United States Patent Application Publication US 2024/0131193 A1 - sequence listing, part 8

SEQ ID NO: 13936 - DNA, 2883 bp, synthetic construct
  source 1..2883: mol_type = other DNA; note = Synthetic coding sequence
atgtcccgcctcattgtgaaaaaccttcctaacggtatgaaagaagaaagatttcgacagctctttgccgcttttgggactttgactgactgttcactgaagtttactaaagacggaaagtttagaaagtttggttttatcggatttaagtccgaggaggaagcccaaaaggcccagaaacatttcaacaaatcttttatcgatacatctcgcatcacagtggaattttgcaagtctttcggtgacccagcgaagcccagagcttggtccaagcatgcccaaaaaccatcccagccaaagcagccacctaaggatagtaccaccccggaaattaaaaaagacgaaaagaaaaaaaaggttgccgggcagctcgaaaaactgaaagaagacacggagtttcaggagttcctgagtgtacaccagagaagggcccaggccgcaacgtgggccaacgacggtctcgacgccgagcctagcaaaggaaagagcaaacccgcaagtgactatcttaacttcgactcagattccgggcaggaatccgaagaagagggcgcgggagaagacctggaagaagaggcatccctcgagccaaaggcagcggtgcagaaggagctgagtgacatggattacctcaaatccaaaatggtaaaagcaggttctagttcctcatccgaggaggaggaatcagaggacgaggcagtgcattgtgacgaggggtccgaggctgaagaggaggactccagcgccactcccgttcttcaagagcgtgactctaagggagccggacaggagcaaggcatgcccgcagggaaaaagaggccccctgaagctcgggccgagaccgagaaacctgccaatcagaaggagcctaccacatgccacactgtgaaattgcgaggggctcccttcaacgtgactgagaagaacgttatggaattcctagcacccctcaagccagtcgctatcagaatcgtgcgcaacgcccatggcaataaaacggggtacatcttcgtcgatttcagtaacgaggaggaggttaaacaggcacttaaatgtaacagggaatatatgggagggcgctatatagaagtgtttagggagaagaacgtacctacaaccaagggtgcacccaagaacaccacgaaaagttggcagggccgcattctcggagaaaacgaagaagaggaggatctcgctgaatccggccgcctgttcgttagaaacctcccatatacctccacagaggaagatctggagaaacttttcagtaaatacgggcctttgtccgaacttcattatcctattgacagcctaacgaagaagcctaaggggttcgcgttcatcacgttcatgtttcccgagcacgcagttaaagcttactcggaagttgatggtcaagtttttcagggaagaatgttgcacgtcctaccctccacaatcaaaaaggaggctagcgaggatgcctcagctctcggtagctcctcatacaaaaaaaagaaagaggcacaggacaaagctaacagtgcgtcctcgcacaactggaataccctgtttatggggcccaatgccgtggccgacgcaattgctcagaagtacaacgctacgaagtctcaagtgttcgaccacgagaccaaagggagtgtggcagtgcgagtagctctcggagaaacccagctcgtgcaggaggtgcgacggtttctcatagataacggggtgtcccttgacagtttcagccaagctgccgccgaaaggtccaagaccgtgatcctggtgaagaatcttcccgctggcacactggccgcgcagttgcaggaaacgtttggtcatttcggctccttaggtcgtgttttgctccctgaaggaggcattactgccatcgtggagttcctggagcctctcgaagcaagaaaggctttcagacacctggcttactctaaattccatcacgtcccactgtatctggagtgggcacctgtaggggtcttctctagcacagcccctcagaaaaaaaaactgcaggataccccctctgagcccatggaaaaagaccccgcagagcccgaaaccgtaccggatggcgagacacccgaagacgaaaaccccaccgaggagggggccgacaattcttcggcgaagatggaggaagaagaggaggaggaggaagaagaagaagaaagcctccctggctgcacccttttcatcaaaaacctcaatttcgataccactgaggagaagctgaaggaggtgttctccaaggtgggtaccgtgaagtcttgttctattagtaaaaagaagaataaagctggggtgcttttgtcaatgggatttggcttcgtagagtacaggaaaccggaacaggctcaaaaggcactcaaacagcttcaaggacacgtagtcgacggccataaattggaggttagaatttctgaacgtgcaacaaagcctgccgtaacgctggcgcgaaagaagcaagtcccaaggaagcagactacaagtaagattctcgtgcgaaacattccatttcaagcccacagtcgagaaatcagagaattattctccacgttcggagagttaaagactgtccgcctcccaaagaaaatgaccggtacaggaactcaccgagggtttggatttgtggacttcctcactaagcaggacgcgaaacgcgcatttaatgcactgtgccactccactcacttgtatggtcgaagactcgtactcgaatgggccgattccgaggtgactctccaggccctgcgtcggaaaacggcagcacactttcatgagcctcccaagaagaaaagatctgtcgtgttagacgagattcttgagcagctcgagggcagcgactccgatagtgaggagcaaacactgcaattgtag

SEQ ID NO: 13937 - DNA, 2919 bp, synthetic construct
  source 1..2919: mol_type = other DNA; note = Synthetic coding sequence
atggccacccggggtcatgtccaggatccgaatgacaggcgcttgaggccaatctatgattacctggacaatggaaataataaaatggcaattcaacaggccgacaagttacttaagaagcacaaggacctgcactgcgccaaggtgttgaaagccattggcttgcaaaggaccggtaaacaggaagaggcctttactctggcgcaggaagtagccgccctcgagcctaccgatgataattcactccaggcactcaccatcctgtatcgtgaaatgcaccggccagaactggtgacaaaactgtacgaagcagccgtgaagaaggttcctaacagcgaggagtaccatagccacctgtttatggcgtatgcacgtgtcggggaatacaagaagatgcagcaggctggcatggcactgtacaaaatcgttcccaagaatccctattatttttggtccgtgatgtccctgatcatgcagtccatttcagctcaggatgagaatctgagtaaaactatgttcctcccattagctgagcggatggtggagaagatggttaaggaggacaaaatagaagccgaagctgaagtggagttatactatatgattttagagaggttgggcaagtaccaggaagcactggatgtcatcagaggtaagctcggggaaaagttaacatctgaaatacagagtagggaaaacaagtgtatggcaatgtataagaaactgtccaggtggccagaatgcaacgcattatcccgcaggctgctcctgaaaaattccgatgattggcagttctacctgacctacttcgacagcgttttccggctcatagaggaagcttggtctccccctgctgagggcgaacactcactggaaggcgaagttcactattccgccgagaaggctgtaaagttcatcgaggatcgcatcaccgaagaatcaaagagcagtcgccatttacgaggacctcatttagccaaactggagttgatccgcagattgaggtcacagggctgcaacgatgagtataagcttggcgaccccgaggaacttatgtttcagtactttaaaaagtttggagacaagccctgctgcttcaccgatctgaaagtgtttgtcgacttactgcctgccacacagtgtacaaagttcatcaaccagctccttggggtggtgcctctaagtactccaacagaggataaactggcactgccggctgatatccgtgccctgcagcaacacctctgcgtagtgcagctgacccgactgttaggcctctaccacactatggataagaatcagaagctgtccgtcgttcgggaactcatgctacgatatcagcatggactcgagttcggtaagacctgcttgaaaactgaattacagttcagcgattactattgcttgctagctgtgcatgcactcatcgacgtctggcgggagactggcgatgaaacaacagtgtggcaggccctgacactgctagaagagggtttaacccacagccccagtaacgcacagtttaagctgctcctggtacggatttattgcatgctgggcgcctttgagcccgtggtggacctttattccagcctcgacgcgaagcacattcagcatgacaccatcggctacctcctgactaggtacgctgaaagcctcggtcagtatgccgctgcctcccagtcatgcaatttcgcactacggttctttcatagcaaccagaaggatacatccgagtatattatccaagcctacaaatatggggctttcgaaaaaatacccgaattcattgcattccgcaacagactgaacaacagtctgcactttgcacaggtccgcaccgaacgaatgcttcttgatctgttgctggaggccaacatctccacatcactcgcggagtccatcaagtcgatgaacctccgtcccgaagaggacgacatcccttgggaggacctcagagataaccgtgacctcaacgtctttttcagctgggatcccaaagatcgggatgtgtccgaggagcataaaaaactgtctcttgaggaagaaaccttgtggctgagaatcaggtccctgacgttacgcctcatatcagggctaccttccctgaaccatccggtagaacctaaaaactctgagaagaccgcagagaacggtgtgagcagcagaatagacatcttgcgcttactgttacagcaactcgaggctactttggaaactggtaaaagattcatcgagaaagacatccaatatccattcctgggacctgtgcctacccggatgggcggtttttttaacagcggttgctcccagtgccagatttcttctttttatctcgtcaacgatatttatgagctggacacctccggcctggaggacactatggaaatacaagaacgcatcgagaattcctttaaaagtctgctggatcagctaaaggacgtgttcagcaaatgtaagggggatctgctcgaagttaaggacgggaatctgaaaacgcacccgacactgttggaaaatttggtcttctttgtagagaccatatctgtgatcctgtgggtgtcttcctattgcgagagcgtgctacggccctataaacttaacctccaaaaaaaaaaaaagaaaaagaaagagacatcaatcatcatgccacctgtatttactagcttccaggattacgtcacagggctccagaccctaatctcgaacgtagtggatcacatcaaaggactggaaacgcacttgattgctctgaagctggaggagttaattctggaagatacgtctctgagccctgaggaaaggaagtttagcaagaccgtccagggtaaggtgcagtcctcctatctacactctctgcttgagatgggggagctgttaaagaaacgcctcgagaccacaaagaaacttaaaatttag

SEQ ID NO: 13938 - DNA, 2166 bp, synthetic construct
  source 1..2166: mol_type = other DNA; note = Synthetic coding sequence
atggctgagaagttcgaaagcttgatgaatattcatgggtttgatctcggcagcaggtacatggatctaaagccactcgggtgtggaggtaacggacttgtgttctcagcagttgacaatgattgtgacaaacgggtggcaataaagaaaattgtcctgactgatccgcagtctgttaaacacgccctaagggagatcaagatcatccgccgcctagaccatgataacatcgtgaaagtgttcgagatcctcggtccctctgggagccagctgacagacgatgtgggtagcctaaccgagttgaattctgtttacattgtccaggaatatatggaaacagacctggccaatgtgttggagcaagggcccctgctagaggaacacgctcgacttttcatgtaccagctgcttagaggtctgaagtacattcactcagctaatgtgctccaccgtgacctgaagccagcaaatcttttcatcaataccgaagacttggtcctcaagattggggatttcggcctggcaaggataatggacccccattactctcacaagggtcatcttagtgagggattagtaaccaaatggtatagatctcccaggctgttgctctcccctaacaactacactaaggctatcgatatgtgggccgcagggtgcatttttgctgagatgctcacgggaaaaaccctcttcgccggggcacacgagctggagcagatgcagctgattctggaatctataccagtagtgcacgaggaggataggcaagagctgctgagcgtgatccctgtctacatcaggaatgatatgaccgagccacataagcccttgacacagctgctgcccgggattagcagggaggccctagacttcctcgaacagattctaacattcagcccgatggataggctcactgcagaggaggctctttcgcacccctacatgtccatctattcttttcctatggacgagcccatctcctcccacccgttccatatcgaggatgaggtggatgatatcctgctgatggacgagacacactcacacatttataactgggagcggtaccacgattgccaattcagtgagcacgactggcctgttcacaataacttcgatattgacgaggtgcagctcgacccgcgggccctgtccgatgtaactgacgaagaagaggtgcaggtggatccaaggaagtatctagacggggatcgcgaaaagtatcttgaagatcctgcgtttgacactaattatagcaccgaaccatgttggcagtacagcgaccaccatgagaacaaatactgcgatctggagtgcagtcatacatgcaactataagacaaggagttcctcctatctggacaacctcgtctggcgcgagagtgaggtcaatcactactacgaaccaaagcttatcatagatctcagcaattggaaggagcaatcaaaggagaagagcgacaagaagggaaagagcaagtgtgagagaaacggactggtgaaggcccagatagccctcgaggaggcttcgcaacagttggccggcaaggaacgcgagaaaaaccaaggatttgactttgattcctttatcgcaggcacgatccagctgagttcacagcatgaaccaaccgacgtcgtggacaagctaaatgacctgaatagtagcgtctctcagttggaactcaagtcacttatcagcaaaagcgtgtctcaggagaaacaggagaagggcatggcaaacctggctcagctggaagcactgtatcagtcctcttgggatagccagttcgtgagtgggggggaggactgcttctttattaatcagttttgtgaggtgcgcaaagatgagcaggtcgagaaggaaaacacatataccagctacctggacaaatttttctcacgtaaagaagatacagaaatgttagaaacagagccagttgaggacggaaagcttggggaacggggtcacgaggaggggttcctgaacaactctggggaattcctcttcaacaagcagttggaatccatcggtatcccacagtttcattcacccgttggatcgcccttaaaatccattcaggctaccttgacccctagcgcaatgaagtcctctccacaaattccacatcagacctacagctcaattctcaaacatttaaattag

SEQ ID NO: 13939 - DNA, 948 bp, synthetic construct
  source 1..948: mol_type = other DNA; note = Synthetic coding sequence
atggcagccggcgtgccttgcgctctcgtgacctcatgctcctctgtcttttcaggcgaccaattggtgcagcacatattgggtaccgaggacctcattgtcgaagtgacctctaatgatgcagtcaggttctacccttggacaatcgacaacaagtactacagcgccgatatcaatctttgtgtggtaccgaataaattcctggtaacagctgagatagctgagtccgtgcaggccttcgtcgtctactttgactccacacagaaatctggactcgatagcgtcagctcttggctgcccctcgcgaaagcctggctgcccgaggtgatgatccttgtgtgcgatagggtctcggaagatggaataaatcgccaaaaggctcaggaatggtgtattaagcatggattcgagttggttgagctgtcgccagaagagttgcccgaagaagacgacgatttcccagaatccaccggagtgaagagaattgtacaggccctaaatgcaaatgtttggagcaatgttgtgatgaagaatgacaggaatcagggcttctctctcctgaatagcctcactggtactaaccacagcatcggtagcgccgatccatgccatccagagcagccccacctgcctgccgctgattcgactgagtcactcagtgaccacagaggaggggcgtcaaacacaacagacgcccaagtcgatagcatcgtggaccctatgctcgacctagacatccaggaattggcttctttgacaacaggggggggcgacgtagagaatttcgagcgtctgttctcaaagctgaaggaaatgaaagacaaggctgccacgttgccacatgaacagcggaaagtccacgcagagaaagtggctaaagctttctggatggccatagggggagatcgggacgaaatagagggcttaagctctgatgaggagcattag

SEQ ID NO: 13940 - DNA, 1338 bp, synthetic construct
  source 1..1338: mol_type = other DNA; note = Synthetic coding sequence
atggccgcaccagaggagcgtgatttgacccaagaacagaccgagaaactgctgcaattccaggatctgacaggcatagagtctatggaccaatgcaggcataccttagagcagcataactggaacatcgaagctgccgttcaggatcgcctgaacgaacaggagggtgtcccatctgtgttcaacccgccacccagtagacctctgcaggtgaacactgctgaccaccgaatatattcatatgtggtgagccggccacagcctagaggcctgctgggttggggttactatctcatcatgttgcccttcagattcacctattacactattctggacattttccggttcgccctgagatttatccggccggatcctagatcccgggtcaccgatcctgtgggggatatagtgtccttcatgcacagctttgaggagaagtatggacgtgcacaccccgtgttctatcagggtacttactcccaggccctgaacgacgcaaagagggagctgaggtttctactcgtttatctgcatggcgatgaccaccaggattctgatgagttttgcaggaataccctgtgtgccccagaagttatttcgctcatcaatacgagaatgctcttctgggcatgcagtacaaacaaaccagaagggtatagagttagccaagcactgcgagaaaatacatacccattcctggccatgatcatgctgaaagatagaaggatgaccgtggtgggccgactggagggcctgatccaacccgacgatctgatcaaccagctgaccttcatcatggatgccaatcagacttacctcgtgagcgaaaggcttgagcgggaagagaggaaccaaacgcaggtgctgaggcagcagcaagacgaagcatatcttgcaagcctgcgcgccgatcaagagaaggagcggaagaagagagaggagcgagagcgaaagaggcggaaggaagaggaggtgcaacagcagaagctcgccgaggagcgcaggagacagaatctgcaggaagaaaaagaaagaaaactggagtgcctgcctcctgagccctcaccagacgatccagaaagcgtgaagattatcttcaagctgcccaatgacagccgggtggagagaaggttccacttttcccagtcactcacagtgatccacgatttcttgttcagcctcaaggagtctccagaaaagtttcagattgaggcaaattttccccggcgggtgttgccgtgtatccccagtgaggaatggcccaacccgcccacattacaagaggcaggtctatcccatacggaggttcttttcgtgcaagacctgactgatgagtag

SEQ ID NO: 13941 - DNA, 2724 bp, synthetic construct
  source 1..2724: mol_type = other DNA; note = Synthetic coding sequence
atggctacccccgaccaaaagtcacccaatgtcttgctgcaaaacctttgttgtcggatacttggccgcagcgaagccgacgtggcgcagcagttccagtacgctgtgcgggttatcggcagcaatttcgctcccaccgtggagcgcgacgaattcctggttgccgagaagataaaaaaagaactgatacggcaaaggcgggaggctgacgcagccctttttagcgaattgcaccgcaagttacacagtcagggcgtactgaagaacaaatggagtattctatatctcttgctgtccctctctgaggacccccgccggcagcctagcaaggtgtcatcttatgcaactctgtttgcccaggccctcccacgagacgcccactccacaccatattactacgcccgcccgcaaacacttcctctgtcttatcaggaccgctcagcccagtccgcacagtctagtggctccgtcggctcaagcgggatctccagtatcggactgtgcgccctctcagggcctgcgccagccccacagtctctccttcccggtcagtccaaccaggctcctggcgtgggggattgtttgcggcagcagttgggttcacgtctggcctggacgctcactgccaaccagcctagttcacaggccacgacttccaagggagtgccttccgctgtgagccgcaatatgaccaggtccaggagagaaggcgatactggaggcacaatggaaatcacagaagccgcgcttgttagagacattctctacgtgttccaaggcatcgacggcaagaatatcaagatgaacaatactgaaaactgttacaaggtggaaggcaaagcaaatctgtcccgctctctgcgtgacacagccgtgcggctctccgaactgggatggctgcataataaaattcgtcgctacaccgaccaaagatccctcgatcgctcgtttggcctagttggacagtcattctgtgctgccttgcaccaggagctccgggagtattatcgtctgctctccgtcctccattcccaactgcagctggaagatgaccaaggagtgaatctgggcctcgagtcgtcattaactctgcgtcgattgcttgtgtggacctatgatccgaaaattcggctgaaaaccctggccgccctcgtggatcattgtcagggcaggaaaggaggagaactcgcctctgcagttcatgcttacactaagaccggtgatccatacatgcggtctcttgtacagcacatactgtccctggttagtcatcccgtgctatccttcctctatcggtggatctacgatggggagcttgaggacacataccacgagttttttgtggcgtcagatcctaccgttaagacagatagactttggcacgataagtacacactgaggaaaagcatgattccgtcatttatgaccatggatcagtcgagaaaagtcctgcttatcgggaagagcattaatttcttgcaccaagtgtgtcacgatcaaacacccaccactaagatgatcgcagtgactaaatctgccgaaagcccccaggacgccgcagatcttttcaccgatttggaaaatgctttccagggtaaaatagacgcagcatactttgaaacctcgaaatacctgctggatgtgttaaataagaagtattccctacttgaccacatgcaagcaatgcgccggtatcttcttctcggacagggcgactttatccgtcacctgatggatctgctgaagccggagcttgtaaggccagccaccaccctctatcagcacaacttgacaggcatacttgagaccgctgtgagagctaccaacgcacagtttgattcacctgagatcctgcggcggcttgatgttagactccttgaggtgtcccccggggataccggttgggatgtgttctctctggactaccacgtcgacggaccgatagcaaccgtttttacgagggagtgtatgtctcactacttacgagtgtttaatttcctttggagggcaaagcggatggaatatattctgacggatatccgcaaaggccacatgtgtaatgctaagctcctccgtaatatgccggagtttagcggcgtcttacaccagtgtcacatcttggccagtgagatggtccactttattcaccaaatgcagtattatataacatttgaggtgctcgaatgcagctgggatgagctctggaataaggtgcagcaggcccaagatctggatcatattatcgccgctcacgaggtgttcctggacacaataatctcccggtgcttgctcgacagcgattcccgagcactgctgaaccagctcagggctgtgtttgaccagatcatcgagctgcagaacgcgcaagatgcgatttatcgtgccgccctggaagaacttcaacggcgccttcagttcgaagagaagaagaaacagagagagattgaagggcagtggggtgttaccgcagctgaagaagaggaggaaaacaaacgtatcggcgaatttaaagagagtattccaaaaatgtgttcccagctgaggatcctcacgcacttttaccagggcatagtgcagcaattcttggttctgctcaccacctccagcgatgagtcgctccgttttctatcctttcgactggattttaatgaacactacaaagctcgggagcctaggctgagggtctcccttgggaccagaggcagaaggtcctctcacacatag

SEQ ID NO: 13942 - DNA, 1086 bp, synthetic construct
  source 1..1086: mol_type = other DNA; note = Synthetic coding sequence
atgactggtaaggcaggcgaagcactcagcaagcccaagagtgagaccgtcgcaaaatctacctctgggggtgcccctgcccgctgtactgggtttggtattcaggagatcctgggactgaacaaagagccaccctcgagccatccacgcgctgcgttggatggactggctcctggccacttgctggctgcacgctccgtcctctccccagctggagtcggaggtatggggttactgggtcctggaggactgccaggattttatacccagccgacattcctggaggttctttctgatccacaaagcgttcatcttcaaccgcttggcagggccagcggtccactcgacacatcccaaacagcctcctctgattctgaggatgtgtcttcttccgacaggaaaatgtccaaatccgctctgaaccaaacaaagaagcggaagaagcgacgacatcgaacgatctttactagctaccagctagaggagctcgaaaaggctttcaacgaggctcactaccccgacgtgtacgcacgcgagatgttagctatgaaaaccgaacttcccgaggaccggatacaggtctggtttcagaatcgaagggcaaaatggagaaagcgagagaagtgttggggccggtccagtgtgatggcggaatacggcttgtatggggccatggtgcgccacagcattcctttacctgagagtattcttaagagcgcaaaggatggcatcatggactcctgtgcaccatggctgctcggaatgcacaagaaaagtctcgaggccgcagctgaatcaggcagaaaacctgagggagaaaggcaggctctgccaaaactggataaaatggaacaggacgagagaggccccgatgctcaggctgccatcagccaggaagagctccgggagaacagcatcgccgtccttagggccaaggcccaagaacactctacaaaagtgctcggcaccgtaagcggacctgacagcctcgccagatccaccgagaagccagaggaggaagaagccatggatgaggatcgcccagcggagcgtctctccccgccacagcttgaagatatggcatag

SEQ ID NO: 13943 - DNA, 2073 bp, synthetic construct
  source 1..2073: mol_type = other DNA; note = Synthetic coding sequence
atggaggagagccctctgtcacgagctcccagccgcggcggtgtgaattttctgaacgtcgctcggacctatattcccaatacaaaggtggaatgtcactacactcttccaccaggcaccatgccatccgcttcagactggatcggcatttttaaagttgaggcagcgtgtgtccgggactatcacaccttcgtgtggtcttcagtgcctgagagtacaactgatggaagccctattcatacaagcgtgcagttccaggccagctacctccccaagcctggcgcccaactgtatcagttcagatatgttaacaggcagggccaagtgtgtggacagtccccacctttccaattcagggagccacgacccatggacgaacttgttactttagaagaagcggacggtgggtccgacattcttttagtggtgccaaaggctaccgtgctgcagaaccagctcgatgaatcccagcaagagcggaacgacctgatgcagctgaaactgcagttagagggtcaagtgacagaactgaggtcaagggtgcaggagttagagcgcgcgcttgctaccgcaagacaagagcacaccgaactgatggagcagtacaaaggaatttcccggagccacggagagattaccgaagagcgagatatactctcacgccagcagggagaccatgtcgcaagaatcctcgaacttgaggacgacatccaaaccatttcggaaaaggtcctcactaaggaggtggagctagacaggcttcgcgacaccgttaaggccttaactagagagcaggaaaagctgcttggacagctgaaggaggtgcaagcagataaagaacaaagcgaagcagaactccaggtcgcacagcaggagaatcatcatttaaatctagacctaaaggaagcgaaaagctggcaggaagaacagagcgcgcaagctcagcgcttaaaggataaagtcgcgcagatgaaggacactcttggacaagcgcagcagagagtcgctgagctagagcccctcaaagagcagctgagaggcgcgcaagagcttgcagccagttcacagcagaaggcaacgctgctcggtgaagaactggcctctgccgctgccgctcgcgaccgtaccatcgccgagctgcatcggtcccgcctggaggtggccgaagtgaacgggcgattggcagaacttggcttgcatctgaaggaggagaagtgtcaatggagcaaggaacgagccgggctgctccagtcagtggaggccgaaaaagataagattctcaaactctcagcagagatcctgagattagagaaagccgtgcaggaggaacggactcagaatcaagtattcaagacagagctggcaagggaaaaggatagtagtctggtgcagctgtcagaaagcaagagagagttgacagaactccgatctgccctcagggttctgcaaaaagagaaggaacaattacaggaagaaaagcaagaactgctcgaatacatgcggaagctggaggccaggttggaaaaggtggccgatgaaaagtggaacgaggatgcgacaaccgaggatgaagaggccgcggttggcctgagctgtcctgctgcactcactgactcagaggatgagtcacccgaagacatgagattaccaccctatggactgtgtgagcgcggggacccaggcagtagtcctgcggggccccgggaggcctctccactggtggtgattagccagccagctcccatttctccacacctgtcgggacccgccgaagactcgagcagcgactcagccgaggatgagaagtccgtgctgatggctgcagttcagtctggaggggaagaagctaatctgctgctgcccgaactgggttcagctttctacgatatggctagcggcttcacagtggggaccctttctgaaacaagcacaggtggcccggctacccccacttggaaggagtgccctatttgcaaggaaagattccccgccgaaagcgataaggatgccctggaagaccatatggatgggcatttcttctttagtacgcaagatccattcacgttcgagtag

SEQ ID NO: 13944 - DNA, 1980 bp, synthetic construct
  source 1..1980: mol_type = other DNA; note = Synthetic coding sequence
atgagtctgccacccgaaaaggccagcgaactaaagcagttgatccaccaacagctgagcaaaatggatgttcacggaaggataagggagatcctggcagagaccatacgggaggaactcgcaccagatcagcagcatctgagcaccgaggatcttattaaggccttacggaggagaggcatcatcgacgacgtgatgaaggagctgaatttcgtgacagatagcgtggagcaggagttgcccagctcaccaaaacagccaatttgctttgatcgccagtctaccctaaaaaaaacgaatatagaccctacccgcaggtatctttatctgcaggtacttggcggcaaggcattccttgaacatctgcaagaaccggaacccctcccggggcaagtttgcagtacgttcacgctttgcctgcattacagaaatcagagatttaggtctaagcctgtgccctgcgcttgcgagcctgatttccacgatgggtttctactcgaagtccaccgcgagtctcttggcgatggcacccgcatggctgacagtacaaccatgctcagcatcagcgaccccatacacatggtgctcattaagactgacatcttcggcgaaaccacactggtggcttcctattttctggaatggcgctcggtgcttgggtccgagaacggcgtcacatctttaactgtcgaactgatgggggtggggacggagagcaaggtgagcgtgggcattttgaatatcaaactcgagatgtatcccccgcttaaccagacattgagccaggaagtggtgaacacacaactggccctggaaagacaaaagacagctgagaaggagagactatttcttgtgtacgcaaagcagtggtggagagaatacctgcagatcaggcccagccataatagtcggttggtgaaaatctttgctcaggatgagaatgggatcaacaggccagtctgcagttatgtgaagccattacgcgcgggtagactcctcgacacaccccgccaagcagcgcgtttcgtcaacgtgcttggctatgagcgagccccggtgatcggcggaggcggtaaacaggagcaatggtgtactctgttggcattcctgtgccgcaataaaggcgactgcgaggatcacgccaacctcttgtgctctctcttgctcggctatggtcttgaggctttcgtctgcgtgggtaccaaggcaaagggcgtgcctcacgcttgggtgatgacttgcggaaccgacggtgctatcactttctgggaatcgcttaccggccacaggtatattcacaaaccaacaaatcctgacgaacccccagtggccgaacagccaaagcccctgtatccctatcgcactattggatgtgtctttaaccatcagatgtttctggggaattgtcagccgtccgatgccgtcgaaacatgcgtatttgatttaaatgatgagagcaagtggaagccgatgtccgaggaagctattaaaagtgtttgcgcaccaggtgctaccacaagcctgccaccatttccccccctgtgcgcttcgaccattgatgcgtctgttacctctaatgagattgagatgcaacttcgcctgctcgtgagcgagcacaggaaagacttaggtctaaccaccgtgtgggaggaccagctctcctacttactctctcctgcactcgctagctatgagttcgagagaaccaccagtattagcgcgggtaatgaagaattccaggacgccatcagacgtgcagtccccgacgggcacactttcaaaggatttcccatccacttcgtgtacagaaatgctcggcgagccttcgctacctgcctgcggagccctttctgcgaggaaatcatttgttgtagaggcgatcaagtgcgtctggctgttcgagtgagagtatttacttatccagagagcgcctgtgccgtgtggattatgttcgcttgtaagtatcgttccgtgttatag

SEQ ID NO: 13945 - DNA, 1500 bp, synthetic construct
  source 1..1500: mol_type = other DNA; note = Synthetic coding sequence
atgttagaaaggccacctgctctggccatgcccatgcctacggagggtaccccccctccactttctggcacccccataccagtgccggcctacttccgccacgccgagccaggattttccctcaaaagacccagaggcttgtccaggtctctacctccgccaccgcccgcaaagggctccatccccatatcacgcctcttcccccctcgcacccccggctggcaccagctccagccgagacgcgtaagtttccggggggaagcctccgaaactctccaaagtcctggctacgatcccagtcgtccagagtctttttttcagcagtcattccagaggctctccaggctcggccatgggagttatggcgaggtttttaaagttcggagcaaagaggatggccgcttatacgccgtcaaacgttcgatgtccccttttagaggccccaaagatcgagcccggaagttagctgaagtggggtcgcatgaaaaagtaggtcagcatccatgttgcgtccgcctcgagcaggcttgggaggaaggcggcatcctgtaccttcaaacagaactgtgcggacccagcttacagcaacactgtgaggcctggggcgcatctctccctgaggcacaggtgtgggggtatctgcgagacaccctgttggctctggctcacctgcactcccaaggtcttgttcacctggacgtcaaaccagcgaacattttcctggggccaagggggcggtgcaagctgggagatttcgggctgctagttgaacttgggacggctggagccggcgaagttcaggagggtgatccccggtatatggctcccgaattactgcagggctcctacggtactgcagccgatgtattttcattgggactgactatcctagaagtggcctgcaatatggagctgccacacggcggggagggatggcagcagcttcgccagggttatctgccccccgaattcaccgcaggtttaagctctgaactgagatccgttctcgtaatgatgttggaacccgacccgaaattgcgggccacagcagaggccttgttggcattgcctgttctgcggcaaccccgcgcatggggggtgctgtggtgtatggcagctgaggccctatcacgtggttgggcattgtggcaggcactccttgcactcttgtgctggctctggcatggcttagcccaccccgcttcatggctgcagccgctcggcccgcccgccacccccccgggcagcccaccctgtagccttctgctcgattcctcgctgagtagtaattgggacgacgacagcctcgggcctagtctaagccctgaagcagtgctcgcgagaaccgtgggctccacaagcacgccccgatcacggtgtactccgcgcgatgcactcgatttgagtgatatcaactccgagcctccacgcggatcttttcccagtttcgagccgaggaatttgctgagcttatttgaagacaccctagatccaacatag

SEQ ID NO: 13946 - DNA, 486 bp, synthetic construct
  source 1..486: mol_type = other DNA; note = Synthetic coding sequence
atggacgtgtttctgatgatccgccgtcacaaaactaccatctttaccgatgcaaaagagtcttccaccgtgttcgagctcaagaggatcgttgagggaatcttaaagagacctcccgatgagcagcggctttataaagacgaccagctgctggacgatggcaagacgttaggagagtgcggtttcactagtcagaccgccagaccccaggcccctgccaccgtgggtttagcctttcgcgcggatgacacattcgaagccctctgcattgagccattttcgtccccgcccgagctgcccgacgttatgaaacctcaggacagcggttcctctgctaatgaacaggcagtgcacctgcacgttcatagtcagaccatggcaaaaagcagaaacacctcctggtcccagtgccccggcctcacagcatgttctaccagagagccgcaggacggccccacccaggttcatcctcggtgggggctgtag

SEQ ID NO: 13947 - DNA, 1521 bp, synthetic construct
  source 1..1521: mol_type = other DNA; note = Synthetic coding sequence
atgacaggagagaaaatccgctccctcagaagggatcacaagcccagcaaggaggaaggagatctgctggagcccggggacgaagaagccgctgccgcccttggtggtaccttcactaggtctaggatcgggaagggcgggaaggcctgccataaaatcttcagcaaccaccatcacaggctgcagctaaaggcagcccctgcatccagcaatccgccgggagcaccggctctacccctgcacaactcctccgtcactgccaattcccagtccccggcattgctggctggcacaaaccctgtggccgtggtggcagatggggggtcttgtccagcccactaccccgtgcacgaatgcgtgttcaaaggcgacgtgaggcgcctttcgtcattgataagaacccacaatattggacagaaggacaaccacgggaatacccccttgcatctagccgtgatgctggggaacaaggttacagcgttgctgagaaagttgaagcaacaaagcagagagagcgttgaggaaaagagacctcgactcctgaaagccttaaaggagcttggcgatttttacctggaattacattgggacttccagtcatgggtgccattgctgagtaggatcctgcccagcgacgcgtgtaagatctacaaacaggggatcaatatcaggttggataccactcttatcgacttcaccgacatgaaatgtcaacgcggggacttatcgttcattttcaacggggacgccgccccctcggaaagcttcgttgtgttggataacgagcagaaagtataccaacgaatccaccatgaagagtctgagatggaaactgaagaagaggtcgacattctcatgtcatccgacatctactccgccacgctgtccaccaaatctatctcatttacgcgcgcccagaccggttggctttttcgagaagacaaaacagaacgggtcggtaatttcttagcagacttttatctcgtgaacggcctggttctggaatctcgaaagcgcagagaacacttgtcggaggaagatatcctacggaataaggccattatggagagtctctctaaggggggtaacattatggagcagaacttcgaaccaatacggcgccagtccctcacaccccccccccaaaatacaattacatgggaggagtatatatctgctgagaacggtaaagccccccaccttggtagggaactagtctgcaaagagtccaagaagacttttaaagcgacaattgccatgagtcaggaattccctctggggatcgaactcctcttaaacgtcttggaagtggtagcacccttcaagcacttcaacaagctacgcgagtttgtgcaaatgaaactacccccagggtttcctgtcaagctcgacattcctgttttcccaacaatcacagccactgtgacatttcaggagttcaggtacgatgagtttgatggatccatttttactataccggacgactataaggaggatcccagtagatttccggacctatag

SEQ ID NO: 13948 - DNA, 699 bp, synthetic construct
  source 1..699: mol_type = other DNA; note = Synthetic coding sequence
atgcagccgccagcccctccagcagaactagccgctccactcccaagccctctgcccgagcagcccttggactctcccgccgcgccggctctctcaccttccggcctggggctccagcctggcccggagcgtacctcaacaaccaagtctaaggagctgtcaccaggcagtgctcaaaaaggaagtccaggctcaagccaggggaccgcctgcgccggaacgcagcctggagcccagcccggtgcacaaccaggggccagcccctcccccagtcagcccccggctgaccaaagcccacatacccttcgaaaggtatccaagaagcttgcacccatacctccaaaagtgccgttcggccagccaggcgccatggccgaccagagcgccggacagcctagccccgtctctctttcccctacaccaccatccactcccagtccatatgggctgagctacccacagggatattccttggcctcgggccagctctctccagccgcggcaccacctctggcaagtccttctgtcttcacgagtaccctgtccaaatccaggccaacgccgaagccacgtcagcggccaaccctcccgccaccgcaaccacctacggtgaatctcagtgcgtcctcgccacagagcacagaagcgcccatgcttgatgggatgtctccgggcgaaagcatgtcaactgctgtttag

SEQ ID NO: 13949 - DNA, 1221 bp, synthetic construct
  source 1..1221: mol_type = other DNA; note = Synthetic coding sequence
atgcaccctgccgtgttcctttctttgccagacctgcgctgttccctcttgctattggtgacatgggtgtttacacccgttacgaccgagataacaagtctggacaccgaaaacatcgacgaaatccttaacaacgcagacgtcgccctggtgaacttctatgcggattggtgccgattttcgcagatgttgcacccaatctttgaggaagcttcagacgttatcaaagaagagtttccaaatgaaaaccaggtcgtgttcgcacgggttgactgtgatcagcacagtgatatcgctcagcgttataggattagtaaataccccaccctaaaactgtttcggaatggtatgatgatgaagcgtgaatatagaggccagcgctccgttaaagcactggccgactatatccgccaacagaaaagcgaccctatccaggaaataagggacctggctgagataactactctggacaggtccaagaggaatatcatcggatattttgaacagaaagacagtgacaactatagggtgttcgagagggtcgctaacatactgcatgacgattgcgctttcctctcagccttcggggacgtcagtaagcccgaacggtacagcggagacaatattatctacaagccccccggtcattccgcccctgatatggtctacctaggtgccatgacaaactttgatgttacctataattggatccaagacaaatgtgtcccattggtgagagagataaccttcgaaaatggcgaagaactcaccgaggagggcctcccctttttaattttgttccacatgaaggaagataccgagtcattggagatctttcagaatgaagtggcccggcaactgatctccgagaaaggtaccatcaactttttgcatgctgactgcgataagttccgccatcccctgttgcacattcagaagacccccgccgattgtccagtgattgcaatcgacagttttaggcacatgtatgtctttggtgactttaaggatgtgttaatcccaggaaaactgaaacaatttgtattcgatttgcactccggtaagcttcacagagaattccatcatggacccgaccctaccgacaccgcccctggggagcaagcccaggatgtggcctccagcccacctgagtccagctttcagaagcttgcaccatccgagtacagatatacccttctaagggatcgagatgagctgtag

SEQ ID NO: 13950 - DNA, 5601 bp, synthetic construct
  source 1..5601: mol_type = other DNA; note = Synthetic coding sequence
atggatcccgtaggcctgcagctgggcaataaaaatctatggtcatgccttgtcaggctgcttaccaaagacccagaatggctcaatgctaagatgaagttcttcttacctaatactgacctggactctcgcaatgaaaccctggaccccgagcaaagagtgatccttcagctcaacaaactgcatgtccagggctccgacacctggcagtctttcattcactgtgtgtgtatgcagctggaggttccacttgacttagaggtgctgcttctaagcaccttcggatacgatgatgggtttacatcacagcttggagctgaaggcaaatcgcagcctgagagtcagctgcaccatggtctgaaacgtccgcaccagtcctgtggtagctccccccgacgcaaacaatgtaagaaacagcagctggaactggctaaaaagtatctgcagctgcttcggacttccgctcagcagaggtaccgctcgcagattcctgggagcggacaaccacatgcattccaccaggtttatgtccctccgattctgcgaagggcaaccgcctctttggacaccccagagggagccatcatgggcgacgtgaaggtcgaagatggcgccgatgtctccatcagcgacttgttcaacaccagagtcaacaaaggaccacgtgtcactgtgttgctggggaaagcaggaatgggcaagaccacactcgctcatcgactgtgtcagaagtgggcagagggccaccttaattgtttccaggcgctgtttctgttcgaatttcggcagttgaatttaatcacccgcttccttacaccgtcagagctcctctttgatttgtacctgtctcctgaaagcgaccatgatacggtcttccagtaccttgagaagaatgccgaccaggtgttactgattttcgatggcctagatgaggcgctgcagcctatggggcccgacggacctgggcctgtactgacactgttctcccacttatgcaacggcactctactgcccggctgtagagtgatggctacatccagacccggaaagctcccggcctgtctacctgctgaggccgccatggttcacatgcttggcttcgatgggccacgtgtggaagaatacgtcaaccatttttttagcgcacagccatctagagaaggggcacttgttgagctacaaactaatggccgtctacgctccctgtgtgcggtgcctgccctgtgtcaggtggcctgtttatgtctgcatcaccttctgcctgaccacgctcctgggcagtctgtcgccctgctccccaacatgactcaactgtatatgcaaatggtgctggccctgagcccccccgggcatttaccaacttcgagcctgctagatctgggcgaagttgccctgagaggcctagagactggaaaggtaatattttatgcaaaggatattgcacctcctcttatcgctttcggcgcgacacactcattgctgaccagtttctgtgtgtgcacagggcctggacatcagcagacaggttacgccttcacgcacctctcgttgcaggagttccttgcagcgctacacctgatggcgtcacctaaggtcaacaaggacaccctgacacaatatgtcacactgcacagtaggtgggtccagagaactaaggcccggttggggttaagtgaccaccttcccactttcctggctggcctggcttcttgcacttgccgcccatttctgtcacatctggcacagggcaacgaagactgtgtgggggcaaaacaagccgccgttgtacaggttctgaaaaaactcgccaccaggaagctcacgggacccaaagtggttgagttatgccactgtgtggatgagacgcaagagccagagttagccagcctcactgcccaatcactcccttaccaacttccctttcataacttcccgctgacttgtacagatcttgctacgctgactaacattttggaacaccgcgaggctccaatccatctcgacttcgacggatgtccccttgaaccacattgccctgaagccctggtcggatgcgggcaaatcgagaacttgtcttttaagagccggaagtgtggagacgccttcgcggaagccctgtctcggtcattgcccactatgggccgccttcagatgctgggactggctggaagcaagatcacggctcgcggcatttcccacctggtaaaggccttgccactgtgcccacagctgaaggaggtatcctttagagataaccagttatccgatcaggtggtgcttaatattgtggaagttctaccccacctacctagactgaggaagctcgatttaagcagcaattccatctgcgtgtctacgctcctttgtcttgctcgcgtggctgtgacgtgtcctaccgttagaatgcttcaggctagagaggccgacctgattttcctgctctctccccctaccgagactactgccgagcttcagcgtgctccagaccttcaggagtcagacgggcaacggaaaggcgctcagtcacggagcctcaccctgaggctgcagaaatgccaactccaggtgcatgacgccgaagctttaattgccctgcttcaagagggccctcaccttgaggaggtcgatctgtccggaaatcagctggaagacgaggggtgcagactaatggccgaagccgcgtcacagctacatatcgcccgcaagctggatctgtccaacaatggcctgtctgtggccggtgttcactgtgtgcttcgcgcagtttcagcttgctggaccctggctgaacttcacatctctctgcagcacaagaccgtcatattcatgtttgcgcaagaaccagaagagcagaaagggcctcaggagcgggctgcgtttctcgactccttgatgctccagatgccctccgagttacctctgagcagtaggaggatgaggttaacacactgcggtctccaagagaagcacttggaacagctatgcaaggctctgggtggctcttgccacctcggccacctccacctggacttttcgggcaatgcacttggcgacgaaggtgctgcccggctcgctcagctgctacctggattgggagccctccagtccttgaatctcagtgagaacgggctttccctcgacgctgtgcttgggttagtccgttgcttctccacactccaatggctgttcaggctcgacatctcgttcgagtcccagcacattctgcttagaggcgacaagaccagccgcgatatgtgggccaccggctccctgcctgactttcctgcggccgcaaaattcttggggtttagacaaaggtgtatcccccggagcctttgcctcagcgaatgcccattagagccgcctagcttgacccgcctgtgcgctaccctcaaagactgtccaggccctttggaacttcagctctcttgtgaattcctctctgatcagtcccttgaaactctgcttgattgcctgccacaactaccacagctgagtctacttcagctcagtcaaaccgggctgagccctaagtcacctttccttcttgccaataccttgagtctgtgcccaagggtgaaaaaagtggacttgaggtccttgcatcatgcgacgctccacttcaggtccaacgaagaggaagagggtgtttgctgcggaaggtttaccggatgtagcctaagtcaggaacatgtggagtccctctgttggttactcagcaagtgcaaggacctttctcaggttgacctttctgccaatcttctaggggatagtggccttcgatgcctgctggaatgcttaccgcaggtgccaatatctggtctgttggacctatcccacaattcaatttcacaggagtcggcgttgtacctcctggaaacactgccaagttgccctcgagtgcgagaggcctctgttaatcttggttctgaacagagttttcggatacacttcagccgcgaggaccaggcgggcaagacactacggttgagcgagtgtagctttcgccctgaacacgtgtctcgtcttgctaccggactctccaaaagcctccaattgacagagttgacattaacccagtgctgcctgggccagaaacagctggccatccttctttccctagttggcaggccagctgggctgttctcgctgagggtgcaggagccttgggccgaccgcgctagagtgttatctcttctggaagtgtgcgcccaggcttccggaagcgtcaccgaaatcagtatctccgaaactcagcagcagctgtgcgtgcagctcgaattcccacggcaggaagaaaacccagaagcagtggccctgaggttggcccactgtgatctcggggcacatcactctctccttgtaggacagctcatggagacttgcgcccgcctgcaacagctgagtctgtcgcaggttaacttgtgtgaggacgatgatgcttcatccctgctattacagagtcttctgttatcccttagcgaactgaagacgtttagactgacgtccagctgcgtgagcacagagggcttagcacacctagcttccgggctggggcactgtcaccatttagaagagctagacctgtctaacaatcagtttgatgaagagggcaccaaggctctgatgagagctctggaaggaaagtggatgctcaagcgtctagatcttagccacctcctgctaaactcatcaaccctggccctgctgacccaccgtctgtctcagatgacatgtcttcagtccctccggctcaatcggaatagtatcggggatgtcggttgctgtcacctgtctgaggccctcagggcggccacatccctggaagagctcgatctttctcacaatcagatcggggatgcaggcgtccagcacttagccaccatccttcccgggctcccagagcttagaaagatcgacttatccggaaacagtataagtagtgccggaggcgtgcagcttgccgagtctcttgtactttgcagaaggctggaggaactcatgttaggttgtaacgcgctcggtgaccccaccgcactggggttagcccaggaactaccccagcatcttagggtacttcacctgccctttagtcatcttggacccggaggagcactgtcgctggcccaggcactggacgggtccccacaccttgaagagatctctttggcagagaacaatcttgcaggaggtgtgcttcgcttctgtatggaactgccactgctccgacagatcgatttagtgtcgtgcaagatcgacaaccaaactgcaaaactcctgacaagtagcttcactagctgtcctgccctggaagtaattctgctgtcctggaacttgttaggagacgaggcagccgccgaactcgctcaagtgctccctcaaatgggcaggctgaaaagagtagatctggaaaaaaatcagataacagctctgggggcctggcttcttgccgaaggccttgcccaaggatcaagtattcaagtgatccggctatggaataatccaattccatgtgatatggcccagcatctcaaatctcaggaaccacgcctggacttcgcattctttgacaatcagccacaggctccctgggggacttag

SEQ ID NO: 13951 - DNA, 897 bp, synthetic construct
  source 1..897: mol_type = other DNA; note = Synthetic coding sequence
atgatgaatgtgaatacaagggggacctatcttgctagtaaggcctgcatcccatatctcaaaaagagtaaagttgcccacattctgaacatttcccctccacttaaccttaaccctgtatggttcaaacagcactgtgcctataccattgctaaatacggtatgagcatgtacgtgctaggcatggcggaagagttcaagggagaaatcgctgtaaacgcgctgtggcctaaaactgccattcatacggcggctatggatatgctaggcggcccaggcattgagagccaatgtaggaaagtcgacatcatcgcagatgccgcttattctatatttcaaaaacctaagtcctttacgggcaacttcgtgattgacgagaacattcttaaggaggagggaatcgagaacttcgacgtctatgcaatcaaaccgggacatcccctccaaccagatttcttccttgacgaatatccagaggccgtgagcaagaaagtcgaatccactggagctgtccctgagttcaaggaagagaaactccagttgcagcccaagccgcgctcaggtgcggtggaggaaacttttaggatagtgaaggactcactgagtgatgatgtggtcaaggccacccaagctatttacctctttgagctttcaggcgaagatggggggacatggtttttggaccttaagtctaagggagggaacgtgggctacggcgagccaagcgatcaggcagacgtggttatgtctatgaccaccgatgattttgttaaaatgtttagcggtaagctgaagcctaccatggctttcatgagcggcaagctgaaaattaaaggaaatatggctttggcaattaagcttgaaaagctgatgaatcaaatgaatgcaaggctttag

SEQ ID NO: 13952 - DNA, 4026 bp, synthetic construct
  source 1..4026: mol_type = other DNA; note = Synthetic coding sequence
atgtggaggaggaagcacccgcggacctccgggggcactaggggcgtgctatccggcaacagaggcgtggaatacggctccgggcgggggcacctcgggacattcgaaggtagatggcgtaaactgcccaagatgcctgaagctgtgggcacagatccaagtacttcgcggaaaatggctgaacttgaggaggtgacgcttgatggtaagcccctgcaagccctgcgtgtgaccgatctaaaggcagccttggagcagcgggggcttgcaaagagtggccagaaatccgcgctagtgaagagactgaaaggcgctttgatgctggagaatttacagaagcattcaactccacacgccgccttccaacccaactctcagataggggaagagatgtcacagaattcctttattaagcagtacctcgaaaagcaacaggagctgctgcgtcagcggcttgaaagggaggcaagagaggccgccgagctcgaggaggcttcagctgagagcgaggacgaaatgattcaccctgagggggtggcctccctgttaccccccgacttccagtcctcccttgaaaggcctgagttggaactatcaagacacagccccaggaaaagctctagcatatcagaggagaagggcgacagcgatgatgagaagcccagaaaaggggagcgaagatctagtcgcgtccggcaggctcgcgccgccaaactgagcgaagggtcacagccggccgaagaagaagaagaccaggagacaccatcacgaaacctcagggtgagggccgacaggaacctgaaaacagaggaggaggaagaagaagaagaagaggaggaggaagacgacgaggaggaagaaggcgacgatgaaggccagaagtcacgggaggctcccatcttgaaagaattcaaagaagaaggggaggaaattcccagggttaagcctgaagagatgatggatgagaggccaaagacgcggtcccaggagcaggaggtgttagaacggggtgggcgtttcacccgcagccaggaagaggcacggaaatcacacttggcccgccaacagcaggaaaaagagatgaaaacaacatctccactggaagaggaggagcgggaaatcaagagctcacaaggcctcaaggaaaaatctaaaagtccttcccctccacgactgacagaggatcgcaaaaaagctagtttggttgcattaccggagcaaaccgccagtgaggaggaaaccccaccaccactgttaactaaagaggcaagcagcccccccccacacccacaactgcactctgaggaagaaattgaacccatggagggacccgcgccagcagtgcttattcaattgagcccgccaaataccgatgctgacaccagggagcttttagtgtctcaacatactgttcagctcgtgggcggcctgtcccccctcagctctccttccgacaccaaagcagagagcccggctgaaaaggttccggaggagagtgtgctgcctctcgtccagaagagtacccttgcagactacagcgcccagaaggatctagagcctgaaagtgacagatcagctcagccgcttcccctgaaaattgaggaattagccctcgctaagggcattactgaggagtgcctgaaacaacctagccttgaacagaaggaaggacggagagcttcacacaccctacttccttctcacagactgaagcagtctgccgactcctccagcagccggtcctccagctcttcttcttcttcgagccgctcccgcagccggtcccctgactcttcaggaagcagatctcattcacctctgcgcagcaagcagcgggatgtggcccaagcaagaacccacgctaaccccagagggcgccccaagatgggctcaagatcaacatccgagtcccggtcccgatccaggtcaaggagtagatcagccagtagtaactcccggaagtcactgtcacccggagtgtctagagactcttcaacctcctacacggagacaaaagacccctcttctgggcaagaggttgccacgcccccggtacctcagctccaggtgtgcgagcctaaggagaggacaagcacctcgtccagttccgtgcaggcacggcgtctgagccagcccgaatctgcagaaaagcacgtaacccagcggctccagcccgaacgaggatcacctaagaaatgtgaggccgaggaagccgaaccacctgccgctacacagccgcagaccagtgaaacacagacttctcatctgccggaatcagaaaggatccatcatactgtggaagagaaggaagaggtgacaatggacacctcagagaaccggcccgagaatgacgtgcccgagcctccaatgccaatcgccgatcaggtgagtaacgatgataggcctgaggggtccgtagaagacgaggaaaagaaggaaagcagcctgcccaagtcattcaagcgaaagatctctgtagtgagcgccacaaagggagtgccagccgggaatagtgacactgaggggggtcagcccggtagaaagcgtcgatggggcgcaagtacagctaccacccagaaaaaaccctccatcagtattacgacggagagtttgaagtccctgatccccgacattaagccgctcgccggccaggaggctgtggtggatcttcacgcagacgactctaggatctccgaggatgaaaccgagcgcaatggagacgacggaactcacgacaaagggcttaaaatatgtaggacggttactcaggtcgtgccagccgaaggccaagaaaatggccaacgggaggaggaggaagaggagaaggagcctgaggccgaaccccccgtaccgccacaagtgagcgttgaggtggcacttccccccccagctgagcacgaggttaagaaggtgaccctcggagataccctgacacggagatctatctcacagcaaaaatcgggggtgagtatcacaatcgatgacccagttcggacagcccaggttcctagcccaccgcgtggcaagatctccaatattgttcatatatccaatcttgtgcggcccttcaccctgggccagctaaaagaattgttaggacggacaggcactctggtcgaagaggcgttttggatcgacaaaattaagtcccactgttttgtcacatactccacggtggaagaggccgtagccaccaggaccgccctgcacggggtgaaatggccgcagtccaaccctaagtttttgtgcgcagactatgccgaacaggatgagctggactatcaccggggcctgctggttgaccggccgagcgaaaccaagaccgaggagcagggcatccctagacctctccatccccctccaccgcctccagttcagccaccccagcacccgcgggccgagcagagggaacaggagcgcgccgtgagagagcagtgggctgagagagagagggagatggagagaagggaaaggacgcgatccgagagagaatgggaccgtgataaagtccgcgaaggcccaagaagtcgaagccgaagcagagaccgacgccgcaaagagcgagctaagtccaaggagaagaagagtgagaaaaaagagaaggctcaagaagagccacctgctaaactacttgatgatctgttccggaagaccaaagccgctccatgtatctattggctgccactcacagactctcagattgtacagaaggaggcagagagggccgagcgcgccaaggaaagagagaaacgacggaaagaacaagaggaagaggagcagaaggaaagagagaaggaggctgagagagagcgcaacaggcagttagaaagagaaaagaggagggagcatagcagagaacgggatcgggagcgtgagagagagcgggagcgggaccgaggcgatagagaccgggatagagaacgggaccgcgagaggggtcgggagcgtgatagacgcgatacaaaaagacacagcaggtcgagatcccgaagtacacctgtgagagacagagggggaagaaggtag

SEQ ID NO: 13953 - DNA, 600 bp, synthetic construct
  source 1..600: mol_type = other DNA; note = Synthetic coding sequence
atgagttcgggaaacgccaagattggacacccagcccccaactttaaggcaaccgctgtcatgcccgatggacagttcaaggatatttccctctctgattacaaaggcaagtatgtcgtgttcttcttctatcctctggattttacctttgtgtgtccaacagagatcatcgctttctcggatcgggctgaggaattcaagaaattgaattgtcaggtgattggcgctagtgttgactctcatttttgtcacctggcatgggttaacactcccaagaagcagggaggtctcggccccatgaatattcccctcgtcagcgatcccaagagaacgattgcccaggactatggagtgcttaaagccgacgagggaatttcgttcaggggactgtttatcattgacgataaaggtattctgagacagataaccgtgaacgatttgcccgtgggtcggagcgtagacgagacactgagattggtgcaggctttccagtttacagataagcatggggaagtctgtccagccggatggaagccaggatccgacacaataaagcctgatgtgcagaaatctaaggagtatttcagcaagcagaaatag

SEQ ID NO: 13954 - DNA, 1077 bp, synthetic construct
  source 1..1077: mol_type = other DNA; note = Synthetic coding sequence
atggagaaaaaaaaaatggtgacgcagggcaaccaggagcctaccaccacccccgatgcgatggtacaaccatttaccacaatcccattccctccccctcctcaaaacggaattcctaccgagtacggcgtgccccacacccaggactatgccggccaaactggagaacacaaccttactctatatgggagcacccaggcacatggcgagcagtctagcaacagtccgtccacccagaacggcagtctgaccactgaaggtggagcccaaaccgacggccagcaatcccagacccaaagttccgagaactccgagagtaaatccacccccaagcggcttcatgtcagcaacatcccgtttaggtttagagatcctgatcttcgccagatgttcggaggatttggctttgtcaccttcgaaaactctgccgacgccgaccgggcccgagagaaactccacggcactgtcgtggagggcaggaagattgaagtgaacaacgctaccgcccgggtcatgaccaacaagaaaatggtcaccccctacgctaatggctggaagctttctcccgttgtgggcgccgtctacggaccagaactgtacgctgcctcctcattccaagccgatgtcagtctcggcaacgatgcagctgtcccactgtccggaagggggggtataaacacttatatcccactgatcatacctggtttcccatatccgacggccgccaccaccgcggcggcattcagaggggcccatttacggggcaggggtcgaaccgtgtacggggctgtgcgagcagtcccccccacagccatcccggcttatcccggagtcgtgtaccaggacggtttctacggcgcagacttgtacgggggctacgccgcatacagatacgcacagccggcaacagcgaccgctgctactgcggctgccgctgctgccgctgcatacagtgacgggtatgggagggtttataccgctgacccctatcatgccctagcaccagccgctagttacggcgtgggcgcagtggcatccttgtacagggggggatactctcggttcgctccctattag

SEQ ID NO: 13955 - DNA, 1596 bp, synthetic construct
  source 1..1596: mol_type = other DNA; note = Synthetic coding sequence
atgtcctatcccgccgacgattacgagtcggaagccgcgtacgacccctatgcttatccctcagactacgacatgcataccggtgaccctaaacaggatctggcctatgaacgccagtacgagcagcagacctaccaagtgatacccgaagtgatcaaaaactttatccagtattttcacaagactgtctccgacctcatcgaccaaaaagtctacgagttgcaggcctcaagagtcagctctgatgttatagatcagaaagtttacgagatccaggatatttatgaaaatagctggactaaactcacggaaaggttcttcaagaatactccatggcctgaggccgaggcgatagcgccgcaagtggggaacgacgccgtgttcctgattttgtataaaattcttcaagcccatggtcccgcccctttggagctgcccaatcaatggctctgggacattatcgacgaattcatataccaattccagtccttcagccagtatcgatgtaaaaccgccaagaagtcagaagaagagatcgactttctcaggtcaaacccaaagatttggaatgtgcactcagttctaaatgtcctgcactcactagtggataagtcaaatattaaccgccagctggaagtctacacttctggcggggatcccgagagtgtggcaggggaatacggacgacactcactgtacaagatgctgggctacttcagccttgtgggcttgctgcgcttgcatagtttacttggagactactaccaggctatcaaagtcctggagaatatcgaactgaacaagaagagcatgtactctcgcgtccctgaatgccaggtgacaacatactactacgtaggctttgcatacctcatgatgagaaggtaccaggatgcgatccgcgtatttgctaacatccttttgtatatacagaggactaaatccatgtttcaaagaactacttacaagtatgaaatgataaataaacaaaatgaacagatgcacgcactcctcgctatcgccctcacgatgtacccaatgagaatcgacgagtccatccacttacagctccgggagaagtatggagacaagatgctaaggatgcagaaaggcgatccgcaggtgtatgaggaactgtttagttactcatgtcctaaattcctctcaccagtggtacctaattatgataacgttcatccaaattaccacaaggaaccattcctacagcagttgaaagtgttcagcgacgaggtccaacagcaggcccagctgagcaccatacgttcattcctgaagctctacactaccatgcctgttgctaaattggctggcttcttggacctcactgagcaggagtttcggatacagctgctggtttttaagcataaaatgaagaatctagtttggactagtggtatttctgccctcgacggtgagttccaaagcgccagcgaagttgacttctatatcgacaaagacatgatacacatcgctgatactaaagtggcaagaagatacggggatttctttatacgccagattcataagtttgaggagttaaacagaactctcaagaaaatgggacagaggccctag

SEQ ID NO: 13956 - DNA, 5952 bp, synthetic construct
  source 1..5952: mol_type = other DNA; note = Synthetic coding sequence
atgagtggtaacaaacgaggaagccgggccagctgccctcatcgcggggcggaatgtctcctgccttgggcagcccttaatctgcagggatttcagttgctgctattacacccaagcgctacagcaatgatggatgtgtctgaattgggcgaaagcgcgagatacttgcggcagggctatcaggaaatgactaaggtccatacaattccctgggacggcaagaagagggtgtgggttccagatgagcaagacgcatacgtagaggccgaggttaagtctgaggcaaccggaggccgggtgactgtagagacaaaggaccagaaggttctcatggtacgagaagccgagctccagccaatgaacccacctcgctttgatctgctcgaagatatggcgatgatgacacatctgaacgaggcgtccgtactgcacaatctcagacagcggtatgcccgatggatgatctatacttacagcggactgttttgcgtgaccatcaacccctacaagtggctaccggtgtatacagcatccgtggtggctgcttacaagggcaagcgcaggtcagattcccccccacatatttacgctgtggccgataatgcttataacgatatgctgagaaaccgggataaccagagcatgttgatcactggcgagtcaggagctgggaaaacagtcaacaccaagagggtcattcaatatttcgcaattgtcgccgcattgggggacggacctggaaagaaagcccagttcctggctaccaagactggcggcacactggaggaccagataatcgaggcaaaccctgccatggaggccttcggtaacgccaaaaccctcaggaatgataacagcagccgttttggaaagtttattcggatacacttcgggccatccgggaagctggcctccgcagatatcgactcatatcttctcgagaagtcaagagtgatcttccagctgccaggcgaaaggagctaccacgtgtactatcagattctctccggccggaagcctgagctacaggatatgctcttgttatctatgaacccgtacgactaccacttttgtagtcagggggtcatcactgtcgataacatgaacgatggtgaagaactgatcgccactgaccacgcaatggatatcctgggtttctctgtcgacgagaagtgtgcatgctacaagatcgtgggagccctcttgcatttcggtaacatgaagtttaagcaaaagcagcgagaagagcaggcagaagccgacggtacagaatcagccgataaggccgcatatctcatgggggtctccagcggagatttattaaaaggcctgctgcaccctcgagtgcgggtcggaaacgagtacgtcacaaaaggccaaagtgtggagcaggtcgttttcgctgttggcgctctggccaaggcaacatacgaccgcctgttccgctggctggtctctcggataaaccaaactctcgacacaaagctaccgcgccagttcttcatcggagtcctggacatcgccggcttcgagatatttgaattcaattcgttcgaacaactctgtatcaacttcactaacgagaaattacagcagttttttaaccagcacatgtttgtccttgaacaagaggaatacaagagggagggcatcgattgggtgtttattgattttggcctggatcttcagccctgtattgaccttatagaaaagcccctgggtatcctgtcaatcttggaggaagaatgtatgttccccaaggcgtcagatgcatcctttcgtgctaaattatacgacaaccatgccggtaaatcgcctaacttccaacagcctcgtccagacaagaagaggaaatatcaagcccatttcgaggtggtccattatgcaggtgtcgtcccttatagcattgtgggctggcttgagaaaaacaaggaccccttgaacgagaccgtggttcccatattccagaaaagtcagaaccgcctgctcgctaccctgtatgagaactatgctggttcttgtagtactgagcctcccaagagtggcgtcaaagaaaagagaaagaaggccgctagtttccagaccgtatcccagctgcacaaagaaaatttgaataagctaatgaccaatctgagagcaacacaaccccattttgtgcgttgtattgtaccaaatgaaaacaaaacgcccggcgtcatggacgctttcctcgtgctgcaccagcttaggtgtaacggggtgctggagggtataagaatctgcaggcaaggattcccaaacagattgctctacaccgacttccgacagcgttaccgaatcctgaatccttcagcaatccctgacgatactttcatggatagtcgtaaagctacagagaagcttctgggcagtctcgatctggaccacactcagtaccagttcggacataccaaagtgttcttcaaggcaggcctgttgggggtgctcgaggagctcagagatcaacgcctcgctaaagtgctgacactcttgcaggcgcgttcacgggggagattgatgaggctggagtatcaaaggttactaggaggaagggatgcactgttcaccattcagtggaatatccgtgctttcaatgcggtcaaaaactggtcctggatgaaactttttttcaaaatgaagcccctccttcggtccgcacaggcggaggaagagttagctgccctgcgtgccgagctccggggcctgcgaggagcccttgccgccgcggaagctaagcgtcaggaactggaagagacccatgtctccattacccaggagaagaacgacctggcacttcagctacaggcagagcaggataatttggctgacgcagaagagcggtgccacctattaatcaaatcgaaggtgcagctagaaggcaaggtgaaagagctgtccgagcgcctcgaagatgaagaagaggttaacgcagaccttgccgcacgtcgaaggaagttggaagatgagtgcaccgagttaaagaaggacatcgatgatttaaaactgacgctcgcgaaggcagagaaagaaaaacaagccactgagaataaagtgaaaaatttgaccgaggagatggccgcactggacgaaagcgtggcccgcctcactaaagagaaaaaggcactccaggaggcccaccaacaggctcttggcgatctgcaggcggaagaggatagggtgagcgcgctcacaaaggcgaagcttagactggagcagcaggttgaggatttggagtgctctttggaacaagagaaaaagctcagaatggacacagagcgagccaagaggaagcttgagggcgatcttaagctgactcaggagagtgtcgcagatgcagcgcaagataaacaacagttagaggagaaattaaaaaagaaggattctgagctctcccagctgagcctgagggtcgaagacgagcagctgctgggtgctcagatgcaaaagaaaattaaggagctccaggcacgcgcagaggaactcgaggaggaactggaggctgaacgggccgccagagctagagtagagaagcagagagcggaagctgcacgagagctggaggagctgagcgagcgactggaggaagctggaggcgcttccgcagggcagcgggagggctgtcgcaagagggaagccgagctcgggagactgcgacgggagctggaggaggcagccctgcgccacgaggcaaccgtggctgctctcaggcgcaaacaggccgagggcgcggccgagctgggggagcaggtggacagcctgcagagggtgcggcagaagttggaaaaggaaaaaagtgagctcaggatggaggtcgacgacctggccgcaaatgttgagaccctgactcgcgcaaaagcaagtgctgaaaagctatgccgcacgtacgaggaccagttgtccgaggcaaagatcaaggtggaagaactgcaacgccagctggctgatgctagtactcagaggggacggttgcagactgagtctggagaactgtcaaggcttttagaggagaaagaatgtctaatttctcagctgtcccgtggcaaagcgctcgctgcccagtctctggaggagctgaggcgacagctggaagaagagtctaaggccaagtccgccctcgcgcacgccgttcaggccctccgacatgattgtgatttactgcgagagcagcacgaggaggaagctgaagcacaggctgagttacagcgtctgctctcaaaggcgaacgctgaggtggcccagtggaggagcaaatacgaggcggacgcgatccagcgcaccgaggagcttgaagaagccaagaaaaagctggccctccgcctccaggaggccgaggagggggtagaagccgccaatgccaaatgctcatctctcgagaaagcaaagctaagactccagacagagagcgaggacgtgaccctggaacttgagcgcgcgacatcagccgctgccgctctcgataaaaagcagagacatctggagagagccttggaggagaggcgcaggcaggaagaagaaatgcagcgcgagctggaggccgcacagcgagaatcaaggggcttaggtactgagctattcaggctccgacacgggcatgaggaggcactggaggccttagagactctaaagcgggaaaacaagaatttgcaggaagaaatctctgatctcaccgaccaagttagtctgtcaggcaagtctatacaggagctagagaagaccaaaaaggccctggagggggaaaaaagcgaaattcaggccgcgctggaagaggccgaaggcgcccttgagctcgaggagactaaaaccttgcggatccagctggaactttctcaggtaaaagctgaggtggataggaagctggcggagaaggacgaggagtgcgctaacttaagacgcaatcatcagcgggcagttgaaagcctgcaagcaagcctggatgctgagacacgcgcacgaaacgaggccctccggcttaagaaaaagatggagggcgatctcaatgatttagaactacagctcggccacgccacacgtcaagcaaccgaagcccaggccgccaccagattaatgcaggctcagttaaaagaggagcaggccgggagagatgaggaacagcggctggcagcggaactccatgaacaagcgcaggccttggaaaggagggccagtctgctcgcagctgagctggaagaactgcgcgccgccctcgagcagggcgagagaagccggagattagcagagcaggaactgctggaagctacagaaagattgaacttgctgcactcccagaataccggacttctgaaccaaaagaagaaactcgaagccgaccttgctcaactgtcaggagaggtagaagaggccgcccaggaacggcgtgaagcggaggagaaagccaaaaaagcgatcaccgatgccgccatgatggctgaggagctaaagaaggagcaggacacctcagcccatctcgaaagaatgaagaaaacgttggagcagaccgtccgagaacttcaggccaggctggaggaagctgaacaggctgcgttacggggcggaaagaagcaggtccagaagcttgaagcaaaggtgagggaactggaggcagaactggatgcagaacaaaagaaacatgccgaagcactgaaaggcgtccggaaacacgagcgacgtgttaaggagctcgcttatcaggctgaggaagatcgtaaaaacctggcacgcatgcaggacctggtagacaagttgcagtccaaggtgaagagttacaagcggcaatttgaagaggctgagcagcaggctaataccaatctggccaaatatcgcaaagcacaacacgaactggatgatgctgaggagagggcagacatggcggaaacccaggctaataaactgcgagcacgaaccagggacgctctaggacctaagcataaggaatag

SEQ ID NO: 13957 - DNA, 2730 bp, synthetic construct
  source 1..2730: mol_type = other DNA; note = Synthetic coding sequence
atggagagggcaatggaacagctgaatcggcttacgcgatccctcaggagggctcggaccgtagagcttccggaagacaacgagacagctgtatacaccctgatgccgatggtaatggcggatcagcatagatctgtctcggagctgctcagtaatagcaagtttgacgttaactacgcgttcgggcgagtcaaacgcagtttactgcacattgccgctaactgtggctctgtcgaatgtctggtactcctcctgaagaagggggctaatccgaattaccaggacatctccggttgtaccccactgcatctggctgctaggaacgggcaaaagaagtgcatgtcgaagctgctcgagtattctgctgatgtgaacatttgcaacaacgaaggtttgaccgccattcactggttagcggtcaatggccgaaccgagctgctgcacgacctggttcagcacgtttccgacgtcgatgtcgaggatgctatgggccagacggccctacacgtggcctgtcagaacgggcataagacaaccgtgcaatgtttgctggatagtggggccgatatcaacaggccaaatgttagtggggcgacccctttgtatttcgcctgctcacatgggcaacgggataccgctcagattctgctgctgagaggcgccaaatacctgcctgacaagaacggtgttacacctctggatctttgtgtccagggaggctatggtgaaacctgtgaggtcctgattcagtatcaccccaggctgttccagaccatcatccagatgacccagaacgaggatctgagggagaacatgttacgccaggtgctggagcatctctcccagcagagtgagtcccagtatctgaagatcctgacatccctagctgaggtggccactacaaatggtcacaaacttctgagcttgagtagcaattacgacgcccaaatgaagtccctgctgcgaattgtgcgaatgttttgtcacgtgttcagaattggcccctctagtcccagcaatggcattgacatggggtacaacggaaataaaactccccgcagtcaagtgttcaaacccctggagcttctgtggcacagcctggacgagtggctggtactgattgctacggagctaatgaaaaacaaacgcgattcgactgagataaccagcattctgctaaaacagaaaggacaagaccaggatgctgccagcattccaccatttgagcccccaggaccaggctcctatgaaaacttgtctacaggaactagagagagcaagcccgacgcactagcgggccggcaggaggcttccgctgattgtcaggatgtgatctccatgacggcaaatagactgtctgcggtgatccaggccttctatatgtgttgctcctgccaaatgcccccgggcatgacttctcctagattcatcgagttcgtgtgcaagcacgacgaggtcctgaaatgtttcgtgaatcggaatcctaaaatcatctttgatcactttcactttcttctggaatgccctgaacttatgagtagattcatgcatatcattaaggcacagcctttcaaagaccgttgcgagtggttttacgagcacctacactctggccaacccgactctgacatggtgcacaggcccgttaatgagaatgatatcttactggtccatcgagacagcatttttcggtcatcctgtgaggttgtttccaaggccaactgtgctaagctcaagcaaggaatcgccgtcaggtttcacggcgaggagggaatggggcagggagtagtgagggagtggttcgacatactgtccaatgagatcgtgaatcccgactacgcattattcacacagtctgctgatggtaccacttttcagcccaattccaactcatatgtgaatcctgatcatctaaattatttccggttcgccggacagatactcgggttagctctgaatcatcgccagcttgttaacatctatttcactaggtctttctacaaacatatattaggaatccctgtgaactaccaggatgtcgcttccattgaccctgaatacgccaaaaatctgcagtggatcctggataatgatatctccgatctgggcttagaactcaccttctccgttgagactgacgtgtttggcgcaatggaggaggtgcccctgaagcctgggggaggctccattcttgtgacacagaacaataaggctgaatatgtgcagctagtcaccgagctaagaatgacccgggctattcagccccagataaacgcatttctccagggttttcacatgttcatcccaccatctcttattcagctgttcgatgagtacgagctggaattgctgctgagtggcatgccagaaatagatgtgtctgactggatcaagaacaccgagtacacctctgggtacgaacgggaagaccctgttatccagtggttttgggaagtggtcgaggatattacccaggaagagcgggtgctgctgctgcaattcgttaccgggtcctcccgggtccctcacggtggcttcgccaatattatgggcggctcaggactgcagaactttaccatcgctgccgtgccttacacacctaacctgctgcccacgagctcgacttgcatcaatatgcttaagctgcctgagtacccctcaaaagagatccttaaggaccgacttctggtcgccttgcattgtggatcttatggttacacaatggcttag

SEQ ID NO: 13958 - DNA, 2679 bp, synthetic construct
  source 1..2679: mol_type = other DNA; note = Synthetic coding sequence
atgcgcaaagttaaaaaactcagactggacaaagaaaatacaggaagttggcggagtttttctcttaattctgaaggtgctgagaggatggccaccaccggtactcccacagctgatcgcggggatgccgccgctactgacgacccagctgccagattccaagttcaaaagcactcctgggacggcctacgcagcataatacatggtagcaggaaatattcgggcctgatcgtcaataaggcgccgcacgacttccagttcgttcagaagactgatgagtccggaccccactctcaccgcctgtattacttgggtatgccatatggctcccgagagaattcactgctgtatagcgagatcccaaagaaagtgcggaaagaagccctgctgcttctttcttggaagcaaatgcttgaccatttccaagccactcctcatcacggggtgtattcccgggaggaggagctcttacgcgagcgcaaaagattgggtgtctttggcattacatcttacgattttcatagcgagtccggtctattcctattccaggcttccaactctttgttccattgccgagacggaggaaaaaatggattcatggtctctccgatgaagccacttgagattaagacgcagtgttccggcccgcggatggacccaaaaatctgtccggctgatccggcatttttttcctttattaataattctgacctctgggtcgccaatatcgaaactggtgaagagcgcagactaacattttgccatcagggcctgtcaaatgtgttagatgatccaaaatcagcgggcgttgctactttcgtcatacaggaggagttcgatcgctttaccggttactggtggtgtcccacagcatcctgggagggcagtgaggggctaaagacccttcggattctgtacgaggaggtcgatgagtccgaagtagaagtaatccatgttccatctccagccctggaggaacgcaagaccgacagctatcgttacccacgaaccggctctaagaatccaaaaattgctctgaaactcgccgagttccaaacagattctcagggcaagatcgtgagcacccaagaaaaggaactggtgcaaccatttagctccctattccccaaggtcgaatatattgccagggctgggtggactagggacggcaaatacgcctgggcgatgttcttggacagaccgcagcagtggcttcaattggtgttgcttccgccagccctattcatcccaagtactgaaaatgaggagcagaggcttgcatccgcacgggcagtgcctagaaatgtgcagccttacgtcgtatacgaggaagtgaccaacgtgtggattaacgtccacgatatattctatccatttcctcagtctgagggagaggatgagctgtgtttcctccgagctaatgagtgcaaaaccggcttctgccacctgtataaggttactgcggtactgaaatcccaaggatacgattggtctgagccattctcacctggtgaggatgaatttaaatgccccatcaaggaagagattgcgttgacaagcggggagtgggaagtcctagccaggcacggaagcaaaatttgggtaaacgaagaaacaaagctggtgtattttcagggcactaaggatacaccactcgagcaccacctgtatgtcgtaagttacgaagctgcaggtgaaattgtgcgactaacaacaccaggattctctcattcgtgtagcatgagtcagaatttcgatatgttcgtttcacattatagcagcgttagtacacccccatgcgtgcacgtgtataaactgtcgggccctgacgatgaccctctgcacaaacagccgcgattctgggccagcatgatggaggccgccagttgtcctcctgactacgtccctccggagatattccactttcatacgcgcagtgacgtgcgtctgtatgggatgatttacaaaccccacgccctccagccgggcaagaagcaccctacagtactgttcgtgtacggcggtcctcaggtgcagctggtgaataacagcttcaagggcataaagtatctcagactgaacaccctcgcctctctgggatacgcagtggtagtgatagacggccgaggctcatgccagcggggacttagatttgaaggcgcactcaaaaaccagatgggacaagtcgagattgaagatcaggtggagggcctacagtttgtggccgagaagtatggctttatcgaccttagccgagtcgctatccatggctggagctacggtgggtttctgagtcttatgggtctgatccataagccccaggtatttaaagtagcaatagctggcgcgcccgtcacagtatggatggcttacgacaccggctacaccgaacgctacatggacgtgccagagaacaaccaacatggctacgaggctggatcggtggccctgcatgtcgagaagctgcctaatgagccaaaccgactgctaattctgcacgggttcctggacgagaacgtgcacttctttcatactaacttcctcgtgagtcagctgatccgggccggcaagccctaccaacttcagatctacccgaacgaaaggcactctattcggtgtcccgaatccggagaacactacgaagtaacactgttgcatttccttcaggagtacttgtag

SEQ ID NO: 13959 - DNA, 1533 bp, synthetic construct
  source 1..1533: mol_type = other DNA; note = Synthetic coding sequence
atggccgctgaattagtcgaggctaaaaatatggtgatgtcctttcgtgtgtcagacctgcagatgctgttgggattcgtcggccggtctaaatcaggactcaaacacgaactcgtgacaagggctctacaattggttcagttcgactgttccccagaactgtttaaaaagatcaaggagctttacgagacccgatatgcaaaaaagaactccgagccagcacctcagccacacagaccactggaccccctcacaatgcactccacttacgacagggcaggcgccgtgcctaggacgcctctggcaggccctaatatagactatcctgtcctgtatggcaaatatcttaatggactgggacggcttcccgccaagacattgaaaccggaagtcagattggtgaagctaccgttcttcaatatgcttgacgagctgctgaagccaaccgaactggtgccccagaacaatgaaaagttacaagaatccccatgtatatttgcgttgacccctcggcaagtcgagctcatccggaatagcagggaattgcagcctggcgtgaaagccgtgcaggtagtgttacggatctgctattctgatacatcatgtccacaagaggaccagtatcctcctaatatcgcagttaaggtcaaccacagctactgttccgtgcccggctactatccttctaataaaccaggcgtagaacccaagcgtccttgtaggccgatcaatctcacccacctgatgtacctttcaagcgccaccaatcggattaccgtcacttgggggaactatggcaagtcatacagtgtcgccctctacctggtgagacagctgacctcctccgaactgctgcaaagactgaagactataggagtgaagcatcccgagctgtgcaaagcgctggtgaaggagaagctgagactagacccagatagtgaaattgctactacgggggtacgtgtcagcctcatctgccccctagttaagatgcggctctccgtcccatgtagggctgagacttgtgcccacctccaatgtttcgatgccgtgttttacttgcagatgaatgagaagaaacccacctggatgtgtcctgtctgtgataagcctgccccctatgatcagctgattatcgacggcctgctgagcaagatcttatcggagtgtgaggatgcggatgagatcgaatatctagtggatggcagctggtgcccaattcgggctgagaaggaacgctcgtgcagcccgcagggggctatcttagtgctcgggcctagcgacgccaatgggcttctcccggccccttctgtcaatggctccggcgcactgggcagcactggaggaggcggccccgtaggtagcatggaaaatggaaagcctggagccgacgttgtggatctcacactcgacagctcctccagctcagaagacgaggaagaggaggaagaggaggaggaagacgaggacgaggagggaccgaggcccaagcggagatgcccttttcagaagggcctcgtaccagcatgctag

SEQ ID NO: 13960 - DNA, 684 bp, synthetic construct
  source 1..684: mol_type = other DNA; note = Synthetic coding sequence
atggcagcgcaacggcctctgcgcgtattatgcttggcaggtttcagacagagcgaacgagggtttagggaaaagaccggcgccctgcgcaaagccctaaggggacgtgccgaattggtttgcctgagtggtccccacccggtaccggacccaccaggcccagaaggcgctaggtccgactttgggtcctgccctccggaggagcagccacggggatggtggttctcagagcaggaggccgacgtcttttctgctctggaagaacctgctgtttgcaggggtctcgaggaatctcttggcatggtcgctcaagcccttaaccgactgggcccgtttgatgggctgcttggcttcagtcagggggccgctcttgccgccctggtgtgcgccttgggacaagcaggcgatcctaggttcccactcccacggttcattttactagtgtcaggtttttgtccacgcgggattggcttcaaggagagcatcttacagcgacctctgagcctgccatctctgcatgtctttggggacacagataaagtgattccctcacaggaaagcgtgcagctcgcatcacagttccctggggctatcactttaactcactccggcggccacttcattcccgctgctgccccacagcggcaagcatatcttaagtttctcgatcagttcgcagagtag

SEQ ID NO: 13961 - DNA, 1656 bp, synthetic construct
  source 1..1656: mol_type = other DNA; note = Synthetic coding sequence
atggaagaggccgagttggtgaagggtagattgcaagctatcacagataagcggaagatacaggaagaaatttcccagaagagactgaagatcgaggaggacaagctgaagcatcagcacctgaaaaagaaggccctgagagagaaatggttgttggacggtatcagctccggaaaggagcaagaggaaatgaagaagcagaaccagcaggaccagcatcagatacaggtgctcgaacagtccattctgcgactggaaaaggagatccaagacctcgagaaggccgagcttcagatcagcaccaaggaagaggccatcctgaaaaaactcaaaagtatagagcgaactactgaagatataattaggtcggtgaaggtcgagcgagaagagagagctgaggagtcgatagaggacatttatgctaacatccccgatcttcccaagtcctacataccttcccggttacgaaaggaaattaacgaagaaaaggaggacgacgaacaaaacagaaaggccttatacgcaatggagattaaagtcgagaaagacctgaaaaccggagagtcgaccgtgctgtcaagcattcctctgccctccgatgatttcaaaggcacagggatcaaagtttatgacgatgggcagaaatccgtgtatgctgtaagctcaaaccattccgccgcctacaacggaaccgatggtctagccccagtggaagtggaagaactgctaagacaagcctcggagcgcaatagcaagtccccaactgagtatcatgagccggtgtatgctaacccattctataggcctactacccctcaaagagagactgtcacacctggaccaaactttcaggaacgcataaagatcaagaccaatggcctgggaattggggtgaacgagagcatacacaatatgggtaacggtctaagcgaggagagaggcaataatttcaatcacatcagtcctatccccccggtgccccacccaaggtcagtgatccagcaggccgaggagaagttacataccccccagaagcgcctcatgacaccttgggaggaatctaacgtcatgcaggataaggatgctccttcgccaaaaccccgcctatcccctcgagaaacgattttcggcaaatctgagcaccagaattcgagccccacttgtcaagaagacgaagaagatgttcggtataatatcgtgcactccctcccacctgacatcaatgataccgaacctgtcactatgatctttatgggctatcaacaggccgaggatagcgaagaggacaagaagtttcttacaggttacgacggcataatccacgctgagctcgtggtgatcgacgatgaagaggaggaagacgagggggaagccgagaagccaagctatcatccgatcgctccccactcgcaagtataccaaccagccaaacccacgccgctgccacggaaacgctccgaagcttcccctcatgagaacaccaatcataagagtcctcacaagaactcaatcagtctgaaggagcaagaagagtccctcgggtctcccgttcatcatagcccatttgatgctcagaccaccggggacgggaccgaagatccctcactgaccgccctaaggatgagaatggctaagttagggaaaaaagttatttag

SEQ ID NO: 13962 - DNA, 1701 bp, synthetic construct
  source 1..1701: mol_type = other DNA; note = Synthetic coding sequence
atgttcgtctccgactttcggaaggagttctatgaggtggtgcagagccagagggtcctactgtttgtggcctccgacgtagatgctctctgtgcctgtaagatactgcaagccctttttcaatgtgaccacgtccaatacacgctcgtgccagtgagtggatggcaggagctggaaaccgcttttctggaacacaaggaacagttccactactttattctcatcaattgcggtgcaaacgtggatcttctggatattctgcagcccgacgaggacactatcttttttgtgtgcgacactcaccgaccagtaaacgtggtgaacgtgtataacgatacccagatcaaactgcttatcaagcaggacgacgatttagaagtcccagcctatgaggacattttccgggacgaagaagaagacgaagagcattctggaaatgatagtgacggatccgaaccctccgaaaaaaggactaggctggaggaagagatcgtcgagcaaactatgagacgtcgccagagacgcgaatgggaagctcgtcgcagagacattcttttcgactacgaacaatacgaatatcacggaacaagttcagctatggtgatgttcgagctggcctggatgctctcaaaagacctgaacgatatgctctggtgggccatcgtgggcctgaccgaccagtgggtgcaagacaaaatcacacagatgaagtacgtgactgacgtcggggtactccagcgccatgttagccgccataatcacaggaacgaggacgaagaaaacaccctgtcggtcgattgcacccgaatctccttcgagtacgatttacgcctggtgctctaccagcactggtctctgcacgattctctgtgtaataccagctacaccgcagccaggtttaagctgtggagtgttcacgggcaaaagcggctgcaggaattcttggcagacatgggtttgcccctgaagcaggtgaaacagaaattccaggcgatggatatttcacttaaggaaaatttaagagagatgatcgaggagtcggctaacaagttcgggatgaaagacatgcgtgtccaaaccttctctattcacttcggctttaagcataaatttcttgccagcgatgttgtgtttgccacaatgtctctgatggagtcaccggagaaagatgggtctggaactgaccatttcatccaggcattggatagtctgtcaagaagcaatctggacaaactctaccatggacttgagcttgctaaaaaacagcttagagcgacgcagcagacgattgccagctgtttatgcacaaatcttgttatatcacaggggcctttcctgtactgcagcctcatggagggtacaccagatgtcatgctcttcagcaggccggccagcctgagtctcctctcgaaacatctcctgaaaagctttgtgtgttccacgaaaaataggcgttgtaaactgctgcccctggtgatggctgcccccttgagcatggaacacggcacggtcacagttgtcggtatcccccccgaaacagatagcagtgacaggaaaaacttctttggacgggctttcgaaaaggctgccgaatctacatcttctaggatgctgcacaatcacttcgatttaagcgtgattgaactcaaagctgaggaccgatcaaagttcctggacgcacttatctcattgttatcttag

SEQ ID NO: 13963 - DNA, 1461 bp, synthetic construct
  source 1..1461: mol_type = other DNA; note = Synthetic coding sequence
atgtccgtcacttatgacgacagcgtgggtgtggaagtttcaagtgatagcttctgggaggtcggcaactacaaaagaactgtcaagcgaattgatgacggccaccggctgtgttctgacctgatgaattgccttcacgaaagagcgaggatcgaaaaagcatacgctcagcagctaactgaatgggccagaagatggcgtcagctagtagagaagggcccccagtacggcacagtggagaaggcatggatggccttcatgagtgaggccgagcgagtaagcgagctgcatctagaggtgaaggcctcccttatgaacgacgatttcgagaagatcaagaactggcagaaagaggcgtttcataagcagatgatgggcggcttcaaagaaactaaagaggccgaggacggctttagaaaggcccagaaaccgtgggctaagaaactgaaggaggtggaggcagccaagaaagcccaccatgctgcctgtaaggaggaaaagcttgccatctcccgagaagccaactccaaggctgaccccagcctcaatcccgagcagttgaagaagttgcaggataaaatcgaaaaatgtaaacaagacgtgctgaaaacaaaggagaagtacgaaaagtccttgaaggaacttgaccagggcacaccccagtacatggagaatatggagcaggtgttcgaacagtgtcagcaattcgaggaaaagagacttcgcttctttcgcgaagtgctgctggaagtccaaaagcacctcgatctttccaacgtcgccgggtacaaggcaatttatcacgacctggagcagtccatccgcgcggcagatgccgtagaagacctgagatggttccgagccaaccatggccctgggatggccatgaattggccacagtttgaggagtggagtgccgacctcaatcgcaccttaagtagaagagagaagaagaaggccacagacggcgtcacgctaaccgggataaatcaaacaggggatcagtccctacccagcaaaccctcgtcaaccctgaacgtccccagcaaccctgctcagtcagcacagagccaatcctcctataacccgttcgaggatgaggatgacaccggcagcaccgtttccgagaaagatgatacgaaggcgaagaatgtgagctcatatgagaagacacagtcctaccctacggattggagtgacgacgagagtaataaccctttttcgagcacggacgccaacggcgactcaaatccctttgatgatgatgcgacctccggaactgaggtgcgggtccgagcactgtatgactacgaaggccaggagcatgacgaactgtcattcaaggcaggggacgaactcacaaagatggaggacgaagatgagcagggttggtgtaagggaaggctagataacgggcaagttggactctacccagccaactacgttgaagctatccagtag

SEQ ID NO: 13964 - DNA, 2262 bp, synthetic construct
  source 1..2262: mol_type = other DNA; note = Synthetic coding sequence
atgatggaggagagagccgctgcagcagtcgccgcggccgcctcctcctgtcgtccactagggtcgggggccggcccgggccctacaggagcagctcctgtctcggcgcctgcgccaggccccggcccagcggggaaaggtggtggaggcggtggcagtccaggtccgacagccggcccagaacctttatcactgccaggcatccttcattttattcagcatgagtgggctaggttcgaggcggagaaagcacgctgggaggcagagcgtgctgagttgcaggcccaggtcgcgtttctgcagggcgaacgtaagggccaggaaaatctgaaaactgacctggtgaggaggatcaaaatgttagagtacgccctgaaacaggaacgagctaagtatcacaaattaaagttcggaacagatctgaatcaaggcgagaagaaggctgatgtgtcagagcaggtctccaacggcccagtagaatctgtcaccctcgagaatagccctctcgtgtggaaagaagggagacagcttcttcggcagtacctggaggaggtcggatacacggacaccatcctggatatgagaagcaagagggtcagatctcttttaggcagaagtctcgaactgaatggggctgtggaaccatccgaaggggcccctcgagctcctccaggccccgcaggactgtctggaggggaatccctgttggtgaagcagatagaggagcagattaaaagaaatgcggccggaaaagacggaaaggagcggctcggggggagcgtactcggacagattcccttcttgcagaattgtgaagacgaggactctgacgaggatgatgagttagactctgtgcagcataaaaagcagcgagtcaagttgccgtcaaaagctctcgtgcccgagatggaggacgaggatgaggaagacgactctgaagacgccattaacgagttcgatttcctgggatcgggcgaggacggtgagggtgctcctgacccgcggcggtgtactgtggatggaagcccgcacgagctggaatcccgtcgcgttaaactccaggggatcctagctgacttgcgggatgtcgacggcctcccccccaaagtgacaggccctcctcctggtacacctcagccccgccctcacgaagacgtcttcattatggacaccatcggcgggggcgaggtatcactgggagacctggctgatctaacagtcactaacgataacgatctgagctgtgacttatctgattctaaggatgctttcaagaaaacctggaaccccaaatttacactacgcagtcactatgacggaattaggtccctggccttccaccattcccagtcggcccttctgacggcatctgaggacggcactctgaagttgtggaatctgcaaaaagcagtgacagccaaaaagaacgccgctctcgatgtagaaccaatccacgcttttcgcgcacatcgcgggcctgtgttagccgttgccatggggagcaacagcgaatactgctattctggtggggcagacgcatgtatacactcatggaagatacctgacctgagtatggatccttacgacgggtacgatccgtcggtcctcagccacgttctggaggggcatggagacgctgtgtggggacttgcgttttcaccaacaagccagcgacttgctagctgctccgcagacggaaccgtccgcatctgggacccttcctcctcttcgccagcttgtctgtgcacatttcccactgcctctgaacacggcgtgcctaccagcgttgcattcactagcacagaaccagcccacattgtcgcatctttcagatcgggggacactgtgctttatgatatggaagtgggttccgctctgttaacactggagtcccgaggatcgtccggcccgacacagattaatcaggttgtgagccacccaaatcagcccctcacaatcacagcccatgacgacaggggcatacgctttctggacaaccgaaccggcaagcctgttcatagtatggtggcacatctcgatgccgtgacctgtctggctgtggatccaaacggagctttcctgatgtcagggagtcacgattgctcactgaggctgtggtcattagataataagacctgcgtccaggagataactgcccatcgtaaaaaacatgaggaagctatccacgccgtggcatgccatccttctaaggctctgattgcttccgccggtgctgatgcgttagcaaaagtcttcgtatag

SEQ ID NO: 13965 - DNA, 1596 bp, synthetic construct
  source 1..1596: mol_type = other DNA; note = Synthetic coding sequence
atgcggatgcacacgcgattatccctgcctgggccaccccaccatgtgggcgcagcctacccacctgccggaggcaacaggagcgagaatgctggaagttgggggggcgctggcgcaagcagcgttgagccactggctagaagggtcgccagtggcgaggccacattggctatggaccagcctgccggattgcaggtagactacgtgtttaggggcgtagagcacgcagtccgtgtaatggtcagcggtcaggtgctcgagctggaggtggaagataggatgaccgctgaccagtggcggggtgagtttgacgctgggtttatcgaggacttaacccacaagacaggcaacttcaagcagtttaacatcttctgtcacatgttagagagcgcccttacacaaagctcagagagcgttactctcgacttgcttacctacacggacctcgaatccttgcgaaacagaaagatgggtgggcggcccgggtcactggcccctagatcggcccaactaaatagcaaaagatatctgatcctgatttatagcgtagagttcgaccgcattcactacccccttccgttaccatatcaaggaaagcctgatccagtggtgctccaggggattattaggtcattgaaagaggagctaggacgtctacaaggtcttgatggtcagaatacgagagacacacgagagaacgagatctggcatcttagagaacaggtgtccaggctcgcatctgagaaaagggaactcgaagcccaacttggcaggtctcgtgaggaagccctcgcaggcagagcagcaagacaggaagccgaggcactgagaggactggtccgcggcctcgagttggaactccggcaagagcgaggactaggacaccgcgtagcgggcagacgcgggcaggattgccggcgcctggccaaagagctcgaggaggccaaagcctctgagcgttcccttcgggccaggttgaagacacttactagtgagctggccttgtataagcggggcggccgaggttccaggggtagaggtaggcctgctaggccaagcccatcacctaccggcggtcgagctttgcgtttcgatcctaccgcgtttgtgaaggccaaggagcgcaagcagcgggaaattcagatgaaacagcagcagcgaaacaggctggggagtggcggctctggagacggcccttcagtgagctggtcacgtcaaacccaacctcccgctgccctgacaggaagaggtgatgccccaaatagatctagaaataggagctctagcgtggattcttttagatcaaggtgttcatccgctagctcttgttctgatttagaagatttctccgaatccctgagccgaggcggtcaccggcgacgaggaaagccgccatcacctactccttggtccgggtccaacatgaaatcccccccggtcgaacgctcacaccaccagaagtctctggctaacagcggaggctgggtgccaatcaaggagtatagttccgaacaccaggctgcagacatggccgagatcgacgcccgtctcaaggccctccaggaatacatgaatcgactcgatatgcgaagctag

SEQ ID NO: 13966 - DNA, 1452 bp, synthetic construct
  source 1..1452: mol_type = other DNA; note = Synthetic coding sequence
atggcttccttactttggggtggagatgccggcgcagcagagtccgagcgcttgaatagtcatttcagtaatctgagtcaacctcggaagaacctgtggggtatcaaaagcactgccgttaggaatattgatggatccatcaataacatcaatgaagacgatgaggaggatgtagtagaccttgcagcgaacagcctgttgaacaagctaattcatcagtctttagtggagagctcccatcgtgtggaggtgcttcaaaaagatccttcaagcccattatattctgttaagaccttcgaggagctaagactgaaagaagaactcctcaaagggatctacgccatgggctttaatcgcccatcaaagattcaggaaatggccttgcccatgatgctggcgcaccctccacaaaacctcattgctcagtcccagagcggaacgggcaagactgccgccttcgtgttggctatgctgagcagagtcaatgccctggagctctttccccagtgcctctgtcttgctccaacctacgaactggctctacagactggcagggtcgtggagcagatggggaaattctgtgtcgacgtccaggttatgtacgcgatcagagggaatagaataccccgcggcactgatataaccaaacagataataatcggcacacccgggactgtgctggactggtgttttaaactcaagctgatcgacctgacaaagatccgggtctttgtactcgacgaggctgatgtaatgattgacacccaggggttctctgatcatagcatcagaatccagcgtgcccttccttcagagtgccaaatgttattgttctctgctacttttgaggattctgtgtggcacttcgccgagcgcatcattcccgaccccaatgtgataaaacttagaaaagaggagctgactctcaacaacatcaggcagtattatgttctctgcgagcaccggaaggacaaataccaggcactgtgcaatatttacggctccattacaatcggccaggccattatcttttgccagactaggaggaatgccaagtggctgaccgtcgagatgatccaggacggacaccaggtttctctgctgtcaggcgaactaacagtggaacaaagggctagtattatccaaagatttcgagatgggaaggagaaggtgctgataaccactaacgtctgtgcccgcgggatcgacgtcaagcaggtaaccatagtcgtgaatttcgacctccccgtgaagcaaggggaggagcccgactatgagacctatctacatagaataggccgaaccgggcgcttcggtaaaaaaggcctggcgttcaacatgatcgaggtggatgaactccccagtcttatgaagatccaggaccactttaactcttctatcaaacagctgaatgctgaagatatggatgaaatcgaaaagatcgactactag

SEQ ID NO: 13967 - DNA, 1014 bp, synthetic construct
  source 1..1014: mol_type = other DNA; note = Synthetic coding sequence
atggccgacgccgcgccacagcttggaaagcggaagcgcgagctcgatgtcgaagaggctcatgcggcttccaccgaggagaaggaagctggcgtcggcaacggtacttgcgctccagtcaggctgccttttagcggttttaggctgcagaaagtcctaagagagagtgccagggataaaattatctttctgcacggaaaggtaaacgaggctagtggagacggcgatggggaggacgccgtggtcattctggagaagactccatttcaggttgaacaggttgcccagctcctgacggggagcccagaacttcaactgcaattctctaatgacatatactcgacctatcacttgtttcctcctagacagctgaacgatgtgaaaacgaccgtggtgtaccctgccaccgagaagcacctccagaaatacctgcggcaggatttaagattgatcagagagacgggggacgactatagaaatatcaccctgccacatctggaaagccaatcactctccattcagtgggtgtataatatcctagataaaaaggccgaggccgaccgcattgtcttcgaaaacccagacccaagtgacggattcgtgctcattcccgatctcaagtggaaccaacagcagctggacgatctatacctgattgccatctgccacagacgcgggatacgaagcctccgtgacctcaccccagagcatcttcctttactgcggaacattttacatcaggggcaggaggctatactgcagcggtacagaatgaaaggggatcatctgcgcgtctatctgcactaccttccaagctattaccacctacatgtccatttcaccgccttgggatttgaagcacctggttcaggtgtggaaagggcacatctgttagctgaggtaatagagaacttggaatgtgacccccgtcattaccaacaacgcacactcactttcgctctgcgcgcagatgatccactgttgaagctcctgcaggaggcccagcaatcatag

SEQ ID NO: 13968 - DNA, 1782 bp, synthetic construct
  source 1..1782: mol_type = other DNA; note = Synthetic coding sequence
atgaagctgcaggcagtgatggaaaccctgctgcaaaggcaacagagggccagacaggagctggaagctcgacagcaactgcctccagaccctccagctgcccccccaggacgcgctcgggcagcacccgatgaagaccgagagcctgagtccgccaggatgcagagggctcagatggcagctctcgcagccatgcgcgccgctgcagctggcctcggacaccctgccagtcctgggggttccgaggatggcccccctggtagcgaggaggaggacgctgccagggagggcacgccgggcagtcctggccgcggcagagaaggaccaggcgaggagcatttcgaggatatggccagcgacgaggatatgaagcctaagtgggaggaggaggagatggaggaagaccttggcgaagacgaagaagaggaagaggaagactacgaggacgaagaagaagaggaggatgaggaaggactgggaccaccgggacctgcaagcctgggcaccaccgccctgtttcctaggaaggcccagccgcctcaggccttccgcggagacggggtaccgcgtgtccttggaggtcaggaacgtccaggccccgggccagcgcaccctgggggggcagcccatgtcgctcctcaactgcagccccctgatcatggtgactggacatatgaagagcaattcaagcaattatacgagctggatggtgaccctaagcgcaaagaattcctggacgacctgttctccttcatgcagaaaagaggaacacccgtaaatcgaattccgattatggcaaaacaggtcctggacttgtttatgctttatgtgctggtgacagaaaaggggggcctggttgaggtaataaataagaaactgtggagggaaattacaaaaggccttaatcttccgacctccatcaccagcgccgcgtttacattacgtactcagtacatgaagtacctgtatccctacgaatgtgaaaagcgtggattatcgaaccccaatgagttgcaagccgctatcgatagcaacagacgcgagggcagaagacagtctttcggaggctccttgttcgcatattctcctgggggcgctcacgggatgctgtcaagtcccaagctcccagtgtcgtcactcggtctcgccgcatcaactaatggtagcagcattacgccagctcctaagattaagaaggaagaagatagtgccatcccaatcaccgtgcccggcaggctgccagttagtcttgcaggacacccagtggtcgccgctcaggctgccgcagtgcaggcggctgctgcccaggccgccgtggcagcccaagccgctgctcttgaacagctgagggagaaactggagtcagccgagcctcccgagaagaaaatggcattagtcgccgatgaacaacaacggctaatgcagagagcactgcagcagaatttcctggccatggcggctcagttgccaatgtctatcaggattaatagtcaggcctcagagtccagacaggactcagccgtaaacttgacaggcacaaatggctccaactccatatctatgagtgtcgagatcaatggtataatgtacacaggtgttttgtttgcccagccacccgcccccactccaaccagcgccccaaacaagggtggtgggggagggggcgggagcagctcaaatgcaggggggagaggaggtaacactggcacttccggtggacaggctggtcccgccggactgtccaccccgtctacttccacatcaaacaattctttgccgtag

SEQ ID NO: 13969 - DNA, 6192 bp, synthetic construct
  source 1..6192: mol_type = other DNA; note = Synthetic coding sequence
atggccgacggcgctccaaggccacagctttacaggagcgtctctttcaaactcttggaacggtggagcgggggaccggggctgcgggaggaagacactgacaccccaggactgcgacggagagccagctgtagaccgactactgccgctagagggcagccctcacgcagagtgtcgaagctcgctagcggacctcttgcagctcccgcgcaacctcggccgcttagaagtttatcaccgtcggtcagacaactgtcaaggcgatttgacgccccacgcttggatgatggcagcgcgggtactcgtgatggcggcgtactgccagctgcggccgaagaggctgcagaaggaccagccagaggtgcctggccaagcgtaacagagatgcgaaagctgttcggagggcctggaagcaggcgaccatccgctgatagtgaaagcccagggactccatctcccgatggggccgcttgggaaccgcccgctagagagagtcgacagccacctacccccccaccccggacctgtttccccctggctgggctgcgcagcgccaggcctctgacaggaccagagaccgaggggaggctgagaaggccgcagcagcagcaggagagagcccaaagacccgcggacggtctccatagttggcacatcttttctcagccacaggccggagctagagccagttgcagcagctctagtattgcagcctcctatccagtcagcaggtctagggcagccagcagcagcgaggaggaagaggaaggccctccccagctgcctggtgcccaaagcccagcctatcacggggggcactcctccggctccgatgacgatagagatggggagggtgggcataggtggggcgggaggcctgggctgaggccagggagctccctcctcgaccaggactgcagacccgattctgatggcttaaatctgagttccatgaactctgctggagtctccggctctccagagcctcctacttcaccccgagcaccaagggaggagggcctcagggaatgggggagtggatctccaccttgtgtgcccggaccgcaagagggacttaggcctatgtcagactctgtcggcggagcgttcagagtggccaaggtgtcttttcccagttacctggcttcacctgccggttcccgtggctctagcaggtatagtagtaccgaaacgctgaaagatgatgacctatggtcatcccgcgggtctgggggttggggggtgtatcggtcgccttcatttggagcaggggagggcctcttaagaagtcaggcacgtacaagagcaaagggccctggggggacaagccgtgctctgcgagacggtggctttgagccagaaaagtcccggcagaggaagtctttaagcaatcctgacatcgcctcagagaccctgaccctgctttctttccttcgatctgacctgtccgagctgcgggtcaggaaaccgggaggtagctcgggtgataggggctctaatccacttgatgggagggacagccccagcgcaggcggccctgtcggacaactggagccaattcctattccagcacctgcaagccctggtaccagacccacactcaaggacctgacggccacactcaggcgggcaaagtcctttacttgctcggaaaaacccatggcacgacgactgccccggacctccgcattaaaaagcagctcgagtgaactgctcctaaccgggccaggggctgaagaagacccactccccctcatagttcaggaccagtatgtgcaggaagcacgacaggtctttgagaagatacagagaatgggcgcccagcaggatgatggcagcgatgccccgcccggctcacctgattgggcaggcgacgtgactagaggccaacggtctcaggaagagctgtctgggccagagtcatctctcactgacgaaggtatcggcgccgatccagagcctcctgtggccgccttttgcggtttaggaacgaccggcatgtggagacctctaagttcctcatccgcacagaccaaccaccacgggccaggcaccgaagactcgctgggagggtgggctctagttagccctgaaacccccccgacccccggagccctccgccggaggagaaaggttccgccctccggctctggaggctcagagttgagcaacggagaggctggtgaggcttacaggtccttaagcgaccctatcccacagcggcatagagccgcaacgagcgaagaacccacggggtttagtgtggatagcaatctgttaggcagcctgtccccaaaaaccggactgcccgcaacttcagcgatggacgaggggctcacctctgggcattcagactggtcagtgggatccgaggaaagcaaaggctaccaggaggtcatccagtctattgtgcagggtcccgggactttaggacgtgttgtggatgacagaatcgccggaaaagcaccgaaaaaaaagtcactttccgacccctcaaggcgtggcgagctggccggccccggattcgagggcccggggggagaacccatccgcgaggttgagccaatgctgccgccctctagtagcgaacccatcttggtagagcagagggcagaacctgaagaaccgggagctacaaggagccgcgcacaatccgagcgagcactgccggaagctttgccaccgcctgctaccgcgcatcgtaatttccatctagacccgaaactggcagacatcttaagtcctagacttattcgccggggatcaaagaaaagacccgccaggagttcacaccaggagctgcgccgcgatgagggctctcaagaccagacggggtcactgtcgagagctcgaccttcctccaggcacgttaggcacgcttctgtgccagctacttttatgcctatcgtcgtgccggagcccccaacatcggtgggtcccccagtcgcagtgcccgagcccatcggcttccccacccgcgctcatccaacactccaggcaccatccttggaggacgtgaccaaacagtacatgttgaacctgcattccggtgaggtcccagcccccgtcccagttgacatgccctgtctccctctcgcagcacccccgtccgccgaagccaaaccgcccgaggctgcccgacccgcagatgagccaacccctgctagcaagtgctgttctaaaccccaggtggacatgcggaagcatgtcgccatgacactcctggataccgagcagtcatatgtagaatctctgaggaccctcatgcagggatacatgcaaccattaaagcaaccagagaattccgtactgtgtgatcctagtctcgtggacgagattttcgaccagatccccgagctcctggaacatcatgaacagtttctcgagcaggtaagacactgcatgcagacgtggcacgcgcagcagaaggttggcgcgttgcttgtccagagcttcagcaaggatgtgctagtgaacatctacagtgcttacattgacaattttctgaatgccaaggacgcagtgagagtcgctaaggaagctcgaccggcatttctgaagttcctcgagcagtctatgagagagaataaggagaaacaggccctcagtgatctcatgatcaaacccgtgcagcgtatcccgcggtacgagctgctcgtgaaagatctgcttaaacataccccggaggatcaccctgaccacccattgttattggaagcccaacgtaacatcaaacaggtggcagagcgtatcaataagggagttaggtccgctgaagaagctgaaagacacgcccgcgttcttcaagagatcgaagcccacatcgagggcatggaggacctccaggcaccgctgcgcagattcctcagacaggagatggtgatagaagtgaaagccatcggtggaaagaaagaccgtagcctgtttctattcaccgacctgatagtgtgcaccacgttgaaaagaaagtcgggtagtctgaggagaagctcaatgagtttatacacagccgcttccgtgatagatacggcgtctaaatacaagatgctgtggaagttgccgcttgaggacgctgatatcatcaaaggggcatcgcaggcgaccaaccgggagaatatccagaaagctattagtaggctggacgaagacctgaccactctcggacagatgtctaagctgtccgaatccctgggattcccccatcagagcttggacgacgccctgcgagacctcagtgcagccatgcatagagacctgagcgaaaagcaggccctgtgctacgcgctctcttttccacccacaaagctggaactgtgtgctacaagaccggaaggcaccgatagctatatatttgaattcccacaccctgatgccaggctgggttttgagcaggctttcgacgaggctaagcgaaagctggctagctctaagtcctgtttagatcccgagtttcttaaggccattccaattatgaaaacaaggtccggaatgcagttctcttgcgcagcccctacgctcaattcctgtccagaaccttcacctgaagtgtgggtatgcaactcagacggatatgttggacaggtttgcctgctctccttacgtgcagaaccagatgttgaggcgtgtatcgctgtctgctccgcgcggatactctgcatcggggccgtccctggattgcagccgcgctgccatagagagcccccacccagtctgagaagtccaccggaaactgccccagagcccgctggtcctgaactcgatgtcgaggctgccgctgacgaggaagccgccactctggccgagcccgggcctcaaccttgcttgcacatctctatcgccggcagcggactggaaatgactccggggctaggcgagggagatccgcggccagaactggtgccgttcgattccgattcagatgatgagtcctcaccaagtcctagcggtacgctccagtcacaggccagcagatctactatctccagttcttttgggaatgaagaaactccatcgtccaaggaagccacggccgaaaccactagttccgaagaggagcaagaaccaggctttttgcccctctctggatcgtttgggccagggggaccatgtggcacctccccaatggatgggagagcactgcgcagatccagccacggtagtttcacaaggggttccttggaggacctgttaagcgttgatcctgaagcctaccagagttctgtgtggctgggtacggaggatggttgtgtgcatgtctatcagtcctccgacagcatccgcgaccgacgaaacagtatgaagctccagcacgccgcttctgtgacatgtatcctgtacctgaataatcaagtgttcgtcagccttgctaacggtgaactcgttgtgtaccagcgtgaggctggacacttttgggatccccagaattttaagagtgtgacgctaggcacgcagggctctcctattactaagatggtgtctgtgggtggccggctctggtgtggttgccaaaatcgcgtgctggttctctcccccgacacgctgcagctggagcacatgttctacgtgggccaggatagctcacgatgtgtggcctgcatggtggactcctcactgggtgtctgggttactttaaagggaagtgctcatgtgtgtttataccatccggatacttttgaacaactggccgaagttgatgttaccccccccgtgcaccgcatgctggcaggctccgacgccattatcagacaacacaaggcagcatgtcttcgtatcacagctctgctggtctgcgaggaacttctgtgggttggcaccagcgccggagttgtcctgacaatgcccactagcccaggaacggtgtcttgccctcgagccccgctcagccccactggtctcggacagggacatacgggccacgtccgtttcctggctgcggtccaactgcctgacggcttcaacttgctatgtccaacacctcctcctccccctgatactggacccgagaagctcccaagcctcgaacaccgggattctccctggcaccgcggcccagctccagcccgaccaaaaatgctggtgatatccggaggcgacggctatgaggactttagattgtcctcaggtggcggctcctcttctgagacagttggaagagatgacagtaccaatcacctgctgctttggagagtgtag

SEQ ID NO: 13970 - DNA, 2499 bp, synthetic construct
  source 1..2499: mol_type = other DNA; note = Synthetic coding sequence
atgtctgaggccggcggggccgggcccggaggttgcggcgccggggcaggtgccggcgctggccctggcgcattacctcctcagcctgccgctttgcctccagcccccccccaggggtctccctgcgccgcggccgcaggcggatccggagcctgtgggccggccaccgctgtggccgccgcaggcacagccgagggcccgggtggcggaggatctgcccgcatcgctgtgaaaaaggcccagctcaggtccgccccgcgggccaaaaaactggagaaacttggagtttattccgcctgtaaagccgaagagtcatgcaaatgtaacggttggaagaaccctaatccaagcccgaccccacctagagctgatttgcagcagattattgtcagcctgaccgaatcctgcagatcttgctctcacgccctcgcagcccacgtaagccacctggaaaacgttagcgaagaagagatgaacaggctgctcggtatcgtgcttgatgtcgaatatttgttcacatgcgtgcataaggaagaagacgctgacacgaaacaggtgtatttttacctcttcaagcttctccgcaaaagtatacttcagcgggggaaaccggtagtggaaggcagcctagagaagaaaccccccttcgaaaagccgtccatcgagcagggagtgaataactttgtgcagtacaagttcagtcatctcccagctaaagaaagacagaccatcgtggagctcgcaaaaatgtttctgaacagaatcaattactggcacctcgaggccccgtcccagcggcgactccgctctcctaacgacgacatctccggatataaggaaaattacacaagatggctctgttactgtaatgtccctcagttctgcgacagtctcccccggtatgagactacacaggtattcgggaggactctcctccgaagcgtgtttacagtcatgaggaggcagttattagagcaggctcggcaagagaaggataaactgccgcttgagaagcggacactgatattgacccacttcccaaagttcctctctatgctcgaggaggaggtgtattctcagaattccccaatatgggaccaggactttctgagtgcctcctccaggacttctcagctggggattcagaccgttattaacccacctccagtggcaggcactatctcctacaacagcacatctagttccctagaacagcctaatgcaggatccagctctccggcctgtaaggcctcatccggcctagaggccaaccctggagaaaagaggaagatgactgattcccacgtgctagaggaggcaaagaagcccagggtcatgggcgatatccctatggagctaattaatgaggtgatgagtacaattactgacccggcagccatgcttggacctgagacaaactttctctcggctcatagtgcgcgcgacgaagcggctcgcctcgaagaacgcagaggtgtgatcgaatttcatgtcgtgggcaactcccttaaccagaagccaaacaagaagatattaatgtggctggtcggtctgcagaatgtgttttctcatcagctgcctaggatgccaaaggagtatattactcggctggtattcgatcctaaacacaagaccctggctttaattaaagacggacgagtcataggtggcatctgctttcggatgttcccatctcagggattcaccgaaattgtgttttgtgccgtgacgtcaaatgaacaagttaaagggtacggcacacatcttatgaaccacctgaaggaatatcatattaagcatgacattctcaatttccttacatatgctgacgagtacgcaattggatactttaagaaacaagggttctcaaaggagatcaagataccgaagacaaagtatgttggatacataaaggactatgagggagcaaccctgatgggatgcgagttaaatccaagaatcccctacaccgaattctccgtgattatcaagaagcaaaaggagatcattaaaaagttaattgagagaaagcaggctcagattcgaaaagtctatcccggactgagctgcttcaaagacggagtgcgccagatccccatcgaaagtattccgggaatcagagagactggctggaaaccttccggtaaagagaaatctaaagagcctagggaccccgaccaactgtatagtacgctcaagtcgattctccagcaggtcaaatcccaccagtccgcttggccattcatggagcctgtcaagcgcaccgaggcgcccggctattatgaagtgatccggttcccaatggacctgaagaccatgagcgagcgcttgaaaaatcgttactacgtcagcaaaaaattatttatggccgacctgcaacgggtgtttaccaactgtaaagagtataacccacccgagtctgagtactataaatgcgccaacatcctcgagaagttttttttcagcaaaatcaaggaggcggggttaatagacaagtag

SEQ ID NO: 13971 - DNA, 4950 bp, synthetic construct
  source 1..4950: mol_type = other DNA; note = Synthetic coding sequence
atggctggtggccggggagctcccgggaggggccgtgacgagcccccagaatcatatccccagcggcaggaccacgagctgcaagccttggaggcaatttacggtgcagacttccaagatctgcgccctgacgcgtgcggcccagtcaaagaacctcctgaaatcaaccttgtactgtacccacagggcctgacaggcgaagaagtctacgtgaaggtggacctgcgcgtgaagtgtcctcctacataccctgacgtggtccctgagatcgaactgaagaatgcaaaaggactcagtaatgagagcgtcaacctgttaaaaagtcgattggaggaattagctaagaaacactgcggggaagtcatgatttttgaactagcttaccacgtgcagtcattccttagtgaacacaataaaccccctccaaaatccttccacgaggagatgcttgaaagacgcgcgcaggaagagcagcaacgcttactggaggccaagcgcaaggaagaacaggaacagagagaaatcctccacgagattcagcgtaggaaggaggagatcaaggaagaaaaaaaacgcaaggagatggcaaaacaagaacggcttgagattgcgagtctgtcaaaccaggatcacacaagcaaaaaggatccgggggggcacaggaccgctgccatcttacatgggggatcccctgatttcgtggggaacggcaaacacagggcgaactcgtcaggacgcagcagaagggaacggcagtacagcgtctgcaactccgaggacagccctgggtcttgcgagatcctgtattttaatatgggatctccagaccagctcatggtgcacaagggaaagtgtatcggcagtgacgagcagctggggaagctggtttataatgctcttgaaacagccactggaggcttcgtcctgctctacgagtgggtgctccagtggcagaagaaaatgggaccctttctgacctcccaggagaaagagaaaattgataagtgtaagaaacagatccaggggactgaaacggaattcaatagtctggtgaagctgtctcatcctaatgtcgttcggtatctcgcgatgaacctcaaggagcaagatgattcaatagttgtggatatccttgtggagcacatctctggcgttagtcttgctgcacatttatctcactccggccctattcccgtccatcaactgagaagatatactgcacagctcctgagcggtttagattatctgcacagcaattcagtggtgcacaaggtgctttctgcaagcaacgttcttgtggatgctgaaggaactgtgaagatcactgattatagcatttccaagagactggccgatatctgcaaagaggacgtgttcgagcagactcgtgtgcggttctcagataacgcactaccctacaaaaccgggaagaagggggacgtgtggagactgggtctgttactgctcagcttgagtcaagggcaggaatgcggcgaatatcccgtgactatcccatcagatctccccgccgatttccaggactttctcaagaagtgtgtgtgtttagacgataaggaaaggtggagtcctcaacagttgttgaagcattctttcatcaatccccagcctaaaatgcctctggtcgagcagtcccccgaggattccgagggtcaggattacgttgaaaccgtgattccttccaataggctgccctccgctgcatttttcagcgagacccaaaggcaattctccaggtattttattgagtttgaagagcttcagctgctgggtaaaggggctttcggcgctgtcatcaaagtgcagaacaagctagatggatgctgttacgccgtgaagagaattcccatcaacccagcttctcgtcagttccggcgaatcaaaggcgaggtcacgctccttagcaggctccatcacgaaaatatagtaagatactataacgcctggatcgagagacacgaaagaccggcaggtccggggacacctcctcccgactcagggcctctggccaaggacgatagggcagcccggggccagcccgcctccgatacagatgggcttgacagtgtcgaggccgctgctcctccaccaatcctgtctagcagcgtagaatggagcacctctggggaacgctctgcttcagctagattcccggctacggggcccggatccagtgatgatgaagatgacgatgaggacgagcatggtggagttttctcccagtccttcctccccgcctctgactccgaaagtgatataattttcgacaacgaggacgaaaactctaagagccagaaccaggatgaagactgtaatgagaaaaacggctgccatgaatccgagccatccgtgactaccgaagccgtacactatctgtatatccagatggaatactgcgagaagtcaaccttgcgggatacaatagaccagggcctgtacagggatacagtgcgattatggcgcctgttccgtgagatcttagatgggctcgcatacattcacgagaagggcatgatccatcgggacttgaaaccagtgaatattttcctggacagcgatgatcacgtgaaaattggcgacttcgggctagcgacggaccatctggcatttagtgcagactctaaacaggatgaccagacaggcgacttgatcaaaagtgacccgtctggacacttgacgggtatggtaggcacagctctgtatgtttcacctgaggtgcaaggctctacaaaaagtgcttataatcagaaggtagatctctttagtttggggattatctttttcgaaatgtcatatcatccaatggtcactgcgtctgaacgtattttcgttctgaatcagctgcgcgaccctaccagccccaaatttccggaggatttcgacgacggggaacatgcaaagcagaagtcagtaatatcctggttactgaatcacgatccggctaagcgtcccaccgcaaccgagttgctgaagtccgagctgctcccacctccccagatggaggagagcgaactgcatgaggtgctgcaccacaccctgaccaatgtcgacggtaaagcttatagaaccatgatggcacagatcttctcccagcggataagccccgcaatagattacacctatgattctgacatactcaaggggaattttagtatcagaacggccaaaatgcagcagcacgtgtgtgaaactattataaggatctttaaacgacatggagctgtgcaattgtgcacaccactcttattgcccagaaatagacaaatatacgaacacaacgaggctgctctgttcatggaccactccggcatgctcgttatgcttcctttcgatctcaggatccccttcgctaggtacgtcgctcggaataatatcctgaacctgaagagatattgcattgaacgcgtgttccggcctcggaaacttgaccggtttcaccccaaagagttactggagtgtgcctttgacatcgtaacctctactactaacagtttcttgccaaccgcagagattatttatactatttacgagatcatccaggagtttccagccctgcaggagagaaattactcaatatatctgaaccacacaatgttactgaaggcaatactccttcattgcggcattcccgaagataagttgtcccaagtgtatattatcctctatgatgcagtcactgagaaacttacacgtagggaagtcgaggccaagttctgcaacttatccctgtcatccaactctctctgtcgactttataagtttatcgaacagaagggcgatctacaggacctaatgcctactattaacagccttattaagcagaagacaggcatcgctcaattggtgaagtacggcttgaaagacctggaggaggttgtgggcctgttaaaaaaactgggaattaaacttcaggtgctgataaatctcggtctcgtttacaaggtccagcaacataatggtatcatattccagtttgtggcattcatcaagcgccggcagcgggccgtaccagaaatcttggccgccggcgggcgctacgatctgctgataccccagttccgtggaccccaagctttgggccctgtacccacggccattggggtatccatcgccatcgataagatctcagccgccgtgctcaacatggaagagtcggtgaccattagttcttgcgatctgcttgtggtcagtgtcggtcagatgagtatgagccgcgcaataaacttgacacaaaaattgtggactgccggaatcactgccgagataatgtatgattggagtcagtcccaagaagaacttcaagagtactgcaggcatcacgagatcacctacgtggccctggtgagcgataaggaaggctcccatgtgaaggtgaagtctttcgaaaaggagaggcaaactgagaagcgcgtgcttgagacagaactggtggaccacgtgctccagaagctgcgcaccaaagtaacggacgaaaggaacgggagggaggcttctgacaacctggccgtgcagaatctaaagggatccttcagtaatgcctcaggtctcttcgaaattcacggagcaacggtcgttcctattgtctcggtgcttgcacccgagaagctgtcagcctcaacaagacgccgttacgaaacgcaggttcaaacacggctccaaacttccctggccaacctccaccagaaaagctctgaaatagaaatcctagccgtagatctgcctaaggagactatcctccagttcctgagcctggagtgggacgccgacgagcaggccttcaatactactgttaaacagctgctctcccggctgcctaaacagagatacttaaaattggtgtgcgacgaaatttacaacatcaaagttgagaagaaagtatccgtgctctttttgtattcatatagagatgactactaccgaattctcttctag

SEQ ID NO: 13972 - DNA, 5652 bp, synthetic construct
  source 1..5652: mol_type = other DNA; note = Synthetic coding sequence
atgccagtcggcagaattgagtgtccaagttcaccatcatttccacgagacatatcacatgaatgccgagtctgtggagtaactgaagttgggctaagcgcatatgcaaaacatatctctggccagctgcataaggacaacgtggacgcccaagagcgtgaggacgatgggaaaggcgaagaagaggaagaagactacttcgacaaagagctcattcagctgattaaacagcgtaaggaacaatctagacaggacgaaccgagtaactcgaatcaggagattaacagcgatgatcggcgccctcagtggaggcgcgaagatcgcatcccatatcaggaccgggaatcttacagccagcctgcctggcatcaccggggcccaccccagagagattggaaatgggagaaagacgggttcaacaacactagaaagaactctttcccgcatagcctgaggaatgggggaggacctcgcggcaggtctggctggcataagggggtggctggaggaagcagcacctggtttcataaccacagcaattcaggcggtggatggcttagcaatagtggcgccgtggactggaatcataatgggacagggaggaatagttcttggctgtcagaaggaacaggcggctttagttcctggcatatgaacaactccaatggtaactggaagagctcagttcgatccacgaataattggaactattccgggccaggtgataaattccagccgggtcgaaacagaaacagtaactgccagatggaggacatgaccatgctctggaataagaagtcaaacaagtccaacaaatatagccacgatcgctacaattggcaacgccaagaaaacgacaagctgggaacagttgctacgtaccggggaccgtccgaggggttcactagtgacaagtttccatccgaaggacttctggacttcaattttgaacagttagaatcccagacgacaaaacaggctgacactgccaccagcaaagttagcggcaagaacggctcagctgccagagaaaaacccagacgatggacgccatatccctctcaaaaaacactggacctgcaatcgggactgaaggatatcacaggaaacaagtctgaaatgattgaaaagcctctcttcgacttctctctaataactaccggcattcaggagccgcagaccgacgagactcggaacagccccacccagaaaacacagaaagaaatccatacgggaagcctcaaccacaaggcatcaagtgactccgcagccagctttgaagtagtaagacagtgtcccaccgcagaaaagccagagcaggaacatacaccaaataaaatgccctctttgaaatcaccactgttaccttgccctgccactaaaagtttgtcccaaaagcaagatcccaagaacatctccaaaaatactaaaactaatttcttcagtcctggcgaacactcgaatcctagcaacaagcctaccgtggaggataaccatgggccatacatctctaagttacgcagtagctgtccccatgtgcttaagggtaacaagtccacgtttgggtctcagaagcagtccggcgacaatctgaatgatactttacgcaaagccaaggaagtgctccaatgccacgagtcactccaaaatcccctcctgtctacaagcaaaagcacccggaactatgctaaagcgtctcggaacgttgaggaatcggagaagggtagtctgaaaattgagttccaagtccatgctctggaagatgaatcggatggcgaaaccagtgatacagaaaagcacggcacgaaaatcggcactttagggtcagccactaccgagttgctcagcggctccacacgtaccgcagatgaaaaggaagaagatgaccgaattctgaagacctctcgagagctcagtacaagcccttgcaatcctatcgtgagacagaaggaatctgagctacagatgacatccgctgcgtctccccatcctggcctcctcctggatttgaaaacttctctcgaagacgctcaagttgatgacagcatcaagagtcacgtatcctacgagaccgagggatttgaatccgctagcctggacgcagaactacagaagtctgatattagtcagccttccggaccacttctgcctgagctttcaaaactggggtttcctgcctccctgcagcgtgatctgacgcgacacatatccttgaaatcaaagactggggtgcacctgccagagcccaacttgaactccgctcgacggattaggaacatctcgggacatcgaaaaagcgagacagaaaaggagtcaggactgaagccaaccctgagacaaatcctaaacgcttccaggaggaacgtaaactgggagcaagtaatacagcaggtgaccaaaaaaaaacaagagctgggcaaagggttacctcgctttgggattgagatggtgcctctggttcagaacgagcaggaggctctcgatttagacggcgagcctgatctgtccagcttggaaggctttcaatgggagggagtgtccatttctagtagtcctggactggccaggaagagaagtctcagcgaatcatctgttatcatggaccgcgcaccaagtgtctactcatttttttccgaggagggaacgggaaaggagaacgagccacagcagatggtgtccccatctaacagtctccgggctggccagtcacaaaaagcgaccatgcacctgaagcaagaggtgactcctagagctgcgagcctccggaccggagagagagcagaaaacgtggctacacagaggagacacagtgcccagctcagtagtgaccacatcatccctctgatgcacctggcaaaggatctaaattcccaggagaggtcaattccgccttctgaaaaccaaaacagtcaggagtctaatggagaaggtaactgcctgagctcctccgcatcatcagccctggccatcagctccttggccgatgcggcgaccgattccagctgcacttccggtgctgaacaaaacgacggccagagcattaggaaaaagcgtagggctacgggagatggatcaagtcctgagctacccagcctagagaggaagaataaacgcagaaagatcaaaggaaaaaaggaaaggtctcaggtagatcaactgctcaacatctctctccgggaggaagagctttccaagtcacttcagtgcatggacaacaacctgttgcaggctagagccgccctgcaaactgcttacgtcgaagtgcaacgcttattaatgctcaaacagcagatcaccatggagatgtctgcgctgcgcacacacagaatacagatcctgcagggcctgcaggagacgtatgagccatcagagcacccggaccaggtgccctgttcgctgacacgggagagacggaactccaggtcacagacttctatagacgccgccttgctgccaacgcccttcttccctttgttcctggaaccaccttctagtcacgtgagtccttctccaactggggcatctctgcagattacaaccagccccacctttcaaacccacggcagtgtcccagcacccgactcttctgtgcaaataaaacaggagcccatgagccccgagcaggatgagaatgtcaacgccgtgcccccctctagcgcatgcaatgtcagtaaagaattattagaagcaaacagagagatctcagattcatgtcctgtgtacccagtgatcacagccagactgtcgctccctgaaagtacggaatctttccatgaaccctctcaagagctgaagttctctgtcgagcagagaaatactcggaatagggagaactctccatcgtcccagtctgccggcctcagctctattaacaaagagggggaagagcctacaaaggggaatagtggatcggaagcctgtacgtcatccttcttacgtctgtcgtttgcttccgaaactcccctggaaaaggagccacactcccccgccgatcagcctgagcagcaggccgaaagtactttgacttctgccgaaactcggggatctaagaagaagaaaaaactgaggaaaaaaaagagtttgagagcggcccacgttcccgaaaattctgacaccgagcaggatgtactgacagtgaagccagtgaggaaggtgaaggctggcaaactgatcaaggggggtaaagttacaacgagcacttgggaggattctcgtacgggccgagaacaagaatctgtgcgggacgagcccgatagcgacagttcactggaagttctggaaatccccaatccgcagctcgaggttgtcgccatcgactcgagtgaatctggtgaagagaaacccgatagtcccagcaagaaagacatttggaactctacagagcagaaccccttagagacaagcagaagcggatgtgatgaggtttccagcacctctgagattgggacccgatacaaagatggcatcccagttagcgtggcagaaacacagaccgttatctcgtcaattaagggatccaaaaatagctctgaaatctcctctgagcccggcgatgatgatgaaccgaccgagggctcatttgagggacaccaagctgccgtgaacgcaatccaaatttttggtaacttgctctacacatgtagcgccgataagaccgtccgcgtgtataatcttgtcagtagaaagtgtattggagtgtttgagggccatacctccaaggtgaattgccttttggtgacccagacctcaggaaaaaatgccgctctttacaccggctcgagcgaccatactattcgctgctacaacgtaaagtctcgcgaatgtgtggagcaacttcagctggaagaccgagtgctttgccttcacagccggtggcggatcttatacgccggcctggcaaatggcacagtggtgacattcaacatcaagaacaataaacgcttggagattttcgagtgtcacggcccccgtgccgtgtcctgtcttgccacagcacaggaaggtgctcggaaactcttggtagttggcagttatgattgcacaatcagtgtgcgcgacgctcggaatggactgctccttcgaaccctggagggccattcgaagaccatcctatgtatgaaggttgtcaacgatctggtgttcagcggttctagtgatcagagcgtgcacgcacacaatatacacacaggagagttagtgaggatttacaaagggcataaccacgccgtgaccgtcgtcaatatattaggcaaggtcatggttactgcctgtctggacaagtttgtgcgcgtgtatgaattgcagagtcatgatcgactgcaggtgtacggcgggcataaggatatgattatgtgcatgaccattcacaagtcaatgatttacaccggctgctacgacggcagcatccaggccgtgagattgaatctgatgcagaattataggtgttggtggcatggctgctccctcatcttcggagtagttgatcacttgaagcagcacctgttgactgaccacacgaatccaaatttccagacactcaagtgcaggtggaaaaattgtgatgccttcttcactgctcgaaaaggcagtaagcaggatgccgcagggcacattgagcgacacgccgaggatgatagtaaaatcgattcgtag

SEQ ID NO: 13973 - DNA, 588 bp, synthetic construct
  source 1..588: mol_type = other DNA; note = Synthetic coding sequence
atggctgagccagttcaagaggaactctctgtcttagctgccatcttttgcaggccacacgaatgggaagttctgtcacgctctgaaactgacgggactgtgtttcgaatccacaccaaggcagaggggtttatggatgtggatatacctttagaattggtgtttcacctgccggtgaactatccctcatgtctccccggcatttccatcaattcggagcaactcacgcgtgctcagtgtgtgacagtgaaagagaacctgctggaacaggcggaatcactcctcagcgagcctatggttcatgaactcgtactgtggatccaacagaatttacggcacatattatcccagcctgagacaggatccggctccgagaaatgtaccttcagcacttctacaaccatggacgacggactttggataacgctcctgcacctcgaccacatgagagctaagacaaagtacgtaaagattgtcgaaaagtgggcctcagatctgcgcttgacgggcaggctaatgtttatggggaaaattattctcatattgttgcagggggaccgaaacaacttaaaggtgcctaagtcctag

SEQ ID NO: 13974 - DNA, 1119 bp, synthetic construct
  source 1..1119: mol_type = other DNA; note = Synthetic coding sequence
atgagtcgaaggaggttcgattgccgcagcatctctgggttgttgacgaccactcctcaaattcccatcaagatggagaatttcaataacttttacatcctgacgtctaaagaactggggagggggaagtttgcagtggtgcgtcaatgcattagtaagagcacaggtcaagagtatgcagccaaattcttaaaaaaaagacgaaggggtcaagactgccgggccgaaatcctgcatgaaatagccgtgctggagctcgcgaagtcatgccccagagtcattaacctgcacgaagtgtatgaaaataccagcgaaattatccttatcctcgagtacgcggccggaggagaaatcttttctctgtgtctgcccgagctggcagagatggtaagcgagaacgatgtcatcagactaattaagcaaatcctcgagggagtgtactacctccatcagaacaatattgtgcatctcgatctaaagccccagaatattctgttgtccagtatctaccccctcggcgacataaagattgtggatttcgggatgtccagaaaaatcgggcacgcttgcgaattaagagagataatgggaactccagagtatctggccccagaaatactgaactacgatccaattacgacagccactgatatgtggaacatagggatcatagcctatatgctcttgacacacacttcaccgttcgtcggcgaagataaccaggagacgtaccttaatatcagtcaggtgaatgttgactatagcgaagagacgttcagctctgtgtcccagcttgccaccgatttcatacaaagcctgctagtcaaaaatcccgagaagagaccaaccgcagagatctgcctgtctcactcctggttacagcagtgggattttgagaacctctttcatccagaggaaacatcctcctcctctcaaacacaggaccactctgtccgaagcagcgaggacaaaacgtccaaaagcagttgtaatggcacttgtggtgacagggaggacaaagaaaatatccccgaagacagctctatggtgtcaaagagatttagattcgatgacagcctgcctaaccctcacgaattggtctcagacttgctatgctag

SEQ ID NO: 13975 - DNA, 930 bp, synthetic construct
  source 1..930: mol_type = other DNA; note = Synthetic coding sequence
atggaggccgcccgcacagctgttctgcgagtcaagcgcaagcgaagtgcagaaccggctgaagctttagtgttggcatgcaaaagacttcgtagcgacgccgtggagtcagctgctcagaagacaagcgaaggactcgaacgcgccgcagagaataacgtctttcacctcgtggccacggtgtgctctcaggaagaaccggttcaaccgttgctcagagaggtcctgcggcctagccgggacagccagcaacgcgtccgtaggaatctcagggcatccgcccgcgaggtccggcaagaaggcagatatcgcgtgctgtccagcaggagatctttgggaactacttcgtccggacaggaatccgagtacacccccggaaatccagaggctgccggcaatagcgggttccaactccttgatctagtacacgaagaaggtgagcccgaagcagctagcgctggctcatgcaagacatccgatcctgacgtgatcctgtgcaattcagttgagctgatcagagagagactcaccgtcagcgaggacggtccaggtgtaagacgacaggaggagcagaagcacgacgactacgtctacgatatttactacctcgaaacagccacccctgggtggatcgaaaacatcctttctgttcagccatatagtcaggaatgggaactggtgaacgatgaccaggagcctgaagacatttacgatgatgaggatgacgagaactccgagaataactggcgaaatgagtacccagaagaggagtcttctgatggagacgaggacagccgggggtcggcagattacaacagtctgagtgaggaggagcgtggttctagtcgccagcgtatgtggtccaaataccccctggacgtgcagaaagagtttggttatgattcgcctcatgacctggattcggactag

SEQ ID NO: 13976 - DNA, 1068 bp, synthetic construct
  source 1..1068: mol_type = other DNA; note = Synthetic coding sequence
atggccgacaattcttccgacgagtgtgaggaggaaaacaataaggtcctgcgggagggcatgccgcaggcaccaggacaccgcgggaaagacatggatcccgttccccccgctccagcttcgctgaagtgccatcagacaccttctcacgttttagaaagggtcggatggtatcgtgaaagccagaaacaccggaaggaaaaaaaaaagacatcgcagctcaccccccagcgaggatttagtgagaatgaggacgacgacgatgacgatgatgatagcagtgaaaccgatagcgactccgacgacgacgacgaggagcacggcgcacccctggaaggggcttatgatcccgccgattacgaacacctcccagtctccgcggagataaaagagctgtttcagtatattagtcgctatacaccgcagttgattgacctggaccataaattgaaaccctttattccggactttattccagcggtgggagatatagatgcgtttcttaaagtcccccgcccagatggcaaacctgataacttaggccttctggttctggacgagccctccacaaagcagtctgaccccactgtactgtccctatggctcaccgaaaactctaagcagcataatattacacagcacatgaaggtcaagtcactggaagatgcagagaaaaacccaaaagctatcgacacgtggatcgagtccatttctgaactacaccgatccaagccccctgcaacagtgcactacacacgtcccatgcccgacatcgacaccctgatgcaggagtggtcgccggagttcgaggagctgctcgggaaagtgagcctacctacagcagagatcgattgtagtttggctgaatatattgatatgatctgcgcaatcttagacatcccagtctacaaaagccgtatccagagtctgcatctcctgttcagcctgtacagcgagtttaagaacagccagcactttaaggcactcgcggagggtaaaaaggctttcactccgtcctccaatagcacaagccaagctggagatatggaaacgctgactttttcttag

SEQ ID NO: 13977 - DNA, 915 bp, synthetic construct
  source 1..915: mol_type = other DNA; note = Synthetic coding sequence
atggccgataacagtagtgacgagtgcgaggaggaaaacaacaaagagaaaaagaagacgagccagttaacaccgcagagggggttctccgaaaatgaggacgacgatgacgatgacgatgactcatctgagaccgatagcgacagtgatgacgatgacgaggaacatggcgcccctcttgaaggtgcctacgaccccgctgattatgaacatttgcctgtcagtgctgagataaaagaactgtttcaatatatctctagatataccccacagctaattgacctcgaccataagcttaaacctttcatccccgactttatcccagccgtcggggatattgatgcattcttgaaggtcccaaggcctgatgggaaacctgataatctgggcctcttagttctggacgagccctccacgaaacaatccgatcctaccgttcttagcctctggcttacggagaactcgaaacagcataatatcactcagcatatgaaagtgaagtctctggaggacgccgagaagaatcctaaggctattgacacctggatcgaaagtatctccgaactccaccgaagcaagccaccagccaccgtccactatactcgtccaatgcctgatatagacactctgatgcaggaatggtcaccagagttcgaggagctgttgggcaaggtgagcctgcctacggcagagattgattgttcactggcagaatacattgatatgatatgcgcaattctggacatacccgtgtataaaagtagaatccagagtctccacctgctgttctcactgtatagcgagttcaaaaactcccaacatttcaaggcactggctgaaggcaagaaagcctttacaccctctagcaattcaacctctcaggccggcgacatggagacgctaaccttctcttag

SEQ ID NO: 13978 - DNA, 1335 bp, synthetic construct
  source 1..1335: mol_type = other DNA; note = Synthetic coding sequence
atgcgagagattgtgcacctccaggccggccaatgtggcaaccagattggggctaaattctgggaggttatatccgacgaacacggcatcgatccaacaggcacgtaccacggcgatagtgaccttcagctggaaagaattaatgtttattataacgaggctaccggcgggaactatgtgccccgggccgtccttgtcgacctggagcctggcacaatggactccgtgcgctccggcccatttggacagatatttcgtccagacaacttcgtcttcgggcagtctggcgctggcaacaattgggctaagggccattataccgagggcgctgagctggtagacgccgttttggatgtggtgagaaaagaggcagaatcctgtgactgcctgcaaggatttcagcttacacattcactgggcggaggcacgggctccggcatgggtaccttgctgatttccaagatccgcgaggaattccctgatagaattatgaatactttctcagtggtgccatctcccaaagtgtccgatactgtggttgagccctataacgccactcttagcgtgcaccaactggttgaaaatacagatgagacctattgtatagataacgaggctctatatgatatttgttttaggacgctaaaactgacaacccccacctatggggatctgaatcacctcgtcagcgcaacaatgtctggagtcaccacatgtctccggttccccggccagctgaacgccgatctgaggaaactagctgttaacatggtgccattccccagacttcactttttcatgccaggattcgcccctttgactagtcgaggttcccagcagtacagagctcttacagtgcctgagctgacccagcaaatgttcgacgcaaagaacatgatggccgcatgtgatccccggcatggcaggtatttgaccgtggccgcggtctttagggggcgcatgtctatgaaagaggtcgacgagcagatgttgtcagtccagtccaagaatagcagctacttcgtcgagtggattcctaataacgtcaagactgcagtctgcgatatcccaccgcgtggcctcaagatggccgccactttcatcggcaatagcacggctatacaggaacttttcaagagaatcagcgagcagttcacagccatgtttaggagaaaagctttcctgcattggtataccggagagggaatggacgagatggagtttacagaggcagagagcaacatgaatgatttagtctccgaataccagcagtatcaggatgccactgccgaagagggtgaattcgaggaagaagcggaggaggaagtggcttag

SEQ ID NO: 13979 - DNA, 1398 bp, synthetic construct
  source 1..1398: mol_type = other DNA; note = Synthetic coding sequence
atggagcccagctctctcgagctccctgcagatacagtgcaacggatcgctgctgaactcaaatgccacccaactgatgagcgggtggccttacacctggatgaggaggacaagctccgacactttagggagtgcttctacattccgaagattcaggacttaccccctgtcgacctctctctggtcaacaaagatgaaaacgctatatactttttaggcaatagccttgggctccagcctaagatggtgaaaacatatctcgaggaggaactcgataaatgggccaaaatagccgcatacggccacgaggtggggaaacgcccatggattactggggatgaatccatcgtcggcctgatgaaagatatagtaggagccaacgaaaaagagatcgccttgatgaatgcgctgacagtgaatttgcatctcctgatgctgagcttcttcaaaccaaccccaaagcggtacaagatcttactggaggcaaaggcctttccgagcgatcattacgcaatcgagtcccagctgcagctgcacggcctgaacatcgaggagtccatgaggatgatcaaaccgagagaaggggaggagactctgcggatcgaggacatactcgaggtcatcgaaaaagagggtgatagcattgctgttattttgttcagtggggtgcatttctacaccgggcagcatttcaacatcccagccataaccaaagccggacaggctaaaggatgttacgtgggcttcgatctcgcccacgccgttggaaatgtggaactgtatcttcatgattggggtgtggactttgcctgctggtgctcttataaatacttgaatgctggggccggggggatcgcgggagcatttattcatgaaaaacacgcgcataccattaaacctgcattggtgggatggttcggacacgagttgtctacacggttcaaaatggacaacaagttgcagctaatcccgggcgtgtgtggtttccgcattagcaacccccctattctcctggtgtgctcgttgcacgctagcttggagatctttaaacaggctacaatgaaggcgctccgaaagaaaagcgtcctcctgacaggatacctggagtatcttatcaagcacaactacgggaaagataaagctgccaccaagaaacctgtggtaaatatcatcaccccttcgcatgtggaggaacgcggctgtcaattaaccattaccttctccgttcccaacaaggatgttttccaggagttggagaaacggggcgtcgtctgtgataagagaaatccaaacggaatcagggtggcccccgtccccctttacaacagtttccatgacgtgtataagttcacgaacctgctaacctctatcttggacagtgcagagacaaagaactag

SEQ ID NO: 13980 - DNA, 4758 bp, synthetic construct
  source 1..4758: mol_type = other DNA; note = Synthetic coding sequence
atgaactctcagccacagaccagaagtccattttttcaacgcccccagattcagccaccgcgtgcgaccattccaaatagcagtccatccattaggcctggggctcagaccccaacagctgtgtaccaggccaaccagcacatcatgatggtgaatcacctgccaatgccgtaccccgtaccccagggccctcaatattgcataccccaatataggcacagtggccctccctacgtggggcccccccagcagtacccagttcagcccccaggacctggccccttttatccgggcccgggccctggagatttccccaacgcatatggaacgccattttacccctcacagccagtgtaccagagcgcacctataatcgtgcccacgcagcagcaacctcctccagctaagcgggagaagaagaccatcagaatccgcgaccctaatcaaggcggaaaagacataacagaggaaattatgtcaggtggaggctctcggaacccgacaccaccaatcggcaggcccaccagcaccccaacaccgccacagcaactaccctcccaagtgcccgagcatagccccgtggtctatggaacagttgagtcagcacaccttgctgcgtctacacctgtgacagctgcctctgaccagaagcaggaggagaagcccaaaccggatcctgtactcaaaagccccagtcctgtgctgcgcttagtgctaagcggcgagaagaaagaacaggagggacagacaagcgagactacagctatagtttcaattgcagaactccctctgccgcctagtccaaccacagttagtagcgtggcgcggagcactatcgctgccccaacatcgagtgcactgagctcccagccaattttcaccactgcgatcgacgataggtgtgaattaagtagccccagggaagatacaatccctatcccttctctcacttcgtgcaccgaaaccagcgacccactgcctaccaatgaaaatgacgacgatatctgcaagaaaccctgctcagtcgcacctaacgacattcccttggtgtctagcactaacctgattaatgaaataaacggtgtgtctgagaaactcagcgccaccgagtccattgtggagatcgtgaaacaggaggttctaccccttactctggaactggaaattcttgagaacccacctgaagagatgaaactggaatgcataccagcccccattacaccttccactgttccaagcttccctccaacccctcctactcctccagcaagcccaccgcacacccctgtgatcgtgcctgcggccgcaaccaccgtttcatccccatcagctgcgatcaccgttcaacgggtgctcgaagaggatgaaagcattagaacttgtctatccgaagacgccaaggagatccagaacaagatcgaagtggaagccgacggtcagaccgaggaaatcctcgactcacagaatttgaatagccgcaggagccccgtccccgcacaaatcgctatcaccgtgcccaagacatggaaaaagcccaaggaccgtacaagaactaccgaggaaatgctggaagctgaactcgaattaaaagccgaggaggagctgtcgattgacaaggtgttagagtctgaacaagacaaaatgtcccagggcttccatcctgagagagaccctagcgatcttaagaaggtgaaggccgtcgaggaaaatggtgaagaagctgagcctgtccggaacggggctgagtcagtgtctgagggcgaagggatcgacgcaaacagtggctctacagatagcagcggcgatggcgttacgttccccttcaagcccgaatcctggaaaccaaccgatacagaaggcaagaagcagtacgaccgtgagttcctcttagactttcagtttatgcctgcatgcattcagaagccggagggactgcctcctatttctgacgtggtgctcgataagattaatcagcctaagcttcctatgcgcaccttagacccgcggatcctgcctaggggtcctgactttactcccgcgtttgctgacttcggcagacagaccccaggaggaaggggggtgccactcttgaatgtgggatccaggcgctcacaacccgggcagaggagggaaccccgaaaaataatcacagtttcggttaaggaggacgttcatctgaagaaggccgaaaatgcttggaagccaagccagaaacgcgattcccaggccgatgatcctgaaaatatcaaaacccaagagctctttcgcaaggtgaggtctattttgaacaaacttacaccgcagatgttcaaccaactcatgaaacaggtgtcaggcttgaccgtggatacagaggaacgtttaaaaggagttatagacctcgtgttcgagaaggccatcgatgaaccttccttctctgtcgcgtacgctaacatgtgccgatgccttgtgacactgaaagtccctatggccgacaaacctggcaataccgtcaacttccgaaagctgctgcttaatcgctgccagaaggagttcgagaaagataaggcggatgacgatgttttcgagaagaagcaaaaggaactagaggcggctagcgccccagaagagcgcactagattacatgatgagttagaggaggctaaagacaaggccaggcggcgctccattggcaacatcaaatttatcggtgaactttttaaattgaagatgctgacagaagccatcatgcatgattgcgtcgtaaaactgctgaagaaccacgatgaggagagtcttgagtgtctttgcaggttgctgacaactataggtaaagatctggatttcgaaaaggccaagccccggatggaccagtactttaaccagatggagaagatcgtgaaagagagaaagacttcttcaaggatccggttcatgctgcaggatgttatcgaccttcggctttgcaactgggtcagtagacgagccgatcagggacccaagacaatagagcagatccacaaggaagcgaagatcgaagaacaagaggaacagaggaaagtgcagcagcttatgactaaagaaaagcgccgacctggggttcagagggtcgacgaaggaggttggaataccgtgcagggcgccaaaaacagccgcgtgctggatccgagcaagttcctgaagatcaccaagcccaccatcgacgagaagattcagttagtgccaaaggcccagttgggtagctggggtaagggttcaagcggcggtgccaaggcttctgaaaccgacgcactgcggagcagtgcgagctcactgaataggttttcagctctacagccccccgctccaagtggctctaccccttccactccggtggagtttgactctcggcgcaccctcacaagccgcgggtcaatgggacgggagaagaatgataagccgcttccctcagccactgcgcgcccaaatacctttatgcggggcgggtcatcaaaagacctcctcgacaaccagagccaggaagagcagagacgcgaaatgttagaaactgttaaacaactgacaggcggcgtggacgtcgaaaggaactcgaccgaggctgagagaaacaaaaccagggagtcagctaaacccgagatttccgcgatgagcgcacacgataaggccgccctgtctgaagaggagctggagaggaagtcgaagagcatcatagatgagttcctccatattaatgacttcaaggaggccatgcagtgcgtggaggaacttaacgcacaaggactactccacgtctttgttagagtgggtgttgagagcaccttggaacgttcccagatcacgcgcgatcacatgggccagctgttatatcagttggtgcaaagcgaaaagttatccaagcaggatttcttcaaggggttttccgaaacactggagctcgcggatgacatggcaatcgacattccgcacatctggctgtacctggctgaactggtgactcctatgctaaaggagggagggatctccatgcgggagcttaccattgagtttagcaaacctctgctgcccgtaggacgcgccggcgtgctcctatctgagatcctgcatttactctgtaagcagatgtctcataagaaggtgggcgccctgtggagagaagccgatctgagctggaaagatttcttgcccgaaggggaggacgtacataacttcctgctggagcagaaattggatttcatcgagtctgacagcccctgtagctctgaggcgctgagtaagaaggagttgagcgcggaagaactgtataaacggctggagaaactgattatcgaggataaagccaatgacgagcaaatcttcgattgggtggaggcgaatttggatgagattcaaatgtcatctccaaccttcctaagagcactaatgaccgcggtttgcaaggctgccattattgctgattcatcaacattccgcgtggatactgctgtcattaagcagagggtgccgatcctcctgaaatacctggattccgataccgagaaagagctgcaggcactgtatgcactacaggctagcattgtgaagctcgaccagccggccaacctattgcgaatgttttttgactgtctctacgatgaagaggtgatcagtgaagacgccttttacaagtgggagagctccaaggaccccgccgaacaaaatggcaagggcgtggccctcaaaagcgtgactgctttctttacttggttacgggaggctgaggaggaatcggaggataattag

SEQ ID NO: 13981 - DNA, 378 bp, synthetic construct
  source 1..378: mol_type = other DNA; note = Synthetic coding sequence
atggcaccggctaagaagggaggcgagaaaaaaaaagggcgaagcgcgataaatgaagtggtcacgcgcgagtatacaattaacattcataaaaggatccacggagttggttttaaaaaaagagcacccagggccctaaaagaaattaggaagtttgcaatgaaggaaatggggaccccggacgtgcggattgacacccggctgaataaagctgtttgggcaaaggggatcaggaacgttccctaccgaatccgcgtgaggttgtcgagaaaaaggaacgaggacgaggactctcctaacaagctttacacccttgtgacttatgtgccagtcacaacttttaagaacctgcagacggtcaatgtggacgaaaactag

SEQ ID NO: 13982 - DNA, 1590 bp, synthetic construct
  source 1..1590: mol_type = other DNA; note = Synthetic coding sequence
atgctcgtcttgtttgaaaccagtgtgggttacgccatttttaaggttctcaatgagaaaaaacttcaggaggtcgattctttgtggaaggagtttgagactcccgaaaaggcaaacaagattgtcaagctgaagcacttcgagaaattccaagacacagccgaggcactggccgccttcacggctctgatggagggcaaaattaacaaacagctgaaaaaggtgctgaagaaaattgtgaaagaagctcatgagcccctcgcagtcgctgatgccaagttgggcggtgtgattaaagaaaaattaaacctcagttgcatccacagccctgttgttaatgaattaatgaggggcatccggtcgcagatggacgggctcatcccgggcgtggaacctagggagatggctgccatgtgcctcggtctggctcacagtctctcaagataccggctgaaattttccgctgataaggtcgataccatgatagtgcaggccattagcctgctggacgatctggataaggaactgaataattacataatgaggtgcagggagtggtatggctggcatttccccgaactgggtaagatcatctctgataatctgacgtactgcaaatgccttcagaaggtcggcgaccggaagaactacgcttctgccaagctgtctgagctgttgccagaggaagtcgaggccgaagtgaaagctgcagccgagatttctatgggcaccgaggtctctgaagaggacatctgtaatatcctgcatctgtgtacccaggttattgagatctctgaataccggacccagctgtatgaatatttacagaaccggatgatggcgatagcgcctaatgtcacggtcatggtcggtgaacttgtgggggccaggttgattgcacacgctggttccctcctcaatcttgccaagcacgccgccagcacagtgcagatactcggtgcggagaaagccctgtttcgcgctctgaagtcccgtcgagatactcccaagtacggcttgatctaccacgcctcacttgtggggcagacatcccccaagcacaaagggaaaatctcacgcatgctggctgccaagacagtgctcgccataagatacgacgccttcggggaggattcatcttccgccatgggcgtcgagaaccgagccaaactggaagccaggctgagaacccttgaagatcgaggcatcaggaagatctcggggaccggaaaggctttagcaaaaaccgagaagtatgaacacaaatctgaggtcaagacatacgacccatcaggcgattccacactgccaacctgttctaaaaaaaggaagatagaacaggtggataaggaggacgagatcacagaaaagaaagcgaagaaggccaagataaaggttaaagtggaggaagaagaagaagagaaggtggccgaggaagaagagacctctgtgaaaaaaaagaaaaagcgtggcaaaaagaagcatattaaggaagaacccttgtcagaagaggagccctgcacctcaaccgcaattgcctcgccagagaaaaaaaagaaaaagaaaaaaaagagagaaaatgaagactag

SEQ ID NO: 13983 - DNA, 738 bp, synthetic construct
  source 1..738: mol_type = other DNA; note = Synthetic coding sequence
atgaacggacgcgccgattttagggagcccaacgccgaagttccccggcctattccacatatcggccccgattatatccctactgaggaggagcgccgtgtcttcgctgaatgtaacgacgaaagtttttggtttcgttcagtgcccctggccgcgaccagcatgctaattactcagggccttatctcaaagggtatcctctcttctcatccaaagtatggatccattccaaaactcatccttgcttgcatcatgggctattttgccggcaagctgtcttacgtcaaaacttgccaagagaagttcaagaaactggagaattcccctctgggagaggccctgcggtccggccaggccagacgctcttccccaccagggcactattaccaaaagtcgaaatacgatagctccgtgtctggacagtcttctttcgtcaccagcccagcagccgataatattgagatgcttccccactacgaacctattcctttctcctcttctatgaacgagtccgctcccacgggcattacagaccatatagtacaggggcctgatccaaacctggaagaatcaccaaaacgcaagaatatcacatacgaggagctgaggaacaaaaatagagaaagctacgaggtcagcctgacacagaaaacagaccccagcgtacgaccaatgcacgagagggtgccaaagaaagaagtgaaagttaacaaatacggcgatacatgggacgagtag

SEQ ID NO: 13984 - DNA, 1746 bp, synthetic construct
  source 1..1746: mol_type = other DNA; note = Synthetic coding sequence
atggaggatgttaactcaaatgtcaatgctgaccaggaagtgaggaaactgcaagaactcgtcaagaagcttgaaaaacagaacgaacagctacggtcaagatcaggggccgtccagggggccgggtctctgggccccggaagccccgtccgcgccggcgcctctattccatcttctggcgctgcttcaccaagaggatttccccttgggctgtccgccaagtcgggtggaggcccaggctccggcccaagaaggacatccagtgaggaactgcgtgacgcaacttctttgctggctgccggcgaggggggactactggacgaggtggagcccctgcgcccagatgaactcgagagactgagcggttgggaagaagaggaagagagctggttatatagcagtcccaaaaaaaagctgactcccatgcagaaatcagtttccccactggtgtggtgcagacaggtgctggactacccatcccctgacgtcgaatgcgccaaaaagtcactaatccataaattggaccagaccatgtcagcccttaagcgccagaacctgtataataatccgttcaatagcatgtcctatacgtccccttactcgccgaacgcatcctcaccttacagcagcgggttcaatagcccatcatctacccctgtgaggccacccatcgtcaagcagctgatactccccgggaactcagggaatttgaaatcatctgataggaatcctccactctcccctcagtcatcaatcgactctgaactgtccgcctccgagctggatgaggattctatagggtccaattataaactcaatgatgtcactgatgttcagattctcgccagaatgcaggaagagtcgttacgtcaagagtacgctgcgaccacaagcagaagatccagtgggtccagctgtaactcgacgcgccgcggcacctttagcgaccaggagttggatgcccagagcctggatgacgaagatgacaatatgcatcatgcagtttaccctgcagtgaaccggttctccccttccccaaggaatagccctcggccatccccgaagcaaagccccaggaactcaccacggagcagatccccagctcgtggtatcgagtattcccgcgtgagcccacagcccatgattagtagactgcagcaaccccggttgagtctccagggccaccctaccgatctgcagacatctaacgttaagaatgaagaaaaacttcgtcgatcattacccaatttatctagaacgtctaacacccaagtagattcagttaaaagttccaggtccgatagtaacttccaagtccccaatggcgggatacccagaatgcagccacaggcatcagcaattcctagccccggtaagtttcggtcccctgctgccccttcccctctggccttgcgccagcccgtgaaagcattctctaatcacggctccggctcgcccggctcccaagagatcactcaactgacccagacaacttccagccctgggccacccatggtgcagtcaaccgttagtgcaaaccctccatcgaacattaatagtgcgactcttacacgtccagccggtactaccgccatgcgatctgggctcccaagaccgagcgctcccagcgccggaggaatcccggtacctcggagtaagctggcgcagccggtgaggcgatctctgccagcaccaaaaacatacggttctatgaaggacgacagttggaaggatgggtgctactag

SEQ ID NO: 13985 - DNA, 3153 bp, synthetic construct
  source 1..3153: mol_type = other DNA; note = Synthetic coding sequence
atgctgtgttgggggtactggtctctagggcagccagggatttccactaatttacaagggatcgtggctgagccacaggtatgcggattcatcagtgacagatctgtgaaagaagtcgcatgcgggggaaaccattctgtgttcctactggaggacggcgaagtttacacttgtggattgaacacgaaaggacagttgggccacgagcgggaaggaaacaagcctgaacagatcggcgccctagcagaccagcacataattcacgttgcatgcggtgagtcacatagcttggctctttctgatagaggtcagctcttttcttggggggcaggctctgacggccaacttgggctgatgaccaccgaagattcagtcgcagttcctcggctcatccagaaactcaaccaacagactatcctccaggtgtcttgcggcaactggcactgtctggccctagcagctgatggtcagttcttcacctggggtaaaaattcccatgggcagctgggccttgggaaggagttccccagtcaagcctccccccaaagagtccgttcgttggagggcatcccgctcgcccaagtcgcggctggcggagcacactctttcgctctaagcctatccggagcagtctttgggtgggggatgaacaacgctggtcagttagggctgtcagacgagaaggaccgcgagtctccatgccatgtgaagctcctgcgaacacagaaagtggtgtatattagctgtggcgaggagcataccgccgttcttacgaagtcaggaggggtgtttacgttcggcgcggggagctgtggccagcttggacacgactcgatgaacgatgaggtgaatcctaggcgcgtgcttgaactaatgggctccgaagttacacagattgcctgtggcaggcagcacacgctggcgtttgtgccatcttcagggctcatctatgcattcgggtgcggggcccgtggccaattggggactgggcacacatgcaatgtaaaatgcccctctcctgtaaaaggttattgggccgctcactctggccagctgtccgcaagagccgaccggtttaagtaccatattgtgaagcagatcttttccggaggggatcagacattcgtgctgtgttctaaatatgaaaactattcgccggccgttgattttcggacaatgaatcaagcgcactacacttccctaatcaatgacgaaacaatcgccgtgtggcgccaaaagctgagcgaacataataatgcaaatactatcaatggggtggtacagatcctgtccagtgcagcctgctggaacggaagttttctcgagaagaagatcgacgaacacttcaagacgtccccaaaaattccgggcatcgacctcaactccacacgggtccttttcgaaaaacttatgaattcccagcactctatgatcctagagcagatactgaactcattcgagagttgcttaatccctcagctatcttccagtccaccggacgtggaagccatgaggatctaccttattctgcctgagttccccctgctgcaggactccaagtattacattacactaacaatccccctcgctatggctatcctgaggctcgacactaatccctcgaaggtgttggataattggtggtcccaagtgtgccccaagtatttcatgaaactagttaatctgtacaaaggcgctgtgctgtacctcctaagaggccgcaagaccttcctcatccctgtgttgtttaacaactacattactgcggcccttaagctgttagagaagttatataaggtaaacctcaaagttaaacacgtagaatacgacacattttacattcccgagatctccaacctcgtggatatccaggaggattacctgatgtggtttctgcaccaggcgggaatgaaagccaggccttccattatccaagacacagttacattgtgttcctaccccttcattttcgatgctcaggcaaagaccaagatgctgcagacagacgcagagctgcagatgcaggtggccgtcaacggggcgaacctgcagaacgtattcatgctgctgaccctggaaccattgcttgctcgaagccccttcttggtgctccatgtacggagaaacaatctagtgggagatgcgctgagagaactgagcatccattcagacatcgatctgaagaagcccctgaaggttatattcgatggtgaagaggccgtggatgcgggtggggttaccaaagagtttttcctgctgctgctgaaggagctcctcaaccccatttatggtatgttcacctattaccaggatagtaacctgctctggttttctgatacatgcttcgtggaacataactggtttcatcttatcggaatcacctgcggtctggcaatctacaacagcacagtggtggacctgcatttcccgctggccttatataagaagctgctgaacgtgaagcctggcctggaagacctgaaagaacttagtcccaccgaagggcgcagcctccaagagttactggactacccaggagaggacgtcgaagaaacattctgtttaaactttacgatctgcagggagagctatggcgttatagaacaaaagaaattgattcccggcggagataatgtaaccgtctgcaaggacaataggcaggagttcgtcgatgcctatgtaaattatgtttttcagatatcggtacacgagtggtacacagctttcagctcaggatttctgaaggtttgcgggggaaaagtgctggagctgtttcagcctagtgaactacgtgctatgatggtaggaaactcaaactataattgggaggagctggaggagaccgcaatatataaaggggattactctgccactcatcctactgtcaaacttttctgggagacattccatgagttccccctggagaagaagaagaaattcttactgttcctgaccggctcggatagaataccaatctatggtatggcttccctgcagatcgtcatccagagtactgccagcggggaggaatatcttcccgtggcccatacctgctacaatctgctcgatcttcctaagtactccagcaaggagatcctgtctgcccgcctcacccaggcccttgacaactatgaagggttttcactcgcctag

SEQ ID NO: 13986 - DNA, 3069 bp, synthetic construct
  source 1..3069: mol_type = other DNA; note = Synthetic coding sequence
atgtacttttgttggggtgccgactctcgggagctgcaaaggagaaggacggcaggcagccccggtgccgagctgttacaagctgcgagtggagagcgtcacagcctgttgttgctgacaaatcatagagtcctttcctgcggggataatagtcgaggccagctagggcggcgaggcgctcagaggggcgagctcccagagccgatacaagcccttgagaccctcatcgtcgatttggtctcatgtgggaaagaacattccctggcggtctgccataaaggtcgagttttcgcttggggggctggatctgagggtcagctcggcataggtgagttcaaagagatctccttcactcctaagaagatcatgacactgaacgacattaaaattattcaggtgtcctgcgggcactaccattctctcgccttgtctaaagactcccaggtattttcttggggaaagaattcccacgggcagttggggctcggaaaagagtttccgtctcaggcctccccacaaagggtaagaagcctcgagggcattcctttggcccaggtggctgcagggggcgcacacagcttcgctctcagcctctgcggcacatcttttggatgggggtccaactccgcaggacagttggctcttagtggacgcaacgtgccggtccaatccaacaagccactctccgtgggcgccctcaaaaatctgggggtggtctacatctcttgcggggatgctcacactgcagtactaacacaagacggcaaggtatttaccttcggagataacagaagcggccaacttgggtattccccaactcctgagaaacgcggccctcagctggtggagagaatcgatggtcttgtaagccagatcgattgcggaagctatcatactctggcctatgtgcataccactgggcaagtcgtctccttcggtcatggcccaagcgacacatcaaagcctacgcacccggaagcgttaactgagaattttgatatctcctgcctcatcagcgctgaagacttcgtagatgtgcaggtgaagcacatttttgcggggacgtacgctaacttcgttacgacccaccaagatacctcctcaactcgcgcaccagggaaaaccctcccagagatctcgaggatctcacagagcatggctgaaaagtggattgccgtcaaacgacgttccacagagcacgagatggctaagtctgaaatacgcatgatcttcagtagccctgcttgcctgacggcctcttttctgaagaaaagaggtactggtgagaccacttccatcgacgtggatctggagatggcgcgggacacttttaagaaattgactaaaaaggaatggatttcttcaatgatcacaacgtgtctggaggatgacctcctccgcgccctaccgtgtcattcgccccaccaggaagctttgagtgtgttcttgctgttaccagagtgtccagtgatgcacgatagtaagaactggaagaacctcgtggtgccatttgctaaggcggtgtgtgagatgagtaaacagtcactgcaggtgctgaagaagtgttgggcctttctccaggagtcctcgttgaaccccctgatacaaatgctgaaagccgctattatttctcaactgttgcaccaaactaaaaccgaacaagatcattgtaatgtcaaagctctgttgggtatgatgaaagagctccacaaggtcaataaggctaattgtcggttacctgaaaatacatttaatataaatgaactgtcaaacctcctgaacttttatatcgatcgcggccgccagctcttccgcgacaaccacttaatccccgccgagaccccatcccccgtgatcttttctgattttccctttatttttaattcgctctcgaagatcaagctcctgcaggcagactcgcacataaaaatgcagatgtcagagaagaaagcatacatgttgatgcacgaaacaattctgcagaaaaaagacgaatttccaccttctcctcggtttatcctgagggtgcgccggtctagactcgtcaaagacgctcttcgacagttatcgcaagccgaagccactgatttctgtaaagtattagtggtggagttcatcaatgagatttgtcccgaaagcggaggcgtcagcagcgagttctttcattgcatgtttgaggagatgactaagccggagtatgggatgtttatgtatcccgagatgggcagctgcatgtggttcccagcaaagcctaaacccgagaaaaagaggtattttctatttggcatgctctgtggacttagtctcttcaacttgaatgttgcaaacctgccattcccattggctctatataaaaagttgctagaccaaaaacccagcttagaggatctaaaggaactcagcccacgtttaggcaaatcgctgcaggaagtcctggacgacgcagctgatgacatcggcgatgctctatgcatcagattctcaattcattgggaccaaaatgacgtagatttgatccctaatggcatttctatccctgttgaccaaactaataaacgcgactacgtaagtaagtacattgactatattttcaatgtatctgtgaaagccgtgtacgaggaatttcagcgcggtttctacagagtatgcgaaaaggaaatcctcaggcatttctaccccgaagagctgatgacagcaattatcggaaacaccgactatgattggaagcagtttgaacagaactcaaaatacgagcaaggctatcagaaaagtcatcccactatccagcttttctggaaagctttccacaaacttacactggacgagaaaaagaaattcctgtttttcctcactggccgcgaccggctgcacgccagggggatccagaagatggagatagtctttcgctgcccagaaacgttttcagaaagagaccatccaacctccatcacctgtcacaacatcctctccttaccgaaatatagtacaatggaacgcatggaagaagcgctgcaggtcgccattaacaataaccgaggttttgtgtcgcccatgctgactcagtcttag

SEQ ID NO: 13987 - DNA, 1221 bp, synthetic construct
  source 1..1221: mol_type = other DNA; note = Synthetic coding sequence
atggctgctgctgtgcggcaggacctggctcagctgatgaattcctctggcagccataaggacctcgcgggaaagtaccgacagatcctggagaaggctatacaactgtccggagcagaacagctagaggcgcttaaggcatttgtagaagcaatggtgaacgaaaacgtgtccctggtcatttcaaggcagctactcaccgacttttgtacccacctgcctaaccttcccgacagcaccgccaaggagatttaccacttcacgctcgagaaaattcagcctcgcgtgatatctttcgaagagcaagtggcttccatccgacaacatcttgcctcaatttatgaaaaggaggaggattggagaaacgccgctcaggtgttagtcggaatccccctggagaccggtcagaagcagtacaacgtcgattacaagttagaaacctacttgaagattgcccggttgtatcttgaggatgacgaccctgtacaggccgaggcctatatcaaccgcgcctcgctgctgcagaacgagtccactaacgagcagttacagatccattataaggtctgttatgcccgggtcctcgattataggcggaaattcattgaggcggcccaacgttacaatgagctatcatacaaaacgatcgtgcatgagtccgagagacttgaggcattaaaacatgcgttgcactgtaccattctggcaagcgccgggcagcaaagatcgcggatgctggcgaccctttttaaggatgaacggtgtcagcagctcgctgcttacggcatactggaaaaaatgtatctggataggatcatacgggggaatcagcttcaagaatttgcagccatgcttatgcctcaccagaaggctacaactgcagatgggagctcaatactggatcgagccgtgatcgaacacaacctgctatctgcctccaaactctacaacaacattacatttgaggaactcggcgccttactggaaataccggctgctaaggccgagaagatcgccagtcagatgataacagagggccgcatgaatggatttatcgatcagatagacggtattgtgcacttcgagacacgcgaggctttacctacctgggataagcagattcagtcgctgtgttttcaggtcaacaacctcctggaaaagatctcacaaactgcccctgagtggaccgcacaagcgatggaagcccagatggcacagtag

SEQ ID NO: 13988 - DNA, 1578 bp, synthetic construct
  source 1..1578: mol_type = other DNA; note = Synthetic coding sequence
atggcagctggcctgctgggatccgaggatccaccttggtcttggaaccttacttgtcgcgccctgagaacatgccaggtgaggaatataagggtactgcaattgttgcttaaaccatggtgtatttccagagctgtgtatcagatgaccgaaggccgcagatgtcaagtgcatctgttggatgatcgcaagctcgagctgctcgtccagccgaagctcttagccaaggagctgctggatctcgtggccagtcatttcaatttgaaggagaaggaatattttgggatcgcttttaccgacgagacaggccatctgaactggttgcagctcgatcgcagagttctcgagcatgattttccaaagaaaagcggaccggttgtgctgtacttttgtgtgaggttctacattgagagtatcagctacctgaaagataacgcaacgatagagttatttttcttaaacgcaaaatcttgtatctataaggaacttattgacgtggacagcgaggtggtgtttgagctggccagctatatactccaggaggccaagggagatttcagtagtaacgaggtggtgagatctgatctgaagaaactgccagcactgcctacccaagctctgaaagaacacccatccttagcgtattgcgaagacagggtcattgagcattacaagaagcttaacggccagacgaggggccaggccattgtgaattacatgagcattgtcgagtcgctgccaacctatggtgtacactactacgccgtgaaggataaacagggaatcccttggtggctcggtctaagttacaagggcatctttcagtatgattaccatgacaaggttaagccaaggaagatcttccagtggaggcagctagaaaacttgtacttcagggagaagaaattctctgtagaagtccatgacccacggcgcgctagcgtcacgagacgcactttcggtcacagtggtattgcagtgcacacatggtacgcctgccccgcactgatcaagagcatctgggccatggctatttcccagcatcagttttatttggacagaaaacaatcgaaatctaaaatacacgccgcaaggagcctctcagagatcgctatcgatctgactgagacgggcacacttaagacttctaagctagccaatatgggttccaaaggcaaaatcatctcaggctctagtggatccctcctgagctccggctcacaggaaagtgacagttcccagtcagccaaaaaggatatgcttgcagcactcaagagtcgccaggaagccctggaagagaccctgcgacagcgtctcgaggaactgaagaaactgtgcctgcgtgaagccgaactgactgggaaacttccagttgaatatcccttagaccccggcgaagaaccccctatcgtaaggcggcgcatcggaacagccttcaagctagatgaacagaagatcctgccaaaaggcgaggaagccgaactggagcggctagagcgagagttcgccatccagagtcaaattaccgaagcagctaggcgtttggcctccgatcccaacgtatccaaaaaactgtag

SEQ ID NO: 13989 - DNA, 1605 bp, synthetic construct
  source 1..1605: mol_type = other DNA; note = Synthetic coding sequence
atgaaacaggagggtagcgctcgaaggagaggcgccgacaaggcaaaacctcccccgggagggggggagcaggagccacctcctccacccgccccgcaagacgtcgaaatgaaagaagaagccgcaactgggggtggttccacaggagaggccgacggaaaaacggctgcagccgcagccgaacattcccagcgggagcttgataccgtgaccctggaggacataaaggagcacgttaaacagcttgagaaggccgtctccggtaaggaacctcgcttcgttctgagagccctaaggatgctacctagtaccagcagaaggcttaaccattacgtgctgtataaagccgtccagggattctttaccagcaacaatgcaactcgcgacttcctgctccccttcctcgaggagccaatggacacggaggctgacctccagtttaggccaagaacaggcaaagccgcctctacccctctgctgcccgaagtggaagcctacctgcagctcctggtggtcatatttatgatgaatagtaagaggtacaaggaagctcaaaagatttctgatgaccttatgcagaagattagtacccagaatcgacgtgctttggaccttgtagccgctaaatgctattactaccacgcacgtgtatacgaattcttagacaagctggacgtcgtacggagcttccttcacgccaggctgcgaactgccacactgcgacacgatgcggatggccaagccactcttctgaacttgctgctgcgaaactacctgcactactcactttacgaccaagccgaaaagcttgtgagcaaaagcgtgttccccgagcaggcaaataacaacgagtgggcacggtacctgtactatactggccgcatcaaggctatccagctcgagtatagtgaggcacggaggacaatgaccaacgccctccgtaaagcaccccagcataccgctgtgggattcaaacagactgtgcacaaactactgatagttgttgagctcttattaggagagattcccgacagactgcagtttcgtcaaccaagcctgaaacgatcgctgatgccctacttccttttgactcaggcggtacgcaccggaaatctggccaaatttaaccaagtcctagaccagttcggggagaaattccaggctgatggtacctatacattgattatccgccttagacacaatgtcattaagactggggtgcgcatgatttctttaagttattccaggatcagtctggccgatatagcacagaaactgcaactcgattcacccgaggacgccgaattcatcgttgccaaagcgatcagggatggcgtaattgaggcaagtatcaatcatgagaagggctatgtgcaaagtaaagaaatgattgatatttacagcactcgcgagccccagcttgcatttcaccagcgtatctcattttgtctggatatccacaatatgtccgtcaaggcgatgaggtttccccctaaatcctataataaggacttggagagcgctgaagaacgccgcgagagagaacagcaggatctggaattcgctaaagagatggcagaggacgatgacgattctttcccctag

SEQ ID NO: 13990 - DNA, 1311 bp, synthetic construct
  source 1..1311: mol_type = other DNA; note = Synthetic coding sequence
atgcgacgcgacgtgaacggtgttaccaagagccggtttgaaatgtttagcaattccgacgaagccgtgataaataagaagctgcccaaggaactgctgctgcggatcttttctttcctagatgtggtaacgctgtgtagatgtgcccaggtaagcagagcctggaacgtgcttgcactcgatggctcaaattggcaaaggatcgatctctttgactttcaacgggacattgaagggagagtcgttgagaacatctccaagcggtgcggggggttcctgcgcaaactgagtctgagagggtgcttaggcgtgggcgataatgcactgcgcaccttcgctcagaactgtcgcaacatcgaagtcctcaatttgaatggctgtacgaaaactacagacgctacctgtacctccttatcgaagttctgcagtaaactgaggcacttagatctcgccagttgcactagcattacgaatatgagtctaaaagcccttagtgaagggtgtcctctgctggagcaattgaacatctcctggtgcgaccaggtgactaaggatgggatccaagccctggtgcgaggatgcggtggattaaaagctctctttctgaaagggtgcacacagcttgaagatgaagcccttaagtatatcggcgcccattgtccagaattagtcactcttaatctgcagacgtgtctccagatcactgacgaaggactgattactatttgtcgaggctgtcacaagcttcaaagcctctgcgcttccgggtgcagcaacataacggatgcaatcctcaatgcactaggccagaactgtccgcggttgagaattctcgaagtggctagatgctctcagctaaccgatgtgggcttcaccacactggcgcggaattgtcacgaactggaaaaaatggatttagaagaatgtgtgcagatcaccgactccaccctcattcagctgtctatccattgccctcggttacaggttctgtctttgagccattgcgagctgataacagatgatgggattcggcatcttgggaatggggcatgtgcacacgaccaacttgaggtcatcgagctggataactgtcccctgataacagacgcctctcttgaacatttaaaaagttgtcattcactggaacggattgaactatacgactgtcagcaaatcacccgcgccggcattaagcgactccgcacccacctgcctaatatcaaagtacacgcctatttcgcgccagtaacgccacctccatcagtcggcggtagccggcagcgcttctgtagatgctgtattattctgtag

SEQ ID NO: 13991 - DNA, 1167 bp, synthetic construct
  source 1..1167: mol_type = other DNA; note = Synthetic coding sequence
atgcggtgcctctacggtcgagtggggggcgcccggcggaaaatggccgcaagtgctgcagccgcagagcttcaggcctccgggggccccagacaccctgtgtgcctgctcgttcttggcatggctggtagtggtaaaaccacctttgtgcagaggttgacaggccatctccatgcacagggcacgccgccttacgtgatcaatttagacccagctgttcatgaggtaccctttcccgccaatattgacatccgggatactgtcaagtataaggaggtaatgaagcagtacggactcggccccaatggcggcatagtcaccagcctgaatctgtttgcaacgcgattcgatcaggtgatgaagtttatagagaaggcacagaatatgtctaagtatgtcctgatcgatacccccggacagattgaagttttcacatggtctgccagtggcacgatcattacagaggccctggcatctagtttccctaccgttgtgatctatgtgatggatacatctaggtccacaaatcctgtgacattcatgtccaatatgctgtatgcttgttctatactctataaaacgaaactaccatttatcgtggtcatgaataagactgatataattgaccactcatttgctgtagagtggatgcaggatttcgaagccttccaagatgccctaaatcaagagactacatacgtgtccaacctgacaagatcaatgagtctcgtgctcgatgagttctactcgtcacttagagtggtgggcgtgagcgccgtccttggcacggggctggacgagctgttcgtgcaggtgacatctgctgctgaagagtatgaacgcgaatacaggccagaatacgagcgacttaaaaaaagcctggccaatgcagagtcccagcagcaacgcgagcaactagaacgactcagaaaagatatgggctcggtggctctggacgctggcacggccaaggactccttgtcacccgtcttgcatcctagcgacttgatcttgacccggggcacattggatgaagaagacgaggaagctgacagtgataccgacgatattgaccaccgggtcactgaggagagccacgaggagccagccttccagaacttcatgcaagagtcaatggcacaatactggaaacgtaacaacaaatag

SEQ ID NO: 13992 - DNA, 1668 bp, synthetic construct
  source 1..1668: mol_type = other DNA; note = Synthetic coding sequence
atgagactgattggaatgccaaaggagaaatacgatccccctgatccacgcagaatctatacgatcatgagcgccgaggaggtggccaacggtaaaaagagccattgggccgagttggaaatcagcgggagagtgcgatccctctcaacttctctctggagcctcacccatctgacagcattgcacctgaacgataattacctgtccagaattccgccggatatcgcgaaactccacaatctagtctatctggacttgtcttctaacaaactgaggagccttccggctgagctcgggaatatggtgagcctgagagaactgttgctcaacaacaatctcctccgagttctaccctatgagctcggaaggttatttcaactgcagacactgggactgaaaggcaacccattgagccaggacatcctgaacctgtaccaagacccagacgggactcggaagcttctcaattttatgctggacaatctcgcagtgcatcctgagcagttgcccccgcggccatggatcacactgaaggaaagggaccagatcttacctagcgcctcatttaccgtgatgtgctataacgttctctgcgataagtacgctacccggcagctgtacggttactgtccttcctgggccttaaattgggagtaccgtaaaaagggtattatggaggaaatcgtgaactgcgacgccgatataatttccttacaggaggtggagacagagcagtattttaccctcttccttcccgctctgaaggaacgggggtacgacggctttttctcccccaagtcacgggcaaagatcatgagcgaacaggaacggaagcatgtggatggctgcgcgatcttttttaagactgaaaagttcacactcgttcagaaacatactgtcgaattcaaccaagtagcaatggccaacagcgacggctctgaggctatgctgaatagggtaatgacaaaggataacatcggagtcgctgtagtactggaagtccataaagaactatttggagctggcatgaagccgattcatgcagcggataagcagctgctcattgtggctaacgctcatatgcattgggatcctgagtactccgacgtcaaacttatccagactatgatgttcgtttctgaagtgaagaacatattggaaaaggcctctagtcgccccggctcccctaccgccgatcctaacagcattccattggttctctgtgccgatcttaatagccttccggacagcggggtcgtagaatacctctctaacgggggcgtagccgataaccacaaagactttaaagaactgcggtataacgagtgtctgatgaatttcagttgtaacggaaagaatgggtccagtgaggggaggatcacgcacgggttccagttgaagtctgcctatgaaaacaatctgatgccttacaccaattataccttcgatttcaaaggcgtgattgactacatcttctacagcaagacgcacatgaatgtgctcggggttcttgggccactggaccctcaatggttggtggagaataatatcaccggctgcccacaccctcacataccatctgaccatttcagtctgctcacacagttggagctgcaccctccactgctgccattggtaaacggggtgcatctccctaaccgccgctag

SEQ ID NO: 13993 - DNA, 2673 bp, synthetic construct
  source 1..2673: mol_type = other DNA; note = Synthetic coding sequence
tcatcggactcagaaatcattggctacgctttggacacactttacaacattatttcaaacgaagaagaggaggaggtggaagagaactccacgcgacagagtgaggatctgggatcgcagttcactgagatctttattaaacagcaggagaacgtgacattgctcttgagtctgctggaggagttcgacttccatgtgaggtggcctggtgtaaaattgctaacttccttactgaaacagcttggcccacaggtccagcaaattatcctcgtcagtccaatgggggtatcaagactgatggatttgcttgccgatagcagagaggtgatcagaaacgacggagtactgcttcttcaggctctcaccagatctaacggggcaatccagaagatcgtggcgttcgaaaatgctttcgaacgcttgctcgacataatctctgaggagggaaattcggacggcgggattgtagtagaggattgcctgattctgcttcaaaatctgctgaaaaacaataactcaaatcagaattttttcaaggaaggtagctatatacaacgtatgaaaccatggttcgaagttggggacgaaaattcaggttggtccgcacaaaaggttaccaatctccatctcatgctgcagctcgttcgcgtgctggtatcacccacaaatccacccggtgcaacctcttcatgccagaaggccatgttccagtgcggcctcctccagcaactctgcacaatactgatggccacaggagttcctgccgacatcttaacagaaactattaatacagtgagcgaggtgattcgcggatgtcaagtgaatcaggactattttgcctcagttaatgcaccctccaacccaccaaggccagcaatcgtagtcctacttatgtcaatggtgaacgagcggcagcccttcgttctgcgctgtgctgtactgtactgtttccagtgcttcctctataaaaaccagaaaggccagggcgagattgtcagcacactgcttccgtccactattgatgcaaccgggaatagcgtcagcgctgggcaactgttgtgcgggggcctcttttccaccgattccttaagtaactggtgcgccgctgtggcactggcccatgcattgcaagaaaatgccacccagaaggaacagctgcttagagtgcaactggcaaccagtattggcaacccacctgtatccttgctgcaacagtgcacaaacattctctcacagggcagcaagatccagacacgggtgggcctgctgatgctgctgtgcacctggctgagcaactgcccgatcgctgttacccacttcctccataattctgctaacgtcccgttccttacaggacagatcgcggagaatcttggagaggaggaacagctcgtccaaggactgtgcgctcttctgctgggtatctctatctatttcaacgataattccctggagtcgtacatgaaggagaaactgaagcaactgattgaaaaaaggattgggaaggagaatttcattgaaaagcttggatttatttccaaacatgaactttactccagagcctctcagaaaccgcaaccgaattttccaagccccgagtacatgatctttgatcatgagttcaccaaactcgtcaaggagctggagggcgtgatcaccaaggcaatttacaagtccagtgaggaagataagaaggaagaggaggtaaagaagacccttgagcagcacgacaatatcgtcacacattacaagaatatgatacgcgaacaggatctgcagctggaggagttgagacagcaggtgagcactttgaagtgtcagaacgagcagcttcagaccgctgtcacccagcaagtcagtcagatccagcagcacaaagatcagtacaacctgctcaagattcagctcgggaaagataatcagcatcagggctcctacagcgaaggcgcacaaatgaatgggatacagccagaagagatcggacgactccgtgaggagatagaagaactgaagcgcaatcaagaactgctgcaatcacaactgactgagaaggattctatgatcgagaacatgaaaagtagtcaaaccagcgggacaaatgagcagtccagtgcgatagtcagtgcacgcgattccgagcaggtggccgagttaaaacaggaactggcaacgttaaagagtcaactcaactcacagtcagtggagatcacaaaattacagaccgagaagcaggagctgttgcagaaaacagaggccttcgccaaaagcgtcgaagtccagggggagacagagacgatcatcgctactaaaacaactgacgtcgaaggccgactcagtgcactgctgcaggagacaaaggagctgaagaatgagatcaaagcgctatccgaagagcggaccgccattaaagagcagttggactccagcaacagtaccatagcgatcttgcagacagagaaggataagttggagctcgagattactgactccaagaaagagcaggatgatctcttggtgctcctggcagaccaggatcagaaaattctttctctaaagaataaactcaaagatctggggcaccccgtggaggaggaagacgagctggagagcggtgatcaggaggacgaagacgacgaatcagaggacccaggcaaagatttggaccatatttag

SEQ ID NO: 13994 - DNA, 1944 bp, synthetic construct
  source 1..1944: mol_type = other DNA; note = Synthetic coding sequence
atggcccgtgctgggccacggttagtcctgtctgaagaagcggtacgggcaaagagtggtctgggtcctcaccgcgatcttgctgagctgcaaagcctgagcatacctggaacatatcaggagaagataacgcatctcgggcactccttgatgtccctcaccggcttaaagtcacttgacctctcccggaactcgctggtttccttggaggggattcagtatcttacagccctggaatccctgaacctttattacaattgcatttcttcactggcagaagtatttaggctgcacgctctgacggagcttgtcgatgtggacttccggctcaatcctgtagtgaaagtggaacctgactacaggttgttcgtggtgcatctgctcccgaagctgcaacagctcgatgatagaccagtcagagcaagtgagaggaaggctagccggctgcatttcgcttccgaagatagtctggactctaaggagagtgtgcctgcgagcttaaaagaggggcggccccatcacccccgagccaaatgtacggaggctctcgcaaagcagtctttggtgatggacgccgatgatgaggccgtcctcaacctgatcgccgaatgcgagtgggacctgggcagacccccgggatccacttcattttctcagaaaggacgtgaagctgatagcaggggatcccaggagtccagacatttgctctccccacagcttgtacaataccagtgcggggactccggaaagcaggggagagagacaagacggtcctcctgcaggggctgttgtctggaaaaaatgccttggagccagttatgtggcgagcttcccccactgtacggcgctgaaccggaagctagccgcgcccctcggccccacacatattttaccccccatcccgactctatggacacagaggattctgccagctctcagaagctcgacctgagcggtgagatggtgcccggcccccttccagctcccggaaagtgcaggaagaggagaatgcccgtggggaggttccaaacattcagtgaccaggagggattaggctgtcctgagcgaacgcatggtagctcagttcccaaggagagccttagcagacaggactcctccgagagccggaatggcagaactttgtcccagcctgaggcaagcgaaacggaagagcagaggagtaggggggtcaccgatactcgcgaaccgagtccaggaagccacagcgccctgcccggtaaaaagacagcgctgcaggctgcattactggaaaccttgctggacctggtcgataggagttggggtgggtgccgtagcttgcacagcaatgaggcattccttgcacaggcccgacacatactgagtagtgtcgaggagtttacggcagcccaggattccagcgccatggtgggcgaagacgtgggcagtttagcgctggagagcaaatcgcttcagagtagactggctgagcagcagcagcagcatgcacgcgaaatgtcagaggtgaccgccgagttgcatcatacccataaggagctcgacgatttacggcaacacctggacaaatccctagaagagaactcacgccttaaatccctactgctctcaatgaagaaagaggtgaaaagtgcagacaccgcagcgacccttaatcttcaaatcgcagggttacagacctccgtgaaaagactgtgcggagagatcgtggaactcaagcagcacttggaacactacgacaagatccaggagctcacgcaaatgctccaggagtctcattctagcctcgtctcaaccaatgagcaccttttgcaggagttgtcccaggtccgggcccaacatagggctgaggtggagcagatgcattggagttaccaggagctgaagaaaaccatggcactcttcccccacagtagtgcttctcacggcggctgtcaggcctgttag

SEQ ID NO: 13995 - DNA, 777 bp, synthetic construct
  source 1..777: mol_type = other DNA; note = Synthetic coding sequence
atggccgagacagaagagagatctcttgataattttttcgccaaacgtgataaaaagaagaagaaggaacgctccaatcgggccgcaagcgccgctggcgctgcagggagcgcagggggctccagcggcgccgccggcgcggctggggggggcgccggggcagggacaaggcccggcgacggaggaactgcctccgccggggccgctggacctggggccgcgaccaaagctgtaaccaaggatgaagatgagtggaaggagctggagcagaaagaggtggactactccggattacgagtgcaggctatgcagatatcaagcgagaaggaggaagatgacaatgagaagcggcaggatccaggggacaactgggaggagggaggagggggcggagggggcatggagaaaagcagtgggccctggaataaaactgctcctgtacaagcacctcctgctcctgtgatagtgaccgaaacccctgaaccggctatgacgagcggtgtatataggcctccgggggcgcgccttacgacaacacgcaagacccctcagggacccccagagatctactcggatacacagttcccaagtttgcagagtaccgcaaagcacgtcgaaagtcgaaaagacaaagagatggagaagagtttcgaggtagtcagacacaaaaaccgaggtcgtgatgaagtgagtaagaaccaggcactgaaactacaacttgacaatcagtatgcagtcctcgagaatcagaagtccagccacagtcagtataactag

SEQ ID NO: 13996 - DNA, 1077 bp, synthetic construct
  source 1..1077: mol_type = other DNA; note = Synthetic coding sequence
atggcccctcaaaacctgagcacattttgcctactgttgctctacctgattggcgcggtgatcgctggtcgtgatttctacaagatcctgggagtgccccgcagcgcatctataaaggatattaagaaggcttatagaaaattagctctccaattacacccagatcgcaaccctgacgatccgcaggcacaagagaagttccaggatttgggagcagcctatgaggtgctgtccgattccgagaaacgcaagcagtacgacacgtatggagaagaaggcctgaaggatggccatcagagctcacacggcgatatattctcacatttcttcggtgattttgggtttatgtttgggggaactcctcggcagcaagataggaatataccacgggggtccgacataattgtggatcttgaagtgacactagaagaagtgtacgccggaaactttgtcgaagtggtgaggaacaagccagtggctagacaggccccgggtaagagaaagtgtaattgccgccaggaaatgcgtacaacacagctgggcccgggacgcttccagatgacgcaagaagttgtttgtgacgaatgccctaatgtgaaactcgtcaatgaggagcggactctcgaggtcgagatcgagcccggcgtccgagatgggatggagtaccccttcatcggggagggcgagccccacgtcgacggcgagcctggcgatctgcgctttcgcataaaggtcgtcaaacaccctatctttgaacgccgcggcgacgacctgtataccaatgttacaattagcttggtggagagtcttgtaggcttcgagatggatattactcatctggacgggcacaaagtccacatatcacgagataaaataacccgccctggcgccaagctttggaaaaaaggcgagggtctcccaaacttcgacaataacaatattaaaggcagcttgattatcacgttcgatgttgatttccccaaagagcaactgacagaagaagcgcgcgaaggcattaaacagttgctaaagcagggtagcgtgcagaaagtttacaatggcctgcaggggtactag

SEQ ID NO: 13997 - DNA, 624 bp, synthetic construct
  source 1..624: mol_type = other DNA; note = Synthetic coding sequence
atgacatcacgcaaaaaagtcctgttgaaagtgattattttgggggacagcggtgtggggaagacctctctcatgaatcagtacgtcaacaagaaattctccaatcagtacaaagcgactattggcgccgactttctcacgaaggaagtgatggtcgatgaccgcctcgtcaccatgcagatctgggacactgctggacaagaacgatttcaaagccttggtgtagcattttatcgcggcgccgattgttgcgtcttagtgttcgacgttacggctcccaacacctttaagactttggacagctggagggacgaatttctaatccaggcttctccgcgtgatccggaaaattttccttttgtcgttctgggaaataagatcgacctggagaacaggcaggtcgctaccaaacgggcccaggcctggtgttactcaaaaaacaacatcccttatttcgaaacgtcagcaaaagaggccatcaatgtggaacaggctttccagaccatcgccaggaacgccttaaagcaggaaaccgaagtggagctctacaatgagttcccggagcccatcaagctggataaaaacgatagagccaaagcctcagccgagagctgtagctgctag

SEQ ID NO: 13998 - DNA, 3225 bp, synthetic construct
  source 1..3225: mol_type = other DNA; note = Synthetic coding sequence
atgatacctatctgcccagtggtatccttcacatatgtgccgtcacgcctgggcgaagacgccaagatggccacaggcaactatttcgggtttactcatagcggagcagctgcggccgccgccgctgcccaatactcacagcaacccgctagtggagtggcttattcgcacccaactactgtggccagttacactgtccaccaggcccccgtcgctgcccacacagtgaccgccgcgtatgcccccgctgccgcaacggtggctgtggcaagaccagcccccgtggccgtggccgcagccgccacagcagccgcctatggcggctatccgactgctcatacagctacggattacggttacacacagcgacagcaggaggctccacctccccctcccccagccactacccaaaactatcaagactcttattcctatgtgcgttctaccgcccctgccgtggcctatgactctaagcagtattatcagcaacccacagctaccgcggccgctgtggcagctgctgctcagcctcagccctctgtcgctgagacttattaccagactgcgcccaaagccggctatagccaaggcgcaacccagtatactcaggcacaacagactaggcaggttacagccattaagcctgcaaccccctctcctgccacaactacattcagcatctaccccgtgtcttcaaccgtccagccagtggcagccgccgccaccgtggttcccagctacacacagtcagccacatatagtaccacagctgtgacttatagcggcacctcatactccggatatgaggccgcggtgtacagcgccgcgagctcttactatcagcagcagcagcagcagcagaagcaagcagccgcagcagctgccgccgctgcagccaccgccgcatggacaggtacaacttttacaaaaaaagctcccttccagaacaagcagctaaagccgaagcagcctccaaaaccccctcagatccattactgtgatgtgtgcaaaatttcatgtgccggaccacagacctataaagagcatctcgagggccagaaacataaaaagaaagaggcagcactcaaagcttcccagaacacatcttccagcaactcatcaaccaggggaacgcagaatcaactgaggtgtgaactatgtgacgtttcttgtaccggtgctgatgcttacgccgcccacatcagaggggccaagcatcaaaaagtagttaagctgcacacaaagttgggtaagcccatcccctcgactgaacctaacgtagtatcccaagccacctcctctactgccgtctccgcgtctaaacctaccgctagtccctcttcaattgcagccaacaactgcactgtcaacactagttccgtggctaccagcagtatgaagggcctgaccaccaccggtaacagcagtctgaactctacaagtaatactaaggtctcagcagtgcctacaaatatggctgctaaaaaaacctctacacctaagattaacttcgtaggaggaaataaactccagtcaacagggaataaagctgaggatatcaaaggaaccgaatgcgtaaagtctacccctgtgacctctgctgtgcagattcccgaggtgaagcaggacacagtatccgaaccagtgacacccgcttctctggcagcactccagagcgatgtgcagcctgtaggtcacgattatgtagaggaggtcaggaatgatgagggcaaggtcatcagattccactgtaaactgtgtgaatgcagcttcaacgacccaaacgcgaaagaaatgcacctgaagggaagaagacatcgcttgcagtataagaaaaaagtcaaccctgaccttcaggtagaagtgaagcctagtattagggcgagaaagatacaggaagagaagatgaggaaacagatgcaaaaggaggaatactggaggcgtagggaagaggaagaacgatggcggatggaaatgagacgatatgaagaagatatgtactggcgaagaatggaagaggagcaacaccactgggatgacaggcggcggatgccagacggcggatacccccacggtcccccaggccccttggggttgctgggagtgcgtcccgggatgccccctcagcctcagggtccggcaccacttcgcaggccagactctagcgatgataggtatgttatgacaaaacacgctacaatctatccaactgaagaagaactccaagcggtgcagaaaattgttagcatcactgagagggcccttaaattggtttcagacagtctgtcagaacatgaaaagaacaaaaataaagaaggagacgacaagaaggagggggggaaggaccgggccctcaaaggtgtcttgagggtgggtgtgcttgccaaagggcttcttctccggggtgaccgtaacgtcaatctggtgctgctgtgttctgagaagccctcaaaaactcttctctctagaattgccgagaacctgccaaagcagctcgctgtgatttcacccgagaagtacgatattaaatgtgctgtaagcgaggccgctatcatccttaacagttgcgtagagcccaagatgcaggtaaccatcactctgacctccccaatcatccgcgaagaaaacatgcgcgagggggatgtgactagcggcatggtcaaagaccctcccgacgtcctcgaccggcagaagtgtctggatgctctggcggcactgcggcacgctaaatggttccaggctagagccaatggacttcagtcctgtgtgatcataattcgcattctcagagatctgtgtcaacgcgtccctacttggtccgactttccttcctgggctatggagttacttgtggaaaaggctattagctccgcgagctcgccacagtcaccaggggatgcattgcgacgcgtgtttgaatgtattagctctggaatcattcttaagggatctcctgggctccttgatccttgcgaaaaggaccccttcgacacattggcgacaatgactgaccaacagcgggaagatatcacttcctcagcccagtttgcgctccggcttttggcttttcgacagattcacaaagtgcttggcatggatcctctgccccagatgagtcagcgctttaacattcataacaacagaaagcggcgacgcgactctgatggggtcgatggcttcgaagccgaggggaaaaaagataagaaggactacgacaatttttag

SEQ ID NO: 13999 - DNA, 438 bp, synthetic construct
  source 1..438: mol_type = other DNA; note = Synthetic coding sequence
atgaagttcaacccctttgtcacttccgatagatcaaagaataggaagcggcactttaacgcgcctagtcacgtgcggcggaagataatgagctcaccgctgtcaaaggaactcagacaaaaatacaacgtgagaagcatgcctattcgaaaggacgacgaggtgcaggtggtaagagggcactacaagggccagcagatcggtaaggtcgtacaggtgtacagaaagaagtacgtcatctatatagagagggttcagagagagaaggccaacggcaccactgtccatgtcggaatccaccctagtaaagttgtcattacgaggctgaaattggacaaagatcgcaaaaagatactggagagaaaagccaagtcccgccaggtcggaaaggagaaaggcaagtataaggaagagctcatagagaaaatgcaggaatag

SEQ ID NO: 14000 - DNA, 3177 bp, synthetic construct
  source 1..3177: mol_type = other DNA; note = Synthetic coding sequence
atggaggacggaacgcctaagcacatcattcagatgactgggtttaaaatggaggagaaagaagcactggttaaactcttgctgaagctagattgcacgttcatcaagtctgaaaagtataagaactgcacacacttgatcgccgagcggctttgtaaatcagagaaatttctggctgcatgtgccgccggtaagtggatcctcaccaaagactatatcattcactcagccaagagtggacgttggctggatgagaccacttatgaatggggctataaaattgagaaggactcaagatattcgccacagatgcaaagcgcccctaaaagatggcgcgaggaactgaagcgtactggggcgcccggagccttccaccgctggaaagtggtcttactcgtgcgcaccgacaagaggagcgatagcctgattcgtgtgctggaagctgggaaagcaaacgttattctgcctaaatcttccccttctggcataacacacgttatcgccagcaatgcaaggatcaaggccgaaaaagaaaaagacaatttcaaagctccattctatcccatccagtacttgggcgacttcctgctagagaaagagattcagaatgacgaggatagccagacaaacagcgtttggacggagcacagtaatgaggaaaccaacaaggactttcgcaaggatgccggattcctggagatgaagggagcactccgcgaaactatgtatcgtactcagaaagaaatgcagaatcacgaggacgttaacgttgggtcaatcttgattcagcaccacaaaaaagagaaattctctggttcatccaaggacctcaaatttgtaaaaatgcggaatactttcgggtcacacacttacgaaaaccagaaagagatcaagaaaaaagacgaggacatccagcggagctatacactcagaaggaaacgcaaaaaaggaaaagagagcaactgtaagaagggagttgagcacgaaaagataaagtcaacactccggaggcatatatataaccgggaccagaaggaaatgaaaaacagtatattcgctgagtatgcgaaggaaagcaaggccatggccattaagaccgacgtggacgtcgtggaaataaagaacaccctgagaaagcatatctacagagcacaggccgttcgctataactgcatccgcattgacaagcaaccggtgtataacgtggaggtgaaaaacgccgaattcccacgcggggtcctcaaccttattgagagtctgattgaaggccatttcttcaaagaggcaatcgaggagctgtccacactccaagcacattacatcccccctgtatgcgttctgcatgctctgttagagaatgttcttcaggataacatagatacattttcaggcagatacttccatatcctctcagctttgttacacttgcatccaccatggaagtcaccggcaatgtcccggtactatctcgaattattccagtgtccaacctgtatgaaaggcgcttggagtctcgtcgaggtgcttatcaggagctgcttgttcaacgaaagcttttgccatcagatatcggaaaatatcgggtccaaggtgctgcatctgacactgctcaagttttttttcaatctaattgaatccgaagtacagcacctgagccaaaagctgtatgattggtcagattcccagaacttaaagattacgggcaaggccatgctgcttgagatcttctggtccggctctgagacctccggactgctgaccaaacccgttaacatgctattagagtggaccatatactcccataaagaaaaatttaagagtaacgatgtgttcaaacacgagctggcttacctgcttgccggcatattgggtgccgctatcgattattggattttcctggggttgaagatggggaggaacgtaatgaggcatatgagcgatgatttgggatcctacgtgtcactgtcctgcgatgatttcagctctcaagagctcgagatctttatctgcagtttctcttccagttggctgcagatgtttgtggccgaggctgtttttaaaaaactgtgcctccaatccagtggatctgtgtcaagcgaaccccttagccttcagaaaatggtgtatagttatcttccagccctcggaaagaccggcgttctcggttcaggcaaaattcaggtctctaaaaaaatcggccaacgcccctgctttgatagccagcgcactctactgatgctcaacgggaccaaacagaagcaagttgaggggctcccagaacttctcgacctgaatctggccaaatgctcaagcagtttgaaaaagctgaaaaaaaaatccgagggggagctgtcctgttcaaaagaaaattgccccagtgttgtgaagaagatgaacttccacaagaccaatttgaaaggagagacggccttgcaccgggcatgcattaacaatcaagtagaaaagcttattctcctcctgagcctgcccgggattgacatcaatgtgaaggacaatgcaggatggacaccactccacgaagcatgtaattacgggaatactgtgtgcgtccaggaaatcctgcagcggtgccctgaagtggacttgctaacccaagtcgatggcgtgacacctctgcacgacgcgttatccaacgggcacgtggaaataggtaagctgttgttgcagcatggtggacccgtgctgctccagcagcgaaacgccaagggggaactgcctcttgactatgttgtctcaccgcagattaaggaggagctgtttgcaattactaaaattgaggacacggtggagaattttcacgcacaggccgagaagcactttcactaccagcagctggaatttggctcctttctcctgtcccgaatgctgctcaacttttgctctatttttgacttgtcaagtgagttcatccttgcttccaagggcctaactcacctcaacgaactcctgatggcctgtaaatcccacaaggagactacttccgtgcataccgattggctgctcgatctctatgctggcaacatcaagacgctgcaaaaacttcctcacattttgaaggaacttcctgagaatcttaaagtgtgtccaggggttcacaccgaagccctgatgattactctcgagatgatgtgcaggagcgtcatggaattctcctag

SEQ ID NO: 14001 - DNA, 660 bp, synthetic construct
  source 1..660: mol_type = other DNA; note = Synthetic coding sequence
atggagcccaaggaggctacaggcaaggagaacatggtcacaaagaagaagaatctggcttttctgcgatcccggttgtacatgttggagcgtcgcaagacagacactgttgttgagagctcagtgtcaggtgatcactccggtacattgagacggagccagtctgatcgcactgaatacaaccagaaattacaggaaaagatgaccccacaaggggagtgctccgtcgcagaaacactgactcctgaggaggaacaccatatgaaacgtatgatggccaagcgggagaaaatcattaaagaactgatccagactgagaaggattacctgaacgacctcgaactgtgcgtgagagaggttgtacagcctttaagaaacaaaaagaccgataggctagacgtggattcacttttctcaaatatcgagagcgtacaccagatctccgcaaagcttttgtctttgctagaggaggctaccactgacgtggagccagctatgcaggtgatcggggaagtgtttctgcagatcaaaggacccctggaggacatctacaagatatattgttatcatcacgatgaagcccactccatacttgagtcttatgaaaaagaagaagagcttaaggagcatctgtcacactgcatccagtcgctgaaatag

SEQ ID NO: 14002 - DNA, 3183 bp, synthetic construct
  source 1..3183: mol_type = other DNA; note = Synthetic coding sequence
atgctgatagaagatgtggatgcgcttaagagctggttagccaaactcctggagccaatatgtgacgccgatcctagtgcgctggcgaactatgttgtcgcactcgtgaaaaaggataagccggagaaagaactcaaggcattttgtgcagatcaactcgacgtttttcttcagaaggagacttcaggctttgtcgacaaattattcgagagtctctacacaaagaactatctgcccctgttagagccagtaaaacctgagcctaagcccctcgtccaggagaaggaagaaatcaaagaggaggtctttcaagagcccgcagaggaagaaagggatgggaggaagaagaaatatcccagcccacagaaaaccaggagtgaaagttccgagaggcgcacgcgggaaaagaaacgggaagatggaaaatggcgggactacgaccgctattacgagcgcaacgagctctatcgagagaaatacgattggagacgcggtagatctaaatcgcggtccaagtcaaggggtttgagccgctctagatcgcggtcccgcggacgcagtaaagatcgcgaccccaacagaaatgtcgaacatagagaacgctccaaattcaagagtgagaggaatgacttagaatccagctacgtcccagtgagcgcacctccccccaattcatctgaacagtattcaagcggagcgcagagtattccttccacggtgactgtgatcgctcccgctcaccactccgaaaacacaaccgagtcatggtctaactattataataatcactcaagttctaattcgttcgggcgtaacttgccaccgaagcggcgctgcagggattatgatgagcgtggcttctgcgttctgggagacctttgtcagtttgatcacgggaacgatcctctggtagtagatgaggtagcactgcctagcatgatcccatttcctcccccaccacccgggttgccccctcccccccccccaggaatgttgatgccacctatgccagggcccggccccgggccaggtcctgggccagggcccggccccggtccaggccccgggccgggccattcaatgagactgcctgttcctcagggtcacggacaacccccacctagtgttgtgctgccaatccccaggccacccattactcagagcagtttgattaactcccgggaccaacctgggacgtcagctgtccccaatctggcgtcagtcgggacgcggctgcctccgcccttgccacagaacctgctgtatacggtgtcagagaggcagcctatgtattcacgcgagcatggagcggcggcatccgagaggctccaattaggtacacccccccctctcctcgccgccagattagttcccccccggaaccttatgggttccagtattggctatcatacaagcgtcagcagccccactcctctggtacccgatacctacgagcccgatgggtataaccccgaggcacctagcattaccagctcaggtagatctcaataccggcagttcttcagccgcacacagactcagcggcccaatctgataggactcacctctggggatatggacgtgaatccacgagctgcgaatatcgtgattcagactgagcctcctgttcctgtgagtatcaattcaaacattaccagggtagtgctggagcccgattcacggaaaagggcaatgtccggattggagggacctctgaccaagaagccctggcttggcaagcagggtaacaacaatcagaataagcccgggtttctccgaaaaaaccaatatacgaatacaaagctcgaggtgaagaagatcccccaagagttgaacaacattactaaactgaatgaacatttctcaaaattcggaaccattgtgaacatacaagtcgcctttaagggcgaccccgaggctgccttgattcagtacttgaccaatgaagaggcaagaaaagcaatcagctccacggaagccgtgctcaataatcgcttcatccgagtcctatggcacagggagaacaatgagcaacccaccttgcaatcttccgctcaactcctgttgcaacagcaacagacactgtcacacctgagtcaacagcaccaccacttgccgcagcacctccaccaacagcaggtgctggtggcccagtccgccccaagtactgtccacggcggcatacagaaaatgatgtctaaaccccagacttctggtgcctacgtgctgaacaaggttcccgttaagcaccggctgggtcacgccggtgggaaccagtcagacgcttcccacttgctgaaccaaagcggaggcgctggcgaggattgccaaattttttcaacaccaggccaccctaaaatgatctacagcagctccaatttgaagactccctcaaagctgtgctctggctccaaatcccatgacgtgcaggaagtgctgaagaaaaaacaggaagctatgaagctgcagcaggatatgcgcaagaaaagacaagaggtgctggaaaaacaaattgaatgccagaaaatgctgataagcaaactggaaaagaacaaaaatatgaaacccgaggagcgagcgaacattatgaaaacactgaaggagttgggcgaaaagatctcccaattaaaagacgagcttaagacaagctccgcagtctcaacccccagcaaggtgaaaacaaaaaccgaggcacagaaagagctcctggataccgaattagatttacacaagcgcctgtctagcggggaggataccacagagcttcggaaaaagctcagccagctccaggtggaagctgcccgcctcgggatcctgcccgtcggccgcggcaagactatgtcgtctcaaggcagggggcggggtagggggcgtggaggacgcggtcggggctccctgaatcatatggtcgtggatcatcgacccaaggcactgaccgtgggcggcttcattgaggaagagaaagaggatctgctccagcatttttctaccgcaaatcaaggacctaagtttaaagacaggcgactgcagatatcctggcacaagccaaaggtgcccagcatttctacggagaccgaagaggaggaagttaaagaggaggagacagagacatcagacctgtttctccctgacgatgacgacgaggacgaggatgaatacgaatccaggagctggaggcgatag

SEQ ID NO: 14003 - DNA, 1818 bp, synthetic construct
  source 1..1818: mol_type = other DNA; note = Synthetic coding sequence
atggaggcggacattatcaccaaccttagatgtaggctgaaagaggccgaagaggagcgcttaaaggctgcgcagtatggattacagttagttgagtcccagaatgagcttcagaatcagctggacaagtgccggaatgagatgatgacgatgaccgagtcatacgaacaggagaagtacacactccaacgggaggtggagctgaaatcgaggatgcttgaaagcctgagctgtgagtgcgaggcgatcaagcagcagcagaagatgcatctcgagaagcttgaggagcagttatcccgctcacacggccaggaggtaaacgagctgaagacaaagatagagaagctgaaggtagagcttgacgaagcacggctgagcgaaaagcagctgaagcatcaggttgatcaccagaaggagttgctgtcttgtaagagcgaagaactccgcgtgatgagtgaaagggtacaagagtctatgagctcagaaatgctggccctgcaaattgagctcacagagatggagagcatgaaaactacgttaaaagaagaggtgaacgaactgcagtataggcaggaacagcttgaattgcttatcaccaacctgatgcgccaagtggaccgactgaaagaggagaaggaggagagggagaaagaagcagtcagttattataacgccctggaaaaggcccgcgtggcgaaccaggatctccaggtgcagttggaccaggccctccagcaggccctggacccaaattctaagggaaactctctgtttgctgaggttgaggatcgcagggctgccatggaacgccagcttatctccatgaaagttaaataccagtctctgaagaagcagaacgtttttaatcgtgagcagatgcagcgcatgaagttgcaaattgccactctactccaaatgaagggtagccagactgagtttgagcagcaggaaagactccttgccatgctggagcagaaaaacggcgaaattaagcacctccttggagagatccgaaacttggaaaagtttaagaacctttacgatagtatggaaagcaagccatccgtagattctggtacactggaggacaatacgtattacaccgatttacttcaaatgaagctggataacctgaataaggagatagagtcgacgaaaggcgaactgtcaattcaacggatgaaggcactgtttgagagtcagcgagccttagatatagagagaaaacttttcgcaaacgagcgatgtctgcagctaagtgagagcgagaatatgaaattgcgagctaaactcgacgagcttaagctgaagtacgaaccagaggaaaccgtggaggtgccagttttgaaaaagaggagggaagtgctgcctgttgacattaccactgccaaggacgcctgcgtgaacaactcagccctgggtggtgaagtttacaggttgcctccacagaaggaggagactcagtcttgtcctaactccctcgaggacaataatctgcagttggagaagtcggtttctatctacacaccagtggtctcactgagtccccataagaacctcccagttgatatgcagctcaagaaggaaaaaaagtgcgtcaaattgattggtgtgcccgccgacgccgaggcgctgtctgagcgatccggtaatacgcccaactctccacgcctggctgcggagagtaaactgcagactgaagtcaaggaggggaaagaaactagcagtaaactagagaaagaaacatgtaagaagttgcacccgatcctttatgtctcctccaaaagtacccctgaaacccaatgcccacagcagtag

SEQ ID NO: 14004 - DNA, 888 bp, synthetic construct
  source 1..888: mol_type = other DNA; note = Synthetic coding sequence
atgatggctaagaagcctcctaaaccagctcccagacgcattttccaagaacggctgaaaatcacggctctgcctctgtactttgaggggttcctcctgattaagcggagcgggtacagagaatacgagcattactggactgaactgagaggcaccacactgtttttttacaccgacaagaaatctatcatttacgtggacaagctggacatagtggaccttacatgtctcaccgaacaaaattcgactgaaaaaaactgcgcaaaattcaccctcgttctgccgaaggaggaagtgcagctgaagaccgagaacaccgaatccggcgaggaatggcgggggtttatcctgacagtcaccgaactgtctgtgccacaaaacgtgagtctgctccccggccaggtgatcaagctgcatgaagtactggaacgggagaaaaagagaaggattgaaactgaacaatctacatcagtggagaaggaaaaagagccgaccgaggactatgttgatgtgctcaaccctatgccagcttgtttttacaccgtctcacggaaggaagccactgaaatgcttcagaaaaacccctccctcggaaacatgatcctaaggccagggtctgactcaagaaattattccatcacgatcaggcaggagatcgacatcccgaggattaagcactacaaagttatgtcagtcgggcagaattacaccatcgagctagagaagccagtgaccctccctaacctgttcagtgtgatcgattattttgtgaaggaaactcggggaaatctgcggccctttatttgtagtaccgatgaaaacactggacaagagccaagcatggagggcaggagcgaaaagctgaaaaagaacccacacatcgcatag

SEQ ID NO: 14005 - DNA, 4821 bp, synthetic construct
  source 1..4821: mol_type = other DNA; note = Synthetic coding sequence
atgtttcacatctgccctgcagaaaacctgtaccagaatagatttttaggactcgcagctatggcctcgccatctcgaaactctcagtctcgaaggagatgcaaagaaccactccgatactcttacaaccctgatcagttccataatatggatctcaggggcggtcctcatgacggcgtgaccattcccaggtcaactagtgacactgatcttgttacctcagatagccggagtacacttatggtctcatcatcatattacagcattggccacagtcaggacctggtgatacattgggatattaaagaggaggtggacgcaggggattggattgggatgtatctcatcgacgaggtcctgagtgagaacttcttggattataaaaaccgaggcgtgaacggctcccaccgcggccagattatttggaagatcgatgccagctcctatttcgttgagccagaaaccaaaatttgctttaagtattaccacggggtctcaggagcacttcgggcaaccaccccatctgtgactgtcaagaacagcgccgcaccgatctttaagagtattggcgctgacgaaactgttcaaggccagggatcccggcgcctaatttccttttccctttctgacttccaggccatgggtctcaagaaggggatgtttttcaatcctgacccctatctgaagatttccatccagccaggaaagcactctatcttcccagctctcccccaccacggccaagagagaagatctaagataatcggcaatacagtgaaccctatatggcaggcagagcagttctcctttgtcagcttgcccacagacgtgctggaaattgaagtaaaagacaagttcgccaagagcaggcctatcatcaagcgatttctgggaaagctgagcatgccagtgcagagattgttggaaagacatgcgatcggcgatcgggtggtgtcatacacgttaggcagaaggctacccactgaccacgttagcggtcagctgcaatttcgtttcgaaatcaccagtagcatccaccctgcagatgacgaggagatttctttgtctacagaacccgagtctgcacaaattcaggacagtcccatgaacaatctcatggaaagtggctccggtgaacctcgttcagaggctcctgaatctagcgagtcttggaaaccagagcaattgggagagggaagcgttccagacggaccaggtaaccagtccatcgagctgagtaggcccgccgaggaggctgccgtgattaccgaggccggtgatcagggcatggtgagcgtagggcccgagggtgctggcgagctcttagctcaagtgcaaaaggatatacagcctgccccatctgctgaggagctggcagagcagctggatctcggagaagaggccagcgccctgctgctagaagacggtgaagcgcccgcgtccactaaggaagagccccttgaggaagaagcaaccactcaaagtcgagcaggaagagaagaggaagaaaaggagcaggaggaggagggagacgtttctacattggagcaaggagagggcagacttcagcttagggcttcagtaaaacgcaaaagcaggccttgcagtctgcctgtctccgagctagaaactgtgatcgctagcgcttgcggcgaccctgagacaccaaggacacactatattaggatccataccctgctccattccatgccatcagcacaaggaggctccgccgctgaggaagaagacggtgcggaagaagagagcactttaaaagattcctcggaaaaggatgggctcagtgaggtggatacggttgctgctgacccaagcgccctcgaggaggatcgcgaagaacccgagggcgcgacccccggcacggcacaccccggccacagtggaggccacttcccttccctggcaaatggggccgctcaggacggggatacccacccttcaacaggcagtgagtctgactcgtctccacgtcagggcggggaccatagctgcgaggggtgtgacgcttcgtgctgtagtccctcttgttactcttccagttgttacagcacctcctgttactcctcttcctgctacagcgccagttgttactcgccgagttgctataatgggaataggttcgcttcccacacgcggtttagtagtgttgattctgccaagatctcggagtctacagtcttcagcagccaggatgatgaggaggaagagaatagtgcctttgagtcagtgcccgacagtatgcagtctcctgagttggatccagaatcgactaacggcgctgggccgtggcaggatgagcttgctgcgccttccggtcatgtcgaaaggtcccccgagggtttggaatccccagtggctggcccatctaaccgtagagagggtgagtgtcctattttgcacaattcgcaacccgtctcacagttgccctcactgaggcctgaacaccatcattacccaacaattgacgagcctttaccgcccaactgggaagcacgcatcgactctcacggcagggtcttctatgtagaccacgtgaataggaccaccacatggcaaaggcccactgccgccgcaactcctgatgggatgcgccggtctggctctatccagcaaatggagcagctgaaccggcgttatcagaatatccagcgcactatcgccaccgaaaggtccgaagaggactccggtagtcagtcctgcgagcaagcccctgcggggggaggaggcggaggaggatcagattccgaggcagagtcatcccagtcaagtctcgacctccgtagagagggctcactgtcccctgttaattcacagaagattaccctgctcctgcagagtccggcagtgaaatttatcacaaatccggaattcttcaccgtgttgcatgccaattatagtgcctatagggtttttacttcctctacttgcctgaagcacatgatcctgaaagtccgcagagacgcccgaaatttcgagaggtatcagcacaatcgggatctggttaactttattaatatgttcgcagacacgcgcctagagcttcctcgaggctgggagattaaaaccgaccagcaaggtaagtctttttttgtggaccacaatagtagagcgacaacgttcattgatcctaggatcccattgcaaaacggcagactgcctaaccatttgacacacagacagcaccttcaacgtctacgaagttacagcgccggtgaggcgtcggaggtgtccaggaacaggggcgcatcgttgctggccaggccaggccatagtctggtggccgcgattcgctcccagcatcagcatgaatctctgcctcttgcctataatgacaagatcgtggcttttctaaggcagccaaacattttcgagatgctacaggaaaggcaaccgtccctagcccgtaatcacacgctgagggagaaaatccactacattcgcacggaaggcaatcatggtttagagaaactctcctgtgatgcagaccttgtgatactgctgagcctttttgaagaggaaattatgtcttacgtgcccctgcaggcagccttccaccctggctacagcttcagccccagatgtagtccttgtagcagcccacaaaacagtcccggccttcaaagggcctctgcccgcgccccgtccccttatagaagagatttcgaagccaagctccggaacttttatcggaagctggaagctaaaggcttcggccagggacctgggaagattaaactcattattaggcgggaccatttactcgagggaaccttcaaccaggtaatggcttacagccgaaaggaactgcagagaaataagctttacgtgaccttcgtgggtgaagaaggcctcgattactctggccctagccgggaatttttttttctactgtctcaggaacttttcaacccttattacggactgttcgagtactctgcaaatgatacctacactgtgcagatcagcccaatgagcgcgttcgttgagaatcatctggaatggttccgcttctctggcaggattcttgggttagccctcatccaccagtacctcctggacgccttcttcacacgacctttctataaggctctgctgcgcttgccatgtgacctgtccgatctggaatacctggacgaggagtttcaccagagcctgcagtggatgaaggataacaacattactgacattttagatctgaccttcaccgtcaacgaagaggtcttcggccaagtcaccgagagggagctaaaatctggtggagccaacacccaggtcactgaaaagaacaagaaggaatacatcgagcgcatggtcaaatggcgcgtcgaaaggggcgtggttcaacaaacagaggccctagtccgagggttttacgaagtagtggactctcggctggtgtcggtctttgacgcccgcgagttagagttagtgattgccggcaccgcagagatcgacctcaatgattggcgcaacaacaccgagtatcggggaggctatcacgatggccacctcgtgataagatggttttgggcggcagttgagaggttcaacaacgagcagagacttcggttgctccagtttgtgactggaaccagtagcgtgccatacgagggcttcgccgcgctgagaggaagtaatggcctgcgacgtttctgtatcgagaaatggggcaagatcacaagcctgccgagggctcacacctgcttcaacaggctcgatctccccccatacccatcctattccatgctgtatgagaagctgctaactgcagtcgaagagacttcaactttcggactggagtag

SEQ ID NO: 14006 - DNA, 2373 bp, synthetic construct
  source 1..2373: mol_type = other DNA; note = Synthetic coding sequence
atgggtacacggaagaaggtgcatgccttcgtccgcgtgaagccaactgatgatttcgctcatgaaatgatccggtatggggatgataagcgtagtattgacatccacctcaagaaggatatcaggcgaggggtcgtgaacaatcagcagacagactggagttttaagctagacggagttctccacgatgcatcacaggatctggtttacgaaaccgtcgccaaagacgtggtgtcacaggccctggacggttacaatggaaccatcatgtgctacggtcaaaccggcgccggcaaaacatatacaatgatgggagctactgagaactacaaacaccgcggcatcttgcctcgggcactccagcaggtatttcgcatgatcgaagaacgaccaactcatgctatcacggtacgcgtttcctaccttgaaatttataatgagtctctcttcgacctgctatctacgctcccttatgttggtccctctgttactcctatgaccattgttgagaaccctcagggagtgttcataaaaggcctttcagtgcacctcacttctcaggaggaggacgcattcagcttgctgttcgaaggagaaacgaatcgaatcattgcctcgcatacgatgaacaagaactcatctagatcccactgtatatttacaatttacctggaagcacactctcgaactttatccgaagagaaatatatcacctcaaaaatcaatttagtcgatctcgctggctctgagagactaggaaaatctggatctgaggggcaagtcctgaaggaggctacttatatcaacaagagtctgagcttccttgaacaggctatcatcgcactgggtgatcagaagagagaccacatcccttttcggcagtgcaaattgactcacgccctgaaagacagcctcggcggaaactgcaatatggtgctggtgacgaatatctacggagaggccgcgcaactggaggaaactctgtcttccctacgcttcgccagcagaatgaagctggtaaccacagaacctgcaataaatgagaagtacgacgctgagcgcatggtgaagaacctggagaaagagctggcactattaaaacaggagctggccattcacgatagcctgacaaatagaactttcgttacatatgacccaatggacgaaattcagatcgccgagattaacagtcaggtcagaagatacctagagggcacgctggacgaaattgatattatcagcctgagacaaataaaggaggtgtttaaccagtttcgggtagtactgtcccagcaggagcaagaagtcgagtccacactgcgtcgaaaatacacgctcatagataggaacgattttgccgcgatctccgcaatccagaaagcggggctcgtggacgtggatggccacctggtaggagagccagagggacaaaatttcgggctgggggttgccccgttttcgactaaaccaggtaaaaaggctaaatcaaagaagacctttaaggaacctctgtccagcctggcacgcaaggagggggcgtctagccctgttaacgggaaggacctggactacgtgagcacctccaaaactcaattggtccctagcagcaaggatggggatgttaaagacatgctatcgcgagacagagagacatcctccatcgagcccctcccttctgattctccaaaggaagaattaagacctattagaccggacacaccccccagcaagccggtggccttcgaagagtttaaaaacgagcagggatccgagatcaaccgcatcttcaaagaaaataaatcaatacttaacgagaggcggaaaagagcatctgagactacccagcacatcaacgctataaagcgggaaatcgacgtgactaaagaagcgcttaattttcagaaatccctgcgtgagaaacagggcaagtacgaaaataagggcttaatgattattgacgaagaagagtttcttctcatcttgaaattaaaagacctcaagaaacagtaccggtctgagtaccaggacctacgtgatctgcgagcggaaatccagtactgccaacacctggtggaccaatgtaggcatagactcctgatggagtttgatatatggtataacgagagttttgttatcccagaagacatgcaaatggccctgaagcctggagggtctatacggccaggcatggtccctgtgaatagaatcgtttccctgggcgaggatgaccaggacaagttctctcagctgcagcagagggtgctgcctgaagggcccgacagtatctcgttctataacgccaaggtgaagatcgagcaaaaacacaattacctgaaaacaatgatgggtctgcagcaagcccatcggaagtag

SEQ ID NO: 14007 - DNA, 876 bp, synthetic construct
  source 1..876: mol_type = other DNA; note = Synthetic coding sequence
atggcctctgtgaccctgtccgaggctgagaaggtatatattgttcatggtgttcaggaagacctacgggtggacggaaggggatgtgaggattaccgttgtgtcgaggtggagactgacgtcgttagcaatacttcagggtcggctcgggttaaactgggacacacggatattctcgtcggggtgaaggccgagatgggcacccctaaactcgagaagccaaatgagggctacttagagttctttgtggattgttctgcttccgctacgcccgagttcgaaggacgcggtggggatgacctgggaaccgagatcgccaatactctatacagaatttttaataacaaatcatcagttgacctcaagactctgtgcatatcacctcgtgaacactgttgggtcctgtacgtggatgtgctcctcttagaatgcggtgggaatttattcgacgcaatctctattgctgtgaaggctgctctgtttaacacacgtattccgcgagtcagagtactggaagacgaagagggctcaaaagacatagaactgagtgatgacccatacgactgtatcagactctctgtggagaatgtgccctgtattgttacgctctgcaagataggttaccggcacgtagtggatgccactctccaagaagaagcatgtagtctagcctctctgctggtgtccgtaacgtccaagggcgtggtaacgtgcatgagaaaggttggcaagggtagcctcgaccctgaaagtatctttgagatgatggaaactggaaaaagagtgggcaaagtactgcatgcaagtctccagtcagttgttcacaaagaggagtccctggggcctaaaaggcagaaggtcggtttcttgggctag

SEQ ID NO: 14008 - DNA, 2382 bp, synthetic construct
  source 1..2382: mol_type = other DNA; note = Synthetic coding sequence
atgttttggaaattcgatctgcattccagttctcatattgacacactgttggaacgggaagacgtgaccctgaaggagttaatggacgaagaagatgttcttcaggagtgtaaagcccaaaaccgtaagttaattgaattccttctcaaagccgaatgtctcgaggatctcgtgtcctttatcattgaagagcctcctcaggacatggatgagaaaattcgctacaagtaccctaacatcagctgcgaactgcttacctcagatgtctcgcaaatgaatgatcgcctcggcgaggacgagtccctcctgatgaagctctactcatttctgttgaatgacagtcccctgaaccctttgctggcaagtttcttttctaaagtcttgagcattttaatctcaagaaagccagaacagatcgttgacttcttaaagaagaaacatgacttcgtggacttgattattaaacatattggcacaagcgccatcatggacttgttgctccgactgctgacgtgtatcgagcctccacagccgaggcaagacgtgctgaattggctcaacgaagagaaaattattcagcggcttgtggaaatcgttcacccaagccaagaggaggatcgacactccaatgcctcccagtccctttgtgagatagttcggttatctagggaccagatgctgcagatacagaactcaactgaacctgatcctctgctggctactttggagaagcaggagatcatcgagcaactgctgtcaaatatttttcataaggaaaagaatgaatcggccatcgtgtcagctattcagatccttctgacacttcttgagacacggcgccccactttcgaggggcatatcgagatctgccctcctggaatgtcccactctgcttgttcagtcaacaagagtgtattagaggccatcaggggccgcctcggttcttttcacgaacttttgctggagcccccaaagaatatgtttttcaaatacacttggaacaactttctgcacacccaggttgaaatttgtatcgctctcatcctggcctcccctttcgagaataccgagaatgcgacgatcactgatcaggattcaaccggagacaatcttcttctgaaacacctgttccagaaatgtcaactgatcgaaagaatcctcgaagcctgggaaatgaacgaaaagaaacaggccgagggaggccgtaggcacggctacatgggacacctcacccggatagccaactgtattgtccactctaccgataagggcccaaatagcgctttggtgcagcagctgatcaaggacctgcccgacgaggtgagggaaagatgggaaactttctgtacctcatcactgggcgaaacgaacaaacggaacaccgtggacctggctttcagcgactatcagatgcaacagatgacttccaacttcattgatcagtttgggtttaatgacgagaagttcgcagaccaggatgacattgggaacgtcagttttgaccgtgtgagcgatatcaatttcactctgaacacaaatgaatccggcaatattgctttgttcgaggcgtgttgcaaggaacgcatccaacaattcgatgacgggggctcagatgaagaggatatctgggaggaaaagcatatcgcttttacgcccgaatctcagcgccgctctagttccgggagcactgatagcgaagagtccaccgacagcgaggaagaagacggggcaaagcaagacctgttcgagccctcctctgctaacactgaagataagatggaagttgacctgagcgagcctccgaattggtccgccaacttcgacgttccgatggaaacgacacacggggcccccttagattctgtagggtcagacgtgtggtcgacagaagagcctatgcccactaaggagacaggatgggcctcctttagcgaatttacaagtagtctgagcaccaaagactctctgaggtctaatagccccgttgagatggaaacctctaccgagccaatggacccacttacaccctctgctgccgctctcgctgtgcaacctgaggccgccgggtctgtagccatggaagccagcagtgacggtgaagaggatgccgagtccactgacaaggtcacagaaacggtgatgaatggtggtatgaaagaaactctgagtctcactgtcgacgcaaaaactgaaactgccgtttttaaatcagaggaaggaaagctttcaacaagccaggacgcagcgtgtaaggatgccgaagagtgccccgaaactgctgaggccaaatgtgctgctcctaggccccctagctcctccccagagcagcgaacggggcaaccatcagctcctggcgatacctctgtgaatggccccgtttag

SEQ ID NO: 14009 - DNA, 3375 bp, synthetic construct
  source 1..3375: mol_type = other DNA; note = Synthetic coding sequence
atggacccttttaccgagaagcttttggaacgtactcgggctcgccgtgagaatctgcaacgaaagatggcagagcgcccgaccgccgctcctcgaagcatgacccacgcgaagcgggccaggcagcctctgtctgaagcctccaatcagcaacctcttagcggcggagaagaaaagtcatgtacaaagccatctccatctaagaaacgctgtagtgacaatacagaggtggaggtgtccaacctggagaacaaacagccagttgaatcaacatcagccaagtcatgctcaccaagcccagtatcaccacaggtgcaaccacaggccgccgacacgataagcgattccgtcgcagtccctgcttccctgctcggtatgcgtagaggacttaatagcagactggaggctactgcagctagctccgtcaaaacaagaatgcagaaacttgccgaacagcgtcggaggtgggataacgatgacatgacagacgacatccccgaatctagtctgtttagcccgatgccctccgaggaaaaagctgcgtctcctccccgacctctgctctctaatgcctctgccacccctgtggggcggcgtggccgcctggccaatctggccgcaaccatatgcagctgggaggacgatgtgaaccactccttcgccaaacagaattccgtccaggaacaaccaggaacagcctgtctgagtaagttttcaagcgcctccggcgcctcagctcgcatcaactcaagcagtgtgaaacaggaggccaccttttgttcgcagagagatggcgatgcctccctcaacaaagccctgagcagcagcgctgatgatgcttcactggtaaatgcctctatctcttccagcgtaaaagccacaagccccgtgaagtctacgacctcaattaccgatgcgaagtcttgtgaggggcaaaacccggagctgctgcctaagacgcctatttctccattaaagactggtgtgtcgaaacccattgtgaagtccaccctgtcccagacagtgccatccaagggcgagctgtcccgggaaatctgtctccagtctcagtcaaaagataagtctaccactccgggaggcacaggaatcaagcctttcctggaacgtttcggggagaggtgccaggagcacagtaaggaaagccctgcacggagcacgccacatcgcacacccatcatcacgcctaacacaaaggctatccaggagaggttgttcaaacaggacactagtagttctaccacacatcttgcacagcaactcaagcaggagaggcaaaaggagctcgcctgcctgcgcggtcgttttgataaagggaatatttggtcagcggaaaagggcgggaattcaaaatctaagcagctggagacaaagcaagagacacattgccagagcaccccattgaagaaacatcagggagtgagtaaaacgcaaagcctgcctgtgacagagaaagtcacagagaatcagatccctgctaagaactcctccactgagccaaagggcttcacagagtgcgagatgaccaaatcaagcccactgaaaatcacactatttctggaagaggacaagagtttgaaggtgacaagtgaccccaaggttgaacaaaaaatcgaagtgatcagagaaatcgaaatgtccgtcgatgatgatgatattaattcgagcaaggttattaatgatctctttagcgacgtgcttgaggaaggggaattagacatggagaaaagtcaggaggaaatggaccaggccctcgctgagagctcagaggagcaggaggacgctttgaatattagctccatgtcattgctggcccccctcgcccagactgtcggcgttgtcagcccggagagccttgtgtctaccccacggctggaactcaaagatactagccgctcggacgagagtccgaaacctggaaagttccagcggacccgggtgcctcgcgcggagtcgggggattccctgggtagtgaggaccgtgaccttctctacagtatcgacgcttaccggagtcaacgattcaaagagactgagaggccctctatcaaacaggttattgtgcgaaaggaagatgtcacctctaagctggacgaaaagaacaacgcattcccttgtcaggtcaacatcaagcagaaaatgcaggaacttaataatgagataaatatgcagcagaccgtaatttatcaggcaagtcaggctcttaactgctgcgttgatgaggaacatggaaaaggatcccttgaggaagctgaagcggaaagattactcctgatcgcaaccggaaaacgaaccctgctgatcgacgagctgaacaaactcaaaaacgaggggccccagcggaagaacaaagcctccccacagtccgagttcatgcccagtaaggggtccgtgactctgtctgaaatccgtctacctctgaaggccgacttcgtgtgtagcaccgtgcagaagcccgacgctgcaaattactactatcttatcatcctcaaagctggggccgaaaatatggtcgccactcccttagccagtacttctaacagcttgaacggcgatgctttgactttcacaaccacttttaccctccaggatgtcagtaacgattttgaaattaacattgaggtttactccctcgtgcagaaaaaggacccaagcgggttggataagaagaaaaaaacctccaaatctaaagcaatcacacctaagcgcctcctcactagcattacgacaaagtccaatatccatagtagcgtgatggccagcccgggcggcctctctgcagtgagaacctcaaattttgcgctggtgggtagttataccctgtctctctcttctgtagggaacaccaaatttgtactagataaggtgccattcttgagctccctcgagggacacatctaccttaagattaaatgtcaggtgaactccagcgttgaagagcgggggtttctgacaattttcgaagacgtgagcggcttcggggcatggcaccggaggtggtgcgtcctcagcgggaactgtattagttactggacctacccagatgacgaaaagcggaagaatccaatcggcagaatcaacctggcaaattgcacatcgagacagatagagcccgcaaaccgcgagttctgcgccagaaggaacactttcgaattgataaccgtgcgaccccagcgagaagacgaccgcgaaacgctggtgagccagtgtcgtgataccctatgtgtgactaagaattggctgtcagcggataccaaggaagaacgcgatttgtggatgcagaagctcaatcaggtcctcgtcgatatcagactctggcagcctgacgcctgttataaacccatcggcaagccgtag

SEQ ID NO: 14010 - DNA, 1365 bp, synthetic construct
  source 1..1365: mol_type = other DNA; note = Synthetic coding sequence
atgcttaaacagattctgagcgagatgtacatcgacccagaccttttggccgagctgagcgaagaacagaaacaaattctctttttcaaaatgagggaagagcagatacgccggtggaaggaaagggaagcagcaatggagcggaaagagtcacttcccgtgaagccaagaccgaagaaggaaaacggcaaaagtgtgcactggaagcttggggcagataaggaggtgtgggtctgggtcatgggtgaacaccacctcgacaagccgtatgacgttttatgtaatgagattatagcagagcgcgcccgtctgaaagctgaacaggaagccgaagaaccacgaaaaacccacagcgaagagttcactaactccctgaaaactaaatcccagtatcatgatctgcaggctccagataaccaacagacgaaagacatctggaaaaaagttgcggagaaagaagaacttgagcagggctcgcgtccagctccaaccctggaggaggagaagattcgttcactctcgagcagctctcgaaacattcagcagatgctggctgacagcattaatcgcatgaaagcgtatgccttccatcagaagaaagagagtatgaaaaagaagcaagacgaagagatcaatcagatagaggaggaacgcaccaagcagatttgtaagtcatggaaggaggactccgagtggcaggcgtccttacggaaatcaaaagccgccgacgaaaaacggcggagcctggctaagcaggctcgggaagactataagaggctttcccttggcgcgcagaagggccgagggggagaaagattgcaaagtcccctgagagtgccgcagaaaccagagcggcctccactgcctcctaaacctcagttcctaaactcaggggcctaccctcaaaaaccgctgaggaaccagggagtggtcagaactctcagctcaagcgcacaagaagatatcatcaggtggttcaaggaagagcagctacccctccgagccgggtatcaaaagacatcagatacaatagccccttggttccacgggattctcacattgaagaaagccaacgaactgctattgagtacagggatgcccggctcctttctaatccgtgtgtctgagagaataaaggggtacgcgctttcctatctctcagaggacggctgcaagcatttcctcatcgatgctagtgccgatgcatatagttttttaggcgtagaccaactgcagcacgccacgctggcagacctggttgagtaccacaaggaggagccgatcaccagtttggggaaggaactgctgctgtatccgtgtgggcagcaagatcagctcccagactacctggagttgttcgaatag

SEQ ID NO: 14011 - DNA, 1497 bp, synthetic construct
  source 1..1497: mol_type = other DNA; note = Synthetic coding sequence
atggatgagactgaatggattcatcggcatcccaaggccgaggacttgcgggtcggcctgataagctgggctggcacatacctgacttttgaagcctgcaagaataccgtgaccgcaactgcaaaaagccttggtagaagacaaacctgggaaattctcgtcagtaatgagcacgagactcaagctgtggtgcggctcaagagcgtgcaaggcttgtatctgctgtgtgagtgcgatggcacagtgtgttatggcagaccccgtacatcgcaccacggctgttttctgttaaggttccacaggaactctaagtggactctccagtgcctgattagcggccgctacctggagagtaacgggaaggacgtattttgcacctcccacgttctgagtgcttaccacatgtggacccctagaccagccttacacgttcacgttatactgtacagccctatccatagatgttacgcccgggcggaccctaccatggggcggatctgggtcgacgccgcagtgccttgcttagaggagtgcggattcctcctgcactttcgagacggatgctaccatttagagacttcaacccaccattttttatcacacgtggataggttgttttcccaaccatcctcccagactgctttccacatgcaggtacggcccggtggcctagtggccctgtgtgacggagaaggtgggatgctgtacccgcaagggacacacctgcttctcgggatgggatgcaaccctatgcgcggtgaggagtggttcatccttcaacactgcccaacctgggtgagtctccgaagcaagaccggcaggttcatttctgtgatttacgatggtgaagttcgggctgctagcgaacggttgaatcggatgtctctgttccagttcgaatgcgacagtgagagcccaacggttcagctgaggtctgctaacggatattacctgagccagaggcgccatcgcgctgtgatggccgacggccaccccctcgagtctgatacattctttaggatgcactggaattgtgggagaatcattctccagtcctgccgggggcgcttcctcgggatcgccccgaattcattgttaatggccaacgttattttgcccggccccaacgaggaattcgggattctgttcgccaaccgcagctttttggttttacgcggtcgatatgggtacgttggctcatcttctggccatgaccttattcagtgtaatcaggatcaacctgacagaatccatttgctgccttgcaggccgggcatctatcatttccaggctcagggcggatcattctggagcatcacatctttcggtacttttaggccgtgggggaagttcgctttgaatttctgcatcgagcttcagggtagtaacttgctgacagttctcgctcctaacggattctatatgcgcgcagatcagtccggaaccttactggctgattctgaagacatcacaagggaatgtatctgggagttttag

SEQ ID NO: 14012 - DNA, 1377 bp, synthetic construct
  source 1..1377: mol_type = other DNA; note = Synthetic coding sequence
atggagcgcgaacccagtgcttctgaggctgcacccgctgctgccgctctgttcgcatggggtgcaaactcttacggtcagttgggactgggacacaaagaggacgtgctactaccacaacagctcaacgatttttgtaagcctagatcagttagaaggatcactgggggcggaggccattctgcagtggtgacggacggaggcgacctgtttgtttgtggacttaacaaggacggccagctgggattaggccataccgaggacattccctatttcactccatgcaaaagcttgttcggatgcccaatacagcaagtcgcttgcggctgggacttcacgattatgctgacagagaacggccaggtacttagttgcggctctaactctttcggtcaactgggcgtgccacacggaccaagacgctgcgtagttccccaggctatcgagctgcacaaagagaaagtggtgtgtatcgctgccgggttgaggcacgccgtcgctgccactgcctcagggatcgtgttccagtggggaacaggtctcgccagttgcggaagaaggctttgcccgggacagacgctcccgctattttttactgctaaagagccaagccgggttaccggcctggagaactccaaagcgatgtgcgttctcgcaggctctgaccattcagcatcactgacagacgccggcgaggtgtacgtttggggatccaacaagcacggtcagctggctaacgaggcggcttttctcccggttccccaaaagattgaagctcattgtttccagaatgaaaaagtcacggccatttggtcaggatggactcaccttgtggcccagaccgaaactggtaaaatgttcacctggggcagagccgactatggccagctgggcaggaagctcgagacatacgaggggtggaaactggagaaacaggactcattcctgccgtgctctcgaccccccaactcaatgccctctagccctcactgccttacaggcgccacagaggtgtcctgcggaagtgagcacaacttggctatcatcgggggagtgtgctatagctgggggtggaatgagcacgggatgtgcggtgatgggaccgaggcaaatgtatgggcccctaaaccggttcaggcactgctgtcatcctcaggcctgctagtgggctgcggagccggccattctctcgccttatgccagttacctgcccatcccgctcttgtgcaagacccaaaagtgacttatctgtcgcccgatgcaatcgaggataccgagtcacagaaggcaatggacaaggagcgaaattggaaggagcgccaatccgagaccagtacccagtctcagagcgattggagcagaaacggcggtctgtag

SEQ ID NO: 14013 - DNA, 2961 bp, synthetic construct
  source 1..2961: mol_type = other DNA; note = Synthetic coding sequence
atggaaagaatgaactggctctctcggctagccagccgggggcctgggcacaggattccacagggcgctaacttgcagacgcctgtgatggcagacccggagacatgcctcatggtgttcaagaaccactggtcccaagttgtgaggatcctcgaacggcaggggcccagagctgcacctggaggtgcagacgatctgtcagcggtgagaaaccacacataccagatgttaacattgcttgctgaggatagggccgtcccgtcagctcccaccggtccagggccgctgctcgagttcgcactgcatgaggacttattaacccgcgtccttacctggcagttacaatgggacgagctgggagacggcgtggaggagcgcagagctgagcagcttaaactgttcgagatgctagtatccgaggcgaggcaaccattgcttcgacacggccccgtcagggaggccttgctgactctcctggacgcctgtgggcggcccgtgccctccagcccagcactggatgaagggttggtcctgctcttgtcgcagttgtgtgtatgcgttgcccaggaacccagcttattagaattttttctacagccacctccagaacccggtgccgcccctaggttgctcctcttcagtaggcttgtgccgtttgtgcacagggagggtacacttgggcagcaagcgagagacgctctgttactgctgatggccctttccgccggttcccccaccgtgggcaggtacatcgccgatcactcttacttttgtcccgttctggccacggggcttagcgctctctatagtagtctcccgagaaaaattgaagtgcccggagatgactggcattgtttacgacgagaggactggctgggggtgcccgcccttgcattattcatgtcatcgctcgaattctgtaacgcggtcatacaggtggcccaccccctggtgcaaaaacaactggttgactacatccacaacggatttcttgtgccagttatgggccccgcactccacaaaacatctgtcgaagagatgattgcctcaacagcttacctcgaactgtttttacggtctatcagtgaaccagccttgctgcgaacctttctgcgatttctcctgttgcatcgacacgatacacataccatcctggacacacttgtagcaagaatcggatccaattcccgcttatgcatggtgagtctgtccttgttccgcaccttgctcaacctatcgtgtgaggacgtcctcctgcagctggtcctccggtacctggtgccatgtaaccatgtgatgctgtctcagaagccagctgtgcgcgatgtggatctgtatggccgggccgccgacaaattcctcagcctgataccacgttgctgtaggcatcacgctccgtccccccctagacctgagcatgcatcctgggcacgagggggcccgagccgggagactggccggcgcgaagacattacaggaccagggagtccatccgtcgacagctcatcagtcaccacagtacccagacctagcacaccatcccgccttgccctgttcctgagacagcaaagcctcggtggctctgagagccctggccccgcaccctgttcccccggactatcggccagccccgcctcttcacctgggcgccggcccactcctgcagaagagccgggtgagctggaggacaactacctagaatacctacgtgaagccagacgtggggttgaccggtgcgtcagggcgtgtagaacgtggtctgccccatatgacggcgagagaccatcacctgaacccagcccttttggctcacgcaccaagaaaagatcgctcctgcccgaggaagatcgcaacaacgtgggagaaggggaagaggaagagctggggcgcagaggccgagcagggggggcaggtgaagggccaggccacctcccacctccccagctgaacggtgtccccgggagctggcccgaaggtgccaagaaagtgcgcttggtcccaaaagaaggagccggggagcttttggagggcatatccgagggcatggcgggtctggaagggttcggccaagagttgagggagcttgaagtcgcactaagtaatggcgggactggatcggaatcaccacttgagcccccactgccactggaggaagaggaggcttacgagtctttcacctgccctcctgagccgcccggtcccttcctgtcctcacctctgcgcacccttaaccagctcccaagtcagcccttcacggggcctttcatggccgtcctgtttgccaaactagaaaatatgttgcaaaactcagtgtacgtcaacttcctgctgactggcctggtggcgcaactagcatgccaccctcagccccttttacgaagcttcctgctgaacactaatatggtcttccagccttcggtcaagtccctcctgcaggtattgggcagtgttaagaacaagatcgagaacttcgccgcctcacaagaggatttcccagccctgcttagcaaggcaaagaaatacctgatcgcccggggcaagctggattgggccgagggtccggccgcaggcccggcaccccgtcgctctgatcctctcgtgaagtctcgccggcctagtctaggggagctgttgctccgtcacgcgcattccccaactcgagccaggcaggcagcacagctggtactgcagcccggcagagacggcgcagggttaggcctgtctggcggaagtcccggggcctccaccccggtgctgttgactagggggggagcgcccgagcgacagggcgaagctttgagggtaaagaatgccgtgtactgcgctgtgatcttccccgagttccttaaagagcttgcagctatttctcaggcacacgccgttacaagtccttttctcctcgaaactagtgaagaaggttcagggcctttaatatccggatgcggccctctgaacccttag

SEQ ID NO: 14014 - DNA, 6723 bp, synthetic construct
  source 1..6723: mol_type = other DNA; note = Synthetic coding sequence
atggatgacaaaggcgaccccagcaacgaagaggcccccaaagccattaaacccacatcaaaggaattcagaaagacttgggggttcaggagaaccacaattgcaaagcgggagggtgccggcgatgccgaagcagatcccctggaacctcccccacctcagcaacagttgggtttgtcactgcgaagatctggcaggcaacccaagaggactgagcgggtagagcaatttctgactatagctcggagacgggggaggagatccatgccagtaagcttagaagactccggagagccaactagctgccccgcgaccgacgctgaaactgcctccgagggaagcgttgaaagcgccagtgagactcgatcaggaccgcagagcgcctccacagccgtgaaagagagacccgcatctagtgaaaaagtgaaaggcggtgatgatcacgacgacactagtgattccgatagcgacggcctgaccctgaaggaactgcaaaaccgtctgcggcggaaacgcgagcaagagcccacagaaaggccgctgaagggcatccaaagcaggctacggaaaaaaagaagagaagagggtccagccgagaccgtgggatcagaggcgagcgataccgtggagggagtgctgcccagcaaacaagaaccagaaaacgaccagggtgtggtttcacaagccggcaaggatgaccgggagtccaagcttgaaggtaaggctgcccaggatatcaaagatgaagagcccggtgacttaggccgcccaaaacccgagtgcgaaggatatgaccccaatgctctgtactgtatctgccgccaaccacacaacaaccgcttcatgatatgctgtgatcgctgtgaagagtggtttcacggcgactgcgtgggtatatccgaggctagaggccggctgttggagagaaatggggaggactacatctgtccaaattgcacgatcctgcaagtgcaggacgagacccacagtgaaacagccgatcaacaagaggctaagtggagaccgggtgacgccgacggcacagactgcacatcaattggcactattgagcagaagtccagcgaggatcagggcatcaaaggaagaatcgagaaagcggctaaccccagcggcaaaaagaaactgaaaatcttccagcccgtgatcgaggcccccggagcatccaaatgtatcggccccggttgctgtcacgtcgcccagcccgactccgtctattgttccaacgactgcatcctgaaacatgccgccgctacaatgaaatttttatcttctgggaaagagcagaaacccaagcccaaggaaaagatgaaaatgaagcccgagaagcccagcctgcccaaatgcggagctcaggcaggtattaaaattagctcggtacacaaacggccagctccagaaaaaaaagagactacagtgaagaaggctgtcgttgtccccgcccgcagcgaggccctcggcaaagaggctgcatgtgagagtagcacaccctcctgggcctcagaccataactataatgccgtgaagccagaaaagacagcagccccgtcaccatctctcctctacaagtccaccaaagaagatcggagatccgaagagaaggcagcagctatggcagccagcaaaaaaactgctcctccagggtcagctgtgggaaagcagccagctcccaggaacttggtacccaagaagtctagcttcgctaacgttgcagccgctacccccgctatcaagaagcccccgagcggctttaaagggactattccaaagcggccatggctttccgcgactccaagttccggagcttcagccgccagacaggccggaccagctccagctgccgcaacagccgcttcaaaaaaattccccggatcggcagcactagtaggtgccgtgaggaaacctgtggtaccctccgttcctatggcctccccggcacccggcagactgggcgcaatgtctgccgccccctcacaacccaacagtcagattcggcagaatatcagaagaagtctgaaagagatcctgtggaagagggtaaacgactctgatgacctgattatgacagaaaacgaagtgggtaagattgccctgcacattgaaaaagaaatgttcaacttgttccaggtgacagacaatcgctacaaatctaagtatcgcagtattatgttcaatctcaaggaccctaaaaaccaaggcctgttccatagggtgcttagggaagaaatatctctagcgaaactagtgcggcttaagcctgaggagctggtgtctaaagaacttagcacttggaaggagagaccagctagatctgtaatggagtcccgtacaaagctgcacaatgagtctaagaagaccgccccccggcaggaagctatcccagatctggaggacagcccccccgtgtctgactccgaagaacagcaggaatccgcccgtgccgttcccgagaaaagcaccgccccattgctagacgttttttcctcgatgctaaaagacaccacatcacagcacagggcccatttattcgacttgaactgtaagatttgtacaggccaggttccctcggctgaagacgagccggctcctaagaagcagaagctttcagccagcgtaaaaaaagaggatctcaagtccaaacacgattctagtgctcccgatcccgctccagattcagctgatgaagtaatgcctgaggctgtccccgaagtcgcatcggagcctggccttgaatcagccagccatccaaatgtcgatcgcacatatttccctggcccgccaggggatgggcatcctgagccatcccctctggaagacctgtccccctgccctgcttcctgtgggtctggcgtggtgaccaccgtaaccgtgtctgggagagacccgcgcactgctccgagctcttcctgcacggccgtcgcctcggccgctagccgaccagatagcacccatatggtcgaggctcggcaagatgtcccaaaaccagtgttgacctctgtgatggtgccgaagtccatccttgcgaagccttcctcaagccctgatcccagatacctgtccgtgcctccatcacctaatatttcaactagtgaatctcgaagtcccccagagggcgatactacactgttcctcagcagactcagcacgatttggaagggcttcatcaatatgcagtcagtagcaaagttcgtgaccaaggcatatcccgtctcaggatgcttcgattatctgagcgaggacttgcctgacacgattcacataggcggaaggatagcccccaaaacagtttgggactatgttggaaagcttaagagctcagtgtcaaaagagctttgtttgataagatttcaccctgctactgaagaagaggaagtcgcgtacatctcattatatagctatttttcttcgagaggcagatttggcgtcgttgcaaacaataacagacatgttaaagacctctatctgatccccctgtcggcccaggatcctgtgcctagtaagctgctgcccttcgaaggccccggactggaaagtccacggcctaatataatattgggcctcgtcatttgtcagaagataaaacgccccgccaatagcggcgagttggataagatggacgagaaacgtaccagactccagccagaggaggctgacgttcctgcttaccccaaggtcgcaacggtgccacaatccgaaaagaaaccctcgaaatatccgttatgttccgcggacgcggcggttagcacaaccccaccaggaagccccccgccacccccacccctccccgagcctccagtgctcaaggtccttagttcactcaagccagcggccccttcccctgcaaccgccgccaccaccgctgcggctgcctcaaccgccgccagttcaactgcaagtagcgcctcaaaaaccgctagcccacttgagcatatcctgcagacgttgttcggaaaaaaaaaaagcttcgaccctagtgcgcgtgagcctccaggctctactgccgggctgccacaagaacccaagaccactgcagaagatggggtccctgcccctccgctcttggaccctatcgttcagcaatttgggcagttcagcaaagacaaggcccttgaggaggaggaggacgatagaccctacgacccggaggaggagtatgacccggagagagccttcgacactcagttagttgaaagaggacgaagacacgaggtagagagagcccctgaagcagcagccgctgagcgtgaagaagtcgcgtacgatcccgaggacgagacgatcctggaggaagccaaggttactgtagatgaccttcccaaccggatgtgtgcagatgttcgaaggaactctgtggaaaggccggcggaacctgtcgccggcgcggccaccccaagcctggtggagcagcagaaaatgctcgaggaacttaacaagcagattgaagaacagaaacgtcagctcgaggagcaagaagaggcactcagacagcagcgagcagccgtgggcgtgtcgatggctcacttttcagtgtctgacgccctcatgagccctcctcctaagagcagcctccccaaggcggaacttttccagcaggaacaacagagtgccgacaagcccgcatccctgcccccagcttctcaggcttcaaaccacagagatcctagacaggctcggagactggccaccgagaccggggagggagagggagagcctctgagccgactgtctgcgcgcggcgcacagggcgccctccccgagcgcgatgcatctcgaggtggcctagttggtcaggcccctatgccagtcccagaggagaaggagccagcgagcagtccatgggcttctggtgagaagccccccgccggttccgagcaggacggctggaaggccgaaccgggagaggggacccgtccagcaaccgtgggcgattcatccgcacgtccagcccgcagagtgcttttaccaactccaccttgcggcgcgctgcagccaggattcccacttcagcacgacggagagcgggatccttttacttgtcccgggttcgccagccaggataaagccttgggatctgcacagtacgaggatccacggaatctgcactctgctggtagatcttctagccctgctggggagacggagggcgaccgcgaaccacaggctaggcccggcgagggtacagcaccactccccccaccaggacagaaagtcggagggagccagccaccctttcaggggcagcgggaacctggtccccatgcactggggatgagcggcctgcacggtccaaacttcccaggtccacgggggcccgccccccctttcccagaggagaatatcgcttcgaatgacgggccgcgcggtccacctcctgcaaggttcggagcacagaagggacccataccttcattgttcagtgggcaacacggaccacctccctacggcgactcacgaggaccttcccctagttaccttggaggtccccgcggcgtggccccctcccagttcgaagagaggaaggatccccatggtgagaagcgggagttccaagacgccccatacaacgaagtgactggagcccccgctcagttcgaagggaccgaacaagcccccttcctggggtctagaggtggagccccctttcaattcggcggacaaagacgtcctctgttaagtcagttgaaaggtccccggggaggaccaccccctagtcaattcggcggacagcggggtccacctcccgggcattttgtcggaccccggggcccacatccctcccagtttgaaacggccagaggaccccaccccaatcaatttgaaggtcctcgaggccaagctcccaattttatgccgggacctaggggaatccaaccccagcagtttgaggatcagcgagtccacagcccacccaggttcaccaatcagagagcgcccgctccccttcagttcgggggccttcgcggctccgcaccattcagtgagaagaatgagcagacacctagtcgttttcatttccaagggcaggcaccacaagtcatgaaacccggacctaggcccctgctcgaactgccttctcacccgccacagcaccgcaaagaccgttgggaggaagccggccccccctcagccctcagtagcagtgcccccgggcagggcccagaggccgacggccaatgggcatccgccgatttcagggagggcaaaggtcacgagtaccggaatcagacctttgaaggccggcagcgcgagcggtttgatgtgggccctaaggaaaagcctctggaggaacccgatgcacagggaagagcctcagaggatcggcggcgggaaagagagcggggaaggaactggtccagagagagagattgggacagacccagagaatgggatcgacacagggacaaggactccagcagggactgggaccgcaatcgcgagcgctccgcgaaccgtgaccgggaacgggaagcagaccgaggtaaagaatgggaccgttcacgcgaaaggtcccgcaaccgggaaagggagcgggaccgtagacgggatcgggatagatcacggtctagagaacgagacagggacaaagcaagagaccgggagcgggggcgcgaccggaaggatcgctccaagtctaaggaaagcgcccgggatccaaaacctgaggccagtcgcgcttccgacgccggtaccgcctcccaggcctag

SEQ ID NO: 14015 - DNA, 1635 bp, synthetic construct
  source 1..1635: mol_type = other DNA; note = Synthetic coding sequence
atggatgacaagggcgaccccagcaacgaggaagcaccaaaagctattaaaccgacgagcaaagaattcagaaaaacctgggggtttcggaggacgaccattgccaagcgtgagggagccggcgacgcagaagctgacccattggagcctcctcctccgcagcagcagctggggctgtccctgcggaggtccggccgacaaccaaaacggacagagagagttgaacagtttctaacaattgctcgtaggaggggaagaagatccatgcccgtgagcctggaagacagcggggaacctacctcgtgtccggccacagacgccgaaaccgcaagtgaagggagtgtggagtccgcaagcgagactcggtcaggcccccagagcgctagcaccgccgtcaaggaacgtcccgctagctcagagaaagtcaaagggggtgacgaccacgatgatacctctgactcagactccgacggtttgacccttaaagagttgcagaatcggcttcgtcggaagcgagaacaagagccaaccgagaggcccctcaagggaattcaatcacggttgaggaagaaacgacgcgaggagggcccggccgagacagtcggcagcgaggcgtccgacaccgttgaaggcgtgctgccatctaagcaggaaccagaaaatgatcagggggtggtttcccaggccggtaaagacgaccgagagagtaagcttgaggggaaggctgcacaagatattaaagatgaggagccgggggaccttggcagacccaagccggagtgtgaaggctacgatcctaacgcactctattgcatctgccgccaaccacacaataataggttcatgatttgctgtgatcgctgcgaggaatggttccacggagattgtgtcggaatttcagaagcccgcggccgcttgctggaaagaaacggagaggactacatatgcccaaattgcacaatactccaagtacaggatgagacccatagcgagaccgcggaccaacaggaggcaaagtggagacccggagacgccgacggcacggactgtacaagtattgggaccatcgaacagaaatctagtgaggatcaaggtattaagggacgtatcgaaaaagccgctaatccttcagggaagaagaaactgaaaatcttccagcctgtgatcgaagctcccggtgcatcaaaatgcatagggcctggttgctgtcacgtggcacagccggatagtgtgtattgtagtaacgactgcatactcaagcatgccgccgccaccatgaagtttttatcaagcggaaaggagcaaaagccgaagccaaaggaaaagatgaagatgaaaccagaaaagcccagcctgcccaagtgtggagctcaagccggcattaaaataagttcagtccataaaaggccggcccccgagaaaaaggagacaaccgtgaagaaagccgtcgtggttccagctagaagtgaagccctggggaaagaggccgcgtgtgagagcagtaccccctcctgggccagtgaccataattataatgcagtcaagcctgaaaagacagccgcgccttctcccagcctgttgtacaagtgctcgggaaagtatagctattccctacacccatcactgattgcatag

SEQ ID NO: 14016 - DNA, 1164 bp, synthetic construct
  source 1..1164: mol_type = other DNA; note = Synthetic coding sequence
atggaaagaccccctccgagagcagccggcagagaccccagcgcattgagggctgaagcaccatggctgcgcgccgaagggcccggaccacgggccgcccctgtgacagttccgacaccgcctcagggttcaagcgtcgggggcgggttcgcgggtctagagtttgctaggccacaggagtctgagcccagagctagcgacctgggagcacctagaacttggacaggagcggcggccggcccacggactccgtcagcccatattcccgttccggctcagcgagccaccccaggcaaagccagactggatgaagtgatggccgcggccgcgctgacatcactctccacatcacctctcctgctcggggccccagtggctgcatttagcccagaacctggtctagaaccttggaaggaggcgcttgtgagacctccaggttcatatagctccagctccaatagcggagactggggctgggacctcgcttcagaccagagttctccatccactccttcacctcctctgccaccggaggccgcccattttctcttcggggagcccacactcaggaagcggaagtctcccgcccaagtcatgttccaatgtctgtggaaatcttgcgggaaggtgctgtccaccgcttccgccatgcagagacatatccgtctcgtgcatctcggcaggcaggccgagcccgagcagagtgacggggaggaggacttttactataccgagctggatgtgggggtggacacgctgaccgacggactgtccagtctgactccagtgtccccaactgcctccatgccccctgcatttcctcggcttgagctcccagagctattggagccccccgcacttccctcccccttgcggcccccagcccctccgctgccccctccaccagtgctgtccacggtggctaacccgcaatcttgtcacagcgacagagtttaccagggttgcctcacacctgcccgactggagcctcagcctacagaagttggtgcctgtcccccagccctttcgtcaagaattggcgtaaccctgaggaaacccaggggggatgcaaaaaaatgccgaaaagtgtacggtatggagaggcgggacctctggtgcaccgcttgcaggtggaagaaggcttgccagaggtttctggattag

SEQ ID NO: 14017 - DNA, 414 bp, synthetic construct
  source 1..414: mol_type = other DNA; note = Synthetic coding sequence
atgttacggttttgcgccggcctgagtgacttcgcaccggtggctgtgcgttctctgcaggatctggcacgaatagcgataagaggcactatcaaaaagatcatccaccaagagacagtctctaaaaatgggaacggtcttaagaatacgccccgctttaagcggagaagggtccggaggagacgcatggaaaccatcgtgtttctggacaaagaggtattcgccagtcggatcagtaatccctctgatgataactcctgcgaggacctggaagaagagagacgcgaagaggaagagaagaccccaccagaaactaaacccgaccctccagtgaatttcctcaggcaaaaggtattgtcactgcccctacctgacccattgaaatattacctcctgtactatagagagaaatag

SEQ ID NO: 14018 - DNA, 2505 bp, synthetic construct
  source 1..2505: mol_type = other DNA; note = Synthetic coding sequence
atgagactactcgatggcaaacagaccagtcgttattcggagaacgcctgcgaaaagaagatcttctcaatttacggccactatcctgtcgtgagagctgctctgcgacgcaaaggatgggtggaaaaaaagtttcacttcctgcctaaagtgatacccgatgtggaagatgaaggtgctcgggtaaacgatgatacgtgtgccaaggtcaaagagaaccaggaaatggcactcgagaagacggacaatatccacgacgtgatgagccgccttgtaaagaacgagatgccatatctcctgtggacaatcaagagagacatcatcgactaccatagcctaacctacgaccagatgctgaatcactacgctaagactgcctctttcaccacaaagataggactctgcgtgaacatgaggtcactcccttggtacgttcccgcaaacccagattcattcttccctagatgttatagcctttgcaccgagtcagaacagcaggagtttcttgaggacttccgcaggactatggcttccagcatactgaagtgggtggtgagtcatcagtcatgctcaagatcttcacgcagtaaaccccgcgaccaaagggaagaggccggcagttccgatctatcatcgcgacaggacgccgagaacgcagaagctaaactcaggggactacccgggcagctagttgacattgcctgcaaagtttgccaggcttatctgggccagctggaacacgaggacatcgacaccagcgccgatgccgtggaggatcttactgaagctgaatgggaggacctcacccagcagtactattctttggtacaggtccctctgggctcatccatcgtactgtgcatctttaagattcagaaggtgatgatgtcctttgagccgcccacagccagggatcgacagtgtcaagccctgcttaaccgtattactagcgtaaatcctcagacagacattgatggattacggaatatatggatcattaaacccgcagctaagagcagaggcaggggggagagtcctgatatcgtgtgtatggatcgcgtggaggaaatccttgagctggcagccgcagaccatccactgtcacgggacaacaagtgggtggtgcagaaatatattgagacacctctgctaatctgtgatacaaagttcgacatcagacagtggtttcttgtgacagattggaatcccctcacaatttggttttataaggaaagctatttgcggttttcgactcaaagattttccctggacaaactggatagcgcaatccacctttgcaacaatgctgtgcagaaatacctaaagaacgacgtgggacgaagccctttactccccgctcataacatgtggacatccacacgctttcaagaatacctccaaagacagggtaggggcgctgtgtgggggagtgttatctacccaagcatgaagaaggccatcgcacatgctatgaaagttgcccaggaccacgtcgaaccgaggaaaaattcatttgaactgtacggggctgacttcgtgctgggccgagacttcaggccttggctgatcgaaataaactcctcacccaccatgcacccttccacccctgttactgcacagctctgcgcacaggtccaggaggacaccatcaaggtagccgtagaccggagttgtgatatagggaatttcgaactgctttggagacagccagtggtggagccaccccccttttccggatccgatttgtgcgtcgcaggggtatctgtacgtcgtgcccggagacaagtgctcccagtctgtaacctgaaggcaagcgcctccctcctagacgcgcagccgttaaaagcccgcggaccaagtgcaatgcccgatcccgcccagggtcccccgtcccctgcacttcagcgcgatctggggctcaaggaagagaaggggctaccactggcactgctggcacctctgcgaggcgctgcagaaagcggtggggcagcccagcctactcgtacaaaggcggccgggaaagtggaactcccagcgtgtccctgcagacacgtggacagtcaggcccccaatacgggcgttcccgtggctcagcccgcgaagagctgggaccctaatcagctgaatgcgcacccgttagagccagtgctacgcggactgaagaccgctgagggcgcactccggcctccgccgggggggaagggtgagggtactgtgtgtagtaggctgcctcatcatggccatcacgtggctgcttgtcagacaactgggacaacatgggatgggggccccggcgtatgcttcctcagacagcttctggcttcggagctacctatgggtccagggctgccacgtgatccccgcgcgccaccctgtctcgtatgtcgcggtctgctcccccccgcggggccttgtaaacgctgcaggtctttttgcgcggctgtgctgcagggggcctccttcgtacgtctcggaggccggagctgctcacccaggaccccttag

SEQ ID NO: 14019 - DNA, 759 bp, synthetic construct
  source 1..759: mol_type = other DNA; note = Synthetic coding sequence
atgtgcagtacttccggctgtgatctggaggagatcccactcgatgacgacgacctgaacacaatcgaattcaaaattttggcgtattatacccgacaccatgtgttcaagtccacacccgccctgttctcccctaaactgctgaggacacgtagcttatctcagagaggactgggtaattgctccgcaaacgagtcctggacagaggtgtcctggccatgcagaaactcccagagctcagaaaaagcaatcaatctcggaaaaaaaaagagcagctggaaggcattttttggtgtggttgaaaaggaggactcccaatctacaccggcgaaagtttccgcccaagggcaaagaacactggagtatcaagatagccatagccagcagtggtctcgctgcctgtctaacgtcgaacaatgtctcgaacacgaagccgtagatccgaaggtcattagcattgctaaccgggtggcagagattgtctacagctggcctccaccccaggccacgcaggcaggagggttcaagagcaaggaaatattcgtcactgagggattgagctttcagctccagggacacgtgcccgtggcttcttcgtccaagaaagacgaagaggagcaaattctggcaaaaatcgtggaacttctgaagtacagtggtgatcaacttgaaagaaaagacaccgcatttatccctatcccactcgttgacacatcaattcagggttttccccaggacggcttaatggcctgtatatag

SEQ ID NO: 14020 - DNA, 261 bp, synthetic construct
  source 1..261: mol_type = other DNA; note = Synthetic coding sequence
atgtccttacccctcaatccaaaacccttcctgaatggattgaccgggaagcctgtcatggtgaagttaaagtgggggatggagtataaaggttatctggtgtccgttgacggatacatgaacatgcagctggctaacacagaagagtatatcgacggggcactctccgggcatctcggggaagtattaatcagatgcaacaatgttttgtatatcaggggtgtcgaagaggaggaagaggacggagaaatgcgggagtag

SEQ ID NO: 14021 - DNA, 1281 bp, synthetic construct
  source 1..1281: mol_type = other DNA; note = Synthetic coding sequence
atggcctcagggcattccctcttgctagagaacgctcagcaggtggttctggtgtgcgcccgaggcgaaagattcctagcacgcgacgcccttagaagcctggccgtgctggagggtgcctcccttgtcgtaggcaaggacggatttattaaggccatagggccagctgacgtgattcagcggcagtttagcggcgaaacattcgaagaaattattgactgctctggaaagtgcattcttcccggcttggtggatgcccacactcaccctgtgtgggcaggagagagggtgcacgagtttgctatgaagctcgccggggcaacctatatggaaatccaccaagcaggtggcggtattcacttcacagtggagaggacccggcaggcgacggaagaagagctgttcagatctctgcagcaaagacttcagtgcatgatgagggctggcactaccctggtggaatgtaaatctggctacggcttagacctggagacagagcttaagatgctccgggtgatcgaaagggcgcgacgggagctggatatcggtatttccgctacctattgcggtgctcattctgtcccaaaaggaaagaccgccaccgaagctgcggatgacattatcaataatcatttgcctaaactcaaagaactgggccgtaacggggagattcacgtggataacatagatgttttctgcgaaaagggcgtttttgatctggacagcaccagacggatcctgcagcgaggcaaggatattgggctacaaatcaactttcacggagacgagctgcatccaatgaaggccgccgagctgggcgccgagctaggagctcaagccatctctcacctcgaggaggtgtctgacgaggggatagtcgcgatggcaactgcccgctgttccgcaatactgctgcccaccactgcctacatgctcagactcaagcagcccagagcccggaagatgctggacgaaggagtgattgtagcattgggcagtgactttaatccgaatgcatattgtttttcaatgcccatggtgatgcatcttgcatgtgttaacatgaggatgtcaatgcctgaggccctcgcagcagccaccataaatgcagcgtacgcactcggaaagagccacacgcatggcagcctggaggtaggcaaacagggggatctgataataattaactccagtaggtgggagcaccttatttaccaattcggagggcaccacgaactgattgagtatgtgattgccaagggaaagctgatatacaaaacttag

SEQ ID NO: 14022 - DNA, 1263 bp, synthetic construct
  source 1..1263: mol_type = other DNA; note = Synthetic coding sequence
atgttttcacccggccaagaggagcactgtgcccctaataaagaacccgttaagtatggagaactggtcgtgctcgggtataacggtgctctgcccaacggagataggggcagacgaaagtctcggttcgcactgtataaacgacccaaggctaacggagtcaagccttccacagtacacgtcatcagcacaccgcaggcatccaaggcaataagctgtaaggggcagcatagcattagttacactctgagccggaatcaaaccgtggtagtcgaatacactcatgacaaggatactgacatgttccaggtaggacgatcgaccgagtcacccattgactttgtcgtgactgacacaatatctggcagccagaataccgatgaggcacagatcacccagagcacaatcagccgatttgcatgccgaattgtctgcgataggaatgagccttacacggctcgcatcttcgctgccggctttgacagcagtaagaatatctttctcggagagaaggccgctaagtggaagaacccagacggccacatggatggactgaccaccaacggcgtgctggtgatgcatcctcggggaggcttcacagaggaatcgcagcctggcgtgtggagggagatttccgtgtgcggcgatgtgtatactttgagggagacaagatccgcccagcagaggggaaaattagtggaatcagagaccaatgtattacaggatgggtctttgattgacctgtgcggggctaccctgctctggcgcaccgcagatgggctgttccacacaccgacccaaaagcatatcgaggccctgagacaggagatcaacgcggcaaggccccagtgcccggtaggactgaatacgctggcatttccctccatcaaccgaaaagaagtggtggaggagaagcagccttgggcctatctaagttgtgggcacgttcacggctaccataattggggccacagatcagacaccgaagccaacgaaagggagtgcccaatgtgtcgcactgtgggaccttacgtgcccctgtggctgggatgcgaggccggtttctacgtcgatgccggaccacccacccatgcgtttactccgtgcggtcacgtctgcagcgagaagagcgcaaagtactggagccagatacctttacctcatggcacccacgccttccatgcagcctgccccttctgcgcaactcaactggtgggagaacagaactgcatcaaactcattttccagggtcccattgactag

SEQ ID NO: 14023 - DNA, 1056 bp, synthetic construct
  source 1..1056: mol_type = other DNA; note = Synthetic coding sequence
atgatcgtacagagggtagttctgaattcccggcccggtaaaaacggcaaccctgtggccgaaaatttcaggatggaggaggtctacctgcctgacaacataaacgagggccaagtgcaggtccgcaccctgtacctgtccgtggatccttatatgaggtgcagaatgaacgaggacacgggcaccgactacattacaccctggcagctgtcacaggttgttgatggcggggggattggtatcattgaagaatccaaacatacaaaccttaccaaaggggatttcgtgacctctttctactggccctggcaaacgaaagtaatactcgacggcaactctcttgagaaggtcgacccacaactggttgatgggcacctgagttacttcctgggtgcaataggcatgcccggactaacttccctcattgggatccaagaaaagggccatattactgctggctccaataaaaccatggtggtctcaggcgccgcaggggcttgcggctccgtggccgggcaaatcggacattttttggggtgcagtcgggttgtggggatttgcggcacccacgaaaaatgcatcctcctaacatccgaacttggcttcgacgccgctatcaactacaagaaagataatgttgctgaacagttaagggaatcttgcccggctggggtagatgtctacttcgataacgtcgggggcaacatcagcgacaccgtcatatcacagatgaatgaaaacagccacataatactatgcgggcagatctcccagtacaacaaggacgtcccttatccgcccccacttagccccgcaatcgaggcaatccagaaggagaggaacattacaagagagcggttcttggtactcaattacaaagataagtttgaaccaggcattcttcagctgtcccaatggttcaaggaggggaagctgaaaattaaagaaacagtgatcaatggactggaaaacatgggagcagccttccagtcgatgatgactggaggaaatattgggaagcagatagtgtgcattagtgaagaaatctcactgtag

SEQ ID NO: 14024 - DNA, 2172 bp, synthetic construct
  source 1..2172: mol_type = other DNA; note = Synthetic coding sequence
atggccgaggaagaggagacggccgccctgaccgaaaaagtgatcaggactcagcgggttttcattaatctcttggactcttatagcagcggcaacataggaaaatttctgtctaactgtgtggtaggcgcttccctggaggagataacggaggaggaggaggaggaggacgaaaataaaagcgcgatgctagaggcgtccagcaccaaggttaaggaggggacgttccagatagtcggtaccctctcaaagccagattctcctcggcctgactttgctgtggagacttatagtgcgatttccagagaggacctgcttatgaggcttctcgaatgcgacgtgataatatataacataactgaaagtagtcagcagatggaggaagcaatctgggccgtctcagcactgagtgaggaagtctcgcattttgagaagcggaagttgttcattttgctttcaacggtgatgacttgggcccgcagtaaggccctggacccagaggatagtgaggtgcccttcacagaggaagactaccgccggaggaaaagccacccaaacttcctcgaccatattaacgccgagaagatggttctgaagttcggcaagaaagcccgaaagttcgccgcctatgtcgttgccgctggtttacagtacggagcagaaggcggaatgctgcacacgtttttcaagatggcctggcttggggagatccccgccctcccagtgtttggagacggtaccaatgtgatcccgacaatccacgttctcgacttagctggtgtgattcagaatgtgattgaccacgtgcctaaaccccattatctagtcgcggttgacgagtctgtacacaccttggaggacatcgtgaagtgtatctccaaaaatacaggccctggcaagattcagaaaatcccaagagaaaacgcgtacttaacaaaagatcttacccaggactgtctggaccaccttctggtcaatctcagaatggaggccttgttcgtaaaggagaactttaatattcgttgggccgcccagactggatttgtcgagaatattaacaccatcctaaaggagtacaaacagtcgagggggctgatgcctatcaagatttgcattctgggccctccagccgtcgggaagtcatccattgctaaagagctagccaactactataaattgcaccacattcagttaaaagacgtgatttccgaagccatcgctaaactggaagccatcgttgcccccaacgacgtaggtgagggggaggaggaggtggaggaagaggaagaggaggagaacgtagaagatgcgcaggagctgctggatggtatcaaagaatccatggaacaaaatgctggacagctcgacgaccagtacatcatccgcttcatgaaagaaaagctcaagagcatgccctgtagaaatcagggctacattctcgatggttttcccaagacttacgatcaagcaaaggatctctttaatcaggaagacgaggaggaagaagacgatgtgcgcggacgcatgttccccttcgataagctcatcatccctgagttcgtatgtgcgctggacgcatcagacgaattcctgaaggagagggtgatcaatctccctgaatcaattgtggccggcacacattactctcaagatcggtttctgcgggctctaagtaactatcgcgacattaacattgatgacgaaaccgtcttcaactactttgatgagctagagatacatcctatccatatcgacgtgggtaaactagaggatgcccagaaccgtctggccattaaacagctgatcaaggaaattggcgaaccacgcaattatggcttgaccgacgaagagaaggccgaggaggagcgcaaggcagcggaggagagacttgcacgagaggcagcggaggaggcggagcgggagcatcaggaagctgtcgaaatggctgaaaaaattgcgcgctgggaagaatggaataagaggttggaagaggtcaagcgtgaagagagggaactgctagaggcgcagtcaatccctttacggaattaccttatgacttacgtgatgccaactctgatccaggggttgaacgagtgctgcaacgtccgtcctgaggaccccgtcgactttttagctgaatatctctttaagaataatccagaagcgcaatag

SEQ ID NO: 14025 - DNA, 1245 bp, synthetic construct
  source 1..1245: mol_type = other DNA; note = Synthetic coding sequence
atgcagaccttcctgaaaggaaagcgcgtcggatattggctgtcagaaaagaagattaagaagttgaatttccaggcgtttgccgagctttgcaggaaaagaggtatggaagtcgtacagttaaatctgagtagaccaatcgaagagcaaggtccattggatgtaataattcacaagctcactgacgtaatcttggaagccgatcaaaatgattcccagtccctggaattggtgcatagatttcaggagtatatcgatgcccaccccgagacaattgtcctagatccactcccagccattcgcacgctgctggaccgctcaaagtcttacgagctgattaggaagatcgaggcgtatatggaggatgaccggatatgctcccccccgtttatggaattgaccagcctgtgtggagacgatacgatgcggttgctcgagaagaacggccttaccttcccttttatctgtaaaacacgtgtagctcatgggaccaattctcacgaaatggctatcgtcttcaaccaagaaggactgaatgctatacagcccccgtgtgtcgtccagaattttataaaccacaatgctgtgctttataaggtatttgtggtgggcgagagctacacagtcgtgcaaagaccgtccctcaaaaatttcagcgccggcactagcgatcgtgagtccatcttctttaattctcataacgtgtccaagcctgaatcttcctcagtgttaacagagctcgataaaattgaaggggtctttgaacgcccatcggacgaggtcatccgggagctatcacgagctcttaggcaggccttgggcgtctcgctgtttggcattgacattataatcaataaccagacaggacagcatgcagtcattgacattaacgctttccctggatatgagggcgtctccgaattcttcacagacctccttaatcatatcgccaccgtactccaggggcagagtacagctatggccgcaaccggagacgtagcgctattgcgacactccaagttactggccgaacctgccgggggactggtgggtgagaggacttgttctgcatcaccagggtgttgtggtagcatgatggggcaggacgcaccatggaaggccgaagccgatgccggtggcacagcaaagttacctcatcaaagactggggtgtaacgctggcgtttccccaagtttccaacagcattgtgtggcaagcctggcgacaaaagcatcctctcaatag

SEQ ID NO: 14026 - DNA, 600 bp, synthetic construct
  source 1..600: mol_type = other DNA; note = Synthetic coding sequence
atgaggttccgattctgcggggatctcgactgccccgactgggtcctcgcggagatttccacactggcaaaaatgtcttctgtaaagttgcggttgctttgcagccaagtactaaaagaactcctggggcagggaatcgactacgagaagattttaaaactgactgctgatgctaagttcgagtctggggacgttaaggccacagtagcggtacttagttttattctcagctctgccgctaaacattctgtggatggagagagcctctcgtcggagctccaacagctcggcctgcctaaagaacatgctgcgtccctttgccgctgttacgaagagaagcagagccccttgcagaagcatctgagagtttgcagcctccgcatgaaccgtctggcaggagtaggctggcgagtcgactacacactgagctcgagtctgttgcaatccgtagaggagccaatggtgcacctccgtcttgaggtggctgcagcaccgggaaccccggcgcagcctgtggcgatgagtctatctgcggataagtttcaggtcctcttagcagaactgaaacaggctcagaccctcatgtcctctcttggctag

SEQ ID NO: 14027 - DNA, 1224 bp, synthetic construct
  source 1..1224: mol_type = other DNA; note = Synthetic coding sequence
atgagccatcgtaaattctctgctcccaggcatggccacctgggtttcctccctcataagcggagtcatcggcaccgagggaaggttaaaacgtggcctagagatgatccatctcagccagtgcacctaacagcctttttggggtacaaggctgggatgacccacacccttcgcgaagtccataggcccgggctgaagatatccaaacgtgaagaagtcgaggctgtgaccattgtagagactcccccgctcgtggtcgtcggtgttgtcggttacgttgccactccccgcggtctacgaagctttaagacaatcttcgccgagcatctttctgatgagtgcaggaggaggttttacaaagactggcataaatcaaagaaaaaggcttttaccaaggcttgcaaacgctggagggatactgacggtaagaagcagttgcaaaaagatttcgccgcaatgaagaagtactgcaaagttatcagagttatagtgcacacacagatgaaattgctgccttttaggcagaagaaggcacatataatggagatacagctcaacggaggaacagtggctgaaaaggtggcctgggcccaagctaggctcgagaagcaggtccccgttcactccgtgttctcccagtctgaagttattgatgtgatcgccgtaacaaaagggcgaggtgttaagggggtgaccagccgatggcacacgaagaaactgccacgaaaaacccataagggcctgcggaaggttgcatgtatcggagcatggcatcccgcgcgggtgggctgtagcatcgcaagagctggtcagaaaggctatcaccaccgaaccgaactcaataagaaaattttccgcatcgggcgaggcccccacatggaggacggaaaactggtcaaaaacaatgcctcaaccagttacgatgttactgctaagtctattacccctctgggtggatttccccattacggcgaggtcaacaacgactttgtcatgctgaaagggtgtatcgctggaactaaaaaaagggtaattaccctccgtaagagtctgttggtacaccattcacgccaagccgtggagaacatcgaactcaagttcatagacaccactagtaagtttgggcatggccgctttcagacagcccaggagaagagagctttcatgggaccccaaaaaaagcacctggagaaggaaactccagaaacatccggggatttgtag

SEQ ID NO: 14028 - DNA, 7323 bp, synthetic construct
  source 1..7323: mol_type = other DNA; note = Synthetic coding sequence
atgtccagttccggttaccccccaaatcagggcgccttctccaccgaacagagccgatatcctccacactccgtgcagtatacatttccgaatacacgtcaccaacaggagtttgccgtgccagactacaggtcttcacatttggaagtgagtcaggcatcgcaactgctgcaacaacagcagcagcagcagttgcggcgccggccttccttactgtcagaatttcaccctgggtccgaccgcccacaagaaagaagaaccagctacgaaccttttcatcccgggccttcccctgtggaccacgattcactggaaagcaaacgaccccgtcttgagcaggtgtcagactcccactttcagcgcgtgtctgccgcagtccttcctctggtgcatccgctcccagagggattgagggccagtgccgacgcgaagaaggacccagcctttggcggtaaacatgaggccccaagctcacccattagcggccagccatgcggggatgatcaaaatgcttcacctagtaaactttcaaaagaggagctcatacagtccatggaccgtgtggatagagaaatagctaaggtcgaacaacagatcttgaaactgaaaaaaaagcagcagcagctcgaggaggaggctgctaagccccccgagcccgaaaagcccgtatccccccctcctgtcgaacagaagcataggtccatcgtgcagataatttacgatgaaaatcgcaaaaaagcggaagaggcccataagatattcgaaggactgggtcccaaggtggaacttccgctgtataaccagcccagcgacactaaggtctatcatgagaatatcaaaaccaaccaggttatgagaaaaaaactgatcctcttcttcaagcggcggaaccacgcccgtaaacagagagaacagaaaatatgtcaaaggtacgatcagctgatggaggcatgggagaagaaggtggatcgcatcgagaataatcccagaagaaaagccaaggagtctaaaacgcgtgagtattatgagaagcagtttcccgagatccgtaaacagagggagcagcaggaacggtttcaacgggtcggacagcgcggagcaggcctttccgccactatcgcccggagcgaacacgagattagcgaaatcatagatggactatctgaacaagaaaacaacgagaaacagatgaggcagctctccgtaatccccccaatgatgttcgacgcagagcagcggagagtcaagtttatcaacatgaatggactgatggaagaccccatgaaggtctataaagatcgacagttcatgaacgtatggactgatcacgagaaggaaattttcaaggataagtttatccagcacccaaagaatttcggcctgatcgcctcctacttggagcgtaaatcggtgcccgactgcgtactgtattactaccttaccaagaaaaacgagaactacaaagcactggtgagacgcaattatggcaagcgtcgtggccggaatcagcagattgccaggccctctcaagaggagaaagtggaggaaaaagaagaggataaagctgaaaagacggaaaagaaggaggaggaaaagaaggatgaggaagaaaaagatgaaaaggaggattcaaaagaaaatactaaggagaaggataagatcgatgggaccgcagaggagactgaggaacgcgagcaagcgacacccaggggccggaaaactgccaatagtcaggggcggagaaagggacgtattacccgctctatgacaaatgaggccgcagctgcctctgctgccgcggccgccgccactgaggaaccccctccacccctgcctccacctcccgaacctatctcgacggagccagtggagacctctcgatggacagaggaggaaatggaagtggccaagaagggacttgtagaacatgggaggaactgggcagccatcgccaaaatggtcggcactaagtccgaggcacagtgcaaaaacttctattttaactacaagcggaggcataacctagataacctcctgcagcagcacaagcaaaaaacctcaagaaagccccgggaggaacgggatgttagccaatgcgaatccgttgcatcaaccgtctccgcccaggaagacgaggacattgaagcgagcaacgaggaagaaaatccagaagatagtgaggttgaggctgtcaagccaagtgaagactcaccggagaatgccacatcaagggggaacaccgagccagcagtagaacttgaaccgactacggagaccgcaccttcaacctccccctccctggcggtaccctccacgaaaccggcagaggatgagtccgtcgaaactcaggtgaatgactctatctccgctgagacagccgaacagatggacgtcgaccagcaagagcacagtgcagaagaaggtagtgtgtgtgaccctcccccggccacaaaggcagattcagtggatgtagaagtgcgagtgcccgagaatcacgcgtcaaaggtcgagggcgataatacaaaagagagagacctggaccgagcaagcgagaaagtggagcccagggacgaggatttagtggtcgcacaacagataaacgcgcaacgaccggagccccagagcgacaacgattcctccgctacttgttccgcggacgaggatgtcgacggtgaacctgaacgacagcgcatgttcccaatggatagcaaaccaagtttgctaaatccaaccggtagcattctggtttctagtcccctgaagcccaacccgctggatctgccccagctgcagcatcgagcagccgtgataccacccatggttagctgtaccccttgcaacatccctattggcactcccgtttcaggctatgctctgtaccagcggcatatcaaggcaatgcacgagagcgcgctgcttgaagaacagcggcaaaggcaagaacagatcgatctggaatgccgcagctctacctccccctgtggcacaagcaaaagcccaaatagggagtgggaggtgcttcagccagctccccaccaggtaatcaccaacctccccgagggggttagactgcccactactcgccctactcgtcctccccctcctttaatcccctcctccaaaaccactgtggcctcagagaagccctccttcattatggggggctccatcagccagggtacacctggaacctatctgactagtcacaatcaggcctcatacactcaggagactccaaagcctagtgtgggcagcatttccctgggcctaccaaggcagcaggagagcgccaagagcgccaccctgccatatatcaaacaagaggaattttccccacgcagccagaattcccagcctgagggcctgctggttagagctcagcatgagggagtcgtgaggggtactgctggggctatccaggaaggcagcatcacgagggggacgcctactagtaaaatttcagtggagagtattccctctctgcgggggtcaataacacaggggacgccagcattgcctcagacaggtattccgaccgaggccctagtcaagggctcaatcagtcggatgccaatcgaggattcctcccctgaaaaaggccgcgaagaggccgcttctaagggccacgttatctatgagggaaaatctgggcacatactctcctatgacaacatcaagaatgccagagagggtacccggtcgcccagaaccgcccacgagatctccctgaagaggagctacgaaagcgttgagggtaacataaagcagggaatgtctatgcgcgagtcccctgtgagtgcgcctttggagggtctgatctgccgcgccctgcctcgagggagtccccattcagacttaaaagaaaggaccgtgctatccggatctatcatgcaagggactccgagggctacgacagaatccttcgaagatggactgaagtaccccaaacagataaagcgcgaatcaccacctataagagccttcgagggggcaattaccaagggcaagccctatgatgggatcacgacaattaaggagatggggcgtagcatacatgagattccgcgacaagatatcctgactcaggagtctcgaaaaaccccagaggtggtccagtcgaccagaccaattatcgaaggtagcatttcccagggaactccgattaagttcgataacaattccggacagtccgcgattaagcataacgtgaaatctctgattactggccccagcaagctgtcccggggcatgcctccactggagatcgtccctgagaatattaaggtggtggagagaggtaagtacgaggacgtgaaggctggggagactgttcgatcgcggcacacgtccgtggtgtcatccggtcctagcgtgttacggagcacattgcatgaagcccctaaagcccagctgagccccgggatatatgacgataccagcgctaggaggacacccgtgagctaccagaacacaatgtcacgtggatccccaatgatgaatagaaccagcgacgtgaccatatcaagcaataagtctaccaaccatgagaggaagagcacattgaccccaacgcaacgggagtcaattcctgcgaagtctccggtgccaggcgtggaccctgtggtgtctcattccccattcgatcctcaccatcggggatccactgccggggaggtttacagaagccatctcccaacgcatttggacccagctatgccttttcaccgcgccctggaccctgctgccgcagcctaccttttccagaggcagctctccccaacacctgggtatccgtcccagtatcagctgtacgccatggagaatacaagacagactatcctcaatgactatataacctcacagcagatgcaggtaaacctccgcccagatgtggcccggggcctaagccctcgggagcagccactggggcttccatatcctgccactagaggtatcatagacctgactaatatgccacctactattctggtgccccacccaggcggaacatcaacccccccaatggacagaattacctacatccctggcacacaaatcaccttcccaccaaggccatacaatagtgcgtctatgtcaccaggacacccgacacatctagctgccgctgcctccgccgagagagagcgcgagagagaacgagagaaggaaagagagcgagaacgcattgcagcagcttcatcagacttatacctcaggccagggtccgagcagccaggacgtcccgggagccacggctatgtgagaagccccagcccaagcgtacgaactcaagagaccatgctgcagcagagaccgtccgtatttcaaggcacaaacggcacaagtgtcatcaccccgttggacccaaccgcgcagctgagaatcatgcctttgcccgccggcggcccatctattagccagggcctaccagcatcccgttacaacacggcggctgatgccctggcggccttggtggatgctgcagccagcgcgccgcagatggacgtctcaaagaccaaggagtctaaacacgaggcagctagattagaggaaaatctgagatcacggtctgccgccgtttccgagcagcagcagctggaacagaagactcttgaagtagaaaagcgatctgtgcaatgcctctacacctcctccgcctttcccagtggaaaaccgcaaccacattctagtgtggtttattccgaagccggaaaagataagggtccacctccgaagtccaggtatgaagaagagcttcgcacccgcggcaagacaacaatcacagctgcaaactttattgatgtaattatcacccggcaaatagcttccgacaaggacgctagggaacgcggcagtcaaagtagcgactccagcagttctctgtcatcgcatagatacgagacccccagcgacgctatcgaagtgatttcccctgcctcatcacctgcaccaccacaggaaaagctgcagacctaccagcctgaggtagtgaaggcaaatcaagctgagaatgaccctactcggcaatatgaaggtccacttcaccactataggcctcaacaggaatctcccagcccccagcagcagctccctccatccagccaggccgaaggcatgggtcaggttccccgtactcatcggctgataaccttggctgatcatatctgtcaaatcatcacgcaggattttgccagaaatcaagtgtcctcacaaacaccccagcagcctccgacatctacttttcaaaattccccctccgccttagttagcactcccgtgcggaccaaaacatccaaccggtacagtcccgaatcccaagcacaatcagtgcatcatcaacggcccggctcaagggtctcaccagaaaatctcgtcgacaagtcgagagggagccggccaggcaagagccctgaacgctcacatgtgtcaagcgaaccatacgaacccatttctccaccgcaggtcccggtggtacacgaaaagcaggattccctactgctactttcacagcggggtgccgagcctgccgaacagcgcaacgacgctcggtctcctggctccatcagctaccttccttccttcttcaccaagctcgagaacacatctcctatggtgaaatccaagaaacaagagatctttaggaagctcaattccagcggggggggggattccgatatggcagccgctcagcctgggacagagattttcaaccttccagccgtgacgacgtccggctccgtgtcctcaagagggcatagttttgcggatccagccagcaatctggggcttgaagatataataaggaaggctctgatgggatcgtttgatgataaggtagaggatcatggcgtggtgatgagccaacccatgggtgtagttcccggaaccgctaatactagtgtcgtaactagtggagagacaagaagagaagagggagatcccagcccacattccgggggggtgtgtaagcctaagctgatttccaagagtaattctcggaaatcaaaatcccctatacctgggcagggttatctgggcacggaaagaccatcatctgtctcctctgttcattcagagggcgattaccacaggcagaccccgggctgggcatgggaggatcgcccaagtagcaccggttccactcaattcccttacaatcccttgacaatgcgtatgttgagcagcactccccctacgccaatcgcatgtgccccttcagctgttaaccaggccgcacctcatcagcagaatcgcatctgggaacgagagcccgctcccttgctgtcagcccagtacgagaccctgtcagatagtgatgactag

SEQ ID NO: 14029 - DNA, 2313 bp, synthetic construct
  source 1..2313: mol_type = other DNA; note = Synthetic coding sequence
atgctccaacaggtcaatggccacaaccccggctcggacggacaggcccgcgagtatctgcgggaagacctccaggagttccttggaggcgaggtgctgctgtacaaacttgatgacctcacccgcgtaaatcctgttacgctggagactgtcctgcggtgtctgcaagctcggtacatggccgacactttctacacaaacgctggctgtactctggtagcactgaatcctttcaagcctgtgccacagctgtattcccctgaattgatgagggagtatcacgccgctccacagccccagaagctgaaacctcacgtgttcacagtcggagagcagacttacaggaacgtgaagagcttgatcgaacctgtaaatcagtcgattgttgttagcggcgaaagcggcgctggtaaaacctggacctcccggtgtctgatgaagttttatgccgtggtggccacttcccctgctagctgggaatcgcacaagatcgctgaacgcatagagcaaaggatcctgaactctaacccagtcatggaggccttcggcaacgcctgcacactgcgcaataacaactcaagccgcttcggcaaatttatccagctgcagttgaacagggcccagcagatgacaggagctgccgtacagacatacctcttggaaaaaacccgagtcgcctgtcaggcgagttccgaaagaaacttccacattttttaccagatatgtaagggtgcatccgaggacgaacgtttacagtggcacctgcccgaaggcgccgccttctcctggctgcccaaccccgagaggtcccttgaggaagactgttttgaggtgacaagggaagcaatgctccaccttggaatagacaccccaactcagaacaacatattcaaagtgctagccggactacttcatctgggtaatatacagttcgccgcctcagaggacgaagcacagccctgccaacccatggacgatgcaaaatattcagtccgcaccgctgctagtctcttgggccttccggaagacgttctgttagagatggtgcagattagaactattcgcgctggacggcagcaacaagtctttagaaaaccgtgcgcgagagccgagtgcgacacacgcagggattgtttggcaaagctgatttacgccagactgttcgactggcttgtgagcgtgattaactcaagcatttgcgctgatacagacagttggacaaccttcatcggtctcctggacgtgtatggattcgaaagcttccccgacaattcacttgagcagttgtgtattaattatgctaacgagaagttgcaactggaggcctgtggcctggtagaaacaattcacatctccgccgcaggtttccctatcagagttagccaccgcaacttcgtcgaaagatacaagctcctcagacgcctacacccctgtacttcctcgggccccgactctccttatccggccaagggcctccctgagtggtgcccccactctgaggaggccaccctagaaccactaatccaggacatactacacactctgcctgttttgactcaggctgccgccattactggagattctgcagaggcgatgccagcgcctatgcactgtggtcggactaaagtgtttatgactgattcaatgcttgagctgctcgaatgcggtagagctcgtgtcttagagcaatgcgcacgctgcatccagggcggatggagacggcaccgccacagggagcaagagcgtcagtggagagccgtgatgcttatacaggccgcaatcaggagttggctgacccgaaagcatattcagagattacatgctgctgctacagtcattaaaagggcctggcaaaaatggcggatccgcatggcctgcctggcagccaaagaactcgacggcgtcgaggagaagcacttctctcaggctccatgttctctgagcacttcacctctgcaaactaggctcctggaagctattatcaggctgtggcctctcggtctagtccttgccaataccgcaatgggcgtcggctccttccaacggaagcttgtggtctgggcctgtctgcaactgccgcgcggctctccttccagctatacggtgcagaccgcacaggatcaggctggtgtgactagtattcgggctctccctcaaggctcgataaagtttcattgcaggaaaagcccacttcgctatgcagacatttgtcccgaaccttctccttattcaattaccgggttcaaccagattcttctggaaaggcaccgattaattcacgtgacctcaagcgctttcactggactcggatag

SEQ ID NO: 14030 - DNA, 2796 bp, synthetic construct
  source 1..2796: mol_type = other DNA; note = Synthetic coding sequence
atggctgaagtcgaggctgtgcagctgaaggaggaagggaacaggcattttcagctgcaagattataaagccgcgaccaacagctattcacaggccctgaaactgactaaggacaaagctctcttagccaccctttatagaaacagagccgcgtgcggtctgaaaaccgagtcatatgtgcaggctgcttccgatgcctcgagagcaattgatatcaattcgtccgacatcaaggcattataccggcggtgccaggccttggagcacttgggaaagctggaccaggccttcaaagacgtccagaggtgcgccaccctcgagccacggaaccaaaacttccaggagatgctgagacgccttaataccagcatccaggaaaagctcagggtccagttcagcacagattctcgggtccagaagatgttcgaaatcttattggacgagaactccgaggccgacaagagggagaaggctgccaacaacctcatcgtgctaggcagagaagaggccggagccgagaaaatcttccaaaataacggggtagctctgctcctgcagctcttggacactaagaaaccagagctcgtcctagccgcggttaggacactttcgggaatgtgctcagggcaccaagctagagccacggtgatcttgcatgcagttcggattgacagaatctgttccctgatggctgtagaaaacgaggagatgtctttggcagtgtgcaacctccttcaagctatcattgactctctgtctggcgaggacaaaagagagcatcgggggaaggaggaggcgcttgtgctggatactaagaaagacctaaaacaaatcacatcgcacctgctcgacatgttggtttccaagaaggtgagcgggcaggggagggatcaagcccttaatctactcaacaagaatgtgcctagaaaggacctcgctatacacgataactctcggactatatacgtggtcgacaatggcctgcgtaagatcctgaaggtcgtgggccaggtccccgatcttccctcctgtctgccactgacggataatacacggatgctcgccagcatcctgattaacaaactgtatgacgatctgcgctgcgacccagaacgagatcactttcggaagatctgcgaagaatacatcaccggtaaattcgaccctcaggatatggacaagaatctcaacgcaattcaaaccgtcagcggcatcctgcaaggacccttcgatctgggtaatcagcttctggggctgaagggagtgatggagatgatggtcgccctgtgcggatcagaacgggagaccgatcagcttgtggcagtcgaggccttaatccatgcgtccactaaactgagcagggccaccttcataataacgaacggggtgtctctgttaaaacagatctacaaaactactaagaacgaaaaaataaagatcagaacactggtcggtctttgcaaactgggttctgccggcggcaccgattacggactacgccagtttgccgaaggcagcactgagaaactggccaaacaatgccgcaagtggctctgtaatatgtctattgacactaggactaggcgatgggcagtagaagggctggcctatctgacgcttgatgcggacgtcaaagacgatttcgtccaggatgttcccgccctacaggctatgttcgaactggccaaggcagggacttccgataagaccattctctattccgtcgccactaccctagtgaattgtaccaatagctatgacgtgaaggaagtgatccccgagttagtccaactggccaaattcagcaagcagcatgtgccggaagaacaccctaaggacaaaaaagacttcatcgatatgcgtgtgaagcgcctcctcaaagctggcgtcatttctgccctggcatgtatggtgaaggccgattctgccattctaactgatcagaccaaagagttgctggcccgcgtcttccttgctctttgcgataacccgaaggatcggggcacaattgtggcccaggggggtggcaaggcgcttatccccttggcccttgaaggcactgacgttgggaaagtaaaggctgctcatgctttagccaagattgcggcagtgtcaaacccagacatcgccttcccgggtgagagggtctatgaagttgtgcggcctctggtgcgcttgctggacacccaaagggatggactacagaattacgaagcactcttgggcctgaccaacttaagtgggcggagcgataaattgcgacagaagatctttaaggaaagggccttgccagatattgagaactatatgttcgaaaatcatgaccagctgcgccaggcggccaccgagtgtatgtgcaacatggttctccacaaagaagtgcaggagcgctttctggctgatggtaatgataggctcaagctcgtggttctgctctgcggcgaggacgatgacaaggtgcaaaatgccgctgccggagctctggccatgctgaccgccgcgcataagaagctgtgtttgaagatgactcaggtaaccactcagtggttggaaatcctccaacggttgtgtctccacgaccaactctccgtccagcaccgcggcctggtgatcgcttacaatctgttggccgctgatgcagagctagcaaagaagctggtagagtccgagctgcttgagattctgaccgtggttggcaaacaggaacctgacgagaaaaaggctgaagtagtgcaaacagcgcgggaatgtctgataaagtgtatggactatggttttatcaagcccgtctcttag

SEQ ID NO: 14031 - DNA, 2022 bp, synthetic construct
  source 1..2022: mol_type = other DNA; note = Synthetic coding sequence
atggccagtcagttttgcctgcctgagtctccctgtctgtctccactcaagccactgaagcctcattttggtgacatccaggagggaatttacgtagctatccagcgctctgataagcgaattcaccttgccgtcgtgacagagatcaatcgcgaaaactactgggttacagtcgaatgggtggagaaagcagtcaagaaaggaaaaaagattgacctggaaaccatcttactcctcaacccggcattagatagtgctgaacatccgatgcccccccctccactgtccccactggcactagcccccagctcagctattcgggaccaacgcactgcaactaagtgggtggccatgataccacaaaagaatcagacagcaagcggggacagtctcgacgttcgtgtgccttctaaaccttgcctaatgaaacaaaaaaagagtccctgcctgtgggagatacaaaaacttcaggaacagcgcgaaaagaggcgccggctgcagcaggaaattcgggcacgaagagccctggacgtgaatacccgcaaccccaattacgagattatgcatatgatcgaggaatatcggcgtcaccttgattcttcaaaaatctccgtgcttgagccaccccaagaacataggatctgtgtttgcgtgcggaaaagaccactgaaccaacgcgagaccaccctgaaggatcttgatattatcaccgtccccagtgataatgtggttatggtgcacgaatctaaacagaaggtggacttgacccggtacctgcagaatcagactttctgctttgaccacgcatttgacgataaggccagtaatgaactggtctatcagtttaccgctcagccgctggtcgagtctatctttcgaaaaggaatggccacatgtttcgcctacgggcaaacaggttccggaaagacttacactatgggcggcgacttttccgggaccgcccaggactgctccaaaggcatctacgccctcgtcgcgcaagatgtgtttctgcttttgcggaattctacatacgaaaagctggacctaaaagtttatggtactttttttgagatctacggcggcaaggtgtatgacctgctgaactggaagaagaagttgcaggtgctggaggatggcaaccagcaaattcaggtggtggggttacaggaaaaggaggtctgctgtgtcgaagaggtacttaacctcgtagagatcggcaattcttgccgaacatcccgccagacacccgtcaacgcacactctagtagatcccacgccgtattccaaattatcttaaaatcgggaagaatcatgcacggcaaattttcacttgtagacttggccggtaacgaacgtggggctgatacaacaaaggcaagtagaaagaggcaactggagggagctgaaattaacaaatccctgctcgcactgaaggaatgcatccttgccctgggccagaataagccgcatacgccattcagagcctccaagctcacactggtgttgagggacagcttcattgggcaaaattccagtacctgtatgatcgctacaatctcacccggaatgacctcttgtgaaaacacgctcaatactctgcgctacgctaatcgggtcaaaaaacttaacgtggacgtgcgcccctaccaccgcggccattatccaattgggcatgaagcaccacggatgctgaaaagccacattggcaattcggagatgtctctgcagcgtgacgagtttattaagattccatacgtgcagagtgaggagcagaaagagatcgaagaggtcgagacccttcccactctgctaggtaaggacactaccatcagcggaaagggaagcagccagtggctggagaatatccaggagagagccggtggagtccaccacgacatagatttttgcattgccaggtctctgagtatcttggagcagaagatcgatgcactgactgagatacaaaagaagttaaaactgctcctagccgatttacacgtaaagtcgaaagtggagtag

SEQ ID NO: 14032 - DNA, 1236 bp, synthetic construct
  source 1..1236: mol_type = other DNA; note = Synthetic coding sequence
atggctaccacagcgacgatggcaacgtcaggctctgctcgaaaacgcctacttaaggaggaggacatgactaaggtggaattcgagacctctgaggaagttgacgtgacacccacattcgacacaatgggtcttcgggaggacctgctgcggggaatctatgcctatgggtttgagaagcccagcgctattcagcagcgggctatcaaacagatcattaagggcagggatgtcattgcccagtctcagagcggcactgggaagaccgcaaccttcagcatcagtgtgttgcagtgcttggatatccaagttagagaaactcaggctctgattctggcccctacccgggaactcgccgtgcagatccagaaggggttactggcgctgggcgactacatgaacgttcagtgccacgcttgcatcggcggcactaacgtgggtgaggacattcgcaagctggactatggacagcacgtggtggctggcaccccggggagggtttttgacatgatccgtagacgatcgctgagaacccgggccataaaaatgttagtacttgacgaagccgatgagatgttaaataagggcttcaaagagcaaatatacgatgtgtacagatacttgccacccgcaacacaagtggttctcatttcagcaactctcccccacgagatcctggaaatgacaaacaagttcatgactgacccaatacgaatcctagtgaaaagagatgagttgacacttgaggggattaagcagttctttgtcgccgtagaaagggaagagtggaaattcgatacactgtgtgatctgtatgacacactcaccatcacacaggcggttatattctgcaatacgaagcgcaaagttgattggttgacggagaaaatgcgggaggccaactttacggtgtcaagcatgcacggcgatatgccgcagaaggagcgagagtcgattatgaaggagtttagatcaggcgcctctcgagtcctcattagcaccgacgtctgggcacgggggcttgatgtgcctcaggtgagcctcatcatcaactacgacctgccaaataaccgcgaactgtatatacaccgtattggcagatctggccgctatggaaggaaaggagtggccataaacttcgttaagaacgacgatatccggatactgcgggacatagaacagtactacagcactcaaatcgatgagatgcctatgaatgtggccgacctaatctag

SEQ ID NO: 14033 - DNA, 1683 bp, synthetic construct
  source 1..1683: mol_type = other DNA; note = Synthetic coding sequence
atggaactgcccgctgtgggcgaacacgtgttcgctgttgagagtatcgagaaaaagcggattcggaaagggagggttgagtatctcgtaaaatggcggggctggtcccccaagtacaacacctgggaaccggaagagaacattctggatcccagactgctcatcgcttttcagaatcgcgaacgacaggagcagttaatgggatatcggaaaaggggacctaaacctaagccactcgtcgtccaggtgccaacatttgcacgacgcagtaatgtactgacaggactccaggactcatccactgacaaccgcgctaaactcgatttgggcgcacagggaaagggccagggccatcagtacgagctgaactcaaaaaagcaccatcagtatcagccacactcaaaggagagagctgggaagccccctcccccaggcaaatctggaaagtactactatcagcttaattcaaaaaaacatcacccctatcaacctgatcccaagatgtatgacctccaataccaagggggacacaaggaggcaccttcccctacctgccccgacctgggggccaagtcccacccaccagacaagtgggctcagggcgctggcgcaaagggctacctgggagcagtcaagcccctggcgggcgctgccggcgcaccaggtaaagggagcgagaagggccctccaaatgggatgatgccagctccaaaggaggctgtgaccggcaatggcattgggggcaaaatgaaaatcgttaaaaataaaaacaaaaatggacggatcgtcatcgtgatgtccaagtatatggaaaacggtatgcaggctgtcaagattaaatcaggagaagtggccgaaggtgaggcacggagccccagccataagaagcgggctgctgacgaaagacatcctccagctgaccgcacgtttaaaaaggcggccggagccgaagagaagaaagtcgaggctcccccgaagaggcgcgaggaggaggtgtctggagtaagtgatcctcagcctcaggacgctggcagtagaaaactatccccgactaaggaagcctttggggagcagcctctgcagttgactacgaagcctgacctcttggcctgggaccctgcccggaacacacatccccccagtcaccatcctcaccctcatccccatcaccaccatcaccaccaccaccatcaccatcatgctgtcgggcttaacctgagccatgttcgtaaacgatgtctgtcagagacccacggcgagagggaaccatgcaaaaagaggctgacagcaaggtctatatcaacaccaacatgtctcggtggttccccggcggcagaacggcctgccgatctgccacccgccgccgccttgccccaacctgaggtgatcctgctggattcggatctggacgagccaatcgatctaaggtgtgtgaagacccggtctgaagctggcgaaccgccctcctcattgcaggtgaagccagagacccccgcttcagctgcagtcgctgtagctgccgcggcagcacccacaaccaccgccgaaaagccacccgccgaggctcaggacgaacctgctgagagtttatccgagttcaagccgttctttggcaacatcatcatcacagacgtaactgctaattgtctgaccgttacctttaaggagtacgtcacagtttag

SEQ ID NO: 14034 - DNA, 1218 bp, synthetic construct
  source 1..1218: mol_type = other DNA; note = Synthetic coding sequence
atggattctctggttactgctaatacaaagttttgttttgaccttttccaggaaatcggaaaagacgatagacacaagaacatcttcttttcacccttgtcactttctgcggccctggggatggtccgcttgggagccagaagcgatagcgcacaccagatagacgaagtcttacatttcaacgaattttcacagaatgaatctaaggaacccgatccgtgcttgaagtcaaataagcagaaagcaggatcccttaataatgagagcggcctggtgtcttgctatttcgggcagttgttgtcaaagcttgatcgcatcaagactgattatactttgagcatcgctaatcgcctgtatggtgagcaggagttcccgatctgccaggagtatctggatggcgtgattcaattctatcatacaacaatcgagagcgtggattttcagaagaatcccgagaagagtcggcaggaaataaacttttgggtcgagtgtcagagccaagggaagattaaagaactgttctctaaagatgcaatcaatgctgaaactgttttagttctcgtcaatgctgtctactttaaagcgaaatgggagacatactttgaccatgagaacaccgtggacgcccctttttgcctgaatgctaacgaaaacaagtctgttaaaatgatgacacagaagggcctgtacaggattggatttatcgaagaggtgaaagctcagattttggaaatgcggtacacaaagggcaaattgagcatgtttgtgctgctccctagtcacagcaaagataatcttaaggggctcgaagagttagaaaggaagataacctatgaaaagatggtggcctggtcaagcagcgagaatatgagcgaagagtctgtggtgctcagttttcctcgattcacactcgaagacagttacgatttgaactccatcctgcaggatatgggaattaccgatatctttgacgagacccgcgcggacctgactggaatcagcccgtctcctaacctttatctctccaaaatcattcataagactttcgtcgaagttgacgagaacggtacacaggctgccgccgccaccggcgctgtggtgtcagagcggagtctcaggagctgggttgaattcaacgctaaccacccattcctgttttttatacgccacaataaaacccaaaccattcttttttacgggcgcgtgtgcagtccgtag

SEQ ID NO: 14035 - DNA, 3537 bp, synthetic construct
  source 1..3537: mol_type = other DNA; note = Synthetic coding sequence
atgttaagaatgaaacttccattgaagcctactcaccccgctgaaccaccccctgaggccgaagaacccgaggccgacgctcgcccaggggctaaagctccttctcggaggcgacgtgactgccgccctcccccccctccaccaccccctgccggaccctcacgggggccactgcctcccccacccccaccccgcggcctggggccacctgttgccggtggagctgctgctggcgccggaatgcctgggggagggggaggtccgagcgccgccttgcgagagcaagaacgcgtgtatgagtggtttgggctggtccttgggagcgcccaacggctcgagtttatgtgcggactcttggacctctgtaatcctctcgagctgcgtttcctggggagctgtctcgaagatttggctaggaaggactatcactatctgagggacagtgaggccaaagctaatggcctctctgatcccggacctcttgcagactttagggagccggccgtccggagtaggctgattgtatacctcgctctgttggggtcggagaacagagaagcggcaggtagactgcaccgtctgctgccccaggtggactccgttctgaaaagcctgcgcgcggccaggggggaggggagtagagggggggccgaggatgaaaggggggaggacggcgacggcgagcaggacgctgaaaaggacgggtccggccctgaaggcgggatcgtggaacccagagtgggaggaggactgggatcgagggctcaggaagagttactcctcctgtttacaatggctagtttacaccccgcgtttagtttccatcagagggtgacgttacgggagcacttagaacgtctccgcgctgcactgcgcgggggacctgaggatgccgaggtggaggtcgagccgtgcaagtttgctggtccacgggcgcagaacaactctgcccatggtgactacatgcagaacaatgaatcctcactgattgaacaggctcctattccccaggatggcctgaccgttgccccgcacagagcgcagcgggaagccgtgcacattgagaaaataatgcttaaaggcgtacaacgtaagagagcagacaagtattgggagtacacatttaaagtaaactggtcggacctcagcgtgacgacggtgaccaagacacaccaggaacttcaggaatttctgctcaagctgcccaaggaactgagtagcgagactttcgataaaacaatcctgcgcgcccttaatcagggctctctgaagcgtgaagaacgccgacaccctgatttggagcctatcctgaggcaactcttctcgagctccagtcaggctttcctccaaagtcaaaaggtgcacagcttttttcaatcgatctcatctgactctctgcattcaatcaacaatctgcagtctagcctgaagacctctaaaatcttggagcacttgaaggaagactcgtccgaggcttctagccaggaggaggatgtcctgcagcacgcaatcattcacaagaaacacactggtaagtcacctattgtcaacaacatcggcacaagctgtagccccctggatgggctgactatgcaatactctgaacaaaatggaattgtagactggcgtaagcagtcatgtacaactattcagcatccagagcactgcgtcacatccgcagaccaacacagcgcagaaaaaaggtcgttatcctcaattaacaaaaagaaagggaaaccccagacggaaaaggagaagatcaagaagaccgacaacagactcaactcgcgcattaacggcataagattgtctacgccccagcatgctcatggaggaaccgtgaaagatgtgaatctagatatcggctccgggcatgatacttgtggcgaaacctcaagtgagtcctatagttcccccagttccccccggcatgacggacgcgagtctttcgagagtgaagaggaaaaagatagagacacggacagcaacagcgaggactccgggaatccgagcactaccagattcaccgggtacggatcagtaaaccagaccgttacggttaagccaccggtccagattgcctcattagggaacgagaacggcaacttgttggaagatcccctcaactctcctaagtaccagcacatttcattcatgcccacactgcactgcgtgatgcacaatggtgcccagaaaagcgaagtcgtggtgccagctcccaaacccgcggatgggaagacaattgggatgctggtgcctagccccgtggcaatatccgctatccgcgaatccgcaaatagcacccccgtcggcatcttgggccccacagcatgcacaggtgagtcagagaaacacctcgagttgctagcatcccctttacctataccctctacattcctgccacattccagtacccccgccctacacttgaccgttcagagactgaagcttccgccaccccaggggtccagcgagtcttgtaccgtgaacattcctcagcagccgcctggctcgctctctattgcttctcccaacacggctttcatacccattcataatcccgggagctttccgggatcacctgtggccaccacggaccccatcactaaatcagcctcacaggttgtgggtcttaaccaaatggtgcctcagatagagggaaacacgggcacggtcccacagcccaccaatgtgaaagtggtcttacctgccgccgggctgtctgcagctcaacctccagcttcctatccattgcccggctcaccgctggcggccggggtgttacccagccagaacagtagcgtactaagtacagctgcaactagcccacaacctgcttctgctgggatcagccaggcgcaggccaccgttcccccagccgtgcctacccacacaccaggcccagctccatccccttcccctgctttaacgcactcgaccgcacagtctgactccacttcctacattagcgctgtgggtaacacaaacgcaaacgggacagtggttccaccccaacagatgggatcggggccgtgtggctcctgtgggcgtcgatgtagctgcggaaccaacggtaacctgcagttgaacagctactactaccccaatcccatgccagggccaatgtacagagtccccagcttctttaccctgccttccatttgtaatggctcatacttaaaccaggcgcatcagtccaatggcaaccagcttcctttctttctcccccagaccccctatgccaatggcctcgtgcatgatcctgtgatgggctcccaagcaaattacggcatgcaacagatggccgggttcggacgtttttacccagtttaccctgcgccaaatgtcgtggctaatacctctggctcagggccaaaaaaaaatgggaatgtgagttgttacaattgcggagtgtcagggcattatgcccaggattgtaaacaatcatccatggaggccaatcagcaaggtacctatagactgcgctacgcccccccattgccccctagcaacgacaccctggactccgccgattag

SEQ ID NO: 14036 - DNA, 411 bp, synthetic construct
  source 1..411: mol_type = other DNA; note = Synthetic coding sequence
atgccaggtaagaaagccagaaagaatgcccagccctcccccgcaagggcgcccgcaggccccgccggtacagctgggactgcccgcgaccaggccggatttgccataggcatgcagcttcggttcacacgcgggaagaagctactcagctcatccctttcatcaagccctttggccctgccaagggggcatgaggaacaggttcaggtagccggttctcgagtatgctactctactcaggagatatggcgccaaaccgagctcccggctgaaacgtccgaatctgatattcagactctccttcttcggaatctgaccgccagcaagacatgcatgcggggtctgctgcagaagagtttcctgcggagatgcacttttcaccagtttgaggaacgcttacactgcaactag

SEQ ID NO: 14037 - DNA, 879 bp, synthetic construct
  source 1..879: mol_type = other DNA; note = Synthetic coding sequence
atgaaggccactgttctgatgaggcaaccgggtcgagtccaggaaatagtgggcgcacttagaaaagggggaggcgatcgtcttcaggttatctcagactttgacatgactctgtctaggtttgcatacaacggcaaacgttgccccagctcatataacatcctggacaattccaaaataatttctgaagagtgcaggaaggagctgaccgctctgctgcatcactattacccaattgaaatcgacccccatcggaccgtgaaggaaaagctgcctcatatggtggaatggtggaccaaagcccataacctcctgtgccagcagaagatccagaagttccagatagctcaggtagttcgcgaatccaacgctatgcttagagaaggatataaaaccttttttaacaccctgtatcataataacataccgctgttcatttttagtgccggaatcggcgatatcttagaagagatcatacggcagatgaaggtcttccatcctaatattcacattgtctctaactacatggatttcaacgaggatgggtttctccagggcttcaaaggccagttaattcatacttacaacaagaatagtagtgcctgtgaaaatagcggctacttccagcagttagaagggaagaccaacgtcatcctgctaggcgactccatcggagacctaaccatggcagatggcgtacctggagtgcagaatattctgaagatcggtttcctgaacgacaaagtcgaagaaagacgggaacgttacatggatagttacgacatcgttctcgagaaagatgagacgctggatgtggtgaatggtctgttgcagcacatactgtgtcagggtgtccaactcgagatgcagggtccttag

SEQ ID NO: 14038 - DNA, 2010 bp, synthetic construct
  source 1..2010: mol_type = other DNA; note = Synthetic coding sequence
atggatctgaggaccgccgtgtataatgccgcccgggacggtaagctacaattgcttcagaagcttctcagcgggagatcacgcgaagagttagatgagttaactggcgaggtggccgggggaggcacacccctgctgatcgccgcccgctacgggcacctggatgtcgtggaatatctggtggaccgctgcggggcttccgtcgaggcaggcggttctgtccatttcgacggcgaaaccatagaaggggccccacccctgtgggccgcatccgccgccggtcacctagacgttgtgagatctctcctgagaaggggcgcctccgtgaacaggactacgcgtaccaattccacccccctgagggccgcctgctttgacggccatctagaggtcgttaggtacctggttggggaacaccaggctgacctcgaagtcgccaatagacacggacacacctgtttgatgattagctgctacaaaggtcaccgggaaatcgctcgctacctgctagaacagggtgcacaggtaaatagaagatcggctaaggggaatacggcactacacgattgcgcagaatccggctctctggagattctccagctgctgctggggtgtaaagctagaatggaacgggatggatacggaatgaccccccttctcgcagcaagtgtgactgggcacaccaacatcgttgagtatctaattcaagagcagcctgggcaggagcaggtcgccgggggcgaggctcaacccggcctgccacaagaagacccatccaccagccagggatgtgcccagccacaaggagccccatgctgcagttcatccccggaggagcccctgaatggagagtcttatgaatcctgttgcccaaccagtcgtgaggcggcagttgaagccctggaactgttgggagccacttacgttgataagaagcgcgatctccttggggcactaaagcactggagacgtgccatggagctgagacatcaagggggagaatatctgccaaagccagagccaccccaactggtcttggcttatgattattctagagaagtcaataccacagaggaactcgaagcactgattactgatccagacgagatgcgcatgcaggcccttctcattcgtgagcgaatcctcgggcctagccatccggatacgtcgtactatatccggtatcgaggtgctgtctatgcggattcggggaattttgaaaggtgtatccgcctgtggaaatacgccttggatatgcagcagtcgaatctggagcccctaagccctatgactgccagctcgttcctctccttcgcagaactgttctcctatgtgctccaggatcgcgccgccaagggctctcttggcactcaaattggtttcgcagaccttatgggcgtgctcaccaagggcgtgagggaagtcgagagagccctgcagctaccccgggagcccggtgatagtgcccagttcacaaaagctctcgccataatcctccatctcctctacctcctggagaaggtcgagtgtacaccctctcaagagcacctgaaacaccagaccgtataccgactgctcaaatgcgcccctcggggcaaaaacggctttacccctctacacatggccgtggacaaagacacaacgaatgttggacggtatcccgtgggacggtttccatcgctgcatgtcgtcaaagtcttgctagactgtggagccgacccagacagccgggattttgataacaacacccccctgcacatcgcagcccagaataactgtcctgccattatgaacgcactcatcgaagcaggagctcacatggatgcaaccaatgccttcaagaagactgcctatgagttgctggatgagaaactgctcgcccgaggaacgatgcagccgtttaattatgtgacccttcagtgtctggcagcccgggctttagacaaaaataagattccctacaaagggtttattcccgaggacttggaggctttcatcgaacttcactag

SEQ ID NO: 14039 - DNA, 720 bp, synthetic construct
  source 1..720: mol_type = other DNA; note = Synthetic coding sequence
atggccgcaactctgcttgcagcacggggggccggccctgctcctgcctggggtccagaggcctttacccctgactgggaatcaagggaggtttccacaggaactaccatcatggccgtccaatttgatggaggagtagtgctgggcgcagattcacgcaccacaactggctcttacatagcgaaccgcgtaacagacaaactcacgccaatccacgataggatcttctgttgtcgaagcggctctgcagcagacacccaggccgtggctgatgcagtgacatatcagttagggtttcacagcattgagctgaatgaaccccccttagtgcataccgcagcctctttgttcaaagaaatgtgctaccggtacagggaggacttgatggccggaataatcatcgcaggctgggaccctcaggagggcggccaggtgtatagtgtgcctatgggaggtatgatggttcgccagtcgtttgcaattggagggtccggcagcagttacatttatggatacgttgatgctacatatagggaagggatgacgaaagaagaatgtttacagtttaccgcgaacgcgctagcactggccatggagagggatgggagcagcggaggggtcattcggctcgccgccatcgcagaaagtggcgtggagagacaggttctgcttggggaccagatccctaaatttgctgttgctaccctgccccctgcctag

SEQ ID NO: 14040 - DNA, 1383 bp, synthetic construct
  source 1..1383: mol_type = other DNA; note = Synthetic coding sequence
atgaatttttccgaggtgttcaagctcagcagcctgctttgcaagttctcccccgacgggaagtacctggcgagctgcgtgcagtacagactcgtggtgcgggacgtgaacacactacagattctccagctgtatacgtgtctggaccagattcagcatatcgagtggtccgctgattctctgtttatcctatgcgcaatgtacaagcgagggctggttcaagtttggagtctcgaacaacccgagtggcactgcaaaatcgacgagggctcagccggcttagtggcctcctgctggagcccggatggtagacatattctgaacaccacagaattccacctgcggattaccgtctggagtctctgcacgaaaagcgtgtcttacattaagtatcccaaggcctgcctacagggaattaccttcacgcgggacggacgctacatggccctcgctgagaggcgcgactgtaaagactacgttagcatattcgtctgttctgattggcaacttttacggcattttgacacagacactcaggatctcaccgggattgagtgggcccctaatgggtgcgtgttagccgtgtgggacacttgcctggagtacaaaattcttctgtactctctcgatggtcgccttctgtccacttattccgcctacgaatggtccctcggcatcaaaagcgtggcatggtcgccttcctctcagtttcttgcggtgggtagctacgacgggaaagtcaggatcctcaatcatgtgacctggaagatgataactgaattcggtcatccagcggcaatcaacgacccgaagatcgtggtctataaggaggctgaaaagagcccccagctgggcttagggtgcctctccttccctccccccagggcgggggctggaccgctcccttccagtgagtctaagtacgagatcgcatcagtgcctgtgagccttcagactctgaagccagtgaccgaccgtgcaaatccaaagattgggatcgggatgcttgcattcagtcctgattcatacttcctggcaaccagaaacgacaacataccaaacgcagtgtgggtgtgggatatacaaaagctcagactctttgctgttctagaacagctgtccccggttagggcctttcagtgggacccacagcagcccagactggccatatgtaccggggggtctcgtctctacttgtggtctccagccggatgtatgagtgtccaggtgccgggcgaaggagacttcgccgtcctaagcttatgttggcacctttcaggagactcaatggccctcctcagcaaggatcatttctgcttgtgcttcttggaaaccgaagcggtggtcgggactgcttgcaggcagctgggcggccacacttag

SEQ ID NO: 14041 - DNA, 282 bp, synthetic construct
  source 1..282: mol_type = other DNA; note = Synthetic coding sequence
atgtctggccttcgggtctactcaacatctgtcaccggctctcgcgaaattaagagtcaacagtcggaggtgactcgaattctcgatgggaaacgcatccagtatcagctcgttgacatttcccaggacaacgcgttgagggacgagatgagggccctggccgggaatcccaaggccacacctccccagatagtcaacggagatcagtattgcggtgactacgagctgttcgttgaagcagtggagcagaacacactccaggaattcctgaagcttgcctag

SEQ ID NO: 14042 - DNA, 1920 bp, synthetic construct
  source 1..1920: mol_type = other DNA; note = Synthetic coding sequence
atgaacttagagaagctgtctaagcccgagctgctgaccttgttcagtattctggaaggagagctggaagcccgcgatctggtgatcgaggcactcaaagcacagcaccgggacacgtttatcgaagaacgatacgggaaatacaacatctccgaccctctgatggccctccaacgtgacttcgagacactgaaagagaaaaacgatggcgaaaaacaacctgtgtgtacgaacccacttagcatcttgaaggttgtgatgaaacagtgtaagaatatgcaggagcgcatgcttagccagttggccgccgctgaaagcagacaccgtaaggtcatacttgacctcgaagaggaaagacagcgacacgcacaggacacagccgagggagatgatgtcacctatatgttagaaaaagaaagagagcggctgacccagcaactggaatttgagaagagtcaggtgaaaaaattcgagaaggagcagaagaaactcagtagccagctggaagaggagcgttcacgacacaaacaactgagcagtatgttggtgctggagtgtaagaaggccacaaacaaagccgctgaagagggacaaaaggccggagaactgagtctgaagttagagaaggaaaaaagccgggtgtctaaattggaagaagaacttgcagctgagcggaaacgcggacttcaaacagaagcccaggttgagaaacagctgtccgagtttgacatcgaacgggaacagctgcgggcgaagcttaacagggaagaaaatagaactaaaacattgaaagaagagatggagtcgttaaagaagattgtgaaggatctcgaagcctctcaccaacattcgagtcccaacgagcaactgaagaaacctgttacagtgtccaaaggtacagccacagaacccctcatgctgatgagcgtattttgccagactgagtcattccctgcagagagaacacacggaagcaatatagctaagatgactaacacagggctgcccggcccagctacacccgcgtactcatacgctaagaccaatgggcactgtgatcctgagattcagactaccagggagctcactgcaggcaacaacgtcgaaaaccaagttcctcccagggagaagagcgtagctcttgcgcaggaaaagccggtggagaatggcggatgcccagtaggcatagagacacctgtgcccatgccctcacccctctcctcctccggatcttcactgtctccgagctctacggcttcctcaagcctgacatcgagtccttgtagctctcctgtgctaaccaagcgtctccttgggagttctgcatcctcccctggatatcaaagctcttaccaggttgggataaatcagcgattccatgcagcgaggcacaaattccagtcccaggctgatcaggatcagcaggcttccggtctacagagtcccccttcccgcgacttgtccccgaccctcatcgataacagcgctgctaagcagctggccaggaacacggtgacccaggttcttagccgcttcacctcccagcaaggtccaatcaaaccggttagtcctaatagcagccctttcgggaccgactaccgcaatctggccaacaccgcaaatcctcgcggcgacaccagccactcgcctactcccggtaaggtgtctagtccgctaagccctttgtcccccggcatcaagagcccgacaatcccgcgcgccgagagaggaaatcctcctccaattccaccaaagaaaccgggactgactccatccccctccgccactacacccctcaccaaaacccactcacaagccgcctcactgacaacagccgaagacctggccagctcttgttctagtaacaccgtcgtggccaatggcaaagatgttgagctgctgttacccacgagctcttag

SEQ ID NO: 14043 - DNA, 2487 bp, synthetic construct
  source 1..2487: mol_type = other DNA; note = Synthetic coding sequence
atgcgtttcctcgaagcaaggagtttggccgtggccatgggcgatactgtggtggagcctgcgccactgaaacccacatcggaacctacgagcggccctccggggaacaacggtggctctctcctctcagtgatcacggagggcgtcggagagcttagtgtcattgatccggaggtagcccagaaggcttgccaggaggtattggagaaggtcaagctcttgcatggcggcgttgcagtgtcatccagagggacacctctggagctcgtgaatggcgacggtgtcgacagcgaaataaggtgtcttgacgaccccccagcgcagataagagaggaggaagacgaaatgggggcggcggttgcgtccggcaccgccaagggagctagaaggcgacggcagaataattcagccaaacagagctggctactgcggctcttcgagtctaaactgtttgatatctctatggcaatctcttacctatataattccaaggagcctggtgtgcaagcctatataggcaaccgccttttctgtttcaggaacgaggatgtggatttttacctgcctcagttattgaatatgtacatccacatggacgaagatgtgggcgacgccattaaaccttatatcgttcataggtgccgccagtcaataaacttcagcctccagtgtgctctccttttaggggcatactcttctgatatgcacatctcaacccagcggcactcgagaggaactaagctacggaagctcatcctgagcgatgagctaaaaccagcacaccgcaaacgcgaactgcccagcctttcccccgccccagacaccggactgtctccttccaaacggacacaccagagaagcaaaagcgacgcaactgcaagcatcagcctgtcatctaatttgaagaggaccgcaagtaaccccaaggttgaaaacgaggacgaggagttatcatcatcaaccgaaagcatcgataactcattctcttcaccagtacgccttgctccagaacgtgagttcattaaaagcctcatggcaattggaaaacgtctcgcaactctgcccaccaaagagcagaaaacacagcgcttaatttccgaattgtcccttctgaaccataagctgcctgcccgggtttggctgcccacagcaggattcgatcaccatgttgtccgggtcccacacacgcaggctgttgtgcttaactccaaagataaggcaccttacttgatttacgtcgaggtgttagaatgtgaaaatttcgataccacatctgtcccggctcggattcctgagaatcgaatacggagcacgcgttcagtcgaaaacctacccgagtgcggcatcacacacgagcagagggcaggttctttctccactgtgccgaactacgataacgatgacgaagcatggtcggtggatgacatcggagaactgcaagtggaactgcctgaagtgcataccaacagctgcgacaacatctctcaatttagcgtggactcaatcaccagccaggagagtaaggagcctgtcttcatcgcagccggcgatataagaagaaggctttcagaacaactggcgcacactcccacagcgttcaagcgcgacccggaggaccccagcgcggtggccttgaaagaaccgtggcaagagaaagtacgccgtattagagaggggtctccttacggacatttgcccaactggcgcttgctcagtgtaattgtgaaatgcggcgatgacctccgccaagaactgctggcatttcaggtgctgaagcagcttcagtcaatttgggagcaagagcgggtgcccctctggattaagccttataagatccttgtcatatccgccgatagtgggatgattgaacccgttgtaaacgcagtcagcatccaccaggttaagaaacagtcacaattgtcactactggattattttctccaggagcatggcagttacactactgaggctttcctgtcggcacagcgcaacttcgtgcaatcctgtgctggctactgcttagtatgctatctgctccaggttaaagacaggcacaatgggaatattcttctggacgcagagggtcacattatccatatcgattttggtttcatacttagttcatccccaagaaacctgggatttgagacgagtgccttcaaactgacaacagagttcgtcgatgtcatgggaggccttgatggtgacatgtttaattattataagatgttgatgctgcaggggctcatagccgccagaaaacacatggacaaggtcgtccagatcgtggagatcatgcaacaggggagtcagctgccatgctttcacggctcatcaaccatacgcaacctcaaggagaggttccatatgtctatgaccgaagaacagctgcagctgttggtagagcagatggtcgacggttctatgcgtagtattacaacaaagttatacgacggattccagtacctgaccaacggaataatgtag

SEQ ID NO: 14044 - DNA, 4233 bp, synthetic construct
  source 1..4233: mol_type = other DNA; note = Synthetic coding sequence
atggcagacaccgacctctttatggagtgtgaggaagaggaactggaaccatggcagaagatctctgatgtgatcgaagactccgttgtagaagattacaactccgtggacaaaactactacagtgagcgtatcacagcaacccgtgagtgcgccagtcccaatcgctgcacacgctagtgtagccggacacctctcaaccagcaccacggtatccagtagcggcgcccagaattctgattccaccaaaaaaaccctcgttacgctgatagctaataacaacgcagggaatccattggtacaacagggggggcagcccttgatactgacccagaatccagcacctggtttgggcacgatggtgactcagccagtgttacggcccgtgcaggtgatgcagaatgccaaccatgtcactagctctccagtcgcatcgcagccaatttttattactacacaaggttttccagtaagaaacgtgagacccgtccagaatgctatgaatcaagtgggaattgtgcttaatgtacagcagggccagactgtgcgtccaataacgttggtgcccgcgcctggaacacagttcgtgaaaccaacggtgggagtgccacaagtgttcagccagatgaccccggttcggccggggtccacaatgccggtccgacccaccacaaacacctttacgacagtgattccagcaactctcacaatccgttcaacagtgcctcagtcccaaagtcagcaaactaaatccaccccatctacgtccactacccctacagcaactcagccgacctctctcggccaactggccgttcagtcgccaggacagagtaaccaaactacaaatcctaaactggcgcctagctttccatcgccaccggctgtgagtattgcctcctttgtcaccgttaaaaggccgggtgtgacaggggagaatagcaacgaggtcgcaaagctggttaacaccctgaacaccattcccagccttggtcagtctccaggccctgtggtagtgtccaataatagcagtgcgcacgggagccaaaggacatcaggccccgaatcctccatgaaggtgacatcttcaatccccgtgtttgacctgcaggacggtgggagaaagatttgtcctcgctgcaatgcacaattccgagtgaccgaggccctcagggggcacatgtgctattgttgtcccgagatggtggaatatcagaaaaagggcaaatcattagactcagagccttctgtaccctcagcggcgaaaccacccagtcccgaaaaaacggcacctgtggcctctactccttcctctaccccaataccggccctctctccgcctaccaaggttcccgagcccaatgagaatgtgggcgacgctgtacagactaaattgattatgctggtggacgatttttattatggaagggatggcggcaaggtagctcagctgacaaactttcccaaggtggccacttccttccgttgcccccactgtacaaagagactgaagaacaacatcaggttcatgaatcatatgaagcatcacgtcgagttggaccagcagaacggggaagtagacgggcatacgatatgccaacattgttatcgtcagtttagcaccccctttcagctgcagtgtcacctcgaaaatgtacacagcccttacgaaagcaccacaaaatgcaagatttgtgagtgggccttcgaatccgagccactcttcctccagcatatgaaggatacgcacaaaccgggcgagatgccgtacgtctgtcaggtctgtcagtatcgctctagcctctacagcgaggtagatgtccactttcggatgatccatgaggacacaagacacctgctgtgtccctactgcctgaaagtgtttaagaacggcaacgcattccaacagcactatatgcggcaccagaagagaaacgtataccactgtaacaaatgcaggctccagtttctgttcgctaaggataagattgaacacaagctgcagcatcacaagacttttcgaaaacctaagcagctggaaggcctgaaacctggaactaaggttaccatacgggcatcacgcggacaaccgagaactgtccccgtgtctagcaacgacaccccacccagcgctctacaggaggcagcacctttaacatctagcatggatcctttgccagtgttcctctatccccctgtgcagcggtctatccagaagcgggcggtgaggaagatgtcagtgatggggcgccagacgtgtctcgaatgctcattcgagatcccagactttcctaaccacttcccaacttatgtgcactgtagtctctgtcggtacagcacatgttgctctagagcttacgccaatcacatgatcaataaccacgtgccacgaaagagtcctaagtacctggccctgttcaagaactctgttagtgggatcaagttggcatgtacttcctgcactttcgtcaccagcgttggggatgcgatggccaaacatttggttttcaacccctcgcaccgaagttccagcatacttccgcgcggactaacctggattgctcactcccgccacgggcagacaagagatagagtacatgacagaaacgtcaaaaatatgtacccccccccatctttccccactaacaaggccgctaccgtgaaatcagcgggagcaacacctgcggaacctgaggagctgcttactccactggcccccgccctcccttctcccgctagcacagcaactccccctccaacccctacccatcctcaggccttagcactgcctccactggcaaccgagggagccgagtgcttaaatgtcgacgaccaggatgaggggtctcctgtgacccaagaaccagagcttgcatcaggcgggggagggtcgggaggagtaggaaagaaggagcagctatccgttaagaagctccgtgtggtgctgtttgccctgtgctgcaatacagagcaagccgctgaacattttagaaatccccagcggaggattcgccgttggctccgtaggttccaggcatctcagggcgaaaacttggaaggcaagtatttgtcctttgaggcagaagaaaagctcgccgagtgggtcctgacacaaagagaacagcagctcccagtgaatgaggaaacattatttcaaaaggcaacgaaaattggacggagtctagaggggggatttaaaataagctacgagtgggccgtgcgttttatgctacgtcaccacctgactcctcacgcgagacgggccgtggcacatacactgcccaaagacgtagccgagaatgcaggcctttttatcgatttcgtccagcgccagatccacaatcaggatttgccccttagcatgattgtagcgatagacgagatctcacttttcctcgacacagaagttctgtcttctgacgatcgcaaggaaaatgcccttcagaccgtggggacaggggaaccatggtgtgacgtggttcttgctatcctggctgatggcactgtcctgcctacactggtattttatcggggccagatggatcagccagccaatatgcccgattccattctgctggaggctaaggaatccggctactccgacgatgaaatcatggagctgtggagcacaagagtatggcaaaagcacaccgcctgccagcgttctaaagggatgctcgtcatggattgccaccgaacccatcttagcgaggaggttttggccatgctctccgccagcagtaccctgccagccgttgttccagccggctgctcgtctaagattcagcccctggacgtgtgcattaaacgcactgtgaagaattttcttcataagaaatggaaggagcaggctcgtgaaatggccgacaccgcatgtgactctgacgtcctcctgcagctggttctggtatggctgggtgaagtgttgggcgtgatcggggactgccctgagctggtgcagaggtcttttctggtcgcttccgtgcttcccggtcccgatggtaacatcaactctccaaccagaaatgcagatatgcaggaggaattaattgcgagccttgaggaacagctaaagttgtctggcgaacatagtgaatcatcgacaccgagacctcggtcctcaccagaggaaactatcgaaccagagtcactgcaccagttgtttgaaggcgaatcggagactgagtccttctatggctttgaggaagcggacttggatctgatggagatctag

SEQ ID NO: 14045 - DNA, 1488 bp, synthetic construct
  source 1..1488: mol_type = other DNA; note = Synthetic coding sequence
atgccccaactgctccagaatattaacggcatcattgaggcctttagacggtacgcccggaccgagggcaactgtaccgctctgactcgcggcgaattgaagaggctgttggaacaggaatttgcggacgtcatcgtcaagccgcatgatccagcaacagttgacgaggtgttaaggctgctcgatgaagaccacaccgggacagttgagtttaaggaatttctggtcctcgtgtttaaggtcgcacaggcctgttttaaaaccttgtcagagagtgccgaaggagcttgcggttcacaggagtctggttccctccattctggcgcttcccaggagctcggtgaaggacaaaggtctggcacagaggtcggacgagcaggcaaggggcaacattacgaggggagctcacaccggcaaagccaacaggggtccagaggtcaaaaccgccccggagtgcagacccagggacaggccactgggtcagcatgggtctcttcctatgaccgccaggctgaatctcagtcacaggagagaataagcccacagattcagttaagtgggcagacggagcagacccagaaagccggtgagggaaagaggaaccagacaaccgagatgcgccccgagcggcaaccccagacccgagagcaggatcgcgcccatcaaaccggagagactgtcactgggtccggaacccagacccaggccggtgcgacacaaacagtggaacaagactcaagccatcagacagggcgcacttctaagcagacacaggaagccactaacgaccaaaaccgaggcaccgagacccatggacaaggccgcagtcagacatcccaggctgtgaccggcgggcacgcccaaatccaggctggaacgcatacacagacccctacccaaactgttgagcaggattcatctcaccaaaccggtagtacctctacccagacacaggaaagcacgaatggtcagaaccggggcacggagattcacggccagggcagatcacagacctcgcaggctgttactggcggccacacgcagattcaagcaggctcacacaccgagacagtggaacaagataggagccagactgtcagccacggaggcgcacgtgagcagggtcagacgcaaacccagccgggtagcggacagcgatggatgcaggtttccaatcccgaagccggggaaacggtccccggcggccaggctcaaacaggcgcatctacagagtccggtagacaggaatggagctctacacatcccaggcggtgcgttacggaggggcagggagacagacagcctacagtggtgggtgaagagtgggttgatgatcattctagggagaccgttatcttgcgtcttgatcagggcaatctgcacactagcgtgagcagcgcacagggccaggatgctgctcagtcagaagagaagagggggatcactgcaagggaactgtacagctacttgagatccacaaagccctag

SEQ ID NO: 14046 - DNA, 1233 bp, synthetic construct
  source 1..1233: mol_type = other DNA; note = Synthetic coding sequence
atgaacatgccctctacgcctttggccccaacaaccgggactgctacatgctcttggagcgcctccacatgcacgaccacaaggcccgctgtcaggccccccagcttcccgcatcgccctcctggcaacgcagccctgccctcactcatgccatccaggcccacacaggtggcaggccagtgcggcgccggtaataattgggccaaggggcattacacggaaggagcagaattgatggagagtgtgatggatgtggtccgtaaagaggctgagtcttgcgactgtttacagggtttccagcttacccattccctcggcggaggaaccgggagtggtatgggaacactgttgctgagtaagatacgcgaagagtacccagatcgaattatcaatactttcagcattctgccgagtcctaaagtgtctgataccgtagtggaaccttacaatgctacgctgtccgtccaccagctgatcgagaacgcggacgagactttttgcatcgataacgaagcactgtacgacatctgcagcaaaacactgaagctgccgacgcccacatacggcgatttgaaccacctcgtgtccgctacaatgagcggggtgacaacctgtttgcggttccctggccagcttaacgcagacctgaggaagctggccgtgaatatggtcccattcccccgattacatttttttatgccaggcttcgcacccctgacttcccggggcagccagcagtatagagctctgactgtggccgagctcacacaacaaatgtttgatgcgaaaaatatgatggcagcatgtgatccacggcacgggagatatctcaccgcggcggccatctttcgcgggcggatgcctatgcgcgaggtagatgagcagatgttcaatattcaggacaagaatagttcttattttgccgattggttgcctaacaacgttaaaaccgctgtgtgtgatatcccacctcgtggtcttaaaatgagcgccacatttatcggcaacaacacagccatacaggagctttttaagagagtcagcgaacagttcactgcaatgttcagaagaaaagctttcctgcattggtatactggcgaaggcatggacgagatggagttcacagaggctgaaagtaacatgaacgatctcgtttcggaatatcagcagtaccaagacgctactgcggaggaggaagaggacgaggagtatgcggaagaggaagtcgcctag

SEQ ID NO: 14047 - DNA, 2106 bp, synthetic construct
  source 1..2106: mol_type = other DNA; note = Synthetic coding sequence
atggggtcagctgcggacgtccggttctctctgggtacaaccacccacgcgccacccggggtccataggaggtactccgcgcttcgcgaggaatcagccaaggattgggagaccagtccgctgccgggaatgttagccccagccgccggcccagccttcgattctgatcccgagatttctgacgtggatgaggacgaaccagggggactggtcggaagcgctgatgtggtgtctccttcgggacactctgacgctcagacactggccatgatgctgcaggagcagctggatgccattaatgaggagatccgcatgattcaggaggaaaaggagtccacggagctgagggccgaagaaatagaaacgcgggttacatccggtagcatggaagcgcttaacctgaaacagctgagaaagcgcggcagcatccctacatcgttaaccgcgctctcgctggcatcagccagccccccactgagcggaagaagcacacccaaactcacgtctaggagtgccgcacaggacttagatcgtatgggagttatgacactcccttcagacttgcgcaaacatagacgcaagctgttgtcacctgtgagcagggaggagaatagggaggataaagctactatcaaatgtgaaacttccccaccaagttctccacgaactctgagattagagaaactgggccatcccgccttgagtcaggaggagggaaagagcgcattggaggatcaggggtccaacccatccagttccaattctagccaggactccctgcacaagggcgccaaaaggaaagggatcaaaagcagtattggaagactgtttggcaaaaaagagaagggcagactcatccaactctccagggatggtgctactggccacgtgctcctcactgacagtgaatttagcatgcaagagcctatggtgcccgctaaactggggacccaggccgaaaaggataggcggcttaaaaaaaaacaccaactgctggaagacgcacgacggaagggtatgccctttgctcagtgggatggccccacagtggtgtcttggttagagttgtgggttggcatgcccgcttggtacgtggccgcctgcagagctaacgtaaagagtggggcgatcatgtcggcactctcggacaccgagatacagagagaaatagggatatccaacgcactgcaccgcctgaagttgaggctggccattcaggagatggtgtctttgacatcaccatccgccccccccacttctagaacctcaagtggcaatgtgtgggtgactcacgaagagatggaaacgctggaaacttcaactaagaccgactctgaggagggcagctgggcacagaccctggcgtacggggacatgaatcacgagtggatcggaaatgaatggcttccatccttggggcttccccagtacagaagctattttatggaatgtctagtggacgcccggatgctggaccacctcactaaaaaggacctcagggtacatctaaaaatggtcgactccttccacaggacatccctccaatatggcatcatgtgtctgaaaaggttaaactatgacaggaaagaactggagaagagacgtgaggagagccaacacgagatcaaggacgtgttggtgtggacgaatgaccaagtggtccattgggtccagagcatcggactgagagattacgccggaaatctgcacgagtctggtgtacacggagcactgctggcccttgacgagaacttcgatcataatacactcgccttgatcctgcaaattccgacgcagaacactcaggcgagacaggttatggagagagagttcaataacctactcgccctgggtaccgaccggaagctcgatgatggcgatgataaagtctttagaagagcgccttcatggagaaagaggtttaggccccgcgagcatcacggccgtgggggcatgctctccgcttctgcggagacccttccagccgggttcagggtctccacacttggaactctccaacccccccccgcgccacccaaaaaaattatgcctgaggcccatagtcattatttgtacgggcacatgctatctgcattccgagactag

SEQ ID NO: 14048 - DNA, 1029 bp, synthetic construct
  source 1..1029: mol_type = other DNA; note = Synthetic coding sequence
atggcctcagtgactcgcgccgtttttggggaactcccatccggcggcgggacagtggaaaaatttcagctgcaatctgatctcttgcgggtggacatcatttcctggggatgtaccatcaccgcactggaagtaaaagatcggcagggcagggccagtgacgtcgttttaggcttcgcagagttggaaggctacctgcaaaagcagccctattttggcgcagtgatagggagggtggctaaccggatcgctaagggcactttcaaggtggatggaaaggaatatcacctggctatcaacaaggaaccaaactcgcttcacggaggcgttcgcggttttgataaggtgctgtggacgcctcgcgttctatctaatggcgtgcaattctctcgaatatcaccagatggcgaagagggttacccaggggaactcaaggtttgggtcacctacactctggatggcggcgagttgatcgtcaattatagggcccaggcgagccaggcaacccctgtgaatttaaccaaccactcgtactttaatctggccggccaggcctcaccgaacattaatgaccacgaggtgactattgaggccgacacttacctcccagttgacgaaaccctgattccaactggggaggtggctcctgtgcaagggaccgcttttgacctcagaaaaccagttgagctgggcaagcatttacaggacttccacctgaatggctttgatcataacttctgcttgaaaggttcaaaagaaaagcacttttgtgcgcgcgtgcaccacgctgcgtccggccgcgtcctagaagtctacaccacccaacccggcgtgcaattctacactgggaatttcctcgacggtacactgaaaggaaagaatggggcagtgtatcctaagcacagcgggttctgcctcgagacacaaaactggcccgacgccgtgaaccagccacgctttccacctgtgttgctccgccctggcgaagaatatgatcatacaacctggtttaaattttccgtggcctag

SEQ ID NO: 14049 - DNA, 2295 bp, synthetic construct
  source 1..2295: mol_type = other DNA; note = Synthetic coding sequence
atgtctgacaccaggagacgggtcaaggtgtacactctcaacgaggacagacagtgggatgacaggggaacggggcatgtcagcagcacctatgtggaagagctgaaagggatgagcctgcttgtaagagccgaaagcgatggctcactacttttggaaagcaaaattaaccccaatacagcataccaaaaacagcaagatactctgatcgtctggagcgaggccgagaattacgacctggctctgtcatttcaggagaaagctggctgtgatgaaatctgggaaaaaatatgtcaagtgcagggtaaggacccttctgtggaagtcacccaggacctcattgacgaatcggaggaagagagatttgaagaaatgccagaaacttcccacctgatcgatctgccaacatgcgaacttaacaaacttgaagaaattgccgacttggttacgtcagtgctgtctagccctattagacgagagaaactcgccctcgccctcgaaaatgaaggatatatcaaaaagctcctccaactgtttcaggcctgcgaaaacctagagaacacagaggggctgcaccatctatacgagattattagagggatcctgtttctgaataaggctacactctttgaggtcatgttcagcgatgagtgtatcatggatgttgtcggatgtctggaatacgatcccgcgttggcacagccgaagagacatcgcgagttcttgacaaaaaccgccaagtttaaggaagtcatccctatcacggattccgagcttcgccagaagattcaccaaacctacagggttcagtacatacaggacatcatcttgccaaccccttccgttttcgaggaaaactttctgtccaccctgacttcattcatattttttaataaagttgagatagtaagtatgctccaggaagacgaaaagtttctgagcgaggtgttcgctcagttgacagatgaggccacagacgacgataagcgaagggaattagtgaatttcttcaaggagttctgtgcttttagccagacgctgcagcctcagaatcgtgacgccttttttaaaactctggcgaagctgggtatcctgcctgccctcgaaatcgttatgggaatggacgacctccaggttcggagcgccgctaccgatattttttcttacctagtcgagttctcccctagcatggttcgcgagtttgtgatgcaggaggcacagcagtctgacgatgatatcctgctcatcaatgttgttattgagcagatgatctgtgatactgatcctgagctgggtggcgccgttcagttgatggggcttttaaggaccctgatagaccctgagaacatgctggccaccaccaataagactgaaaagtcggaattcctaaacttcttctacaaccactgtatgcacgttctcactgctcctctgctgaccaatacgtcagaagataaatgcgagaaggacaacattgtgggctcaaataaaaataataccatttgccctggagcgctgcggttcatgcgcaggatcatcggcctgaaggatgaattctataatagatacataacaaaagggaatctatttgagccggtgattaacgcccttcttgacaacggcacccggtataacctactgaatagtgcagtgatagagttatttgagtttattcgggtggaggacattaaaagtctgactgcccatatcgtggagaatttctataaagctctcgagagtattgagtacgtgcagaccttcaaggggctcaaaaccaaatatgagcaagagaaggatcggcagaatcagaagctcaattcggtgccgtccattctgcggagcaaccgcttccgccgggatgctaaggccctggaggaagacgaagaaatgtggttcaatgaagacgaagaggaagaaggcaaagcggtcgtggcgcctgtggaaaagcccaagccggaagatgatttccctgacaactacgaaaaattcatggagaccaagaaggccaaagaaagcgaggacaaagaaaacctgcccaagaggacctccccaggcgggttcaagttcacattctcccatagcgcgtccgccgcaaatggcacgaatagcaagagcgtggttgctcaaattccccccgccactagtaatggcagtagctcaaagacaactaatctcccaacttctgtcaccgccaccaaggggagtcttgttggtttagtggactacccggacgacgaggaggaggacgaggaggaggagtccagccccaggaagcgccccagactggggtcttag

SEQ ID NO: 14050 - DNA, 231 bp, synthetic construct
  source 1..231: mol_type = other DNA; note = Synthetic coding sequence
atgagcaaggcccaccccccggaactaaaaaagtttatggacaagaaactatcactcaaattaaatgggggtaggcatgtgcagggcattttgcggggcttcgatccatttatgaatcttgtgatcgatgagtgtgtcgaaatggcgacatcaggacaacagaataatatcggcatggtggtgattcggggtaattcgattatcatgctcgaggcccttgagcgagtctag

SEQ ID NO: 14051 - DNA, 528 bp, synthetic construct
  source 1..528: mol_type = other DNA; note = Synthetic coding sequence
atgcaacttacacaccagctggacctttttcctgagtgtcgggttactctactactgtttaaggatgtgaaaaacgccggagatctcaggcggaaagctatggagggaactatcgacgggtctctaataaatccgaccgtgatcgtcgatccatttcagatcctggtcgccgcaaacaaagcggttcacctctataaactgggaaaaatgaagacacggaccctgtccaccgaaatcatttttaatttgtcccccaataacaatattagtgaggcattgaaaaaatttggaatctccgccaacgataccagcattcttatcgtgtatatcgaggagggggaaaaacagataaaccaggagtacctcataagtcaggtggagggccaccaggtgagtcttaagaatctgcctgagatcatgaatataaccgaagtgaaaaaaatatacaagctaagctcacaagaagagtcgatcgggaccctgctcgacgcaataatctgtaggatgtctactaaggacgtcctgtag

SEQ ID NO: 14052 - DNA, 909 bp, synthetic construct
  source 1..909: mol_type = other DNA; note = Synthetic coding sequence
atggccctgcacgacatggaagactttaccttcgacggaacgaagaggctgtctgtgaactatgtgaagggcatactgcaacctacggacacttgcgacatctgggataagatttggaatttccaagctaaaccagacgatctactgatcagcacctaccctaaagctgggaccacgtggacccaggagatagtggagctcatacaaaatgagggggatgtggagaagtcaaaaagagcccctactcaccaacgcttccccttcttggaaatgaaaataccctcccttggctccgggctcgagcaggctcacgccatgccaagccctcgtatactcaagacacacctgcccttccatctgcttcccccgtcactgcttgaaaagaactgcaagattatttatgtcgcccgcaatccaaaggataatatggtgtcgtactaccattttcaaagaatgaataaggcccttcccgcgccgggaacatgggaggaatactttgagaccttcctggccggcaaggtctgctggggatcttggcacgagcatgttaaagggtggtgggaggcaaaggataagcatcggatcctctatcttttctatgaggatatgaagaaaaacccaaagcatgaaatacagaagctggccgaattcatcggtaaaaagcttgatgataaagtgttggacaaaatcgtgcactatacgagttttgatgtcatgaagcagaaccctatggccaattacagcagtatccccgctgaaataatggaccactccattagtcctttcatgcgtaagggggcagtgggggattggaaaaagcactttacagtggcgcagaacgaacggtttgatgaagactacaagaaaaaaatgaccgatacccggctgacgtttcattttcagttttag

SEQ ID NO: 14053 - DNA, 2892 bp, synthetic construct
  source 1..2892: mol_type = other DNA; note = Synthetic coding sequence
atgtggtgcctccactgtaactccgagcgtacccagagcttgcttgagttagaactcgactccggtgtggaaggagaagctccgtcaagtgaaaccggaacaagcttggatagcccgagcgcatacccccaagggcctctggtgcccggtagcagcctaagcccagatcactacgagcatacatcagtgggggcttacggcctgtacagtggaccacccggacagcagcagagaactaggagaccaaaactccaacactctacctccatattgcgcaagcaggctgaggaggaggccatcaagcggtctcgttcactctctgagagctatgaactttcctccgacttgcaggataagcaagtcgagatgctcgagcgaaaatacggagggcgactagtgactcgccatgctgccaggaccatccagaccgccttcagacagtaccaaatgaacaagaattttgagcgattgcggagctctatgagtgagaaccggatgagtcgacgcatagtgctgtctaatatgcggatgcaatttagctttgaagggccagaaaaagtgcactctagttattttgaaggaaagcaggtaagcgtgacaaacgatggaagtcaacttggcgccttggtcagccctgagtgtggcgatctttccgagcccacgacccttaaatcaccagctccatcatccgacttcgccgacgctatcactgagttggaggatgctttttcaaggcaggtcaaatctctggcagaatccatagacgacgcattaaactgtcgctccctgcacactgaggaggcccccgctctcgatgcggcccgggccagagacactgaaccacagaccgcgttgcatgggatggaccaccgaaaactcgacgagatgacagcatcgtactctgacgtaactctgtacattgacgaagaggagctttcaccacctctgcctctgagccaggctggagacagaccctctagcaccgaatccgatctgagactccgagctggcggtgcggcacccgactactgggcacttgcccataaggaagataaagctgacaccgatacatcctgtagatcaaccccttctctagaacgtcaggaacaaagactgcgggtagaacacctgcccctcctgaccattgagcctcccagcgattcctctgtggacctcagcgacaggtctgagagggggagcttgaagagacagtcggcctacgagcgatccttgggaggccagcagggctctcctaagcacgggccccactcaggcgctccaaaaagccttccccgggaagagccggagttgaggcctagaccccccagacccctggacagtcatctagcaatcaacggcagcgccaaccgacaaagtaagagtgagagcgactattccgacggcgacaatgattccattaactcgacatcaaacagtaacgataccattaattgttcctccgaatcctcctcacgggatagcctgcgggaacaaacgctgagcaagcagacatatcacaaggaagcgaggaactcctgggattctccggccttctctaatgatgtcatccgcaagcggcactaccgcattggtcttaatctgttcaataaaaaaccagaaaaaggggtccaatacctaattgagcggggctttgtgccagacactcctgttggggtagcacattttctgctacagcggaaagggttgtcacgacagatgattggtgaatttcttggcaatcggcagaaacagttcaatagggatgttttggactgtgtggtcgacgagatggatttctcgactatggagttggacgaggcactcaggaaatttcaggcccacatacgcgtgcagggagaagcccagaaggtggagcgactgatcgaggcattcagccaaaggtattgtatttgcaaccccggagttgtgaggcagttcagaaacccagatacaatattcattctcgcctttgcaatcattctgctgaacactgatatgtactcgccgaacgtgaagcctgagcgtaagatgaagttagaggactttatcaagaatctgcgaggcgtggatgatggagaagatattccacgggagatgcttatgggaatctacgaacgcattaggaaacgagaacttaaaacaaatgaggaccacgtcagccaggtccagaaggtcgagaagctcatagtgggcaaaaagcccataggtagcttgcaccctggcctgggctgcgtccttagtctaccccatcggcgcttggtgtgttattgccgactgttcgaggtacctgaccccaataaaccccagaagttgggacttcaccagagagaaatcttcctcttcaacgacctgctggtggtgacaaaaatcttccagaagaagaaaaatagtgtgacctattcatttcgacaaagtttctcattatatggaatgcaggtgcttttgttcgagaatcaatattatcccaatggaattcgcctcacttcaagtgtaccaggggcagacattaaagtattgataaatttcaatgcgcctaaccctcaggataggaaaaagtttaccgacgatctgagagagtctattgctgaagtccaagaaatggagaaacacagaatagagagtgagctggagaagcagaaaggggtcgtcaggcctagcatgagccaatgtagctctctgaagaaagagagtggcaacgggacgctgtcccgggcttgcttggacgattcctacgcaagcggggaggggctgaagaggtctgccctcagtagctctcttcgggacctgtctgaagccggcaaaagagggcgacggagctcagctggtagtcttgagagtaacgtcgagttccaaccctttgagcctttacagccttctgttctctgtagctag

SEQ ID NO: 14054 - DNA, 711 bp, synthetic construct
  source 1..711: mol_type = other DNA; note = Synthetic coding sequence
atggccagcctggatagggtcaaggtgctggtgcttggggattctggcgtcggtaaatccagcctggtgcatctattgtgccaaaaccaggttctgggcaacccatcctggacagtcggttgttctgtggacgtaagagtacacgactacaaggaaggcaccccagaggaaaaaacctattacattgagttatgggatgtcggtgggtctgtggggtcagcttctagcgtgaagagcacacgtgcagtcttttataatagcgtcaatggaatcatcttcgtgcacgatctcaccaataagaaatcctcacagaatcttcgccgatggtcgctagaggccttgaatcgcgacttggtgccaaccggagtactagtcacaaatggagactacgatcaggaacagttcgccgataatcagattcccctcctcgtgataggtaccaaactcgaccagatccatgaaacaaagagacacgaggtgttaacccgcactgctttcctcgctgaggatttcaacccggaggagataaatctcgactgtacaaatccccggtatctcgcggcaggcagttccaatgcggttaaactgtcgagattctttgacaaggtgattgaaaaaaggtattttttacgtgaagggaatcagatccctggtttccccgatcggaaacgcttcggggccgggacactgaagtcccttcactacgattag

SEQ ID NO: 14055 - DNA, 2784 bp, synthetic construct
  source 1..2784: mol_type = other DNA; note = Synthetic coding sequence
atgcaatctattctttatcatggcctgattagagatcaggcctgccggaggcagaccgattactggcaatttgtgaaagacataaggtggctgagccctcactccgccctccacgtggagaaatttataagtgtacatgagaatgaccagtcctccgccgacggagcaagtgaaagggcagtagcggagctatggttgcagcattcactgcagtatcattgtctgagcgcccaattacggccgctactaggtgaccgccaatacattcgtaagttttacacggatgcagcgttcctgctgtccgatgcacacgtgaccgccatgctccagtgtttggaagccgtagaacagaataatcctcgactcttagctcagattgatgccagcatgttcgcacgtaaacacgaaagcccattgttggtcactaaatcccaatcccttaccgctctgccatcttccacctacacaccccctaattcatatgcacagcattcttacttcgggtcattcagttctctccatcagagtgtgccaaacaatggatccgaaagaagaagtacaagcttccccctctctggcccccctaggaagccgcaagagtcacggggtcacgtttcgcccgccgaagatcaaaccatccaggctccacctgtgtctgtcagtgcactagcccgagactcccctctgacccccaacgaaatgagtagcagcactttaacctctcccatagaagcaagctgggtgagctcccaaaatgattcaccaggtgatgcatcagaggggcctgaatatctggccatcggaaatctggatcctagaggtcggacagcctcctgccagtcacatagcagtaatgccgagtcctcaagcagcaatctcttttcgtccagtagtagccagaagcccgatagcgctgccagctccctcggtgatcaggagggggggggagaaagtcagcttagcagtgtgctccggcggagctctttctctgagggacaaacattaacagtcaccagcggagccaaaaaatctcacattcgctctcattcggacacctcaatcgcctcccggggagcgcctggcggtccccggaatataaccattattgtcgaggatcccatagccgagtcatgcaacgataaggccaagctgaggggtcccctcccatacagcggacagtcatcagaagtgagcacaccctcaagtctttacatggagtacgagggcggccgttacctttgctcaggtgagggcatgttccgccggccctccgaaggtcagagtctcatatcttatttgtccgagcaggatttcggaagctgcgccgatctggagaaggagaatgcccacttttcaatttcagagtccctcatcgctgcgatcgaacttatgaagtgtaacatgatgtcacagtgcctggaagaagaggaggtggaagaggaggacagtgatcgagagattcaggagctcaagcagaaaattaggctgagaagacagcagattcgcactaagaatctcctgcccatgtatcaggaagccgaacacggtagctttagagttactagttcctcgtcacagttctcatcgagggacagtgcacagttatccgacagcggaagtgctgacgaagtggatgagtttgaaatacaagatgcggatattaggaggaacactgcctcctccagcaagagtttcgtgtccagccagagcttttcccattgctttctgcattcgacatcagccgaagctgtggcaatgggcctcttgaaacagttcgaggggatgcagcttcccgctgcatctgaactggaatggctcgttcccgaacacgatgctccacagaagctcctccccataccagacagcctaccaataagccctgatgacggccagcacgcagatatctacaagctgcgtatacgcgtcaggggcaacctcgaatgggcacctccaagaccgcaaattatctttaacgtgcatccagccccaacccggaagattgccgtagcaaaacagaactatcgttgtgccggatgcggcattagaaccgatcccgactacattaaacgtctgagatattgtgagtatttgggaaagtacttctgccaatgctgccacgagaacgctcagatggccattcccagtagggtcctgcgcaaatgggacttttctaaatattacgtgagcaacttctcaaaggacctgctgataaagatttggaacgaccccctctttaacgtccaggatattaatagtgccttgtaccgcaaagtgaagctgcttaatcaggttcggctgctccgcgtccagctttgccatatgaaaaatatgtttaaaacttgccgcctggcaaaggaactgttggattccttcgacacagtacctgggcatctgactgaggatttgcacctatattcattgaatgatttgacagccacgcgcaagggagaactcggcccacggttagcggagctaacacgcgcaggcgctacgcacgttgagagatgtatgctgtgccaggctaaaggctttatttgtgaattttgccaaaatgaggacgatattatctttccctttgagcttcataaatgcagaacgtgcgaagagtgcaaggcttgctaccacaaagcatgttttaaatccggatcctgccctaggtgtgaacggttacaagccaggcgcgaggccctggcacgccagtctctggagagctacttgtccgattatgaggaagaacctgccgaggctctggccctggaagcagccgtgctagaggcgacctag

SEQ ID NO: 14056 - DNA, 300 bp, synthetic construct
  source 1..300: mol_type = other DNA; note = Synthetic coding sequence
atggcgagcgcatccgctagaggaaatcaggataaggacgcacacttccctccgccctctaaacagagcctgctcttttgccccaagagcaagttacatattcatcgcgccgagattagcaagattatgcgggaatgtcaggaggaaagcttctggaagagagctctccctttttcacttgtgagcatgctcgtgactcaggggctcgtgtaccaaggctatctggcggccaacagtagatttggcagcctcccaaaggtggccagaactgcttcactccctgtaagaaatgcaaagtag

SEQ ID NO: 14057 - DNA, 786 bp, synthetic construct
  source 1..786: mol_type = other DNA; note = Synthetic coding sequence
atggtggtattgtctgtgccagctgaggtgactgtgatcttgttggacatcgagggcacgacaactcctatagcatttgtgaaggatattctatttccctacatagaggagaatgtgaaggagtacctgcagacgcactgggaggaggaggagtgccaacaggatgtgtctctgctaagaaagcaagccgaggaagacgctcaccttgacggcgcggtgcccattccagctgccagtgggaacggcgtcgacgaccttcaacaaatgatccaggccgtggttgacaacgtgtgctggcagatgtccctggatcgtaagaccacggccctgaaacagctgcagggtcatatgtggcgggctgcatttaccgccggccggatgaaggccgaattcttcgctgacgtcgtgcctgccgtgagaaaatggcgcgaggccgggatgaaagtctacatctattcctctggctcagtggaagctcaaaaactcctgttcggacacagcacagaaggtgacatccttgagctcgtggatggccattttgataccaagatcggccacaaagtcgaaagcgagagttacagaaagattgctgattctatcggctgtagcactaataacattttgtttcttactgacgtcaccagggaggcatccgccgctgaggaggcagacgtgcatgttgccgtggtggttcgccccgggaacgccgggctgaccgacgacgagaagacgtattactctctgataacgagcttctcagagttgtacctaccgtccagcacttag

SEQ ID NO: 14058 - DNA, 1188 bp, synthetic construct
  source 1..1188: mol_type = other DNA; note = Synthetic coding sequence
atggctgaagatggactgcctaagatttatagccatcctccaacggaaagctctaagacccccaccgctgctactatcttttttggagcagacaacgccatccccaagtccgagacaacgattacttctgagggcgaccacgtgacatcagtgaatgagtatatgctggagtccgatttttccactacgacagacaataagctcacggcaaagaaggagaagttgaagtcggaggatgacatgggaacggattttatcaaatctactactcacctgcagaaggagatcacatccttgaccggaaccaccaattcaataacacgagattccataaccgaacacttcatgcctgtgaaaattgggaacatctcatctccggttacaactgtttcactgatagattttagcacggacatcgcaaaagaagatatcttactggcaacgattgacaccggcgatgctgaaatttcgattacttccgaagtcagtggaaccctcaaagattccagcgccggcgtggccgatgcacccgcatttcctaggaagaaggacgaagccgatatgtccaactataacagctcgatcaagtccaatgtgccagccgatgaagctgtacaagtaaccgatagtactatacccgaagcagagatccctccagcacctgaggagtcctttactacaataccagatatcaccgccctggaagaggagaaaatcaccgagatcgacctgagcgtgctcgaagatgacacaagcgctgtggctacgctgaccgacagtgacgagaaattcatcacggtatttgaactcacaaccagcgcggaaaaagataaggacaagcgggaagatacactacttactgatgaagaaactacggagggggcatccatttggatggagcgagatactgctaacgaggcagagacccattccgttctgttgaccgccgttgagagccgctatgacttcgtggtgcccgcaagcattgccacaaacttagtcgaggagtcttccaccgaagaagacctgtctgagacagacaacaccgagaccgtgcctaaaatcacagagcccttttccggcacaacgtccgttctggatacaccagattataaggaggatacaagcacaaccgagacagatattttcgaacttctcaaggaagaacctgacgagttcatgatttag

SEQ ID NO: 14059 - DNA, 921 bp, synthetic construct
  source 1..921: mol_type = other DNA; note = Synthetic coding sequence
atgtacttttgttggggcgctgactctcgcgaactgcaacggaggcgtaccgccggctcacccggggcagagcttctgcaggccgcctccggtgagcgccactcactcctactgctgaccaaccatagagttctctcttgtggggataacagcagaggccaacttggaagacggggtgcgcaacgcggcgagttgccagaacccatccaggcgcttgagaccctgatcgtagatctcgtgtcctgcgggaaagaacattctctggcggtctgtcacaaggggcgcgtgttcgcatggggagctggaagcgaaggccaactaggaattggtgagttcaaagagatctcgtttaccccgaagaagattatgaccctcaacgacattaaaattatccaggtgagctgcggccactaccattctctggctctgagcaaggatagccaggtgtttagctgggggaagaattcacacgggcaattgggtctggggaaggagttcccatctcaggcatcacctcagcgagtgcgctcactggaagggattcctctggctcaggtcgccgcaggcggtgcacattcttttgcactttctctctgcggaacctcgttcggttggggctctaactctgcaggccagcttgccctttctggcaggaacgtgccagttcagagcaacaagcccctgtctgtgggggccctgaaaaatctgggcgtggtttatatttcatgcggtgatgcgcacacagccgtcctaacccaggacgggaaggtctttacgttcggggacaacagaagcgggcagctcgggtatagtccaactcctgaaaaaagaggtcctcagttggtggaacggatagatgggcttgtgtctcaaatcgattgtgggagaaattccaagcatgggttcatgacgttcttttag

SEQ ID NO: 14060 - DNA, 909 bp, synthetic construct
  source 1..909: mol_type = other DNA; note = Synthetic coding sequence
atggggaactgctgctggacccagtgttttgggcttctgaggaaagaggctggccgactgcagagggtaggcggcggcggaggcagtaaatacttcaggacctgttcaaggggggagcacctgactatcgaattcgagaatctggtggagagcgatgaaggagagtcacccggatctagtcatcgccctctgactgaggaggagatcgtcgatttgcgcgagcgccattatgattcgattgctgagaagcaaaaggacctggacaaaaagatccaaaaagaacttgccctgcaagaggagaagctgcggttggaggaagaagccctgtatgccgcacagcgggaagcagctcgcgctgctaaacagaggaagctgcttgaacaagagcgtcagcgcattgttcagcagtaccacccgagcaataatggagaatatcagagtagcggccctgaggacgattttgaaagctgtctaagaaatatgaagtcccagtacgaggtctttcgttcaagtagactgagcagcgacgccacagtgcttacaccgaatacagaaagttcgtgcgacctgatgacaaagactaaatccacatctgggaacgacgactctacttccctagatcttgagtgggaagatgaagaaggcatgaatcggatgttgcctatgagagaacggagtaaaaccgaagaggacatcctgagagctgctcttaaatactcgaacaagaaaacagggagtaatcccaccagcgccagtgatgactccaatggtctggagtgggagaacgattttgtgtccgctgagatggatgataacggcaactccgagtactctggcttcgtgaatccggtgctagagctgagcgattccggcatccggcacagtgacactgaccaacaaactcgatag

SEQ ID NO: 14061 - DNA, 1641 bp, synthetic construct
  source 1..1641: mol_type = other DNA; note = Synthetic coding sequence
atggccactctggtggtgaacaaactgggtgctggcgtggactccggcagacagggctcccgtggcactgccgtggtgaaggtgttagagtgcggagtctgcgaggacgtcttctctctgcaaggcgacaaggtgcctagattgctgctttgtggccacaccgtgtgccatgattgcctcactcgacttccactccacggcagggccatcaggtgtccttttgaccggcaagtgactgaccttggggattccggcgtgtgggggctgaagaagaatttcgccttgctggaattactcgaacgcctccagaacggtcctatcggccaatacggagctgctgaagaatctattggcataagcggagagtcaatcattcggtgtgatgaagatgaggcgcaccttgcttcagtatactgcacagtctgcgctacccatctgtgctctgagtgttctcaggtgacacattcaacaaaaacactagctaagcataggcgtgttccattagcggataaacctcacgaaaaaactatgtgcagccagcaccaggtgcacgctattgagtttgtgtgtctggaggagggttgccagacttctcccctgatgtgctgcgtttgcaaagagtatggcaagcaccaggggcacaaacactctgtgctggaacccgaggcgaaccagatccgggccagtatcctggatatggcccactgcatacgaacattcactgaagagattagcgactactccaggaaattggtgggaatcgtgcagcacatcgaggggggagaacagatcgtcgaggatggcattgggatggcgcacacagagcacgtgcctggcaccgcggagaatgccagatcatgcatcagagcttatttttatgacctccacgagacactttgccggcaggaggaaatggctttgtctgttgtggatgcacatgtgcgggagaaactcatatggctgaggcagcagcaagaggatatgaccattctgctgtctgaggtgtcggccgcttgcctgcattgtgaaaagaccttgcagcaggatgattgccgtgtggtcctggccaaacaggaaatcaccagactgctggaaaccttgcagaagcagcagcagcagtttactgaggtggcggatcacatccaacttgacgcttccatccctgttacattcaccaaggataatcgcgtgcacatcggccctaagatggaaatcagggttgtcaccttaggtctggacggtgcaggtaagacgacaattctctttaagctaaagcaggatgagttcatgcagcctattcccaccataggcttcaatgtggagaccgtggaatacaaaaacttgaagtttaccatttgggatgtcggtggcaagcataaactgcgtccactctggaaacactactaccttaacacccaggcagtggtgttcgtcgtggacagctctcatcgtgaccgcatctctgaggcgcactcggaactggccaagctgcttaccgaaaaagaactgcgcgatgctcttctcctcatctttgccaataaacaagacgttgcaggcgcgctaagcgtagaagagataacagagttgctgtccttgcacaaattatgctgcggaagaagctgcttcagcgacaacatgtag

SEQ ID NO: 14062 - DNA, 609 bp, synthetic construct
  source 1..609: mol_type = other DNA; note = Synthetic coding sequence
atggcagtgccagcggctcttattctgagagaatcaccttccatgaagaaggcagtcagcttgatcaatgccatcgacacgggtagattccctcgtcttctaacaaggatcctgcagaagttgcatctgaaggccgagtcttcattttccgaggaggaggaggagaaattacaagctgcatttagcttggagaaacaggacctccacttagttctagaaaccatttcgttcatactagaacaagctgtgtaccacaatgtaaagccagcagccctccaacaacagcttgagaatattcatctgagacaggacaaagccgaagctttcgtgaatacatggtcgagcatggggcaggaaaccgtggagaagtttaggcaacggatcctggccccatgtaaattggagacggtcggctggcaactaaatctgcagatggctcactctgcccaagcgaagcttaagtctccacaagcggtgctgcaactgggggtgaacaatgaggacagcaagagcctagagaaagtgttggtagagtttagtcacaaagagctgtttgacttttacaacaagttggagactattcaagctcagctcgactccctcacgtag

SEQ ID NO: 14063 - DNA, 1521 bp, synthetic construct
  source 1..1521: mol_type = other DNA; note = Synthetic coding sequence
atggaagctgacatcatcacaaatctgaggtgtcgactcaaggaagctgaagaggagcggctgaaggccgctcagtatggactacagttagtggagagccaaaatgaactacagaatcagctggataagtgccgcaacgagatgatgaccatgacagagtcatacgagcaggagaagtacactctccagcgagaagtagaactgaagagcaggatgctagagagtttgagttgtgagtgcgaggcaatcaagcagcaacagaagatgcatctggagaagctggaagagcagctttcaaggagccatggtcaagaagtgaacgaactcaagaccaaaatcgagaagctgaaagtagaattggacgaggcacggttatccgaaaagcagctcaaacaccaggtcgaccaccaaaaagagttgttaagttgcaagtctgaagaactaagagtgatgtccgagagagtgcaggagagtatgagcagcgagatgttggcgttacaaattgaactgacagaaatggagagcatgaaggttaagtaccaatcattaaaaaaacaaaatgtgttcaatcgagagcaaatgcagaggatgaaattacagatcgctaccctgttacaaatgaagggctctcagacagagttcgagcagcaagagcgcctgctggccatgctggaacagaagaatggcgagattaagcacctcctgggtgaaattaggaaccttgaaaaattcaaaaacctatacgattcgatggaaagtaagcccagcgtcgactcaggaactcttgaggataacacctactacacggatttactacagatgaaactggacaacctcaataaagagatcgagtccaccaagggcgaactcagcatacaacgcatgaaggccttgttcgaatcacagcgcgcactagacatcgagcgaaaactgttcgccaatgaacggtgcttgcagctgtccgaatcggagaatatgaaactccgagccaagctcgacgagttaaaacttaaatacgaacccgaggagaccgtggaagtgccagtattgaagaagagacgtgaggtcttaccagtggacattaccacggccaaggatgcctgcgtgaacaactcagctttgggtggggaagtgtatcggttgcccccccagaaagaggaaactcagagctgccccaatagcctagaggacaataacctccagttagaaaagtccgtgtccatttataccccagtagtcagtttgagcccccataagaacctgcctgtggacatgcagcttaaaaaagagaagaaatgtgtcaaactcatcggtgtcccagctgatgctgaggccctgtccgaacgctctggcaacaccccaaactctcctcgcctcgctgcagaatccaagctccagaccgaggtcaaggaggggaaagagactagctcgaagctagagaaagagacctgcaagaaactgcacccaatcttgtatgtatccagcaaaagtacaccagaaacccaatgcccgcagcaatag

SEQ ID NO: 14064 - DNA, 1842 bp, synthetic construct
  source 1..1842: mol_type = other DNA; note = Synthetic coding sequence
atggcgacaatacctgactggaaactacagctgcttgcccggaggcggcaagaggaggcgtcagtaagagggcgtgagaaggctgaacgcgaaaggctgtcccagatgcctgcttggaagaggggactgctggagcggagacgtgccaaattgggattgagtcctggagaaccatcaccagtactcggaaccgtggaggcgggtccaccggatcctgacgaatcggcggtcctgctagaagctattggtcccgttcatcagaatcgctttattagacaggagagacagcagcaacagcaacagcaacaacgaagtgaggagcttttagccgagaggaaacccggacccctggaggcgcgagagcgcaggccatcacctggtgagatgcgcgatcaatccccgaagggtcgagaaagtagggaggagcgcctctcaccccgggaaaccagagagagaagactcggtatcggtggcgcccaagagctttctctgcgacccttagaggcacgggattggagacagtcccctggagaggttggagaccgcagcagccggctaagtgaggcttggaagtggcgcctgagtcccggcgagactccggagcgctcactgaggctggcagagagcagggaacagtcccctaggcggaaagaggttgaatcgcgcctcagccctggggaatcagcatatcagaagctcggcctgacagaagcgcataaatggcgtcctgactcccgggagtcccaggaacaatccttggttcaactagaagccaccgaatggaggctccggagcggtgaggagagacaggattatagtgaagagtgtggaaggaaagaagagtggccggtgcctggcgtcgcccctaaagagaccgcagagctttcagaaactctgaccagagaggcccagggaaattcctctgccggggtggaggctgcggagcaaaggcctgtggaggacggggaacggggcatgaaaccgaccgagggctggaagtggacccttaacagtggcaaagctcgcgaatggaccccccgcgatatcgaggctcagacacagaaaccagagcctcctgagtctgccgagaaactgttggaatctcccggcgtggaagccggagaaggtgaagccgaaaaggaggaagccggtgcccagggccgaccactgagggccctccagaattgttgtagcgtgccgtctccactccccccagaagatgctggaacaggaggcttgcgccagcaagaggaggaagccgtggagctccagcctccccccccagccccgctctctccgcctccacctgctcctacagctccccagccgcccggcgatccactgatgtccaggctgttctacggtgtgaaggccggaccaggagtcggggcacctcggcggtcaggccacacgtttaccgtgaatcccagaaggtccgtcccgcctgcaaccccggccacacccacgagtcctgccacagtcgatgccgcggtccccggggcgggaaaaaagagatacccgactgcagaggagatcttggttctgggaggataccttcgtctgtccaggagttgcctggcgaaagggtcaccggaacggcaccacaaacagctcaagatatcgttctctgagaccgcccttgagactacctatcagtatccatctgagtccagcgtgctggaggagctcggacccgagccagaggtgccaagtgcacctaatcccccggctgctcagcctgatgacgaagaggatgaggaggaactccttttgctgcagcctgaactacagggaggcttgcggacaaaggccctgatcgtcgacgaaagctgccgcaggtag

SEQ ID NO: 14065 - DNA, 654 bp, synthetic construct
  source 1..654: mol_type = other DNA; note = Synthetic coding sequence
atgagttggacctgtcctcgctgtcagcagcctgtattctttgctgaaaaggtcagttcacttgggaaaaactggcacaggttttgcctgaagtgcgaaagatgccattccattttatctcctggaggccatgcggaacataacggtcggccttattgtcacaagccttgctacggggctctttttgggcctaggggggtgaacatcggcggggtaggtagctacctgtataatccacccacacctagccccggctgtacaacccctctcagtcccagtagtttctcccctccgagacctcgcaccggcctcccacaagggaagaagtctcctccacatatgaaaacttttacaggagagacctcactgtgccctgggtgcggggagcccgtatactttgccgagaaagtcatgtcccttggaaggaactggcacagaccttgcctcaggtgtcagcgttgccataagacgctaactgcaggatctcatgccgagcacgatggtgttccatattgtcacgtcccatgttacggatatctgttcggcccgaagggtggacagcctcatccccggcattgggatggaatgtacatgccggaagtgtggcacgtgcatgggctgtgggtgtgcgtggataattttccctgtggatag

SEQ ID NO: 14066 - DNA, 1503 bp, synthetic construct
  source 1..1503: mol_type = other DNA; note = Synthetic coding sequence
atgaaccagcggaggtcagagtctaggcctggcaaccacaggctgcaggcctacgcggagccaggtaagggcgattccggaggtgctggtccactctcaggcagtgcacgacgcggcagaggcggcggtggcgccattcgggtccgtagaccttgctggagcggcggggcaggcagggggggggggccggcctgggccgtccgcctgcctactgtgactgccggctggacctggccagcactcaggacactgagctcactgcgcgccggcccctccgagcctcacagtcctggcaggcgaccacccagggcagggcggcctctgtgccaggctgatcctcagcctggcaaggcagcacgcaggagtctagaacccgaccctgctcagacaggaccaaggcctgccagagccgccggcatgtcagaggcacgcaaaggccctgacgaggcagaagagtctcaatatgactcaggcattgagtccttgcggagtctccgctcactacccgagtctacaagcgcccccgcctcaggccccagtgacggttcccctcagccatgcacccacccccccgggcctgtgaaagaacctcaggagaaagaggacgccgacggcgagagagcggatagcacatacgggtccagcagcctgacctacaccctctctttgctgggggggcctgaggccgaagatcctgccccccgtttgccattgccacacgtgggcgctctctccccacagcagctggaagctctgacgtacatatccgaggacggggacacacttgtgcacttggccgttattcatgaagcacccgcggtcctcctgtgctgtctggcccttctgccccaagaggtgttggacatccagaacaatctgtaccagaccgccctgcacctggccgtgcacttagatcagccaggtgcagtccgggcgctggtcctcaaaggagcgtccagagcactgcaggacaggcatggcgataccgcgcttcacgttgcctgccagcgtcagcacctggcctgtgcccgctgcttgctggagggacgcccagaaccaggcagggggactagccacagcctcgatctccagcttcagaactggcagggtctcgcctgtctgcatatagccaccctgcagaaaaatcaacccttgatggagctcctattaagaaatggcgcagacatagatgtccaagaggggacctccggaaagacggcgctccacttagcagtggaaacccaggagaggggattggtacagttcctgctacaagctggcgcccaagtcgatgctcgcatgctgaacggatgtacaccactccatctggccgcaggcaggggtctcatgggcatctcgagcactctgtgtaaagccggcgctgacagtctgctaaggaatgtggaggatgagacaccccaggacctgacagaggagagcctggtcctgctgcctttcgatgatctgaagatttccggtaaactactgttgtgtacggactag

SEQ ID NO: 14067 - DNA, 1881 bp, synthetic construct
  source 1..1881: mol_type = other DNA; note = Synthetic coding sequence
atggaaggaccaagagagaatcaagatcccccccccagaagtctggcccgccatctcagtgacgccgatcggctcaggaaggttatccaggaactggtcgacacggaaaaatcctatgtcaaggacctatcatgtctgtttgagttgtatttggaaccactccagaatgagacattcctcacacaagacgagatggaatccctgtttggatcgcttcccgagatgctcgaattccagaaagtgttcctggaaaccctggaggatgggatcagtgcttccagtgatttcaatacactcgaaactccgtcacagttccgcaagttactcttttcactgggcgggtcattcctatattacgctgatcacttcaagctgtactctggcttttgtgcaaatcatatcaaagtccaaaaagttctcgaaagggctaaaaccgataaggcattcaaggccttcctggacgccaggaatcctaccaaacagcactctagtaccctcgagtcttacctgataaagcctgtccagcgagttctgaaatacccactgctgcttaaggagctcgtctcactgaccgatcaagagtccgaggaacattatcacctgaccgaagcattgaaggccatggagaaagttgccagccatatcaatgaaatgcagaaaatatacgaagactatggaacagtattcgaccagctcgtggccgagcagagcgggactgagaaggaagtcacagagctgtcaatgggcgaactccttatgcattctacagtatcctggcttaatccattcctgagcctaggcaaggcacgcaaggacctcgaactgacagttttcgtgtttaaaagagccgtgatcctcgtgtacaaggagaattgcaagctcaagaagaaattgccgtcgaatagccgccctgctcacaattctacagacctagatcccttcaagttcagatggctcatccctatatcagccctccaggttcggctgggaaaccctgccgggacggagaataacagcatttgggagctgatccacacaaaatctgagattgagggtaggccggaaacaattttccagctctgttgctctgacagcgaaagcaaaactaatatcgtcaaagtgatcaggtcaattctgcgcgagaactttaggcggcacattaaatgcgagttgcctcttgagaaaacctgtaaggaccgtctggtcccgttgaagaatagagtccccgtgagcgctaagctggcctcctctcgaagcctcaaggtacttaagaattcctctagcaacgagtggactggcgaaacaggaaagggtacattactagactcagatgaaggctcactgtcatccggaacccagtcgagcggttgtcccacagccgaaggcaggcaagactccaaatctacctctccaggcaagtacccccatcctggcctggctgattttgcggacaacctcatcaaggagagcgacattctctccgatgaagatgacgaccatcgccagaccgtcaaacaaggctcacccacaaaggacattgagatccaattccagagactgagaatttccgaagatcccgacgtacacccagaagctgagcaacagccaggccctgaaagtggggagggccagaagggaggcgaacagcccaaactggtgcggggccacttctgtcctataaaaaggaaagccaattccactaaaagggatcgagggactctgctgaaggcgcaaattaggcaccagagccttgacagtcagtcagaaaacgcaacgattgatttaaacagtgtcttggaaagggaattcagcgtccaatcgctgacttccgtggtaagcgaagagtgcttttacgagactgaatctcacggaaaaagttag

SEQ ID NO: 14068 - DNA, 1596 bp, synthetic construct
  source 1..1596: mol_type = other DNA; note = Synthetic coding sequence
atggccgcagttaagacactgaatccaaaagcggaagtcgcgagggcacaagccgcacttgcagtaaacatttccgccgcccgggggctgcaggacgtgctccggaccaaccttggccctaaggggactatgaagatgctggtgtctggagctggcgacattaaactgacgaaagatggaaacgtccttttacatgaaatgcagattcagcatcccaccgcctccttgatcgccaaagttgctacagctcaggatgacatcacaggagacggaactaccagcaacgtactcattataggtgagttactgaagcaagctgacctgtatattagcgaagggctccaccccagaattatcacggagggttttgaagccgcaaaggaaaaagctctgcagttcctggaggaagtgaaagtttcccgggagatggaccgtgaaacacttatcgatgtagcacggacgtcccttcggacaaaggtgcacgcagaacttgccgatgtactgacagaagccgttgttgattcaattttggcgattaaaaagcaggatgaacctattgacctgttcatgatcgagataatggaaatgaaacacaagtcagaaacggatacttctctgatcagaggtctagttcttgaccatggtgcacggcaccctgatatgaaaaagcgcgtggaggatgcctacatccttacctgtaatgtgagccttgagtacgaaaagactgaggtcaacagcggcttcttttataaatcagctgaggagcgtgaaaaacttgttaaggccgagcggaaattcatcgaagatcgcgttaagaagattatcgaactgaagcgaaaggtctgtggggatagtgataagggctttgttgtcataaatcagaaaggaatcgatccgttctcactggatgctttatccaaggaaggtatcgtggccctcagaagggccaagcgtagaaacatggaacggctcaccctggcatgtggcggggtcgcattaaatagcttcgacgatctttcaccagactgtctaggccacgccggactggtatatgagtacaccctcggagaagagaaatttacctttatcgaaaagtgcaataaccccaggagtgtgactctcctgatcaaaggtccaaacaagcacacactcacacagataaaggatgcagtgcgagatgggctgagggcggtgaaaaacgccatcgacgatggctgcgtcgtgccaggcgcaggggctgtcgaggtcgcaatggccgaggccctaatcaagcacaaaccctcggttaagggcagagcccagcttggagttcaggccttcgcagacgctctgctgataatcccgaaagtgttggcacagaactcgggcttcgatctccaggagacactcgtcaaaatacaggccgagcacagcgagtccggccagctggtgggtgtcgatttgaatacaggggagccaatggtcgccgctgaggtgggggtttgggacaactactgcgtcaaaaaacagctgcttcacagttgcactgttattgccaccaacatcttattagtggatgagataatgcgagccggaatgtccagtctcaagggatag

SEQ ID NO: 14069 - DNA, 666 bp, synthetic construct
  source 1..666: mol_type = other DNA; note = Synthetic coding sequence
atgtctgcttttggccacgatgaggcttggatggaagctggcggcttcggtcttgaagctgccgagagaacagaatatcaatctttgtgcaaatctaaacttctgtttctcggagagcagtcaggcaaaaccagcataatttccagatttatgtacaactccttcggttgcgcttgtcaggctactgtgggcatcgatttcctttctaaaactatgtacttagaggaccagatcgtgcagctccagctgtgggacactgctggacaggaaaggttccacagtctcattcccagttacattcgcgactctacaatagccgttgtggtctacgatataacgaacataaactcattcaaagagacggataaatgggttgagcacgttcgggctgagcggggagacgatgtcgttattatgctgctggggaataagattgacctggacaataagaggcaggtgaccgcagaacagggggaagagaaaagccggaacttgaatgtcatgttcattgagaccagcgccaaaactggctataacgtgaaaaaattgtttagacgggtcgcgtcagcgcttctgtcgactcgtacctcacctccccctaaagaaggtactgtagagatcgagttggaatcttttgaggagtccggaaacagatcctactgctag

SEQ ID NO: 14070 - DNA, 6222 bp, synthetic construct
  source 1..6222: mol_type = other DNA; note = Synthetic coding sequence
atggcagaagtgcgcaaattcactaagagactttcaaaacccggcaccgcagctgaattgcgccagagtgtgtctgaggcggtgaggggtagtgtggtgctagagaaggcgaaagtggtggagcctctggattatgagaatgttatcgcacagagaaaaactcagatttacagcgaccctctaagagatcttctaatgttccccatggaggacataagcatctcagtcataggccgccagcgacgtacggtacagagcactgtgcctgaggatgctgagaagagagcacagagtctcttcgttaaagaatgcattaagacatactccaccgattggcacgtggtgaactataaatacgaggacttctccggagattttagaatgcttccctgcaaatcactacggcctgaaaaaataccgaaccatgtttttgaaatagacgaggattgcgaaaaagacgaggactcttcgtctctatgtagtcagaagggcggcgtaattaaacaaggctggcttcataaggcgaacgtcaatagtactataacggtgacaatgaaggtttttaagcgtcgctacttttatctgactcaattacctgatggcagctacatactgaacagttataaggatgagaaaaactccaaagagtcgaaaggttgtatttaccttgacgcctgtatcgatgtggtacaatgtcccaaaatgcgtagacatgccttcgaactcaaaatgctcgacaaatactcgcactatctggctgcagagacagaacaagagatggaggaatggttgatcactttaaaaaagattatacagatcaacactgactcactggtgcaggaaaagaaggagaccgtcgaaacagcgcaggacgatgaaacttcatctcaagggaaggcagagaatatcatggcatcacttgaaaggtctatgcatccagagctgatgaaatacggcagggagaccgaacagctgaacaagcttagcaggggggacggccgtcagaatttgttctcctttgattcagaggtacagcggctggactttagtggtatcgagcccgatattaaaccattcgaagaaaaatgtaataaaagattcttagtgaactgccacgatctaacttttaatatactggggcagatcggtgacaacgctaagggaccccctaccaacgtggaaccattctttataaatttagccttgtttgatgtgaaaaacaactgcaaaattagcgccgacttccacgtcgacttaaatcctccctctgttcgagaaatgctatgggggtcttcaactcagcttgcgagcgatggaagtcccaagggcagcagccctgaatcctatatacacggaattgccgagagccagctgagatatatccagcagggcatcttcagcgtgacgaatcctcaccccgagatttttctcgttgcccggatcgaaaaggtactgcaaggtaacataacccactgcgccgagccctacatcaagaatagtgaccccgtaaagacggcccagaaggtgcaccggactgccaagcaggtgtgctcacgccttgggcaatataggatgccgttcgcgtgggccgcaagaccaatcttcaaggacacccagggtagcctggatttagatggcaggttctccccgctctacaagcaggactcctctaaactcagcagcgaggatatattgaagttattgagcgaatacaagaaaccggagaaaaccaaacttcagattataccaggacagctgaacattacggttgaatgcgtgcccgtcgacctgagcaactgtatcacatcttcctacgtgcccctgaagcctttcgaaaaaaactgccaaaatattacagttgaggtcgaggagtttgtcccggaaatgactaagtattgctatcccttcacaatctacaagaaccatttgtatgtctaccccttacagctgaagtacgattcccagaaaactttcgctaaagctcgtaatatcgctgtctgtgtcgagttcagagactccgacgagagcgatgcatccgctcttaaatgtatatatggcaagcccgccggtagcgtttttacaacaaacgcctatgctgttgtgagtcaccacaaccagaatcccgagttctacgacgaaataaaaattgaactccccatccatctacaccagaagcatcacttgcttttcaccttctatcacgtctcttgcgagattaacaccaagggtaccaccaaaaagcaagatactgtagagacccccgtcggatttgcttgggtgcccctcctgaaagatggccgcatcatcacattcgaacagcagctgcccgtgtctgctaatctgcctcccgggtatctgaatctcaatgatgccgagtcccggcggcagtgcaacgtcgatatcaagtgggtagatggtgctaagccactgcttaaaataaaaagccacttggagtctacaatctacacgcaggaccttcacgtccacaaattttttcatcactgtcagttgatccaatctggctcaaaagaagtaccaggggagcttatcaaatatctaaagtgtctccatgccatggagattcaagtaatgatccagtttctgcccgttattctaatgcaactgttccgcgtccttaccaacatgacgcatgaggacgacgttcctatcaactgtacaatggtactactgcatatagtcagcaaatgccatgaggaggggctcgatagctacctgcgctcgttcatcaagtatagctttcggccagagaagccatccgccccccaagcgcaactgatccacgagacccttgcgacaacaatgatcgctattctgaagcagagtgccgattttctgtctattaataagttgctgaaatacagctggttctttttcgagattatcgccaagagcatggccacttatctgttagaggaaaacaagatcaagcttccacggggacagcggttccctgaaacataccaccatgtgttacatagcttgctgttggccattatcccccacgtgactatacggtatgccgagatacccgacgaatcacggaatgtgaactactcactggccagcttcttgaagcgctgcctgacgctcatggaccggggctttatctttaaccttattaatgattacatttcaggcttctctccaaaagaccccaaagtgctcgctgagtataagttcgagttcctgcagactatatgtaatcatgagcactacattcctctcaacctgcctatggcctttgctaagcccaaacttcagcgcgtccaggatagtaacctggagtattcactgagtgacgaatattgcaagcaccattttctggtagggttattactccgtgaaacctcgattgctcttcaggacaactacgagattcgctataccgctatttcagtcattaagaatctgctaatcaagcatgcatttgacaccagataccaacacaagaaccagcaggccaaaatagcacagctgtatctcccttttgtcggacttctgttagagaatatacagagactggccggccgcgatacactgtattcttgtgcagcaatgcccaattcggctagcagagacgaattcccctgcgggttcacaagccccgcaaatcgcggcagtctctcgacggacaaagacactgcttatgggagtttccagaatggccacgggattaagcgcgaggacagcaggggtagccttattccagaaggcgctacggggttccctgatcagggaaacacaggggagaatactcgccaaagtagtacacgctcatccgtgagtcaatataacaggctggaccagtatgagatccgctcactgctcatgtgttatctgtacatcgtcaaaatgatttcggaagataccttactgacatattggaataaggtttctccgcaggagctgattaatatcttgatccttttagaagtttgcctcttccactttagatatatgggaaagcggaatatcgccagggttcatgatgcttggctcagcaaacatttcggaattgaccgcaagtctcagacaatgcctgccttacggaacagaagcggtgtcatgcaagctaggctacaacacctgtcatcgctcgagagtagttttactctgaaccacagttctactacaaccgaggctgacatcttccatcaagcacttctagaaggaaacaccgctactgaagtgagtttgacagtcttggacacaatttcatttttcacacaatgctttaagactcagctcctgaacaatgacggtcacaatcccctcatgaagaaggtctttgacatccacctcgccttcctaaaaaacggccaatcagaggttagtttgaagcacgtgttcgcatcactcagggccttcatatctaaatttccctcggccttttttaaaggtagggtgaacatgtgcgcagcattttgttacgaggtgctgaagtgctgtacctccaaaatatccagcacccgaaacgaggcgtctgctttgttgtatttgctcatgcgcaacaacttcgagtacactaagaggaagacatttctgagaacccatctgcagattataatcgccgtcagtcagctcatcgccgacgtggccctctccgggggcagccgttttcaggagtcactgttcataataaacaacttcgcaaattccgaccgcccaatgaaagcaacagcctttcccgccgaagtcaaggacctgacaaaaagaattagaaccgttcttatggcgactgcccagatgaaagagcatgagaaagatccggagatgctgatcgatctccagtattcactggctaagagctacgcatcaactccggaacttcgcaagacatggctggatagtatggctaagattcacgttaagaatggagacttttccgaggctgcaatgtgctatgtacatgtggccgccctggttgccgaattcctccaccgcaagaagctcttccccaacggctgcagcgctttcaagaaaatcacaccaaatattgacgaagagggagcaatgaaggaagatgcaggcatgatggatgtgcactacagtgaggaagttctcttggaactgctggaacaatgcgttgatgggctttggaaggcagagagatacgaaatcatctctgagatcagtaagctgatcgtccccatttacgagaagaggcgggagttcgaaaaactaacccaagtgtatagaacgttacatggcgcctacacgaagatattggaagtcatgcatactaaaaagcgattactgggaacatttttcagagtggctttctacggacaatccttcttcgaggaagaagatggaaaggagtacatttataaggagcccaagctcactggcctgtcggaaatctcgctcagactcgtaaagctttacggggaaaaattcggcaccgagaacgtgaagattatccaggacagcgacaaggtcaacgccaaggaactcgatcctaagtacgcgcacatccaggtgacctatgtgaaaccctatttcgatgacaaagaactgaccgagagaaagaccgaatttgaaaggaaccataacatcagcaggtttgtattcgaagctccatacactctgagtgggaagaagcaggggtgtattgaggagcagtgtaaaagaaggaccatactgacgacaagcaacagttttccttacgtgaagaaaaggattccaattaactgcgagcagcaaatcaatctgaagcctatcgacgttgccacggatgaaattaaggacaagactgccgagttgcagaaattgtgctctagtacggacgtcgacatgatccaactgcaactcaagctgcagggctgtgtctcagtacaggtgaacgccgggcctctggcatatgctcgtgcctttctcaacgacagccaagcatcgaaatacccacctaagaaggtgtcggagctaaaagatatgtttcgaaagttcattcaggcatgctccattgccttggaactgaacgaaaggctgatcaaggaagatcaggtcgaatatcacgagggactgaaatctaattttcgggacatggtgaaagagctctccgacatcatccacgagcagatccttcaggaagacactatgcatagcccttggatgagtaacacactccatgtattttgtgctatctccgggacttcttctgacagaggctatggctcacccagatacgcagaagtttag

SEQ ID NO: 14071 - DNA, 1644 bp, synthetic construct
  source 1..1644: mol_type = other DNA; note = Synthetic coding sequence
atgggcgggtgcattcccttcttaaaggctgccagggcgctgtgcccccggatcatgccgcctttattactgttatccgcgttcatctttctcgtctccgtgcttggaggcgcccccggacacaacccagatcggagaacaaagatggtctccattcatagtctttctgagttggaaaggctgaagctacaggaaacagcctaccacgagctagtcgctaggcacttcttaagtgaattcaaacctgaccgtgctttgcccatagaccgccccaacaccctggacaagtggttcctaattttgagaggccagcagcgcgccgtgtcgcacaagacgttcggtatatcactagaggaggtcctggtcaacgaattcacaaggcgcaaacacctggagctgaccgccacaatgcaggttgaggaggcaactggccaagctgctggaaggcggcggggcaacgtagtccgacgcgtgtttggaaggatcaggaggttcttttcacgcaggaggaatgagcccacactgcccagagagttcaccaggaggggacgtcggggagccgttagcgtcgactctctcgccgaacttgaagacggcgctctgctccttcagacattacagctgtcaaagatatccttccctattggtcagaggctgctgggctccaaacgaaaaatgagcttaaatccaattgctaagcagatccctcaggttgtggaggcgtgctgtcagtttatagagaagcacggcctgtcggcggtcggaatcttcactctggagtattctgttcaaagggtacgtcagctgcgcgaagaattcgatcaaggtctggatgtcgtgcttgatgataatcagaatgtgcatgacgtggccgcacttctgaaggagttcttcagggacatgaaagactcgctgcttccagacgatctgtacatgagcttcctgcttaccgcgacactgaagcctcaggaccagctgtcagctctgcaacttctcgtctacctgatgcctccctgccacagcgacaccctggaacgcctgctcaaggctctgcataagatcaccgagaactgtgaggactccatcggaatcgacgggcagctggttccaggtaatcgaatgacgagcaccaacttggccctcgtattcggatccgccctgctgaagaagggcaaattcggcaaaagggaaagtagaaagaccaagctgggaatcgaccattatgtcgcttccgtgaatgtggttcgcgccatgattgataactgggacgtcttgttccaggtcccgccccacattcaacggcaagtggccaaacgtgtgtggaagtccagccccgaagcgctggatttcatccgccgtagaaacttgagaaaaatccaaagtgcccgaatcaaaatggaagaggatgccctgctgagcgaccctgttgaaacaagcgcagaagcgcgggctgcggttttggcccagtcgaagccatccgacgagggtagcagtgaggaacccgccgtgccatccgggaccgccagaagtcacgacgacgaggagggtgctgggaacccccccattccggagcaagaccgcccactgctgcgggtgcctcgggagaaggaggctaaaaccggagtctcatattttttcccgtag

SEQ ID NO: 14072 - DNA, 5613 bp, synthetic construct
  source 1..5613: mol_type = other DNA; note = Synthetic coding sequence
atggcacgctggattcctacgaaaaggcagaaatacggggtggccatctacaactataacgcgagccaggatgtggaactttctctgcagataggggacaccgtgcacatccttgagatgtacgagggttggtaccgggggtatactctccagaacaagagcaaaaaggggatctttcctgagacctacatacatctgaaggaagccaccgttgaggacctgggccaacacgaaactgtcatcccgggagaactgcccctggtgcaagaattaacaagtactctgagggaatgggccgtgatctggaggaaactttacgttaataataagttgactctgttccggcagctccagcagatgacgtattccctgatcgaatggcgaagccagatcttgagcggcactcttcccaaagacgagctggcagagctcaagaagaaggttaccgcaaaaattgaccacggtaatcggatgttaggcctggacctcgtcgtgagggacgataacggcaacattctggatcccgacgaaaccagcaccatcgcactgtttaaagcccacgaagtggcgtccaagcgaattgaggagaagatccaagaagagaaatcaatcctgcagaatttggacctcaggggccaatcaatcttttctaccattcacacgtatggtctgtacgttaacttcaagaacttcgtctgcaatatcggtgaggacgcagagctgttcatggccctgtatgatccagaccagagcacctttattagtgagaattacctgatcaggtggggttctaacggtatgcccaaagagatcgaaaagcttaacaatcttcaggctgtatttaccgacctgagctccatggacttaatacgccctcgggtttctctcgtgtgccaaattgttagagtcggtcatatggaacttaaggagggcaagaaacacacctgtggtctcagacggccttttggcgtcgccgtcatggatattaccgatattattcacggtaaggtagatgacgaggagaaacaacactttatccccttccagcagattgccatggaaacatacatccgtcagagacaacttattatgtctcctttaattacaagccatgtaatcggagaaaacgagccactgacttccgtgctgaacaaagtgatcgcggccaaggaggtgaaccataaggggcaggggctatgggtcagtctgaaactgctgccgggcgacctaactcaggtacagaaaaactttagccacttggtggataggagcaccgctattgccagaaagatgggattccctgagatcattctgccaggggatgttcgtaatgatatctacgtcacactgatccacggtgagtttgataaaggaaagaagaagacccctaaaaacgtcgaagtcactatgtcagtgcacgacgaggaagggaagctcctggagaaagctatccaccccggagctggttacgaaggcatcagtgaatacaagagcgtggtgtactaccaggtgaaacagccctgctggtatgaaacggttaaagtgagcatcgcaatcgaagaggtgacaaggtgccatattagattcaccttccgacaccgttcgtcacaggagacacgggataaaagcgagcgggcctttggcgtggcgtttgtcaagctgatgaacccagacggcaccaccctccaggatggcaggcacgatctggtagtgtacaagggagataataaaaagatggaggatgccaagttctacctaactctgcccgggaccaaaatggagatggaggaaaaggagttgcaggcttcaaagaacctcgtaacgttcacccctagtaaagactctacgaaagactcctttcagatagcgacactcatttgcagcactaagttgacccagaatgtggatctattaggcctactgaactggcgtagtaattcccagaatattaaacataatctcaaaaaattgatggaggtggatggcggcgagatcgtgaaattcctccaggatactttagatgctctgtttaacataatgatggaaatgtcggattccgaaacctatgatttcctggtcttcgacgctctggtgttcatcatttccttgataggagatataaagtttcaacacttcaacccggtcctggagacttacatatacaaacatttttctgctactctcgcgtatgtcaaactgagcaaggtgttaaatttctacgttgccaatgccgacgactcgtctaaaacagagctgttgttcgccgccctgaaggcccttaaataccttttccggtttataattcaaagcagggtgctgtatctgcgattctacggccagagcaaggacggagacgaatttaataattcaattcgccagttattcctggctttcaacatgctcatggataggccgctcgaggaggctgtgaaaatcaaaggagcagcactgaagtacctgccctcaattattaacgatgttaaactcgtgttcgatcctgtggagcttagcgttctgttctgcaaatttattcagtcgatccccgataaccagcttgttaggcagaagctgaactgcatgacaaagatcgtggagtctaccctcttccgccagagcgaatgcagggaagtactcctgccactactcaccgaccaactgagcggacaactcgatgacaattctaataagcctgatcacgaggcatctagccagctgctgagcaacattctcgaagtattggataggaaagacgtgggagccaccgccgtgcacatccagctgatcatggaaagactcttgcggaggattaatcgtacagtaatcgggatgaatagacagtccccccacatcgggtccttcgtggcatgtatgattgccctgctccagcagatggacgactcccattatagtcactatatctcaacgtttaagaccaggcaggatatcatagacttcctgatggaaacattcatcatgttcaaagatctgataggcaagaatgtttacgccaaggactggatggtgatgaacatgacgcagaacagggtgttccttagggcaataaaccagtttgcggaggttctgacccgcttctttatggaccaggcatcgtttgagttgcagctctggaacaactacttccaccttgccgtagcttttttgacccatgaatctctgcagctggagactttctctcaggccaagcggaataagatcgtgaagaagtacggcgatatgcgaaaggagataggcttccggattcgggacatgtggtacaatctcgggcctcataagataaaattcatcccctcaatggtgggccccatcctcgaggtcaccctgactcctgaggtcgagttgcgcaaggcaacaatccccatcttctttgacatgatgcagtgtgaattcaactttagtggcaatggaaacttccacatgtttgaaaacgaactgattacaaaactcgatcaagaggtggagggcggcaggggggatgagcagtacaaggtcttactggaaaagctcctgctggagcactgtcgcaagcataaatacctgagtagttccggtgaggtattcgcactgttggtctcaagcctcctagaaaacctgctggattaccggacaatcatcatgcaggatgagtctaaagagaatcggatgagttgcacagtgaacgtgttgaatttctacaaggagaagaaaagggaggatatttacatccgctatctttacaaattgcgggatctgcacagagactgcgaaaactatactgaagcggcctatacactccttctgcacgctgagcttctgcagtggagtgacaaaccttgtgtgccccatctattgcagaaagacagctactatgtgtacacccagcaggaactaaaagagaagctgtatcaggaaattatttcctacttcgacaagggcaagatgtgggagaaggcaatcaaacttagtaaagagctggccgagacatacgagtccaaggtgttcgactacgaaggattggggaacctcctgaaaaagcgggcaagcttttatgaaaatattattaaggctatgcggccccaaccagagtattttgccgttggatactatggccagggcttcccaagctttctacggaataagatctttatatacagagggaaggagtatgaaagaagggaggacttcagtctccgcctgttgacacagtttcccaatgcagaaaagatgacctcaaccacaccaccaggcgaagatataaaaagttcccctaagcaatatatgcagtgctttacagtgaaacctgttatgtccctccctccaagttataaggacaaacccgtgccggagcagattttaaactactaccgtgcaaacgaggttcaacaattcagatactcacgaccattccggaaaggggagaaggacccagacaatgagttcgctacaatgtggatcgagcgtacaacatacacaacggcctacactttcccaggaatcctgaagtggttcgaagtgaaacagatatctactgaggaaatctccccgctggagaatgccatcgagacaatggaactgaccaacgagcgtatctctaattgcgtccagcagcatgcctgggatcggtctctgtccgtgcatccactaagtatgttgctctcgggcattgtggatcccgccgtcatgggcggcttttctaactacgagaaggctttcttcactgaaaagtacctgcaagagcatcccgaagatcaagagaaagtcgagctgcttaaacgactgatcgccctgcaaatgcctctgctgacagaagggattcgcatacacggggaaaagctgaccgagcaactcaagcccttgcatgagcggctgagtagctgtttcagagagctcaaggagaaggtggaaaagcattatggcgttatcaccctgccacctaacttgaccgagagaaagcagtcccggactggatcaattgtcctgccctacattatgagctctaccctaaggagactgtccatcacaagcgtgacaagtagcgtggtttcgacttccagcaattccagtgataacgcaccatccaggcccggctcggatgggtctattctggaaccactgttggagcgcagagcttcaagcggtgctagggtcgaagaccttagccttcgggaagagaacagtgaaaatagaatctccaagttcaaaagaaaagactggtccttatccaagagccaggttatagcggagaaggcccctgagcccgacttgatgtcacccactagaaaggctcagcgacctaagtctctacaactgatggataaccgtttaagcccattccacggctcctctccaccacagtcaacaccgctcagccctccccctttgacaccaaaggctaccaggactttgtcttctccaagtctacaaaccgacggcattgccgccacccctgttcccccaccaccgccaccaaagtcaaaaccttatgagggttcccaaagaaattcaactgaactcgcccctcctctgcctgtgcgtcgggaagctaaagcgcctccccccccccccccaaaggcccgaaagtcaggcatccctacttcagagcctggcagtcagtag

SEQ ID NO: 14073 - DNA, 1623 bp, synthetic construct
  source 1..1623: mol_type = other DNA; note = Synthetic coding sequence
atgtccgcatcacttaattacaaaagctttagcaaagaacagcagacaatggacaatttggagaaacagctcatctgcccaatttgcctggaaatgttcaccaagcccgtggtgatattaccatgccagcacaatttgtgtaggaagtgcgcaagtgacattttccaggcttcaaacccatatctgcctaccagaggggggaccacgatggctagcggcggacggtttcgatgtccttcatgcagacatgaggtggttctcgacagacacggcgtttacggactgcaacgaaatctgttggtcgagaacatcatagacatctacaagcaggagagcacgcgccctgagaaaaagtcagatcagccaatgtgcgaggagcacgaagaggagcgtatcaatatttattgcctaaattgcgaagtccccacgtgttccttatgcaaagtctttggcgcacacaaagactgccaggtcgcccctctcactcacgtgtttcaaaggcagaagagtgagttgtcagatggcatagccatcctggtcggaagcaacgatcgggtgcagggagtaataagccagttggaagatacctgtaaaacaatagaggaatgctgtaggaaacagaagcaggagttgtgcgaaaaattcgactacctgtacggaatactggaggagagaaagaacgaaatgactcaggtaatcacacgaactcaagaagaaaaacttgaacatgtgcgggcccttattaaaaaatactccgatcatctggagaacgtgtctaagctggtagagagcggtattcagttcatggacgagcccgaaatggcagtcttcctccagaacgcaaaaacgctccttaaaaagatcagcgaggccagcaaggcgttccagatggaaaaaatcgaacacggatacgaaaatatgaatcactttacagtaaatctgaatcgggaagagaaaattatcagagaaatcgacttctatagggaagatgaagacgaggaggaggaagagggaggggagggcgagaaagagggcgagggagaggtgggcggcgaagcagtggaggttgaggaagtcgagaatgtgcagacagagttccccggggaggacgagaatcccgaaaaagcaagcgaactgtcacaagtcgagttgcaggcagcacctggagcccttcccgtctcatctccagagccgcctcctgcgctgcccccggctgcagacgctcccgtaacgcagggagaagttgttccaactgggtcagaacagactacagagtcagagacgcctgtgcctgccgccgcagagactgctgacccgcttttctatccatcctggtataagggccagactagaaaggcaacgactaaccctccttgcacccccgggagcgagggattaggccagatcggccctcctggttcagaggattcaaacgtcaggaaggctgaagtcgccgcagcagccgcgtccgaaagggctgccgtgagcggtaaagagaccagcgccccagccgctacgagtcaggagctcgtcatctgcctcgccctgctggcttttctcatcttgcactacatttggtcacaaatccagtgtttgatattcacactgatggactggatctag

SEQ ID NO: 14074 - DNA, 3252 bp, synthetic construct
  source 1..3252: mol_type = other DNA; note = Synthetic coding sequence
atgtcacagacccaggactatgaatgccgatcccacaacgtggatttgccggaaagccggatacctgggagcaacacgaggctggagtgggtggaaataattgagcctcgcacccgcgaacggatgtacgccaacctcgtgacaggcgaatgcgtctgggacccccctgcaggggtacgtattaaaagaacgtcggagaaccaatggtgggagctgttcgatcctaatacaagcagattttactactataatgccagtacgcaacgaacagtgtggcatagacctcagggttgcgatataattcctctggcaaagctccagaccctcaaacagaataccgaatcaccccgcgcgagcgctgagagcagcccaggccgtgggtcttccgtctcccgggaaggctctacatcctcctcactggagcctgagcccgacactgagaaagcacaagagttacccgctcgcgcaggtaggcctgcagcctttggtactgtcaaggaggatagcgggagctcctcaccacctggtgtctttcttgaaaaggactatgaaatttacagagattactccgcggacggacagttgttgcattaccgcacttcaagcctgcgttggaactccggcgcaaaggaaagaatgctgatcaaagtggctgatcgagagccctctttcctcgctgcccagggtaatgggtacgctcctgatggccccccgggtgtccgatcgcgacgtcctagcggctcacagcatagcccgtccctccagaccttcgcacccgaagcggacggcaccatattcttccccgaacggcggcctagtcctttccttaaaagagctgaacttccagggagttctagcccccttctggcacaacccagaaagccaagcggcgacagccagccgagctcgccacgatacggatatgaacctccactctatgaagagccaccagttgagtatcaagcccctatttacgatgagcctccaatggatgtgcagttcgaggccgggggtggttatcaagcagggtcaccccagcggtctcctggccgcaaacctcgccccttcttacaacccaataagcagggtcccccctctccctgtcagcaactcgttttgactaaacaaaaatgccctgaaaggtttcttagtcttgagtatagcccagccggcaaggagtacgtccggcagttggtgtacgtggagcaagcaggctcaagccccaagctacgagccgggcctcgacacaagtatgctccaaatcccggggggggctcctactccctgcagcccagtccgtgcctgttgcgtgaccagcgtcttggtgttaaatccggtgattactccaccatggagggtccggagctccgccactcccagccccctacccctttgcctcaagctcaagaagatgctatgagctggtcttcacagcaggacactttatcttccaccgggtacagccccggtactcgcaagagaaaatctaggaaacccagtctttgtcaggccaccagcgcaacacctactgaaggccccggcgacctgctagtcgaacagccattagcagaagagcaaccgccttgcggtacatctcttgcgccagtgaaacgcgcagagggcgaagcagagggcgcacggggtgccgctgaaccttttcttgctcaggcaaggctggcatgggaggcccagcaggctcacttccatatgaagcagaggtcctcttgggatagccagcaagatggctctggctatgaatccgatggcgcactgcccctgcctatgcctgggccggttgttcgtgccttcagtgaggacgaggctctggctcaacaagaaaacagacattggcggcgtggaacctttgagaagcttggcttcccccagatcctcctggaaaagagcgtgagcgttcagaccaacctcgcttcacccgagccctatctccacccttcgcaatcagaagacctcgccgcctgcgcccagtttgagtcaagcaggcagtcccgctccggagtgccttctagttcatgcgtgtttcccacctttaccttgcggaaacctagctctgagacagatatcgagaattgggcatcaaagcattttaataagcacactcaaggcttgtttcgtagaaaggttagtatagctaacatgcttgcatggagttccgagagtatcaagaaacctatgattgtcacctccgacagacacgtcaaaaaagaagcgtgcgagctgtttaagttaatccagatgtacatgggcgataggcgagcaaaggctgaccccttgcatgtggctcttgaagtagcgaccaagggctggtcagtgcaagggttgcgcgacgagttatacatccagctttgccgccagaccaccgagaactttcgcctggaatcactcgcccgcggttgggagttaatggccatttgcctggccttctttccgccgacaccgaaattccacagttatctcgagggttatatttaccgccacatggaccccgtgaatgatacaaaaggggtggctatctctacttatgccaaatattgttaccacaagttgcagaaagcagccttaaccggcgcgaagaaggggctgaagaaaccaaacgtcgaggagattcggcatgctaaaaacgcagttttttccccgtccatgtttggctccgcgttgcaagaagtgatgggcatgcagagggaacgataccctgaacggcagctgccgtgggtccagactcgcctctcagaggaggtcttagcactaaacggagatcagactgaaggtatatttcgtgtgcccggcgacattgacgaggttaacgcccttaagctgcaggtcgaccagtggaaggtgcccacgggacttgaagatccacatgtacccgcaagtcttctcaagctctggtaccgggagctggaagagcctctgataccccacgaattttacgagcagtgtatcgcacactacgatagcccggaagctgccgtagcagtggtgcacgcgctgcctagaatcaacagaatggtgctgtgctacctgatcaggttcctgcaggtttttgtgcagcccgcaaatgtggctgtcaccaagatggacgtctcgaaccttgctatggtcatggccccaaattgcctgcggtgccagagtgatgaccccagagtgattttcgagaacactagaaaagaaatgagtttcctccgggtgttaatccagcacctcgataccagtttcatggaaggggtcctgtag

SEQ ID NO: 14075 - DNA, 426 bp, synthetic construct
  source 1..426: mol_type = other DNA; note = Synthetic coding sequence
atgggcaaaggcatccccctgaacgatcaggacagaatcccttggttatgtaatctgcacgatatcctgctgagagacgtggcctctgggcaacgggtcgttttggcttgctccgctctcaagaagacttatcgcgatattctgacacagggcaaggacggggtggccctgaagtgtgaggagagtggcaaggaagccaaacaggccgagatgcagctgctggtggtccacctgtccggcagcttcgaggtcataagcggccggctgctgaagagagaaggccattttatgccacctgagctgctccaaagtcagtttgaaaccctggagccccctgctgcgcctgaaaattttatacaaatctctgtggacaagaatgtgtctgaaattatcgcaaccattatggaaaccttgaagatgaagtag

SEQ ID NO: 14076 - DNA, 1701 bp, synthetic construct
  source 1..1701: mol_type = other DNA; note = Synthetic coding sequence
atggacatacagctggaccctgccagggatgatctgcccttgatggctaacacatcacatatcctggtaaagcattatgtgctggacctcgacgttgactttgaaagtcaggtgattgaaggaacgatcgtcctcttcctcgaagatggaaatcggttcaaaaaacaaaatagctccatcgaagaggcctgccagtccgaaagcaataaagcatgcaaattcggcatgcccgaaccgtgccacattcctgtgaccaatgctaggactttcagcagtgaaatggaatacaacgacttcgccatttgctctaagggtgaaaaggacacgagcgacaaggatggcaatcatgacaatcaggaacacgcaagtggaatatctagttcaaagtattgctgcgatacaggtaaccatggcagtgaagacttcttgctcgtactcgactgctgtgacttatcagtgctgaaggtagaggaagtggacgtcgccgcagtgcccgggttggagaagttcactcgctcacccgagttgacagtcgtttctgaagagttcaggaatcagatcgtgcgggaattggtcaccctccccgctaataggtggcgggaacaattggattattatgcaagatgcagtcaagctcccgggtgcggagagctacttttcgacacagatacctggagtctgcagatcagaaaaaccggtgctcaaaccgcgactgattttccgcacgcaatcaggatctggtataagaccaaacctgagggccgctctgttacctggaccagcgaccaatccggcagaccctgcgtttacacagtggggtccccaatcaacaatcgggccctattcccctgccaggaaccacccgtagctatgtctacttggcaggcgaccgtgagagcagctgcaagcttcgtagtgttaatgagcggcgagaattctgctaagcccacacaactttgggaggaatgcagctcatggtattattacgtgactatgccaatgccggcgagtaccttcactatcgctgttgggtgctggacagaaatgaagatggagacgtggtcatccaacgatctcgcaacagaacgccctttcagtccatcagaggcaaacttccgccatgtgggtgtctgttctcacatggagtacccttgcaggttccaaaacgccagcgccaccactcaggaaattattcctcatagggtattcgcccctgtctgcttaacaggggcctgccaagagacgttgcttcggcttattcccccctgcctttctgcggcacacagcgtgctgggcgcacatcctttttcccgcctggatgtactgatagtgcctgcaaacttcccctctctgggaatggcatctccccatatcatgttcttatcccagtccatcctgactggaggcaatcatctctgcggaacccggctgtgccatgaaattgcacacgcctggttcgggcttgccataggggccagagactggacggaggaatggctctcagagggtttcgccacccacttggaggatgtcttttgggccaccgcgcagcagctcgctccatacgaagcccgagagcaacaagagctgcgcgcgtgccttaggtggcgacgtctccaggatgaaatgcagtgttctccagaggaaatgcaggtcttgcgcttccctcatgtaggcggctgcagcggttcatttagctag

SEQ ID NO: 14077 - DNA, 1266 bp, synthetic construct
  source 1..1266: mol_type = other DNA; note = Synthetic coding sequence
atgccattcctccatggatttcggcgaattattttcgagtaccagcccctggtcgacgctatactcggcagcctgggaatccaagatcctgagcggcaagaaagcctggaccgcccatcatacgtggcgagcgaagaatccagaatcttggtattaaccgagctcctcgaacggaaagcccactccccattctaccaggaaggggtttcaaatgctttgctcaagatggccgagctcggcctgacacgagcagctgatgtgctgttgagacatggggcgaaccttaatttcgaggatcctgtgacctactacacagctctgcacatcgcagtccttaggaaccaacccgacatggtggaactgctggtgcaccacggcgcggacgtgaaccgcagagatagaattcatgagtcaagcccattggacctggcttccgaggagcctgagcggcttccatgtctgcagcggctgctagatctgggagcagacgtaaacgccgctgacaagcacggaaaaaccgctcttttgcacgcgctggcctcctccgatggcgtccaaatccataatacagaaaatatccgcttactgctagaaggaggcgcggacgtcaaagcgactacaaaagatggggatacagtctttacatgtattattttcctgttgggcgagacagtgggcggggataaggaggaagctcaaatgatcaaccggttctgctttcaggttaccagactgctcctggcacatggggccgacccctctgaatgccctgcacacgagagccttacccatatctgtttgaagagtttcaaactgcatttccctctgctccgcttcctcctggaatccggcgcagcctacaattgcagcttacacggcgcatcctgctggtctggcttccatattatattcgagaggctctgctcccaccccgggtgtactgaggacgagtcacatgccgatctgttgaggaaggcagaaacagtcttggacctgatggtgaccaattcccagaagctacaactgcctgagaatttcgatattcatcccgtgggttctttggccgaaaaaatccaggcactgcactttagcctacgccagttggagagctatcccccccccttgaagcacctgtgtagggtggcaattaggctgtatttgcagccatggccggtggacgtcaaggtgaaagccttgcccctgcccgatcgcctcaaatggtatctgctctcggagcactccggctctgtggaggacgatatctag

SEQ ID NO: 14078 - DNA, 594 bp, synthetic construct
  source 1..594: mol_type = other DNA; note = Synthetic coding sequence
atgccattcctgcacgggttccggcggataatcttcgagtaccagcctctggtggacgccatcctggggtccttgggaatacaggatcccgaaagacaggagagtctggatcgcccctcttatgtggccagcgaggagtctagaattctcgtcttgacagaactcctcgagcgcaaagctcactctcccttctaccaagagggcgtgtctaatgcgctgctcaagatggctgaactgggcttaactagagccgctgatgttctgctccgacatggtgctaatcttaacttcgaggaccctgtcacctactatacagccttacacatcgctgtactgaggaaccaaccagacatggtagagcttctggtgcatcatggggccgacgtaaatcgcagggatcgcgagaaattgctgtgctccatgctgtggcctgcagcgacgggatgccggagtaccatactccggacattcgtatcctactggaaggagggccagaccagtcggccccccccaaagatggggacacagtgctctcccgcgtctagcagttgtctcgttcggccctgggaaggtactaaacgacggcctagatag

SEQ ID NO: 14079 - DNA, 684 bp, synthetic construct
  source 1..684: mol_type = other DNA; note = Synthetic coding sequence
atgagcgacattaaccttgattgggtcgacagaaggcagttacagaggctggaggaaatgttgatcgtggtggatgaaaatgataaggtcattggtgctgatactaaacgaaactgtcacctgaacgagaacattgaaaaaggactcttacatagggctttctccgtggtactgtttaataccaaaaataggatacttattcaacagcgcagcgataccaaggtgactttccccggatattttaccgattcctgttctagccacccactgtataatcccgcagaactcgaagagaaggacgccattggtgtacgccgggctgcccagagacggctgcaagcagaactgggaataccaggagagcagattagtcctgaggatattgtcttcatgaccatctaccaccacaaggctaaatccgacagaatttggggggaacacgaaatatgctatctcttgcttgtaagaaaaaacgttacattgaaccctgacccgtctgagaccaagtccatcttgtatctttcccaggaagaactttgggagctgctcgagcgagaggcaaggggcgaggttaaagtcactccctggttgagaacaattgccgaacggtttctttacagatggtggccacacctagacgacgtaactccgttcgtcgagctacacaaaatccatcgcgtttag

SEQ ID NO: 14080 - DNA, 864 bp, synthetic construct
  source 1..864: mol_type = other DNA; note = Synthetic coding sequence
atggaggtgatggaaggaccgctcaacctggcacatcagcagagtcgccgcgccgaccggctgttggctgccggaaagtacgaggaagctatttcgtgtcacaaaaaggctgctgcgtatctatccgaggccatgaagttaactcagtctgagcaggcacatctgagtctggagctgcagagagattcccacatgaaacagctgctcctgattcaggagcgctggaaaagagcacagagagaagaacggctgaaggcccagcagaacacagataaggatgctgctgcccatctgcaaacaagccacaaaccgtcagcagaggacgctgaagggcaatcacccctgtcccagaagtattctccaagcacagaaaagtgcctgccagagatccaggggatctttgaccgcgatcccgacacactgctgtatcttctgcaacagaagtcagaacccgccgaaccatgcataggctcaaaggcaccaaaagacgataagacaataattgaggagcaggctactaagattgccgatctcaagaggcatgtggaatttttggtggccgagaacgaaagactgagaaaggaaaataaacagctaaaagctgaaaaggccagactgctgaaaggcccaattgaaaaggaactagacgttgacgcagatttcgtggagacttctgagctgtggtctctgcccccccacgctgagaccgccacagcctcctccacgtggcagaagttcgcagctaacactggtaaggctaaggatatcccgatccctaatctcccgccgctggattttccaagtccggaattgcccttgatggagctctctgaggacatcttgaaaggatttatgaataattag

SEQ ID NO: 14081 - DNA, 2844 bp, synthetic construct
  source 1..2844: mol_type = other DNA; note = Synthetic coding sequence
atgtgcgtcgattcactggtgcgcatttgcagcggactttcttacggccggattaggaatattaagagtctgtccgacattcagattgtgcaggtggcctgcggctactaccactctttggcgctttctaaggcctccgaggtgttctgttggggtcagaacaagtatggccagctgggtttaggaacagactgcaaaaaacaaacttcaccccaactgctgaaatctcttttgggcattccatttatgcaagtggctgctgggggtgcgcacagctttgttctgaccctgagcggtgccatctttggctgggggcggaacaagtttggccagctgggcctgaacgacgagaatgaccgctatgtcccgaatctcttgaagtctctcagatcccaaaagatcgtgtatatatgttgcggcgaagaccacacagctgctctcactaaagagggtggcgtgttcacctttggagctgggggatacgggcagctgggacataactcaacttcgcacgagatcaatccacgtaaagtcttcgagctgatgggttcaattgttacggaaatcgcgtgcggcaggcaacatacgagcgccttcgttcctagcagcggtagaatatattccttcggcctgggaggcaacgggcagctcggcacaggcagcacgagcaataggaaatccccgttcacggtaaagggcaactggtacccatacaatgggcagtgcctcccggacatcgactccgaggagtacttctgtgtcaaacggattttttctggcggggaccaatcctttagccactattcatctccccagaactgtggcccacctgatgattttcgatgcccaaacccaacaaagcagatatggacggtcaatgaggctctcatccagaagtggctaagttacccatctggtcggttcccagtggagatagccaacgaaatcgacggcacgttcagttcaagcggctgtctcaacgggtcattcctggccgtctccaatgatgatcattatagaaccggaactcgtttctctggggtcgacatgaacgccgcaaggctgctattccataaacttatccagcccgatcaccctcaaattagccagcaggtcgcggcatccctggaaaaaaacctcatcccaaaattgacaagcagcctgcccgacgtggaggcactgcggttttacctcaccttacccgagtgccccttaatgagcgacagtaataacttcactaccatcgcaatcccatttggtactgcacttgtaaatttagagaaagctccactgaaggtgctggagaactggtggagcgtgcttgaaccgccactgtttctgaagattgttgaactttttaaagaagtggtagtccacctgctgaagttgtacaagattggaatccctccttccgagcgccgtatttttaacagtttcctgcacacggcgttgaaagtattggaaatcctccaccgcgtgaatgagaagatgggtcagatcatacagtacgataaattctatatccatgaagtacaggagctgattgacattcggaacgattacattaactgggtccagcagcaggcttatggcatggacgtaaatcatggtctgactgagctcgccgatattcccgtaacaatttgtacgtatcctttcgtgtttgacgcacaggctaaaactacgctcctgcagacagatgctgtgctgcagatgcagatggctattgatcaggctcacaggcagaacgtaagctcattgttcctccccgtgattgagtcagttaacccttgccttatccttgtcgtaaggagagaaaacatcgtgggagacgccatggaggtgctgcggaaaaccaaaaacatcgactataagaaacctctaaaggtaattttcgttggagaagatgcagtggatgccggaggcgtccggaaggaattcttcctcctaatcatgagagagctgctggatcctaaatacggcatgttcaggtactatgaggattcacggctgatatggtttagtgataaaacattcgaggatagcgacctgtttcatctgatcggggtcatttgtgggctcgcgatttataattgcacaattgttgatcttcatttcccactggccctttataaaaagctgctgaagaagaaaccctcccttgatgacctgaaggaactgatgcccgacgtcggccgcagtatgcaacagctgctagattatccagaggacgacatcgaggagactttttgcctgaactttactatcaccgtggaaaattttggagctaccgaggtcaaggagctggtactcaacggcgccgacacagcagtcaacaaacagaatcggcaggagttcgtggacgcttacgtggattacattttcaacaagtccgttgcgtcactcttcgatgccttccatgctgggtttcataaggtatgtggagggaaagtgttgcttctgttccagcctaacgagctgcaggcgatggtgattgggaacaccaactacgactggaaggaattggagaaaaataccgagtataagggcgaatattgggcggaacacccgaccattaaaattttttgggaagtgttccacgaattgcccctggagaagaagaagcagttcctgcttttcttgacaggatcagacaggatacctatccttggaatgaagtcacttaaactggttattcagtctaccggtgggggcgaagagtaccttcctgtttctcacacatgcttcaatctgctggacctcccaaaatatactgagaaggagaccctccgctctaagctcattcaggccattgatcataacgaagggtttagccttatttag

SEQ ID NO: 14082 - DNA, 2541 bp, synthetic construct
  source 1..2541: mol_type = other DNA; note = Synthetic coding sequence
atgccagcttttctcggcctgaagtgtttggggaaactatgctcatcggagaagtccaaagtgacctcctccgagcggacctcagcaagaggaagtaaccggaagcggcttattgtggaggatcggcgcgtgagcggaacaagtttcaccgcccaccgacgcgcgacaatcacgcaccttctgtacctctgcccaaaagactattgcccgagaggtagggtgtgcaattctgtcgacccatttgtggctcacccacaggatccacatcacccatccgagaagcccgtaatccactgtcacaagtgtggcgaaccgtgcaaaggagaggttttgcgggtacagaccaagcatttccatataaaatgtttcacgtgcaaagtatgtggctgtgatctcgcccagggaggcttctttattaagaacggggaatacttgtgtacactggactaccagcgcatgtacggcacgcgctgccacggctgtggagaattcgttgaaggggaggttgttactgcgcttggaaagacttatcaccctaactgtttcgcttgtacaatatgcaaacgtccctttccaccaggcgatagggttaccttcaacgggcgggattgtctatgccaactgtgtgctcaacccatgtcgtcatctcctaaggagactacattcagctccaattgtgcagggtgtgggcgcgatattaaaaatgggcaggcactgctcgcactggacaaacaatggcatttagggtgttttaagtgcaagtcgtgtggcaaagtgctgaccggggagtatattagcaaagacggtgcaccatactgtgagaaagattaccagggactcttcggggtcaaatgtgaggcctgtcaccagttcattacaggcaaggtacttgaggccggggacaaacattaccacccgtcctgtgcaagatgtagtcgctgtaatcagatgtttacagaaggcgaagagatgtaccttcaaggcagcacagtatggcaccctgactgcaaacaatcaacaaaaacggaagagaagctgaggcttccgaatatccggcgctcatcttccgactttttttactccaaatcgctaattagacgaacggggaggagcccatctctgcagccaacacgaaccagcagtgagagcatctactcacgccccggatcctcaatacctggcagccctgggcacaccatctacgccaaggtggataatgagatcctcgattacaaggacttagccgccatcccgaaagttaaggcaatatacgatattgagaggccagacttgatcacttatgaaccattttatactagtggatacgatgacaagcaggagagacagagcctcggcgaaagtccccgtactctttctcccactcccagtgcggaggggtaccaggacgtgcgggaccggatgatccataggagtacgagccagggttctatcaactcacctgtctatagtcgccacagttacactcccaccacttcaaggagcccacagcactttcacagaccagaactcctcagtcccggagtgcagagattgagttatctacggacatcatccttgtcccccactcattctgacagtagaccgaatccacctttccggcaccactttattccgcacatcaaagggaacgagccatcctccggacgtaactcccctctcccttatcgacccgactctcgccccctgacgccgacatacgcgcaggctcctaagcattttcatgtgcccgatcagggcatcaatatctatagaaagcctccaatttacaagcagcacgcagccctggcggctcagagcaaatcaagcgaggacattatcaagttctcaaaatttcctgcagctcaagcgccagacccatctgagacacccaagatcgaaacagatcactggccaggtcctccaagcttcgcggtggtgggccctgatatgaaaaggcggagcagtggccgtgaagaggacgacgaagagctgctgaggcgccggcagctacaggaggagcagctgatgaagttgaatagtggcctcggccaattgatattaaaggaagagatggagaaggaatctagggaacgttccagcctgctggctagccggtacgacagcccaattaacagcgcctctcacatccctagcagcaaaaccgcctcattaccaggctacggacgaaacggtttacaccgtcccgtcagcaccgattttgctcaatataattcctatggtgacgtgagcgggggagttcgggactaccagaccctgcccgatgggcacatgcccgcgatgaggatggatagaggcgtctcaatgcctaacatgctcgagccaaagatctttccatatgaaatgctcatggtgaccaacagaggaagaaataaaattctccgtgaagtcgaccgaacaaggctggagaggcacctggcccccgaggtttttagagagatttttgggatgagcatccaagaatttgaccggttgcctttatggcgtcgaaacgacatgaaaaagaaagcaaaactgttttag

SEQ ID NO: 14083 - DNA, 594 bp, synthetic construct
  source 1..594: mol_type = other DNA; note = Synthetic coding sequence
atgtttggttgcctggtggcaggtagacttgtccagaccgccgcccagcaagtggctgaggataagtttgtttttgacctgccagattacgagtctattaaccacgtggttgtattcatgttggggactattccattcccggagggaatgggtggatcagtctacttctcctaccctgactcaaacggaatgcccgtttggcaactactaggcttcgtgacaaatggcaaaccatccgccattttcaagattagcgggctgaaatccggagagggttcccagcaccctttcggcgccatgaacatcgtgagaacccccagcgtagcccaaatcggtatttctgtcgagctgctggattccatggcccagcagactccagtcgggaatgccgccgtcagctccgtggactcctttacccagttcacacaaaaaatgctggataatttctacaatttcgcttcctcttttgcagtgagccaggcacagatgacaccttctccgtccgagatgtttattcccgccaacgttgtcctcaaatggtatgagaatttccaacgccggctggcccagaatcccctattttggaaaacttag

SEQ ID NO: 14084 - DNA, 930 bp, synthetic construct
  source 1..930: mol_type = other DNA; note = Synthetic coding sequence
atggtcttccccgccaaaagattctgcctggtcccaagtatggaaggcgtcaggtgggctttctcatgcggtacttggttacctagcagagcagaatggctgttagccgtgaggtccatacaaccagaagagaaggaacggataggccaatttgtattcgctcgagacgccaaagcagcaatggctggcaggctgatgatccgcaagctcgttgccgagaagttgaatattccctggaatcacatcaggctgcagagaactgcgaaaggcaaaccagttctcgcaaaggatagctctaatccatatcccaatttcaacttcaatattagtcaccagggcgattatgctgttctggctgccgagcccgaactgcaagtggggattgacattatgaagacatcatttccgggtaggggatccatccctgaattttttcacataatgaaaagaaagtttacaaacaaagagtgggagaccatcagatcatttaaggacgagtggacacagttagatatgttctataggaattgggccttgaaggagtcatttatcaaagccatcggggtgggcctaggatttgaactgcagcggctggagtttgatctgtcgccactgaacttagatataggtcaagtctacaaagagactcgactgtttctggacggcgaggaggagaaagaatgggctttcgaggagagcaagatcgatgagcatcacttcgtagctgtagctttacgcaaaccagacggaagccgccaccaggacgtgccgagtcaggatgactccaaacccacgcagcgccagttcacgatcctgaactttaatgatctgatgagcagtgctgtgccgatgactccggaagacccttcattctgggattgcttttgttttaccgaagagataccaatccgtaatggtacaaagagctag

SEQ ID NO: 14085 - DNA, 1599 bp, synthetic construct
  source 1..1599: mol_type = other DNA; note = Synthetic coding sequence
atgcagtcctgtgagagcagcggtgactccgccgacgacccgctctctagaggcctccgccgaagaggccaaccgcgcgtggtagtgataggggccggactggcaggtctagccgcagccaaggcattgttagagcaaggattcaccgatgtgacagttctggaagcatcaagccacattggcggccgggtgcaaagcgtgaagctcggccatgcgacctttgagttgggggcgacatggatccacggtagccacgggaatcccatataccacctagcagaggcgaacgggttgttggaagaaacgacagatggcgagcgatcagtcggcagaatcagcctgtacagcaagaacggcgtggcctgctacctgaccaatcacggcaggcggatcccaaaggatgttgtggaggaattctcagacctctataacgaggtctataacctgacacaggaattctttcgtcacgataagcccgtgaatgccgaatcccagaacagtgttggtgtgtttacccgagaggaggtccgaaatagaatcaggaacgaccctgatgatcccgaagccacaaagcgcctgaagttagctatgattcagcaatatcttaaggtcgagagctgcgaaagcagttcacactccatggatgaggtatccctttccgccttcggggaatggaccgagatcccgggggcccaccatatcatccccagtggatttatgcgtgttgtggaattactggctgaggggattcccgcccatgtgatccagcttggcaagcctgtcaggtgcattcactgggatcaggcttccgcccgcccacgtgggcctgaaattgagccccgtggcgttctgaaacggcagtacactagtttttttagacccggactcccgactgagaaagtggcagctatacaccgtctgggcattggaacaaccgacaagatatttctggagttcgaggaaccgttctggggcccagaatgcaattcattgcagttcgtatgggaggacgaagctgagagccacactcttacttatccaccggagttgtggtaccgcaagatatgtggctttgatgtactctaccccccagaaagatacggacatgtactctcaggctggatctgtggtgaggaggctctcgtcatggaaaagtgcgacgatgaagcagtcgcggagatctgtacggagatgctcaggcaattcactggaaatcccaacatccctaagccgcggcgcattctgagatcagcatggggctcaaatccgtatttccgagggagctatagctacactcaggttggcagttctggggcggacgtggagaaactcgccaagcctctgccatacaccgagtcaagcaaaacggcccatgggtcctcaacgaagcagcagcccggccatctcttctcctctaaatgccccgagcagcccctggatgctaatcgcggagccgtaaaaccgatgcaggtcctattctctggcgaagcaactcacagaaaatattactctaccacacacggtgctctgctgtctggtcagcgtgaagctgcgagactgatcgagatgtatcgcgacctgtttcagcaggggacatag

SEQ ID NO: 14086 - DNA, 2349 bp, synthetic construct
  source 1..2349: mol_type = other DNA; note = Synthetic coding sequence
atggattcttctatccatttaagtagtctcatctccaggcatgatgacgaggccacacgtactagtacctccgagggcctggaagagggcgaggtggagggggagaccctccttattgtagaaagcgaagaccaggcctccgtagacctaagccacgatcaatctggcgactctctgaattcggatgaaggagacgtgtcatggatggaagagcagctgtcgtatttctgtgataagtgtcagaagtggattcccgcatcgcaactccgggagcagctaagctatcttaagggagacaatttttttcggtttacatgttccgactgtagcgctgacggcaaggagcagtacgaacgccttaaactcacttggcagcaggttgtaatgttggccatgtataacctttctcttgagggaagcggacggcaagggtactttcggtggaaggaggacatctgtgctttcattgagaagcactggaccttcctactgggaaacaggaagaagacaagtacctggtggtctacagtcgcaggctgcctgtcagttggcagccctatgtatttccgctctggagcacaggaattcggcgaaccaggctggtggaaactggttcataataagcccccaactatgaagccagaaggcgaaaaactgtccgccagcaccctgaaaataaaggcagcctccaagccaactcttgatcctatcataaccgttgaaggtcttcgaaagcgcgcctcccgcaacccagtggaatcagctatggaattaaaagagaagcgaagtcgcacccaagaagcaaaagacattaggcgggcccagaaggaggcggccggcttcttggacaggtctacaagcagcacccccgtcaagttcataagcagagggcggcggcccgatgtgattttagaaaagggagaagtaatcgacttttcgtctctgtccagctcagaccggacacctctgaccagccctagtccgtctccgagcctagattttagcgcacctggcacacccgcctcacactctgctacaccatcgctgctgagtgaagcggatttaatccccgatgtcatgccgccacaggcactcttccatgacgacgacgagatggagggagatggtgtgatagacccaggcatggagtatgttccaccacccgctggctcagtggccagcggccctgtggtgggcgtgagaaagaaagtcaggggtcctgaacagatcaagcaagaggtggaatccgaggaggagaagccagaccggatggacattgattctgaagatacggatagcaatacaagcctccagactcgcgcacgcgaaaaacggaagccccagcttgagaaggataccaagcctaaagagccaagatatactcccgtctccatctacgaggaaaagttgctccttaaacgcctcgaggcctgcccgggcgctgtggccatgacaccagaggcccgccgattgaagcgcaagcttatcgtcaggcaggcaaagagagaccgcggcctccctctgttcgacctggaccaggttgttaacgctgccctgctcctggttgatgggatctatggggcgaaagagggagggatttcccgcctgcctgcaggccaggcaacctatagaacgacttgtcaggactttcgtatcctggacagatatcagacgtccctgcctagccgtaagggcttccggcaccaaaccaccaaattcctctaccggctggtggggtcagaagatatggcagtggaccagtccattgttagcccctacactagccgcattctgaagccctatatcaggcgcgactacgaaaccaaacctccaaagttacaattgttgtcccagattcggtcgcacctgcataggagcgatccacattggaccccagagccagatgccccactagattattgctatgtcaggcccaaccatatccccactatcaacagcatgtgccaggagtttttttggccggggattgacctctccgagtgccttcaataccctgacttcagcgtggtcgtcctgtacaagaaggtgatcattgcattcggctttatggtgcctgacgtgaaatacaatgaggcttacatttctttccttttcgttcatcccgaatggaggagggcgggaatcgccacctttatgatctaccatctcatccagacgtgcatggggaaggacgtgacactccacgtgtccgccagtaatcctgccatgctcctgtatcagaaattcggtttcaaaacggaggagtatgtgttggacttctatgataagtactatccactggagagcacagagtgcaagcatgctttttttcttcgtctcagacgttag

SEQ ID NO: 14087 - DNA, 2745 bp, synthetic construct
  source 1..2745: mol_type = other DNA; note = Synthetic coding sequence
atgggaacgactgctccggggcctatacacttgcttgaattatgcgaccagaaacttatggaattcctgtgtaacatggataataaggatctggtgtggctggaggagatccaggaagaggccgagcggatgtttactagggagttcagtaaagagcctgaattgatgccaaagacacccagccagaaaaaccgcagaaaaaaacgtcggatttcatacgtgcaggatgagaatcgggaccccataagaagacgactgtctcgccgcaaaagcaggtcttcacaactcagttcacgaagactccgcagtaaggattccgtggaaaagctggcaactgtggtgggcgaaaatgggtccgtgctgagacgtgtcaccagggccgccgccgctgctgctgcagctactatggccctggctgcaccttcttcacccacacctgagtctccgaccatgctgactaaaaagcccgaagataatcacactcagtgccaattagtcccagtggttgagatcggaatctccgaacgacagaacgctgaacaacacgtcacacagttaatgtcaaccgaaccactgcctcggaccctctccccaacaccagcaagtgcaacagcccccacctctcagggcatccccacctccgatgaagaatccacacccaaaaagtccaaggctaggattctggagtcaataaccgtgagctctcttatggctaccccacaggatcctaaaggacaaggagtgggaacagggcggagcgcttcaaaactacgcatagcgcaggtgagtcccggacctcgtgactctcccgcctttccagactctccatggagagagagagtgttagcgcctatcctcccagataacttctccacccctactgggtcccgcacagattcccagtcagtccgtcatagccccatcgccccaagtagtcccagcccacaagtgctggcgcaaaaatatagtctcgtggctaaacaggagtcagtagttaggcgcgcaagccgcaggctggccaagaagactgctgaggaacccgccgcttccggtaggatcatttgtcatagttatctagaacgacttctgaacgttgaggtaccccagaaggtaggctcagaacaaaaggaacctccggaggaggccgagcccgtcgcagccgccgagccagaggtgccagaaaataatgggaacaatagctggccccacaacgacacagagattgcgaactccacccctaaccccaagccggcagcctctagtcccgagacaccatccgcaggccagcaggaggccaagactgaccaggctgacggaccacgggagccgccccaatctgcccgccgaaagcgctcatataagcaggctgtcagcgagctcgacgaggagcagcatctggaggacgaggaactccagcctccccgaagcaaaactcccagctccccgtgccctgcaagtaaggttgtgcgtcctctgcgcacatttttgcataccgtgcaacggaaccaaatgctaatgacgcccacctccgctccaaggtccgttatgaagtcattcatcaaacgcaatacgccactacggatggatcctaaggagaaggaacgccaacggctggaaaaccttagaagaaaggaggaggccgagcagctgaggagacagaaagtggaggaagacaagcgaagaaggctcgaagaggtgaagctaaagagggaggagcgtctgcggaaagtgctgcaggccagagaaagggtggaacagatgaaggaagagaagaaaaagcagattgagcagaaatttgctcagattgatgagaaaacagaaaaagcgaaggaggagagactggccgaggagaaggccaagaagaaggcagccgcaaaaaaaatggaagaggtcgaggctcgcagaaagcaagaagaagaggcacgacgcctgcgctggctgcaacaagaagaggaggagcggcggcaccaggagttactacaaaaaaagaaggaagaagagcaggagaggttgcgaaaggcagctgaagcaaagcggttggccgagcagagggagcaggagcgcagagagcaagaacggagggagcaagaacggcgggagcaagaacggcgggaacaagaacgtcgagagcaggaacgccagttggccgaacaggagcgcagacgggagcaggaacggttgcaagcagaacgggagctgcaggaacgggagaaagccctaaggctgcagaaggaacagctgcagagagagctggaggaaaaaaagaaaaaggaagagcaacagcggctggccgagcggcagctgcaagaggagcaagagaaaaaggctaaggaggccgccggagcttccaaagcccttaacgtgaccgtagatgtacaatctccagcttgtacaagctaccagatgactccacagggccatagggcaccccctaagatcaaccctgacaactacgggatggaccttaacagcgatgactcaaccgatgatgaggcccaccccagaaaaccgataccaacctgggctcggggtaccccattgagtcaggccattatccatcaatactaccatccaccgaatctccttgagctcttcggcacgatcctgcccctagacctggaagacattttcaagaaatccaaaccacgttatcataagcgcacatcctctgctgtttggaatagccctccactgcagggtgctcgagttccctcctccctggcctactcactgaaaaaacactag

SEQ ID NO: 14088 - DNA, 4149 bp, synthetic construct
  source 1..4149: mol_type = other DNA; note = Synthetic coding sequence
atggatgaagaggagaatcactatgtcagtcagctgcgtgaggtctatagtagctgcgatactacgggcactggattcttagaccggcaggaactcacccagttgtgcctaaagctgcatcttgagcagcagctgccggtcctcctacaaactttgctgggcaatgaccacttcgcccgtgtgaacttcgaggagttcaaggagggtttcgtggctgtgctttcaagcaatgcaggcgtcaggcccagtgatgaagacagctcatccctggaatcagctgccagtagtgcgattccccccaagtatgtcaacgggtctaaatggtacggcaggcgctcaagaccggagttatgtgacgcagccaccgaggcccgaagagtgcccgaacagcaaactcaagcaagcctgaaaagtcacctgtggcgctccgcatccttggaatctgtggagagcccgaaaagtgacgaggaggcagagagcacaaaagaagcccagaatgagctgtttgaggcacaaggccagctgcagacttgggattctgaggacttcgggtccccccagaagagctgctcccccagcttcgacacccccgagagccagattcgaggagtgtgggaagagctaggcgtcggatcttcaggccacctgtccgaacaagagttagccgtggtctgccagagtgtgggcctgcaaggcctggaaaaggaggaattggaggacctgttcaataagctggaccaagatggggacgggaaggtaagcctggaggagtttcaattgggcctcttcagccacgaacctgccctgctgctcgagagctccactagggttaaacccagcaaagcttggtcccactatcaggtgcccgaggaatccggctgtcacactactactacaagcagcctggtgagtttgtgtagctctctgcgactttttagtagtattgacgatggtagcggcttcgcttttccagatcaggtgctcgccatgtggacccaggagggtatccagaatggcagagaaattttgcagtccctggatttctccgtagatgaaaaggtcaacctccttgaactgacctgggctttagataacgaactgatgactgttgacagcgccgtgcagcaggcagccctcgcttgctaccaccaggaactgagttaccaacagggacaagtcgagcagctggctcgagagcgtgacaaagcacgccaagatctcgagcgtgcggagaagcgtaacttggaattcgttaaagagatggacgactgtcacagcacattagaacagctgactgagaaaaagattaagcacctcgagcagggatatcgggaacgactcagcctgctacgatctgaagttgaagcagagagggaactcttttgggaacaagctcaccgccagagggcagctctggaatgggacgtcggcagattacaggccgaggaagcgggactccgtgaaaaactgactctggcattgaaggaaaactctcggctgcagaaagagatcgttgaggtggtcgagaagctcagcgacagcgagcggcttgctctgaaattgcaaaaagacctggaatttgtcctcaaggacaagctggaaccccagtccgccgagctgctggcccaggaggagcgctttgccgctgtcctgaaggagtacgagttaaaatgcagagacctgcaggacaggaatgatgaattgcaagcagaacttgaaggattgtgggcgcggttgccgaagaatcgccattctccatcttggagccccgatgggcgtcggcgccaactgcccggtcttggacctgcagggatttcttttctcgggaatagtgctcctgtgtccatagaaacagaattgatgatggagcaagtgaaagaacattatcaggacttgcgtacccagctcgagactaaagtcaattattacgaaagagagattgctgcactaaaacgcaacttcgaaaaagagcggaaggacatggagcaggcccgccgtagggaggtgagcgtgctagagggacagaaagcagatctcgaagagctccacgaaaagtcacaggaggtcatttggggcttgcaagaacagttacaagatacggctagaggacctgaaccagagcagatgggactggccccctgctgtacccaggcactgtgcggactggccctgcgccatcatagccatttgcagcagatccgccgcgaggccgaggccgaattaagcggtgaactctcaggcctaggcgctctgccagccaggcgcgacctcactctagaactggaggagccccctcagggcccattaccccgtggcagtcaacgatctgaacagctagagctggagagggcacttaagttacaaccatgtgcttcggagaaacgtgcacagatgtgcgtgtcccttgccctcgaggaagaggaattggaattggcacgggggaagagggttgacggaccctccttggaggccgagatgcaggcgctgccaaaagacggtttggtggccgggtctggccaggagggcactcgtggccttctgcccttgcgccctgggtgtggagagaggcctctagcttggcttgcccctggagacggtcgggagtctgaggaagccgccggtgccggccctaggagaaggcaagcccaggataccgaggctacccagtcacctgctccagcccccgcccccgctagtcatggccctagtgaacgttggtctcggatgcaaccctgtggggtcgacggtgacattgtgcctaaagaacctgagccatttggtgcatccgcggccggtctcgagcagccaggcgctcgcgaattacccctgctgggaacagaacgggacgcgtcccaaacgcagcctcggatgtgggaaccacccctcaggccggcggccagttgccgcgggcaggcagagaggctgcaagctattcaggaagagcgcgcaagaagttggtctcgtggtacccaggaacaggccagtgaacagcaagctagggcagaaggtgcccttgagccaggatgtcacaagcacagtgtggaggtagctcgacggggttctttaccctctcacctgcagctggcagatccgcagggaagttggcaggagcagctggccgcaccagaggagggggaaacgaaaattgctctcgagcgcgaaaaagacgatatggagaccaaactattgcatcttgaggacgtcgtgcgcgctctcgagaaacacgtcgatctgagagaaaacgaccgtcttgaattccacaggctctctgaggagaacactctgctcaagaatgatctgggccgtgtacgtcaggaacttgaggctgcggaatccacgcacgacgctcaacgtaaagagatcgaggtccttaagaaggacaaggagaaggcctgttcagagatggaggtgcttaaccgacagaaccagaattataaggaccaactgtcccaactcaatgtcagagtgctgcagctgggccaggaagcatctacacaccaagctcagaacgaggagcatcgggtcactatacaaatgctcactcagtcccttgaagaagtagtacgctccgggcagcagcaaagcgaccagatccagaagctgagggtcgaactggaatgcctcaatcaggaacaccagagcctgcaactgccatggagcgagttaactcaaaccctcgaagagagtcaggatcaggttcagggagctcacctacgcctccgccaagcacaagcacagcacctacaggaggtgcgcctagttccccaggatcgtgtggctgaactccaccgtctgctgtcccttcagggcgaacaggcgcggcggaggcttgacgctcaacgggaggagcatgaaaaacagctcaaagcaactgaagagagggtagaagaggcggaaatgatcctcaaaaatatggaaatgctgttgcaggaaaaggtggacaaactgaaggaacagtttgaaaaaaataccaagagcgacctgctgttgaaagaattgtatgtagagaacgcccatctcgtaagggccctgcaagccacagaggagaaacaaagaggggccgagaagcagtctcgcttattggaagagaaggtgcgggcactgaacaaactagtcagtagaattgcccctgcggcacttagtgtgtag

SEQ ID NO: 14089 - DNA, 4383 bp, synthetic construct
  source 1..4383: mol_type = other DNA; note = Synthetic coding sequence
atggccggacgacctctgcgaatcggggatcagctggttctcgaggaggattacgacgaaacctatattccctcagagcaggaaatcctggagtttgcacgcgaaatcgggatcgatcctattaaggagcctgaactgatgtggctcgctagagagggtatcgttgcccctctgcccggcgaatggaaaccctgccaggatattactggcgatatctactattttaactttgccaatggccaaagcatgtgggaccacccttgtgacgagcattaccggagtttggtaattcaggagcgggccaaactgagtacctcgggggcaattaaaaagaagaaaaaaaagaaggagaagaaggacaaaaaagatcgcgatcctcctaaatcatctcttgccctgggctcttcacttgctcctgtgcacgtgccactgggtggcctggctcccctaagagggctggtagacacacccccttctgctctcagggggagtcagagcgtcagcctgggatcaagtgtggaatctggccggcaactcggggagctcatgctaccttcccagggcttgaagacatcagcttatacaaaggggctgctaggctccatctacgaagataagacagccctgagcctgctcgggctgggcgaggagaccaacgaagaggacgaagaagaatctgacaatcagtcagttcactcctccagcgagccccttcggaaccttcacctggatatcggcgcactgggaggagactttgaatacgaggagtctctacgaacctcacaaccagaggagaagaaggatgtgtccttggactctgatgcggccggacccccaaccccgtgcaagccctcttcacccggggccgactcatcactctctagcgcagttggaaaagggcgacagggtagtggcgctagaccggggttgccagaaaaagaggaaaacgagaaatctgagcccaagatctgtaggaatttggtgactcccaaagccgaccctaccgggtctgagccggcaaaagcctcggaaaaggaagcccccgaggataccgtggatgctggagaggaagggagtcgtagagaagaagccgccaaggaacctaagaaaaaagcctccgccttagaagagggaagcagtgacgcgtctcaggagcttgaaataagtgagcatatgaaagaaccgcaattgagcgattccattgcaagtgaccccaagtcttttcatgggctagacttcggttttaggagtcgcatcagcgaacaccttctggacgtggacgtgctgtcacctgtgctcggcggagcatgccggcaggcacaacaacccctgggcatagaagacaaagacgattctcagtcatcccaggacgaacttcaatctaaacaaagcaaagggcttgaggaaagactctccccccctctgccacatgaagagagagcccagagcccccctcggagcctggctactgaggaggagccaccccaaggaccagagggacaaccagagtggaaggaggcagaagaactgggagaggatagcgctgcctccctgtcccttcagttatcgctgcagcgcgaacaggccccatcaccccccgccgcatgcgaaaagggcaaggaacagcattcccaagctgaagagctcgggccaggccaggaggaggcggaggatcctgaggagaaagtggcggtctcccctactccaccagtgtcccccgaggtgcgctccacagaacctgtggccccaccagagcagttgtctgaagcggctctaaaagctatggaggaagccgtggcgcaggtgctggaacaggaccagcgccacctgcttgaaagtaaacaagagaagatgcagcagctgcgggaaaagctgtgccaggaagaggaggaggagattttgagactgcaccaacagaaggagcagtctctctcgtctctgagggaaaggctgcagaaggccatcgaagaagaggaagctcggatgagagaggaggagtcgcagaggctttcttggttgcgagcccaggtccagtctagcacccaggctgacgaagaccagattcgagcagaacaggaggcatccctccagaaactccgggaagaactcgagtcccagcagaaggccgaaagagcctcattagagcagaagaacagacagatgctggaacagctcaaggaagaaatcgaggctagcgaaaagtcagaacaggctgctttgaacgccgcaaaggagaaggcactgcaacaactcagggaacagttagagggggagagaaaagaagccgtggcaacactcgaaaaggaacacagtgcggaactggaaagactgtgctcttctctcgaagccaagcatcgcgaggttgttagttccctccagaaaaaaatccaggaagcgcagcagaaagaagaggcccagttacaaaagtgtttggggcaagtcgaacatagggtgcaccaaaaaagttatcacgtcgccgggtacgaacacgagctgagctcactcctccgagagaagcggcaggaggttgagggggaacatgaaaggagactcgataagatgaaagaggagcaccagcaagtgatggccaaggctagagagcagtatgaggccgaggaacgtaagcagagagcagagttgctgggccatctgaccggcgaactggaacgactccaacgcgctcatgagcgggagctggagaccgtcaggcaggagcagcacaagcgtctggaggacctccggcgccggcacagggagcaggagcgaaaacttcaggacctggagctggatctggaaactcgcgcaaaggatgtgaaggctaggctcgctctgctggaagttcaggaggagactgccaggagggagaagcaacagctcctagatgtgcagcgccaagtcgctttgaagagcgaggaggcaacggcaacgcatcagcagctggaggaggcccagaaagagcacacccatctgctgcagagcaatcagcagcttcgtgagatccttgacgagctacaggccagaaagttgaaattagaaagtcaagtggatctgttgcaagcccagtcccaacaacttcaaaagcatttctcttcgcttgaagcggaggcgcagaaaaaacagcatctgctgcgcgaggtcaccgttgaggaaaataacgcatcaccacactttgagccagacctgcacattgaggacctcagaaagtccctcggtaccaatcaaaccaaggaagtgagttcatcattgagtcagtcaaaagaggacctatatctcgactcgctgtcaagccacaatgtgtggcatttgctttccgccgaaggtgtggccctacgctcagcaaaagagtttctagtgcagcagaccagaagcatgcggcgacgccagacggctcttaaagccgcccagcaacactggagacatgagcttgccagcgcccaggaggtggccaaagatccaccagggattaaggccttggaggacatgcggaagaacttagaaaaggagactaggcatcttgatgagatgaaatcagctatgagaaaggggcacaacctactgaagaaaaaagaggaaaaacttaatcagctcgaaagcagcctgtgggaggaggcttccgatgagggcaccctaggcgggtcgcccactaagaaggccgtgacttttgatctgtcggacatggatagtctaagcagcgagagctccgaatctttttcccccccccaccgagaatggtggcgacagcagagaattgatagcactccttcgctgacctctcgaaaaatccacgggctcagtcattcgctgcggcagatcagttctcagctgagttctgtcctctctatcctagatagtttgaaccctcagtcccccccccctctcttggcttctatgccagcccagttacctccacgggaccctaaatcaactcctactccaacctattatggaagcctggcccggttctctgcgctgtcctctgccacaccaacttctacgcagtgggcatgggactctggacaaggcccacgtttgccctcgtcagtggcacaaaccgtggatgacttccttctcgagaaatggagaaaatactttccatcaggcatccctcttttgtccaactctcctactcctctggagtctaggctcggttacatgtccgcctccgaacagcttaggctgctccagcactcccattcacaagtgccagaagccgggtctactacttttcagggtataattgaggctaatagaagatggctggagagagtcaaaaacgacccgagactgccactcttctctagcacccccaaacccaaggccacactttctcttttgcagctaggcctggatgaacataatagagtgaaggtctaccgcttttag

SEQ ID NO: 14090 - DNA, 1881 bp, synthetic construct
  source 1..1881: mol_type = other DNA; note = Synthetic coding sequence
atgatggcaaacgacgcgaaacccgacgtgaagactgtgcaggtattaagggacaccgctaataggttgagaatccactctattcgggcaacctgtgcaagcggttctggccagctcacttcttgttgttccgctgccgaggttgtcagtgtcctgtttttccataccatgaaatacaaacagaccgatccagagcatcccgataatgaccgcttcatcctgtcccggggtcatgctgcgccaattctttacgcagcttgggtcgaggtgggggatatcagcgagagtgaccttctaaaccttcgcaagctgcactccgacttggaaaggcatcccacccctcgcctcccctttgtggacgtcgccactgggagccttgggcagggtttgggaaccgcttgcggcatggcatataccgggaagtatctggataaagcttcataccgtgttttttgcctgatgggcgacggtgaaagttccgaggggagcgtgtgggaagcctttgcctttgctagccactacaatctcgacaacctcgtggccgtcttcgacgtgaacagactggggcaatctggtcctgcccccctcgagcacggggcggatatttatcaaaactgctgcgaggcttttggctggaatacctaccttgtggatgggcacgatgtggaggccctctgccaggcgttttggcaggcatcacaggtaaagaacaagccgacggctattgtggccaaaactttcaaaggcagggggatcccaaatattgaggatgccgaaaattggcacggtaaacccgttccaaaggagcgcgccgacgctatcgtgaaactcatcgagtcccaaatccagaccaatgagaatttaatcccaaaatctcctgttgaggatagtccccaaatctccatcacagatattaaaatgacttctccacctgcgtacaaggttggcgacaagattgccacccagaaaacctatggcttagccctggcaaagttgggaagggcaaatgagcgcgtgatcgtgctgtctggagataccatgaactctaccttcagtgaaatctttaggaaagagcatcctgaaaggttcattgaatgcatcatcgccgagcagaacatggtgtccgttgctctgggctgtgcaactagagggcgcactatcgcattcgcgggggcgttcgcagccttcttcactcgcgctttcgaccagctgcggatgggggccatatcacaagcaaacattaacctcattggttcacactgcggggtctccaccggagaagatggggtttcccagatggcccttgaggatttggctatgttcagaagcattccaaactgtacagtgttttacccttctgacgccatcagtaccgaacacgccatctacctggctgccaacactaaaggaatgtgtttcattagaacatcgcagccggaaaccgccgtgatttatacaccccaagagaacttcgagattggccaagctaaagtggtgaggcacggtgttaacgataaggtgacagtaataggcgccggcgtgaccttacatgaggccctggaagccgcagatcacctttctcagcaaggcataagtgtgagggtcatcgacccatttactattaaaccattagatgcagccaccataatcagctctgccaaagccacgggaggacgagttatcaccgtcgaggaccattacagggagggaggcatcggcgaagccgtgtgtgctgcggtttccagggaaccggatattctggtgcaccaattagccgtgagcggcgtgccccagcgggggaagacaagcgagctgctggatatgtttggtatctctactaggcacattattgctgccgtcaccctaacgctgatgaagtag

SEQ ID NO: 14091 - DNA, 999 bp, synthetic construct
  source 1..999: mol_type = other DNA; note = Synthetic coding sequence
atggccacaattaaatccgaactcattaagaacttcgccgaggaagaggcaattcaccacaataagataagcatcgttggtactgggtcagtgggggttgcttgcgctatcagcattctgctgaaaggcttaagcgatgaactggtgctggttgacgtggacgaaggtaaactgaagggagagaccatggacttacagcacggcagtcccttcatgaaaatgccaaacatagtgagcagcaaggactacctcgtcaccgcgaatagcaatctcgtgataatcaccgccggtgctcgtcagaaaaaaggagagacccggctggacctcgttcagagaaacgtgagcatctttaagctgatgataccaaatatcacacagtatagcccccactgtaagcttctgatcgttaccaaccccgtcgacatattgacttacgttgcctggaagctgtcaggctttccaaagaatagggtgattgggagtggttgcaatctcgactccgcgcgcttccggtacttcatcgggcagcgcctggggatccactccgagtcatgccatggcctgatcttaggagagcatggggattcctcagtccccgtttggtctggtgttaacatcgctggggtacctttgaaggacctgaatcctgatatagggacagacaaagatcctgaacagtgggaaaatgtacacaagaaggtgattagctccggctatgagatggttaagatgaaagggtacaccagctggggcatttcactgagcgtcgcggatttaacggagtctattctcaagaacctgcggcgtgtgcacccagtgtccaccctgagtaaagggctctacggcattaacgaggacatctttctctctgttccatgcatcctgggagagaacggaatcaccgacttaattaaggtaaaattaaccctggaggaggaggcctgcttgcagaagagcgcagagacgctatgggagattcaaaaggaactaaagctctag

SEQ ID NO: 14092 - DNA, 972 bp, synthetic construct
  source 1..972: mol_type = other DNA; note = Synthetic coding sequence
atgccagagatgcctgaggatatggagcaagaagaggtcaatattccgaatcggcgtgtcctggtgaccggagcgacggggctcctggggcgtgcagtgcataaggagtttcagcagaacaactggcatgccgtgggctgcggatttcgtagggctcggcccaagtttgaacaagtgaatctgttggactctaacgcagtgcaccatatcatacacgattttcagccccacgttatcgtgcattgcgcggcggagagaagacccgatgtagtggaaaaccaacccgacgcggcatcacagttgaatgtcgatgcttccggtaacctcgcaaaagaggccgccgccgttggcgctttcctgatttatattagttcggactacgtcttcgatggcaccaatcccccctatcgggaagaagacattccagcccccctgaacttgtacggtaaaacaaagttggacggtgagaaagcagtgttagagaacaaccttggtgctgccgttttgaggattccaattctgtacggggaagtcgagaaacttgaggagtccgccgtcacggtgatgtttgacaaagtccagttctccaacaaatcagccaacatggaccactggcagcaaagattccccacgcacgtcaaagatgttgccacagtgtgtagacagcttgctgaaaagaggatgctcgacccaagtatcaagggtacttttcactggtcggggaacgaacagatgactaaatatgagatggcctgtgcaattgcagatgcgttcaacctcccgtcttcccacctccggccaattaccgactccccagttctgggagcccagcggcccaggaatgcccagcttgattgctctaaactggaaaccctcggaatcgggcagcggactcccttcagaatcgggatcaaagagtctctgtggccttttctcatcgacaaacgctggaggcagacggtgtttcactag

SEQ ID NO: 14093 - DNA, 3285 bp, synthetic construct
  source 1..3285: mol_type = other DNA; note = Synthetic coding sequence
atggcagagtcttcctccgaaagcgatcatttcaggtgtcgcgaccgactgtcaccctgggccgctaggtccactcatagaggtacacggagtctgcctaccgtggaagtgactgagaaggtgaacactattactagtacccttcaagacacttctcgaaatctgcggcaggtggatcaaatgcttgggagatatcgggaatacagcaatgggcaggcaggggccatagagcacctgaaggagagcctagaacaatccatcgatcagctaaggtcacagcgattactgaggaacagcggaggcaggtcaatcagcgtaacctcactgtctgcatctgatctagacggcgggaccggaagcgaactccaccacttccctcctacttctcctttgaaagactatggtgatccccaaggcatcaaaagaatgaggtctcgaacgggagtgcgctttgtgcaggaaacggatgatatgacccagctccatgggttccatcagtccctgagggatctgagcagcgagcagattagattgggagatgatttcaatagggaactgtcccgtcgaagccggtctgacgccgagacaaagagagccttggaggagctgactgagaagcttaacgaagctcagaaacaggaggttgtgtccgacagggtagaaagacggctgcaagagctcgagagagagatgaggacggagagggagttggtcgagcgcagacaggaccagctgggattgatgagtcttcagctgcaggaggctttgaagaagcaagaggccaaagcagacgagcatgagggagccataaaaaacaaactgagacaaaccgagacagaaaaaaaccagctggagcaggagctcgagctgagtcgcaggcttttgaaccagagcgaaggatcgagagaaacgttgctgcaccaggtagaagaactgcggacccagctcactaaggccgagggcgatagaaaggggctccagcaccaagtgagccaaatctccaaacagcagagcaactaccaggacgagcaaggcgaagactggaggttcaggagaggagtggagcgtgaaaaacaggatctggagaagcagatgtccgatctgagagtccaactgaacttctctgccatggccagcgagctcgaagaagtcaagaggtgcatggagcgcaaggataaggagaaagcccaccttgccagtcaggttgaaaatctgacaagggaattggagaacggagagaagcagcaactccagatgcttgatcggctgaaagagattcagaatcactttgatacttgcgaagctgaacgaaaacacgcggatcttcagataagcgaactaacacgccatgcggaggatgctactaagcaggctgaaagatatctcagtgagcttcaacagtccgaggcactaaaagaagaggcagaaaaaaggcgggaagaccttaagctcaaggcccaggaaagcatccgccagtggaaactgaagcacaagaagctcgaacgcgcccttgaaaagcagtctgagacagtggacgagctaaccggtaaaaacaatcagattcttaaagagaaggacgagctgaaaactcagctttacgctgccctgcagcagatcgagaacctgagaaaggagctcaacgatgtactgacaaagcgggccttacaggaggaagagctccactccaaggaggaaaagttgagagacattaaaagccaccaggccgatctggagctcgaggtgaaaaactccctggacactattcaccggctggaatcagaactcaaaaagcagagtaagatccaatcccagatgaaagtcgagaaggcgcacctggaagaggagatcgctgagttaaagaaatcccaagcgcaagacaaagctaaactgctggagatgcaggagagtatcaaggatctctccgctatccgggctgacttggcgaataaactggcggaggaagaaagggccaaaaaggccgtgctcaaggatctgtccgacctaacggctcaggctaaatcccgcgatgaggaaaccgcgaccattattacacagctgaaactcgaacgggacgtgcaccaacgcgagctgaaggacctgaccagttccctgcagtccgtgaaaacgaaacacgagcaaaatattcaggagcttatgaagcacttcaaaaaggagaagtctgaggccgaaaatcacatccggaccctgaaagccgaaagtctggaagagaagaatatggccaagattcatagaggccagctggagaagctcaaaagccagtgtgatagactcaccgaggagctaacgcaaaacgagaatgagaacaagaagctcaaactgaagtatcagtgcctcaaggaccaattggaagaacgggagaagcatataagtatagaggaggagcacttaaggcgcatggaagaggcccggctacagctgaaggatcagctgctgtgcctcgagacagaacaggagtctattctcggtgtgatcggaaaagagatagatgctgcttgtaaaacatttagcaaagactctgtggaaaagctaaaggtcttctctagcggaccagatatccattacgacccgcacaggtggctggccgaatcaaagacaaaattgcagtggctgtgcgaggaactgaaggagcgggagaatagagaaaagaatctgcggcaccagcttatgttatgccggcagcagttaagaaatctgactgagaacaaggaatctgaacttcagtgcctattccagcagattgaaagacaggaacagctcctggacgaaattcacagagagaaaagggatctgcttgaagagactcagcggaaagacgaggagatgggaagtctacaggaccgcgtgatagcacttgagacgtccactcaggtggcattggatcacctcgaatcggtgcccgaaaaactttctttgctagaggattttaaagacttcagggactcttgcagtagttcagaaagaacggatggacgctactctaagtatagggtgcggaggaattcactccagcaccaccaggatgacactaaatataggacaaagagcttcaaaggcgacaggacattcttagagggatcccatacaagaggattagaccacagcagtagctggcaagaccacagccgtttcctcagttcccctagattttcctatgtcaatagctttaccaaacgcactgttgccccggattcagcgagcaataaagaagacgccacaatgaatgggacatcctctcagcctaaaaaagaggaatacgggagctag

SEQ ID NO: 14094 - DNA, 1011 bp, synthetic construct
  source 1..1011: mol_type = other DNA; note = Synthetic coding sequence
atgaagaaagagcacgttcttcactgccagttcagtgcctggtatcctttctttcgtggcgtcaccattaaaagcgtgattctccccctaccacagaatgtgaaggattacctgctcgacgatggtaccctagtagtgtcaggaagagacgatcctcctacacatagtcaacctgactctgatgatgaagccgaggaaattcaatggtccgacgacgaaaacacagcaactctgacagctccggaatttcccgaattcgctaccaaagttcaggaggccattaacagcctggggggctccgtctttccaaaattaaattggtccgcccccagagacgcctactggatcgcgatgaactccagtctgaaatgcaaaaccctgtctgatatttttttactgtttaagagtagcgactttataacccgcgactttacgcaaccttttatccactgcactgatgattcacctgatccctgtatagagtatgagctggtgcttagaaagtggtgtgagctgatccccggggccgaattcagatgttttgtcaaggagaataaactgattggcataagccaaagggactacacgcagtactacgatcacatcagtaaacagaaagaggaaattagaagatgtatacaggacttctttaagaagcacatccaatataagttcctggatgaggatttcgtgttcgacatttatcgggacagcagagggaaggtttggcttattgattttaatccctttggagaggtgaccgatagcctgctttttacatgggaggaactgatatctgaaaacaaccttaacggtgacttttcggaagtagatgcacaagaacaagattctccggcctttagatgcacgaactccgaggtaactgttcagcctagcccctacctgtcctatcgactgcccaaggactttgtggaccttagtaccggtgaagacgcacacaagctgattgatttcctgaaactgaaaagaaaccaacaggaagatgattag

SEQ ID NO: 14095 - DNA, 1248 bp, synthetic construct
  source 1..1248: mol_type = other DNA; note = Synthetic coding sequence
atgaagctgtcgcttaccaaggtcgtgaacggatgtcgcctggggaaaataaagaatttagggaaaactggcgaccacactatggatattcctggttgtctcctttacacaaagaccggttctgcccctcacttgactcaccacacacttcacaatatccatggcgttccagccatggcccagctcaccttgagcagcttggctgaacatcacgaggtgctgacagagtataaggaaggcgtgggaaaattcattggtatgcccgaatctctactgtactgctcactccatgatcctgtgtccccttgcccagccggttacgtgacaaataagtctgtgagcgtgtggagcgtcgctggccgggttgaaatgaccgtcagcaagtttatggccatacaaaaggcgttacagcccgactggtttcagtgtctcagcgacggagaggttagttgcaaagaagcaacgtccattaaacgggttcggaaatctgtagatcggtccctcctgtttttagataattgcctgaggctccaggaagagagtgaggttctgcagaagagtgttatcatcggcgtgattgaggggggcgacgtgatggaggagcgcctgcgtagtgcccgggagactgctaagcggcccgtgggcggcttcttactagatgggtttcagggtaacccgacgaccttggaggcacgactcaggctgctatcctccgtgacggcggaactgccagaagataagccaagactgataagtggcgtttctaggcctgatgaggtgttagagtgcattgaaaggggcgtcgacctgtttgaatcttttttcccctatcaagtgactgagcgcggatgcgccttaaccttctcctttgactaccagcctaatcccgaagagactctcttgcagcagaacggcacccaggaggaaataaagtgtatggaccagattaaaaagatcgagacaaccggatgcaatcaggaaataaccagctttgaaataaacctgaaggaaaagaaataccaggaagatttcaatccacttgtgcgaggctgctcttgctactgctgcaagaaccacactagagcgtatatccaccacctgctcgtgacaaatgagcttctggccggagtgcttctgatgatgcacaactttgagcattactttggtttctttcactacattcgggaagccttgaaatcagacaagctggcgcagctcaaagaacttattcatagacaagcgtcttag

SEQ ID NO: 14096 - DNA, 1770 bp, synthetic construct
  source 1..1770: mol_type = other DNA; note = Synthetic coding sequence
atgcccactgtgagcgtcaagagggacttactgtttcaggccctgggaaggacatacacagacgaggaattcgacgagctttgcttcgagttcgggcttgagcttgacgaaatcacaagcgagaaggagataatctccaaagaacagggcaatgtgaaggctgcaggtgccagtgatgtggtgttgtacaagatcgatgtcccagcgaatcggtatgacctgctgtgcctagagggcctcgtccgggggttgcaagttttcaaagagcgaataaaggcgccagtttacaaacgcgtaatgcccgatggcaagatccagaagctcatcataacagaggagaccgccaaaatccgaccattcgctgtggccgccgttctgcggaacattaagttcacaaaagaccggtacgactctttcattgagttacaggagaaactgcatcagaacatctgccgaaagagggcacttgtcgccatcggcactcacgacctcgacaccctaagcggtccttttacatacacggccaagcgcccctccgatattaaatttaagcccctaaacaaaaccaaagagtacaccgcctgcgaactgatgaatatctacaagacagacaatcacctcaaacactatctgcatataatagagaacaaaccgttgtaccccgtcatctacgacagtaacggtgttgtgctctctatgccccccattattaacggcgatcacagcaggatcactgttaacactcgcaacatttttatagaatgcaccggcacagattttaccaaagccaaaatcgtcctagatatcattgtcaccatgtttagcgaatactgtgaaaatcaattcaccgtggaagcggctgaagttgtgttccctaacggtaaaagccacaccttccccgagctggcataccggaaagaaatggtaagagccgatctgatcaacaaaaaagtggggatccgagagacaccagagaatctggcaaagcttctgacccgcatgtacttaaagagcgaagtgataggagacggaaaccaaatcgagatagagatcccccccaccagggccgatattattcatgcctgcgacattgtcgaggatgccgctattgcatatggctacaacaatatccaaatgaccttgcctaaaacatatacgatcgccaatcagtttccactgaataagttaacagagctgttaagacatgatatggcggccgccggctttaccgaagccttgacctttgccttatgttcacaggaggacattgctgacaagctgggtgttgatattagcgccacaaaagctgtgcatatcagcaaccctaaaaccgccgagtttcaggtggcaagaacaacgctgctacccggcttgctgaagactatagccgcaaacaggaaaatgccactcccactaaaacttttcgagatttctgatatcgtaattaaggattctaacacggacgttggggccaagaactaccgacacctgtgcgctgtttactataataagaatccaggattcgaaataatccacggactgctggatcgtattatgcagctgctggatgtacctcccggagaggacaaaggaggctatgtaattaaagcctcagaggggccggccttctttcccgggcggtgtgccgagatttttgctagagggcagtccgtggggaaactcggagtgcttcaccctgacgtcattaccaagtttgagctaacaatgccttgtagttctttggagattaatgtgggcccttttctttag

SEQ ID NO: 14097 - DNA, 477 bp, synthetic construct
  source 1..477: mol_type = other DNA; note = Synthetic coding sequence
atggccgcccagggcgtggggcctgggccgggctccgccgcacctccaggactcgaagctgcccggcagaagctggccctgcgacgcaaaaaggtcctcagcaccgaggagatggaactctacgagctggcccaggcagccggtggggccatcgacccagacgttttcaagatccttgttgacctcctgaaactcaatgtcgccccgcttgccgtgttccagatgttgaaatccatgtgcgctggtcagaggctcgcaagtgagccgcaagatccagctgcagtgagcctgccgacttcctccgtcccagagactaggggccggaataagggatctgcggccctaggcggggctctggcccttgccgagcgctcttcccgggaggggagctctcagaggatgcctagacagccttcagctactaggctgcctaaggggggcggtcctggtaaaagtcctacacgcggctcaacttag

SEQ ID NO: 14098 - DNA, 675 bp, synthetic construct
  source 1..675: mol_type = other DNA; note = Synthetic coding sequence
atggttgaggacgagcttgccctatttgataaaagtattaacgagttttggaacaagtttaaaagcactgatacctcctgccagatggccgggctgcgggatacgtacaaagatagtatcaaggccttcgccgagaagctgagtgttaagttgaaggaagaggagaggatggtggagatgttcctggaatatcagaaccaaatttctcgacagaataaactgatccaggaaaaaaaggataatcttctgaaactgatagccgaagtgaagggtaagaagcaggaacttgaggtactaaccgcaaacatacaagacctaaaagaagaatatagcaggaaaaaggagacaatcagtacagccaataaagccaacgccgagagattaaaaaggcttcaaaagagcgctgatctgtataaggaccggctgggattggagatcagaaagatctatggcgagaagctacagtttattttcactaatatcgatccgaagaaccccgagagcccgttcatgttctcacttcacctgaatgaagctcgagactacgaggtgtccgatagcgccccccatctggagggcctggccgagtttcaggaaaatgtccggaaaacaaacaactttagtgcatttctggctaatgttcgcaaagcatttaccgcaactgtatacaactag

SEQ ID NO: 14099 - DNA, 1728 bp, synthetic construct
  source 1..1728: mol_type = other DNA; note = Synthetic coding sequence
atgaagctgacagactccactaaaggttggatagtctgggctgccctcgacagcagcatgaggggcatgtctcttagcgcaggatcatctcccctgcactcccccaaaatcacaccacacacgagcccggcaccacggaggcggtcccataccccaaatcccgcctcctacatggtgccatcatctgccagtacatccgtgaataatccagtgagccaaaccccctccagtggccaggtgatccagaaggagacggtgggcgggacgacatatttctacactgatactacaccggctcccctgacgggtatggtgtttcccaactatcacatttatcctcctactgctccccacgtcgcttacatgcagcccaaagctaatgcccccagcttctttatggccgatgagcttcgccaggaactgatcaataggcacctgatcacaatggcacagattgaccaggctgacatgccagctgtaccaaccgaagtggactcctatcactccctcttccctctagagccgctacctccacccaaccgcatccagaaatcctccaacttcggctacattacctcctgttacaaagctgtgaactcaaaagacgatcttccatactgtttgagacggattcacggctttcgcctggtcaacaccaaatgcatggttctcgtcgacatgtggaaaaaaatccagcactctaacattgtgaccttgcgtgaggtatttacaaccaaggctttcgctgaaccatctttagtgtttgcctatgattttcatgccggcggagaaaccatgatgtcacgccactttaacgacccaaatgctgatgcctattttaccaaacggaagtggggacagcacgagggtcctctgcccagacagcacgcaggactgcttcccgagagcctaatttgggcctatattgttcagctatcaagcgccctgagaacaatccatactgcagggctggcatgcagagtgatggatcctacaaagattttgataacaggaaagacccgccttcgtgttaattgcgttggtgtctttgacgtgttaacgttcgacaactcccagaataataatccgttagcactgatggctcagtatcaacaggcagacctcatctcactgggcaaagttgtgctggcactggcctgtaactctctggctgggatacaacgggaaaatcttcagaaagccatggaattagtgactataaactactcttctgatctgaagaatctgatactttacctgttaaccgaccagaatcgcatgcgctccgtaaacgatattatgcctatgattggtgcaagattttatacccagctggatgcggcgcaaatgcggaacgacgtgattgaggaggacctagccaaagaggtgcagaatgggagattattccggttactggcgaaactgggaacaataaatgagagacctgaatttcagaaggatcctacatggtctgagaccggcgaccggtatctcctgaaattgttccgcgaccatctcttccatcaggttaccgaggctggtgcaccatggatcgatctgtcacacattattagttgtcttaacaaacttgacgcgggagtccccgagaaaatcagtctgattagtcgcgatgagaagtctgtgcttgttgttacctactccgacctaaaacgctgttttgaaaacacatttcaggagctgatcgcggctgcaaacggacaattatag

SEQ ID NO: 14100 - DNA, 1785 bp, synthetic construct
  source 1..1785: mol_type = other DNA; note = Synthetic coding sequence
atggagtccaaccacaagagtggagacgggctcagcggcacccagaaggaggccgccttgagagcgcttgtccaaaggactggatattcactcgtgcaggagaacggccagcgcaagtacggaggtcccccgccagggtgggatgccgcccccccggagcggggctgtgaaatatttataggcaaactcccccgagatcttttcgaagacgaacttatcccactctgtgagaagatcggtaagatttatgaaatgaggatgatgatggatttcaacgggaacaatcgtgggtacgcatttgtgacattttccaacaaagtggaggccaaaaacgctattaaacaactgaataactatgaaatccgtaatggcaggctcttgggcgtatgcgccagtgtggataattgtagattgtttgtcggagggattccaaagaccaagaaaagagaggagattctctctgagatgaaaaaagtgactgagggcgtggtggacgtgatcgtctaccccagtgcggccgataagacgaagaatcgagggttcgctttcgtggaatatgaatctcatcgcgctgctgctatggctcgaaggaagctgctgccagggcgcatccaactgtgggggcacggaattgctgtcgattgggccgagccagaagtagaggttgacgaggacactatgagcagcgttaaaattctgtacgtcagaaatctcatgctcagcacgagtgaagaaatgattgagaaagagttcaataacatcaaacctggagctgtagagagggttaagaagatccgtgactacgccttcgttcatttctccaatcgggaggatgccgtggaagcaatgaaagctctgaatggcaaagtgcttgacggatctcccatcgaggtgacactggccaaacccgtggataaagactcatatgtgagatacacacgaggaactggcggtaggggaacaatgctacaaggcgaatacacttacagcttgggacaggtgtacgatcccaccaccacctatctaggagctccggtcttttatgctccccaaacctacgctgctattcctagtctgcacttccctgctactaaggggcacctcagcaacagagcaatcatcagggccccctccgttcgcgaaatctatatgaacgttcccgtgggggccgcgggggtgcgtgggctgggaggccgcggatacctggcatatacaggcctgggcagagggtatcaggtgaaaggagataaaagggaagacaaactctacgatatcctgcctggaatggaactgaccccgatgaaccccgtgacccttaagccccagggcattaaactggccccccagattttggaggaaatttgccagaaaaacaactgggggcaacctgtctaccagttgcattctgccatagggcaggatcaacgtcagctttttttatataaaattaccattccagccctagccagccagaatccggcaatacacccattcactcccccgaaattgagcgcctttgtagacgaggcaaaaacctacgccgccgaatataccctacaaacgctaggcatcccaactgacggtggggacgggacaatggccaccgccgcagctgccgccacagcattcccgggatacgccgttcccaacgctaccgcccctgtgtctgcggcccagctcaaacaggctgtgactctgggccaagaccttgcagcctacaccacttatgaagtgtatcccacctttgccgtaaccgccaggggcgatggctatggaactttctag

SEQ ID NO: 14101 - DNA, 1167 bp, synthetic construct
  source 1..1167: mol_type = other DNA; note = Synthetic coding sequence
atgctggagggaagctggatcaaccgaagggaggacaaactgggcgtgtactcactggttcatttctcgccgaagatgttgggatccgttgctactactcttccattgtcatctagcaacagttctgggatgccgttggggtactacctgtcatcaccacagatttcgcgagtcacgatcagcaccaccggacagctgacctccaaggccactgtgggctcctgcagtcgcgtagagaattctctggacgcaagtccattctccgtccctaagaaacaggacgaatctcccatgatcggcgatggagaagactatttcctctctctgttcggcgactctaagaaactgacagctcactccaactacacacaaaagacacttaagtactttagcatgattcttgaggaggtaggccagttcacctcatcatcacttggtgatgttgagattgctgaggtgaatgtcaagggactgttcgtaaagctgatcaactctagcctcgacaaagagatggcaatcggagatcatattctacagcagaatgttaatggtcagacaatctccctatatcggttcctgccaaatattgtcatgcaggccaatagcacagtaacagtgtgggctgctgcctctgaagcaaagcaccagccacctagtgatttcctgtggaaggagcaagataaattccgagcatctcctgattgtataaccatactctgtaagccaaatgggcaggctattgcatggtacacccccatccactggaaacaggcttgggaaaaattagacgccgatgtggaatttaacaggtgctctgtggtgagtcctactttcagaaagcgggtttttcaatggaccgcctctacggcgactatcacaaaggagaaacaagaccagccaaaaaaagatatctctaactaccaggtcgaacaggcccaggttctcctcaagcgagagaaggagatccctccgactgttttccccaatcgcagcccatggtgccagaatccctacgtatccgctcacccttactgtccactgatcgagcctcataatacatctacagccgggggtcgcttagataggcaacctaggacgcgatccaccaggcctaatcgtgctagcggcagcaagaaaaaaaagacatctgagtcccagaaacagtag

SEQ ID NO: 14102 - DNA, 744 bp, synthetic construct
  source 1..744: mol_type = other DNA; note = Synthetic coding sequence
atggaggagcagccccaaatgcaggacgctgacgagcccgctgatagtgggggcgaaggaagagcgggaggtcctcctcaggtggccggagcccaggcagcttgttctgaagacaggatgacattactgctgcgtcttcgcgctcagacgaagcagcagcttctggagtataaaagcatggtggatgcttcagaggaaaaaacacccgaacagatcatgcaagagaaacaaatcgaggccaagatcgaagacctggaaaatgaaatcgaggaagtaaaagtggcgttcgaaataaagaaactggccttagaccgaatgagactgagtacagctctgaaaaaaaatttagaaaaaatctccagacagagtagtgtgctgatggataatatgaaacacctgctggagctgaataagctgattatgaagagccagcaggagagttgggacctcgaggagaaattactcgacatcaggaaaaagcgcttgcagcttaagcaagcctcagagagtaagttgctggaaattcagaccgagaagaacaaacaaaaaattgatctcgatagcatggagaactctgaaagaataaaaatcattcggcagaacttgcaaatggagattaaaattaccacagtgattcaacacgtgtttcagaacttgattttaggatcaaaagtcaactgggccgaggatccagcccttaaagagatcgtgctgcagctagaaaagaacgtggatatgatgtag

SEQ ID NO: 14103 - DNA, 1458 bp, synthetic construct
  source 1..1458: mol_type = other DNA; note = Synthetic coding sequence
atggaattcctgggcacgacccagactgcctcatattgcgggccaaagaaatgttgtgggctgaccagtctccccgcagttcaagctccggttattcaggagtgctatcagccctactacctgccaggttaccggtacctgaacagctggcgtccctccttattctataagattgccaacgtgcagacatgccccgatgagtctaccagcactcttcgccctccaaccattctaccaactctgcggtcggccctgttctcaagatacagtcctcacgattgggaccagagcaatcagcttcaggttagaggcgcggaagcctcccggctgtgggcaagcaggctgacagatgactcaatgaggctgttgcaagataaggatcagctgactcatcagatgcaggaaggaacctgcagaaacctgggtcagcggctgtccgatatcggattctggaaatctgaactaagctatgaactggaccggttgttgaccgaaaaccaaaatctggagaccgtcaagcggagattggagtgtgctgccaatgaggtgaattgccctctgcaggtagctctggaatgtctctatcacagggaaaagcggataggaatcgaccttgttcatgacaacgttgaaaagaatctgatccgtgaggtagacctacttaagtgttgccaggaacagatgcgcaagttggcccagcgcattgacatccagatgcgagacaatagggacgcccagcacgtcctcgagcgcgacctggaggacaaatcaagcgcccagtgtatcgatgagaaatgtttcaacctgcgaaatacaagtgactgtatcagtttcttccacggcatggaaaaaattgacggcaccatatctgtgcctgagacttgggccaaattctctaatgacaatatcaaacactcacagaacatgcgggccaacagtatacagctcagagaggaagccgaacacctctttgaaaccctcagtgaccagatgtggagacagttcaccgataccaacctggccttcaacgcaaggatcagcgaggtgaccgatgtaaaaaacaagcttcagactcagctggcgaaaaccctgcaagagatttttcaggcggagaacactatcatgctgctcgaacgatccattatggctaaagaaggccctttaaaagttgcgcagacccgcttggagtgccggactcgcagacccaacatggagctatgcagggatatacctcagttgaagctcgtgaacgaggtgtttaccattgacgatactctccaaaccttgaagctgcgcctgcgagaaacacaggatacattacagctgctggtgatgacaaaatgcaggttagagcacgagctggccattaaagccaacaccctgtgcatcgataaggaaaagtgtatgggaatgcggaagacctttccatgtacgcctaggctggtggggcacacctag

SEQ ID NO: 14104 - DNA, 837 bp, synthetic construct
  source 1..837: mol_type = other DNA; note = Synthetic coding sequence
atgggaaaatcttcagaatggtgtgagcgcattgccggaatccagaaattcgtcctcgagaaatggacaaagaaagccaaacccgaggacaccctcaatttgtgtcaactcctcaacaacgacttagcgtccacagtggtgagctatccgcgacgctttgtcgggcttggaacgctgcccatgcaggccccagagttggccgtgaaggaaatggaacgctgtgtgaaagagcttgggtttccaggagtacaaataggaactcacgtgaatgaatgggacctaaatgctcaggagctgttcccagtgtatgccgcagcagagagactgaagtgttccttgttcgtgcacccctgggacatgcaaatggatggtcggatggccaaatattggctcccttggctggtagggatgccagcagagacaacgatcgcgatctgcagtatgatcatgggtggcgtctttgaaaagttcccaaaattgaaggtgtgtttcgcccacggcgggggtgcattcccctttaccgtcggtcgcatctcccacggattctcaatgaggcctgacctgtgcgctcaggataaccccatgaatccaaagaaatatttggggtctttttataccgacgcccttgtccacgacccgctctccctgaaactcctcacagacgtgatcggcaaagataaagtgatactaggaacagactacccctttcccctgggcgagttggagccaggcaaactgatcgagtccatggaagaatttgacgaggagacaaagaacaagctgaaggctggcaacgccctggccttcctcgggctggagcgcaagcagtttgagtag

SEQ ID NO: 14105 - DNA, 2478 bp, synthetic construct
  source 1..2478: mol_type = other DNA; note = Synthetic coding sequence
atgagttcttcccccgtcaacgtcaaaaaactgaaagtgagcgagttgaaagaagagctaaaaaaaaggagactgtccgacaaagggctgaaggccgaattgatggagagactccaggcagctctggatgatgaagaggccggaggacggcccgctatggaacctgggaatgggtcactcgatcttggtggcgatagtgcgggccgctctggcgccggactggaacaggaggcagctgctggaggagatgaggaagaggaagaagaggaggaagaagaggaagggatttctgccctcgacggcgaccagatggaactcggagaagaaaatggtgccgcaggagcggcagactctggtccgatggaagaagaggaggccgctagtgaggatgagaacggggacgaccagggcttccaggagggggaggatgagctgggcgatgaggaggagggagcgggcgatgagaacggtcatggagaacagcagccacagccccctgcaacgcagcagcagcagccccagcagcagaggggcgccgctaaggaggcagccggaaaatcttctgggcccacctcacttttcgcagtcacagtcgccccgccaggggcccggcagggacaacaacaagcgggaggcaagaagaaagcagaaggcggcggcgggggcggacgtcccggcgcccccgctgccggggacggcaagacagaacagaagggaggtgacaagaagcggggagttaagaggcctcgtgaagatcatgggcgcggatatttcgagtacatcgaagaaaataaatattctcgcgccaaatccccacagcctccagtggaagaagaggatgaacatttcgatgacacagtggtgtgccttgatacgtacaattgcgaccttcactttaaaattagcagggataggctgagcgcgagtagcctcacaatggagagtttcgccttcctgtgggccgggggccgggcctcatacggagttagtaaaggcaaagtctgtttcgagatgaaggtcacagagaagatccctgtgagacatctctacacaaaggacatcgacattcacgaagtaagaattggttggagcctgacaacttcggggatgcttctgggagaagaagagttctcgtacggttattcccttaagggtatcaagacttgtaattgtgaaaccgaggactacggggaaaaattcgatgagaatgacgttataacatgttttgctaattttgagtcggatgaagtggagttgtcatatgcaaagaatggacaggacctgggggtggcctttaagatcagcaaagaagtgctcgccggccggcctctgtttcctcatgtgctgtgtcataattgtgcagtggaattcaattttggacagaaggagaaaccctacttccctatcccagaagagtataccttcattcagaatgttcctctggaggatcgcgtgcgggggccaaagggtccagaggaaaagaaggactgcgaagtggtaatgatgatcggcctcccaggagccggcaagacgacctgggtaaccaagcacgcagccgagaatcctgggaaatacaacatcctcggaacaaatacaataatggataagatgatggttgcaggcttcaagaaacagatggccgacactggcaagctgaataccctgctgcagcgagcccctcagtgccttggcaaatttatagaaattgctgctcgaaagaaacgcaactttatcctcgatcagactaacgtgtccgcagccgcacaacggcgcaaaatgtgcctgtttgcagggtttcagcgcaaagccgtggtagtgtgtccaaaggatgaagattacaaacagaggacccagaagaaggcagaggttgagggcaaggacctgcctgagcacgccgtattgaagatgaaggggaattttaccttgcccgaagtggccgaatgctttgatgagatcacttatgttgagctacaaaaagaagaggcccaaaagctgctggagcagtacaaggaggagtcgaaaaaagccctgcctcctgagaagaagcagaacactggctccaagaagtccaacaagaataaatctggaaagaatcaattcaaccgaggcggaggccacagagggagaggtggatttaacatgcgcggaggtaatttcaggggaggagccccgggtaatcgcggtggttataacaggagaggcaacatgccccagagaggaggaggcggaggcggtagtggaggaatcggctacccatacccacgagcaccagtgtttcccgggcgtggctcgtatagcaacaggggcaactacaacagaggggggatgcctaacaggggcaactataatcagaattttcggggccgaggtaacaaccgaggatacaaaaaccagtcacaggggtataatcagtggcaacaggggcagttttggggccagaagccatggtcccagcattatcatcagggttattactag

SEQ ID NO: 14106 - DNA, 945 bp, synthetic construct
  source 1..945: mol_type = other DNA; note = Synthetic coding sequence
atgcaaaatgtaatcaatacagtgaaagggaaagccctggaagttgccgaatacctaactccggtattaaaggagtcaaagttcaaggagaccggggtgatcacaccggaggaattcgtcgcagccggtgatcacctggtacatcattgtccaacttggcagtgggcaaccggcgaagagttgaaagtcaaagcctatctgcccaccggtaagcagtttcttgtgaccaaaaacgtgccgtgctacaagaggtgtaagcagatggaatactctgacgaactcgaggctattatagaagaggacgatggggacggaggatgggtggatacttaccacaatactggtataacagggatcacagaagcggttaaggaaatcactttagagaacaaggacaacattcgcctgcaggactgcagtgccctctgcgaagaagaggaggacgaggacgaaggtgaggccgcggacatggaggagtatgaggagtcaggccttctcgaaacagacgaagccactctggatactaggaaaatcgtcgaggcctgcaaagcaaagacagatgcaggcggggaggatgccatattgcaaacccgcacttacgacctgtacataacatacgataagtattaccaaactcctcgcctgtggctgttcggctacgatgagcagcggcagccacttacagttgaacacatgtacgaagacattagccaagaccatgtgaagaagacagtcaccattgagaaccatccgcatctgcccccccccccgatgtgtagcgtccacccatgtcggcacgccgaggtcatgaagaaaatcatagagacagtggcagagggcggcggcgagctgggtgtccatatgtatctgctcatcttcctgaagttcgtgcaggctgttatacctactattgaatacgattacacaaggcacttcactatgtag

SEQ ID NO: 14107 - DNA, 900 bp, synthetic construct
  source 1..900: mol_type = other DNA; note = Synthetic coding sequence
atggtggacaaaaagctagtggtggtgttcggaggcactggcgctcagggcggaagtgtcgccagaacattgctcgaggacggcacttttaaggtgcgtgtcgtgacccgcaatcccagaaagaaggccgctaaggaactgcggctccaaggggcagaggtcgttcagggggatcaagacgaccaggtcattatggaacttgcactcaacggagcttacgcaacatttattgtaacaaactactgggagtcgtgctcacaagagcaggaagtgaaacagggcaagctgctcgcagatttagccaggcgacttgggctccattacgtcgtgtattcagggttggagaacatcaagaagctgaccgccggccgactggcagctgcccacttcgatggtaaaggagaggtggaagagtattttcgcgacatcggggtgcctatgacctcagtgcgtctcccctgttatttcgagaatcttctcagtcacttcctcccccaaaaggcccctgatgggaagagctacctattatcacttccaactggtgacgtgcctatggatggtatgagtgttagtgatctgggcccagtggtcctcagcctgcttaagatgcccgaaaagtacgtgggtcagaacatcggcctgtcaacctgtcggcacaccgcagaggagtacgcagccctgctaacaaaacacaccaggaaggtggtgcacgacgccaagatgacccccgaggactatgaaaaattggggttcccaggggcgagggatttggcgaacatgttccgcttttacgcccttagaccggaccgcgatatagagttgactctgcggctgaatcctaaggcgcttactctcgaccagtggctggagcagcataaaggggattttaacctgctttag

SEQ ID NO: 14108 - DNA, 2571 bp, synthetic construct
  source 1..2571: mol_type = other DNA; note = Synthetic coding sequence
atggacattagcaaggggctgccgggtatgcagggggggctccacatttggatatccgagaatcggaaaatggtcccagtgccagaaggcgcctatggaaactttttcgaagagcactgctatgttatccttcatgtcccacaatccccaaaggccacccaaggagccagcagtgacctacactactgggtcggaaagcaggccggcgctgaggctcaaggagcagctgaagcctttcaacaacgcttacaagacgagctgggaggccaaacagtgctgcatcgtgaagcccagggacacgagagcgattgtttttgctcttactttagacccggtatcatctatcgcaagggaggactcgcctctgatctgaagcacgtggagacaaatcttttcaatattcagaggctgctgcatattaaaggacgcaagcatgtcagcgccactgaggtggaattgagctggaactcttttaataagggtgatatattcctcttagatctaggtaaaatgatgattcaatggaacggccctaagacatcaatttcagagaaggcgaggggcctagcgctaacttatagtctcagggatcgtgagcgtgggggcggtcgggcccagatcggagtggtagacgatgaggcaaaagcgccagatctgatgcagattatggaggctgtcttaggacgccgggtgggctccctccgggctgctaccccatctaaggacattaaccaactacagaaagccaacgttcggttgtaccacgtgtatgaaaaggggaaggacttggtcgttttggaacttgccacccccccgttaacacaagacctgctgcaggaagaagatttctacatactagatcaggggggatttaaaatttatgtttggcaggggcgaatgagcagcttgcaggagaggaaggctgcgttttctagagctgtgggatttattcaggctaaaggatatcctacctatactaatgttgaagttgtgaatgacggagcagagtccgccgcatttaaacagctgttccgcacctggtctgagaagcgcagaagaaaccagaagcttggcggaagagacaagagtattcacgtcaaactcgacgtgggaaaactacacactcaacccaaactggccgcccagctcagaatggttgacgatggtagcggaaaagtggaagtgtggtgtatacaggaccttcacagacagcctgtcgatccaaagcgccatggccagctctgtgccggtaattgctacctcgtcctctacacctaccagaggcttgggcgggttcaatacattttatatttgtggcagggacaccaagctactgctgacgaaatcgaggctctgaattctaacgccgaggaactggacgttatgtacgggggcgtgcttgtgcaagaacacgttacaatgggctccgaaccccctcactttctggctatctttcagggacagttggtcattttccaagagagagccggccatcatggtaaaggccagtctgcctcaacgacacgactgttccaagtccagggaacagattcccacaacacccggacgatggaagtgccagcacgagcgtccagcctgaattcatctgatatcttcctattggtcaccgcgtccgtgtgttatctttggtttggtaaaggatgtaatggagatcagcgagagatggccagggtggtggtgaccgttatatcacggaagaatgaagagacagtcttagaggggcaggagccacctcatttctgggaagccctcggtgggagagccccttatcctagcaacaaacgcctgccagaggaggtgccctcattccagcccagactgtttgagtgctccagccacatgggatgtttagtgctggcagaagtcggcttcttcagccaggaggatctggacaagtatgatattatgttactggatacctggcaagagatttttctttggctcggcgaggcagcatccgaatggaaggaggccgttgcgtgggggcaggagtatctgaagacccatcctgcaggtcgaagccctgctactcctatagtgttggtcaaacagggtcatgagcctcccacctttattggctggttttttacctgggatccttacaagtggaccagccacccctcccataaagaggtggtggatggcagcccagccgccgcctctacgatcagcgagataacagccgaggtgaataatctccggctatctaggtggcccggtaatggtagggcaggggccgtggccttgcaagccctgaaagggagtcaggacagttccgaaaatgacctggttagatctcctaaaagcgccgggagtcggaccagcagctcagtaagtagtacaagcgccacaattaacgggggattaagacgcgagcagctgatgcaccaagccgtggaggacctgcccgaaggagtggaccctgcaaggagggaattttatctgagcgatagtgactttcaagatattttcggcaaaagtaaagaagaattttacagcatggcaacgtggcgtcaaagacaagagaagaagcagcttgggtttttttag

SEQ ID NO: 14109 - DNA, 987 bp, synthetic construct
  source 1..987: mol_type = other DNA; note = Synthetic coding sequence
atggaggccaatggtagccagggcacatccggtagcgcgaacgactcacagcatgaccctggaaagatgtttatcggcggcctgagctggcagacttctcctgatagtctgagggactatttctcgaagttcggggagatcagagaatgcatggtcatgagagatccaacaacaaagcgcagcaggggattcggttttgtgactttcgccgatcccgctagcgtcgataaggtcttggggcagccccatcacgagctggattccaagacgattgaccccaaggtcgcttttcctaggagagctcaacccaaaatggtcaccagaacgaagaagatctttgtgggaggtctgagcgctaacacggttgtggaggatgtgaagcagtacttcgaacagttcgggaaagttgaggatgccatgcttatgttcgacaagactaccaatagacatcgcgggtttggattcgtcacatttgagaacgaggacgtcgtagaaaaggtgtgtgagatccactttcacgaaataaacaacaagatggttgaatgtaagaaagctcagcccaaagaggtaatgttcccccctggaactcgtggtagggctcgcggattgccctataccatggatgctttcatgctgggcatgggtatgttggggtaccccaatttcgtggccacatatggacggggttatcccggcttcgcaccaagttatggataccaatttcctggctttccagctgccgcttacgggccagttgctgccgctgcggtcgccgctgcccgcgggtctgggtctaacccggcccggccaggtggtttccccggagccaactcacccgggccagtggccgacctgtatgggcctgcctctcaggactctggtgtgggcaattatatctccgctgcttcgcctcagccaggatccggcttcggccacggcatagccgggccgctgatcgccacagcctttaccaacgggtatcactag

SEQ ID NO: 14110 - DNA, 654 bp, synthetic construct
  source 1..654: mol_type = other DNA; note = Synthetic coding sequence
atggagagcgttgctttgtatagctttcaagctaccgagagtgatgaactcgccttcaacaaaggcgataccttgaaaatcttgaacatggaagacgaccagaattggtataaggccgaactccgtggggtggaaggtttcatcccaaagaactacatacgcgtgaaaccccacccatggtattccggccgtataagcaggcagttggcggaggaaatccttatgaagaggaatcatctcggcgcgttcttaattagagagagtgagtcctctccgggcgagttttccgtttccgtcaactatggagaccaagtacagcatttcaaggtcctgagagaggccagcgggaaatacttcctctgggaggagaagttcaatagcctgaacgaacttgtagacttctaccgaaccacaactatcgccaagaagagacagatattcctgagggacgaggagcccctactgaaaagccctggcgcttgttttgctcaggcgcagttcgacttcagcgcgcaggacccaagccaactcagcttcaggagaggtgatattattgaggtgctggagaggcctgatccgcattggtggagaggacgttcatgtggaagagtggggttttttcctcggtcctacgtgcaacccgtccatctctag

SEQ ID NO: 14111 - DNA, 231 bp, synthetic construct
  source 1..231: mol_type = other DNA; note = Synthetic coding sequence
atggggctgaagatgtcatgtctgaagggtttccagatgtgcgtctcatctagctcatctagccacgacgaagcgcctgtattaaacgataagcatctcgatgtgcctgacatcataatcacgccaccgaccccgactggcatgatgcttccccgggatctgggcagcactgtgtggttagatgaaacaggcagttgccccgacgatggcgagatagaccctgaggcctag

SEQ ID NO: 14112 - DNA, 19863 bp, synthetic construct
  source 1..19863: mol_type = other DNA; note = Synthetic coding sequence
atggaccagccacagttctctggagccccgcggtttcttacacgtcccaaagcctttgttgtgagcgttggcaaggacgccactctgtcttgccagattgttggtaaccccacgccacaggtcagctgggaaaaggaccagcaacccgttgccgctggtgcccggtttcgcctggcgcaggatggcgatctgtatagacttactatactggatctggcgctaggcgatagcggacaatatgtgtgtcgtgcaaggaatgccatcggagaagccttcgccgctgtgggtctccaggtggatgccgaggccgcctgcgctgagcaagccccccacttcctgttaagaccgacatctatccgggtacgagaaggatccgaggcgaccttcagatgtagagtggggggctcacccaggccggcagtatcttggtccaaagatggtcgccgcttgggtgagcccgacggccccagggttcgagttgaggagctaggagaagcctcggcgttgcgtataagagctgctaggccccgggatggcgggacctacgaggtacgcgccgagaacccattgggggcagcaagtgctgccgcagccctggtggtagattctgacgccgccgatacagcctcaaggcctggcacctctaccgccgcacttttggctcacctgcagcggaggcgcgaggcgatgagggctgagggggcccccgcaagtcccccttccacaggcacaagaacctgcaccgtgaccgaggggaagcatgccagactgagctgttatgttactggggaaccaaaaccagaaaccgtttggaagaaagatggccagttggtaacggaaggtcgcagacatgtggtttacgaagacgctcaagaaaatttcgtcctgaaaatcttattctgcaaacagagtgacaggggcctttacacttgtacggcgagtaacttagtcggccaaacgtatagctctgtgctggtcgtggtgcgtgagcctgctgtgccattcaaaaaacggttacaggacttggaggttcgggagaaagagtcagctactttcttgtgcgaggttcctcagccgagcacggaagccgcctggtttaaggaggaaacacgcctctgggcgtccgcaaagtacgggatcgaggaggaaggcacagagcgtagactgacagttcgtaatgtgtcagccgatgacgatgctgtgtacatctgtgagactcctgaagggtcccggacagtggcagaacttgcagtgcagggtaatctgcttcggaaactgcctcgaaaaaccgccgttagagttggggacaccgcaatgttttgcgtcgagcttgccgtgccggtgggtccggtacactggttgcgcaaccaggaggaggtcgtcgctggagggcgggtggctattagtgctgaggggacacgacatacgttaacaatttcacaatgttgtttggaggatgttggtcaagtggccttcatggcgggcgactgccagacgagcacccaattctgtgtgtccgcccctagaaaaccaccgctccagcctccagtagacccggtcgtgaaggctaggatggagagcagcgtgattctgagttggagccctcctccccatggggaacgcccagtaactatcgacgggtacctggttgagaaaaagaagttgggaacttacacctggatccgatgccacgaagccgagtgggttgccacccccgagctgactgtggccgatgtggctgaagagggcaactttcagtttagagtatctgctttaaacagctttggacaaagtccttatctcgaattccctgggaccgtacacctggctcccaagctggcagtgaggaccccgctgaaagccgtgcaagccgtagagggcggtgaagttacattttccgttgacctcactgtggcctcggcgggtgaatggttcctggatggccaggcacttaaggcctcatctgtttacgaaatccattgcgataggacacgtcataccctcaccatcagggaagttcccgcctcgctacacggtgcacaattgaagttcgtggctaacgggattgagtctagcatccgaatggaagtaagggctgctccaggactgaccgcgaacaagcctccagctgctgccgctcgcgaggtgctggcaaggctgcatgaagaagcccagctgttggctgagctttccgaccaagccgcagctgtgacctggctgaaagacgggaggaccctgagtcctggaccaaagtacgaagttcaggccagcgctggtagacgggtcctcttagtaagagacgtagcaagagacgatgcaggcctttatgaatgcgtctctaggggaggcaggatcgcctatcagctgtctgttcaggggcttgcacggttcctgcacaaggacatggccgggtcttgcgtggacgctgtcgcaggcggccccgcacagtttgagtgtgaaacgagtgaggcccacgtccatgtccactggtacaaggacggcatggagctgggccatagcggcgagagattcctccaggaagatgtagggacccggcaccgactcgttgctgcgaccgttacccgacaagacgaggggacctactcctgtcgcgttggcgaagattccgtcgattttcggttgcgagtgagcgaacccaaggtcgtattcgccaaggaacaactcgctcggagaaagctgcaggccgaggcgggcgcgtccgctacattgagttgcgaggtcgcgcaggctcagaccgaagtgacctggtataaggacgggaaaaaactgtcaagcagctccaaagtctgcatggaagctactggctgtactagacgtctggtggtacaacaggcaggccaggcagatgccggtgagtattcctgcgaagccgggggccagcgccttagtttccatctcgacgttaaagagcctaaggttgtgttcgccaaggatcaggtggcacattcagaggtgcaggctgaggctggggcttctgctaccctttcctgcgaggttgcacaggcccagaccgaggtgatgtggtacaaagatggaaagaagctttccagtagcctgaaggttcatgtcgaggcaaaaggctgtcgacggaggcttgttgtgcagcaagctggcaaaacagatgctggggattactcttgcgaggcccggggtcagagggtttcatttcgacttcatattactgagcccaagatgatgttcgcaaaagagcaatccgttcacaatgaggtgcaggccgaggctggagcttccgccatgctgagctgtgaagtggctcaggcacagactgaagtgacttggtacaaggacgggaagaagttaagtagctcatccaaggtagggatggaggtcaaggggtgtacgcggaggctggttttaccacaggcgggcaaggccgatgcaggggaatacagctgtgaggccggcggccagcgggtgtcttttcacctgcatataacggaacccaaaggcgtgtttgccaaagagcaatctgtgcacaatgaggttcaggcagaagcgggaacaaccgccatgctaagctgtgaggtcgcgcagccgcagactgaggtcacgtggtacaaagatggcaaaaagctgtcaagcagctccaaagtgcggatggaagtcaaaggctgtactaggagactagtggtgcagcaggtggggaaggcagacgccggcgagtatagctgcgaagccggcggacaaagagtatccttccaattgcatattaccgaacctaaagccgtattcgctaaagagcagctcgtgcataatgaggttaggacagaggctggtgcatctgccaccctgagctgcgaggtagcccaggcccaaacagaggtgacctggtataaggacggcaagaagttgagttcctcgagcaaggtgaggatcgaggctgcaggatgcatgcgacagctggttgtgcagcaggccggccaggccgatgctggagaatatacctgtgaggccggaggacaacgactttccttccacctcgatgtctccgagcctaaggccgtcttcgctaaggagcagctagcccacaggaaggtgcaagccgaggctggagcaatagctaccttgagttgtgaggtggctcaagctcagaccgaagtgacctggtacaaagacgggaagaagctgagtagttcctcaaaagtgcgcatggaggccgtaggttgtactaggagactggtagtgcaacaggcatgccaggccgatacgggggagtatagttgcgaagcaggaggtcagcggctgtcgttcagtttggacgttgctgagcccaaggtagtattcgccaaggaacagccagtacaccgcgaagtgcaggcccaggccggcgcttctactaccttgagttgcgaggtggcccaggcccagacagaggtcatgtggtataaggatggaaaaaaactgagcttttcctccaaagtgcggatggaggccgtagggtgcacgcggcgtcttgtcgtacaacaggcgggacaggccgtcgctggtgagtattcatgtgaagccggatcccaacgcttgtccttccaccttcacgtcgccgagcctaaggcggtttttgccaaggaacagcctgcctcccgggaagtccaagccgaagctggaacaagcgccaccctatcttgcgaggtcgcccaggcccagaccgaagtaacatggtacaaagacggcaagaagctcagctcttctagcaaggtgcgaatggaggcagtgggatgcaccaggcgcctggtggtgcaagaggccggtcaggctgacgctggtgagtacagctgcaaggccggggatcagagactgtctttccatttgcatgtagcagaaccgaaggtggtgtttgcaaaggagcagcctgcccatagggaggtgcaagcggaagccggggcatcggcgactctctcctgcgaagtagctcaggctcagaccgaggtaacgtggtacaaggatggaaagaagttgtccagtagctcaaaagtgagggtcgaggcagtgggatgcacgagaaggctggtggtacaacaagccggtcaggcggaagctggtgaatatagttgtgaggcaggaggccaacagctcagctttaggctccaggtagctgagttggagccgcagatatcggagaggccctgccggcgtgaaccccttgttgtgaaagaacatgaagacataatcctgacagccacactggccaccccgtcagcagccactgtgacctggctcaaggatggggtcgagatacgtcgaagcaagaggcacgagaccgccagccagggggatacccacacattgactgtacatggggcccaggttctggatagcgctatttacagttgccgagtgggcgccgagggccaggattttcctgttcaggtggaagaggtggcagctaagttttgccggttgctcgaaccagtgtgcggggaactaggcggaaccgtgactcttgcctgtgagctgtccccggcatgtgccgaggtagtgtggagatgtggtaatactcagctgagagtgggaaagcgatttcagatggtcgcagaaggccccgtccgcagcctgactgtcctcggactgcgagccgaggatgccggtgaatatgtgtgtgaatcccgcgatgatcacacaagtgctcagttgactgtgtccgtgcctagggttgtgaagttcatgagcggactgtccactgtggtagccgaagaggggggcgaagcgactttccaatgtgtggttagcccctctgacgttgctgttgtctggttccgcgacggtgctttgctgcagccgtcagagaaatttgcaattagtcagtctggcgcatctcatagcctgaccatctctgatctggtactcgaggacgccggacagatcaccgtggaagctgagggcgcaagctctagcgccgcactgagagtcagggaagcccccgtgctgttcaagaagaagctcgagccccaaacggtcgaagagcggagctcagtcacgttggaggtggaattgacccgaccttggccggaattgcgttggacccgaaacgcaaccgctctggctccaggcaaaaacgtagagatccatgctgagggggcaagacaccggcttgtattgcataacgtggggtttgcagaccgaggctttttcgggtgtgagacacctgatgacaagacgcaagcaaaactgaccgtggagatgcgccaagttagactggtccgcggcttacaagcagttgaagcacgagagcagggaacggctaccatggaggtgcaactttctcacgccgatgtggacggcagttggactcgcgatgggttgaggtttcagcagggcccgacatgtcatttagcagtgcgggggccaatgcatacgctgacactctcgggcctgagaccggaggactccggtctgatggtgttcaaggcagagggcgtgcacacctccgccaggctggttgtgactgaactgcccgtgtccttctctaggccgctacaagatgttgttacaacggaaaaggaaaaggtgacactggaatgcgagctatccagaccaaacgttgacgtaagatggctaaaggacggggtcgaacttagagccggcaaaacaatggccatagctgcgcagggggcctgcaggtctttaaccatttatagatgcgagttcgctgatcagggtgtgtatgtgtgcgatgctcatgatgcccagtctagcgcctccgtgaaagttcagggccggacctatactttgatctatcgaagggtgttagcagaagacgccggggagattcagttcgtggcagagaacgctgagtcccgggcccaactaagggttaaagaacttcccgtgacacttgtacgacctctgcgggacaagatcgccatggagaaacaccggggcgtcttagagtgtcaagtgagccgagcgtcagcacaagtcagatggttcaaaggtagtcaggaactccagcctgggcccaaatatgaactggtttccgacggactgtatcgcaagttgattatttctgatgtgcacgcagaggacgaagatacatacacttgtgatgcaggggatgttaagacttcagcccagtttttcgtagaggagcagagtattaccatagtaagaggactgcaagacgttaccgtgatggaacctgccccagcctggtttgagtgcgagacatcaattcccagtgtacgaccacccaagtggctcctgggaaaaactgtactgcaggctggtggcaacgtggggctggagcaggaaggaacagtgcatcgtctgatgttgcgaaggacatgctccacaatgaccgggcccgtacattttaccgtgggtaaatcgaggtcatcggcacgtttagtggtgtccgatattcctgtcgtcttgacccggccactggagcccaagacaggccgggaactccagtctgtagtcctatcgtgcgactttaggcccgcaccaaaggccgtccagtggtataaagatgacactcccctgtccccgtcagaaaaattcaaaatgtctctcgagggccaaatggcagaactgcgaatcctccggctgatgcccgccgacgcgggggtctacagatgccaggcggggtctgcccacagtagcaccgaggtaactgtcgaggccagggaagttacggtgaccggaccgctgcaggatgctgaggcgaccgaggagggctgggcaagcttttcttgcgaattaagccacgaagacgaggaggtggaatggagcctgaatggcatgccactttacaacgattcttttcatgaaatttcccataagggaaggcgtcacacattggtccttaaatctatacagcgcgccgacgccggcattgtgcgggcctcttctctgaaagtatccactagtgcccgactggaagtgagggtgaagcctgtggtttttttgaaggcattagatgacttgagcgcagaagagcgcggcactctagccctgcaatgtgaagtttcagaccccgaggctcacgtcgtgtggcggaaggacggggtgcagctggggcctagcgacaagtatgattttcttcatacggctgggactcgcggtttggtcgtgcatgatgtgtcacctgaggacgctggcctatatacatgtcatgtcggtagtgaagagacacgcgcccgggttagagttcacgacctccatgttgggatcaccaagagattgaaaaccatggaagttctggagggtgagagctgtagttttgaatgcgttctttcccacgaatcagctagcgatccggctatgtggacagtggggggaaagacagtcggctcttcgagccggtttcaggccacccgccagggaaggaagtacattctggtcgtgcgagaagcagcgccgagtgatgcgggggaggtggtgtttagcgtacgcggcctgacgagcaaagcgagtttgatcgttcgtgagcgaccagcggcaatcattaagcctctggaagaccagtgggtggcacccggcgaagacgtcgagctgagatgtgagttgtcaagggccgggactcctgtgcactggctgaaagatcggaaggccattcgcaagagccagaagtatgacgtcgtgtgtgaaggcaccatggccatgctcgtgattagaggcgcttccctgaaggatgctggagagtacacgtgtgaagtggaggccagcaaatcaaccgcgtcactccacgtagaggagaaagctaactgctttacagaggaactgacgaacctgcaggtcgaagagaagggaacagctgtattcacgtgcaaaacagaacatcctgctgcaactgtaacctggagaaaaggacttctcgaactccgggcgagtggtaaacaccagccctcgcaagaagggctcactttaaggctcactatctccgcattggagaaggctgattccgatacctacacttgcgacataggtcaggcgcagtctagagcccagctgctggtacagggtcgcagagttcacattattgaagatctcgaggacgtggatgtgcaagagggcagctcagccaccttcaggtgtagaatcagcccggcgaattatgagccagtgcattggtttctcgataagaccccgctgcacgcaaatgaacttaacgagattgatgcacagcccggcggttaccatgtactgacactgaggcagctggcgcttaaagactctgggactatttactttgaggcaggagatcaacgtgcttcggccgccctaagagtgactgaaaagcccagcgtgttctccagagagctgactgatgcaacaatcacagagggggaggacctgacccttgtgtgtgaaacatctacctgtgatataccagtttgctggactaaggatggcaaaactttgaggggatccgcacgctgtcaactgtcccacgagggacaccgcgctcaactgctgataaccggtgccaccctgcaagacagtggtaggtataaatgtgaagcaggaggagcctgttcaagcagcattgtgagagtccacgcaagacctgtacgtttccaagaggcgcttaaggatctcgaggtgctggaggggggcgccgccacattgcggtgtgtgcttagcagcgtggcagcccctgtaaagtggtgctatggtaacaacgttcttcgtccgggcgacaaatacagcctacgacaagagggcgcgatgttggaacttgtggtaagaaatctacgccctcaggatagtgggcggtactcctgctctttcggggatcagactacctcagctacactcacagtgacagcccttcctgctcagttcatcggcaagttgagaaacaaggaggctaccgagggtgctacggccaccctgcgatgtgagttgtccaaagctgccccggtagagtggagaaagggttctgagaccctccgagatggggatcggtactgcctgaggcaggatggggcaatgtgtgagttgcaaattcgcggattagcgatggtggatgccgctgaatattcttgcgtgtgcggcgaggagagaacttctgcatctctcactatcaggcctatgccggcccacttcattgggagactgaggcaccaggagtccatcgaaggcgctactgctaccctgagatgtgagctttcaaaggccgcccctgtggagtggcgtaaaggcagggagtccctgcgcgatggagataggcatagcttaagacaagatggggcagtgtgcgaactacaaatctgcgggctggccgtcgccgatgcgggtgaatacagctgcgtttgtggagaggaacggacatccgctacgcttaccgtaaaggcgcttcccgctaagtttacagagggacttcgaaatgaggaggccgtggagggagctaccgccatgctgtggtgcgagctgtccaaagtagcaccagtggagtggaggaaaggccccgagaatctccgcgacggcgaccgctatatattgagacaggaagggactaggtgcgagctgcagatttgcggtttggcaatggcggacgcaggcgaatatctctgcgtgtgcgggcaggagcggacctccgccacactaaccattcgcgcccttccagctaggttcatcgaggatgtgaagaaccaagaagcgagggagggtgccacggcggtgctccagtgtgaacttaactccgcggcccctgtcgaatggcggaaaggttctgaaactttgagagacggagatcgatatagtcttcggcaggatggaacaaagtgcgagctgcagatccggggactggcaatggctgacacaggagagtattcttgcgtatgcggacaggagaggacatccgcaatgcttaccgtgagagccctcccaattaagtttactgagggcctgcggaacgaagaagcaactgaaggcgccacagctgttctgcgctgcgagctgagcaaaatggctcccgttgagtggtggaagggacatgagaccctgagggatggcgaccgccatagcctccgccaggatggggctagatgtgaattgcagattcggggccttgtggcagaggatgccggcgaatacctctgcatgtgcggcaaggagcggacctctgccatgctgactgtccgggctatgccctctaagtttatcgagggcctgcggaacgaagaggcaaccgagggagacacagctacactgtggtgtgagctgagtaaggcagctcctgtcgaatggcgtaagggccatgagaccctacgagatggagacagacattctctgcgacaggacgggtctcgctgtgagcttcagatccgcggactggccgtagtggacgctggcgagtatagctgtgtgtgcgggcaggaacggacatccgctacactgaccgtcagagcattgcccgctcgctttatcgaagatgtgaagaaccaggaggcccgcgaaggggctactgctgtgctccagtgcgaactgtcaaaggcggctcctgtggaatggaggaagggcagtgaaacactgagaggaggggatcgctattctctgcgacaagatggaaccagatgcgaacttcagatccacggcctgtcagtggccgacaccggggagtacagctgcgtctgtggccaggagcgcacatccgcgactctgaccgttagggctccacagcccgtgttcagagaacccctgcagtcccttcaggctgaagaaggctccacagctactctgcaatgcgaacttagtgaacccacagccacggtggtttggagcaaggggggcctgcagttgcaggctaatggccgaagagaaccgaggctccagggatgcaccgcggagctggtccttcaggatctccaacgcgaggatactggcgagtatacgtgcacctgtggctctcaggcaacatccgccaccctgactgttactgccgctcccgtccgattccttcgagaactccaacatcaggaggttgacgagggagggacagcccacctatgttgcgaactctcaagagcgggagcttccgtggagtggcgtaaagggagtttgcaactgttcccatgcgcaaagtaccaaatggttcaggatggtgcagccgctgaactgctggtgcgtggagtggaacaagaagatgcaggagactatacctgcgataccggacacactcagagcatggctagcctgagtgtgcgcgtgcctaggccgaaatttaaaacacgactgcagagcttggaacaagagactggcgatatcgctaggctctgctgtcagctctctgacgcggagagcggagctgtggtgcagtggctgaaagagggcgttgagctgcatgctgggcctaaatacgaaatgcggtcacaaggagccacccgggaactgctgatccaccagttggaggcgaaggacacaggcgaatacgcatgtgtgaccgggggacagaagactgcagcttcacttcgagtgactgagcctgaagtcacaatagtgcgcggactggtggatgctgaagtaactgccgacgaagatgtggagtttagctgcgaggtctcccgcgctggtgcaacaggggttcagtggtgtctccagggattgcccctccagtcgaacgaggttacagaggtggctgtgcgcgacgggaggattcataccctccgtctgaagggcgtgacgccagaagacgctggcaccgtatcattccatctggggaatcatgcttctagcgcgcaattaactgtacgagctcccgaggtgaccattttggagcctctccaggatgtccagctctctgagggtcaagatgcttcctttcaatgtcgcctatctagagccagcggacaggaggcccggtgggccctggggggtgttcccctacaagcaaatgagatgaacgacatcaccgtggagcagggcaccttgcatctgctaactctgcataaagtgaccctcgaggacgccgggactgttagcttccacgtcggcacttgtagctcagaggctcagctcaaggtgactgctaagaacacagtggtccgcggccttgagaacgtcgaggctttggagggcggtgaagccctgtttgagtgccagttgagtcagcccgaagtggccgcccatacatggctcctggacgatgagccagttcatacctcagagaacgccgaagtggtcttcttcgaaaatggtcttaggcatttgcttctgctgaagaatctcagacctcaagactcatgtcgggtgacgttcctggcaggtgatatggtcacttccgcttttctcacagtcagaggatggaggctcgagatcctcgaacccttgaaaaacgcagctgtgcgagcaggcgcgcaggcctgctttacatgtacactcagtgaggcagtgccagtcggggaagcaagttggtacattaacggtgctgccgtgcagcctgacgattcagactggactgttaccgcagacgggtcccaccacgccctgctactgcgttctgctcagcctcatcatgccggagaggtgacctttgcatgtcgagacgcagtcgccagcgcccgtctcaccgttctcggcctgccggatcctcccgaagatgctgaagtcgttgctcggtcaagccatacggttaccctgagctgggccgctcctatgtctgacggcggcggaggtttgtgcggctaccgggtggaagtgaaggagggggccacagggcaatggcgactctgccacgaattggtcccaggacctgaatgcgttgtggatggtctcgcgcccggtgagacctaccgatttagggtggccgccgttgggcctgttggcgccggagagcccgtgcacctgcctcaaactgtgcgactggccgaaccacccaagccggtgccgcctcaaccatcagctcccgagtccaggcaagtggccgcaggggaagacgtgtctctggaactggaagtagtcgctgaagccggagaggtgatctggcataaaggcatggagcgaatccagccaggcggccgatttgaagtcgtgagtcaggggcggcagcagatgctcgtgatcaaagggttcacggccgaggaccaaggggaatatcactgcggccttgcccagggttcaatctgtcctgctgcggccacattccaggtcgcattgtccccagcctccgttgacgaggcaccccagcccagcctccccccagaagcagcacaggaaggggacctccacctgctgtgggaggcattggcccgaaaaagaaggatgtcacgagaacctacattggactctatcagtgaactgcctgaagaagacggacgcagtcaacgtctcccacaagaagcggaggaggtcgcacccgacctgtcggaggggtacagcactgctgacgagctggctcgcaccggtgacgcagacttgagccacacttccagtgatgatgaaagtagggcagggactcccagccttgtgacttacctgaaaaaggccggccgtcctggcaccagtcccttagctagcaaagtgggcgcacccgccgctcccagcgttaagcctcaacagcagcaagagcctctggcagcagtgagaccaccactgggggatctttccaccaaagacctgggcgacccctctatggacaaagccgccgttaagatccaggccgcattcaagggatataaagtgaggaaggagatgaagcagcaggagggcccaatgttttcacatacattcggcgatacagaggcacaggttggcgatgccctgcggctggagtgcgtggtcgcaagcaaggctgacgttcgagccaggtggcttaaggatggcgttgagctcactgatggccggcatcatcatatagaccagctcggtgatggtacctgtagcttgctgatcaccggcctggacagagctgacgcaggatgctatacctgccaggttagcaacaagtttggacaggtaactcatagcgcctgcgtcgtggtgtccgggagtgagagtgaagccgaatcttcatcaggcggcgaacttgacgacgccttccggcgtgccgccaggcgtttgcatagactcttccggactaagtcgcctgccgaagtgtctgacgaagagctgtttctgagcgccgatgagggaccagcagaacctgaggaaccagcagattggcagacctaccgcgaggatgaacactttatctgtatcaggtttgaggcactgaccgaggccagacaggctgtgacccggttccaggagatgttcgctactctgggcattggagtggagatcaagttagtcgaacaggggccaaggcgggtcgagatgtgtatatccaaggagacaccagcgccagtcgtgcctcccgaacctctccccagtctcctaacaagcgacgcagcccctgtgttcctcacagaattgcagaaccaagaggttcaagatgggtatcccgtttccttcgactgtgtggtcacaggccagccaatgccaagtgtcaggtggttcaaggacggcaaattgctagaggaagatgaccattatatgattaatgaagaccagcagggcggacatcaactgattatcaccgcagtggtgccagctgacatgggcgtataccggtgtctagcggagaacagcatgggggttagcagcacaaaagctgagcttcgggtcgacctaacctcaacagactacgacaccgctgccgacgcaacggaaagttcttcatatttctccgcccagggctacctctcttctagggagcaggaggggactgagagcacaactgatgagggacagctgccccaggtggtagaagaactgcgagacctacaggtcgcacccggaactagattggctaagtttcaattgaaagtcaaagggtacccagcaccccgcctgtactggtttaaagacggccagccccttaccgcatccgcacatatcagaatgaccgacaagaagatactgcatactttagaaataatctcagttacgcgggaagattccgggcagtatgctgcctacatctcaaacgccatgggcgctgcctattcatccgccaggctgttagtgcggggcccggacgagccagaagaaaagccagccagcgacgtgcatgaacagctcgttccgccccgtatgctggagcggttcacacccaagaaggtaaagaagggatctagcatcaccttttctgtaaaggtcgaaggccggccagtcccaacagtgcattggctccgggaggaagctgagagaggagtgctgtggatcgggccagataccccaggttatactgtcgcatcttcagcccagcagcactcactggtgctcctggatgtgggcaggcagcatcaggggacttatacgtgtatagcatcaaacgccgcgggacaggccctttgttccgcaagcctgcacgtctcagggctaccgaaggtcgaggaacaggaaaaggtaaaagaagcactcatctcaacgttcctgcagggtacaactcaggcgatatccgctcagggtttagaaaccgcaagctttgccgatcttggaggccagagaaaggaggagcccctggctgctaaagaggcattaggacacctatccctcgccgaggtcggcactgaagaatttctgcagaagctgacaagccagatcactgagatggtgagcgccaaaattacccaggctaaactgcaagttcccggaggcgactctgatgaagattctaaaacaccctcagccagccctaggcatgggaggtctcgtcccagcagttctatccaagagagctcatccgagagtgaagacggggacgctaggggcgagatcttcgatatttacgttgtcaccgcagattatctccctctaggagcggagcaggatgctataactctgcgggagggacaatacgtcgaggtgctggacgccgcccatcccctgcgctggctggtgcgtaccaagcccacgaagtcgtcaccttctagacaaggttgggtaagtcccgcttatcttgatcgaagactcaagctcagccccgaatggggcgctgctgaggcgcccgaatttcctggagaggccgtgtcagaggacgagtacaaagcacgattaagcagtgtgattcaagaactcctctcatccgaacaggcttttgtggaggagctacagtttcttcagtcgcatcacctgcagcacctagagagatgtccccacgtccctattgctgtagcaggacagaaggccgtgatctttcgcaatgtgagggatattggccgattccattcatccttcctgcaagaattgcagcagtgtgacacagatgacgacgtggcaatgtgtttcattaagaatcaggctgccttcgagcaatatctcgaatttttagtcggccgtgtgcaagctgaaagcgtggtggtgtccaccgctattcaggaattctataaaaagtatgctgaagaagcacttctagctggagacccatctcagccccccccccccccattgcagcattacctggaacagcctgtcgagcgagtacaacggtaccaggcactgctgaaggaactgattcgcaacaaggcccgtaaccgccagaactgcgcccttctcgagcaagcctacgccgtcgtctctgcactccctcaaagagcggaaaacaagctccatgtgagcctcatggagaattaccccggcacactgcaagccctaggggagcccatcagacagggccattttatcgtgtgggaaggggctcccggggcacgcatgccatggaaggggcataaccgacacgttttcttgttcagaaaccacctggtcatctgcaagccaaggagagactccagaacggatactgtttcttatgtctttagaaacatgatgaaattatcttcaatcgacctgaacgaccaggtcgagggcgacgacagagccttcgaagtgtggcaagagagagaagacagtgtccgtaagtacctgctgcaagcacgcacagccattatcaaaagttcgtgggtaaaagaaatctgcggcattcagcagcggctcgccctgcctgtgtggcgccccccggattttgaggaagaactcgcagattgcaccgccgagcttggagagaccgttaagctcgcatgccgagtcactggaaccccaaaacctgtgattagctggtacaaggacggaaaagcggtgcaagtagacccccatcacatcctgatagaagaccccgatgggagctgcgctctcattttggattccctgacgggcgtggacagcggtcaatacatgtgcttcgcagcctctgctgcaggcaactgtagcactctcggaaagattcttgtccaggtgccccctagatttgtaaacaaagtgcgagccagccccttcgtcgaaggagaggacgctcaatttacttgtaccatagagggcgcaccttaccctcagattagatggtataaggacggggcactactcacgaccggtaataagtttcagacattaagcgagccaaggtccggactgcttgtgcttgtgatccgtgccgccagcaaagaggacctgggactgtatgagtgtgaacttgttaaccggctcggttccgctcgagccagcgcagaacttaggattcagagtcctatgctgcaggcccaggaacagtgtcatcgggagcagctcgtcgccgctgttgaggtgactgaacaggagaccaaggtgcccaaaaagaccgtgataatcgaagagactataacaacagtcgtcaagagcccacgcggacagcgaagaagccccagcaaatcaccttcccgcagtcccagccgctgctcagcatcccccttgcgccccggactccttgctcccgacctcttgtatctgccaggtgcaggccagcctcgacggccagaggcggaacccggccagaaaccagtggtccctaccctgtacgtcacagaagctgaagcacattcccccgctttgccagggttatcagggccgcaacccaagtgggtcgaggttgaggaaaccatcgaggtacgcgttaagaaaatgggcccacagggggtgagccctacgacagaggtgccccgaagcagttctggacatctgtttaccctacccggagctactcccggtggagacccaaacagcaataattcaaataataagctcctggcgcaagaggcctgggcccaggggaccgccatggtgggagtgcgggaacctcttgttttccgagttgatgctcgtggttccgtcgactgggccgccagcggaatgggatcactggaggaggagggaacaatggaagaggccggtgaggaggaaggggaagatggagatgcctttgtcacagaggaatcacaggatacacactctctgggagaccgggatcccaagattcttactcataatggccggatgctgactctggccgacctggaggactatgtgccgggggaaggcgagacatttcattgtggtggaccaggccctggcgcccctgacgatcctccatgtgaggtctccgtcatccagcgagagattggcgagcccactgtgggtcagcccgtgttgctgagcgttggtcacgccctggggccgcgcggcccacttggtctgttcaggccagagccgagaggtgcaagcccgcccggcccacaggtgaggagcctcgagggaacatcattcttactgcgcgaagctcccgcgagaccagttggctctgccccttggacgcagagcttttgtacaaggattaggcgcagcgctgacagcggtcagtccagctttacgacagaactctcaactcagacagtcaactttggcaccgtgggcgaaacggtgaccctgcacatttgcccagatcgtgatggggacgaagcagcccaaccatag

SEQ ID NO: 14113 - DNA, 1407 bp, synthetic construct
  source 1..1407: mol_type = other DNA; note = Synthetic coding sequence
atggcggcccctgatctctcaactaatttacaggaggaggccacctgcgcaatatgtttggattactttaccgaccctgtgatgaccgactgcggccataacttctgccgggaatgtataaggaggtgttggggccagccggaaggaccctatgcctgcccagagtgcagagagctctcgccccagaggaacttgaggcctaacaggccccttgccaagatggcggagatggctagaaggctccaccctcccagtcccgtcccacaaggcgtgtgtcctgcacaccgcgaaccacttgcagcattctgcggcgacgagctccgtctactttgcgctgcctgcgagcgttcaggggagcattgggctcacagggtcaggcccctccaggacgcagcagaggacctgaaagccaagctcgagaagagcctggagcacctgaggaagcagatgcaggacgctctcctattccaagctcaggcagatgaaacctgcgtactctggcagaaaatggttgaatcacagcggcagaatgtgcttggcgaattcgaacggctcaggagactgctcgcagaggaagagcagcagttacttcagaggctagaggaggaggaactggaagtgctacctagactgcgggagggcgctgcccatttagggcagcagtcagcacatctggctgagctgatcgccgagctcgagggtaggtgccagctacccgctctgggactgctccaggatattaaagacgccctccgccgggtccaggatgtgaagctacaacctcctgaggtcgtgccaatggaattgcgcaccgtatgtcgagtaccgggtttggtcgaaacgctccgcagatttcggggagacgtcaccttggaccctgacaccgcgaaccctgaactcatcctgtctgaggatagacgctccgtccagcgcggcgatttgcggcaggccctcccggattctcccgagcgctttgatccaggaccgtgtgtactcgggcaggagcggtttactagtggacgccactactgggaggtagaagtcggcgatcggacgtcttgggcactcggtgtatgtcgggagaatgtgaatcggaaagaaaagggtgaactgtcagctggcaacgggttctggatccttgtgttcctcgggtcatattataatagctccgaacgagcactagcacctctgagggatccccctcgtagggtcggcatttttctggactatgaggccgggcatctgagcttctacagtgccacggatggatcactgctgtttatttttccagagataccgttcagcggaaccctacgacctctattctcaccactgagcagcagcccgacaccgatgacaatatgtcgccctaagggtgggagcggcgacaccctggcccctcagtag

SEQ ID NO: 14114 - DNA, 813 bp, synthetic construct
  source 1..813: mol_type = other DNA; note = Synthetic coding sequence
atgagccctggttctggagtgaaatccgaatacatgaaaagatatcaagagccccgttgggaagagtatggcccatgctaccgggagcttctgcactaccggctcggccggcggttgcttgagcaagcacacgctccctggttatgggacgactggggtccagccggaagttcagaagatagtgcgagctccgaaagttccggggccggaggcccggctcccaggtgtgccccaccttctccccccccccctgtcgagcctgccacccaggaggaggctgaacgaagggccagaggtgctccggaagagcaggatgcagaggcgggcgacgcagaggctgaggatgctgaagacgccgccttaccagctctccccgtcaaagacgtagaggacaaacctgaacaacagacccggacaagagaaacagacaaatccccaaccagtactgaacccagacaacagccaagcgccctcttcgccaggggaaaccgtaaggccgtcaaatcaccacagcgctcttctagtaaaattaaggagaataaacacccttttgcgctgtacgggtggggagagaaacagaccgatacggggtcccaaaagacgcacaacgtgtgtgcatcggcccctgtgcacgagattcacgaaagcgccctgagggctaaaaataggcggcaggttgaaaagcgcaagctggtcgctcaaagacagcgagcccactctgtggatgtggagaaaaatcggaaaatgaaggcttcttctagcgagaatccttggatgactgagtatatgagatgctatagcgcccgagcttag

SEQ ID NO: 14115 - DNA, 2667 bp, synthetic construct
  source 1..2667: mol_type = other DNA; note = Synthetic coding sequence
atggatgagtcagctcttctggacctcctggagtgtccagtgtgcctggagcgactggacgcaagcgcaaaggtgctcccctgccagcacactttttgtaaacgttgtctgcttggaattgtgggatcgaggaatgaactacgatgtcccgagtgccggaccctggttggatccggggttgaagagttaccatctaatattttgctggtgcggctgctggatgggattaaacaacgaccatggaagcccggtcctggagggggatctggcaccaactgcaccaacgctctcaggagccagtctagcacggtcgctaactgttcatccaaggatctgcagagctctcaggggggacaacaaccccgtgtacagagctggagtccccccgttagaggcatccctcagcttccttgtgcaaaagctctctataattacgaggggaaagaacctggtgacttgaaattctctaaaggcgatataattattctgagacggcaagtggacgagaattggtaccacggggaggtaaacgggatccatggtttctttccaacgaactttgttcagataatcaaacctcttccacagccaccgccgcagtgtaaggcattatatgacttcgaggtcaaggataaggaagctgacaaggactgcctgccttttgctaaggacgatgtactgacggtcatccgcagagttgatgaaaattgggccgaggggatgctcgcagacaagatcgggatctttccaatctcttacgtggagtttaattcggccgctaaacagctgattgagtgggataaaccccccgtacccggagtggacgccggggagtgttctagtgccgcagcccagtctagcactgcgcctaagcactcggataccaagaagaatacaaagaagcggcactcttttacaagtcttaccatggcaaataagagcagtcaggcatcccagaatagacactccatggaaatctctcctcccgtactgatctcctcaagcaacccaactgcagccgcacgtatctccgagctgtcggggctgtcatgctcggctccttctcaagtacatataagcactacaggactaattgtaacgcctccaccgagctcaccagtgactacagggccatcctttacattcccttccgacgtcccttaccaggctgcactcggcaccttaaacccacccctgcctcctccccccctgctggccgctactgtgttagccagcacaccccctggcgctacagccgcggcagccgcagctggcatgggtccgcgaccaatggcaggctctacagatcagatcgctcacctgaggcctcagacacgtccatctgtgtacgttgctatctacccatacaccccacggaaagaggacgagctggagctgaggaagggagagatgttcctggttttcgagcggtgccaggacggctggttcaagggtacatccatgcatacttccaaaatcggggtgtttcccggtaactatgtggctccagtgacccgtgcagtcacaaacgcttctcaggccaaagtccccatgagcactgctggacagacatcacggggagtgaccatggtttctcccagcaccgccgggggacccgcccagaaactgcagggaaacggggtggcaggttccccttccgtggtccccgctgccgtggtgagcgcagcacacattcagacatccccccaggctaaggtgctgctgcatatgacagggcagatgacggtgaatcaggcccgaaatgctgtgcgcacagtggcggcacataatcaggagcggccgaccgccgcagtaactccaatccaagtccaaaatgcggcagggctgtcgccagcttccgtgggactcagtcaccattcgcttgcgtctccccagcccgcccccttaatgccgggaagtgccacacacacagctgctatttccatcagccgggcctcagcccctcttgcttgcgccgcagccgcgcctctgacgtctccatcaattacatctgcaagcctcgaggccgaacctagcgggcggatcgttactgtcctgcccggactcccgacaagtccagattcagcatcatctgcgtgcggcaacagttctgcaacaaaaccggacaaagactcaaagaaggagaaaaagggactcctaaaactgctgtccggtgcctccaccaagcggaagccacgggtctcacccccagcatcgcccaccctggaagtggagctgggaagcgccgaattgcccctacagggtgctgtgggtccagagctgccccctggcgggggacacggcagggcaggctcttgccctgtggatggagatggtcccgtcaccacagcggtggccggtgccgctctcgcacaggacgcttttcatcgtaaggcctcatcacttgattccgcggtaccaatcgcacctccgcccagacaagcgtgtagcagcctgggccctgtcttaaacgaaagccgaccagtcgtttgcgagcggcatcgtgtggtcgtctcctaccctccgcagagcgaggccgagcttgaacttaaggagggagatatcgtgtttgtgcataaaaaacgtgaggacggctggttcaaaggaaccctacagagaaatggaaagaccggactgtttccaggcagcttcgtggagaacatctag

SEQ ID NO: 14116 - DNA, 570 bp, synthetic construct
  source 1..570: mol_type = other DNA; note = Synthetic coding sequence
atgccccaaacagtgattctgccaggccctgccccatggggattccgtctgagtggcgggattgacttcaatcaaccacttgtcattacccgtattacacctggaagcaaggcagctgccgccaacttatgtccaggagacgtgatcttggccatcgatgggttcggaaccgaatctatgacccatgctgacgcacaggatcgcattaaggctgctgctcaccagttgtgtctgaagattgatcggggcgaaacacatctgtggagcccccaagtgtctgaggatggcaaggcccaccctttcaagattaatctagagtcagaaccacaggaatttaaaccaataggaaccgctcataatcgccgggcccagcccttcgttgctgccgccaatattgacgacaagcggcaggtcgttagcgcaagttataactcgccgatcggtctttatagcacctccaacattcaggacgcattgcacgggcaactgcgaggactgatcccgagtagcccgcagaaaactggcactaccctcaacacctccattatttttggccccaatcttagctag

SEQ ID NO: 14117 - DNA, 1095 bp, synthetic construct
  source 1..1095: mol_type = other DNA; note = Synthetic coding sequence
atgccacagactgtgatactaccaggaccggcaccctggggcttccgattgtcaggcggtatagacttcaatcagccccttgtgattacccgaatcacccctggctccaaagctgctgctgccaatctgtgtcccggagatgtcattctggccattgacggcttcgggacagagtccatgacgcatgccgacgcccaggacagaatcaaggcggccgcacatcagctgtgcctgaagatagaccggggggagacgcacctgtggtctccccaggtcagtgaagacggcaaagctcatccatttaagataaacctggagagtgagccccaggatgggaactattttgaacataagcacaacattcgacccaagccattcgtgatcccgggtaggtcatctggctgcagcactcctagcggcattgattgcgggagtggccgtagtaccccctctagtgttagcacagtgtctacaatttgccctggagacttgaaagtggccgccaagttggcaccaaacatccctctggaaatggagctgccgggggtcaaaattgtccacgcacagttcaacacccccatgcagttgtatagtgacgacaatatcatggagacactgcaggggcaggtctctacagctctgggagagacccccctgatgtctgaacctacggcctccgtgccacccgagtcagatgtctataggatgttgcatgacaatagaaatgagcccacacagcccagacaatcaggcagtttccgggtgctacaaggaatggtggacgatggttccgacgatagacctgccggaactaggtccgtgagggctccagtgactaaggtgcatggaggttcaggcggtgcccaaaggatgcctctgtgcgacaaatgcggtagcggtatcgtaggcgcagttgtgaaggcccgagacaaatatcgacacccagaatgcttcgtgtgcgcggactgtaatctcaacctgaagcaaaagggttacttcttcattgagggagaactctactgcgaaacacacgcccgtgctaggaccaaaccacctgaaggatacgatactgtgactctctaccccaaggcttag

SEQ ID NO: 14118 - DNA, 951 bp, synthetic construct
  source 1..951: mol_type = other DNA; note = Synthetic coding sequence
atgccacagactgtgatcctgcctgggccagccccctggggcttccgactcagcggggggatcgacttcaatcagcccctcgtcataacacgtattactccaggatccaaggctgccgccgcgaacctttgccctggtgacgtaatactggccattgacgggtttggaacagaatccatgacacatgctgatgcgcaggacagaattaaggccgcagctcaccagctttgcctgaagatagatcggggagaaacgcacctgtggtctccacaagtgtcagaagacggcaaagcccacccattcaaaattaatctcgagtcagaaccgcaggaatttaaacccataggcacggctcacaaccggagggcacaaccgtttgttgccgccgccaatatcgacgataagagacaggtggtgagcgcttcctacaactcacccatcggcctgtattcaacatctaatattcaggatgccctgcacggtcagttgcgcgggctgatcccttctagtccacaaaatgagccgacagcgtcagttccccccgagagcgatgtgtataggatgctgcacgataacagaaatgaaccgactcagccccgccagagcggctcttttagagttctgcaaggcatggttgacgatggatctgatgaccggccagccggcaccaggtctgttcgggcccccgtcacaaaagtccacggcggctccggcggtgcgcaaaggatgcccttgtgcgacaaatgtgggagtgggatcgtgggggctgtggtgaaagcaagggataagtatcgtcacccagaatgttttgtgtgtgcagactgtaacttgaatctcaaacagaaaggttacttttttattgagggtgaactgtattgcgaaacgcacgcgcgtgccaggaccaaacccccagaggggtatgacacagttacactgtaccccaaagcgtag

SEQ ID NO: 14119 - DNA, 3303 bp, synthetic construct
  source 1..3303: mol_type = other DNA; note = Synthetic coding sequence
atgtcctattatcagcgcccgttttcacctagtgcatacagtctcccagcttcacttaattctagtattgtcatgcagcacggaaccagcctcgactctacggacacttaccctcaacatgcacaatctctagatggcacaacatccagctcaattcccctctatcgctcatcagaagaggaaaaaagagtgaccgtaatcaaagccccgcactacccaggcattggccctgtggacgaatctggcattccaaccgcgattagaacaactgtggacaggcctaaggactggtacaagaccatgttcaagcagatccatatggtccacaagcctgacgatgacaccgacatgtacaacactccatatacgtacaatgcaggactgtacaatcccccctattcggcacagagccacccagccgctaaaacgcagacctaccgacctcttagtaaatcacatagcgataatagcccgaacgcatttaaagatgctagctccccagtgccccctcctcacgtgcccccacccgttccgcccctgaggccgcgggaccgctcatccactgagaaacacgactgggaccctcccgatcggaaggttgatactcgaaagttcagatccgagccgagatctatcttcgagtacgaacccggcaaaagcagcattctgcaacacgaaagaccagcatctttgtatcagtccagcattgacaggagcctggaaaggcccatgagtagcgccagtatggcctccgactttcgaaaacggagaaaatccgagccagcggtcggccctcccaggggcctaggtgatcagagtgcatccagaacgagccctgggagagttgacctcccaggctcaagcactaccctgacgaagtctttcacatcatctagtccctccagccctagcagggctaagggcggtgacgattctaagatttgcccaagcctgtgcagttattctggactgaacgggaaccccagcagtgaactcgactactgttccacctacagacagcacctcgatgtgccccgagacagcccacgcgccatcagcttcaagaacgggtggcaaatggcgaggcagaatgccgagatctggagttccaccgaggaaactgtgtcgcccaagataaaatcgcggtcttgcgacgacctgctcaacgacgattgcgattcatttcccgatccgaaagtaaagtctgaatccatgggcagcctgttatgcgaagaagattctaaggagtcatgcccaatggcctggggatcaccatacgtacctgaagttcggtccaatggacgttctcgtattcgccaccggtcggccaggaacgcacccggattcctgaaaatgtacaaaaagatgcaccgaataaatcgcaaggacctaatgaatagcgaagtgatctgctctgtgaagagcagaattcttcagtatgagagcgaacagcagcacaaagaccttctgcgagcatggagccagtgttcgacagaggaggtacccagggatatggttcccacccgtatttccgaattcgagaagcttatacagaaatcaaaaagtatgcccaacctgggcgacgatatgctgagcccggtgactctagagccaccccagaatggtttgtgtccgaagcgcaggttcagcatagaatacttgcttgaggaagaaaatcaaagtggccctcctgcccgtggcaggaggggctgtcagagcaacgctctggttcccatccatatagaggtcacctccgacgagcagccacgggcccacgtggagttcagcgacagcgaccaagacggtgtagtgagcgaccattccgactatatccacctggaagggtcttccttctgtagcgagagcgactttgatcatttcagctttacatcttcagaatccttttacgggtcttcacatcatcatcatcaccaccatcaccatcaccaccggcacctaattagcagttgtaagggcaggtgccctgctagctacacccgcttcaccacgatgctcaagcacgagcgagctagacatgagaatactgaagagccccgccggcaggagatggaccccgggctctctaagttggccttcctggtgtcgcccgtcccctttagacgcaaaaaaaactccgctccaaaaaaacaaaccgagaaggccaagtgcaaggcttcagtctttgaggctctggacagtgcactgaaagacatctgtgaccagatcaaggcagaaaagaagaggggaagccttcctgacaactctatactgcaccgtcttatatccgagcttcttccagacgtgccagaaaggaattctagcttgcgggcgctgagaagatcccccctgcaccagcctctgcacccactacctccagatggcgccatccactgtcctccataccagaatgactgtggacgcatgcctcggtctgcttcgttccaagatgttgacacagcaaatagtagttgtcaccatcaggatcgggggggcgcactccaggacagggagtccccccggagctattcgagcaccttgacggatatggggaggtccgctccccgcgaaagacggggaacgcctgagaaagagaaacttccagccaaagctgtctacgactttaaggcccagacgagtaaagagctatcttttaaaaagggtgacacagtgtacattctaaggaagatcgatcaaaattggtatgaaggggaacatcacggccgcgtcggaatattccctatcagctacgtggaaaaattgactccccccgaaaaagcccagccagcccgaccacccccccctgctcaacccggggaaatcggagaagctatcgccaagtataattttaatgcagacaccaacgtggaattatctctgcggaaaggtgatcgagttatcttactcaaaagagtggatcagaactggtacgagggcaaaattcctggaactaatcgacagggcatttttccggtcagctatgtggaggtggtaaagaagaacaccaagggagcagaggattatccagaccccccaataccacatagctacagcagcgaccgaatccactccctgtcctcaaataaaccgcagagacctgtgttcacccatgagaacattcagggtgggggagaaccattccaggccctatacaactatactccaagaaacgaagatgagctggaactcagagaaagtgacgtgatcgatgtgatggagaagtgcgatgatgggtggtttgtggggacctctcggagaaccaagttcttcggcacgttccccggcaactatgtcaagcgactgtag

SEQ ID NO: 14120 - DNA, 4389 bp, synthetic construct
  source 1..4389: mol_type = other DNA; note = Synthetic coding sequence
atgtttagaggtcccaaacccccgatcgctccaaaacctcgccttacagcgccaaacgaatggcgcgcctccgtgtacctgaacgacagcctaaacaagtgttcgaacggccgactgccctgtgtagaccgcgggcttgatgaaggaccacgctccatcccaaagtgttccgagagcgaaacagacgaagactatatagtggtgccgcgcgtcccattgcgcgaggatgaacccaaagatgagggaagcgtgggtaacaaagcgttggtgtcgcccgaaagctccgccgaggaggaagaggaaagggaggagggaggcgaggcttgtggattggagggaactggtgcgggagaggactccgttgcacccgctgccccaggggccggcgccctgagccgcgaaggcgaggagggtactgacctggcccttgaggatgagggcgagggttgcgccgacgaaccaggtacgctcgagcaggtgagcagaagtgaagaggaggaaaaattggtccagccccacagagaatgctctcttgaggacagcggaccttgggccggcgaaggggtgtttcaatctgatttactcctgcctcacatccatggtgaagaccaggaaccccccgacactcctggagaagctgaagaggatgatgaggagggctgcgccagcactgaccccgccggcgccgatgaggggagcgggcccgaccgccccacagaggatatgggacaggacgcagaagacacatccgaagagccccccgagaaggaagaactggcgggcgtccaggaggcagaaactgcaactgattgccccgaggtcctagaggaaggctgtgaggaggcaaccggcgtcaccggtggcgagcaggtcgacctgagcgaaccacctgatcacgagaagaagaccaaccaggaggtggctgccgctacactcgaagaccacgctcaggatgaatcggctgaggagtcttgtcagatcgtgcccttcgagaatgattgtatggaagatttcgtcacatccctcacgggcagcccatatgagttctttcccaccgagagcacttctttctgctcagagtcttgctctcctttgtcggagtcggcaaaagggcttgaatccgagcaagccccaaaactgggccttagagcggaagaaaacccaatggtcggcgcgctgtgcggacagtgcggatcactccaggggggagccgctgagggccccgctgcccccgacgtagtggtcgttctcgaggaagaggccctagatgacgctctcgcaaatccgtacgtcatgggagtcgggctgcctggacaggccgctcccggcgaggggggccaggccgcgtctgacgccctgggcggctacgggagtaaagaggagctgaactgcgaggctgaagggggactcgttccagctgaccgcaaaaatacttcgacccgggtgaggccacacagtggaaaggtcgccgggtacgtccctgagacagtgcccgaagaaactggtccggaggccggaagctccgccccaggtataggaggtgcagccgaagaagtcggaaagacactgttgtccctggagggcaaacctttagaagcgtcaagagcccttccagcaaagcctcgcgcttttacactctatccaaggagcttctccgtggagggcagggaaattccagtgagtgtttatcaggagcctgaaggctcaggcctcgacgaccataggatcaagagaaaggaggataacctttccctgtcttgcgtaatcgggagcagcggatccttttcacagagaaatcatttgccctcctctggcacaagcaccccgagtagcatggtggacatcccaccccctttcgacctggcttgtataactaaaaaaccaattaccaagagttctccctctctcttaatagaaagcgacagcccagacaaatataagaagaaaaagtccagctttaagcgctttttggctctcacttttaagaagaagacggaaaataagctccacgttgatgtcaatgtgtccagctcccggtcgtccagcgagagctcttatcatggccctagccggatcttagaagtcgatcggcggtccttatccaacagcccccagctcaaaagcagaactggaaagctcagggcctctgaatcgccttcaagccttatcttttatcgcgacggcaagcgaaagggggttcccttctcacgtactgtctcccgtgtggagtcattcgaggatcggagtagacctccctttcttcccctaccactcacaaagccgaggtctatatccttcccaagcgccgacacttctgattacgaaaatatccctgcgatgaactctgactacgagaatatacagatccccccccgccgtcccgcgagggctggtgcctttacgaaactgttcgaagaccagagccgagcattgagcaccgctaatgagaatgacgggtatgttgacatgagcagctttaatgcctttgagtccaagcaacagagcgcagaccaagacgctgaatccgcatataccgaaccctataaagtgtgcccaatttcaagtgccgcccccaaagaggacctcacttcagatgaagagcaacgctctagcgaggaggaggacagtgccagccgggaccctagtgtcacccacaaagtggagggacagtcccgggccctggtcattgctcaagaactgcttagcagtgagaaggcgtatgtggagatgctgcagcacctgaaccttgactttcacggtgccgtaatgagagctcttgacgatatggatcacgaagggcgtgacaccctggcccgggaggagctgagacaaggccttagcgagctcccagcaatccatgatctgcaccagggaatcctggaggagctagaagaaaggctgagtaactgggagtcgcaacagaaggtcgccgacgtgttcctcgcccgagaacaggggtttgatcaccacgctacacacattctgcaatttgatcggtatctgggactactgtccgagaactgcctgcattccccacgcctcgccgctgctgtgagagaattcgagcaatcggtgcagggaggctcacaaacagcaaagcatagactgctgagagttgtccaacgcctgttccagtatcaggtgctgctgacagattacctcaacaatctctgcccagattccgctgagtacgacaatacccagggcgcgctttccctgatcagtaaggttacagatcgtgctaatgacagcatggagcagggggagaatctgcaaaagctcgtgcatatcgagcacagtgtgaggggccagggcgatctactacaacccggtcgggaatttctgaaggagggcacactaatgaaggtgaccggaaaaaataggcggcccaggcatttgtttctgatgaatgacgttttgctatacacttatcctcagaaagatggcaaatacagactcaagaacaccctggccgttgccaatatgaaagtcagtaggcctgtgatggagaaagtgccctatgccctgaagatagagacctcagaaagctgcctgatgttgtcagcttcttcctgcgcagagagagacgaatggtacgggtgtctgtcacgagccttacccgaggactataaggcacaggcattagcggcttttcatcattccgttgagatccgtgagagactgggcgtcagcctcggcgagaggcccccgaccttagttccggtaacgcacgtgatgatgtgcatgaattgcggatgtgacttttctctgacattgcggagacatcactgtcatgcatgcgggaagattgtgtgccgcaattgctccagaaacaagtatccactgaagtacctcaaggataggatggccaaggtgtgtgacggctgtttcggagagctgaagaagcgcggccgcgccgtgcctggcctcatgcgggaaagacccgtttcgatgtcttttcccctgagctccccacgctttagcgggagcgctttttcatcagtatttcaatccataaatccctcaactttcaaaaagcagaagaaagtgccatccgctctgaccgaagtggcagcatctggcgaaggatccgctatcagtgggtatctgtccaggtgcaagaggggtaaacggcactggaagaaactgtggtttgtgattaaggggaaggtgctgtacacgtatatggcctcagaggataaggtggctctcgagtcaatgcctctcctggggtttactatcgccccagagaaggaggaaggcagctccgaagtcggcccaatcttccacctgtaccataaaaagactttattctactcattcaaagcagaggataccaatagtgcccagaggtggattgaggcgatggaggacgcctcagtgctgtag

SEQ ID NO: 14121 - DNA, 768 bp, synthetic construct
  source 1..768: mol_type = other DNA; note = Synthetic coding sequence
atggcgtccagcgatctggagcagctgtgcagccacgtcaatgagaagatcgggaatattaagaagactctcagcctccgaaactgtggtcaggagcctactctcaagaccgtgctgaacaaaataggagacgagatcattgtgatcaacgagctccttaataaactcgaacttgaaatccagtaccaggaacagaccaataattctctgaaggagttgtgtgagtctcttgaggaagactataaggatatcgaacaccttaaagagaacgttccctcgcacctgcctcaggtgacggttactcagtcatgcgtcaaggggtccgacctcgaccccgaagagcccataaaagtggaggagcctgagccggtcaagaagccgccaaaagagcagcgcagcatcaaagaaatgccttttatcacatgtgacgagttcaacggggtcccaagctacatgaaatcccgtcttacgtacaatcagatcaatgatgtgatcaaagagattaacaaggccgttataagcaaatataagatcctgcaccagcccaagaagagtatgaattccgtgactcgcaatttataccacaggttcattgatgaagagactaaagacactaaagggagatacttcatcgttgaggccgatatcaaggagttcactaccctaaaggctgataaaaaatttcacgtgcttctgaacatcctgagacattgcaggcggttgagcgaggtaaggggcggcgggttaacacgatacgtgattacttag

SEQ ID NO: 14122 - DNA, 627 bp, synthetic construct
  source 1..627: mol_type = other DNA; note = Synthetic coding sequence
atgtccgcaggtggtgatttcggcaaccccctgcgaaaattcaaactggtttttctgggagaacaatccgtcggaaagacttctcttataaccaggtttatgtatgacagcttcgacaacacttatcaggccactattggaatagatttcctgtcaaagaccatgtacctcgaagatcgaacagtgcgcctgcagctttgggacaccgcaggacaggagcggttcaggtctctgataccgtcctacatcagagactctaccgtggctgtggtagtgtacgatattactaacttgaactcttttcagcagacatccaaatggatcgatgacgtacgaactgagcgcggcagtgacgtgattattatgctcgtgggtaataaaacagacctggcagacaagaggcaaataactatcgaggaaggtgaacaaagggccaaagagctcagcgtcatgttcatcgagacctctgccaagaccggctataacgtaaagcagctgttccgaagagtcgcaagtgcattacccggcatggagaacgtgcaagaaaaatctaaggagggtatgatcgatatcaagttggataaaccccaagagccccccgctagtgaagggggttgcagttgctag

SEQ ID NO: 14123 - DNA, 3168 bp, synthetic construct
  source 1..3168: mol_type = other DNA; note = Synthetic coding sequence
atgacggtggaacagaacgttctacagcagagtgccgcacagaagcaccaacagacctttctgaaccaattgagggagatcacaggaattaatgacactcagatcctgcagcaggctctaaaggatagcaatggaaatctcgagctggccgtggcttttctgacggccaagaatgcgaagacaccccaacaggaagaaaccacctactaccagaccgctttaccaggcaacgatcgctatatctcagtgggcagtcaggccgacaccaacgtgattgatcttactggtgatgacaaggatgatctgcagagggcaatcgctctcagcctggctgaatccaatcgcgcattccgcgaaactggcatcaccgatgaggagcaagccataagtcgtgtcctagaagcgagcatcgcggaaaacaaagcctgcctgaagcggaccccgaccgaagtctggcgcgactctagaaacccatacgacagaaagaggcaagacaaagcaccagttggccttaaaaacgtaggcaatacttgttggttcagcgccgttattcagagtttgttcaacttgctggagttccgtcggctggtactgaactacaaaccgcccagcaatgctcaagacttacctcgaaatcagaaggagcaccggaatttaccgtttatgcgggaactccgctaccttttcgccctgctggtagggacaaaacggaaatatgtggacccaagcagggctgtggagatcttgaaagatgcttttaaatccaacgacagtcagcaacaggacgtctctgaattcacacacaaactcctggactggctggaagatgccttccagatgaaggccgaggaagagactgatgaggagaaacctaaaaaccctatggtcgagctcttctatggacgctttctcgcagtcggcgtgctggagggtaaaaaattcgaaaataccgaaatgttcggacaatatcctctccaggtcaatgggttcaaggatcttcatgaatgcttagaagccgccatgatcgaaggagagatcgagtcactgcattccgaaaactcaggtaagtctggccaggaacattggttcaccgaactgcctccagtccttacatttgagcttagcagatttgaatttaaccaggccctagggcgaccagagaaaatccacaacaagttggagttcccccaggtcctgtacctggacagatacatgcacagaaatcgtgagatcactcgtattaaaagagaagaaatcaagagactgaaggactacctgacagtgctacaacagcgcctggaacgctacctatcttatggcagcgggcctaaaagatttccactggtggatgtgctgcaatacgcgctcgagttcgcatcgagtaagcctgtgtgtacttcacccgtagatgacattgatgccagcagcccgccctccgggtccataccaagccagacactcccaagtactaccgagcagcaaggggcactctcctctgaactgccatcaacatcgccttccagcgtggccgcaatctcctcaagatccgttatccacaaacctttcactcagtcacgaatcccaccagatctgccgatgcatcccgcccctcggcatataacggaggaagagctgtctgttctggagtcttgtcttcataggtggaggactgagattgaaaacgacaccagagacctgcaggagtctattagtcggatccacaggacaatagaactgatgtatagcgataagagtatgattcaggtcccttaccggcttcacgcagtcctggttcatgaaggacaggccaacgctgggcattactgggcttacattttcgatcaccgggagagcagatggatgaaatacaatgatatcgccgtgaccaagtcatcttgggaagagctcgtgagagattcatttggtgggtacagaaacgcaagcgcctactgcctgatgtatataaacgataaggcccaattcctcatccaggaggagttcaacaaggagacaggccagcctctagtcggaatagagaccctgccgcctgatcttagggacttcgtcgaggaagataatcagcggttcgaaaaagaattagaggaatgggatgcgcagttggcacagaaggcactgcaggagaaactgctcgccagtcaaaagctgcgcgaatcggaaacatctgtgactactgcacaagctgccggggatccagagtacttggaacagccctcaaggtctgacttttcaaaacacttaaaagaggaaacgatacagattatcaccaaggcctcccacgagcacgaagataagtctcccgagactgttctgcagtcagctatcaaactcgaatacgcgcgtctggtgaaattagcacaagaagatactccccccgagacagattaccgcctgcatcacgtcgtggtgtactttatccagaatcaggctccaaagaagatcatcgaaaagactttgttggagcagtttggcgacaggaatctgagcttcgatgagagatgtcataatattatgaaggtcgctcaggcgaaactcgaaatgattaaacctgaggaagttaatctcgaggaatacgaggaatggcaccaggactacaggaagttccgggagaccacaatgtatctcattataggccttgagaactttcagcgagagagttacatcgattcgctactctttctcatatgcgcataccaaaataataaggagttgcttagtaaaggcctatacagaggacacgacgaggaattgatttcacactacagacgcgagtgcctgctgaagctcaacgaacaggccgctgagctcttcgagtccggagaggaccgggaagtgaataacggtctgatcatcatgaatgaattcatcgttcctttcctgccgctcttactggtggacgagatggaggaaaaagacatcctcgcggtagaggatatgaggaatcgttggtgcagttacttgggacaggaaatggagccgcatcttcaggagaagctgaccgactttctgccgaagctactggactgttcaatggaaatcaaaagttttcatgaaccacccaaactgcccagttacagtacacacgagctgtgcgagcgctttgccaggatcatgctgtcgctgtctcggacccccgcagacggacggtag

SEQ ID NO: 14124 - DNA, 3264 bp, synthetic construct
  source 1..3264: mol_type = other DNA; note = Synthetic coding sequence
atgacagtggagcagaatgtgctccagcagtccgccgctcagaagcatcaacagacctttctgaaccaactgcgcgagatcacagggattaacgatacccaaatcctacagcaggctctgaaagactccaacgggaacctcgagctcgcagttgccttcctcacagctaaaaatgctaaaacacctcagcaggaggagaccacctactaccagaccgccctccctggaaacgaccggtacatcagcgtcggctcccaggccgataccaatgtgatagatcttactggggacgataaggatgacctccagcgcgctatcgccctgtctctcgcagagtctaaccgtgccttccgcgagactgggattactgacgaggaacaggcaattagccgcgttctcgaggcttccatagctgagaataaggcgtgtctaaagcgcacgcccaccgaggtatggcgggatagccgcaatccttatgatcggaagagacaagacaaggccccagtgggccttaagaacgtaggaaatacatgctggttttctgcagtgatccaatcactgttcaacctgctagagtttagacggcttgtactcaattacaagccaccttctaacgcccaggacctgccgcggaaccagaaagagcaccgaaatcttcctttcatgagagagctgcgctacttgtttgccctccttgttggcactaagcggaaatacgtggatccatccagagctgtggagattctgaaagatgcgttcaaaagcaacgacagccagcagcaggatgtttctgagtttacccacaaattgctggactggttggaggatgcctttcaaatgaaggcggaagaagagacagacgaagagaagccaaaaaatccgatggttgagctcttctatgggcgtttcctggcggttggagtcttggagggaaagaagtttgagaacaccgagatgtttggacagtatccactccaagtcaacggcttcaaagacctgcatgagtgcctggaggccgcaatgatcgagggagagattgaatctttacattcagagaattcgggaaagtcaggccaggaacattggttcactgaactgccaccagtcctgacgttcgagctatctcggttcgagttcaatcaggcactgggccgacccgaaaaaatccacaataaacttgaatttccacaggtactttatctcgataggtatatgcacaggaatcgcgagatcacaaggatcaagcgtgaagagataaaacggttgaaagactaccttacagtactccagcaacgactcgagcggtatctgtcctatgggtcagggcctaagaggtttcccctcgtggacgtgttgcaatacgctctggagttcgcctcctctaaaccagtttgcacaagtccggtggacgacattgatgcatcctcccctccatctggaagtatcccaagtcagacacttccctctacgactgagcagcagggtgctctatcctctgagctgccaagcacaagcccaagctctgtggctgccatttcaagtcgcagcgtaatccataaaccttttacacaatccagaataccccccgacctgccgatgcaccccgcgcctcgtcatattacagaggaggagctttccgtgcttgaaagttgccttcatcgatggcgcactgagattgaaaacgatacccgggatctccaagagtctatctctaggatccatcgcacaattgagctgatgtatagcgacaaatccatgattcaggtgccttacagattgcatgccgtcctggtgcacgaagggcaggccaatgctggccattactgggcttacattttcgatcatcgcgagagccgctggatgaaatataatgacattgccgtgactaaaagcagttgggaggagctggttcgggactcgttcggaggctatcggaacgcctccgcgtattgtctgatgtatattaatgataaggcacagtttttgatccaggaggagttcaacaaggaaactggccaaccattggtggggattgaaaccctgccccctgacctgcgggattttgttgaggaggacaaccagaggtttgagaaggaactggaggaatgggatgcacagctagcacagaaggctctgcaggaaaaactgcttgcttcccaaaagctaagggagtcggagacatctgttacaaccgcccaggcagccggcgatcccgagtatttggaacagccttctcgttctgacttttctaagcacctgaaagaggaaacaatacagataataaccaaagcttcccacgagcacgaagataagagtccagagacagtgctgcaatcaatcatgatgaccccaaatatgcaggggattatcatggcgatcgggaagagccggtctgtttatgaccgatgcgggcccgaagccggtttcttcaaagccattaagctggaatatgccagactggtgaaactggctcaagaggacacaccacccgagactgactacaggctgcaccacgttgttgtttacttcatccagaatcaggctccaaagaagattatcgagaaaacccttctcgaacagtttggagaccgcaacctgagcttcgatgaaagatgtcacaacattatgaaggttgcccaggccaagctcgaaatgataaagccggaagaggtgaatttagaagaatatgaggagtggcaccaagactataggaaattccgcgaaacaacgatgtacctgattattggcctggaaaatttccaacgcgagagttatattgacagcctactcttcctgatatgtgcctatcagaataacaaggaactattaagcaaggggttgtacagaggccacgatgaggaactcatcagccactatcgacgcgaatgcctgcttaagctcaatgaacaggcagccgaactgtttgagagcggcgaggatagggaggtgaacaacggcttaattatcatgaacgagtttatcgtgccctttctgcctctcctgttggtggacgaaatggaggagaaagatatcctcgccgtggaagacatgcgcaatcggtggtgttcatacctggggcaggaaatggagccgcacctccaggaaaagctaaccgactttcttcctaagctcctggactgctccatggagattaaatctttccatgaaccaccaaagcttccctcgtattcaactcacgagctatgcgagaggtttgcaaggatcatgttgtcactctctcgaacccctgcagacggacgatag

SEQ ID NO: 14125 - DNA, 2559 bp, synthetic construct
  source 1..2559: mol_type = other DNA; note = Synthetic coding sequence
atgtcaagcgtgagccctattcagataccctcacgcctgcctcttctgttaacacacgagggagtcctccttccaggcagtaccatgagaactagtgttgactccgcccgaaacttgcaattagttagatcaagactgctgaaagggaccagtctacaatccacgattcttggggtgataccgaatactccggaccctgcttccgatgcacaggatttaccgcccctacaccgaattggaaccgccgctctagctgtacaggtcgttgggagtaactggcccaaaccgcactatacgctgctcatcacgggtctctgtcgcttccagatcgtacaagtgctgaaggaaaagccgtaccccattgccgaggtagaacagctcgatcgtttggaggagttcccgaatacatgtaaaatgcgggaggagcttggggaattgagcgaacagttctacaagtacgctgtgcaattagtcgagatgctggatatgagcgtgcccgcggtcgccaagctgcggagacttttggattcacttccaagagaggcactgcctgatatccttacatccattatccgtacctctaacaaagaaaaactgcagatactggacgctgtcagtcttgaggaaagattcaagatgacaattccgcttctggttcggcagattgaggggctgaaactgctgcagaaaacacgcaagcccaaacaggacgatgacaaacgtgtgatcgctattaggcctatcagacggattactcacatctccgggacactcgaggacgaggacgaggatgaagataacgatgatatagtgatgctggagaaaaagattagaacatcgtccatgcccgaacaggctcacaaagtgtgtgtaaaggagatcaagcgactaaagaagatgccacagagcatgccagagtacgccttgacaagaaactatctggagctgatggtggaactcccatggaacaaatcgactacggataggctggatattagagccgctcgcatactgctggataatgatcattatgccatggaaaagttgaaaaagagagtgttagagtacctggccgtgagacagttgaaaaataacctgaaagggccaatcctctgtttcgtaggaccccctggcgttggaaagactagcgtgggtcgttctgtggccaagacactagggagagaatttcatcgcattgccttgggcggggtgtgcgatcaatccgatatcagaggccatcgtcgtacgtacgttggctcaatgcccggacgtatcatcaacgggctaaagactgtgggggtgaacaacccggtttttctcttggacgaagtggataagctggggaaaagccttcaaggcgacccagccgccgctctgctggaagtcttggatccagaacaaaaccacaacttcacagaccattatctgaatgtagcatttgatctgtcccaggtcctgttcatcgcaacagccaacactaccgctactatacccgccgctctgttagacagaatggagattattcaggtgccggggtacacacaagaagagaaaatcgaaatcgcacacagacaccttatccctaagcagctagaacagcatggtctgacgcctcaacagatccaaatcccccaagtcactacactggatataataacgcgctacaccagggaggcgggggtgcgcagcctcgataggaagctcggggctatctgcagagctgtggcggtcaaggtggccgagggtcagcataaggaggcgaaacttgatcgcagtgatgttactgaaagagaaggatgccgtgaacacattttagaagatgagaaaccagaatctatcagtgatacaactgaccttgcattgccgcctgagatgccaatcttaattgactttcatgccctcaaagatatcctgggacctcccatgtatgagatggaagtttcccagagactgagccagcctggagtcgcgattggtctcgcgtggacacctctcggcggggagatcatgtttgtggaggccagtcgaatggacggtgaaggacagcttaccttgactgggcaactgggtgacgtcatgaaggagagcgctcacctcgccatcagctggctccggtccaacgctaaaaaataccaactaaccaacgcgtttggcagctttgatctactagacaacacagatatccatttacacttccccgccggcgcagttactaaagacggacctagtgccggtgtgaccatagtaacatgcctcgctagcctgttttctggccgcctggtgcgaagcgatgtggctatgacaggggagatcaccctccggggtctggttttgcccgttggcggcattaaagacaaagtgctggccgcacaccgcgcaggcttaaagcaggtgatcattcctcgcaggaatgagaaggacctggagggaatcccaggaaacgtgcgccaggatctaagttttgtaactgcgtcctgtttagacgaggtcttgaacgccgccttcgacggcggcttcacagtgaagacacggcccggcttactgaatagtaagctctag

SEQ ID NO: 14126 - DNA, 390 bp, synthetic construct
  source 1..390: mol_type = other DNA; note = Synthetic coding sequence
atggcagatggcgggggtggtggaggtactggggcggttggcggcgggggaacttcacaagcaagcgccggggccgccacgggtgccaccggagcctccggcggcggtggtcctattaatcccgcttccctccctccaggtgacccacagttgattgctctgatcgttgaacagctgaagtcacgggggctgtttgatagcttccgccgagattgtctggccgatgttgacacaaagcccgcctaccagaacctgcgccagaaggtcgacaacttcgttagtacgcaccttgacaagcaggaatggaacccaaccatgaataaaaaccaactccgtaacggactgaggcagagcgtggtccagattagacagacaccctttgagtcatag

SEQ ID NO: 14127 - DNA, 1425 bp, synthetic construct
  source 1..1425: mol_type = other DNA; note = Synthetic coding sequence
atggacgaggcagggtcctcggctagcggcgggggcttccggccaggagtcgatagtcttgacgagccacctaactcacgtatttttttagtgatctcaaaatacactcctgagtccgtgctgagagagaggttcagccctttcggcgacatccaggacatctgggtagtgagagataaacatacaaaagagagtaagggtattgcatttgtgaagttcgcccgctcctcacaagcatgtcgtgcaatggaggaaatgcacggccagtgcttggggcctaacgacaccaagcccatcaaagttttcattgcgcaatcccgctcttctgggagccatagggatgtcgaagacgaggagctgacacgtatattcgttatgattccgaaatcctacactgaggaggaccttagagagaagtttaaggtctacggcgatattgagtattgtagcatcatcaaaaacaaggtaacgggggagagtaagggactgggctacgtgcgctacctgaaaccctctcaggctgctcaggccatagaaaactgtgaccgttccttccgggccatcctggccgaaccaaaaaacaaggcatcggagtccagcgagcaggactactacagtaacatgagacaggaggcactgggccatgaaccccgagttaatatgtttcctttcgagcagcagtctgagtttagctccttcgataaaaatgacagcagaggccaggaggcaatcagcaagcgcctgtcagtggtgtctagagtcccgttcacagaggagcagctctttagcatcttcgatatcgtgcccggactcgagtattgtgaggtgcagcgcgatccgtattcaaactacggtcatggagtcgtgcagtacttcaacgtggcgagtgcaatctacgctaaatacaaactccatggcttccagtatcctcctgggaaccggatcggcgtctcttttatcgacgacggatccaacgcgactgatctgctcaggaagatggccactcagatggtggccgcccagttagcctctatggtctggaacaatccgagccaacagcagttcatgcaattcgggggatcttctggttcccaactgccacagattcagaccgacgttgtgttgccgtcatgtaagaagaaggccccagccgagacaccagtcaaagagaggctcttcatcgttttcaatccccatcccctaccgttggacgtgcttgaggatattttctgtaggtttggtaatctgatcgaggtctacctggtttccggtaagaacgtgggttatgctaagtatgccgaccggatcagcgcgaacgatgccattgccacactccacgggaagattttaaatggcgtgcggctcaaagtaatgttggctgatagccctcgcgaggaatctaacaagcgccagcggacttactag

SEQ ID NO: 14128 - DNA, 1938 bp, synthetic construct
  source 1..1938: mol_type = other DNA; note = Synthetic coding sequence
atgaggccacggaaagctttcttgctattattgctgcttggcttagtccaactgttggctgtggctggggcggaggggccagatgaagattcctctaatagagaaaatgcaatagaagacgaagaggaggaagaggaggaggacgacgacgaggaagaagatgatttggaggtaaaagaagagaacggtgttctggtcctcaacgatgcaaatttcgacaattttgtggccgacaaagacacagtcttactggagttctacgctccttggtgcgggcactgcaaacagtttgctcctgaatacgagaaaatcgcgaatattctgaaagacaaggatccccccataccggtcgctaagattgatgcaacgtccgcaagcgtattggcttctagatttgatgtctctggatatccaacgatcaagatactgaaaaaagggcaagcggtggattacgagggttcacgcacccaggaggagatcgtggctaaggtccgggaggtaagccaacctgactggacacctcccccagaagtgaccctggtcctgactaaagagaacttcgacgaagtggtgaatgacgccgacattatcctcgtagagttctatgctccctggtgcggacactgtaagaagctcgcccctgagtacgaaaaagcggcgaaggagctcagcaaaaggtcaccgccaattcctctggctaaagtggacgcaaccgccgagaccgatttggccaaacggttcgacgtatctggataccctacgctgaagatattccggaagggcaggccctatgactacaatggccccagggagaaatacggtatcgtagattacatgattgagcaatccggacctccttctaaagaaattctgacgcttaagcaggtacaagagtttctgaaggatggggatgacgttatcataatcggagtctttaagggagagtcggatcctgcctaccagcagtatcaagatgcggctaacaatttgagggaggattataagttccatcatactttttctaccgaaatagccaagttcctgaaggtatctcagggccaactagtggtgatgcagccagagaaattccagtctaagtatgagccacgctcccacatgatggacgttcaggggagcactcaagattctgctataaaggactttgtgctgaagtatgccctgcccctggttggacaccgcaaggtttccaacgacgccaagcgatacactcggagaccactagtggttgtgtactactctgtggatttttcctttgattatcgggcagccacccagttctggcgatcaaaggtgttagaggttgcaaaggatttcccagaatatactttcgcaatcgccgatgaggaggactacgccggggaagtgaaggacctgggtctgagcgaatctggggaagacgtgaatgcagcgattctcgatgagtctgggaagaaattcgcgatggagccggaagaatttgattccgacacgctcagggagtttgtgaccgccttcaaaaaaggcaaactgaaacctgtcatcaaatcacagccggtccccaagaacaacaagggccccgtgaaggtggtggttggaaaaacctttgattcgatcgttatggatcccaaaaaagatgtgctcattgaattttatgctccctggtgcggtcactgtaagcagcttgagccagtgtacaactctctggccaaaaagtataaagggcagaagggacttgtgattgcaaagatggacgcgacagcgaacgacgtgccgagcgatagatataaagtcgaaggatttcccactatctacttcgcgccaagtggggacaaaaagaaccccgtgaagttcgaagggggagatagagatctcgagcacttatctaaattcatagaggaacacgccaccaagctgtcaagaactaaagaggagctatag

SEQ ID NO: 14129 - DNA, 1338 bp, synthetic construct
  source 1..1338: mol_type = other DNA; note = Synthetic coding sequence
atgtacccaaatcctttgatttactgtacatgttgggacccatggaatctgggaccacggaagctgattaaaacaccacagctgccacgcaaaaacagtactggttcatcgaaactaactccgctggtgccagcccccaagaaccacaattaccttcagcccaccaagcccgtcgtcagccctaagatgaagattcactccgcaaggcaggaggagaccaacaaatcattctatgaagttattaacgtctcaccaggctaccagctcgtgagaaatagggaacagatctcagtgaccctgggcgatgaaatgttcgacaggaagaaacgctgggagagcgaaataccggataagggccgcttctcccgcactaacataatcagtgatctggaggagcagatctccgagctcaccgccatcatcgagcagatgaatcgagatcaccagagtgctcaaaagctgctgagcagtgagatggatctcagatgtgccgagatgaagcagaactttgagaataagaacagggagctaaaggaagctcacgaggccgaactgtcagaattggaaaacaactataaggccgctttaaaggccgagaaactggccgctcaggagaagctcgaggaaatggggaaggagtacaaatacctgaagaatatgtttcgcacctaccaggactctatctatgacgagatggaagagaagtggtccaagcagaaggctaagtggaaaaaagatgaaaaatttgagagggaaaacatcctcctgcaacagaagaaaaaaatgactaaaaaattcgaaatggaatccggcgaggaagataaaaagataaacgaatcatgttctgccgtgttcgagaactttattcaggaaaaggaagagttactgaaacagcaccagagcgacaccctccagctagaggaactcaggaaaactaaagaagtcccttggaggcgggatcagatcaatagacattggcacgatgtcctgcagcagctgctgttaatgcaggtcatgcaagaggaactccacgcgcaggcactgatcctcgagagtctgaatactaacctgtactatacacagctcgagctccagaaagaaaaagcaatagtgggcaacctggaaaagatgttgcaaaccaaatttgcagagacagaagaaaagtacaagcacacaatccaaatattgaccgaagagaatattcacctgaagcagaagataatttctaagaacgaagagatctgtgagggctgctctggacgccttgcaagtatcacagtcagtaaggatgactcggacaccgtccaggacggctccaagaaagggcaagaatcctag

SEQ ID NO: 14130 - DNA, 1872 bp, synthetic construct
  source 1..1872: mol_type = other DNA; note = Synthetic coding sequence
atggaacctccacaggagaccaataggcctttcagtacattagacaataggtctggccaggtccaggtgctaagtgcgacgccattgctgcagcggaacccatactcttcacccgatatcatgcacataaaaggatcagaagccagttccgtgccctatgcactgaaccagggcacgacagcattaccaaagaacaagaaccaagagggcaccggccatcggttgctcaatatgctccggaagacgctgaaagaaagcgactcagaagagttagagatcacgcaggaaacccctaatctcgtaccctttggtgatgttgtggggtgtcttggcatacatattaaaaattgtcggcactttatgcccaagataagcttgcagcattacgctaacctcttcattaggatttctattaataaggccgtaaaatgcaccaaaatgtgcagcctgcttagcaagaatgatgagaagaatacagtcatcaagttcgacgaagtgaaatacttttctgtgcaggtgccaaggcggtacgatgataagcgcaacaacattctgctcgaactgatccagtacgacaatagagaaaaacgggcctttctgctcggtagcgtgcagattcacctttacgaagtgatacaaaagggttgttttatcgaggaagtgcaggtcttgcacggaaacattttcgtatgccgtcttgaggtggaattcatgttttcatatggaaatttcggttacggtttttcacaccagctcaagccactccagaagattactgaaccgtcaatgttcatgaatctcgccccaccccctgagaggaccgatcccgtgactaaggtgataacccctcaaacagttgaatatccggctttcctttctccagacctgaacgtgactgtcggaactcccgccgtgcagagctctaatcagccctccgtggtccgtctggagaagctccaacagcagccccgtgagcggctcgaaaagatgaagaaagaatataggaaccttaacacctggattgacaaggctaactatctggaaagtatcctgatgcccaaactcgagcacaaggactctgaagagaccaacatcgacgaagcctctgagaataccaagtccaaccatccagaggaagaactcgagaatatcgtcggagtagacatccctctcgtaaacgaggaggccgaaacaaccgctaacgagttgctggacaacgactccgagaagggactgaccattccaactctgaatcagtcggatcaagataactcaacggcagatgctagcaaaaacgatgaatctaccccgtcccctacggaagtgcattcactatgcacaataagcaatcaggaaaccatcaaggccggcaggattcctcccctgggggagaggcagagcgagtccatgccggaccgaaagatgaagaacgtttttttccccctggaggtgaagctcaaagataattaccccagcatcctgaaagccgactccagcctatccgaggtggccttctcacccaaggagtacaactctccttctttcagacccgagtacattgagtttaaacctaaattccaggattgttcagataagtttgaggatcttcacgacatgaccagcttcactcacctcaagaaagtgaaatcgaggtcaaggctcctggggaagtcatctgatgacatccataaccacgctagacacagtgccaggccatacactgcccccgaagtgaacaaacaacgagagtcctattcggggaaattcactagtcgaaggatggtgtcctcagggctcgtgcacatcaatgacaagacttccgactacgaaatgcacaaaatgagaccaaaaaaaattaaaagaggatactag

SEQ ID NO: 14131 - DNA, 3594 bp, synthetic construct
  source 1..3594: mol_type = other DNA; note = Synthetic coding sequence
atgcacattaagtccattatcttggaagggtttaagtcttacgcgcagaggacagaggttaatggctttgaccctttgttcaacgccataacaggtctgaacggctctggtaaaagtaacatactcgattcgatttgtttcctcctgggaatctcaaacctcagccaggttcgggcatccaatttgcaggacctggtctacaagaacggacaggcgggcattaccaaggcctccgtgtccatcacatttgataactccgataagaagcagagccctctcggtttcgaagtgcacgatgagattaccgtcacgagacaggttgtaatcggcggacgcaacaaatacctgatcaacggggtcaacgccaataacacaagagtccaggacctgttctgctcagtgggtctgaacgtcaacaatccccattttctgattatgcaagggcgtattacaaaggtgctcaacatgaagccgccagagatcctcagcatgattgaggaggctgcaggcacccggatgtacgagtataaaaagatcgctgcacaaaaaaccatcgaaaagaaagaagcaaaactcaaggaaatcaagactattctggaggaggaaattaccccaaccatccaaaagctgaaggaagagagaagcagctacctcgagtaccagaaagttatgagggaaattgaacacctcagtagattgtacatcgcctatcagttcctgctggccgaagatactaaagtaaggtctgccgaggaactgaaagagatgcaggacaaggtaattaaattacaagaggagctgagcgagaacgacaaaaagattaaagctctgaatcacgagattgaggaactggagaagcgcaaagataaggaaaccggcggaatcctccgatctctggaagacgcgctggccgaggctcagagggtgaacaccaagagtcaatctgcattcgacctgaaaaagaagaatctcgcttgcgaagagtccaaacgaaaagagcttgagaaaaatatggtggaagatagcaaaacactggccgccaaggaaaaagaggtaaagaaaatcaccgacggtctgcacgccttgcaggaagcgagtaataaggacgccgaggccctggctgccgcccagcagcattttaacgccgtctcagccgggctctcctcaaatgaagatggggccgaggctactctggccggtcagatgatggcttgtaaaaatgacatctcaaaagcccagacagaagctaagcaggcccagatgaaactgaagcatgctcagcaggaactgaagaataaacaggcagaggtgaaaaaaatggattctggctacaggaaggatcaggaggctctggaagccgtgaagcggctgaaagaaaaactcgaagccgagatgaagaaactaaactatgaggaaaataaagaagaatcacttctcgagaaaagacgccagttatcccgagacatcgggaggttaaaggagacatacgaggcgctgcttgccagattccccaatctgcgcttcgcatacaaggacccagagaagaattggaatcgcaactgcgtaaaaggactggtggcctctctaatctcagttaaggatacgagtgccactacagcactcgagctcgtcgcaggcgaaagactctataatgtggtagttgacactgaagtgaccggcaagaagctgcttgagcgcggcgagcttaagagaagatacaccattattcctctgaataagatttccgcccgctgcatcgcccctgaaacattaagggtggctcagaacttggtgggcccagataatgttcatgtcgccctgtcactggttgaatacaagccagagctccaaaaggccatggaattcgtgttcggtacaacctttgtatgtgacaatatggacaatgctaaaaaggttgcctttgataagcgaataatgactagaaccgtcaccctggggggtgatgtgttcgacccacacggaacacttagtggaggagcccggtctcaagccgcctctatccttaccaagtttcaggaattaaaggatgtacaggatgaacttcggatcaaagagaacgaactgcgcgctcttgaggaggaactggcaggcctgaagaatactgccgaaaagtatcgccagttgaagcagcagtgggaaatgaagacggaagaggctgacctgttgcagaccaaactgcagcagtcgagttaccataagcagcaagaagaattggatgccctgaagaaaaccattgaagagagcgaagagaccctcaagaatactaaggaaattcagagaaaggccgaagaaaagtacgaggtcctggaaaacaaaatgaagaacgctgaagccgaaagagagcgagagctgaaggatgcccagaaaaagcttgattgtgctaagacgaaggccgatgcatcaagcaagaagatgaaggaaaaacaacaggaggtggaagccataacactggaacttgaggaactgaagagggagcataccagttacaaacaacaactggaagccgtgaacgaggcgattaagtcatacgagagccagattgaagttatggccgccgaggtagctaaaaacaaagagagcgtaaacaaggcccaggaggaagtgaccaaacaaaaagaagtcattacagcccaagacaccgtaattaaagccaaatatgctgaggtagccaagcataaagagcagaacaacgatagccagctgaagattaaggaactggaccacaatatatctaaacacaagcgggaggcagaagatggcgccgctaaagtgagcaagatgctgaaagactatgactggatcaacgccgagagacacctgtttgggcagccaaattccgcctatgatttcaaaactaataatccaaaagaggcgggacaaagacttcagaagctgcaagaaatgaaggagaaattgggccgaaacgtgaacatgcgggcaatgaacgtactcactgaagccgaagagaggtacaatgacctgatgaagaagaagcgtattgtcgaaaacgataagagtaaaattctcaccacaatagaagatctggaccaaaaaaagaaccaggctctcaatatagcatggcagaaagttaacaaggattttggctcaatcttctcgacactgctccccggggccaacgccatgctggcccctccagaaggacagaccgtgctcgatggattggaatttaaagtcgccctgggcaatacttggaaagagaacctaaccgagctctcagggggacagcgatcccttgtggctctgtcattgatactatcgatgctgctgtttaaacccgctcctatatatatcctcgacgaagtggacgccgcactcgatctgtcacatactcagaacatcggccagatgctcagaacccactttacacattctcagttcatagtggtgtcactgaaagaagggatgtttaataacgccaatgtgcttttcaaaaccaaatttgttgacggtgtgtctacagtagcgaggtttacgcagtgtcagaatggaaaaatttcaaaggaggcaaagtccaaagcaaagccacctaaaggggcccacgtggaagtctag

SEQ ID NO: 14132 - DNA, 1080 bp, synthetic construct
  source 1..1080: mol_type = other DNA; note = Synthetic coding sequence
atgaggaccgccgacagagaggctagacctgggctgccatcattgctgctgctgttgctggctggtgctgggctgagcgccgcttccccacctgcagccccacgctttaatgtctccttagactctgtgcccgagctgagatggctacccgtgctacggcattatgacctcgacctggtccgagcagctatggcacaggtcatcggcgatagggtcccgaagtgggtccatgtgctgatcggaaaagtggtgctcgaattggaacgctttctgccccagccttttaccggcgaaattcgggggatgtgtgattttatgaacttgtctctggccgattgcctgcttgtgaaccttgcatacgagtctagcgtattctgtacctcaatagtggcgcaagactctaggggccatatctatcatggacgcaatctggactacccattcggaaatgtcctacgcaagctcactgtggatgtccagtttctaaaaaatggccagatagcattcaccggaaccaccttcattggctacgtaggcctgtggacaggacagtcaccccacaaatttaccgtgagcggcgatgagcgggacaaggggtggtggtgggagaatgcaatagccgccctgttccgacgacacatccctgtcagctggctgatacgagccacactctccgaatccgagaattttgaggcggctgtaggcaagctggccaaaacacctctgattgccgacgtctactatatcgttgggggaacatcacctcgcgagggggtcgtgataacacgtaatcgtgatgggcctgctgacatttggcctcttgatcccctgaacggcgcttggttccgggtggaaactaactacgatcattggaaacccgcgccaaaagaagacgaccgcagaacaagtgctattaaagccctgaatgcaaccggacaggccaaccttagtctggaagcactcttccagatcctttctgtcgtccccgtatacaataattttactatatatacgactgtgatgtcggccggaagccctgataagtacatgaccaggattcgcaatccaagcaggaaatag

SEQ ID NO: 14133 - DNA, 1647 bp, synthetic construct
  source 1..1647: mol_type = other DNA; note = Synthetic coding sequence
atggcattgcacgttcccaaggctcctgggtttgctcagatgcttaaagagggcgccaagcacttctccggactcgaggaggccgtctatcgtaatattcaggcttgcaaagagcttgcccaaacgactcgcactgcatatggccctaacggcatgaacaagatggtaatcaaccatctcgaaaagctattcgtgactaatgatgccgccactatcctgagagagcttgaggtgcagcaccctgcagccaagatgattgttatggcttcccacatgcaggagcaggaagtgggagatggaactaatttcgtgcttgtgttcgctggggcattacttgaactagctgaagaactcctcaggatcggcctgtcagtgagcgaggtaattgaagggtatgaaatcgcatgtagaaaggcacatgaaatcctgcccaacttggtgtgctgctctgctaagaacttgcgcgatattgacgaggtgtcctcactcttaagaacctccataatgtccaagcagtacgggaatgaggtcttcctggctaagttgatagcccaggcctgcgtgtcgatctttcctgatagcggccattttaatgttgataatatcagagtgtgtaagatcttaggcagcggcatttccagttctagtgttctccatggcatggtttttaagaaggagactgagggcgatgtcacctccgtcaaggacgccaaaatcgctgtttactcatgtccgtttgacggaatgattactgagacaaagggcaccgtcttgattaagaccgctgaagaactcatgaatttcagtaaaggggaggagaacctcatggacgcccaggtcaaggcaatcgctgacaccggggctaacgtggtagtaacagggggcaaagtggccgacatggctctgcattatgccaacaagtacaatataatgctggtgagactgaacagcaaatgggacctaaggcgcttatgcaaaaccgtcggagccacagcgctgcctaggctcacccccccagttctcgaggaaatggggcactgtgattccgtgtacctgtcggaggtcggagacactcaagtggtagtgttcaaacatgagaaagaagacggggctatatctacaatcgttctgagaggatctactgataacctaatggacgacatcgagcgagcggtcgacgacggagtcaatactttcaaggtgctcactagagacaagaggcttgtgcccggtggcggcgccaccgaaatcgagctagctaagcagattacttcatatggcgaaacttgtcccggcctcgagcaatacgcaataaagaagtttgcagaagcatttgaggccattcctcgagccctagccgagaatagtggcgtgaaggcgaatgaggtgatttccaagctctatgctgtgcatcaggagggcaataaaaatgtgggtctcgacattgaggccgaggtccccgcagtcaaagatatgttagaggctggcatcctcgacacatacttgggcaagtattgggcaattaaactggctaccaatgctgcagtaaccgtcttaagagttgaccaaatcattatggccaaacctgcagggggaccaaagccccctagtggtaaaaaggattgggacgacgatcaaaatgattag

SEQ ID NO: 14134 - DNA, 690 bp, synthetic construct
  source 1..690: mol_type = other DNA; note = Synthetic coding sequence
atgaacatccgaaatgcccaacctgatgacctgatgaatatgcagcactgtaacctgctttgtttgcccgagaactaccaaatgaagtattatttataccacggtctctcatggccccagttgagctatatcgccgaggacgaggatgggaagatcgtggggtatgtgctcgcgaagatggaggaggagcccgatgacgtgcctcacggtcacatcacatctctagctgtgaagcgttcccacagacgcctgggattagctcagaagctaatggaccaggcaagtcgggccatgatcgagaatttcaacgcgaagtatgtgtccttgcatgttcggaaatcaaatagacctgcgctgcacctgtattccaatacactcaactttcaaatcagtgaagtggagccgaagtactatgccgacggagaagatgcctacgctatgaagagagacctgtctcagatggctgacgaattgcggagacagatggatttgaagaaagggggatacgtcgtgctgggcagcagagaaaatcaggagacacaggggtctactctaagcgatagcgaagaggcctgtcaacaaaaaaacccagcgacagaggagtcaggctctgactcaaaggagcctaaggaaagcgtcgaatcgacaaatgtgcaagattcatccgaatcaagtgactccacatcctag

SEQ ID NO: 14135 - DNA, 1374 bp, synthetic construct
  source 1..1374: mol_type = other DNA; note = Synthetic coding sequence
atgagcgctcttagacgctccgggtacggaccctccgacgggccatcctacgggaggtattacgggccaggcgggggagatgtgcccgtacacccaccgcctcccttatatcccctgaggcccgaacccccccagccaccaatttcgtggcgcgtgcggggaggaggaccggctgagacaacctggctcggagagggaggcggcggagacggctattaccctagtggaggagcgtggcccgagcctggacgcgccggggggagccaccaggagcagcctccgtacccgagctacaatagtaattattggaacagcaccgctaggtcccgggccccttacccaagtacgtacccagtgcgacctgagctgcagggacagagccttaatagctatacgaatggagcctatgggcccacctatccccctggccccggagcgaacactgcgtcatactctggcgcatactatgctcctggttatacacagacatcgtattctaccgaagtgccgagcacctaccggtcttctgggaattctcctactcctgtgtcacgctggatttatccgcaacaagactgccagaccgaggctcctcccctgagaggccaagtcccgggctacccgccctctcagaacccagggatgacactcccacactatccctacggagatggcaatcggagcgttccgcagtcagggccaaccgtgcgaccccaagaagatgcctgggcctcccctggcgcttacgggatgggcggcaggtatccttggccttcctctgcgccaagcgctcccccaggcaatctgtacatgaccgaaagtactagcccgtggccatcttctgggtcaccacagagcccacctagcccaccggtgcagcagccaaaggatagtagctatccctactcccaatccgaccagtccatgaatcgtcacaacttcccctgctctgttcaccagtatgagtcctcgggcaccgtgaataatgatgacagtgacttactggacagccaggtccagtattccgcggagccccagctttatggcaacgcaacaagcgatcacccaaacaaccaggatcagagctctagccttccagaagaatgcgtgcccagtgacgaaagcaccccaccatctatcaaaaaaatcattcatgttctggaaaaagtacagtacctggaacaagaagtcgaagaattcgtcggtaagaagactgacaaagcgtactggcttctagaggaaatgctgaccaaagagctgctggaactggattctgtggaaaccggtggacaggactctgtgcgacaagcacgcaaagaggcagtgtgtaagatccaggctattttagagaagttagaaaagaagggtctttag

SEQ ID NO: 14136 - DNA, 3201 bp, synthetic construct
  source 1..3201: mol_type = other DNA; note = Synthetic coding sequence
atgcaaagcaccgacttaggcaataaagaatccggcaagatatggcaccgcaaacctagccccgccacccgggacggcatcatcgtgaacattattcacaacacctccgattaccatcccaaggtgctccgctttcttaatgtggcatttgacggaaccggggattgtcttatcgccggggaccatcaaggcaacatttacgtgttcgacctgcatggcaataggttcaacctagtgcagcggactgcgcaagcatgtactgccctcgccttcaacttgcgcagaaaatccgagttcctggtcgccctggccgactattctatcaaatgcttcgacaccgtcacgaaggagcttgtgagttggatgagagggcacgagagcagtgtcttttcgatcagcgtgcatgctagcggcaagtacgctatcacaacatcatcagacaccgctcaattatgggacctcgacacgtttcaaaggaaaagaaagcttaatatccggcagagcgtcggtatccagaaggtcttctttctgcctctgagcaataccatcctgtcatgctttaaggacaatagtatcttcgcgtgggagtgcgacaccctgttctgcaaataccaacttccagcaccccccgaatcaagcagcatattgtacaaggtctttgccgtaacacgtgacggccggatcttagccgcaggggggaaatcaaatcacctccacttgtggtgcctggaagccaggcaattattccgcattatccagatgccaaccaaggttagggcaatcagacacctggagttcctgcccgattccttcgatgccggaagcaaccaggtgctgggtgtgctctcacaggacggaattatgcgcttcatcaacatgcagacctgcaaactcctcttcgagatcggttcactcgacgagggaattagctcgtccgccatcagtcctcacggccggtacattgcaagtattatggagaatggcagcctgaacatctactccgtgcaagccctgacccaggagataaacaagccgccccctcctctcgtgaaagtaatcgaagacctacccaaaaacaagttgtcctcttcagacttgaagatgaaagtaaccagcggcagagtccagcaaccagcgaaatcccgcgaaagtaaaatgcaaacgagaatccttaagcaagaccttacaggggattttgagtcgaagaagaacgaactgcctgatgggttgaataagaaacggcttcagattcttctgaaggggtacggtgagtatcccacgaagtacagaatgttcatctggcggtcactgttgcagttgcccgaaaaccacaccgctttttctacgcttattgataaaggtacgcacgtcgcctttcttaatctgcagaaaaaatatccaatcaagtcgcgcaagctgttacgcgtgttacaacgaacgctgtcagctcttgcccactggtcagtgattttcagtgatacgccctacctgccacttcttgcttttcccttcgtgaaactatttcagaacaatcagctgatctgcttcgaggtcatcgcaactctaattatcaattggtgccagcactggtttgaatacttcccgaatcctccaattaatattctgtccatgattgaaaacgtgctcgcattccacgataaggaactgctgcagcattttatcgaccatgacatcacttcccagctatatgcctggcccctgttggaaacggtgttctctgaggtgctgacaagagaggagtggctgaagttgttcgataatatcttctctaatcatccaagctttttactgatgactgtggtggcttataatatttgcagtcggacaccgttactgagctgcaatctaaaagacgattttgagttcttcttccaccatagaaacaacctggatatcaatgtggtgatccgacaggtgtaccatcttatggagaccactcctacagatatccacccagatagtatgctgaatgtgttcgttgccctgactaagggacaataccccgttttcaaccagtatccaaaattcatcgtggattaccagacgcaagagcgggaaaggataagaaatgacgagctggactacctgcgagagaggcaaaccgtagaggatatgcaggcaaaagtggatcagcaaagggtggaggacgaggcctggtatcagaagcaggaactgctgagaaaagcagaggagacccgcagggagatgctcctccaagaagaggagaagatgattcagcagagacaaagactggccgccgtcaagagagagcttaaagtgaaggagatgcacttgcaagacgccgcgaggcgccggttcctgaaactgcaacaagaccagcaggagatggaattgcgaagattggatgacgaaattggacggaaggtgtacatgcgtgacagggaaatcgcagcgacggcacgtgatctcgaaatgcggcagctggagttagagagtcagaagagactgtacgagaaaaatctgacagagaatcaagaagctttggccaaagagatgcgagcggatgccgatgcgtatagacggaaggtggatctagaagaacatatgtttcataagttgattgaggcaggcgagacccagagtcagaaaacacagaaggtgataaaggagaatcttgctaaagccgagcaggcctgcctgaacactgattggcaaatccagagcttgcacaagcaaaaatgtgatgatctgcaacgcaataagtgttaccaggaagtggctaagctcctgagagagaatagacgcaaagagatagaaatcataaacgccatggtcgaggaagaggccaaaaaatggaaggaagctgagggcaaggaattccgattacgttccgcaaagaaggcctcagcactttctgacgcatccagaaagtggttcctgaaacaggaaatcaacgcagccgtagaacatgctgagaatccctgtcataaagaggagcctcgtttccaaaacgagcaagactcctcatgtctccctaggacctctcagcttaatgactctagcgaaatggatcctagtactcaaatttcactgaaccgacgtgccgtagagtgggatacaacgggacaaaatctgataaagaaagttagaaacctgagacaaaggctaaccgcccgggcacgacacaggtgtcaaacgccacacctactggcggcatag

SEQ ID NO: 14137 - DNA, 618 bp, synthetic construct
  source 1..618: mol_type = other DNA; note = Synthetic coding sequence
atggagggtaatggccccgctgccgtccactatcagcccgcctccccaccgcgcgacgcctgcgtgtatagctcatgttattgtgaggaaaatatttggaaattgtgtgagtatataaaaaaccatgaccaataccccctggaggaatgttacgccgtgttcatcagtaatgaaaggaagatgataccaatttggaagcaacaagctagaccaggcgacggtcctgtcatctgggactaccatgtggtcctgttacacgttagcagcggagggcagaatttcatttatgacctagacacggtgttgcccttcccttgcctgtttgatacctatgtggaggacgcatttaagagcgacgatgatatccatccgcagttcaggaggaaattcagagtgatcagagcagactcatatttgaagaactttgcatcagacagaagccacatgaaagacagctcggggaattggagggaaccaccaccaccatacccatgcatagagaccggggactccaaaatgaacttgaacgatttcatctccatggaccctaaagtgggctggggggccgtgtatacgcttagcgaatttacccataggttcgggtccaagaactgctag

SEQ ID NO: 14138 - DNA, 1974 bp, synthetic construct
  source 1..1974: mol_type = other DNA; note = Synthetic coding sequence
atgtcccaggtattatttcaccagctggtgcctttacaggttaaatgcaaagattgtgaagaaaggcgtgtgagtatcagaatgtcaatcgaactgcagagtgttagcaatcccgttcaccgcaaagacctggtgatccgactcactgatgacactgacccatttttcctgtacaatctcgtcataagtgaggaagactttcagagtctgaagtttcaacagggccttcttgtcgatttcctcgcttttcctcagaagttcattgaccttcttcagcaatgcacccaggagcacgcaaaggagattccacgattcctgctccagctggtgagcccagctgccatattggacaactcacccgcatttctcaacgttgtggaaaccaatcccttcaaacatctgacacatctctctctgaagctcctcccaggaaacgacgtggagatcaaaaagtttttggcgggatgtttgaaatgcagcaaagaggagaagctgtctttaatgcagtccctggacgacgctactaaacagctggattttacgaggaagactttggccgagaagaagcaggaattagataaacttagaaatgagtgggcgagccacactgctgcactgacgaataaacactctcaggaactaacgaatgaaaaagaaaaggccctccaggcccaggtccagtaccaacagcagcacgagcagcagaaaaaggaccttgagatcctgcatcagcagaacatccaccagctgcagaataggcttagtgagttggaggccgcaaacaaagatttaaccgaacgcaaatacaagggcgacagcaccattcgggaattaaaggcaaaactgagtggagtcgaggaagagctgcaacgtaccaaacaggaagtacttagcctgagacgtgagaattccactctagacgtggagtgccacgaaaaagaaaaacacgtaaaccaactgcaaacgaaagtagcggttcttgagcaggaaatcaaagacaaggaccaactggtgctccgtacaaaggaggccttcgacactattcaggagcagaaagttgtgttggaagagaacggggagaaaaatcaggttcagctgggaaaattggaagcaaccataaaaagtctgagcgctgaactcctgaaagccaacgaaatcatcaaaaagttgcaaggggacttaaagactttgatggggaaactgaaactgaagaacaccgttactatccagcaggagaaacttctggccgaaaaagaggaaaagctgcagaaggaacagaaggaactacaggacgtgggccagtcactgagaattaaggaacaggaagtttgcaagctacaggaacagttggaggcaacagtgaaaaaactggaagaatcaaagcagctgctcaaaaacaacgaaaaactgatcacctggcttaacaaggagctgaatgagaaccaattggtcagaaagcaggacgtcctggggccttctaccactccccccgcccatagtagtagcaataccatccgctcggggatttcccctaatctgaacgtcgtggatggccgcctaacataccctacctgcggcatcggctatcccgtctccagcgcctttgccttccagaatacatttccgcacagcattagtgccaaaaatacgtcacatcccgggtctggtacaaaagtccagtttaatctgcaatttactaaacccaatgcaagtctgggcgacgtccagtccggagccactatttctatgccatgtagtactgataaagagaatggggagaacgtcggacttgagagtaagtatctcaaaaagcgagaagacagtattccactgaggggcctgtctcagaaccttttttctaactccgaccaccagcgcgacgggacactgggtgcgttgcacacctcctccaaaccgacagccctgccaagtgcctcttccgcttatttccctggccagttgcctaacagctag

SEQ ID NO: 14139 - DNA, 237 bp, synthetic construct
  source 1..237: mol_type = other DNA; note = Synthetic coding sequence
atgcgctttatgatgatgcgagccgaaaatttcttcatcctccgccgaaagccagtcgagggctacgacataagtttcctaatcacgaattttcatacagaacagatgtacaagcataagctggttgactttgtcattcatttcatggaggagatcgacaaagagatctcagagatgaaacttagcgtaaacgccagagccaggattgttgctgaagaatttctcaagaatttttag

SEQ ID NO: 14140 - DNA, 933 bp, synthetic construct
  source 1..933: mol_type = other DNA; note = Synthetic coding sequence
atgcctctgctggtcgaagggaggcgcgttcgactgccccagtctgctggggacctcgtaagggcgcatcccccactggaggagcgggccagactcctccgcggacaaagcgtgcagcaggtgggtccgcagggtctgctttacgttcaacaacgggagctcgctgtaacaagcccaaaagacggtagcatctctattctggggtctgatgacgccaccacatgccacatagtggtgcttcgccataccggaaacggtgctacgtgtctgacccattgcgacggcaccgatacaaaagcggaggtgcctctaataatgaactctattaagtctttttccgatcatgctcaatgcggacgcttggaggtgcatcttgtaggagggttttccgatgacagacagctatctcagaaactgacccaccagctgctgagcgagtttgaccgccaggaagacgatattcatctggtgaccctgtgtgtcacggagctgaacgaccgggaggagaatgaaaatcacttccccgttatctacggcatcgctgtgaacattaaaacagccgagatctaccgtgcaagttttcaggatcgtgggcccgaggaacagctcagggccgcacggaccttggcaggagggcccatgatatccatctacgacgccgagacggaacagctaaggattggtccctattcctggacaccctttccccatgtggatttttggctgcatcaggatgataagcagattttggaaaacctgtcaaccagtcctttggctgagcctcctcatttcgtggaacacattcgatctacactcatgttcttgaagaagcacccttctccagcacataccctcttcagcggcaataaagcgctactgtacaagaagaatgaggatggcctgtgggaaaaaatctcatctcccggtagttag

SEQ ID NO: 14141 - DNA, 924 bp, synthetic construct
  source 1..924: mol_type = other DNA; note = Synthetic coding sequence
atgactgaaacaaccaagacgcacgtaatcctcctcgcctgtgggtctttcaatcccatcaccaaaggacacatccagatgttcgagcgggcacgggactatctacataaaacaggacgattcattgttattggaggtatcgtgtcccccgttcacgactcatacgggaaacaaggccttgtctcttcccggcatcgtctcatcatgtgtcagctggctgtgcagaattccgattggattcgggtggacccctgggagtgttatcaggatacttggcagacgacatgctctgtgctggagcaccaccgagatctgatgaaaagagtcactgggtgtatccttagtaacgtcaacaccccttccatgacccccgtcatcgggcagccccaaaacgaaaccccccaacccatttaccaaaactctaatgtcgctactaaacctaccgccgccaaaatcctgggaaaagtgggagaaagtctatccagaatctgttgtgtgcggccacccgtggaaaggttcacttttgtagatgagaacgccaaccttggaactgttatgcggtatgaagaaatcgaactacggattcttttactatgtgggtccgatttactggagtctttctgcattccaggtctgtggaatgaagcagacatggaggtaatagtgggagatttcgggatagtcgtcgtccccagagatgccgccgataccgaccgtatcatgaatcatagttctattctacgtaagtataaaaacaatatcatggttgtgaaagatgatatcaatcatcccatgagtgtggtcagttctactaaatcccggttggcactgcaacatggagacggacacgtcgttgactacctgtctcagcccgtaattgactatatactgaaatcccagctctatattaatgcatccggatag

SEQ ID NO: 14142 - DNA, 1476 bp, synthetic construct
  source 1..1476: mol_type = other DNA; note = Synthetic coding sequence
atggaagagggcaagatggacgaaaacgagtggggatatcatggagagggcaacaagagtttggttgtggcacatgcgcagcgatgtgtcgttctacggttcctgaagttcccaccgaaccggaaaaagacatctgaagagatattccaacacctccagaatatagttgacttcgggaaaaatgtcatgaaagagtttctgggggagaattatgtgcactatggagaggtggtccagcttccattggagtttgtaaaacagctctgcctgaaaatccaaagcgagagaccggaaagccgctgcgacaaggacttggacactttgtccggttatgcgatgtgcctgccaaaccttacaagactgcagacatatcgtttcgccgaacatagaccgattttatgcgtggagatcaaaccaaagtgtggctttattcccttcagctcagacgtgactcatgaaatgaagcataaggtttgtcggtactgcatgcatcaacatctcaaggtcgccactggcaaatggaagcagatctccaagtactgccctcttgatctgtattctggcaataagcagcgcatgcacttcgccctgaaatccttgctgcaggaggctcagaacaatctaaagattttcaaaaatggggagctcatctatggatgtaaagatgcaaggtcccctgtggccgattggtctgaactggctcaccatcttaagccattctttttcccatctaatggccttgcatccggtccccattgcactagggcagtgataagagagctggtccatgtgattacacgtgttctcctctctggaagcgacaaggggcgtgccggcacactttcacctgggctcggtccccaaggtcctcgagtgtgtgaagcttcacccttcagccggagcctcaggtgccaggggaagaacaccccagagcggtctggacttcctaagggctgcctattgtataagacattgcaggtacagatgttggacttgctcgacatagaaggactgtatccactctataaccgcgtggaacgatacctcgaggaatttccggaagagcgcaaaacgttacagattgatgggccatacgacgaggcgttctaccagaagctcctggacttaagcacagaggatgacgggaccgtcgcttttgccctcaccaaagtgcagcagtacagagttgcaatgacagccaaagactgttcaatcatgatcgctctgtctccctgtctgcaggacgcgtcttctgatcagcgtccagttgtgccttcatcaagatccagatttgccttctcagtgtccgtgttagacctggaccttaagccatatgaaagcataccacaccaatacaagctcgacgggaagatagtcaactactattccaagactgtccgtgccaaggacaacgccgtgatgtcaacccgttttaaggagagtgaagattgtacgcttgtgctccataaggtatag

SEQ ID NO: 14143 - DNA, 2640 bp, synthetic construct
  source 1..2640: mol_type = other DNA; note = Synthetic coding sequence
atgatgttctatagattgcttagtatagtcggaagacagagggcctcgcctgggtggcagaattggagttcagccaggaattccacatcggccgccgaagcccgctctatggccctgcctacccaagcccaggtggtaatatgtgggggaggcatcactggcacaagtgtggcctatcacctctccaaaatggggtggaaagacattgttctgttggagcagggtcggctggcagctgggtccactaggttttgcgctgggattttgtcgactgctagacacctcaccatcgaacagaaaatggccgattattctaataagctctattaccagctcgagcaggaaacagggatccaaacgggatacacacgtaccgggagcatctttctagctcagacccaggatagattgatttcacttaagcgcatcaatgctgggttaaacgttatcggaataccttccgagattattagccctaagaaggtggccgaacttcaccacctccttaatgtgcacgaccttgtcggcgccatgcacgttccagaggatgccgtggtaagtagcgcggacgtcgcgcttgctctggcctcagcagcttcacagaacggggtgcagatctatgaccgtacctccgtactacacgtcatggttaagaaagggcaggtcacaggagtggagaccgacaaaggccagattgagtgccagtactttgtcaactgcgccgggcagtgggcctacgaacttggactcagcaacgaggagcctgtttctatcccgctgcatgcctgtgagcacttctacctgctgacgcgacctctcgagacgcctctccagtcttccacccccacaattgtggacgccgatgggcgcatttatatccggaattggcagggcggaatactgtcagggggattcgagaagaatcccaagccaattttcacagaggggaaaaatcagctggaaatccagaacttgcaagaagactgggatcactttgagcccctactgagttcacttcttcggaggatgccagaactagaaactcttgaaatcatgaagcttgtgaactgtccggagacgttcacccccgacatgagatgcattatgggagaaagtcccgcggttcagggatactttgttttggccggtatgaacagcgccgggctcagttttggcggcggagcaggaaagtaccttgcagagtggatggtccatggttacccgagtgagaatgtgtgggaactggatttgaaacgctttggcgcactgcagtcatctcgcacctttcttaggcaccgtgtcatggaagtaatgcccctcatgtatgatctgaaagtgccacggtgggattttcaaacaggacgtcaacttaggacttctcccctctatgataggcttgatgcccagggggcccgatggatggagaagcatggttttgaaaggcccaaatacttcgtgccacctgacaaggacttgctggcactcgaacaatcaaaaaccttttataagcccgattggttcgatatagtagagtccgaggttaagtgttgcaaagaggccgtttgcgtgatagatatgtcttcctttactaagtttgaaatcacctcaaccggagatcaggcattagaggttctgcagtacctgttttccaatgacttagacgtgcctgttggccacatagtgcataccggcatgctgaatgagggcggtggctacgaaaatgattgtagcatcgctaggctcaacaagcgctcttttttcatgattagccctaccgatcagcaggtgcactgctgggcttggctcaaaaaacacatgccgaaggattccaacctactgctggaagacgtgacgtggaaatatactgctctgaatcttataggccctcgcgctgtcgatgtactctccgagttaagttatgccccaatgacgcctgatcactttcctagtttattctgtaaagagatgagtgttggatacgccaacggcatcagggtcatgtcaatgactcataccggagagcctgggtttatgctgtatatacccatcgaatacgcactgcatgtgtacaacgaggtgatgtcggtcggccagaaatatggaattagaaacgctgggtactatgcgcttcgatccctgcgaatcgagaaatttttcgccttctggggacaagacattaacaatttgaccacccctctcgagtgcggaagggagtcccgggtaaagctggagaaaggaatggacttcattggccgggatgcgttactgcaacagaagcagaatggagtttataaaaggttaacaatgtttatcttggacgatcacgactccgacctcgacctgtggccctggtggggcgagcccatctaccgcaacggccaatatgttgggaagaccactagttccgcctactcctacagccttgagaggcacgtgtgtctggggttcgtccataatttcagcgaggacactggggaagagcaggtggtaactgcggattttatcaatcgcggtgaatacgaaatcgacatcgccgggtacagatttcaagcaaaggctaagctttacccagtagcttctctgttcacccagaagcggcgtaaagatgacatggagctttctgatctccatggcaaatag

SEQ ID NO: 14144 - DNA, 1440 bp, synthetic construct
  source 1..1440: mol_type = other DNA; note = Synthetic coding sequence
atggcaaccgactcgtgggcactggcggtcgacgaacaggaggcagcagcagaatcactgtccaacttacacttgaaggaagagaagatcaagcctgacaccaatggtgccgtggtcaagacgaatgctaacgctgaaaaaacagacgaggaggaaaaagaagaccgcgcagcccagagtctgctaaacaagctgattaggtctaacctcgtagacaacacaaaccaggtggaggtgctccagcgggacccaaactcgccgctttacagcgtgaagtcatttgaagagttacgactgaagcctcaactcctgcagggggtctatgcgatgggcttcaacaggcccagtaaaatacaggagaacgctcttcctctcatgctggccgaaccacctcagaacttaattgctcagagtcaatccggaaccgggaaaacggcagccttcgtcctcgccatgttatcacaggtcgaacctgccaataagtaccctcagtgtctgtgcctatcaccgacctatgagttggcgctccagaccggtaaagtaattgaacagatgggcaagttctatcctgaattgaagttagcctacgccgtgcggggcaataagctagaaagagggcaaaaaatatccgagcagattgtgatcggcacgcctggcaccgtccttgattggtgcagcaagttgaagttcatcgaccccaagaagataaaagtgttcgtactggacgaagcggacgttatgatcgcgacacagggccaccaggatcaatccattagaattcaaaggatgctaccacgtaactgccagatgctgctgttcagcgcgacattcgaggatagtgtttggaaattcgcccagaaggtcgttcctgaccctaacgttatcaaactgaaaagagaggaggagacactggacaccataaagcaatattacgtgctatgctcctctcgcgacgagaaattccaggccctgtgcaacttgtatggcgcgataaccattgcgcaggccatgatcttttgtcacacgcgaaaaactgcctcttggctggcagcagaattgtccaaggagggccaccaggtggcactcctgtcaggggaaatgatggtggaacagcgtgccgcggttattgaacggtttcgcgaaggaaaagaaaaggtgctggtaaccactaacgtatgcgcaagagggattgatgtcgaacaggtatccgtcgtcatcaacttcgacttgccagtcgacaaggatggcaatcccgacaatgagacatacctccaccggattggcagaaccggaaggttcggcaagcggggcttggctgtgaacatggtcgattcaaaacatagcatgaatatcctcaaccgcattcaggaacacttcaataaaaagattgaacgcctcgacactgatgatcttgacgagattgaaaagatcgccaattag

SEQ ID NO: 14145 - DNA, 3255 bp, synthetic construct
  source 1..3255: mol_type = other DNA; note = Synthetic coding sequence
atggagcagcctaaaggcgtggattggacagttatcatactcacatgccagtataaggacagtgtccaagtgttccagcgcgagctcgaggtgcgtcaaaagagagagcaaatccctgcagggaccttactcctggctgtggaggatccagaaaaacgggttggctcaggcggcgcaaccctgaacgccttgttagtggcagctgaacacttgagcgcccgggccgggttcacggttgtcacctccgatgttttacattcagcatggatattgatactgcatatgggtagagacttcccttttgatgattgcggtcgcgcctttacctgtctacccgttgaaaaccctgaggctcctgtggaggcactcgtttgcaacctggattgcctgctagatatcatgacttatagactgggcccgggctcgcctccaggcgtatgggtgtgttctactgacatgttactgagcgtccctgccaaccccggtattagttgggatagtttcagaggagctagggtcatcgctttgccaggatcgcccgcctacgcgcagaatcacggagtttacctaacggacccccagggcctggtgctcgacatctattaccagggcacggaggctgagattcagagatgtgtacggcctgacggacgggtgcccctggtgtccggggtggtttttttttctgtggagacagctgagcggctattggccacacatgtgtctccacccttggatgcttgtacctacctggggctggatagcggagcccgtcccgttcagttgtcactgttttttgacatcttgcactgcatggccgagaacgtaaccagagaggacttcctcgtgggcaggccccccgagctgggacagggagatgccgacgtggccgggtacttacagtctgcaagagctcagctctggagggagctgcgagaccagcccttgacaatggcatatgtgtcttccggtagttactcatatatgacaagttcagcctcggaatttctcctgagtttaactcttcccggcgccccaggagctcagatcgtgcatagccaggtggaggagcagcagctccttgcggctggatcctctgtcgtgtcttgcctgcttgagggacctgtccaactgggaccaggatccgtgctccagcactgccacctacaggggccaatccacatcggtgcagggtgtctggtgactggtctcgacacggcccactcgaaggctttgcacggcagagagcttagagatcttgtgcttcagggccaccatacacggctacatggtagcccaggacacgcgtttaccctggtcgggaggttggactcttgggaacgtcagggtgctggcacttaccttaatgtgccgtggtccgaattctttaagcggaccggcgtccgcgcatgggacctgtgggatcctgaaacactgcccgcagagtactgcctgccatcagccagattgtttcctgtgctgcatccttcacgcgagttggggcctcaggatctgctgtggatgttggaccaccaggaagacggaggagaggcgctgcgggcatggcgtgcgagctggaggttgagctgggagcaattgcagccctgccttgatagagcagcaactcttgcttctaggcgtgatctgttttttaggcaggccctccataaagctcgccacgtgctggaagcccgtcaagacctgtctttaagacctctgatctgggccgctgtgagggaaggttgccccggtcccctgctggcgacactagatcaagtggcggccggggctggggatccgggcgttgcggcacgcgccctcgcctgtgtggctgatgtcctagggtgcatggccgaaggtagaggagggcttcggtctgggcctgcagctaatcctgaatggatgcgaccgttttcttacctcgaatgcggagatctggcagccggtgtggaggccctcgcccaggagagggacaagtggttgtcccgcccagctctcctcgtacgggccgcgcggcattacgagggagccggacaaatcctgataagacaagcagtgatgtccgcacagcactttgtgtccaccgaacaggtcgaactacccggtcccggccagtgggtagttgccgagtgtcccgcgcgcgtagatttttccggtggttggagcgatactccacctttagcatatgaactgggaggtgctgtgttaggtctggcagtgagagtggacgggagacgcccaataggtgccagggctcgacggatcccggaacccgagctctggctcgccgtgggacccaggcaggatgagatgactgttaagattgtttgtaggtgcctggcggacctccgagattattgccaaccccatgcacccggcgcactattaaaggctgctttcatttgtgcaggcattgtccacgtgcacagcgaactgcagctttcagaacaactcctgcgcacctttggcggcggttttgagctacacacttggtccgaactaccacacggttccggactggggacctcaagtatcctggcaggcacagcactggctgcgctgcagagagctgcagggcgtgtggttggcacagaggcacttatacacgcggtcctacacctggagcaagtcctaacaaccggtggcggatggcaagatcaggttggaggcctaatgcctggcatcaaggtcggcagatcccgcgcacaactgccactgaaagtggaggtggaagaagtgactgtgcccgaaggattcgttcagaaactgaatgaccaccttcttctggtgtacaccggcaaaacacgcctggcccgcaacttgttgcaggacgtgttacgatcttggtacgccaggctcccggcggtagtgcagaatgcccacagcctggtgcgccagacagaagaatgcgcagagggattccggcagggatcgttaccactgctgggacagtgtctgacaagctactgggagcagaaaaagttaatggcccctggatgcgagccacttactgtgaggaggatgatggacgtgctcgctccacacgtgcacggtcaaagtctggccggcgccggcggcgggggcttcctttacctcttaactaaagagcctcaacagaaggaagctctggaggctgtgctggcaaagaccgaaggcctgggaaactatagcatccacctggtagaggtggatacgcaaggccttagtttaaagctattggggactgaagcgagcacctgttgcccatttccatag

SEQ ID NO: 14146 - DNA, 2139 bp, synthetic construct
  source 1..2139: mol_type = other DNA; note = Synthetic coding sequence
atgcagcccgggagtgcgcctcctcccgggaggatggatccttcagctcctcagccacgcgccgaaaccagtgggaaggatatttggcaccctggcgagagatgtcttgcaccctcaccggataacggcaagttgtgcgaagcctctattaagtccataacggtcgacgaaaacgggaagtcattcgccgtagtgctgtacgcggattttcaggagagaaagatcccacttaaacagctgcaagaagtaaaatttgtgaaagattgtccacggaacctgatctttgacgacgaggatctcgaaaaaccttattttcctaacaggaagttcccgagctcctcagtagcatttaagctcagcgacaacggagattccattccatacacaatcaaccgttacctaagggactatcagagggaggggactcgattcctatatgggcactacattcatgggggtggctgcattttgggggatgacatggggctgggcaagacggtgcaggtgatcagctttttggctgctgtcttgcacaagaagggcacccgggaggacatcgagaataatatgcccgaatttcttctacggtcaatgaagaaagaacccctgtcctcaaccgccaagaaaatgtttctgatcgtggctccactttctgtgttgtataattggaaggatgagctggacacctggggctattttcgagtgaccgtcctgcatggtaatagaaaggataacgagctcattcgcgtcaaacagaggaagtgtgaaatcgctcttaccacatacgagactctgcgcctctgcctggacgagctgaactcccttgagtggtcagctgtaatcgtcgatgaggcccatcggatcaaaaatcctaaggcaagggttaccgaggtgatgaaggcactcaagtgtaatgtaagaatcggcctgacaggaacaatcctccagaacaatatgaaggagctttggtgtgtaatggattgggctgtcccaggtctgttgggctccggcacgtatttcaagaaacagttcagcgacccagtcgagcatggacagcgacacactgcaacgaaaagagaacttgcaaccgggcggaaagccatgcagaggcttgcaaagaaaatgagcggatggttcttacgacgaactaagacactgataaaagatcagttacccaagaaagaggatagaatggtgtactgttctctaacagactttcaaaaagccgtttatcagactgtgctggaaactgaggatgtcactcttattcttcagagcagcgagccctgcacctgccggagtggccaaaagagaaggaactgctgttataagacgaatagccacggcgaaacggttaagactctgtacctatcctatctgacagtactgcaaaaagtggccaatcatgtggcactgctccaggcggcttcgacttctaaacagcaagagacactgatcaagcgaatctgtgatcaggtgttctcccgcttccccgacttcgtccagaaatctaaggatgccgcatttgaaacactctccgaccctaagtactctggtaagatgaaagttctgcagcagctgctaaaccattgtcgcaagaatcgtgacaaggtcctcctgttctctttctcaacgaagctgctggacgttctccaacagtactgtatggcttctggactggattataggagactggatggaagtacaaaatctgaagagagactcaagatcgtgaaggaatttaattcaactcaggatgtcaacatttgcctagtttctactatggccggggggctgggactgaatttcgtgggcgccaacgtggtggtcctttttgacccaacctggaaccccgctaatgatttgcaggcaatcgaccgtgcctatcgaatcggccagtgtcgggatgttaaagttctcaggttaatatccctgggcacagttgaagaaatcatgtatctccgccaaatctataagcaacagctccattgtgtggtagtgggctctgagaacgctaagagatactttgaagcagtgcagggcagtaaagaacaccagggagagttgtttggcattcacaatctttttaaatttcgctcccagggaagctgcctgaccaaagatatccttgaagtatag

SEQ ID NO: 14147 - DNA, 1212 bp, synthetic construct
  source 1..1212: mol_type = other DNA; note = Synthetic coding sequence
atgaagcaaaggaaagggcagggatctgggggatcccgaggacgcaaaaaacgagggctgtctgatatctccccatcaacatctcttccacctttggtcgaggggcagttaaggtgcttcctcaagctcacagtcaatagagtaatctggaagatcgctaaacccccgacctgtgtgttagtgcgcgttcgatggtggggggaaacttctgacggcacacttttttgccctcgcgatgccctacaaacagaaccgaaagccgtaaggacaaccactcggtacgcgattcgatgcggccccaagcagtttacatcttatttaacagatatggctgtcctggttttggaggtaatcaccaagctggacggattgccaattggccgagtgcagataaacggcttagcccagctctcaccaactcatcagattaatggttttttcaccatcgtgagctcaacctctaaaaagcttggggagctccaggtatccctcgccctggagccactctcagagacatacgacagttaccaccccctgcctaccaccgacatgacagagaacgtcctactctctaaacagggttttagggagaatactgaaccttcatcaactcaattccaggtaccttcccgccctagggatatccacactatcaaaatcgacggaaaggaactggctgccaattcctctaggtccaccacgccacgggggaaagatcacgtatgttttgcggagaaccccgatacaataaaagattccagcttcgggttgcagcattccttgaactccggccagtccttggagtctgtgaccttgaagggtcgagcaccacgcaaacagatgtcactcctgaattccagcgaattccagccccagatccgtaccgtagcaaagtcacatagtgattcttgcattcttagcagtaataatttgcccactaaggatctgttatctgctctccttgaacaggggaacaaactgcggaatgctatggtgataagcgcaatgaagtccagcccagagacatctatgttactggaccaggtgcatcccctgctgatgaaaatcttgctggagcaccagcaccgtagcgagcctttcctgggtatcgggctgaaaactactctgaagattacctcctcactgcaactgcgcatccacttcggggatatgacacagaagctgatccccgagttatactcttgttactag

SEQ ID NO: 14148 - DNA, 3663 bp, synthetic construct
  source 1..3663: mol_type = other DNA; note = Synthetic coding sequence
atggggaagaagcagaagaataaatccgaagactcgaccaaggatgatatcgaccttgatgccctggctgccgagattgaaggcgccggtgccgccaaggaacaggagccacagaagagtaaggggaaaaaaaaaaaagagaagaagaaacaggattttgacgaagatgacatcttgaaagagttggaagaactttcgctcgaggcccagggtataaaagctgaccgagagaccgtagccgtcaagccgaccgaaaataatgaggaagaatttaccagcaaggacaaaaaaaaaaaggggcagaaggggaaaaaacagagcttcgacgacaatgattcagaagagctggaagataaggactccaagagtaaaaaaacagccaagcctaaggtcgagatgtatagcggatctgacgatgatgatgatttcaataaacttccaaagaaggctaagggaaaggctcagaaatcaaacaagaaatgggatggctccgaggaagacgaagacaactccaagaaaattaaggagcgcagcagaattaatagctctggggagtctggggatgagagtgatgaatttttgcagtctcgaaagggtcagaaaaagaatcaaaagaacaaaccaggcccaaacatcgaaagcggaaatgaggatgacgatgcctcattcaaaattaaaacagtcgcccaaaaaaaagccgaaaaaaaggagcgcgaacgaaaaaaaagggacgaggagaaggctaagttgcgcaagctgaaggagaaggaggagctggaaacgggcaagaaagatcagtctaagcagaaagagtcccagagaaagttcgaagaagagactgtcaagtccaaagtcaccgtcgacaccggggtgatccctgccagcgaagaaaaggcagagacccccaccgctgcagaagatgacaacgagggggacaaaaaaaaaaaggacaagaaaaagaagaagggagaaaaggaggaaaaggagaaggagaaaaaaaaaggaccctccaaggcaactgtaaaagccatgcaggaggccctggctaagcttaaagaggaagaggagcgccagaagagagaggaagaggagaggatcaagcggttggaggagctggaggctaagcgcaaagaggaggagcgcctcgagcaagagaagagggaaaggaagaaacagaaggagaaagagcgcaaagaacgcctcaaaaaagagggtaagctgcttacgaagtcacagagggaggccagagcccgtgctgaagctacacttaagttgctgcaggcccagggtgtggaggtgccctccaaagactctttaccaaaaaagcgtcccatctatgaggataagaaacgtaaaaaaataccccagcagctggaaagcaaggaagtgtctgagtcgatggaactatgcgctgccgttgaagtaatggagcagggagtgcctgagaaggaagaaaccccccccccagtggagcccgaggaggaggaagatacggaggacgcgggcctagacgattgggaagccatggcatccgatgaggaaactgagaaggtggagggaaacaaggtccatatcgaagtcaaggagaaccctgaagaagaggaagaggaggaagaggaggaggaagaagacgaggaatcggaggaagaggaggaggaggaaggggagagcgagggctccgaaggcgatgaggaagacgagaaggtgtctgacgaaaaggacagcggtaagacactggacaagaagccctccaaagagatgagctcagactcagagtacgattcagatgacgataggaccaaggaggagagggcttacgacaaggccaagcggaggattgagaaaaggcgactggagcattctaagaacgtcaacacagaaaaactgagggcgcccattatctgtgtcctgggacatgttgacactggtaaaacaaagatcctcgacaagctgcgacatacacatgtgcaagacggcgaggcgggtggaattacacagcagatcggggccaccaacgtgccgcttgaagctatcaacgagcagaccaagatgattaagaatttcgatagagaaaacgtgaggattcctggtatgctgatcattgatacgccaggccacgagtctttctccaatctgcggaaccgcggatcgagtctgtgtgatattgccattctggtggtggacatcatgcacggactcgaaccacagaccatcgagagcatcaatctgctaaagtcaaaaaagtgccccttcatcgtcgcactgaacaagattgaccgcctatacgactggaagaagtcccccgacagcgatgtcgctgcaactctcaagaaacagaagaagaataccaaagacgagttcgaggagcgcgcaaaagccatcatagtggagttcgcccaacagggcttgaacgccgcactgttctatgagaataaagatccaagaaccttcgtctctctggttcctactagcgctcacaccggtgacggcatggggagcttgatttacctgctcgtggagctgacccagactatgttgtccaagcggttggcccactgcgaggagttaagggctcaggtgatggaggtcaaagcgctgcccggcatgggaacaacgatcgacgtcatcctgataaatggtcgcttaaaggagggggacactattatcgtgcccggcgtcgaggggcctattgttactcagatccgaggactccttctgccgccacctatgaaggagctgcgcgtgaaaaatcaatacgagaagcacaaagaggtggaagctgctcagggggtcaagattctcggaaaagacctggaaaaaaccctggccgggctccctctccttgtagcctacaaagaggacgagattcctgtgctgaaggacgaactgatccacgagctaaaacagaccctgaacgctattaaattagaggagaagggagtctatgtgcaggcttcgacccttggctcactcgaggccttattggaatttttaaaaacgagcgaagtgccttatgctggaataaacattggaccagtccacaagaaggacgtgatgaaggcctccgttatgctcgaacacgatccgcaatacgccgttattctcgccttcgacgtgcgaattgagagggacgcccaggaaatggcagatagtctcggtgtcaggatctttagtgcggaaataatctatcatctattcgacgcattcaccaagtaccggcaggactataagaagcagaagcaagaagaattcaaacacattgctgtgttcccctgtaaaatcaaaattcttccccagtacatctttaattcccgagaccctattgtaatgggcgttacggtggaagctggacaggtcaaacaaggcacccctatgtgtgtgcccagtaagaatttcgtagatattgggatcgtcacgtctatcgaaattaaccacaagcaggtggacgtagcaaaaaaggggcaagaggtgtgcgtaaaaatagagccaattccaggcgagtcccctaagatgttcggccgccattttgaggccacagacattcttgtgagtaagatatcccgacaatccattgacgccctgaaagactggttccgcgacgagatgcaaaagtccgattggcaactgatagtggaactaaagaaggtattcgagatcatatag

SEQ ID NO: 14149 - DNA, 138 bp, synthetic construct
  source 1..138: mol_type = other DNA; note = Synthetic coding sequence
atgtcagacaaaccagatttgtcggaggtcgagaagtttgatcgcagcaagctgaagaagactaatactgaggagaagaacaccctccccagcaaagagactatacagcaggagaaggaatgcgtccagacatcatag

SEQ ID NO: 14150 - DNA, 1533 bp, synthetic construct
  source 1..1533: mol_type = other DNA; note = Synthetic coding sequence
atgccgggaggaggcgcaagcgccgctagcgggcggcttttgacagcggcggagcagaggggttctcgcgaggcagctgggagcgcttctcggtcaggatttggcgggagtggagggggacggggcggcgcctcggggcctgggagcggcagcggagggcctgggggacctgccggccggatgtctctgactcctaaagaactgtcgtccctcctcagcatcatcagcgaggaagcagggggcggcagcacatttgaaggcctaagcaccgcgttccatcactactttagcaaagccgatcacttccgcctggggtccgtgctagttatgctactgcaacagcctgatcttctcccaagcgccgcacagagactcacagcactttacctgctctgggaaatgtacaggacagaaccacttgcggccaatccctttgccgcttccttcgctcatctcctgaacccagcccccccagcccggggcgggcaggagcccgaccggcctccattatccgggtttttaccacccattactcccccagaaaaattttttctgtcacaactgatgcttgccccgccccgggagttattcaaaaagacaccgagacagattgcactgatggacgtagggaatatgggccagagcgtcgacatttcgggtctgcaactcgccctggctgagcggcagtcagaattacctacccagtccaaggcaagtttcccttcaattctttctgacccagaccccgattcttcaaacagcgggtttgactcatctgtagcgagccagattacagaagccctggtgagtggtcctaagccgcccattgaatctcactttagaccagagttcatacgccctccaccccccttgcacatttgtgaagacgaactcgcctggcttaaccctacggaaccagatcacgccatccagtgggataagagcatgtgtgtgaagaattcgactggtgtggaaattaaaagaattatggccaaagcttttaaaagccccctgtctagtcctcagcagacgcagctccttggggagctggagaaggatcccaagcttgtgtaccacatcggcctgaccccggctaagctgcccgatctggtggagaataatcctttggtggccatcgagatgctcctgaagttgatgcagtcctcacagatcacagagtatttcagtgtcttagtgaacatggacatgtctttgcactccatggaggtcgtaaaccgattgactacagctgtggacctccctccagaatttatccacttgtatatcagtaattgcatctctacctgtgagcagatcaaggacaaatatatgcagaaccggttagtgaggttagtctgcgtgttccttcagagcctgatcaggaacaagattatcaacgtgcaagacttgttcatcgaggtccaagctttttgtatcgagtttagtaggataagggaagccgccgggttgtttaggcttctaaagactctcgatactggcgagacgccatcggaaaccaaaatgtcaaaatag

SEQ ID NO: 14151 - DNA, 2184 bp, synthetic construct
  source 1..2184: mol_type = other DNA; note = Synthetic coding sequence
atgtctggcagaaagcgatctttcaccttcggcgcatatggtggagtggataaatcttttacttctcgtcggtctgtatggcgcagcgatggacaaaaccaacactttccacaggccctcgatttgagtagggtcaacctggtcccgtcctacactccatcattgtaccctaaaaatactgatcttttcgagatgattgagaagatgcagggctcacgcatggatgagcagcggtgcagtttcccacctccactgaagaccgaagaggactatattccatacccgagcgtacatgaggtgctgggtagagaagggcccttccctttgattctgttaccacagtttgggggatattggatcgaaggtacaaaccacgagatcacaagcatacccgagacagaaccactccaatctcccaccactaaggtcaaacttgagtgtaatcctactgctaggatttataggaagcatttcttgggtaaggagcatttcaattactactccctggacgccgcacttgggcacctggtgttctcactcaaatacgacgtgatcggcgatcaggagcatctccggctattgcttcggaccaagtgtagaacttatcacgatgttattcccattagctgtctgaccgaatttcccaacgtggtccagatggccaagttggtgtgtgaggacgtgaacgtcgataggttctaccctgtgctgtatcccaaggcctctcgcctgatcgtcaccttcgacgaacacgtaatttctaacaatttcaaattcggcgttatttatcagaaattaggacagaccagtgaggaggagctcttttctacaaatgaggaaagcccggcctttgtcgagttcctcgagttcctggggcagaaagtgaaattgcaggacttcaagggcttccggggcggactagatgtgactcacggccagaccggtaccgagtccgtgtactgtaacttccgtaacaaagaaattatgttccacgtgagtactaagttgccttacactgagggagatgcccagcagctgcagcggaagcgccacataggcaatgacatcgtagccgtcgtgttccaggacgagaatacaccatttgtgcccgacatgattgcctctaatttcctgcacgcctatgtggtggtgcaagctgagggggggggccctgacggacccctttacaaggtgtccgtgaccgcaagagacgatgtgccgttcttcggcccccctcttcctgatccggcagtcttccgcaaaggaccggagtttcaagagtttctgctcactaaactgatcaacgccgagtacgcttgttacaaggcggagaagttcgcaaagctggaggagcgcacccgggcagcccttcttgaaacattgtatgaggagttgcacatacactcccagtcaatgatgggcttgggcggagatgaagacaagatggagaacggctctggaggtggtgggttctttgagagtttcaaacgcgtgataagaagccggtcacaaagcatggacgctatggggctgtccaacaaaaaaccaaacactgtgtcgacctctcatagtggttctttcgcccccaataatcctgatttagctaaggcggcaggaatctctcttatcgtgccggggaaaagtcctacacgcaaaaaaagtggaccctttggcagccggcggtcgtccgcaattggtatcgagaacattcaagaagtacaggagaaacgggagtctcctcccgccggccaaaagacccccgactcaggacacgtctcacaagaaccaaagagcgaaaactccagcacccagagcagccccgaaatgcccaccactaagaatcgggcagagaccgctgcgcaacgggccgaagcactcaaggactttagccgttcatcctcaagtgcgtcttcctttgcctctgtggttgaggagaccgagggcgtggacggcgaggatactggcctggagtcagtcagttcctccggcacaccccacaaaagagattcctttatctactccacttggctggaggactccgtctctactacctccggcggatcatcccccgggcccagcagatctccccatcctgacgccggaaaattgggagaccctgcgtgcccagagatcaagatccagctggaggcatccgagcagcatatgccccagctgggatgttag

SEQ ID NO: 14152 - DNA, 873 bp, synthetic construct
  source 1..873: mol_type = other DNA; note = Synthetic coding sequence
atggttttgttacacgtgaaaagaggggatgagagccagttcctgctccaggctccagggtcgacagagctcgaagagcttacggtgcaggtggccagggtctataatggccggctcaaagttcagagactgtgttcggagatggaagagcttgctgagcacgggatctttttgcctccaaacatgcagggcctcactgatgatcaaatcgaggaactgaaactcaaagatgaatggggcgaaaagtgtgtgccttcgggaggggcagtcttcaaaaaggacgacatcggccgaaggaatgggcaggccccaaatgaaaaaatgaaacaggttttgaaaaaaactattgaagaagccaaggcaataatcagtaagaagcaagtcgaagccggtgtgtgtgtcacaatggagatggtaaaggacgcactagaccaattgagaggagcagttatgatcgtatatccaatgggactcccaccgtacgaccccattcggatggaatttgaaaataaggaggatctttcagggacacaggcgggactcaacgtcattaaggaagccgaggcacagctgtggtgggccgctaaggagcttagaaggacaaagaaactctccgattacgtcggaaagaatgagaagacaaaaattattgccaaaatccagcagaggggccaaggcgcaccagctcgagagccaattatctcatctgaggagcagaagcagcttatgctgtactaccacaggagacaagaggagctgaaacgactggaggaaaatgacgatgacgcatatctgaactccccctgggcagacaataccgccttgaagcgacacttccatggtgtgaaagatataaagtggcgaccgcgctag

SEQ ID NO: 14153 - DNA, 567 bp, synthetic construct
  source 1..567: mol_type = other DNA; note = Synthetic coding sequence
atggagcccccccgcggacctccagccaatggtgccgagccttcaagggccgtgggcaccgttaaagtttatctcccaaataaacagcggactgtggtgaccgtgagggacgggatgtctgtgtacgatagccttgataaggccctgaaggtgcggggcttgaaccaagactgttgtgtggtgtaccgactgataaagggaaggaaaacagtcacagcctgggataccgctatcgctccactcgacggagaagaactgattgtagaagtgctggaggacgtgcccctcaccatgcataacttcgtgcgcaagacctttttctcactggctttttgcgatttttgtctgaaattcttgttccatggctttcggtgccagacctgcggctataagttccatcaacattgctcatccaaggttcccactgtctgtgtcgacatgtctactaaccggcagcagttctaccacagtgtgcaggacttatcgggcggctcccggcaacatgaggcacccagcaataggcccctcaatgaactcctgacgccacagggtccgagttgtagatag

SEQ ID NO: 14154 - DNA, 2034 bp, synthetic construct
  source 1..2034: mol_type = other DNA; note = Synthetic coding sequence
atggacgatcccgactgcgatagcacttgggaggaagatgaggaggatgccgaagacgctgaggatgaggactgcgaagacggagaagccgccggtgcacgcgacgccgacgccggagatgaggatgaagaaagcgaagagccccgcgctgctagaccaagcagctttcagagtcggatgaccgggagccggaattggagggctaccagggacatgtgtcgctatcgacataactaccctgatctcgtagaacgggactgcaacggcgatacccccaacctgtccttttaccgcaatgagattcggttcctgccgaacggctgttttattgaagacattctacaaaactggacggacaattacgatctgctggaggataaccactcctacattcagtggttgtttcctttgcgggagcctggcgttaactggcatgccaaaccactgaccctacgggaagtcgaggtgttcaaatcttcccaggagatccaagaacggctcgtgagagcctatgagctgatgttgggattttacgggatcagattggaggacagaggcactggaacagttgggcgtgcccaaaactatcagaagagattccagaacctgaattggcggagccacaataatctgcgaatcacccggattttaaaatccctcggagagctcggtttggagcactttcaggccccgctagttcggttcttcctcgaagagacgctcgtgcggagagagctaccaggtgtccggcagtccgccttggactatttcatgtttgccgtcaggtgccgtcaccaaaggcggcaactagtgcactttgcctgggaacactttcggccacgctgtaagtttgtgtggggcccacaggacaagctgcgcaggtttaaaccctccagcctgccccatccacttgaagggagccgcaaagttgaagaggagggcagccccggggatcctgatcatgaggcatccactcaagggcggacctgtggaccagaacattctaaaggcgggggccgcgtggacgaggggccccagcctcggtctgttgagccacaagacgcaggtccactggaaagatcccagggtgacgaagctggtggacacggcgaagacagaccagagcctctgtcccccaaggagtcaaagaaacggaagttagagctgtctaggagggaacagcccccaaccgagcccgggccccagtcagcaagcgaggttgaaaagattgctctcaacctcgaggggtgtgctcttagtcagggctcgctgcggacaggaacacaggaagtcggcggccaggaccccggagaagctgtgcagccgtgcagacagccgctgggcgcgcgggtggccgataaagtgaggaaacgcaggaaggttgatgagggcgctggagactccgctgctgtcgcatcaggtggagcgcaaaccctcgctctggcagggtccccagctcctagtggacacccaaaggcaggccatagcgagaacggtgttgaggaggacaccgagggccgcaccggtccaaaggagggaacgcctggcagtccctctgaaacacctggccccagtcccgcgggacctgctggagacgagcccgctgagtctccatctgagacacctgggccacggcctgcaggccccgcaggtgatgagccagccgaatcaccatcggaaacccctgggccccgccctgctggaccagcaggagatgagcccgccgaatctccaagcgagaccccaggcccgtcaccggccgggccaacaagggatgaaccggccgaaagcccatcagagacaccagggccaaggccagccgggcccgccggggacgagccagccgaatccccctccgaaacccccggccctcgccccgcagggcccgcaggtgatgagcctgctgaatctccatcagaaaccccgggtccttcccccgctggtcccacacgtgacgagccagccaaggctggtgaagctgcggaactccaggacgctgaagttgagagctcagccaaaagcgggaaaccgtag

SEQ ID NO: 14155 - DNA, 735 bp, synthetic construct
  source 1..735: mol_type = other DNA; note = Synthetic coding sequence
atgggactcgagctgttcctcgacctagtctcccaaccatccagggccgtttacatctttgcaaaaaaaaacggcatcccacttgagctgaggaccgtcgacttagtgaaagggcagcacaaatcaaaagaattccttcagattaacagcctgggcaagcttcctacactgaaggatggcgattttatcctgacggagtcttctgccatcttaatctacttatcctgtaagtaccagacacctgatcattggtacccttccgatctgcaggcccgcgctcgggtacacgagtacctcggttggcacgccgactgcatccgcgggacattcggcattcccttatgggttcaagtattaggcccgctcatcggtgtgcaagtaccggaggaaaaggttgagcggaaccgcaccgcgatggatcaagcactgcagtggctggaagacaagtttctgggggataggccctttctcgctggtcaacaggtcacactggctgacttgatggctttagaggaactgatgcagccagttgccctggggtacgagctgtttgaggggcgcccaaggcttgcagcgtggagagggcgggtcgaagcctttctgggggcagagctatgtcaggaagcacattccatcatcctctctattctagagcaagccgccaaaaaaacgctgccgactccaagccccgaggcctaccaggcaatgcttttgcggatagccaggattccttag

SEQ ID NO: 14156 - DNA, 531 bp, synthetic construct
  source 1..531: mol_type = other DNA; note = Synthetic coding sequence
atggctgcaagcaccgacatggccggcctagaagaatcttttcgtaagttcgctattcacggtgacccaaaagcctcggggcaggaaatgaatggcaagaactgggccaagctgtgcaaggattgtaaggtggctgatgggaagtccgtgactgggacagacgtggatattgtgttctccaaggtcaaaggaaagagtgcccgcgtcatcaattacgaggagttcaaaaaagcactcgaagagttggccaccaaacgcttcaaaggcaaaagcaaggaagaagccttcgacgccatttgccagctggtcgcaggcaaggagccggcaaatgtgggcgtgacaaaggcaaagacagggggcgccgtcgatagattgacagacacgtcacgctacactggctcacacaaggagaggtttgacgaatcgggaaagggaaaggggatcgccgggcggcaggacattttggacgatagtgggtatgtttctgcgtacaagaatgctgggacctatgatgcaaaggtcaagaagtag

SEQ ID NO: 14157 - DNA, 930 bp, synthetic construct
  source 1..930: mol_type = other DNA; note = Synthetic coding sequence
atgtccgatctggggtcagaagaacttgaagaagagggagagaatgacataggtgagtacgagggagggaggaatgaggcgggcgagcggcacggtcgagggcgagcacgcctgcccaacggcgatacctatgaggggtcctacgagtttggcaagcgacatggccaagggatttataaattcaagaacggcgctagatacatcggcgaatacgttcgcaacaaaaagcacgggcagggaactttcatctacccagatgggtctcgatatgagggggaatgggccaatgacctgagacatggccatggagtgtattattatattaataatgatacttacaccggagaatggttcgcccaccagcggcatgggcagggtacgtatctctatgccgagactggctcaaaatatgtcgggacctgggtcaacggtcagcaagaaggcactgccgagctcatacacctcaaccaccgttaccaaggaaagttcctcaataaaaatcccgtcgggcccggaaaatacgtcttcgacgtgggttgtgaacagcacggcgagtatcggctcacagatatggagcgcggcgaggaggaggaagaagaagagctagttaccgtggtgccaaagtggaaggcaacccagattaccgagctagccttatggacccctaccctcccaaagaagcctaccagcacagatggccccggccaggacgctccaggtgctgaaagtgccggagaacctggggaggaggcccaggctttactagaggggtttgagggcgaaatggatatgagaccgggagacgaggatgcagatgttttgcgggaagagtctagggaatacgatcaagaagaattccgttacgatatggacgaaggcaatataaatagtgaagaggaggagacaagacagagtgatctgcaagattag

SEQ ID NO: 14158 - DNA, 5943 bp, synthetic construct
  source 1..5943: mol_type = other DNA; note = Synthetic coding sequence
atgaaccccaccaacccgttttccggacaacagccctcggcatttagcgccagttcgtcaaacgtgggaacgctgccttccaagccaccgtttcggtttggccagccaagcctgtttgggcagaactctacacttagtgggaagagctccggattcagtcaggtcagtagcttcccggcgagcagcggggttagccactcctcaagtgtgcaaacgctcggttttacccagactagctccgtcgggccattcagcggcctagaacatacctccacctttgttgctaccagcgggccctcttctagctccgtcctgggcaacaccggattctcctttaaaagccctacctcagtcggggctttcccctccacttccgccttcggacaggaggccggagaaatcgtaaattctggctttggaaagactgagttctcctttaaacctctggaaaacgccgtatttaagcccatactcggggccgagtctgagcccgaaaaaacccaatcacagatcgcatcaggatttttcacattcagccacccaatcagcagcgctcctggtggtctggcacctttcagttttcctcaggtgacaagctccagtgccacaacatccaatttcacgttttctaagcctgtttcctcaaacaactccctctctgcgttcactcctgccttgtcaaaccaaaacgttgaggaggagaagcgcgggcccaagagcatcttcggctcaagtaacaatagtttctcttccttccccgtgtcctcagcggtcttgggagaacccttccaagctagtaaagcaggcgtgcgacagggttgcgaagaagccgtgagccaagtcgagcccctgccttccctcatgaaaggattaaagcgcaaagaagaccaggaccgaagtccacgacgccacggccacgaacctgcagaagacagcgatccgcttagccgtggtgaccatcctccggataaaagaccagttcgtctgaataggccacgaggcgggaccctattcgggagaaccatccaagacgtttttaagtctaataaagaggtcggtcggctagggaacaaagaagctaaaaaagagacaggtttcgtcgaatcagcagagagcgaccacatggccattcctggtggtaaccagtcggtcctcgctccaagtagaatacctggagtgaacaaagaggaggagacagagtcacgggaaaagaaagaagactctttacgcggaactccagcacgccaatcaaaccggagcgaatccactgacagtcttggaggcctgtctccaagcgaggtgactgcgatccagtgcaagaacattcctgactatctgaacgaccgtacaatactggagaaccactttggaaagatcgcaaaggtccaacggatattcacgaggcggtccaaaaaactggccgtggtgcatttcttcgaccatgctagcgcagccttggccagaaaaaaagggaagtccctgcacaaagacatggccatcttttggcaccggaaaaaaataagccctaacaagaagcccttctctctcaaggagaagaagcccggcgacggcgaggtatctcctagtaccgaggatgctccattccagcatagcccacttggaaaggcagccggtaggaccggagcatcaagcctgttaaataagagttctcctgtgaagaagccctccctattaaaggcccaccagtttgagggtgattcgttcgattcagcgtccgaaggctctgaaggacttggaccctgcgtattaagcctgtctacactcattgggacagtcgcagaaacaagtaaggagaaataccgccttcttgaccaaagggaccggatcatgagacaggcccgggttaagaggaccgatctggacaaagcccggacctttgtaggaacatgtttggacatgtgtccagaaaaagagaggtacatgcgagagactcgatcccagttatccgttttcgaggtcgtaccgggcactgatcaggtcgaccatgccgctgcagtgaaggagtactcacgtagctccgctgaccaggaggagcccctgccacacgagctgagaccactcccggtccttagcagaactatggattacctggtaactcaaattatggaccaaaaagaaggctccctacgggattggtacgatttcgtttggaatagaacccgcgggatacggaaagacattactcaacaacatctgtgcgatccgctgaccgtgagcctgatcgaaaagtgcaccaggtttcatatccattgcgctcacttcatgtgcgaggagcctatgagcagtttcgatgcaaaaattaataatgaaaatatgactaaatgtctacagtccctcaaggaaatgtaccaggacctgaggaataagggagtgttctgcgctagcgaagctgagttccagggatataacgtcctcctgagcctgaataagggcgatattttgagggaggtccaacagttccatcccgcggtgaggaactcctctgaggtgaaattcgccgtgcaggcattcgcggcacttaactctaataactttgtgaggtttttcaagctggtgcaatcagcctcctacctgaatgcatgcttactacattgctattttagccagattcgaaaggacgctttacgggcacttaatttcgcgtacactgtatctacacagagaagcactatttttccactcgacggtgtggtgcgtatgctgctctttagggactgcgaggaggcaactgactttcttacgtgccatggcttaacagtaagcgatggctgtgtagagctaaacaggagtgccttcctcgagcctgaaggtttgtctaaaaccagaaaatcagtcttcattaccagaaagctaactgtgtccgtgggagagattgtgaacggaggacccctgcctcccgtccctcgccacacacccgtgtgctcattcaatagccagaataagtatatcggggagagtctcgctgctgagttgcccgtgtcaacacagcgcccgggtagcgatactgtgggaggcggtcggggggaagagtgcggagtagagcccgacgcccccttgtccagtctgccccagagcctgcccgcccccgcgcctagcccggtgcctctacctcctgtcttagccctgacgcctagcgtggcaccttctctgtttcagctgtctgtgcagcctgaacccccacccccagaaccagtcccaatgtactcagacgaagatctggcccaagttgtagacgagctcatacaagaggccttacaacgtgactgcgaggaagtagggagcgctggggcagcctacgctgccgcagcactgggagtgtcaaatgctgcaatggaggacctgctcactgccgcaacaacaggaatcctccgacatatcgcggcggaagaggtatccaaagagagggaacgacgcgaacaagaaaggcagagagccgaagaagagcgcctcaagcaggagagggaactggttctgtctgagttatcccaaggcctagctgtagagctgatggagagggtgatgatggaatttgtgcgcgagacatgcagccaggaattaaagaacgctgttgaaaccgatcagcgcgtacgcgtagccagatgctgtgaagacgtgtgcgcccacttagtggatctctttctggtggaggagatcttccagaccgcgaaggagaccctccaggagctccagtgcttctgcaaatatctgcagcgatggagggaagcagtgacggctcgaaaaaagctccggcgacagatgagggccttcccggccgccccctgctgcgtggatgtcagtgatagactgcgggccctggccccatcagccgagtgtcctatagcagaggaaaatctggcccgcggcctgttggatcttgggcatgctgggcgactggggattagctgtacgcgcttgagaagactgcgcaataaaaccgctcatcagatgaaagtccagcatttttatcaacagctcctgagcgacgttgcctgggccagtttagacttacccagtctggtggccgagcatctccccggtcgccaggaacacgtcttttggaagctggtgctggtcctccccgacgttgaggagcagagccctgagtcatgcgggcgaatcctggccaactggcttaaagtgaagttcatgggtgacgaggggtcagtagacgataccagctcagacgcaggcgggattcagacactatccctttttaatagcctctcttcaaagggggaccaaatgatatctgtcaatgtctgcatcaaagtggctcatggagccctgtcagacggagctatagacgccgttgaaacccagaaagacctgctgggggcaagtggtttaatgcttctgctacctcctaagatgaaaagtgaagacatggccgaagaagatgtgtactggctgtcggcactcctgcagcttaagcagctcctgcaggccaagcctttccagcccgcgctgcctttagtggtactggtaccctcgcctggaggagacgctgtggaaaaagaggtagaggatgggctgatgctccaggacctggtgagcgcaaaactgataagcgactataccgtgacagaaattcctgataccattaacgatctccagggctccaccaaggtgctgcaagccgttcaatggctggtgtcccactgtcctcattccttggacctatgctgccagactctcatacagtacgtggaagatggcatcggccacgagttttccgggaggttcttccatgaccgacgggaaaggcgccttggcggcctcgcgtcccaggagcccggggcgatcatcgaacttttcaattcagtcctgcaattcttagcctctgtcgtgtcctccgaacagctgtgtgacttgtcctggccagtgaccgagttcgctgaagcaggtgggtcaagacttttgccccacctgcattggaatgcgcctgagcatctcgcctggctcaaacaagccgtcctcgggttccagctgccacagatggacctgcccccactgggggctccctggttacctgtttgtagtatggtagtacagtacgcttctcagattcctagttcaaggcagacccagcctgtactacagagccaagtggagaacttgcttcacaggacttactgcaggtggaaaagcaagtccccatcacccgtgcacggtgctggcccctccgtcatggagatcccgtgggatgacttgatagcgctgtgcattaaccataagctgagggattggacccctcccagattgcccgtcacgtctgaagcgctctccgaagacgggcagatctgtgtttatttcttcaagaacgatctgaaaaaatacgatgtgccactgagttgggaacaagcacgcctccagacccagaaagagcttcagctgcgagaaggtcggctggccattaagccctttcatccaagcgcaaacaatttcccaatccccctgctgcatatgcatagaaattggaaaaggtccaccgaatgcgctcaggaggggagaatccctagtacggaagatctcatgcggggagctagcgctgaagagctactggcccagtgcctgtccagcagcttgctgcttgagaaggaagaaaataagaggttcgaagatcaactccagcagtggctgtccgaggattcaggcgcattcacggaccttacttcacttccactctacctgccacaaacattggtgtctctcagccacaccatcgaacccgtcatgaagacaagcgttacaacatccccccagtcggatatgatgcgggagcagctgcagctgtctgaggccacaggtacctgcttaggagagcgcctgaaacatctcgaaagactgattcgttcatctagggaagaagaagttgcaagtgagctgcacctctcagccctgctggatatggtcgacatctag

SEQ ID NO: 14159 - DNA, 3147 bp, synthetic construct
  source 1..3147: mol_type = other DNA; note = Synthetic coding sequence
atgtcagatgtcaaccccccttccgacactccgatccccttttcaagttcctcaacccactccagccatatccctccctggacattttcatgctaccccgggtcaccctgtgagaacggggttatgctttacatgcgcaatgtttcgcatgaggagctgcagaggtttaaacagctgctgcttacagagctgtccacaggtaccatgccaatcacatgggaccaggtggaaacggcttcatgggccgaagtcgtgcatctactcattgagcgctttcctggacgtagggcctgggacgtcacttccaacatttttgccattatgaactgcgacaaaatgtgcgttgtggtccgtcgagagatcaatgcaatcctgccgacactggagccagaggacttgaatgtaggggaaacccaagtgaatctcgaagaaggcgagtcgggcaagatcaggcggtataaatctaatgtcatggagaaatttttcccaatctgggacattaccacctggccaggcaaccagcgggactttttttaccagggcgtgcaccggcacgaggaatacttgccatgcttactgctgcccaaacgaccacagggtcgccagccgaaaacggtagccatccaaggagctcctggcatcggcaagaccatcttagccaagaaggtcatgttcgagtgggcacgcaataagttttatgcccacaaaaggtggtgtgcattctactttcactgccaagaggtgaatcaaacaacggaccagtcattttctgaactcatcgagcagaagtggcctggaagtcaggacctagtgagtaaaatcatgtctaaaccagaccaactcctattgctgctggatggctttgaagaattgacctcgactttgatcgatcggcttgaggatctgtcagaagactggaggcagaaactgcccgggtcagtactgctctccagcctgctgagcaagaccatgctgcctgaagccactctgctcatcatgatcagatttacctcctggcaaacgtgcaaaccattgctgaaatgcccctccctggtgacccttcccggatttaacacaatggagaaaatcaagtactttcagatgtacttcggacacactgaggagggagaccaagttttgtcttttgcaatggagaatactatactcttttctatgtgcagagtgcccgtggtctgttggatggtctgctctggcctgaagcagcagatggagcgcggtaacaacctgacccagtcatgccccaacgctacatctgtgtttgtccgctatatttctagcctattccccacgagggcagaaaatttcagtcgtaagattcatcaggcacaactggagggcctctgtcatcttgccgctgattccatgtggcacaggaagtgggtcctgggcaaagaagatcttgaagaggcaaaactggatcaaacaggggtaaccgcattcctcggcatgagcatattgcgccggattgcaggggaggaagaccactacgtcttcaccctcgtgacgttccaggagttcttcgcagctcttttttatgtactgtgcttccctcagagactgaaaaatttccacgttctctcccatgtgaacatacaacggctgattgcctccccccgtggttctaaatcgtacctcagccacatgggcctatttttgttcggcttcctgaacgaagcatgtgcctcagcggtggaacagagctttcaatgcaaggtctcattcggaaataagcggaaactgttgaaagtcatcccccttcttcacaagtgtgatcccccttcccctggcagcggcgttccccagctgttttattgcctgcacgaaatccgcgaagaggccttcgtgagtcaggccctgaatgactaccataaggtggtgctgaggatcggtaacaataaagaggttcaggttagcgctttttgtctcaagcgctgccaatacctacatgaggtcgagttgaccgtgactttgaatttcatgaacgtatggaaactgtcctccagcagccacccagggtccgaggcgcccgagagcaacggcttgcaccgatggtggcaggacctttgcagcgtcttcgcaaccaacgacaagctcgaggttctcacgatgacaaactccgtgctgggccctccattcttgaaagccttggccgcggcactgcgacatccacagtgcaaacttcaaaagttgctcctgcgcagggtaaacagtactatgctcaatcaggacctgattggggtgttaaccgggaatcagcaccttagataccttgagatccagcacgtggaggttgaaagcaaggctgtgaagcttttgtgcagagtcctgcgctcaccgcggtgccgccttcagtgcctgcggctggaagactgcctggctactccaaggatctggacggatctcggtaacaacctgcagggcaatggccacctaaaaaccctgatcctaaggaaaaacagcctggagaactgtggggcctactatctcagcgtcgcgcagctggagcgcttgagcattgagaactgcaacctcacgcagctgacctgtgaaagtctggcatcgtgcctcaggcagagtaaaatgctcacacaccttagcctggctgaaaacgcccttaaggatgaaggcgccaagcacatatggaacgccctaccacatctccgctgccctctacagagattagtgttgaggaaatgtgacctaacctttaactgttgtcaggatatgattagcgcgctgtgtaagaacaaaaccctcaagtccctcgatctgtctttcaatagtctaaaggatgacggagtgatcctactgtgcgaagcactaaaaaatcccgattgcactcttcagatcttggagctggaaaactgtctctttaccagtatatgttgtcaggcaatggcctctatgctcagaaaaaatcagcatctgcgccatctcgacctgagcaagaacgccattggagtgtacgggatcctcaccttatgtgaggcattctcttcccagaaaaaaagagaagaggtgatcttttgcattcctgcttggactaggattacaagtttcagtcctacgcctcatccccccgacttcacaggcaaaagtgactgcctgagccagattaacccatag

SEQ ID NO: 14160 - DNA, 3792 bp, synthetic construct
  source 1..3792: mol_type = other DNA; note = Synthetic coding sequence
atgcctgctagaatcgggtattacgagatagatcgaacaatcggcaaggggaattttgccgtcgtgaaacgggctacccatctggtgacaaaagccaaagtagctatcaagattatagacaaaacccagctggatgaagaaaacttgaagaaaatttttagggaggtgcagatcatgaagatgctctgccatccccatataatcagactgtatcaggttatggaaactgagaggatgatctatctcgttactgagtacgcgtcaggcggcgaaatcttcgatcatctggtggctcacgggaggatggccgagaaggaggccaggagaaagtttaaacagattgtgacagcagtatatttttgtcattgccggaatattgtgcaccgcgatctaaaggctgagaacctgctgctggatgctaacctgaacatcaagatcgctgatttcggatttagtaacctgttcacaccaggtcagctgctgaagacctggtgcggaagccctccgtacgcggcaccagaattgtttgaaggaaaggaatacgacggaccaaaagtggacatatggtctcttggagttgtgctgtacgtcctggtgtgcggagccctgccatttgacggatcaactctacaaaacctccgggcaagagtcttgtctggaaagttccgaattcctttctttatgagtaccgagtgcgagcatctaatccggcacatgcttgtactggatcccaataaacggctttcaatggaacagatctgcaagcataagtggatgaaactaggagatgcagaccccaatttcgataggttaatagcagaatgccaacagttaaaagaggagcgtcaggtcgaccctctgaatgaggatgtgttactagccatggaggatatgggcctagataaggaacaaaccctgcagtctttgcgtagcgatgcctacgatcactattccgccatttactcgctgctttgcgacaggcacaagcggcataagactctgcgtctgggggcattgccttcaatgccacgggcgctggccttccaagctcccgttaacattcaggccgagcaggccggcacagctatgaacatttctgttcctcaggtgcagctgattaacccagagaaccagatcgtggaacccgacggcaccttaaacctcgacagcgatgaaggtgaggagcctagccctgaggccctggtgagatatttgtcaatgaggcggcatacagttggagtagcggatccacggactgaggtgatggaggacttgcagaagctcctgccaggcttcccgggcgttaaccctcaggctccatttctgcaggttgcacccaatgtgaacttcatgcataatctgttgcccatgcagaaccttcagccaacaggccagttggagtataaggaacagtctctattgcagcctccgacgctgcaattgcttaatggtatgggacctttgggccggagggcctcagacgggggggctaacattcaacttcatgcccagcaactgcttaaaaggcctaggggccctagtccgcttgtcacgatgactcctgctgtgcctgccgtaacacccgtcgacgaggagagttccgacggagagcccgatcaggaggcagtgcagtcttctacatataaagatagtaataccctgcatctccctactgagcggtttagcccggtgcggagattctccgatggggccgcttccatccaggctttcaaggctcacctggagaaaatggggaataacagctccattaaacagctgcagcaggagtgcgaacagctccaaaaaatgtacggcggtcaaattgatgagcggacactggaaaaaacgcaacaacagcatatgctgtatcagcaggaacagcatcatcagattctgcagcaacaaatccaggattcgatatgtcctcctcagccaagccctccactccaagccgcatgcgagaaccagcccgccctgctgacccatcaactgcagcggctcaggattcagccgagcagtccacctcccaaccatcctaacaaccatctatttagacaaccctctaacagcccaccacctatgagtagcgctatgatccagccccacggagctgcctcatccagccagtttcagggactgccatcccggtcagctatctttcagcaacaacctgagaactgttcaagtcccccaaacgtagcactcacttgtctggggatgcaacagccggcacagtcacagcaggtcaccattcaagtccaggaacccgtggacatgctgtctaacatgcccggaaccgcggcagggagcagcggccgcgggatctccatctcgccatcagcaggacagatgcagatgcagcaccgtactaacctcatggccaccttgagttacggccataggcccctgagtaagcaactgtctgctgattccgccgaggcccatagcttgaatgttaacagattctcacccgcaaattacgatcaggctcacctccatccacacttattctctgatcagtctcgaggctctccgtcttcctatagtccgagcacgggggttggtttcagtccaacccaggcactgaaggtcccgcccctcgaccagttcccaacattcccgccaagtgcacatcaacagcccccacattacactactagtgccctgcagcaagcgctactgtctcctacccccccggattacactcgacaccaacaggtcccccatatcctccaagggctgcttagccccagacattccctgacaggacattccgatatccgcctgcctccgacagagttcgcccaactgattaagcggcagcagcaacagcgccagcagcagcagcaacagcagcagcagcaggaataccaggagctattcaggcacatgaatcagggcgatgcagggagtcttgctcctagcctgggcgggcagtcaatgaccgaaagacaagccctttcatatcagaatgctgactcataccaccatcacacgagtcctcaacatctccttcagatccgggcacaggaatgtgtgagtcaagcgagttctcctacccctccgcatggatatgctcatcagccggcgttgatgcactctgagagtatggaggaggattgcagttgtgaaggggccaaagacggcttccaggactccaaatcctcctcaacactcactaagggctgccacgactccccgcttcttctgtccacaggaggaccgggagatcctgagtcacttctcggcacagtgagccacgcccaggaactggggattcatccgtacggccaccagcccaccgccgctttctctaagaataaggttccctcacgggagcccgtgattggcaattgtatggatcggagtagccccggccaagctgtggaactgcctgaccacaacggcctgggctacccagccagaccttcagtacatgagcatcataggccgagagctctccagcgtcaccacaccatccagaatagtgacgacgcctatgttcagcttgataacctacccggaatgagtctggttgctgggaaagctctctcatccgccagaatgtcagacgccgttctctctcagtcgtcactaatgggctcccagcagttccaggatggggaaaacgaggagtgcggggccagtttgggcggtcatgagcacccagacctatctgatggatctcagcacctaaactcctcatgctatcctagtacgtgtatcacagacatattgctatcctacaaacacccagaagtctctttcagtatggagcaagcaggggtctag

SEQ ID NO: 14161 - DNA, 4395 bp, synthetic construct
  source 1..4395: mol_type = other DNA; note = Synthetic coding sequence
atgtaccagccagaagatgataataacagtgatgtaacgtccgacgatgatatgacaaggaataggagggaatctagtcctccccattccgtccactcattcagtggggaccgtgattgggaccggcgcggccggagccgcgacatggagccccgggacaggtggagccacacacgcaatccaagatccaggatgcccccgcgggatttgtccttgcccgtagtggccaagacctccttcgagatggaccgtgaggatgatagagactcccgcgcatatgaatctcggtcacaggacgccgagagctaccaaaacgtggttgacctggccgaagataggaagccacataatacaatccaagacaatatggaaaattacaggaagctgctgtccttaggagtccaactcgcagaggacgatggccacagtcacatgacacaggggcacagctcacggtcgaagagaagcgcctatccctccacgtcccgtggtctgaaaaccatgccagaggctaaaaagtcaactcataggcggggaatctgtgaagacgagagctcccacggggtcataatggagaaattcatcaaagacgtcagcaggtcatctaaaagcggacgagctagggagagctctgaccgatctcagcgcttccccaggatgagcgatgataactggaaagatattagtctaaacaagcgggaatcagtgatccagcagagggtgtacgaaggtaacgctttcagaggtgggtttcggttcaacagtaccctggtcagcagaaaaagagtgctggaaagaaaacggcggtaccactttgacaccgacggaaaaggatcgattcatgaccaaaagggctgtcctagaaaaaagccgtttgaatgcggttcggaaatgcgtaaagccatgagcgtcagttccctgagttcgctcagtagcccctctttcaccgaaagtcaaccaatcgatttcggggcgatgccatacgtttgcgatgagtgcggccgctcctttagtgtgatatccgagttcgtggagcatcagattatgcataccagagagaacctctacgaatacggcgagtctttcattcactcagtggccgtgtctgaggtacagaaatcccaggtgggcgggaaacgttttgaatgcaaggattgtggagaaaccttcaataagagcgctgctctggctgagcatagaaagattcacgctcgtgggtacctcgtggagtgtaaaaaccaggagtgcgaagaggccttcatgccctctcctacatttagtgagttacagaagatttacggcaaggacaaattctatgagtgcagggtatgtaaggaaaccttcctgcactcaagtgctctcatcgaacaccaaaaaatccacttcggtgacgacaaggataatgagcgggaacatgagcgcgagcgggagcgggagaggggcgagacctttagaccaagccctgcactgaatgaattccagaagatgtacggcaaggaaaaaatgtacgagtgtaaagtctgcggggagacattcttgcattcaagttctctcaaggaacaccagaagatacacacccgtggtaatcccttcgagaacaagggcaaggtttgcgaggagactttcatccccggtcagagccttaaacgtcgtcagaagacatacaataaagagaaactgtgcgattttacggacgggcgtgacgcctttatgcagtcctctgagctgtctgagcaccagaaaattcactcacggaagaacctgttcgagggtcgcggctatgaaaaatcagtgatacactccggacctttcaccgagagccagaagagccacactatcactcggcctctggagagtgatgaggatgagaaagctttcactatctccagtaatccgtatgagaatcaaaaaatcccaacaaaggagaacgtgtacgaagcaaagtcgtacgagcgaagcgtgattcacagtctagcctcggtggaggctcagaaatcacatagtgtggcaggcccgtcaaaacctaaggtgatggctgagtcgaccatccagtcctttgacgcaatcaaccaccagagggtgcgggccggcggcaatacctctgagggccgggagtactcccgaagcgtcatccattctctggtagcttccaagcctccccggtctcacaatgggaacgagcttgttgaatcaaatgaaaaaggcgagtcaagcatttatattagcgacttgaatgacaagcgacagaagatccctgctcgggagaatccctgtgaagggggtagcaaaaatagaaactatgaagattctgtcattcaatctgtgttccgcgcgaagccccaaaagagtgttcctggtgaaggatccggtgaatttaaaaaggatggtgagttctcagttcctagcagtaacgtgcgcgagtaccagaaggcgagggccaagaagaagtatatcgaacatcggagcaatgagacaagcgtaattcactctctgccatttggggagcagacgttccgccctaggggaatgctttatgagtgtcaggagtgtggagaatgttttgctcatagcagcgatttgaccgagcatcagaagatccacgacagggaaaagccaagtggcagtaggaattacgaatggagcgtcatcagatcacttgcgcctaccgatccgcaaacctcttacgcacaggaacagtatgcaaaagagcaggcccgtaacaaatgtaaggacttcagacagtttttcgcaacctcagaggatcttaacacaaatcagaaaatctatgaccaggagaaaagccacggggaggagtcacagggtgaaaacaccgatggcgaagaaacccactcagaggaaactcacggccaggagactatcgaagatcccgtgatccagggatccgatatggaggatccccagaaagatgaccccgacgacaaaatttacgagtgtgaggattgtggacttgggtttgtcgaccttacagacctgacggatcatcagaaagtccattctaggaagtgcctcgtcgatagtcgcgagtacacccactctgttatacatacccattccatatctgagtaccagcgggattatactggcgagcaactgtatgaatgccccaagtgtggagagtcgttcatccattccagcttcctcttcgaacatcagaggatccatgaacaagaccagctgtacagcatgaaaggctgtgacgatggctttattgcactgttacctatgaagccacggagaaatcgtgccgccgaaagaaaccccgccctcgctggaagtgcaattaggtgtctactttgcggacaaggcttcattcactccagcgcgttgaatgagcatatgcgactgcaccgggaagacgatttgttagagcagtctcaaatggccgaggaggcaatcattcctgggctggcactcaccgagtttcagcgcagtcaaaccgaagaaaggttgtttgagtgtgctgtgtgtggagagtccttcgtgaatcccgctgaactggctgaccatgtcaccgttcacaaaaatgagccttacgagtatgggagtagctacactcataccagctttctgacagaacccctgaaaggggccatccccttctatgaatgcaaagattgtggcaagtcgtttattcactccaccgtcctcactaaacataaggagcttcatcttgaggaagaggaagaggatgaggccgcagccgcggctgccgccgccgctcaggaggtggaggctaatgtccacgttccccaggtggtgttgcggatccagggattgaacgtggaggcagccgaaccggaagtggaggctgcagaacctgaggtagaagccgccgaacctgaggttgaagccgcagaaccaaacggcgaggccgaagggcctgacggcgaagccgccgagccaattggggaagccggccaacctaacggtgaagccgagcaacccaatggagacgctgacgagcctgatggagccgggatagaagaccccgaagagcgcgctgaggaaccagagggcaaagcagaggaacccgaaggagacgccgacgagccagacggcgttggtatagaggacccagaggaaggagaggaccaggaaattcaggtggaagagccgtattacgactgccacgaatgcactgagactttcacgtcaagcactgctttctctgaacatctgaagactcacgcgagtatgattattttcgagccggccaatgcctttggtgaatgttccggctacatcgagcgcgcttctacttccaccgggggtgctaaccaagctgatgaaaagtacttcaagtgtgatgtctgcgggcaattgtttaacgaccgtcttagcttggctcgccatcaaaatacccacacagggtag

SEQ ID NO: 14162 - DNA, 1302 bp, synthetic construct
  source 1..1302: mol_type = other DNA; note = Synthetic coding sequence
atggcagaagcccaatcaggaacggggcagctgcaagaacagaaaaagggtctgctcatagccgtgtccgtttccgtggacaagatcatttcacacttcggtgcagctcgaaatttggttcagaaagctcagctgggggactctcggctttctcctgatgtcggccatttggtcctgacgacactctgtcccgccctgcacgccctggtagccgacggcctcaagccttttcggaaagatctgatcactggtcagcggagatcctctccttggagcgtcgttgaagcgtcagtaaaacctggaagttctacccggagcctgggaactctgtattcacaagtctccaggctggcccctctgtcgagttcgcgctcccgctttcacgccttcattctgggactcttaaacacaaagcaactagagctgtggttttccagcctgcaggaagatgccgggctcttgagtctactgtatcttccaacagggttcttcagccttgcacggggcggttgcccctctctatctactgagttgttgctgctgcttcagccccttagcgttctgacattccacttggaccttctattcgaacaccaccatcacctccccctggggccaccacaagcacccgccccacccggtccgccgcctgccttgcaacagactatgcaggctatgttacatttcggcggccgcctggctcagagtctacgggggacgtcaaaggaagccgccagtgaccccagcgatagcccaaaccttcccacaccaggctcctggtgggaacagctgacgcaggcaagcagagtgtacgcaagcggcggcactgaaggatttcctctcagccgctgggctccgggacgccacgggaccgccgcagaggagggcgcgcaagaaaggcctctgcctactgacgaaatggccccaggcagagggctctggttaggccggctctttggggttcctggaggaccggcagaaaacgagaatggggcactgaagagccgcagaccctcctcttggctcccgcctacagtttctgttctggccctggtaaaaagaggcgcccctccagaaatgccttcgcctcaggagcttgaggcttctgctcctcgcatggtgcaaacacacagagcggttcgcgccctctgtgatcacacagcagcgcggcctgaccagctaagttttcgccggggcgaagtactacgtgttatcaccaccgtcgatgaggactggttgaggtgcgggcgggatggcatggaaggcctagtgcccgtagggtacacatcccttgtgctttag

SEQ ID NO: 14163 - DNA, 1584 bp, synthetic construct
  source 1..1584: mol_type = other DNA; note = Synthetic coding sequence
atggcccaaacactgcagatggagattcctaattttggcaacagcatcctggagtgcttgaacgaacaacggctacagggtttgtattgtgatgtaagtgtagttgtaaagggacatgccttcaaagctcaccgggcggtccttgccgcctcttcctcatatttcagggatctgtttaacaatagtcggagtgcggtggtggagctgccagcagccgtgcagccccagtctttccaacaaattctgtctttttgctacaccgggcgcttgtctatgaacgttggagatcagttccttctcatgtacactgctggattcctgcagatccaagaaatcatggagaaagggactgagttctttctaaaagtttcttccccctcgtgtgactcgcagggactgcatgccgaggaggcgccatcttctgagccacagagtcccgtggctcagacgtccggatggccagcttgttccacacctcttcctttggtttctcgggtaaagacagagcagcaagaaagtgatagcgtgcagtgcatgcccgttgctaaaagattgtgggacagtggtcagaaggaggccggaggcggaggaaacggcagtagaaaaatggccaaattctctacgcctgacctggccgctaaccggccccatcagcctccaccaccccagcaggcacccgtggttgccgcagcacaacctgctgtggccgctggggccggccaaccggccgggggagtggccgccgctgggggggtggtatcaggcccgtctacgtcagagagaacctccccaggaacatcgtcagcatatacaagcgattctcctggatcataccataacgaagaggacgaggaagaggatggaggtgaagagggcatggacgagcagtacaggcagatctgtaatatgtacactatgtactccatgatgaatgtaggccagaccgccgaaaaagttgaggccctgccagaacaggtggctccagaatctaggaatcgtatcagagtacgtcaggacctggcttcactgccagccgagctcatcaaccaaatcggcaatcgatgccatcctaagctttatgatgagggagatccatcagaaaagctcgaactcgtcactggcactaacgtctatataacgcgcgcgcagctgatgaattgtcacgtgtctgccgggacaaggcacaaggtactcctgcgtaggctgcttgccagttttttcgaccgtaacactctggctaacagttgtggcacggggattcgttcatcaacaaatgatcccaggaggaaacctttggactcccgtgtgttacatgccgtgaaatattactgccagaactttgcacctaactttaaggaatcagagatgaatgccattgcggcagacatgtgtactaacgctcggagggtcgtcagaaagagttggatgcccaaggtcaaagttctgaaggcagaggacgatgcttacaccacttttatatctgaaacaggaaaaatcgagcccgatatgatgggcgtggagcacgggttcgagactgctagccacgagggagaagctggccccagtgcagaggcacttcagtag

SEQ ID NO: 14164 - DNA, 672 bp, synthetic construct
  source 1..672: mol_type = other DNA; note = Synthetic coding sequence
atggaggtacagaaggaagcacagaggatcatgacactgagcgtgtggaaaatgtaccactcaaggatgcaaagggggggtctaagattgcataggtccctgcagctcagcctggtgatgcgctctgcaagagagctctatttgagcgctaaggtggaggcattagagcctgaagtgagcctgcccgccgctctgccatcggaccctagactacacccaccgagagaggccgaatcaacagcagagacagctacacccgacggagaacacccatttcctgagccaatggacactcaggaggctccaaccgcagaggaaacgtccgcctgttgtgccccacgtcccgcaaaggtttcccgtaagcgcagatccagctcattgtccgatggcggggacgctgggctggttccatcgaagaaagcacgcctggaggaaaaggaagaagaagagggggcatccagcgaggtggctgacaggcttcaaccccccccagctcaggctgagggcgcctttcctaacttggcaagggtgctacagcgcaggttctccggattactgaattgctccccagccgcgcctccaaccgcccctcccgcctgtgaagccaagccggcctgtaggccggcagacagtatgcttaatgttctggtacgcgccgtggtggccttctag

SEQ ID NO: 14165 - DNA, 1500 bp, synthetic construct
  source 1..1500: mol_type = other DNA; note = Synthetic coding sequence
atgcgggtcctggtgccccccgccgagcgatctcaggacacccgcgtgggagctccagcctggagagaggccgctcaggctatggctcgcaccgcccacatcctaacagaccgctgcggccaggaagccgtcacaatgtggcagccaaaagacagcgtactcgatcctaacgtggcccatcatctgggcagggccgcctatatccagccctggagattcagggtggagatgattaagggaggagggacactcgagaaacccccaccaggtgagggtgtcacgctgtggaagggaaagatgaaaccacccgcttggtatgcgcggctgcctctgccactccacagaaaagcccgcgcacttcagaccacagaggttgtgcacgcacatgccaggggcgccaggctcacggctgccaggctgggtcgtgctcaacaccagattaatggaagagtacgtcagctcttgagacagagggaggtgacggatcacaggttgagcgaggtgagaaagggcctgctaattaatcaacagtcagtgaaacttagggggtaccggccgaaaagcgagaaggtgcccgacaaggcagactcgatgctcacatgggaaaaagaagaactcaagagcatgaagcgtaaaatggagcgggacatggaaaagtcagaagtcctacttaaaacgttggcttcttgcagggatactctgaacttctgttttaaggaaaggcttcaggccgtggacctgatgaatcagccactggataaggtgctcgagcaggcccgacggcattcatgggttaatctcagtagggcccctacccctcggacgcagggccaaaagactcctcccccagatcccgtcggtacgtataacccagcatgcgccctggccttgaacgaagcgaaaagactcttggtagagtccaaagacaccctcgtcgaaatggccaaaaatgaagttgacgtgagggaacaacagctgcaaatctctgaccgggtttgcgccagcctggcacagaaagcctcggagacactcgaacttaaagaaaggctgaacatgactctcggcctgatgcgtggtacaattctgaggtgcaccaaatacaatcaggagctgtacacaactcacggactgatcaaaggcccattgtctaaagtgcacctggaaactgccgaaaaactggaccgccccctggtgcgcatgtatcagagacacgtcggtacacaacttcccgaggctgcacgcctagcacagggcaccgataagcttcaatgtcatatcacctatctcgaaaagaacctggacgaactgctggccacacacaaaaacctttcttggggcttgaactgtaaaaatattggtcacgaagtcgacgggaatgtggtgagactccggctgagacaacgtcagccgcacgtctgttacgaacaggcccagcgactcgtgaaggattgggatcctaggaccccaccacctagaagtaaatcctctgccgatccatag

SEQ ID NO: 14166 - DNA, 1827 bp, synthetic construct
  source 1..1827: mol_type = other DNA; note = Synthetic coding sequence
atggagatggagtcagcagctgctagcacacgctttcaccagccacacatggagagaaaaatgtctgctatggcctgtgagatctttaacgaactaagactcgagggcaagctgtgcgacgtggtcataaaggttaatggcttcgagttcagcgcccacaaaaacatcttatgttcatgctcctcctatttccgggcactgttcacatcaggctggaataatactgagaagaaagtctacaacatccctgggatttcccctgacatgatgaaattaataattgagtacgcatacaccaggaccgttcctataacaccggacaacgttgaaaaattgctggccgctgcagatcaattcaatatcatgggaattgtgcgcggctgttgtgaattcctcaaaagcgaactgtgcctagacaattgtattggtatctgtaagtttacagactactattattgccccgagctgcggcagaaggcttacatgtttattctgcataatttcgaagaaatggtcaaggtatctgccgagtttttggagttatctgtcactgaactgaaggacatcatagagaaagacgaactgaacgttaagcaggaggacgctgtctttgaagccatcttgaaatggatttcacatgaccctcagaatcggaaacagcacatatccatcttactgcctaaagtaagacttgccttaatgcacgccgagtactttatgaataacgtcaagatgaatgactatgtcaaggatagtgaagagtgcaagccagtgatcattaacgcgttaaaggccatgtacgacctgaacatgaacgggcctagcaacagcgactttacaaatccactgactcgccccagacttccatacgccattttgtttgctataggtggctggagcggcggctcccctacaaacgctatcgaagcatacgatgccagggcagaccgatgggtcaatgtgacgtgcgaggaagaaagcccacgcgcatatcacggagctgcctaccttaaaggctacgtgtacatcattggtggatttgactccgtcgattactttaacagtgtgaagcggtttgatcccgtgaagaaaacctggcatcaggtcgccccaatgcattcccgacgttgctatgtttcagttacagtccttgggaatttcatatacgctatgggcgggttcgatgggtacgttcggctgaataccgccgagagatatgagcccgaaactaatcagtggactctgattgcacccatgcatgagcagcggagcgacgccagcgccacaacactgtacggaaaggtttatatctgtggaggcttcaatggcaacgaatgcctgtttaccgccgaagtgtataacactgagtccaatcagtggactgtaatcgctccaatgagaagccgcagaagtggaattggcgtcatagcctatggcgagcacgtgtacgcggtcggcgggttcgacggcgcaaacaggctccgcagtgccgaggcatactccccagttgctaacacatggagaaccattccaacaatgtttaacccgcgcagtaatttcggtatcgaagttgtggacgatctcctgttcgttgtaggtggctttaacggtttcactacaacctttaatgtggagtgctacgacgagaagacggatgagtggtatgacgctcacgatatgtccatataccgttccgcactcagctgttgcgtagtacctggcctggctaacgtggaagagtatgccgctaggagggataactttcccggtctggccctgcgagatgaggtgaagtacagtgcatccacgagtacactgcctgtttag

SEQ ID NO: 14167 - DNA, 942 bp, synthetic construct
  source 1..942: mol_type = other DNA; note = Synthetic coding sequence
atggctgcccttaccgacctttccttcatgtaccggtggtttaaaaactgcaacctggtcggcaacctgtctgagaaatatgtcttcatcaccggatgtgactctggctttggaaatctgctggctaagcagctcgtagacagaggaatgcaggtcttggccgcgtgcttcacagaggaaggcagtcagaagttgcagcgcgacactagctaccgcctgcagaccacactactcgacgttaccaagtcagagtccataaaggctgcagcacagtgggtgcgtgacaaagtcggggaacaaggcttgtgggccctagtgaacaacgccggagttgggctccctagtgggcctaatgagtggctgacaaaggatgatttcgtgaaagtgatcaacgttaatctcgtgggcttaattgaggtcactttgcacatgttgcccatggtgaagagggccagaggccgggttgtaaacatgagctcttcagggggacgggttgccgtgattggcggaggctattgcgtcagcaagtttggtgtggaagcttttagcgattcgatccgaagggaactgtactacttcggcgtcaaggtttgcattattgagcctggaaattacaggaccgccatcctcggaaaggagaatctggaatccagaatgcgtaagctgtgggagcgcctccctcaggagactagggactcatatggcgaggattacttcagaatctatacggacaagctgaaaaacataatgcaggtcgcagagcctagagtcagggacgtgattaactcgatggaacacgcaatagtgtcacgctcgcctcggattagatacaacccagggttggatgccaagctgctgtacattcctctggccaagctgccgactcccgttaccgattttattctctccagatacctgccgaggcccgccgacagcgtatag

SEQ ID NO: 14168 - DNA, 1461 bp, synthetic construct
  source 1..1461: mol_type = other DNA; note = Synthetic coding sequence
atgacctgtggaagttattgcggcggtcgcgcatttagttgtatctcagcttgcggtccaagaccgggtcgttgctgtatcaccgcagccccttaccgggggatctcttgttatcgagggctgactggcggctttgggtcccacagtgtgtgtggggggttcagggcgggcagctgtggacgctcttttgggtatcgctcggggggcgtttgcgggccgtcccccccttgcatcacaacagtgagcgtcaacgagtccctgttaacaccacttaatctcgagattgacccgaacgcccagtgcgtgaaacaggaagagaaagagcagattaagtctcttaacagtaggttcgcagcgtttattgataaggtcaggtttctggagcagcagaacaagcttctggagaccaagcttcaattttatcagaatcgcgagtgctgtcaatcaaatctcgaacctctgttcgaagggtacatcgaaactctaagacgggaggcagaatgtgtcgaggctgacagcgggagactggcgagcgagctgaaccatgtacaagaggtgctcgagggttacaaaaagaagtatgaagaagaggtgtctctgcgcgcaactgctgagaatgaatttgtcgctctgaaaaaggacgtggattgcgcatacctacggaagagcgatctggaggccaacgtcgaagctctgattcaggagatcgatttcctgcgacggctgtatgaagaggagatccgggtgttacagtcccacattagcgatacctccgtggtggttaaactggataattctcgcgatctgaatatggactgtatcatcgcagagattaaagcccaatacgatgacattgtgacaaggagccgtgccgaagccgaaagttggtacagaagcaaatgcgaggaaatgaaagcgactgtgattcggcatggagagacacttcgacgtactaaagaggagataaatgagctgaaccgcatgatccagagacttacagcggaggtggagaatgctaaatgccagaactccaagcttgaggccgccgttgcacagtccgagcaacagggcgaggccgcactgtcagatgcaaggtgtaaactcgctgaactagagggagccctccaaaaagccaaacaagacatggcctgtctgatccgggaatatcaggaagtaatgaattccaaactgggtttggacatcgagatagccacatacaggaggctcctggagggcgaggagcagcgcctgtgtgaaggggttggatcggtgaatgtgtgcgtgtccagcagtcgcggaggggtggtctgtggtgacctatgcgcctctacaactgcccccgttgttagcacacgcgtgtcctcagttccgagcaatagcaacgtcgtggtgggtacaaccaatgcttgtgctccttctgctcgggtcggtgtctgtggcggctcctgtaaaagatgctag

SEQ ID NO: 14169 - DNA, 939 bp, synthetic construct
  source 1..939: mol_type = other DNA; note = Synthetic coding sequence
atggccgagctcaccgctctggaatcgctcattgagatggggtttccaagagggcgtgcggaaaaggctctggccctcaccggtaaccagggtatcgaggctgcaatggattggttaatggagcatgaggacgatccagacgtcgatgagcccctcgaaacacctctcggccacatcctcgggcgggaacccacctcaagtgaacagggggggctggaaggatcaggctctgccgccggcgaagggaaaccagctctaagtgaggaggaaaggcaggagcagacgaagaggatgctggagctggtggctcagaaacagcgcgagcgcgaggaaagagaggagagagaggccctggagcgcgagcgacagaggagacggcagggccaggagttgtcggctgctcggcagcgacttcaggaagacgagatgcgacgggcggctgaggagagacggcgtgaaaaggccgaagaacttgccgcccgccagagagtgcgggaaaaaatcgagcgagacaaagctgagagggccaaaaaatatggaggctctgttggctcacagccaccccccgtggcacccgagcctggcccggtcccatcaagccccagccaggagcccccgactaaacgtgaatatgaccaatgccggatccaagtgcgacttccagatgggacatccctgacccaaaccttccgggcaagggaacagcttgcagccgtgcgcctgtacgtagagctgcatcgcggagaggagctgggcggcggacaagaccctgtccagttgttgtccggctttcctcgaagagcgttctccgaggctgatatggagagaccactccaagaactaggcatggccgcccgccttgaaacccgaaccaggaattgggggtcacgcgaggcttgcctgggaaagggcgggatgcagagagaaggcgccttgtag

SEQ ID NO: 14170 - DNA, 405 bp, synthetic construct
  source 1..405: mol_type = other DNA; note = Synthetic coding sequence
atgcccgccgatctgtcagggacttggacactcctgtccagtgataatttcgagggatatatgctggccctaggaatcgattttgccacccgcaagatcgctaaattgcttaagcctcagaaggtgattgagcagaatggcgactcctttaccatccacactaactctagccttcggaattacttcgtgaaattcaaggtcggggaggagtttgatgaggacaatcgggggctggataacaggaagtgcaagagtctcgtgatctgggacaatgacagattgacctgcattcagaaaggagaaaaaaagaataggggatggacacactggattgagggagataagttgcacctggaaatgttttgcgaagggcaagtgtgcaagcaaaccttccaaagagcctag

SEQ ID NO: 14171 - DNA, 1383 bp, synthetic construct
  source 1..1383: mol_type = other DNA; note = Synthetic coding sequence
atggctggctacctgtctgagagtgactttgtgatggtggaggaagggttttcaaccagggacctgctgaaggagctcactttaggggcctcgcaggcaactactgatgaagtagctgccttcttcgtggctgacctgggagccatcgttcggaaacacttctgtttccttaaatgtctgccccgggtccgacccttttacgcagtgaagtgcaactcatctccaggggtgctaaaggtgctggcccagcttggcctcggctttagttgtgcaaacaaagctgaaatggaacttgtgcagcacatcgggatccccgcatctaagatcatttgcgcaaacccatgtaaacagatagctcagattaagtatgcagcgaagcatggtatccagcttctatcctttgataatgagatggagctcgcaaaggtggtaaagagccatccgtctgccaagatggtgttgtgtattgctacagatgattcacattctctcagctgtttaagtttgaaattcggggtgagcctgaaaagctgccgacacctgctggagaatgcaaagaagcatcacgttgaggtcgtaggggtttcttttcacataggcagtggttgtccagatcctcaggcctatgcccaatctatcgccgacgcgcgcctcgtgttcgaaatgggcacggagctagggcacaagatgcacgtgctcgacctcgggggcggctttccggggaccgagggcgccaaggtcaggtttgaagaaatcgcctctgttataaacagcgcgctcgacttatactttcctgaaggctgcggcgtagacattttcgccgagctggggcgctattacgtgacatccgcctttacagtggcagtgtccatcattgccaagaaggaagtgctgctagatcagcctggaagggaagaagaaaacggatccacaagtaagacaattgtgtatcatctagacgaaggcgtgtacgggatcttcaatagtgtcctgtttgataatatttgccccacccctatcctccagaaaaagccctccactgaacagcctctgtatagcagcagcctatggggccccgctgtggacgggtgtgactgcgtcgcggagggactctggctgccacagcttcatgttggtgactggctggtgtttgataacatgggagcatatacagttggaatggggtcaccgttctggggaacacaggcctgtcacatcacatacgccatgtcccgcgtggcttgggaggccctgcgtcggcaactgatggctgcggagcaggaggacgatgtcgagggcgtgtgtaagcccctgtcatgtggctgggaaataacggacacactgtgtgttggaccagtgtttacccctgcttcgatcatgtag

SEQ ID NO: 14172 - DNA, 1209 bp, synthetic construct
  source 1..1209: mol_type = other DNA; note = Synthetic coding sequence
gggggaccacgagggagcggtagcgctgcggagaccatgccagaaatcagggtgacaccgcttggcgcaggtcaggacgtgggccgttcatgcattctggtatcaattgctggaaaaaatgtgatgctggattgcggcatgcatatgggttttaatgacgatagacggttccctgacttcagctacattacacaaaacgggaggctcaccgacttcttggattgtgtgataattagtcatttccacctcgatcactgcggggcactcccctacttctccgaaatggtcgggtacgatggacccatttatatgactcaccccacccaggctatatgcccaatcctgctcgaggattaccggaagatcgctgtggacaagaaaggagaggccaacttcttcaccagtcagatgattaaggactgcatgaatttactggagacattctgggagcgaatgaacctgaaggtaccaatatactttagcactggcctcactgagaaggcaaaccactattataaactgttcattccatggactaatcagaagatcaggaagacattcgtacagaggaacatgtttgaattcaaacacataaaggctttcgatagagcttttgccgacaaccccggacctatggtcgtcttcgctacccccggaatgttgcatgccggacagtcccttcagatcttccgcaaatgggccgggaatgaaaagaacatggtaattatgcctgggtattgcgtccagggaactgtgggccacaaaattctgtctggccagcggaagctcgagatggaagggcgacaagtactggaagtaaaaatgcaagtcgagtacatgagtttttccgcccacgctgatgccaaaggcattatgcaactcgtctcctcagaacaggccctgaaagaactcggactagccgaacatcaactgcggttcacatgcagagtgcatcttcacgatactcgcaaagaacaggaaaccgccctcagagtctattcccaccttaagtctgtgctcaaggatcattgtgtgcagcacctgcccgatgggagcgttacggttgagtcggtgctcttgcaggcagccgcaccttccgaggaccccggaacgaaggtgttactcgtgtcatggacctaccaggacgaagagcttggcagcttccttacgtctctactgaaaaagggcctcccccaggcgccgagctag

SEQ ID NO: 14173 - DNA, 1863 bp, synthetic construct
  source 1..1863: mol_type = other DNA; note = Synthetic coding sequence
atggaaaaggccgtcaatgacgggtcacactctgaggagttgttctgtcatcttaaaaccatctccgaaaaagaagatttaccaagatgcacctccgagtcacacctgtcatgtctgaagcaggacatcctgaacgaaaaaactgagttagaggccacgctcaaggaagcagaactggtcacccacagtgtggaattgctgctgcctctgtttaaggatactatcgagaagatcaacttcgagaatgccaacttatctgctctgaacctgaagattagtgagcagaaggagatactcataaaagagttggacacattcaagagcgttaaactcgcccttgagcatctgctccggaagcgtgattacaagcagacaggtgataatcttagctccatgctactggagaatttaacagataacgaatccgagaacacaaaccttaagaagaaagtcttcgaaaaggaggctcatatccaagagctcagttgtctctttcaatccgagaaagccaatacgctcaaggcgaatcggttttcacagagcgtgaaagtggtgcatgaacgcctccagattcaaattcataagcgtgaggcagaaaatgataagttgaaagaatacgtcaagtcactggagaccaaaatcgccaaatggaatcttcaatctagaatgaataaaaatgaggctatcgtgatgaaagaggccagtcgccagaagacagtcgccttaaaaaaagcttccaaagtatataagcagagactcgaccactttactggggctatcgagaagctcacctcgcaaattcgcgatcaagaggccaaactttctgagaccatatctgcctccaatgcctggaagtctcactacgagaaaattgtgattgagaaaacagagctggaggtgcaaatcgaaacaatgaaaaagcagatcatcaatctcctggaagacttgaagaagatggaagaccatggaaaaaatagttgtgaggaaatactccggaaggttcacagcatcgaatacgaaaatgagacgttaaacctggaaaacactaaattaaagaccactctggctgcgctcaaggacgaagttgtcagtgtcgagaacgaactgtcagaactacaggaggtcgagaagaaacagaagacccttatagagatgtacaaaactcaggtacaaaagctccaggaagccgccgaaattgtgaagagccgctgtgaaaacctgttgcataagaacaatcagatcaccaagaccaagaacaagaatgtggagaaaatgagggggcagatggagagtcacctcaaagagctcgaaagagtgtgcgattccctaaccgcggcggagaggaggttgcacgaatgtcaggagagcctccaatgctgcaaggggaaatgcgcagaccaggagcacaccataagagagctgcagggacaaattttgaagcagtgggaggagtacagcgtactggcttgggttgatggcaatcataatctgcttaccaagttgagcctggaagaggagaattgcttgattcagctcaagtgtgagaatcttcaacagaaactcgagcaaatggatgccgagaataaggagctagagaagaaactagctaaccaagaggaatgcttgaagcactctaatctcaagtttaaagagaagagcgctgagtacactgccttggccagacaactcgaagctgctctggaggagggacggcagaaggttgccgaggaaatcgagaagatgtctagccgagaaagcgccctccaaatcaagatcctggacctcgagactgaactaagaaagaagaatgaggaacagaatcagctggtgtgcaaaatgaactctgatcctgaaaccccttag

SEQ ID NO: 14174 - DNA, 465 bp, synthetic construct
  source 1..465: mol_type = other DNA; note = Synthetic coding sequence
atgtccaagaacacagtgagcagtgctcggttcagaaaggtagatgtggacgagtatgatgagaataaattcgtcgatgaggaggatggcggcgacggacaggccggacctgatgaaggtgaggtcgattcttgcctacgacattcaatcactgggaatatgacagccgctctgcaggctgctctgaaaaacccacctatcaacacgaaatcacaggcggtgaaggaccgcgccggcagtatcgtgctgaaggttttgatttcgttcaaggccaacgacatagagaaggccgtgcaatccctggacaagaatggcgtggacttactgatgaaatatatctacaagggatttgaaagcccttccgataactctagcgccatgctgctccagtggcacgagaaagccttggcggcgggcggagtgggttcgattgtccgcgtgcttacggcccgcaagactgtctag

SEQ ID NO: 14175 - DNA, 2946 bp, synthetic construct
  source 1..2946: mol_type = other DNA; note = Synthetic coding sequence
atgagcgagcaggaacgaatccaggagtgcctgagaaaagaaattcggagccttctgatctcaactaaggacgggttatctcctcaagagctggagaaagaatacttactgatggtgggtaaccatctgccactcaggatactgggataccgatctacaatggaactagttctggatatgccagatgtcgtcagggtgtgcccaggcgcagggggaactgtgatacttaaagccattcctgatgagtcaaccaagggcattgcctcactggtcgccaagcagagaagcagtcataaactgagaaattccatgcacaaagggaggccctctatctatagtgggccgagatcccacaggagggtgccatatcgaggacgcgtcgctcctatcctgccggcggtagtgaaatccgagctgaaggacctcttagccctgtcaccagtcttgctatctgatttcgagaaagcgttcgcaaaacgcttcgggcggtcattccaatacatgcagtatgggtttctaagcatgttcgaggtgctgaatgcggcgagtgacgtcatttccgttgagcagacacgcgccggtagtttgctgatgttgaagaagagtgtgaccgaggagaaacctagaggctgccctgctgggaagatctttacccaaccgtttcgcatgaagcaaggctcttacagtaccggttttccagttgcgaaaccctgcttctctcagcctacatcaaacatggaaccccccaaacagattatgtccatggagaagacttctaagcttaatgttgtggagacgtctcggctgaatcatacggagaagttaaaccagctcgagaatacttttaaatccgtgatagcccagatcggtcctggaggaacgatttcctccgagctgaaacataaaatcaagtttgtggtctcgaaattccctgaagggttattcataagtaaacttcttggagagtatgaggtgatcttcaaagagcaactctcaccaaagaagttgggcttcttaaacgtcacggaattagtgggcgctttatctgacattctgcacgtagagttccgcaaggggcaccaggatctgctggtcttcgatgctgataaaaagccactgcccccagttcagagcgacaagaagatcgaggctaaggcttgcgtgtccagccctccccgcaatagcctctctacggccgcggtgaaagagaccgtgtggaattgtccctctaagaagcagaaggaaccacagcagaaaatttgtaaaaaacccaaccttgttgtgaagccactacagctgcaagtggagaccaataaatccgaattgaatctggcgatggcaaaccatgatattccaccagacgccgtccccaataagaaactgtgtcgtcttccgcccctggacacctcttctctcattggtgtgtttgtggaatacattatctctcccagccagttctatatccgaatttactcccgggactcctcggaattgctggaggacatgatgattgagatgcgcagatgctactccaaccaactagtgagtgacagatacgtaatgccagaatgttttatacagcctggccacctatgttgcgtgcgtatctccgaggacaaatggtggtacagggtgataattcaccgggttctggagaaacaagaggtggaagtcttctaccccgacttcggcaacatcggtatagtgcaaaaaagctccctgcgatttctgaagtgttgctacactaagttacccgctcaagccatcccatgtagtctggcttgggtccgacccgttgaggagcactggacctcaaaagccatcctccaatttcaaaagctttgcgggctgaaacccttggtcggagtggtcgatgaatacgtcgacggcatactgaatatcttcctgtgtgatacttctagcaatgaggacgtctacttccaccacgtactgaggaccgaggggcatgcaattgtctgcagagaaaacatttcttccaagggcttctctgagctgaatcctttggccctgtacactaccagtagcggcggaccggaagatatcgtgctgaccgaactgggctacccatctcagcagcattactttaatgaagatcggaaaattagtccgcaatccaaggagagtgagctgaggatcttggatgagattcccaccgggatgccctgcctggaatcagtgaccattggggacgacatatgggacgaaaactggctgcccctgcaggcgaagatggggaagggcggtgacgcggccagccacctgttcaccgccagcctggggggaaaaaaccagtacagttcctgtaaggaaatgccccagaaagactggtgtttctctacccctaaggatacctgggacgattcctggcagcccagtggcttggtaaatggaacaaaagtcgaagttcataagcctgaggtgctcggagcccaggaaaagaatacagggacgaataggactcagaagcagctggatatcaatggttcttccgatagttccaccttgccaaagctggaagagttctgtacttcactgacccagtccgagcagtctgccgacggtagtcaatccgagcccaataactctcagacacagcccaaacagattcagttgagtacagccgctccttgctctaccacagcggtcgatgacagcgctgaaaagcctagcggaagtgttgaaagcagtcctgaaatcctgaaaaatgaggacttctcatcatcccgagccatcaccttgtacaaggacaagcggcaggaatccgtggatcagctctctcttatactgagctatgagtgtcaaatcagtcagaaactctacattccacgttcaaccgccacagcggctctgggggccgctgcaagactcgcgacctctcggtcattgctccactggtatcccagcgtcaagcgcatggaggcatag

SEQ ID NO: 14176 - DNA, 909 bp, synthetic construct
  source 1..909: mol_type = other DNA; note = Synthetic coding sequence
atggagatccaggagctggaggagatccaagcctgtcagggactctgggaggttttcgtgaccttgtccgagcgcgcccgggactatctacataagacaggccggtttatcgtgattggtggaattgtgtcccccgttcacgatagttatggcaaacaggggctggtcagctcccgccataggttgattatgtgtcagctcgccgttcagaattctgactggataagagtggatccctgggaatgttatcaggatacttggcagacgacgtgctcagtgttggagcatcatcgagacctgatgaagcgggtcacaggttgtattctgtcaaatgttaacaccccctctatgacaccggtcatcggacaacctcagaacgagacaccccaacccatataccagaattctaatgtggccactaaaccaacggctgccaaaatattagggaaggttggcgagagcctttctaggatctgctgcgtcagaccacccgtcgaacgcttcactttcgtggatgagaatgccaatctcggcactgtcatgcggtatgaggaaatcgagctgaggatcctcttgctttgtggctctgatctactggagtcattttgcataccgggactgtggaacgaggctgatatggaagtcattgtgggcgattttggcattgttgtagtgcccagggatgccgcggacacagataggattatgaaccacagcagtatactgcggaaatataagaacaacataatggtcgtaaaggatgacattaatcaccccatgtctgttgtgtcatcaaccaaaagcaggctcgcactgcagcacggggacgggcacgtcgtggactacctctctcagcccgtgattgattatatactgaaaagccagctgtatattaacgcctctggttag

SEQ ID NO: 14177 - DNA, 861 bp, synthetic construct
  source 1..861: mol_type = other DNA; note = Synthetic coding sequence
atggagagacgactcggagtgcgcgcgtgggtaaaggaaaatcggggctcttttcagcctccggtttgtaacaaacttatgcaccaggagcagcttaaagtcatgttcatagggggtcctaatacacgtaaagactatcatatagaggagggcgaagaagtcttctaccaactcgagggggacatggtcctccgggtgctcgagcagggtaagcacagggacgtcgtgatccgccagggcgagatattcctgctccctgccagggtgcctcattccccccagcgattcgccaacaccgtgggcctggtcgtggaaaggcgcagattggagactgagctcgatggactacggtattacgtgggagacactatggatgtgttgttcgaaaaatggttttactgtaaagaccttggaactcagttagctcctatcatccaggagttcttctcgagtgagcagtataggacaggaaagccaatcccagaccagctcttgaaggaacctccatttccactctctacacggtcgattatggaaccaatgagtttggatgcatggctggattctcaccaccgcgaattacaggccgggactcccctgtcattgtttggagacacctacgagacgcaggtaattgcctatggacaaggttctagcgagggtcttaggcagaacgtggatgtgtggctatggcagctggaaggcagctctgttgttaccatgggcggccgacgactgtccctggctccggatgattccctgctggttcttgctggcacatcatacgcctgggaacggacccagggaagcgtcgccctgagtgtcacacaagaccctgcatgcaaaaagcccctgggctag

SEQ ID NO: 14178 - DNA, 1545 bp, synthetic construct
  source 1..1545: mol_type = other DNA; note = Synthetic coding sequence
atgcaggagtctggatgcagactggagcacccttccgctactaagttcagaaaccatgtgatggaaggcgactgggacaaagccgaaaacgatttgaacgagcttaagccactcgtgcattctccccatgccatagtagtacggggtgcccttgagatctcccagactctgttgggaatcatcgtgaggatgaaatttctcctgctgcaacagaagtatcttgaatatttggaggacgggaaagtcctggaagcactgcaggtgttgagatgcgagctgacccccctgaaatataacaccgagagaattcatgttctctccggctatctgatgtgctctcatgctgaggacttgcgagcaaaggccgagtgggaaggtaagggaactgcctcaaggagtaaactgctggacaagttacagacttatctgccaccctctgttatgctgccacctaggcgcctgcagaccctgctccgccaagccgtggagctgcagagggaccgctgtttgtatcataatacaaaactggacaacaacttagacagtgtgtctcttttgatcgaccacgtgtgctcccgtagacaatttccttgttacacacagcagatcctaactgaacattgtaacgaggtttggttctgtaaattcagcaatgatggtactaaattggccaccggcagtaaggacaccactgttattatctggcaggtggatccagatactcaccttttaaaattgttgaagacactggagggccacgcatacggagtgagctatattgcatggtccccagacgataactacctcgtggcctgtggcccggatgactgctccgagctctggctgtggaacgtccagaccggcgaactccggaccaaaatgtctcaatcgcacgaagacagtctgacatcagtggcctggaatccagacggaaaacgtttcgtcaccgggggccagagagggcagttctaccaatgcgatctcgacggaaatctgttagactcatgggagggggtccgtgtccagtgtttatggtgcctcagcgatggtaagactgtcctggcctccgacactcatcagcgaattcgtgggtataacttcgaagatctgactgaccggaatatcgttcaagaagatcatcctatcatgagcttcaccatatccaagaatggccgcttggctttgctcaatgtggctacacagggcgtccacctgtgggacctccaggatagggttctggtgagaaaatatcagggggttacccagggcttctacacaattcacagctgttttggagggcataatgaggactttatcgctagcggttctgaggatcataaggtatatatttggcataagagatcggaactgccgattgccgagctgaccggccatacccgcaccgttaactgtgtgagctggaaccctcagattccctctatgatggcctcagctagcgatgatgggactgtcagaatctggggccctgcaccttttatagaccaccagaacatcgaggaggagtgtagtagcatggatagctag

SEQ ID NO: 14179 - DNA, 540 bp, synthetic construct
  source 1..540: mol_type = other DNA; note = Synthetic coding sequence
atgggcatattgtttactcgaatatggcgtctgttcaatcaccaggaacataaagttattattgtggggctggataacgccggcaaaacaacaattctataccagttttcaatgaacgaggtggtgcacacctcccctaccatcggctctaacgtggaggagatcgtcataaataatactcggtttctgatgtgggatattggggggcaggagtctctgcggtcttcctggaacacctactacacaaacacagagttcgtgatcgtggttgtggacagtaccgatagggaacgcatttctgttacacgagaagagctatacaagatgctggcccacgaagatctgcggaaggccggccttctcatcttcgcaaacaagcaggacgtaaaggagtgcatgactgtcgccgaaattagccagtttctaaaactgactagcattaaagaccaccagtggcacatacaggcatgttgtgccctgactggcgagggcctgtgccagggcttagagtggatgatgtctagactgaaaattaggtag

SEQ ID NO: 14180 - DNA, 1428 bp, synthetic construct
  source 1..1428: mol_type = other DNA; note = Synthetic coding sequence
atgcagaagtctactaactctgatacttccgtcgaaaccctcaactcaacaagacaggggactggcgccgtgcagatgcgcatcaaaaatgccaatagccaccatgacaggttgtcacagtcaaagagcatgattctaactgacgtgggcaaagtcactgaacctatctctcggcaccggagaaaccattctcagcatattcttaaagacgttataccccccctcgagcaactgatggtggagaaggagggctacttacagaaggccaaaatcgccgacgggggtaaaaagctgaggaagaattggtccacgtcttggattgtgctttcctctcgcagaattgaattttacaaagagagcaagcaacaggccctgtccaacatgaagacagggcacaaaccagagtctgtggacctgtgcggtgctcatattgagtgggccaaggaaaaaagcagccgaaagaatgtcttccagattactaccgtgagcggcaacgaatttcttttgcagagcgacattgactttataatccttgattggtttcatgcaataaagaatgctattgaccgcttacctaaagactcctcatgcccaagcaggaacctggaattattcaaaattcagcgcagctcttccactgagctcctgtcacactacgattcagatatcaaagaacagaagccagagcacaggaaaagcttaatgttcagactccatcacagtgcatctgacactagcgataagaatcgggtcaagtccaggcttaagaagttcatcacaagaagaccctcactaaaaacgctacaagaaaagggattgattaaggaccagattttcgggtcacacctgcacaaagtgtgcgagcgagaaaactcaacagttccttggtttgtcaaacagtgcattgaggccgttgagaaaagaggacttgacgtggatggcatctaccgggttagtggcaatcttgcgacaatccagaaactgcgatttattgtcaaccaggaagagaagttgaacttggacgacagccagtgggaagatatccatgtggtgaccggcgctctgaagatgtttttccgcgagttgcctgagcctttattcccatacagcttcttcgaacagttcgtggaggccattaagaaacaggacaacaacaccagaatagaggccgtcaaaagcctcgtgcagaagctgccacctcctaatagggataccatgaaggtgctgttcggacacctgactaaaatcgtcgccaaggcatccaagaacttaatgtctacccaaagcctcggaatcgtgttcgggcctacactcctgcgggctgagaacgaaactggcaacatggcaattcacatggtttatcagaatcaaattgccgaacttatgttatctgagtatagcaagattttcggaagcgaagaggactag

SEQ ID NO: 14181 - DNA, 1308 bp, synthetic construct
  source 1..1308: mol_type = other DNA; note = Synthetic coding sequence
atggctcagacagtacctccgtgcgaactgccttgtaaagaatacgatgtagcacgcaatacaggtgcttatactagctcaggccttgcaacagcctcctttaggacctctaagtatttgctggaggaatggtttcaaaactgttacgcgaggtaccatcaggcctttgccgatagggaccagagtgagcgtcaaaggcacgaatcacaacagctggccaccgaaacccaggctctggcgcagcgaacccaacaggacagcacacgcaccgtgggggagagattgcaggacacccactcctggaagtccgagctgcagcgggagatggaggcccttgctgcagaaacaaatttgctgttagcgcagaagcaaaggctggaaagggctctagacgccactgaagtacccttttcgattactaccgataatctgcagtgtagggagcgccgggagcacccgaatctcgtgcgcgaccacgtggaaactgagctccttaaggaggccgagctcataagaaatatacaggagctgctcaaacgcaccattatgcaggcggtctctcaaatccggctcaatcgagagcataaagagacgtgtgagatggactggtccgataaaatggaagcttacaatatcgatgaaacctgcggcagacaccattctcaatccacagaagtccaggcacatccatattcgaccacatttcaggaatcagcttcaaccccagagacaagggccaaattcactcaggacaacttatgcagagctcagcgggaacggttggcctccgcaaacctccgcgtgctggtggattgcattctgcgggatacatcagaagacttgagacttcaatgtgacgcggttaatctagctttcggccgccggtgtgaggagctggaggacgctagatacaaacttcaccatcatttgcacaaaactctgagagaaattaccgatcaggaacataatgttgctgccctaaagcaggccataaaggacaaggaagccccacttcatgtggcacagaccaggctttatctgcggtcacacaggcctaacatggagctttgccgggatgccgctcagttccggctcctctccgaggtggaggaactcaatatgtcactgaccgccctgcgcgagaaactgctggaagcggagcagtctctccgtaatttagaggatattcatatgagccttgagaaagatattgcggccatgacaaattccctttttatcgatagacaaaagtgcatggcccatagaacccggtaccctaccattctgcaactggcagggtaccagtag

SEQ ID NO: 14182 - DNA, 828 bp, synthetic construct
  source 1..828: mol_type = other DNA; note = Synthetic coding sequence
atgcgcaagcgactgagtgcaccggagctgcgcctgagcctaacaaagggtcccggaaacgacggcgcgtcacccactcagtcagcaccgagctcacccgacggctcctccgatttggagatcgacgagctggagacacctagtgacagcgaacaactggattcaggacacgaattcgagtgggaagatgagctcccgcgcgctgagggactcggaacttccgaaactgctgagcgcctaggtagaggatgcatgtgggatgtgacaggagaggacggtcatcactggcgagtttttaggatggggccgcgagagcagagggtggatatgaccgtcattgagccctataagaaggtgctatcacacgggggatatcatggggacgggctgaatgcagtgattctgttcgctagctgctatttgcctcggtcctcaatcccaaactacacatatgttatggaacatctgtttagatatatggttgggactctggaactgctggtggctgagaattacctgctggtgcacctctccggaggcacaagtagggcacaggttcctccgctgagctggattcggcagtgctatcgtacccttgacagacgtttacgtaaaaacctgagggctctcgttgtggtccacgctacgtggtacgtcaaagcatttcttgcgttactccggccctttatcagctctaaatttacccgcaagattagattcctggactccttaggcgaactggcccagctgattagcctagatcaggttcatataccagaagccgtccgccagttggaccgcgacctccatgggtccggaggcacatag

SEQ ID NO: 14183 - DNA, 2391 bp, synthetic construct
  source 1..2391: mol_type = other DNA; note = Synthetic coding sequence
atggaagaagaggcttcaagaagtgccgccgcgactaaccccggaagtaggctaacccggtggccccccccagacaaacgagagggatctgctgtggaccccgggaaaagacgcagcttggccgccacccctagctcgtctcttccctgtaccctgattgccctcggcttacggcatgagaaagaagctaacgaattaatggaggatttgtttgagacttttcaggacgagatgggtttttctaatatggaggatgacggaccagaagaggaggagagagtggccgagccacaggcaaattttaatacaccacaggcacttaggtttgaagagctactcgccaacttgctgaacgagcagcatcagatcgctaaagagctcttcgaacagctgaaaatgaaaaagccaagtgctaagcaacaaaaagaggtagagaaggtgaaaccccagtgcaaggaagtccaccaaacactgatcttagacccagcccagcggaagaggcttcagcagcaaatgcagcagcacgtacagctcctgactcagatccacttactcgcaacatgcaatccgaatctaaatccagaggccagcagcaccaggatctgcctgaaggaattaggcacatttgctcagagcagtatagcgctccaccaccagtacaaccccaagttccagaccttatttcagccctgtaaccttatgggcgccatgcagttgatcgaggacttttccacacacgtgtcaattgactgttcccctcacaagactgtgaaaaagacggctaacgaatttccttgcctgcccaagcaagtcgcctggatattggcgaccagcaaggtcttcatgtaccccgagctgttgccagtttgtagcttgaaggccaaaaacccccaagacaaaattctatttaccaaggctgaagataataagtacctcctgacttgcaagacagctcgccaactgacagtaaggatcaaaaatttgaacatgaaccgggccccagacaacataattaaattctataagaagactaaacagctgccagtgttggggaaatgctgcgaggaaattcaacctcaccagtggaagccccccatcgaaagggaggaacatagactcccattctggctgaaagctagcctgcccagtatccaagaagaattacgccacatggcggacggcgcaagggaggtcgggaacatgaccggcactacagaaattaattcggaccaggggctagagaaagataacagtgagctaggttcagagaccaggtacccgctcctcttgcccaagggagtggtgctcaaattgaaaccggtagccgatagattcccaaagaaggcttggaggcagaagcgttccagcgtgctgaaaccactgctgattcagcctagtccttcactgcaacctagtttcaaccccgggaagactcctgcccaatcgacccattccgaggccccaccatcaaagatggtgctgcgaattcctcacccaatccagccagccacagtcttgcagaccgttcccggagtcccacctttgggcgtatccggtggagaaagcttcgaaagtcccgcagccttaccagccatgccccccgaggccaggacctcgtttcccctctcagaatcacagacattattaagcagtgcccctgttcctaaggttatgatgccttctccagcatcttccatgttcaggaaaccttacgtgcggcggagaccgagtaaacgaagaggtgcccgcgcctttcggtgcataaagcccgcaccagtgatacatccagccagcgtgatcttcacagttccagcgaccacagtcaaaatcgttagcctcggcggcggctgcaacatgattcaaccggttaacgcagccgtggcccagtcaccccagactattcccatcgcaactctgctggtgaacccaacctccttcccttgcccattgaaccagcctttggtggcaagctcagtgtcaccactgatcgtttcggggaatagcgttaacttacccataccatccacgcctgaagacaaggcacatatgaacgtcgacatcgcttgcgccgttgccgacggcgaaaatgcctttcagggtctggagccaaagctggaacctcaggaattgtcccctctcagtgccaccgtgtttccgaaggttgaacattcccctggaccaccccctgtggacaagcagtgtcaagaggggttgtcagaaaacagcgcctaccgatggaccgtggtgaagaccgaggaaggacgacaggcactcgaaccccttcctcagggaatccaggaatccctgaataacagttcccccggggatctggaggaggtagtgaagatggaaccagaagacgccaccgaggagatcagtggatttctctag

SEQ ID NO: 14184 - DNA, 1380 bp, synthetic construct
  source 1..1380: mol_type = other DNA; note = Synthetic coding sequence
atggcagccagcgcttctgcggcagccggtgaggaggactgggtcttaccgtcggaggtggaggtactcgaatccatttatctcgatgagctccaggtgatcaaagggaacgggagaactagtccatgggagatctatattacattgcatcctgcaacggccgaggatcaggattcccagtatgtttgcttcacactggtgttgcaggtgccagccgaatatccacacgaggtcccacaaatttccattcgcaatcctcgagggctctcagatgagcagattcacacgattctgcaagtacttggccacgtagcaaaggctggcttgggcaccgccatgctgtatgagcttatcgaaaaaggaaaggagattttgaccgataataacattccccacgggcagtgtgtgatctgtctctacggattccaggagaaggaagcctttaccaagactccctgctaccactattttcattgccactgtcttgctcgatatatacagcacatggagcaggagttgaaagctcaggggcaagaacaggaacaggagcgccagcatgccaccaccaagcaaaaagcagtgggcgtccagtgccccgtgtgcagagaacctctggtgtacgatctcgcctcactgaaggccgctcctgaaccacagcagccgatggagctgtaccagccaagcgctgagagtctccggcagcaggaggaacgaaagcggttgtaccagcgccagcaggagaggggcggaattatagatctggaagctgagcggaataggtactttatctctttgcagcagcccccagctccagccgaacccgagtccgcagtggacgtttcaaagggctcacagccaccgtctacccttgccgccgaactttccactagcccagccgtacaaagcactttaccacctccactaccagttgcaactcagcatatatgtgaaaaaattcctggcacacggagcaaccaacaacgactgggcgagactcagaaggctatgctggatccacccaagccctctcggggtccttggagacaacctgaacggcggcatccaaagggaggggaatgccacgcccccaagggaacccgtgatactcaagagctccccccacctgagggcccgctgaaggagccaatggatctcaagccggagccccatagccaaggagtggaggggcccccacaagagaaggggcctggttcatggcagggaccacctcctcgaagaacccgcgattgtgtgagatgggagcggagtaaggggagaactccgggctcaagctaccctcggcttccacgaggacagggcgcatacaggcccgggaccaggagagaaagcctcggactggagtcgaaggatgggagctag

SEQ ID NO: 14185 - DNA, 2079 bp, synthetic construct
  source 1..2079: mol_type = other DNA; note = Synthetic coding sequence
atgggaagcgccgctgacgtccgctttagcttgggcaccaccacacacgccccccccggcgtacacagacggtattcagctctccgagaggaaagtgccaaggattgggaaacatcccccctgccgggtatgctagccccagccgccggtcccgctttcgattccgatcccgagatttccgatgttgacgaggacgaacccggaggcctggttggtagcgccgatgttgtgagtcccagcggacactctgacgcacagacgttagccatgatgttacaggaacaattggatgcgataaacgaggaaatcaggatgatacaggaggagaaagaatcaacagaactaagagcagaagagatcgaaacacgggtgacctctggatcaatggaagcccttaacctgaaacaactgcggaagcgcggaagcattcccacatctctgacagcactctcgctcgcttcagcatcccctccactgagcggccgtagtacccccaaactcactagcaggtctgccgcccaggacttggacagaatgggagtcatgacgttaccaagcgatttaaggaaacaccggcgcaagctgctcagccccgttagcagggaggagaatagagaggacaaggcaactattaaatgcgagacttcccctccatctagtccccgcaccctacggctggagaaactgggccaccccgccctctcccaggaagagggaaagagcgcattggaagaccagggctcaaacccttcgtcttccaacagctcacaggattcactgcacaagggggcaaagcggaagggtatcaagtctagtataggccggctcttcgggaagaaggagaaggggagactgatccagttgtcaagagacggcgccacaggccacgttctgctgactgactcagaatttagcatgcaggagcccatggttcccgcaaagctgggtactcaggccgagaaagacaggcgcctgaagaaaaaacaccagctgcttgaagacgcccggcgaaaggggatgcccttcgctcagtgggatggtcccaccgtggtctcctggctggaactgtgggtcgggatgcccgcttggtatgtggcagcctgtcgagctaacgtaaagtcaggggcaatcatgtctgctctgtcagatactgagattcagagggaaataggcatcagcaacgctctccatagactgaagcttcggctcgctattcaggaaatggtttctctcacatccccatctgcccccccaacctcccggacctcatcagggaatgtttgggtgacacacgaggagatggaaacgctggaaacctcaaccaaaacaacgctggcatatggggacatgaatcacgagtggatcggcaatgagtggctaccatctttgggccttccccaatacagaagctattttatggaatgcctcgtcgacgccagaatgcttgaccacctgacgaagaaagatctgcgggtacacctgaagatggtagacagtttccaccggacgagccttcagtatggaataatgtgcctcaaaaggttaaactatgaccggaaggaacttgaaaaaaggagggaagagagtcagcacgagattaaagacgtgctcgtgtggacaaacgatcaggtggtgcactgggtacagagcatcggactgcgggactatgcaggcaacctacatgagagtggagtacatggggccctgctagccctggacgaaaactttgatcacaatacactggctctgatcctacaaataccaacacaaaacacccaagcccgtcaagtgatggagagagagttcaataatttactggcgctcggtaccgatcgtaaactcgacgacggggatgataaggtgtttcgacgagctcccagttggagaaaaaggtttagaccacgagaacaccacgggagaggaggcatgttgagcgcttctgccgagacattgcccgctggtttccgagtgtctaccctaggtacgctccagccacctcctgcacccccaaaaaaaataatgcctgaggcgcactctcactatctgtacggacacatgttgagcgcattccgggactag

SEQ ID NO: 14186 - DNA, 369 bp, synthetic construct
  source 1..369: mol_type = other DNA; note = Synthetic coding sequence
atggcgcctcagaaggaccgcaaacccaagaggagtacatggagatttaatctggacttgacccacccggtcgaagacggtatttttgattcagggaattttgagcagttcctgcgagagaaagtgaaagtcaatgggaagacaggcaacctcggtaacgtggtgcatattgagcgattcaagaacaagatcaccgttgtcagcgaaaaacagttctccaagagataccttaaatacctcacaaagaagtatctcaagaaaaacaatctgagggactggttacgggtggtcgctagcgacaaagaaacctacgagttacggtatttccagatttcccaggatgaggacgagagcgagagtgaggactag

SEQ ID NO: 14187 - DNA, 936 bp, synthetic construct
  source 1..936: mol_type = other DNA; note = Synthetic coding sequence
atgcagtacatctcacacattttcggcgttataaactgcaatgggtttaccctgtctgatcaacgcggtttgcaggccgtgggtgtaggaatcttcccgaatctgggactggtcaatcacgactgttggccaaactgtacggtgatatttaataacggcaagatcgaattgcgcgctctgggcaaaatctctgagggggaggaactaactgtctcctatattgattttctaaatgtgagtgaggaaagaaagaggcagctcaagaaacaatattactttgactgcacctgcgaacattgtcaaaaaaaacttaaagatgacctcttcctgggtgtcaaggacaatcctaagccgtcccaggaagtagtaaaagaaatgattcaattctccaaggacaccctggagaaaatcgataaggcccgtagtgagggcttgtatcacgaagtcgtgaagctatgccgagaatgccttgaaaagcaagaacctgttttcgccgacaccaatatctacatgctgaggatgctgtctatcgtgagcgaggtcctctcctacctccaggcatttgaagaggccagcttctatgctcgccggatggtcgatgggtacatgaaactgtaccacccaaacaacgcgcagctgggcatggccgtgatgcgtgctggcctgactaactggcacgcaggcaacattgaggtgggccacggaatgatctgtaaggcttacgcgatcctgttagtcacccacggacccagtcaccccatcacaaaagacctcgaggcgatgagagtgcagaccgaaatggagctcaggatgttccgccaaaacgaattcatgtattacaagatgcgggaggccgctctcaacaatcagccaatgcaagttatggcggagccttccaatgagccctcccccgcactcttccataagaaacagtag

SEQ ID NO: 14188 - DNA, 1542 bp, synthetic construct
  source 1..1542: mol_type = other DNA; note = Synthetic coding sequence
atggcggaactacagatgctcctggaagaggagatcccaggcggcaggagggccctgttcgactcatacactaatttggagcgcgtggcagactactgtgagaataattacattcagtctgccgataaacaaagggccctcgaagaaacaaaggcttatacaactcagtctcttgcctctgttgcctacctgattaataccctggccaacaacgtgctgcagatgctggatatccaggcatctcagctccgcagaatggagtcatcaattaaccacataagccagacagtcgacattcataaagagaaagtggcacgtagagaaatcggcattttaaccaccaataagaacacctccagaacccacaaaattatcgccccagccaatctcgagaggccggtgcggtatatacgcaagcctatagattacacgatccttgatgatattggtcacggagtgaaatggctgctacggttcaaagtttctactcagaacatgaagatggggggtctgccaaggaccaccccgcctactcagaagcccccaagtcctcctatgtccgggaagggaactctggggcggcattcaccctatcggaccttggaacccgtcaggccacctgttgtgccaaatgactatgttccctcccccactcggaacatggcacccagccagcagtcccccgttcgtaccgctagcgtcaaccaacggaatcggacgtacagttccagcggcagctcaggcgggtcccatccaagctctcggtcatctagccgggagaactcgggaagcggatcagtcggcgttcctattgccgttcccactccatccccaccctccgtgttcccagccccagctggatcggctggtactcccccccttcctgctactagcgcctcagcaccagcgcctctagttcccgccacagtgccatcttcaactgcacctgatgcagcggcagggggcgcccagaccctggctgacgggttcaccagtcctactcctcctgtcgtgtcaagcacccctccaactggccaccctgttcaattctatagcatgaataggcccgccagcaggcatacaccaccaactataggcggatccctgccatatcgtcggcctccctcaataacgtcgcagacttcgctgcagaaccagatgaacgggggacccttctattctcaaaaccccgtttcagacactccccctcctcccccgcccgttgaggagcctgttttcgatgagtctccaccgcctccccccccccctgaggactacgaagaagaagaggctgcagtggtcgagtactctgatccatatgccgaagaggaccctccctgggcccccaggagttaccttgagaaagtggtggcgatctacgattacaccaaggacaaggaggacgagcttagcttccaggagggggccatcatatatgtcataaagaaaaacgacgacgggtggtatgagggagtgatgaacggcgtgacagggctattcccaggcaactacgttgagagcatcatgcactattcggagtag

SEQ ID NO: 14189 - DNA, 1170 bp, synthetic construct
  source 1..1170: mol_type = other DNA; note = Synthetic coding sequence
atgcccctggaaaatctcgaggaggaggggctgccaaagaacccagatctccgcatcgcccaactgagatttctgctctcattaccagagcataggggagacgcagcagttcgagatgagctaatggccgctgtgcgcgataataacatggcgccatattacgaggccctttgcaaaagtctcgattggcagattgatgttgacctgctcaataaaatgaagaaagcgaacgaagacgaacttaaacggctggacgaggagctggaggacgccgagaaaaatctgggtgaatcggaaattcgggacgccatgatggccaaggccgaatatttgtgccgaattggagataaagagggcgccctcacagccttcagaaaaacttacgacaaaaccgttgcccttggacatcgactcgatatcgtgttctatctgctgaggatcggactgttctacatggataacgatctaattactcgtaataccgagaaagccaagtccctgatcgaagaggggggggattgggaccggcgcaaccggctgaaggtttaccagggcttatattgcgtggccatccgggactttaaacaggccgcggaactgtttctcgataccgtttcaacttttaccagttacgagcttatggattacaaaaccttcgttacctacactgtgtatgtgtctatgatagctctggaacggcccgacctccgggaaaaggtgataaagggtgccgagatactggaagtgctgcattcgctcccggcagtccggcagtatcttttttctttatacgaatgccggtacagcgtttttttccaatctctggctgtagtcgagcaggagatgaagaaagactggttgtttgccccacactataggtactacgtgcgagaaatgaggatacatgcttattcccaactgctagaatcataccggtcactgacactcggctatatggctgaggctttcggcgtaggcgttgaatttattgaccaggaactaagtcggttcatcgctgccggaaggcttcattgcaagattgataaggttaatgagattgtggagacaaaccgccccgattctaagaactggcagtaccaggagaccatcaagaagggtgatctcctgttgaaccgcgtacagaaactgtcccgcgtcatcaatatgtag

SEQ ID NO: 14190 - DNA, 420 bp, synthetic construct
  source 1..420: mol_type = other DNA; note = Synthetic coding sequence
atggctaacattgctgtgcagcgtatcaaaagggaattcaaagaggtgctcaagagcgaagagacctctaaaaatcagatcaaagtcgacctcgtggatgagaatttcaccgagctgagaggtgagatcgcaggaccccccgatactccctacgaaggagggagataccagctggagattaagatccccgaaacctacccgttcaatcccccaaaatataagcagaatccagaaatgtttaagcagacggcccgattgtgggcacacgtctacgccggtgccccagtttctagtcctgaatacacaaagaaaattgagaatctctgcgccatgggcttcgaccgtaatgcggttatagtggcactcagcagcaagtcttgggacgtggagaccgccacagaactactgttgtcaaactag

SEQ ID NO: 14191 - DNA, 1203 bp, synthetic construct
  source 1..1203: mol_type = other DNA; note = Synthetic coding sequence
atgaacttcacagtcgggtttaagccactcctcggagatgcacacagtatggataatctggagaaacagctcatttgtcccatttgcctcgaaatgttcagtaagccagtggtcattttgccatgtcagcacaacctgtgcagaaagtgcgcaaacgacgtgtttcaggccagcaacccactctggcaatcgagaggcagtacgactgtctcttccggaggaaggttccggtgtccaagctgcaggcacgaagtggtacttgatcgccacggagtttatggcttacagcgcaatcttctggttgagaacattattgatatctataaacaggaatcaagccgtccattgcactctaaggccgagcagcatctcatgtgcgaggaacatgaggaggagaagataaatatctattgccttagttgtgaggtccctacctgcagtctgtgtaaggtcttcggcgcccataaagattgcgaagtcgcccccttgcctactatctacaagaggcagaagaaacaggatctgaccttgcttccaaggctggaatgctctgggaccaacactacctattgttctttggaccttcctagttcctctgatccaccgattttggcatcacaaaataccaagatcatcgactcagaactgagcgatggaatcgcaatgctggttgccggcaatgatagggtgcaggctgtcatcacacagatggaggaagtgtgccaaacaattgaagacaactcacgtcggcagaaacagttgctgaatcaacgtttcgagagcctctgcgccgtgctcgaagagaggaaaggagaactgctccaggcactcgcccgggagcaagaggagaagttacagagagtccggggactgatccgccagtatggtgatcaccttgaggcttcctcaaagctcgtagagagtgccatacagtcaatggaagagcctcaaatggctctgtatctgcagcaagccaaagagctcataaacaaggtcggtgcaatgtccaaagtggagttagcgggacgcccggagcctggttatgagtccatggagcagtttacggtaagggtggagcatgtcgctgaaatgctgagaaccatcgacttccagcccggagcctctggggaggaagaggaggttgccccagatggtgaagagggctccgcaggacctgaggaggagcggcccgacgggccctag

SEQ ID NO: 14192 - DNA, 198 bp, synthetic construct
  source 1..198: mol_type = other DNA; note = Synthetic coding sequence
atgttcctttccgctgttttctttgcgaagagcaagtcaaagaacatcctggtcagaatggtgagtgaggccggtaccgggttctgcttcaataccaagagaaatcgcctgcgggagaagctgacactgctgcactacgatccagtagtgaagcagagagtcctgtttgtcgaaaagaagaagatacgcagcctttag

SEQ ID NO: 14193 - DNA, 2919 bp, synthetic construct
  source 1..2919: mol_type = other DNA; note = Synthetic coding sequence
atgcggccagaaggagccggaatggagttagggggcggggaggagcgattacctgaggaatcaaggagagagcactggcagctgctggggaacctgaagactaccgttgagggcctggtgtctaccaactcccctaatgtatggtccaagtatggcggcttggaacggttgtgtcgcgacatgcagtctattttatatcatggtctgatcagggatcaggcctgccggcgacaaaccgactattggcagttcgtgaaggacattcgttggctgtctccacatagtgccctgcatgtggagaagttcatctccgtgcacgaaaatgaccagtccagcgccgatggcgccagcgagcgggcggtggctgagctttggcttcagcactccctgcagtaccactgtttgtctgcccagctgaggcctctgcttggtgatagacagtacatcagaaagttttatacagacgcagcattcttgttgtcggatgcacacgtcactgcaatgctccagtgtttggaggcagttgagcagaataacccaagactgttggctcaaattgacgcatcaatgtttgccaggaagcacgaatcccctctgctggtcaccaagtcccaatctttaactgccttaccctctagcacctacaccccccccaacagttatgcacagcactcctacttcggctccttcagttccctacaccaaagcgtgcccaacaacggctccgagaggaggtccacaagttttcctctgagcggtccacccagaaagccacaggagtctagaggacatgtctcccccgccgaggaccaaaccattcaggctccgcccgtcagcgtgtcagcactggccagggattctccactaactccaaatgagatgtcttcgtcaacgctgacttcaccaatagaggccagttgggtcagttcacaaaatgactctccgggcgatgccagcgagggccccgagtacctagccattggtaatcttgatccaagagggagaactgcgagctgccagtctcacagtagcaatgcagagagttctagctctaacctcttcagttccagtagctctcagaaacctgattctgcggccagctcgttaggagatcaggagggaggcggcgagagtcaactcagtagcgtcctgcggcgctcatctttctccgaaggtcaaaccctgacagtgacatctggcgctaagaaaagccacatccgcagccacagtgacacttctattgcgtcgcgcggagcaccagagtcatgtaatgacaaggcgaaattgcgaggccccctcccatatagcggacagagtagcgaagtatccaccccttcttctctttacatggagtacgagggaggccggtacctgtgttcgggcgaagggatgttcagaagacctagcgaaggtcagtccctcatctcttatctgtccgagcaggattttggttcatgtgccgacctggagaaagagaatgctcatttctcgatatctgagagcttgattgctgcaatagagctcatgaagtgcaatatgatgagccagtgtctggaagaggaggaggtggaagaggaggattcagacagggaaattcaggaactgaaacaaaaaatccgtctgcggcggcagcagatccggaccaagaacctactgccaatgtaccaggaggcagaacacggctcttttcgcgttacttcgtctagttcccagttcagctcccgcgattccgctcagctctccgattcaggttcagccgatgaggttgacgagttcgaaattcaagatgccgatattcgaagaaataccgccagctcaagcaagagtttcgtgagctcccagtctttctcacactgctttctgcatagcaccagcgctgaagccgtggccatgggtctgttgaagcagttcgaaggcatgcagctccctgctgcatcagagttggagtggctcgtcccagagcatgatgccccacagaagctcctcccaattcctgactctctgcccatctcaccagacgatgggcagcacgccgacatctacaagctgcggatacgggtgcgaggtaacctagagtgggctccacctcgcccacagatcattttcaatgtacaccccgctcccactaggaagattgcggttgcaaaacaaaactacagatgcgctgggtgcgggataaggacagaccccgactacatcaaaagactgcgttactgtgagtacttagggaagtatttttgtcaatgttgccatgagaatgcccagatggcaataccaagtagggttctcaggaagtgggacttcagtaagtattatgtgagcaacttcagtaaagatctgcttatcaaaatatggaacgaccccttgttcaacgtgcaggacatcaatagcgctttatacaggaaagtgaaattgctgaatcaagtccgcttgctcagggttcaattgtgccacatgaagaacatgttcaaaacctgccggttggcgaaggaattgctggattcgtttgacactgtgccaggccacctgaccgaagatctacatctgtattcccttaacgatctgacagctactagaaaaggagaattgggtcccaggctcgcggaattgacacgtgctggtgcaacccacgtcgagcgttgtatgctgtgccaagctaaggggtttatttgcgaattctgtcagaatgaggatgacattatttttccattcgaattacacaagtgtcgaacgtgtgaggaatgcaaagcctgttatcacaaggcttgtttcaaatcgggttcatgtccgaggtgtgaacgtctgcaggcaaggagagaggctctggcacggcagtcccttgagagctatctgtcagactacgaagaggagccagctgaagctctggcacttgaggccgcagtactggaggctacgtag

SEQ ID NO: 14194 - DNA, 1161 bp, synthetic construct
  source 1..1161: mol_type = other DNA; note = Synthetic coding sequence
atggcagctgtggagaccagagtttgtgagacggacggctgctcctccgaagccaagttgcagtgcccaacatgtattaagcttggcattcagggatcatacttttgttcccaggagtgttttaagggctcctgggctacacacaaactgttacacaaaaaagctaaggatgaaaaagctaaacgagaggtgtccagttggaccgtggagggagatatcaataccgacccatgggcaggataccgctacaccggaaaactgagaccccattatcccctgatgccgaccaggcccgtcccttcgtacatacagagacctgattatgctgatcatccccttggcatgagcgagtcagagcaggccctcaaaggcacctctcaaatcaagctcctgtcctctgaggacatcgaaggcatgagactggtttgccgcctcgctcgcgaggtcctggatgtggctgccggaatgattaagcccggcgtgaccaccgaagagatcgaccatgcggtccacctggcctgtattgccagaaattgttacccatcaccgcttaactactacaattttcccaagagctgttgtaccagcgtgaatgaagtgatatgccatggtattccagataggcggcctttgcaggagggtgacatcgtaaacgtggacatcaccttgtaccgaaatggctatcacggagatctgaatgaaacgttctttgtcggtgaggtggacgacggcgcccggaagcttgtgcagactacttatgaatgtctgatgcaggctattgatgccgttaagccaggcgtgaggtatcgagaactcggtaacattatccagaaacacgctcaagcgaacggcttttcagtcgtgaggagttattgcggccacgggattcacaaactgttccacacagcacccaatgtccctcattacgccaagaacaaagccgtaggagttatgaagagcggtcacgtgttcaccattgagcccatgatctgtgagggtgggtggcaggatgagacttggccggatgggtggactgctgtaacccgcgatggcaagaggtcggcgcagtttgagcacaccctgttagtcacagacactggctgtgagattctgacacgcagattggactccgctcgtccccacttcatgagccagttctag

SEQ ID NO: 14195 - DNA, 738 bp, synthetic construct
  source 1..738: mol_type = other DNA; note = Synthetic coding sequence
atgggacgtctggatgggaaagtcattatactcacagctgcagcccaaggcatagggcaggctgcagccctggccttcgcccgagaaggggctaaggtcatcgcgaccgatatcaatgaatccaaactccaagagcttgagaaataccccgggatccagacccgcgtgcttgatgtgacaaaaaaaaaacaaattgaccaattcgcaaacgaggtcgagcggctggatgtcctgtttaatgtagcaggctttgtgcatcacggaacagtacttgactgcgaagaaaaagactgggatttcagcatgaaccttaacgtgcgctccatgtatctgatgataaaggctttcctccccaagatgcttgcccagaagagtggtaacattataaacatgagcagtgtcgcctcgagcgtcaagggggtcgttaacagatgtgtatacagcacaacgaaagctgccgtcattggcctcaccaaatctgtggcagcagatttcattcagcagggaataagatgcaattgtgtttgcccaggaaccgtggacaccccctccctgcaggagcggatacaggctcgaggcaatcccgaggaagcccgtaacgactttctgaagcgtcagaaaaccgggcgttttgctacagcagaggagatcgccatgctgtgtgtgtacctggcatctgacgagagtgcttatgtgactggcaaccccgttattatcgatggcggatggagcctgtag

SEQ ID NO: 14196 - DNA, 2520 bp, synthetic construct
  source 1..2520: mol_type = other DNA; note = Synthetic coding sequence
atgagcgtcgtggggattgacttggggtttcttaattgttatatcgccgtggcccgctctggggggattgaaacaattgccaacgagtattccgatcgctgcacacctgcatgtatctctcttggatctcgcactagagccatcggcaatgccgctaaatcgcagatagtgaccaatgtcaggaacacaatccacgggttcaaaaagctgcacggtcgttcattcgacgacccaattgtccagactgaaaggatcagactcccttatgagctccagaaaatgcctaacgggtcagcaggggttaaggtgaggtacctagaggaggaaaggcccttcgcgatcgagcaagtcaccggcatgctcctggcaaaactaaaagagaccagcgagaacgcgctgaaaaaaccagttgcggactgcgttatctcaatcccctccttctttactgatgcagagaggcggtctgtgatggcagccgctcaagtcgccggccttaattgtctgagactgatgaacgaaaccaccgcagtagcactggcctatggcatctacaaacaggacctgcctcccctcgacgaaaagcccagaaatgttgtctttatcgatatgggccatagcgcctaccaggttctcgtatgtgccttcaacaagggtaagctgaaggtgctggctacgacatttgatccctaccttggggggcggaactttgacgaggcgcttgtggactacttttgcgacgagttcaagactaaatacaagattaacgtgaaagaaaacagccgtgccctgctgcggctgtatcaggagtgcgaaaaactgaagaagctcatgtcggctaatgcctctgacctgcctcttaatatcgaatgcttcatgaacgacctggacgtttccagcaaaatgaaccgggcccaatttgagcagctgtgcgctagtcttctggcacgagtcgagcccccattgaaagctgtgatggagcaggccaacctacagagagaagatatctcatcaattgaaatcgtaggcggagctacccgaatccctgcagttaaggagcagataactaagtttttcttaaaagatatttctaccaccctcaatgctgacgaagccgttgcccggggctgtgccctccagtgcgctattctgtctcccgccttcaaagtccgtgagttttcgataactgatcttgttccctattccataacactgcggtggaaaacaagctttgaggatgggtccggagagtgcgaagtcttttgcaaaaatcacccagctcccttttcaaaggtaatcacatttcacaagaaagaacccttcgagttggaggctttttacactaaccttcacgaagttccctatcccgatgccaggatcgggtcctttaccatacaaaacgtgttcccgcagagtgacggcgattcctccaaggtaaaggtgaaagtaagggtgaatatacatgggatcttttccgtcgcctccgcttcagtgattgaaaaacaaaacctcgagggcgatcattctgatgcgcccatggagactgagacctctttcaaaaatgaaaataaggacaacatggataagatgcaagtggatcaagaggagggccatcagaaatgtcatgcagagcataccccagaagaggagatagatcatacaggagccaaaactaagagtgccgtgtctgataaacaggatagactcaaccagaccttgaaaaaaggtaaggtgaagtccattgacctgcccatccaatctagcctgtgcaggcagttgggtcaggaccttttaaacagctacatcgaaaacgagggtaaaatgataatgcaggataagctcgaaaaggagagaaatgacgctaaaaacgctgtggaggagtacgtgtacgatttcagggatagactgggaaccgtctacgagaaattcattaccccagaggatctgtccaagttgtccgctgttctggaagacacggagaattggctgtatgaagacggtgaggatcagcctaagcaggtgtacgtggacaagctgcaggagcttaaaaaatacggccaacctatccagatgaagtacatggaacatgaggaacgccctaaagccttaaatgacttgggtaagaagatacaactagttatgaaggtgatcgaggcttatagaaacaaagatgagcgatacgaccatctggatccaactgagatggagaaagtggagaaatgcatctccgatgcgatgtcttggcttaatagcaagatgaatgcgcagaataagctttctctcacacaggatccagtggttaaagtgtcggaaatcgtggctaagagtaaggagctcgataatttttgtaacccaattatttacaagccaaaacccaaagcagaggtcccagaggacaagccgaaggccaacagcgaacacaacggtccaatggacggacagagcgggactgagactaagtccgacagcactaaggactctagtcagcatactaagtcctccggagagatggaagtagactag

SEQ ID NO: 14197 - DNA, 1224 bp, synthetic construct
  source 1..1224: mol_type = other DNA; note = Synthetic coding sequence
atggctgcaccatgtgccgaggacccatccttggagagacacttcaagggtcaccgtgatgccgtgacttgcgtggactttagtataaacacaaagcagctggcctctggttccatggactcatgtctgatggtgtggcatatgaaaccacaaagcagggcttacagatttacaggccataaggacgctgttacatgcgtcaatttttctccttcaggacatctgctcgcttccggctccagggacaagacagtaagaatctgggtgcccaacgtaaagggcgaatctactgttttcagggcccataccgcaacggttagatccgtacacttctgttctgatggccaatcttttgtgacagcctccgatgacaaaactgtgaaggtctgggccacacataggcaaaagttcctcttttctctgtcccagcatatcaattgggttcggtgtgcgaagtttagcccggacggaagattaatcgtgagcgcttccgatgataagaccgtgaagctttgggataaaagcagcagagaatgcgtccactcttattgtgaacatgggggatttgtaacatacgttgatttccacccctctggcacctgtattgccgcggccggcatggataatacggtgaaggtatgggacgtccgtactcatcgacttctgcagcattatcaactgcacagcgcagcggttaacggattgagttttcacccttccggcaactacctgattaccgcatcatccgactctacactcaaaatcctggacctgatggaaggccgtctcctgtacacactacacggccaccagggtcctgccacaaccgtggcctttagtcgcacgggagaatacttcgctagcggcggatcagatgagcaggtcatggtttggaaatccaacttcgatatcgtggaccatggcgaggtgacaaaggttccgaggcctcccgcaaccctggcatcatctatgggtaacttgccagaagtggacttccctgtgccccccggaagaggaagaagtgtcgagagcgtgcagtcacagccacaggaaccagtcagtgttccccaaacactgacctccacccttgagcacatcgtgggacagctggacgtgctgactcagacagtctccattctcgaacaacgcctgaccctaactgaggataagcttaagcaatgcctggagaatcagcagctgattatgcagcgtgccacaccctag

SEQ ID NO: 14198 - DNA, 1173 bp, synthetic construct
  source 1..1173: mol_type = other DNA; note = Synthetic coding sequence
atggcgaccggtgacctcaagcgctcactcagaaatcttgagcaggtgttacgcctgctgaactacccagaggaggtggactgcgttggccttatcaagggagaccccgctgcctccctgcccattatttcctattcattcacttcatacagtccgtacgtgacggaactgatcatggaatccaacgttgaactgattgccaaaaatgatctgcgcttcatagatgcagtgtacaaactcttacgagatcagtttaattataagcccattctgacaaagaagcagtttattcagtgtggcttcgccgagtggaaaatccagatagtgtgcgacatcctcaactgtgttatgaagaaacacaaagaactctcatcgctgcaaaaaatccctagtcagcagagaaaaaaaattagctccggaaaaagcgagcctcccctagggaacgagaagatatccgccgaggctgttggggtggacatctcaggtcgtttcatgacatcgggaaagaagaaagctgtcgtcatacgccacctgtacaatgaggacaatgttgatatttctgaggataccctctcccccatcacagatgtaaatgaggctgtggacgtctctgaccttaatgctactgaaatcaaaatgcccgaagtgaaggttccagaaattaaagcggagcagcaggacgttaatgtcaaccccgaaatcacagctttacagaccatgctggctgagtgtcaggaaaatctcaaaaaactgacttcaattgagaaacggttagactgcctggaacagaagatgaaaggaaaagtgatggtcgacgagaatacgtggaccaatctgctgagtagggttacccttttggagacggaaatgcttctgagcaagaaaaatgatgaattcattgagttcaatgaagttagcgaagactatgcctcttgttctgatatggacctcttgaaccctcatcggaaatcagaagtggaacgcccggcatcaattccactctcttcaggttactcaacggccagctccgatagcacaccaagagcctcaacagtgaattattgcgggctgaacgaaatatctgaggagacaactattcagaaaatggagaggatgaaaaagatgtttgaggagactgctgaattacttaaatgtcccaaccattatctctag

SEQ ID NO: 14199 - DNA, 2601 bp, synthetic construct
  source 1..2601: mol_type = other DNA; note = Synthetic coding sequence
atgcccgccgtcagcttgccaccaaaagaaaatgccctttttaaacgcattctgaggtgttacgagcataaacagtatcggaacgggctgaagttctgcaaacagattctgtcaaaccctaagtttgccgaacacggggagaccttagccatgaaaggacttacacttaattgtcttggaaagaaggaggaagcttatgaactggtgcgcagaggcctgaggaatgatctgaaaagccacgtctgttggcacgtgtatggtttgctgcagcggtcggacaagaagtatgatgaggctatcaagtgctatcgaaacgcgctcaaatgggacaaagacaatctccagattctcagggatctcagcctcctgcagatacagatgagagaccttgagggctacagggagaccagataccagctgttgcagctgagacccgctcagagggcttcctggatcggatacgcgattgcttatcacctgctggaggactacgaaatggctgctaaaattcttgaggagttccgaaaaacccagcagaccagccccgacaaggtagactacgaatacagcgagcttctgctctaccagaaccaggtgctgagggaggctggtttgtacagagaagctctcgagcatctctgtacttatgaaaagcaaatctgcgacaagttggctgtagaagaaaccaagggagagttactactgcaactgtgtcgcttggaagacgccgcagacgtttacagagggttgcaggaacgaaatccagagaattgggcatactacaaaggcctggaaaaggcgctcaagcctgccaacatgctagagcgcctaaagatatacgaggaggcatggaccaaatacccgcgcggcctggtgccacggcgactccccctaaatttcctgtcgggggagaaatttaaggagtgcttagacaaatttctgcggatgaacttctcgaagggatgccccccggtctttaatactctcagatcactgtataaggacaaggagaaagtggccatcatcgaagaactcgttgtggggtacgagacatctctgaagtcttgccgtctctttaacccaaatgatgacggtaaggaggaaccccccaccacactgctgtgggtgcagtattatctcgcgcagcactacgataagattggacagccgtccatagccctcgaatatattaacactgcgatcgaatccacacctacactgatcgaattattcctggtgaaagccaagatttataagcacgccgggaatataaaggaagcagccagatggatggatgaggcccaggccctcgacacggccgaccggttcatcaattcaaaatgcgcaaaatacatgttgaaggctaatcttattaaggaagctgaggaaatgtgtagcaagtttactcgtgagggaacttcagcagtagagaacttaaatgaaatgcaatgtatgtggttccagactgaatgtgcccaagcctataaggctatgaacaagtttggagaggctcttaaaaaatgccacgaaatcgagaggcatttcatcgaaatcacagatgatcagttcgacttccatacctactgcatgcgtaagattactctccggagctatgttgacctgctgaaattggaagacgtgcttcgccagcaccccttctattttaaggcagcccggattgcgatcgagatttatctaaaactgcacgacaaccccctcaccgatgaaaacaaggaacacgaggccgacactgccaacatgtccgacaaggagctgaagaaactccgaaataagcagaggcgggcccagaagaaggcccaaatcgaggaggagaagaaaaatgcagaaaaggagaagcaacaaaggaatcaaaaaaagaaaaaggatgatgacgacgaggagataggcggtcccaaagaagagctgatccccgagaagctggctaaagtagagacaccactggaggaggcgatcaagttcctcacacccctcaaaaacctggtgaaaaacaaaattgaaacccatctcttcgctttcgaaatttatttcagaaaggagaaatttctcctcatgctgcagtcagtaaaacgcgcatttgccatcgatagctcgcatccctggcttcatgagtgtatgatcagactcttcaacactgctgtgtgtgaaagcaaggatctgtctgacacagtgaggacggtgctgaaacaggaaatgaacagactgttcggtgccacaaaccctaagaacttcaatgaaacattccttaagcgtaattcagacagcttaccccaccgtctgtcggctgcgaagatggtgtactacttggacccctcatcccagaagagggccatcgaactagcaaccacgctggatgaatccctcaccaaccgcaacctccagacctgcatggaggtcctcgaagctctgtatgacggatccttgggggactgtaaagaggccgcagaaatatacagggctaactgtcacaaactgttcccgtacgctctggctttcatgcctcccggatatgaagaggacatgaagattaccgtaaatggggactcctccgccgaagccgaagaactggccaacgagatttag

SEQ ID NO: 14200 - DNA, 1293 bp, synthetic construct
  source 1..1293: mol_type = other DNA; note = Synthetic coding sequence
atggccagtagcgccaagagtgccgagatgccgaccatctccaagacagtgaatccgactccagatccacaccaagagtatcttgatccccgcatcacaattgccctgttcgaaattggtagtcacagcccgagcagttgggggtctctcccgtttctgaaaaattcaagccatcaagttaccgaacagcaaacagctcagaaattcaataatctcctgaaagaaataaaagacatcctgaaaaatatggccggtttcgaagaaaagattaccgaagccaaggagctgtttgaggagaccaatatcacagaggatgtttctgcacacaaggagaatattaggggtctagataagatcaatgaaatgctgagtactaacttacccgtgtccctggctcccgagaaagaagacaacgagaaaaagcaggagatgattctggagaccaacatcacggaggatgtctccgctcacaaggagaacattcggggcctggataaaattaacgagatgctgagcactaatctccctgtgagtctcgcccctgaaaaggaagataatgagaagaagcagcagatgataatggaaaaccagaactcagaaaataccgcccaggtgttcgcccgtgatctggtaaaccgattggaggagaaaaaagttctgaacgaaacacaacagtctcaggaaaaggccaagaacagactgaacgtgcaggaggaaacgatgaagatacgcaataacatggaacagttgttacaagaagccgaacattggagcaaacagcatacagagctgtcaaaacttatcaaatcctaccagaaatctcagaaggatattagcgaaactttggggaataatggggttggattccagacgcagccaaacaatgaggtctctgccaagcatgagctagaagagcaggtgaagaagctctcccacgacacatactccctgcagctgatggccgcactgctggagaatgagtgtcagatccttcaacaaagggtggagatccttaaggagctccaccaccagaagcagggcacgctgcaggaaaaaccgatccaaatcaactataaacaggacaagaagaatcagaagcctagtgaagcaaaaaaagtcgagatgtataagcagaacaagcaagcaatgaagggtaccttctggaaaaaggacaggagctgccgaagccttgatgtgtgcctgaacaagaaggcgtgcaacacccaatttaatatccatgtggctcgaaaggccctcagaggaaagatgagatctgcatcaagtctgcggtag

SEQ ID NO: 14201 - DNA, 5199 bp, synthetic construct
  source 1..5199: mol_type = other DNA; note = Synthetic coding sequence
atggccgccatcggtcgcggacggagtctcaaaaacctgcgggtccggggtcgtaatgatagcggcgaggaaaatgtgcccctggatctgactcgagagccatcagacaacctgagagagatcctccagaacgttgccagacttcaaggggtatcaaacatgaggaagctaggccatctcaacaatttcactaaactcttgtgcgacattggtcatagcgaggaaaagcttggttttcattacgaggatattattatctgtctgcgtctggctctactgaacgaggccaaggaagttcgcgctgctggccttagagcattgaggtacctcatccaagacagtagcatcttgcagaaggtcctgaaactgaaggtggactacctcatcgcaagatgcatagacatccaacagtctaacgaggtggaaagaacccaggcccttcgcctggtgaggaagatgatcacagtgaacgcctcccttttcccatccagcgtgacaaattcacttatcgctgtcgggaatgacggactccaggagcgtgacagaatggttagggcttgcatcgccattatttgtgagcttgcgttgcagaacccagaggttgtggccctgaggggcggtttgaacaccatattgaagaacgtgatcgattgccaacttagccggataaacgaggcgttgataaccaccatcctccacctgctgaaccatccaaagacccgacagtacgtgcgagctgacgtggagcttgaaagaatactggcaccttacacagacttccactaccggcactcacccgacacagcggaggggcagctgaaggaagatagggaggcccgctttctggcatctaaaatgggcattatcgccacattcaggtcctgggctggtattatcaacctctgtaagcccggcaattccggcattcagtctctgattggtgtgctttgcattccgaatatggaaattcgccggggactactggaggtgctatatgatattttcaggctccctctacctgtcgtaaccgaggagttcattgaagccctgctctcagtggatcccggaagatttcaggattcatggcgtctgagcgacggattcgtcgccgctgaggctaagaccattcttcctcaccgcgcccgctctaggccggatctaatggataattatctggcccttattcttagtgctttcatcaggaacggcctgctggaaggcctggttgaggtcataacaaacagtgacgatcatatatccgttcgggcaaccatcctattgggcgagctgttacatatggctaatacaatactcccacattctcattctcatcatttacactgccttcctacgttgatgaacatggctgcaagttttgatatcccaaaagaaaaacgtcttcgagcaagtgcggccctcaactgtctaaaacggttccacgaaatgaagaagcggggcccaaaaccgtatagccttcacctggatcacatcatccagaaggcaatagcgacacatcagaaaagagatcaatatctgcgggtgcagaaagacatcttcatactgaaggatacagaggaagccctcctcattaatttgcgcgattcccaggtgctccaacataaagagaatctagagtggaactggaatctcatcggcaccatactaaaatggccgaatgtaaacctgaggaattacaaggatgagcagctccataggtttgttaggcgtctgttgtacttttacaagcccagttccaaactgtacgcaaacctggacctggacttcgccaaggctaagcagctcacagtggtcgggtgccagtttacagaattccttctcgagtccgaggaggacggtcaaggttacctcgaagacttagtgaaggacattgtgcaatggctcaacgcatcctctggtatgaaaccggaacggtcactgcaaaataacggtctcttaaccaccctgagccagcattattttctatttatcggcactctttcctgccacccgcacggcgttaaaatgctggaaaaatgcagcgtcttccagtgtttactcaacttatgctcgctgaagaatcaagatcacctgctgaaactcaccgtgtctagcctggattactctcgggatggactggccagagtgatcttgagtaagatactcaccgctgctaccgatgcctgcaggttgtatgcgacaaagcacctgcgcgtgcttctgcgtgccaacgtggagttcttcaacaactggggcattgagctactggtcactcagctacatgacaaaaacaagaccatcagtagtgaggcacttgacattctggacgaagcgtgcgaggacaaggccaatctgcatgctcttatccagatgaagccagctctttcccatctgggggacaagggtttactgctcctgctgagattcctcagcattccaaaaggattctcatatttgaacgagcgtggatatgtggccaagcagttggagaaatggcacagggagtataacagcaagtatgtcgatctgatagaggagcaactgaacgaagcccttactacctacagaaaacccgttgatggcgacaactacgtgaggcggtccaaccaacggctgcagcgtcctcacgtttatctccccatccacctctatggccagctcgtccatcacaaaactggctgtcacctgcttgaagttcagaacattatcacggagctctgtcgcaatgtgaggactcctgacctggacaagtgggaggagatcaaaaaactgaaagcttccctctgggccctgggaaatatcggctccagcaactggggtttaaatctcctgcaagaagagaacgtcattcctgacattcttaaacttgcaaagcagtgcgaagttttatccatccgaggcacgtgcgtatatgtgctcggcctgatcgcaaagacaaagcaaggctgcgacatactcaaatgtcataactgggatgccgtgaggcacagtagaaagcatctctggccggtagtccctgacgacgtcgaacagctgtgcaatgaactgagctccatccccagcacactgagtttgaattctgaaagcactagtagccgccacaactccgagagcgagtccgtgccttccagcatgttcatcctggaagacgacaggtttggcagtagttctacttccacgttctttctggacataaacgaagacaccgagcctactttttatgaccggagcggcccaattaaagataaaaattccttcccattttttgccagttctaaactggtgaagaataggatcctcaacagcctgaccctgccgaataaaaagcacaggagctctagcgatccgaaagggggcaagctgtccagtgagtcgaaaacttccaatcgcagaatcagaacattgacagagcccagcgtggactttaaccatagcgacgacttcacccccatttcaaccgtccagaagactctccaacttgagacttccttcatggggaataagcacatcgaggacacaggcagtacaccgtctatcggagaaaacgatctgaagttcactaagaatttcggtacagagaaccatagagaaaacacctccagggaacggctggtcgtagaaagttctacctcttcccacatgaagatccgctcccagagcttcaacactgacactacgacaagcggtatttcctcgatgtcaagctcccctagccgggaaactgtaggagttgatgcaacaactatggatacagattgcggctcaatgtctacggtcgtctcaacaaaaaccatcaagacaagccactatctgaccccacagtcgaatcacctgtccctgtctaagtcaaactccgtgtccttggttccgccaggatcaagccacaccctcccccggcgtgcacagtctcttaaggctccctctattgctacgatcaaaagtctggctgattgtaacttttcttatacctcttcccgagacgctttcggatacgccactctgaagcgacttcagcagcaaaggatgcatccatcattgtcccacagtgaggcgcttgcctccccggccaaggacgtgttgttcaccgacacgatcacaatgaaagccaatagcttcgaaagtcgactgactcctagccggattgactttaaaaagaagcacgttggtggcattagatcactgcgcccgacaatcaccaacaacctgtttcggttcatgaaggccttgtcatacgctagcctcgataaggaggacctactttctccgattaaccagaacaccttgcagaggagttcctccgtcaggtcaatggtatcgagcgcaacatacgggggtagcgacgattacatcggcttggccctgcccgtggatataaacgatatattccaggtgaaagatatcccatatttccagacgaagaacatccccccccacgatgacaggggagcccgggcattcgcacatgatgctggcggcctgccctctggcaccggcggtctggtcaaaaactcattccacctgctgcgacagcagatgagtctgactgaaatcatgaattcaatccatagtgacgcgagcctgtttctcgagtctactgaagacacaggactacaggaacacaccgacgacaattgtctgtattgtgtctgcatcgagattctgggctttcagccttcaaatcagctaagtgctatctgctcacactccgacttccaggatatcccatattccgattggtgcgaacagactatccacaatcctctggaagtcgtgcccagcaagttctcaggaatatctgggtgcagcgatggcgtaagccaggagggatccgcctcctccacgaagagtacggagctgctgctgggagtgaagaccatccccgatgataccccaatgtgccggattctgctccgcaaggaagtccttcgcctggtgataaacctcagctctagcgtctctacaaagtgccatgaaacaggcctgttgacgattaaagagaaatacccccaaacctttgatgacatctgtctgtactccgaagtgagtcacctcttatctcattgcacctttcgcctgccatgccgcagattcatacaggagttgtttcaggacgtccaattcctgcagatgcacgaggaagctgaagcggttctagcgaccccgcccaagcagcccattgtcgacacatcggccgagtcctag

SEQ ID NO: 14202 - DNA, 1761 bp, synthetic construct
  source 1..1761: mol_type = other DNA; note = Synthetic coding sequence
atgagcgctaccgttgtggacgctgtgaacgccgccccgctaagtgggtccaaggagatgagcttagaagagccgaaaaagatgaccagggaggactggcggaagaaaaaagagttggaagaacagcgaaagttgggcaatgcacctgcagaagttgacgaggagggcaaagatataaatccgcatatcccccagtacatatctagcgttccatggtacattgatccatcaaagcgtcccactcttaagcaccagcgtcctcagcctgaaaagcagaagcaattctcatcatccggagaatggtacaagcgcggcgtgaaggaaaatagcatcataacaaagtatcgaaaaggtgcctgcgagaattgtggtgctatgacacacaagaaaaaggattgtttcgagcggccaagacgagttggggccaagtttaccgggaccaacatagcccccgatgaacacgtgcagcctcaactgatgtttgattacgatggcaagagggatagatggaacggatataatcccgaagaacatatgaagatagtggaggaatatgctaaagtggacttagctaagcgtaccctcaaggcccagaagctgcaagaggagttggcgtccggcaagttggttgagcaggctaattctcctaagcatcagtggggagaagaggaacccaatagtcagatggagaaagatcacaatagcgaggatgaggatgaggataaatatgcagacgatattgatatgccaggccagaattttgatagtaaaaggagaatcactgtgcgcaacttgcgcatcagagaagacatagctaaatatctgcggaacctcgatcctaattctgcatattatgatcctaaaacacgcgctatgagagagaatccatacgcaaatgcaggtaagaaccccgatgaggtaagttatgccggggacaacttcgtgaggtacacgggggatacaatctccatggcgcagacacagttgtttgcctgggaggcatatgacaaaggtagcgaggtgcacttacaagccgaccccacaaagttagaactgctctacaagtcttttaaagtcaaaaaagaggatttcaaggaacagcagaaggaatcaattctggaaaaatacgggggacaggaacacctggatgcacccccagcggagctgttgttagcacagaccgaagattacgtcgagtactctagacacggtacagtgatcaaaggtcaggaaagggccgtcgcctgttccaagtatgaggaagatgtgaagatccataaccatacccacatctggggcagctattggaaggaggggcgctggggctataagtgttgtcacagcttcttcaagtactcatactgcacaggtgaagccggtaaggagatcgtcaactccgaggagtgtatcataaatgagataactggtgaggaaagcgtgaagaagcctcagacccttatggagctacaccaggagaaactgaaagaggaaaagaaaaaaaagaaaaagaagaagaagaagcaccgaaagagcagcagtgatagtgatgatgaggaaaagaagcatgaaaagctcaaaaaggccttgaacgcagaagaggccaggttgctgcatgtgaaggagaccatgcaaatcgacgaaagaaagcgaccctacaatagcatgtatgagactcgggaaccaactgaggaggaaatggaggcctaccggatgaagcgacagaggcccgacgatccgatggcgagcttcctgggccagtag

SEQ ID NO: 14203 - DNA, 1185 bp, synthetic construct
  source 1..1185: mol_type = other DNA; note = Synthetic coding sequence
atggccctggaagtgggagacatggaagatgggcagctgagcgattccgacagcgacatgaccgtggctccaagcgatcgtcccctgcaactgcctaaggtgctgggcggagacagcgcaatgcgagcattccagaatacagcaaccgcttgtgctcccgtgagccactaccgagcggtcgagagcgtcgatagtagtgaggagtccttttctgactcagatgacgactcatgcctatggaaacggaagagacaaaaatgctttaaccctccacctaagccggagcctttccaatttgggcagtcgagccaaaagccaccagtggctggtggtaaaaagataaacaacatctggggggctgttctgcaggaacagaatcaggatgcagttgcaactgaactaggcattctgggaatggaaggcacaatcgaccgtagccgacagtcagagacctacaattacttactggccaagaagctacggaaggagagccaggaacacaccaaggacctggataaggagctggacgaatacatgcacgggggaaaaaaaatggggtctaaggaagaggaaaacgggcaagggcacttgaaacggaagcgacctgtaaaggatagactcggcaataggcctgagatgaactacaaaggtaggtacgagataactgcagaggatagccaagagaaagtggcggacgagatttcattccgactacaggagcctaagaaagacctgattgcgagagtggtgagaatcattggcaacaaaaaagccattgagctacttatggagacagcagaggttgaacagaatggggggctgtttataatgaatggtagccgcaggagaactcccgggggagtttttttgaacctgcttaagaacacgcctagtatctcagaggagcagattaaggacatcttttatattgaaaatcagaaagaatacgagaataagaaagccgctaggaagcgtaggacacaggttcttggcaaaaaaatgaagcaagccattaagtctctcaactttcaggaggacgatgacacatctagggaaacttttgcttccgacaccaacgaggccctagcttctctagatgaaagccaagaaggccacgccgaggccaaacttgaggcagaagaagccattgaggtggaccattcccacgacttggacatcttctag

SEQ ID NO: 14204 - DNA, 789 bp, synthetic construct
  source 1..789: mol_type = other DNA; note = Synthetic coding sequence
atgttcctctttagtcggaagactcgtactcctatttcaacctatagcgatagctatagggctccgactagtatcaaagaggtctacaaggatccgcccctctgcgcatgggaggccaacaaattcctgacaccgggcctgacacacacaatggaacgccacgtggatcccgaggctcttcagaagatggccaagtgcgcggttcaagactacacatacagaggcagcatcagcggacacccttatctcccggagaaatattggctcagccaggaagaggccgataaatgcagtccaaattatctggggagcgactggtacaatacctggaggatggagccatacaactcaagctgctgcaacaaatacactacctatttacccaggctcccaaaagaggcccgcatggaaaccgctgtccgggggatgcctctcgagtgtcctccccgtccagagcgcctgaatgcttatgaacgcgaagtaatggtgaacatgctaaattcactgtcaagaaatcagcagctgcctaggattacaccgaggtgcgggtgcgtcgacccactaccaggtcggcttcctttccatggttatgagtctgcctgctccggtagacactactgcttgcgcgggatggattactatgccagcggggccccctgtactgataggcgcctcaggccgtggtgtcgcgaacagcccactatgtgtacctctctgcgtgcgcctgctcgaaatgcggtttgttgttataatagtcccgccgtgattttgcccataagtgaaccttag

SEQ ID NO: 14205 - DNA, 4206 bp, synthetic construct
  source 1..4206: mol_type = other DNA; note = Synthetic coding sequence
atggaggagattcctgtgaaagtggccgttcggattcggcctcttctgtgcaaggaagccctgcacaatcatcaagtgtgtgtccgggtcatcccaaattctcagcaggtaattatcggacgcgaccgggtctttaccttcgactttgtattcggcaaaaattcgacacaggatgaggtgtataacacgtgcattaagcctcttgtgctttccttgattgaagggtacaatgcgactgtgttcgcctatggccagacagggagcggcaaaacgtacaccatcgggggagggcacatcgcttctgtggtggaaggtcaaaaagggattatcccacgggccatccaggagatatttcagagcattagtgaacacccgtcaatcgattttaatgtgaaggtcagttatattgaagtgtacaaggaagacctcagggacctcctggaactagagacatccatgaaagaccttcatattagagaggatgagaaagggaataccgtgattgtgggtgccaaagagtgccatgtcgaatctgccggggaggtgatgtcattgcttgagatgggaaatgcggcccggcacaccggaacaacccagatgaacgaacattcaagcagatcacatgcgatttttacaatcagcatatgtcaggtgcataagaacatggaggctgctgaggacggaagttggtactcacccagacatatcgtgtctaaattccatttcgtggacctcgccggaagcgagcgcgtgaccaagacagggaacaccggggaacgctttaaggagtcaatccaaattaactcgggcctcctggccctggggaacgtaatttctgccttaggcgatcctcgaaggaaatcctcccacataccctatagagatgctaaaataactagactcctgaaagatagcctcggaggtagcgctaaaaccgtgatgattacatgtgtatcaccaagcagttctaatttcgatgagagtctgaattctctgaagtacgctaatcgggccaggaatattagaaacaagccaacggtgaatttctcccccgagtctgataggatcgatgagatggaatttgagatcaagttgcttagagaggccttgcagtcccaacaagcgggcgtgtcccagaccacacagattaaccgagaaggctcccctgatacgaaccggatccacagcctcgaagaacaggtagcacagcttcagggggagtgcctgggctaccagtgttgtgtggaagaagcttttacctttctcgtcgatctaaaggatacggtcaggttaaatgagaagcagcagcataaactgcaggaatggttcaatatgatccaggaggtgcgcaaggcagtgctgacgtcgttccgaggaattggcggtacggcaagtttagaagaggggccccagcatgttaccgtgcttcagctaaaaagggaattaaaaaagtgccagtgtgtgttggctgccgatgaggtggtttttaaccagaaggaactcgaagtaaaagaactgaagaatcaagtccagatgatggtccaagaaaacaaaggacacgccgtctcactcaaggaggctcaaaaggtgaatcgccttcagaacgaaaagattatagagcagcagttactagtggaccaattgtctgaagaactgacaaaactgaatctttctgttacgagttcggccaaggaaaactgcggtgatggccctgatgcacggatcccagagagacgaccgtacacagttccctttgacacccatcttggccactatatatacataccttcccggcaagattcacggaaggttcatacctccccccccatgtactctcttgatcgcattttcgccggtttcaggacacgtagtcagatgctgctaggccatattgaagagcaggataaggtcttacattgccagttcagtgacaacagcgatgacgaagaatccgagggccaggagaagagcgggactcggtgccggtcaaggtcctggatacagaagcccgattctgtttgtagtctcgttgaactgagtgatacccaagatgagactcagaaatccgacctggagaatgaagatctgaaaattgattgccttcaggaaagccaagaactaaacctccagaaattaaagaattcagaacgcattctcaccgaagctaaacagaagatgcgagagctaacaattaacataaaaatgaaggaggacctcataaaagagctgattaagacaggcaacgacgccaagtccgtgtcaaagcagtattcgttgaaggtgaccaagttagagcacgatgccgagcaggccaaagtggagctcattgagacccagaagcagttacaggagctggagaataaagatttgtcagatgttgcgatgaaggtgaagctgcagaaggagtttcgcaagaaaatggatgcagcaaaactccgtgtccaggtgttgcagaagaagcagcaggacagcaaaaaacttgcctctctgtcgattcagaacgaaaagcgggccaacgaacttgaacaatctgttgatcatatgaagtaccagaaaatccagttacagaggaagctgcgcgaggaaaacgaaaaaaggaagcagctcgacgccgtcattaagagagaccaacagaagataaaggagattcagttgaagaccggccaggaagagggactcaagccgaaagccgaagacttagacgcttgcaatcttaaacgccgaaaagggtcatttggtagtatagatcacctgcagaagcttgacgaacagaaaaagtggctcgatgaagaggttgagaaggtacttaaccaaaggcaggagctcgaagaactggaagccgatttgaagaagagggaggctatagtcagtaagaaggaggccctgttgcaagaaaaaagccatctggagaacaaaaagctgcgctcttcccaggctttaaacactgattctcttaagatttcgacaaggctcaacctcttggaacaggagctgagtgagaaaaatgtgcagttgcaaacatcaaccgccgaggaaaagacaaagatttcggagcaggtggaggtcctacaaaaggagaaggaccagctgcagaagaggaggcacaatgttgatgaaaagctgaaaaacgggagggtgctgagtccagaggaagagcacgtattgtttcagctagaggaaggcatcgaggcactggaagccgcgatagaatacagaaatgaaagcatccaaaatcgccaaaagagcctccgcgcttctttccacaacctgagcaggggcgaagccaacgttctggagaagttggcatgtctgtcccctgtggaaatcaggacgatactcttccgttattttaataaggtggtcaatctccgggaggccgagagaaagcagcagctttacaatgaagagatgaagatgaaagtactggagcgcgacaatatggtacgcgagcttgagtctgccttggaccatctgaagcttcagtgtgatcggagactcaccctgcagcagaaggagcacgaacagaaaatgcagcttctcctgcaccattttaaggagcaggatggagaggggattatggagacctttaaaacctacgaggacaaaatccaacaattggagaaggatctgtacttctacaaaaagacctcaagagaccataagaaaaagttaaaggagctagttggcgaggcgatcaggcgccaacttgccccaagtgaatatcaagaggctggcgacggcgtcctgaagccagagggaggcgggatgctgtcagaggagctgaagtgggcttcaagacccgagtcgatgaaactaagtggcagagagagagagatggacagctctgcctcatctcttaggacccagcctaaccctcagaagctatgggaagatatacccgagttgccacccattcattcttccctcgcacccccatccggccacatgctgggcaacgaaaataagaccgagacagatgacaatcaatttactaagtctcattctaggctgagcagtcaaatccaagttgtaggcaacgtgggtcggctgcatggcgtgacccccgtgaagctctgcaggaaggaactgcggcagatctccgccctggaacttagtcttcgacgatcctcacttggagttggaattgggtcaatggctgccgattctattgaagtgtcgagaaagccacgtgacctgaaaacctag

SEQ ID NO: 14206 - DNA, 768 bp, synthetic construct
  source 1..768: mol_type = other DNA; note = Synthetic coding sequence
atggttaagggggagaagggacccaaggggaaaaaaatcaccctgaaggtcgccagaaactgtatcaaaataaccttcgacggaaagaagagactggacctttccaagatgggcataacaacattccctaagtgcatactcaggctaagcgatatggatgagctggatctgtcccgcaacctaattagaaaaattccggactccatttctaagtttcagaacctgcgatggctcgacctgcattccaactacatcgacaagctccccgagtctataggacagatgacaagccttctctacctgaatgtatctaacaacagattaaccagcaacggtctgccagtagagctcaagcagttaaagaatattagagccgtgaatcttggcctcaaccatctcgactctgttcctaccacccttggtgcactcaaggaacttcatgaggtggggctgcatgacaatctgctgaataacatcccagttagtatctctaagttgcctaagcttaagaagctgaacattaagcggaatccattccctaaacctggcgagagcgagatctttatcgattccattaggcgcctcgaaaacctctacgtggtcgaagaaaaagatctctgcgccgcgtgtctgagaaaatgtcagaacgcccgggataatctaaaccggataaaaaatatggccaccacaacaccccggaagaccatcttcccgaaccttataagtcccaattcaatggctaaggactcctgggaggactggaggtag

SEQ ID NO: 14207 - DNA, 645 bp, synthetic construct
  source 1..645: mol_type = other DNA; note = Synthetic coding sequence
atgggccgtcgtcccgccaggtgctacagatactgtaagaacaagccttaccctaaatctcggttctgtagaggggttcccgacgctaagatacgtatttttgaccttgggaggaaaaaggccaaggtggatgagtttccgctggggggccatatggtctctgatgagtatgagcagctgtcctccgaggcattggaggcagcccgtatctgtgctaataagtacatggtcaagagctgtggacgcgatggattccacatgagggtgagactgcatcccttccatgtgatcaggatcaacaaaatgctcagctgcgccggtgccgatcgactgcaaacaggcatgaggggagcctttggaaagccacaaggaaccgttgcaagggtgcacatcggccaggttattatgagcatacgcacaaaactgcagaacgaggaacacgttatcgaagctttgcgaagggcaaagtttaaatttccaggtaggcaaaagattcatataagtaaaaagtggggtttcacaaaattcaacgcagacgagttcgaagatatggtggcgaaaaagtgtctcatcccagacggatgcggggttaagtatgtgcccagccacgggcccctggacaagtggcgcgttctgcactcctag

SEQ ID NO: 14208 - DNA, 3231 bp, synthetic construct
  source 1..3231: mol_type = other DNA; note = Synthetic coding sequence
atgaagtctagattttccactattgacctgagggctgttctggcagaattgaatgcttctttactggggatgagagttaataacgtgtacgatgtcgacaacaagacctacctgataagactgcagaagcccgacttcaaggcaactctgctgctggaatccggcatcaggattcataccacagagtttgagtggcctaagaatatgatgccttccagctttgccatgaagtgccggaagcatcttaagtcgaggagattagtgtccgccaagcagctgggtgttgatagaattgttgacttccagttcggatccgatgaggcagcctatcacctgattatcgagctgtacgacaggggcaacatagtgctgaccgattacgagtacgtcatcttaaacatactccggttcagaaccgatgaagccgatgacgttaaattcgcagtgagagaacgataccctctggaccacgccagagctgccgaacccctgctgaccttagagcggctgaccgaaatcgtggcctccgccccaaagggggaactcttgaagcgagtgttgaaccctctcctgccttacgggcccgcgcttatcgagcattgccttttggagaacggcttcagcgggaacgtgaaagtggacgaaaagctcgagaccaaggatatcgagaaggtgcttgtgagcctgcagaaggctgaggactatatgaagaccacatccaacttttccggaaaaggctatatcatacagaaaagagagatcaaaccttcattggaggctgacaaacctgtggaagacatactgacatatgaggaatttcatcctttcctgtttagtcagcactcccaatgcccctatatcgagttcgagagtttcgacaaggcggtcgatgaattctactctaagattgaggggcagaagattgacctgaaagccctccagcaggagaagcaggctctgaagaaactcgataacgtcagaaaagaccacgagaacagactggaagccttgcagcaggctcaggaaatcgataagctgaagggcgaactgatcgagatgaatctccagatcgtggatagagcaatccaggtggtccggagcgcgctggctaatcagattgattggacggaaatcggcttgattgttaaagaagcccaggcccagggtgatccggtggccagtgcaattaaagagctgaagttacagaccaaccacgtcactatgctcctccgcaatccgtaccttttgagcgaggaggaagatgacgacgtcgacggagatgtgaatgtcgagaagaacgaaacggagcccccaaagggtaagaagaaaaagcagaaaaataaacaactccagaagccgcagaaaaacaaacctctactggtggatgtggatctgtcactttccgcctacgcgaacgcgaagaagtactatgaccacaagcggtacgccgcaaagaaaacccagaaaacggtcgaagcagctgagaaagcttttaaatcagcagagaagaaaaccaagcagacattgaaagaagtccagacagtcacatccatccagaaagctaggaaagtctactggtttgaaaagtttttgtggttcataagctcagaaaattacttgattattggcggtcgggatcagcagcagaatgaaataatcgtgaagcggtaccttacaccgggtgacatctacgtgcatgccgatctacatggggccacctcttgcgtgataaaaaatcctacaggggaacccatccccccccgcactcttactgaggcgggtactatggcattgtgttacagcgctgcctgggacgcaagggtgataaccagcgcatggtgggtgtaccaccaccaggtgtccaagaccgccccaacgggcgagtatcttaccacaggcagctttatgattcgagggaagaaaaattttctgcccccatcctacctcatgatggggttctcctttctctttaaggtggacgaatcttgtgtgtggcggcaccaaggagaaaggaaggtgagagtgcaggatgaagacatggagaccttggcttcgtgcacatcagagctgatttcggaggagatggagcagttggatggaggggacacttctagtgatgaggacaaggaagagcatgaaactccagtggaagtcgagttgatgacccaggtcgatcaggaagacattacactgcagagcggcagggatgaactgaatgaggagctaattcaggaagaatcctccgaagatgaaggagagtacgaagaggtcagaaaagaccaggacagcgtgggagaaatgaaggacgagggagaagaaacacttaattatcccgatacaaccatcgatctttcccaccttcagccacagagaagtatccagaagcttgctagtaaagaggagtcatccaactcctctgattctaaaagccaaagccgcagacatctgtctgcgaaggagaggcgggaaatgaagaagaagaagctgccaagtgactcaggggacctggaggcactggagggaaaagacaaggaaaaagagtcaactgttcacatcgaaacacaccaaaatacttccaagaatgtcgcagccgtacaacccatgaaaaggggccaaaagtctaaaatgaagaaaatgaaggagaaatacaaagatcaggatgaggaagatagagagctgatcatgaagctcctgggaagtgcaggtagtaacaaagaagagaagggaaaaaagggcaagaagggcaagacgaaagatgagcccgtcaagaagcagccccagaagcccagaggaggtcagagggtcagcgacaatatcaagaaagagacaccattcctcgaagtgatcacacacgaactgcaggacttcgcagtggacgatcctcacgatgataaggaagagcaggacctggatcagcaggggaacgaggaaaacctctttgacagccttacggggcaaccccatccagaagacgtgctgttgttcgcgatccccatttgtgccccctacacaacaatgacaaactacaagtacaaggttaaactgacacccggtgtacagaaaaagggcaaagcggctaaaactgcgttaaattctttcatgcactcaaaggaagccacagccagggagaaggatttgttcaggagtgtcaaagatacggacctttcacgtaatataccagggaaggtcaaagtgagtgcaccaaatctcctgaatgtcaaaagaaagtag

SEQ ID NO: 14209 - DNA, 963 bp, synthetic construct
  source 1..963: mol_type = other DNA; note = Synthetic coding sequence
atgggggacattcctgcggtggggctctcttcatggaaggcttccccaggcaaagtgaccgaggcagtgaaagaggccattgacgcaggctatcggcattttgactgtgcttatttttatcataacgaacgagaggtgggagcgggtattaggtgtaaaattaaagaaggagcagtaaggcgcgaagacctctttatagctactaaattatggtgcacttgccacaagaagtctttggtggagacggcctgtaggaaaagcttgaaggccctgaagctaaactacctggatctgtaccttattcattggccaatgggcttcaagccacctcatcctgagtggattatgtcctgttcagagctctctttctgcttatcccacccgcgagttcaagatcttcctctggatgagagtaatatggttatcccgtctgacacagactttctcgacacttgggaagccatggaagacctcgtgatcacaggcctggtgaagaacattggtgtgtcaaactttaatcacgaacagctggagcgcctgctgaacaaacccggcctgcgtttcaaaccactgactaaccaaattgaatgtcatccttacctgacccagaagaacctgatcagcttttgccagagccgggatgtttctgtgacagcttacaggcccttgggcggcagttgtgagggcgtggacctgatcgataaccccgtcattaagcgaatagcaaaggagcacggaaagtctcctgcccagattctgatccgcttccagatacagaggaacgtcatcgttattcctggtagcatcactccttcccacattaaagaaaacattcaagtgtttgatttcgagttgactcagcacgatatggacaacatcctttcattgaatcggaatctccgcctggctatgttcccaattaccaagaaccataaggattatccgtttcatattgagtactag

SEQ ID NO: 14210 - DNA, 1239 bp, synthetic construct
  source 1..1239: mol_type = other DNA; note = Synthetic coding sequence
atgtctgggtaccaaaggaggcctggagccacgcctctgagtagagctcgctctctagctatccctgatgcccctgcgttctacgaacgccgatcctgcctaccccagctcaactgtgaaaggccccacgggagagacctcgactccccattttttgggattcgccccgcgtttatgtgctatgtgccgtcccccgtcctggcttccgtaggcgacactgatgacagatttgaggacttggaagaggcgaaccccttctcctttagagaattcctcaaaaccaagaatctcggactctcaaaagaagaccctgccagtcgtatatacgccaaagaggccagcaggcacagtttaggcctggaccacaatagtccccccagccaaaccggaggttacggacttgagtaccaacaaccattcttcgaagaccccaccggcgccggtgatcttctcgatgaggaagaggatgaggatacaggatggagtggcgcatatctcccatctgccattgagcagacgcatccggaacgagtgcccgccggcacctcaccctgcagcacttacttgtccttcttctctacgccgagcgaattggccggtccagagtcccttccatcctgggccctctccgacactgattctcgggtaagtcctgcaagtcctgccggatcacccagcgcggacttcgcggtccacggcgagagccttggagaccgacatctgcggacacttcagataagttacgatgcactgaaagatgagaactccaaattgagaagaaaattgaacgaggttcagagcttctctgaagcccaaactgagatggttagaaccctcgaacgaaagctggaagcgaagatgataaaggaagaatccgactatcacgatcttgaatccgtggtgcagcaagtggaacagaacctagagctcatgacaaaacgcgccgtcaaagccgagaaccacgtggtcaagttgaagcaagagattagcttactgcaggcacaggtgagtaattttcagcgcgaaaacgaagctttgagatgcggacagggcgcctcccttaccgtagttaagcagaacgcagatgtggcgctccagaacctcagagtggttatgaattcagcgcaggcctctattaagcaactggtgagcggcgcggaaactctgaatctggttgccgagatacttaagagcatagatcgtatctccgaggtgaaagatgaagaggaggactcgtag

SEQ ID NO: 14211 - DNA, 1440 bp, synthetic construct
  source 1..1440: mol_type = other DNA; note = Synthetic coding sequence
atggatgcgaccattgctcctcatcggataccgccggagatgcctcagtatggggaggagaaccacatcttcgaactgatgcaaaatatgctggaacagcttctgatccaccagcctgaggaccctatcccctttatgatacagcatctgcatagggacaatgacaacgtaccccggattgtgatacttggtcctcctgcatctgggaaaactacaattgctatgtggctgtgtaagcacctgaactccagtctgcttacgttagaaaatctgatcctgaacgaattttcctacaccgccaccgaggcacgccgcctctacctgcaacggaaaaccgtgccaagcgctctgctggtccagttaatacaggaaaggttggctgaggaggactgcattaaacagggatggatcctcgatggaattcctgagacccgcgagcaggcccttaggatccagaccctcggaataacaccacgccatgtgattgttctgagcgccccagataccgtgctgatagaacgaaacctcggaaagagaattgatccccagacaggagaaatttaccatacaactttcgactggcctcctgagtccgaaatccaaaacaggctgatggtccctgaagatatcagtgagttagaaaccgcccagaagctgttggagtatcatcgaaacatcgtaagagtgatcccttcataccctaaaatcctcaaggtgatttccgccgatcagccgtgtgtggatgtgttctaccaggcactcacctatgtgcagtccaaccatagaaccaacgcaccattcacaccacgcgtactgctgttggggccagtcgggagtggcaaaagtcttcaggctgcccttcttgctcaaaagtatcggctagtcaacgtctgctgcggacagctattgaaagaggccgtggccgataggaccacatttggagaactaatccaaccttttttcgaaaaggagatggcagtgcctgattcactactgatgaaagtgctcagccaacgtctcgatcagcaggattgtatccagaagggctgggtgctgcatggcgttccgcgagacctcgaccaggcccacttgctcaacaggcttggttacaatccgaatcgagtgttcttccttaacgtgccgtttgacagtataatggaacggctgactctcagaaggattgatccagtgacaggtgagcgataccaccttatgtataagcccccacccaccatggagattcaagccagacttctacagaatcctaaagatgcagaagagcaggtcaagttgaaaatggatttattctacaggaacagcgcagatttggaacagctttacggctctgcgattacacttaatggagatcaggacccatatactgtcttcgagtacattgagagtggtatcattaatcccctgcctaagaaaatcccttag

SEQ ID NO: 14212 - DNA, 432 bp, synthetic construct
  source 1..432: mol_type = other DNA; note = Synthetic coding sequence
atggcacacgagatgatcggtactcaaatcgtcacggagcgcctggtagccttgctcgagagcggaactgaaaaagttctgctgatcgatagtcgaccatttgtcgagtacaataccagtcacattctcgaagcaatcaatatcaattgttcaaagctgatgaagaggaggctccagcaggataaagtgctgataaccgaacttattcagcactccgccaagcataaagtagatattgattgcagccagaaggtcgtcgtctacgatcagagttcgcaggatgtggcctccctcagttccgactgttttttgactgtacttttggggaagttggaaaaatcattcaatagcgtgcaccttcttgccggtgccgatgcagccgaatgggattggctgtgcgtgaagtgccagcagtatctgtccaaagcttag

SEQ ID NO: 14213 - DNA, 1191 bp, synthetic construct
  source 1..1191: mol_type = other DNA; note = Synthetic coding sequence
atggctagcctctccagagccctacgggtagcagcagcacatccacgtcagagccctacacggggtatgggcccgtgcaatcttagctcagcagccggacctacagccgaaaagtctgtcccctatcaacggactctcaaggaaggccagggtacaagcgtggtggcccagggtccaagtagacctctcccttctacagcaaatgtggtggtcatcggcggcggatcacttggctgtcagacactctatcacttggcaaagctcggaatgtctggcgccgttctgctcgagcgggagagactcacttccggaaccacctggcacaccgctggcctcctctggcagctgcgcccaagtgacgtggaggtggagctgctcgcccacactcgccgagtggtctccagagagttggaggaggaaacaggtttgcatacaggatggattcaaaacggagggttatttatcgcttctaacagacagcggctagatgagtacaaacgcctgatgtcactgggaaaagcttacggtgtggagtcccatgttctgagccccgcagaaaccaagactttatacccattgatgaacgtggacgatctgtacggtaccctgtatgtcccacacgacgggaccatggacccggcaggcacatgtaccacactcgctagggctgcttctgccaggggggcccaagtgattgaaaactgccccgtgacaggcattagggtctggaccgatgatttcggcgtgaggcgcgtcgcgggggtggagacccagcatggttccatacaaactccttgcgttgtcaactgtgcaggcgtgtgggcctcagctgtcgggagaatggcaggcgtcaaggtcccccttgtggctatgcaccacgcctacgttgtgacggagcggatcgagggcatacagagcttcaccctgttgcctacactggaatactccggtactgtctccgcccactgtaacttgagactcccagggagctctaattcaagagcttcagcttcccacgttgcgggaatcaaatgcgctaggcaccacactcgcttaatcttcttctgtatccttgtggagactgagttccaccacgtggccaaggcaggcctggaactcctgtcttccgggaacccacccatcagcgatttccaatcagctaggatcaccggagtgagccaccatgcttag

SEQ ID NO: 14214 - DNA, 4416 bp, synthetic construct
  source 1..4416: mol_type = other DNA; note = Synthetic coding sequence
atggagcccgagccggtggaggattgtgttcagagtacccttgccgcgctgtatcctccatttgaagcaacagctccaacgctcctagggcaggtgttccaagtcgtggagaggacatatcgggaggatgctctgagatacaccctcgacttcctggtccctgccaaacatttgttagcaaaagtccaacaggaagcctgcgcccaatatagtggcttcttgttcttccatgaaggttggccactgtgcctgcacgaacaggtcgtcgtgcagttggctgctcttccatggcagctactccgccccggcgacttttatttgcaggtggtgcccagtgctgcacaggccccaaggctggccctaaaatgtcttgcacctggtggaggccgggtccaggaggtccccgttcctaacgaggcctgcgcttacctgttcacacctgaatggttgcagggcatcaacaaagataggcccaccggccgactgtccacctgtctcctgtcggccccttcagggattcaaagactgccttgggcagagctgatttgccctagatttgtgcataaggaagggctcatggtggggcaccagccaagtactctgccaccagaactgccaagcgggcctccaggactgccaagccctcctctgcccgaagaggccttaggaactcgctcaccaggtgacggacacaacgcaccagtagagggcccggaaggcgagtacgtcgaactgctcgaggtgacactgcctgtccgcgggagcccaacagatgcggaaggaagcccaggtctgtcgagggtgcgtacagtaccaacacgaaagggcgccggcggtaagggaaggcaccgtcggcaccgggcttggatgcaccagaagggccttggcccgcgtggccaggacggcgcacgacccccaggagaagggagctctacaggggccagtcccgaatcccctccaggtgccgaggccgttccagaagcagctgtactggaggtttctgagccccctgcagaggccgtgggggaagcctccggctcctgtcccctccgacctggcgaactgcggggtggggggggggggggacagggcgccgagggcccacccggcacacccagaaggacaggcaaggggaatcggagaaaaaaacgggcagctggccgtggcgccctttcccgtggcggagactctgcgccactgtcccctggcgacaaggaggacgcttcccaccaagaagcccttgggaatctgccctctccctctgagcataaattaccggagtgtcacctggtgaaggaggaatacgaaggctccgggaagcctgagtctgaaccaaaagagctcaaaactgcaggggagaaagagccgcagttatcagaggcttgcggcccaaccgaagagggggccggcgagcgagaactagaagggcccggactcttatgcatggcaggtcatacaggacccgagggtcccctgagtgatacaccaacgccacccctcgagactgtgcaagaagggaagggcgataatataccagaagaagccttagccgtgtctgtgtccgatcaccccgatgtggcatgggacctcatggcatcgggtttccttatattgactgggggggttgaccagagcggcagagctcttctgactataaccccaccatgtcctcccgaggagccaccaccctcccgggacacactgaatactactttgcactaccttcattcattgctccggcccgaccttcaaactctgggtctgagcgtgctcctggacctccggcaggccccccctttaccacccgctctcatcccagccctgtcccagcttcaggactcaggggaccctcccctggttcagcgtcttctgattctgatccacgacgatctgcccactgaactgtgtgggtttcagggggcagaggtgctttccgaaaacgacctgaaaagggttgccaagccagaggagcttcaatgggaactcggggggcacagagatccttcacccagtcactgggtggagatccaccaggaagtggtccggttgtgtagactgtgccaaggagtgctcggatctgttaggcaagccattgaggaactggagggcgccgctgagcccgaagaggaggaggccgtcggcatgccaaaacccctccagaaagtcctcgctgaccctagactgacagcactgcagagagatggcggtgccatcctaatgcgcctgaggtctaccccgagctccaagctcgaaggacagggcccagccactctctatcaggaggttgatgaagcaattcaccagctggttcgactctccaatttgcacgtacagcagcaggaacaacgacagtgcctccgccgactgcagcaggtgttgcagtggctttcagggcccggtgaggaacaattggctagttttgcgatgccgggggataccctctccgctctgcaggaaacagaactaagatttcgcgccttttcagccgaagtgcaggagcgactggcacaggccagggaagcgctggcactggaggaaaacgccacttctcagaaggttctggatatctttgagcagaggctcgaacaggtggagagtggattacacagagccctgagattacagaggttttttcagcaggcacacgaatgggtggacgagggttttgcgcggctggccggcgccggaccaggcagagaagcagtactggctgccctcgccctcagaagagctcccgagccctccgcaggaactttccaggaaatgagagctttggctctggacctcggctccccagccgccttgcgtgaatggggtcgatgtcaggcgagatgtcaggagcttgaacgcagaattcagcagcacgttggggaggaagctagccctcgaggttacagaaggaggcgtgcggacggggcatcaagcggaggcgcccagtgggggcctaggtctcctagcccaagcctgagctccctcttgttacctagtagcccaggccctcggccagctcccagccattgttctctggcaccctgcggtgaggactatgaagaagagggcccagaactggctccagaagccgaaggacgaccacccagggctgtgttgattcgcggtctggaagtgacaagtacggaggtggttgatagaacatgctctcctcgggaacacgtccttctgggacgcgcccgcggtcccgacggcccgtggggggtcggaaccccaagaatggagagaaagaggagcattagtgcacagcagagactcgtgtccgaattaattgcctgtgagcaagactacgttgcaaccctctctgagcctgtgcccccgcccggccctgaactgaccccagagctgaggggaacatgggcagccgcgctctccgcgagagaacggttgcgcagcttccatcggacacacttcctcagagaactccaagggtgcgctacccacccacttcgcattggcgcttgctttttgaggcacggagatcagttctccctctacgcacagtatgtcaagcaccgacataaactcgagaatggcctggcagccctgagtcctttgtctaagggaagcatggaagctgggccctacctgccacgggctctccagcagccgctcgagcagctgacccgctacggacgattgctggaggaactcctgagagaagctggtcccgagctgagcagtgaatgcagggcactgggcgcagctgttcagctccttcgagaacaggaggccagaggccgtgacctccttgctgtggaagcggtgagagggtgcgagatagacctgaaagagcaaggtcagttgctacacagagatccttttaccgtcatctgcggccgaaagaagtgcctaagacacgtcttcctcttcgagcatcttctgctgttcagcaaactgaagggaccagaggggggttccgagatgttcgtgtataaacaggcattcaagaccgccgacatgggcttaacagagaacattggagacagtggcttatgcttcgaactctggttcaggcggcgcagagctagagaggcctacaccctgcaggccacttcccccgaaatcaaactcaagtggacttcctcaatagcacaactcctgtggcggcaagccgctcataacaaggagctgagggtccagcaaatggtgagtatggggatcggaaataagccatttcttgatattaaggcactgggggagcgtactctaagcgcgctcctgaccggaagagcaccggagactttagactcctctggggatgtgagccccgggcccagaaattccccgtctcttcaaccgccccaccctgggtcgagcacgcccactttggcttcaaggggtattctcggccttagtcgacagtcccatgcacgagctctgtccgatcctactacacccctgtag

SEQ ID NO: 14215 - DNA, 4560 bp, synthetic construct
  source 1..4560: mol_type = other DNA; note = Synthetic coding sequence
atggagccagaaccagtcgaggattgcgtccagtcgaccctggccgctctgtacccacccttcgaagccactgccccaaccctgctgggtcaagtattccaagtggtggagcgaacatacagagaggatgctctcaggtatacgttggacttcttagtacccgcaaaacatcttctggccaaagttcagcaggaagcatgtgctcagtacagtggattcttgttttttcacgagggctggcctctgtgcctgcacgagcaggttgtcgttcagttggccgccctgccctggcagctccttcgccccggggacttctatctgcaagttgtaccttcggctgctcaggcaccacggctggcactgaagtgtctggcccccggaggaggcagggtgcaggaggtgccagtcccaaacgaagcttgcgcgtacttattcacaccagagtggctgcaagggattaacaaggatcgaccaacggggaggctgtcaacatgtttgctctctgcaccctcaggaattcagcgcctgccctgggcagaactgatctgtcccaggttcgttcacaaagaagggctgatggtcggtcaccagccgagcaccctgccccctgagctacccagcggccctcctgggttgcctagccctcctctccccgaggaggctctcggaacaagaagccctggcgacggccacaacgccccagtagagggcccagagggggagtacgtggaactccttgaagtaaccctccccgtcaggggatccccaacagacgccgaggggtcacccggactgtccagagtcagaactgtgcctactagaaagggcgccggtggtaaaggccgtcatagacgacatcgtgcatggatgcatcagaaagggctgggcccacgaggtcaagatggagctcgaccccctggtgaagggagttccacaggtgcctcacctgaatcacccccaggcgccgaagctgtgcccgaagccgcggtgctggaggtgtcagagcctcctgctgaagccgtgggagaagcctcggggagttgcccacttagaccgggagaactccggggcggcggggggggaggacagggagctgagggaccaccagggactcccaggcgaacagggaaaggaaacaggagaaagaagagggctgccgggcgcggggcattgtcaagagggggggacagtgccccactatctcccggcgataaggaagatgcctctcatcaggaggctttagggaacctgccctcaccaagcgaacacaagctgccagaatgtcacctggtgaaggaggagtatgaagggagcggtaaaccggaaagcgagcctaaagagctgaaaactgcaggcgagaaggagcctcagctgtctgaggcctgcggaccaacagaagagggagctggtgagagggagctagaggggccagggctgttgtgcatggcgggccacaccgggcccgaaggccccttgtccgacaccccaactcctcctctggagaccgtgcaagagggcaaaggggataatattcctgaagaggctttggctgtgtctgttagtgatcatcctgacgtggcctgggatctgatggcttcggggtttctgatattgacaggcggggtcgatcaatctggtcgggcgctgctgaccatcacccccccatgcccccctgaggaacccccccctagccgggatacgctcaatacaaccttgcactatctgcattctcttcttagacctgacctgcagactctaggcctcagcgttctgctagacctgagacaagcccccccactcccccccgcccttatccccgcattgagccagctccaggatagcggtgatcctccccttgtgcagcgcctgttgattctaattcatgacgatcttcctaccgaactctgtgggtttcagggggcagaggtgttaagtgagaacgacttgaagagagttgccaagccggaggaactgcagtgggagttaggggggcacagggatccctcacccagccactgggtggaaatccaccaggaagtcgttcggttgtgtcgtctctgtcagggagtgttagggagcgttaggcaggctatagaagaactagagggggctgccgagccagaagaggaggaggctgtcggtatgcctaaaccactgcagaaagtgctggctgatccaaggctcaccgccctgcaacgagacggcggggccatactgatgcgtctaagatccacaccatcgtcaaagctggagggccaagggcccgcaactctctaccaggaggtcgacgaggctattcatcagttggtgaggctgtctaacctgcatgttcagcagcaggaacagaggcagtgtttgcgtagactccagcaggtactgcagtggctgagtggtcctggagaggaacagctggcatcctttgcaatgcccggagacaccctgtccgcgctccaggagaccgagctgcgatttcgggcgtttagcgctgaggttcaggagcgcctagctcaggctcgagaggccttggctctggaggaaaatgcaacgtcacagaaggtgctggacatattcgaacagaggctcgagcaggtggagagcggcttgcatcgggcattacgcctccaacgcttcttccagcaggcacacgaatgggtcgatgaaggttttgctcgactggctggcgcaggcccagggagagaggccgtgctagccgccctagctcttcggagagctcccgagccctccgccggcacctttcaggagatgcgagcactcgccctcgatctgggcagccccgcggcgctcagggagtggggaagatgccaggcaaggtgccaggaacttgaacggcggatccagcaacatgtgggcgaggaagcctccccccgcggttatcgccgacggcgcgcagatggcgccagctctggaggagcgcagtggggtccccgtagtccatcaccatctttgtcttcactcctgctgcccagttctcccggcccaaggcctgccccaagtcattgctctctagctccttgtggcgaggattatgaagaagagggcccagaactggcaccggaggcagaagggaggccccccagggcagtgttgatacggggcttggaagttacctccacagaggtcgtggaccgaacttgcagtccaagggagcacgtgctgctcgggcgcgctcggggcccagacggcccctggggcgtgggtacacccaggatggagaggaagcggagtatatctgcacagcaaaggctcgtcagtgaactgattgcatgtgagcaggactacgtggccactctcagcgaaccagtgcccccgcccggcccagaactcaccccagaactgagaggcacgtgggcagccgccctttcagcccgggagcggctgcgctcattccacaggactcattttttaagggaactgcagggatgtgccacccatcccctgagaattggcgcatgtttcctcagacatggagaccagttctcgttgtatgcacagtacgttaagcatcgccataaactcgagaacggcctggccgctctcagccctctgtccaaaggctctatggaggccgggccctatctgccccgagcactgcaacagcccctcgaacagctgaccaggtacggtcgtcttctcgaagaacttctgagagaagctggacctgaactgtcaagtgagtgccgggcactgggggccgccgtacagctattaagggaacaggaggcccggggccgggacttgttggctgtggaggctgtgagagggtgtgaaatcgacctcaaggagcagggccaactccttcatagagatcccttcaccgtgatatgtgggagaaaaaaatgtcttcgccacgtctttctattcgaacacctcctattattctctaagctcaaaggcccagaaggcggctccgagatgtttgtgtacaagcaggcctttaaaacagccgacatgggattgaccgaaaatatcggagatagcggcctttgcttcgagctgtggtttcgcaggcggagagctcgagaagcatatactcttcaggccacttctccggagatcaagctgaaatggaccagctccatagcccagcttctctggagacaagccgcgcacaataaagaactgcgcgtacagcagatggtgagcatggggatcggcaacaaaccttttttggatattaaggctcttggagaacggacattgtctgccctgcttaccggcagagctgctagaacaagagctagtgtcgctgtctctagctttgagcacgccggaccatcgctgcccggtcttagccctggcgcttgttccctccccgcccgggtggaggaggaagcctgggatctggatgttaaacagatctcactcgctcccgaaaccttggactccagcggggacgtgagccctggcccccgcaactcccccagcttgcaaccaccacacccagggagttctactccaactctggcaagccgggggattctggggcttagtcgtcagagccacgcacgcgcgctgtctgatcccaccactcccctgtag

SEQ ID NO: 14216 - DNA, 2709 bp, synthetic construct
  source 1..2709: mol_type = other DNA; note = Synthetic coding sequence
atgtttcctgccctggagacccacttgaagcagactatcccagatccctatgaagatttcatgtatcgccacctccagtattacgggtattttaaggctcagaggggcagcttaccgaactccgccacccaccagcacgtgcggaagaataacccacagtgccttttaaacggctcactcggggagaaagacgacctgatccctgacaccctgcagaaggagaaactcctgtggcccatttccctctcctcagcagtccatcgccaaatcgaggccatcaatcgcgacttccatagctgcttagggtggatgcagtggcgcgggctttctagcctccagccaccccccccacgatttaaagactccccggcttcagctttccgtgtggctgggattacagactcacacatgctctcgcttccacacctgcgatctagacaattactgtatgacgaacttgatgaggtcaacccccgcctaagagagccacaggaattgttctccattttaagtacaaagcgcccattgcaggcaccgagatggcccatagaatgtgaggtgatcaaggaaaatattcaccatattgagtgggctccccctcagccggagtatttttaccaacctaaaggcaatgagaaggttcccgagatcgtgggcgagaagaaaggaaccgtcgtgtaccagctagactcagtgcctattgaggggtcatacttcacctcctccagagtggggggtaagcgagggattgtcaaagagcttgcggtgacattgcaaggccctgaggataataccctgctatttgaatctagatttgagtccgggaacctgcaaaaagcagtgcgcgtcgacacctatgagtatgagctgacattgcgtaccgatctgtatacaaacaagcatacgcagtggttttactttagggtgcagaatacgcgcaaggacgctacttaccggttcacaattgtaaatttgctgaagcctaagagcctctacaccgtcgggatgaaaccattgttgtactcccagctggatgcaaacaccagaaacattggctggcgtcgggagggaaatgagatcaagtactacaagaataataccgacgatggtcagcagcccttctactgtctgacatggactattcaattcccatacgatcaggacacctgcttctttgcccacttctatccctacacgtataccgacctgcagtgttacctgctgtcagtcgctaataacccaattcagtctcagttctgcaagttacaaacactgtgcaggtccctggccggcaatacggtgtacctcttgactatcactaaccctagccagacacctcaggaggcggccgctaagaaagccgtggtcttgagcgcaagggtccatcccggagagagtaatggtagctgggtgatgaaaggtttccttgattttattttgagcaattcaccagatgcccagctgttaagggatatcttcgttttcaaagttctgccaatgctcaatccagatggagttatcgtggggaattatcgctgctccctggctggccgcgacctgaacaggcactacaaaacaatactcaaagagagttttccttgcatatggtacacaagaaatatgattaaaagactattagaggaaagggaggtgcttctgtactgtgattttcacggtcatagccggaagaacaatatcttcttatacggctgtaacaataataatcggaaatactggttgcacgaacgcgtttttccgttaatgctctgcaaaaacgcccccgataaattttcattccacagttgtaatttcaaggttcagaagtgtaaggaagggacgggccgggttgtcatgtggcgcatgggcatcctgaattcatatacaatggagagcacctttggcggctccacactcgggaacaagcgcgacacccatttcaccatcgaggatctaaagtctctcggctatcacgtgtgcgatactttactggatttctgcgaccctgaccagatgaagtttacgcagtgtctggcagaacttaaggaactgcttcgacaggagatccataagaaattccatgagctcgggcaggacgtggacctggaggggtcgtggagtgacatttccctctcagacatagagagttcaacgtctggcagtgatagttcattgagtgacggactgcccgttcacttggcaaatatagccgacgaacttacccagaagaaaaagatgttcaagaaaaagaaaaagaaatctttacagacacgaaaacagcgcaacgaacagtatcaaaagaagaacctcatgcagaaactaaagctgaccgaagacacttccgaaaaagcgggatttgcatctaccttgcaaaagcagcccacattctttaagaattcagagaacagcagcttcctcccaatgaaaaatgagaaccccaggctcaacgaaactaacctgaacaggcgcgataaagatacccctctggacccatcaatggctacacttattcttcctaagaataagggacggatgcaaaacaaaaaacctggcttcaccgtctcatgctcacctaaacggaccattaacagcagccaggagcccgcgccaggcatgaaaccgaattggccacggagccgatatcccgccactaagagaggatgcgcagcaatggcagcttacccttctctgcatatctacacttacccatag

SEQ ID NO: 14217 - DNA, 3234 bp, synthetic construct
  source 1..3234: mol_type = other DNA; note = Synthetic coding sequence
atggaagtgcaggtttcccaagcttccctaggattcgagttaacttccgttgagaaaagtcttcgtgagtggtcccggctgtctagggaggtgatagcctggctgtgtccatcttcccccaatttcatcttgaattttccccctccaccttccgcgtccagcgtaagcatggtccagctatttagcagcccgttcggataccagtcgccatcggggcacagcgaggaggaacgggaaggaaatatgaaatccgcaaaaccacaggtgaaccattcccagcatggagagagtcagcgtgctctttccccgctacaatcaaccctgtcatccgcagcctctccttcacaggcctacgagacttacatcgaaaacggcctgatttgtctgaaacataagatccgaaatatcgagaagaaaaaactgaagctagaagattacaaggatagactaaagagtggagagcatttgaatcccgatcagctggaggccgtcgaaaagtatgaagaggtcctgcacaatctggagtttgctaaggagctgcagaagacattctccgggctgtccttggacttgctgaaagcccagaaaaaagcacaaagaagggaacacatgctaaaattggaggctgagaaaaagaaattgcgtactatcttgcaggtccaatatgtgttacaaaatctgactcaagaacacgttcagaaagactttaagggaggactgaacggggccgtttatttaccttctaaggagctggattatctgatcaagttcagtaagctgacgtgccctgaaagaaatgagtcactgagtgtcgaagatcagatggaacaaagtagcctgtacttttgggacctgttggagggaagcgagaaggcggtagtggggaccacttacaagcatctcaaggatcttctctctaagttgctgaacagcgggtattttgagtctattcctgtgcccaagaatgctaaagaaaaggaagtccctctggaggaagagatgctcatacagtcagaaaagaagacacaactgtctaagaccgaaagcgtgaaagaaagcgaatccctaatggaattcgcccagcccgaaatccagccacaggaatttttaaatcgccggtatatgaccgaggtcgattattctaataagcagggcgaggagcagccttgggaagccgattatgcaagaaagcccaatttgcccaaacgatgggacatgctcactgagccagacgggcaggagaagaagcaggagagctttaagagctgggaggctagcggcaaacatcaggaagtgtccaagccagccgtgagcttggagcagcgcaagcaggacactagtaagcttcgttccactttgccagaggagcaaaagaagcaagagatcagcaaaagcaagcccagcccgagtcagtggaagcaggacacccccaagtctaaagccggatacgttcaggaagagcaaaaaaaacaggagacgcccaagctgtggcctgtccagctgcagaaggagcaggaccctaaaaagcagacaccgaagtcatggacccctagcatgcagtcagaacagaacaccactaaatcctggactacgccaatgtgtgaggagcaggattcgaaacagcctgagacgccaaagagttgggagaacaacgtcgagagtcaaaaacacagcttgacaagccaatcacagatctcacctaagtcgtggggagttgctactgcttctctgatccctaatgaccagctactgcctcgtaagctgaataccgagcctaaggatgttcccaagccagtgcaccagcctgtggggtcctcttcaacccttccaaaggatcctgtgcttcggaaggaaaagctgcaggatctgatgacacagattcaagggacatgtaatttcatgcaggagagtgtgctggactttgataagccttctagcgcaattcctaccagtcaaccaccatctgccactcccgggagcccagtcgcgtctaaggagcagaacctgagctcacaaagcgattttctacaggagcctcttcaggccacctcttcacccgtaacgtgttcttccaatgcttgcctggttactaccgatcaagcttcatccggaagcgagactgaatttatgacatcagagacccctgaagtgtttaacgtgaatgctcctcttcccccacggaaagagcaggaaattaaggagtccccttacagccctggttataatcagtccttcactactgctagcacacagacccctccccagtgtcaactgccaagcatacacgtggaacagaccgttcacagtcaggagaccgcgaactatcaccctgatggaaccatccaggtatctaatggatctctcgccttctacccagcccagaccaacgtgttccctagacccacccaaccatttgttaattcaaggggcagtgtgaggggctgcacccgcggggggcggctcattaccaattcgtatagatcacccgggggctacaagggattcgacacttataggggactcccctctatctccaacgggaattatagccagctccagtttcaagctcgggagtattctggtgcaccctactcccagagagacaatttccaacagtgctacaagcggggaggaacatcgggaggtccacgcgccaattctagagccgggtggtcagatagctcacaagtgagtagccctgaaagagataacgaaactttcaactccggtgattcgggacagggcgatagcaggagcatgaccccagttgatgtgccagtgacaaatcccgccgcaacgatactgcccgtccatgtctatcctctgcctcagcagatgcgcgtcgcattctctgctgcccggacgagcaacctggcaccgggaaccctggatcagccaatcgtcttcgatctcctcctcaataatctcggcgagaccttcgacttgcagctgggacgctttaattgtccagtgaatggcacatatgtgtttattttccatatgctgaaactggccgtgaacgtccctctctacgtgaacttaatgaagaacgaagaggttctcgtaagtgcctacgcgaacgacggggcccctgaccatgagacagcttccaaccacgctattttacaactcttccagggcgaccaaatttggctgagactgcacagaggcgcaatttacggctcctcctggaaatatagcaccttttccggttacctgctgtaccaggattag

SEQ ID NO: 14218 - DNA, 1056 bp, synthetic construct
  source 1..1056: mol_type = other DNA; note = Synthetic coding sequence
atgaccttgagactcttggaagattggtgcaggggaatggatatgaatccccgtaaggcattgctgattgccggaataagccagagctgttctgtagccgagatcgaggaggccctgcaagcaggtctggcacccctcggagagtaccgcctgctgggtcggatgtttaggcgggacgagaaccggaaagtcgcattggtcggactcacggcggaaacgtcccatgcattggtacctaaggaaatcccaggcaagggtgggatatggagggtgattttcaagccacctgatccggacaacaccttcctctcccggctaaacgaattcctggcaggcgagggcatgaccgtaggtgagctatctcgcgctctaggccacgagaacggttccctggaccccgagcagggcatgattcccgagatgtgggcgcctatgctagcacaggcgctcgaggctctgcagcccgcgcttcaatgtctcaagtacaaaaagctgagagtgttctccggccgtgaaagccccgagccgggcgaagaagaattcggacggtggatgttccatacaacacagatgataaaagcatggcaggttcctgacgttgagaagcggcgaagactactcgagtcacttaggggccccgcattggacgtcatccgggtactgaagataaacaaccctcttatcacagtagacgaatgcctgcaggcactggaggaggtgtttggagtgactgacaaccctcgcgaactgcaagttaaatacctcacaacgtaccaaaaggacgaagagaagctgtctgcgtatgttctcaggctggaaccccttctccaaaaattggtgcagcgaggggccattgaaagagacgccgtcaatcaggctcggttggatcaggtgattgcaggcgctgttcacaaaacaattaggcgagagctcaacctcccggaggatggcccggcccctggatttctgcagctccttgttctaataaaggactacgaggcagcggaggaggaagaagcactgttgcaggcaatcctggagggcaatttcacatag

SEQ ID NO: 14219 - DNA, 2559 bp, synthetic construct
  source 1..2559: mol_type = other DNA; note = Synthetic coding sequence
atgagcggtagggccagagtgaaagctaggggtatagcccgatccccaagtgccaccgaagtcggccgcatacaagccagccctctgccacgaagcgtggacctgtcaaacaacgaagcctcaagctcaaacgggttcctgggcacatccagaatcagcacaaacgacaaatatggcatctcttccggcgatgcgggcagtaccttcatggagcgcggggtcaagaataagcaggattttatggatttaagcatttgtacgcgcgaaaaacttgctcacgtgagaaactgtaagactggtagctccggtatccctgttaagctcgtcacaaacctctttaatttagactttcctcaagattggcaactttaccagtatcacgttacctacattcccgatctggcatcccggcggctcagaattgccctgctatacagccacagtgagctttcgaataaggccaaggcatttgacggcgctatcctatttctgtctcagaagctggaggagaaagtgacagaattgtccagtgagacccagaggggggagactattaagatgaccataacactgaaacgggagctccctagttcttccccagtttgtatccaggttttcaacattatcttcaggaaaatattgaagaaactgagcatgtaccagattggccgtaatttctataacccatcagaacccatggagataccccagcataaattgtctctttggcccggcttcgccatttccgtctcttatttcgaacgtaaattactcttcagcgccgacgtctcttataaggtccttcgcaacgagaccgtcctggaatttatgactgcattatgccaacggactgggctatcatgctttactcaaacctgtgaaaaacagctcattggactcattgtgctgactagatacaacaaccggacctactccatagatgacatcgattggtcggtcaaacccacacacacctttcaaaaacgagatggaactgagattacttacgtagattactataagcagcagtatgatatcacagtttccgacctgaatcaaccaatgctggtttccttacttaaaaaaaagaggaatgataattctgaagcacagctggctcacctcatacctgagctctgcttcttaaccggcctgaccgatcaggctactagtgattttcagttgatgaaggctgttgcagagaagacccgcctgagtccgtctggacgccagcaacgtctagcacgtctggtagacaacattcagaggaacactaacgccagattcgagctcgagacatggggtctccatttcgggagccaaatctccctcacagggcgcatcgttcccagtgaaaagatcttgatgcaggaccacatctgccagcccgtttctgccgccgactggagcaaggatatacgtacctgcaagattctgaacgcacagtccttgaacacatggcttatcctgtgttcagatagaacagaatacgtggcagaaagcttcttaaattgtctgaggagggtcgcgggatctatggggtttaatgtggactatccaaagataatcaaggtacaggaaaaccctgctgcatttgtccgcgcaattcagcagtatgtagaccctgacgtgcagctagtgatgtgtatcctcccttccaatcagaagacctactacgactccataaagaaatatctgtcctccgattgccctgttccaagccagtgtgtcctggctcggaccttgaacaagcaggggatgatgatgtctattgccacgaaaattgccatgcagatgacatgcaagctgggtggtgaactatgggccgtcgagataccactgaagtccctgatggtcgtcggcatcgacgtgtgtaaagacgccctgtccaaagatgtcatggtggttggctgcgtagcttcagtgaaccctagaataaccaggtggttcagtagatgtattctccagcggacaatgacagacgtagcagattgcctgaaagtctttatgactggcgccctaaataagtggtataagtataaccacgacttgcccgctcgcatcatcgtctatcgggccggtgtgggagacggacagcttaagaccctgatcgaatacgaggtgccacagcttttgtcttccgtggctgagtccagctcaaatacatcaagccgactaagcgtgatcgtggtcaggaaaaagtgtatgccgcgctttttcacagagatgaatcgtactgtacagaatcctcccctgggcactgtcgtggactctgaagccacccgcaacgagtggtacgacttctaccttatctctcaggtcgcctgtcgcggtacggtctcacccacctattataacgtcatctacgacgataacggactaaagcccgaccacatgcagcgtttgaccttcaaactctgccatttatactacaactggcctggcatcgttagtgtgcccgcaccttgccagtatgcccacaagctcacatttttggtggcccagtctattcacaaggagccttccttagaactggccaatcacctcttctacctgtag

SEQ ID NO: 14220 - DNA, 2163 bp, synthetic construct
  source 1..2163: mol_type = other DNA; note = Synthetic coding sequence
atgtacggttctgctagatctgttggcaaggtcgagcccagctctcagtcacctggaaggtcacccaggttgccaagatccccccgattggggcaccggcggaccaattccaccggcggctcatccgggagctccgttggggggggatccggaaaaaccttatcaatggaaaatatccagtcactgaacgccgcatatgccactagcgggccaatgtacctaagcgaccatgaaaacgtagggtctgagacccctaaatcaacgatgaccctcggcagatcggggggtaggctgccctacggcgtccgcatgacagcaatgggcagttcgcctaacattgctagctccggtgtggcaagcgacacgatcgccttcggtgagcaccatctgcctcccgttagcatggcttccacagtgccccatagtctacgtcaggcccgtgataacacaatcatggacctgcagacccagctcaaggaggtgttacgggaaaacgaccttttgcgcaaggacgttgaagtgaaggaatctaaactgtcgtccagcatgaacagcatcaagactttttggtcgccggagctgaagaaggaaagagcactgcgcaaggacgaggcctctaagataactatctggaaagagcagtacagagtagttcaggaggaaaatcaagtcgacgccttacgactaagactcgaagagaaggagaccatgcttaacaagaaaaccaagcaaatccaggatatggccgaagaaaaaggtactcaagcaggcgaaattcacgacctcaaagacatgctggatgtgaaggagagaaaagtgaacgttctgcagaaaaagattgagaacctgcaggagcaactgcgggataaagagaagcaaatgagtagcctcaaagagagagtcaagtccctgcaggctgacactactaacactgacaccgccctgacgacgttggaggaggcactggcggagaaagagaggacaattgagcgtcttaaggagcagcgagaccgtgacgagcgggaaaagcaggaagagattgacaactacaaaaaggatctcaaagacctgaaggaaaaagtaagcctgctgcaaggggatctgtccgaaaaagaggcaagcctgttagacctcaaggagcatgcttcctctctggccagttccggactgaaaaaggactccagacttaaaactctagagatcgccttggagcagaagaaggaagagtgcctgaagatggagtcccagctgaagaaggcccatgaagcagctttggaggctcgcgcatcacccgaaatgtccgatcgaatacagcatctggagcgtgagattacgaggtataaggacgaaagttctaaagctcaggccgaggtggacaggctgcttgagatccttaaggaggtggagaatgaaaagaacgacaaggataagaaaatcgccgagctggagtcgctgttttcgaggcaggtgaaggaccaaaacaaaaaggtggcgaacctcaagcacaaggagcaggttgagaagaaaaagtctgcgcagatgttggaagaagcccggaggcgagaagataacctcaacgacagctctcagcagctgcaggattcgctgcgaaaaaaggacgatcgtatcgaggagctcgaagaggctctgcgggagagcgtccagatcaccgccgagcgggagatggttcttgcacaagaggaaagcgccaggacaaatgccgaaaaacaggtggaggagctgctgatggctatggagaaagttaagcaggagcttgagtctatgaaggcaaagctgtctagcacgcagcagtctctcgctgaaaaggagactcatctgaccaacttgcgggccgaacgccgaaaacacctggaggaggtccttgaaatgaaacaagaggccctcctcgccgcaattagtgaaaaagatgccaacatcgcccttctcgaactgtcttcatctaagaaaaaaactcaggaagaagtagccgcactcaagagggaaaaagatcggttggtccagcaacttaagcagcaaacccaaaacaggatgaaactgatggcagataactatgaggacgatcacttcaagtcaagccattcaaaccaaacaaatcacaaacctagtcccgaccaagacgaggaagaaggcatctgggcttag

SEQ ID NO: 14221 - DNA, 1344 bp, synthetic construct
  source 1..1344: mol_type = other DNA; note = Synthetic coding sequence
atggatatgggtaatcagcatccttccatttccagactgcaggagatccagaaagaggtaaaatccgtcgagcaacaagtaattggattttccggtctttctgacgacaagaattataagaaactggagcgaattcttacaaagcagcttttcgagattgattccgtggacacggagggcaagggcgacatacagcaggccaggaagcgagcggctcaggaaaccgagcggttgctcaaggaactggagcaaaacgccaaccatccccacaggatcgaaattcagaacattttcgaagaggctcagagcctcgtcagagaaaaaatagtaccattctataacgggggcaactgcgttacagacgagttcgaagaaggaatccaggacattatactcagattgacccatgtgaagacaggggggaagatctctttgcgaaaagctcgataccatactctaactaagatctgcgcagtccaggaaatcattgaggattgcatgaaaaaacagccctccctgcccctgagcgaggatgcgcatcccagcgtggccaagattaactttgtgatgtgtgaggtgaacaaggccaggggggtcttgatcgcactattgatgggagtgaacaataatgaaacctgtagacacctaagctgcgtcctgtcaggcctgatcgccgacctcgatgctttagatgtttgcggaaggactgagattcgaaactatagaagagaagttgttgaggacataaacaaactgctcaaatacctggacctggaggaagaagccgatacaacgaaggcatttgatcttcgccagaaccactcaatactcaagatcgagaaagtgttgaagagaatgagagagatcaaaaatgagcttctgcaggctcagaacccctctgagctctacctcagcagtaaaaccgagctgcagggactgatagggcaacttgatgaggtctctcttgagaaaaatccctgtatcagggaggccagaaggagggcggtcatcgaagtgcaaactctgattacatatattgatttaaaggaagctttagagaaaagaaaacttttcgcgtgtgaggagcatccctcccacaaagcagtatggaacgtcctggggaatctgtcagagattcagggcgaggtgcttagcttcgacggtaatcgaacagataaaaactatattcggctggaggaacttctgacgaagcaacttctggccctcgacgcagtcgacccacagggcgaggagaaatgcaaggctgccagaaaacaggcagtccgcctggcccagaacattctgagttaccttgacctgaaatccgatgagtgggagtattag

SEQ ID NO: 14222 - DNA, 1476 bp, synthetic construct
  source 1..1476: mol_type = other DNA; note = Synthetic coding sequence
atggcccagagtggaggtgaagcccggccgggccccaagaccgccgtgcagattagagttgcaatccaagaagcggaagacgtcgacgaactagaagatgaggaggagggcgctgaaactcgcggagctggggacccagcccgctacctatcacctggctggggaagcgccagtgaggaggagccttcccgcggccactccggtactactgcttcaggtggcgagaacgaaagagaggacctggagcaggaatggaaacctcctgatgaagagcttattaagaagctggtcgaccagattgaattctatttttccgatgaaaacctggagaaggacgcctttcttctcaaacacgttaggcgtaacaagctcgggtatgtcagcgttaaactccttacaagttttaaaaaagtgaaacatctgactagggattggaggacaaccgcccacgctctgaaatattcggttgtgctggagttaaacgaagaccaccgaaaggtccgtaggactacacctgttcctttattcccaaacgaaaacctgccgtcaaagatgttgctggtgtatgatctctacctgtcccccaaactttgggcgctggccactcctcaaaagaatggacgtgtacaggaaaaggtaatggagcatctgctgaaactgtttggtacttttggtgtcatcagctctgtgcgtatcctgaagccaggacgagagctgcctcccgatatccggcggatttcaagccgatactctcaggtgggaacccaggaatgcgccattgtggaatttgaagaagtggaggccgccataaaagcgcacgaatttatgattacagagtcacaaggtaaagaaaacatgaaagccgtgctaatcggaatgaagcctcccaagaagaagccagccaaggacaaaaaccacgacgaggagcctaccgcatcaatccatctgaacaagagcctgaataagcgtgtggaggagctgcagtatatgggcgacgagtcgtccgcaaacagttctagcgatcccgagagtaaccccacgagcccgatggctggaaggaggcacgcagctaccaataaactttcaccctccggtcaccagaacttgttcctgagtcctaatgcatccccctgcacgtccccctggtcgtctcccctcgcccagcggaagggcgtaagccgcaaaagtccactggctgaggaaggccgattaaactgttcaacctcgccagagatttttagaaagtgtatggactactccagcgattcatccgtgactcccagcggcagcccctgggtcaggagaagaagacaggcagaaatgggcacacaagaaaaatctcctgggacaagcccattgctgagcagaaagatgcaaacagctgacggactccctgtcggggttcttcgtctcccacgcggccctgacaacactagaggatttcacggacacgagaggtctcgtgcctgtgtttag

SEQ ID NO: 14223 - DNA, 315 bp, synthetic construct
  source 1..315: mol_type = other DNA; note = Synthetic coding sequence
atggccggcaaggcacaccgactgtccgccgaggagcgagaccagctgctgccaaacctgcgcgccgttgggtggaatgaactggagggacgggacgccatctttaagcaatttcacttcaaagatttcaaccgcgctttcgggtttatgactagagtggctctgcaggctgaaaagctagaccaccacccagagtggtttaatgtgtacaacaaggtccatatcacactgagcacccacgaatgtgccggcctctccgagcgggatattaatttggcctccttcatcgagcaggtggctgtgtcaatgacctag

SEQ ID NO: 14224 - DNA, 738 bp, synthetic construct
  source 1..738: mol_type = other DNA; note = Synthetic coding sequence
atgattggagttagctttgaagaagcaaaatctatcattacaggggctaagctttccacgcggcttgaatccgcctgggagattgcatttattcgccagaagtcggataatatccagcccgaaaatttgtcttgcacgtccctgatcgaggcctccggcgagtatggtccccaagcatccacattaagcctcttttcctctccacctgagatcctaattcccaagacgagctcaacccctaaaacaaacaatgatattctgtcttcttgcgagattaaaacaggctacaacaagactgtacagattcccatcacttctgagaacagtactgtgggattgtcaaacaccgatgtggcctccgcttggacagaaaactacgggctgcaggagaaaatttcactgaatccttcggtcaggttcaaagctgagaagttggaaatggcgctgaactatctcggtattcagcctaccaaggagcagcatcaggcattacggcaacaggtccaagctgatagtaaaggcactgtcagcttcggcgacttcgtccaggtggcacgcaatctgttctgcctccagctagacgaggtaaacgttggagcacacgagatcagtaacatcctggatagccagctgcttccctgtgactcttcagaggccgacgaaatggagcggctcaaatgcgagagggacgacgctctaaaggaggtgaatacgctgaaatggccaggccagaattag

SEQ ID NO: 14225 - DNA, 849 bp, synthetic construct
  source 1..849: mol_type = other DNA; note = Synthetic coding sequence
atgggcggcgcggtgagtgcaggagaggacaatgacgagctgatcgacaatctaaaagaagcccagtatatccgaacagaactggttgagcaggctttccgcgcaattgacagggctgattactacctagaagaatttaaagagaacgcatacaaagatctggcatggaagcacgggaatatacatctgtctgcaccgtgcatctacagcgaggttatggaggcactggatttgcagcctggcttatcctttcttaacctgggttcaggcaccgggtatctatcctcaatggtgggattgattctcgggccctttggcgttaatcatggcgtcgaacttcacagcgacgtcatcgaatacgctaaacagaagcttgatttcttcatccgcactagcgacagcttcgacaaattcgatttttgcgaaccaagctttgtgaccggcaattgtctggaaatatctccagactgttcacaatatgacagggtgtattgtggcgcaggcgtccagaaggaacatgaggaatacatgaagaacctgctcaaagtgggaggcattttggttatgcccctggaggagaaacttactaaaattaccaggactggcccctccgcatgggaaactaagaagatcctggctgttagctttgcaccactcatccagccatgccactctgagagtggtaagtctcggctcgtccagctgcgctctccttccttcgtacagggttggagcgtggtggttctcagtcagctgaccgctgccagtaccttccaggctgaggccatcctgcccagtcaatccccaacttggctgacccttcaagtcctcgccaccatgccaaactag

SEQ ID NO: 14226 - DNA, 612 bp, synthetic construct
  source 1..612: mol_type = other DNA; note = Synthetic coding sequence
atggccaggcccaggccaagagagtacaaggccggcgaccttgttttcgctaagatgaaagggtatccacactggcctgcaaggatagatgagttaccagagggagctgtgaagcctcccgctaataagtacccaatcttcttcttcggtacacatgaaactgctttccttggcccaaaggatttatttccctataaagaatataaagataagtttggcaagtctaataagcggaagggctttaacgagggcctgtgggagattgagaacaacccaggcgtaaaatttactgggtaccaggccattcagcagcagtcttcgtccgaaacggaaggtgaaggaggaaacacggcagatgccagtagcgaggaggagggtgatcgcgtggaggaagacggaaagggaaaacgcaagaatgaaaaggccgggtctaaacgcaagaagtcctacacctctaagaagagcagtaaacagagcaggaagagccctggggacgaggatgacaaggactgcaaagaagaggaaaataaaagctcaagcgaaggaggtgacgccggcaatgatacgcgtaataccacttctgatttgcaaaaaacgagcgagggtacctag

SEQ ID NO: 14227 - DNA, 540 bp, synthetic construct
  source 1..540: mol_type = other DNA; note = Synthetic coding sequence
atgaagactccggtggaactagcagtttctgggatgcagactctggggcttcagcaccgttgtagaggtggatacagggtgaaagcacgcacctcctacgtagatgagacactgtttggcagccccgccggaaccaggcccactccccctgacttcgatcccccctgggtggaaaaggccaacagaactcggggcgtaggaaaggaagcgagcaaagccttgggggccaagggatcctgtgaaacaacgccttccaggggcagcacacccacactgacgccacgaaaaaagaataaataccggcctatctcccatacaccttcatattgtgatgagagcctttttggatctcggtccgaaggggcttcctttggagccccccgtatggctaagggggacgccgccaaacttagagccctcctgtggacccctcccccaactccacgtggctcgcattcccccagacctagggaggcccctcctccagtcccacctactcagatgggcttgagaatttccgggctgccaaggcaggggtag

SEQ ID NO: 14228 - DNA, 1104 bp, synthetic construct
  source 1..1104: mol_type = other DNA; note = Synthetic coding sequence
atggatggtgaagacatccctgatttttcttccctgaaagaagagactgcttactggaaggagttgtctttgaagtataaacagagttttcaagaagcccgagatgaactggtcgaattccaggagggctctcgagaactggaagccgagttggaggcacagctggttcaagccgaacagcggaatagagatctgcaggcagacaaccaacggcttaagtatgaggtggaagctctcaaagaaaagctggagcatcagtatgcccagtcctacaagcaggtgagcgtgctcgaggacgacttgtctcaaacaagagccataaaggaacagctccacaagtatgtgcgcgaactcgagcaggcaaacgacgatctggagagggcaaaacgggccacaatagttagtttggaggacttcgagcagagactcaatcaggccatcgagaggaatgccttcctcgaatccgagcttgatgagaaagaatcattactggtctccgtccagagacttaaggatgaggcccgcgatctcaggcaggagctggctgtcagagagagacagcaggaggtaactcgaaaaagcgcgcccagttccccgactttggactgcgaaaagatggattctgcagtgcaggcctccctaagtttgcccgccacgccagtaggaaagggaactgagaacacttttccatctcctaaggctatccctaatggcttcggcacgagcccacttacacccagcgcacgcattagtgctcttaatatagtgggagacctcctccggaaggttggcgccctcgagtcaaaactcgctgcttgccgtaatttcgccaaagatcaggcatcacggaagtcctacatctctggtaacgtcaactgtggtgtgctgaacggcaacggtactaagttttcacggtccgggcacaccagcttttttgacaagggaagttcatcatcttgcgccataagagccagccgccggaggttttctagttcaagcgcagaccttgccggtcggggcggcggtgatgggagtatcccagcacagcatagtacaggcgcctccggtaaggcccctccacccactctcctgctcgagacctag

SEQ ID NO: 14229 - DNA, 591 bp, synthetic construct
  source 1..591: mol_type = other DNA; note = Synthetic coding sequence
atgggtagcagaagcagccatgctgctgtgatcccggacggcgatagtatcagaagagagacagggttcagccaggctagtctgctgagattgcatcatcgcttccgggccctggatcggaacaaaaaaggctatctgagtcgaatggacctgcagcagataggagcgctggccgtgaatccccttggggacaggataatcgagtccttttttccagatggatctcagcgcgttgattttccgggcttcgtgagagtcctggctcattttcggcctgtcgaggatgaggacaccgaaactcaagatcctaaaaagcctgagccactcaacagccgaagaaataaattgcactacgccttccagctgtatgatctcgaccgcgatggaaagatctctcgacacgaaatgttacaggtcctgagactgatggtcggggtgcaggtgaccgaggaacaactagagaacatagcggaccggactgtgcaggaggccgatgaggacggcgacggagcggtatctttcgtggagttcaccaagtcccttgaaaagatggacgtggaacaaaaaatgtccatccgcattttgaagtag

SEQ ID NO: 14230 - DNA, 2313 bp, synthetic construct
  source 1..2313: mol_type = other DNA; note = Synthetic coding sequence
atgttcaggtacgagagcctggaagactgtcctctggatgaggatgaggatgcctttcagggtctgggggaggaagatgaggagattgatcagttcaatgacgacacctttggatctggtgcagttgacgacgattggcaggaggcacacgagaggctggccgaattggaagagaaactcccagtggcagttaatgagcagactggaaacggagaaagggacgagatggacctgctgggcgaccatgaggagaaccttgccgaacggctgagcaagatggtaatcgaaaacgaactggaagatcctgccattatgcgagccgtacagaccaggccggtactgcagccccagcccggctctctgaactcctccatctgggacggaagtgaagtcctcaggaggatcaggggtcctctgttggcgcaagagatgcctactgtctccgtccttgagtacgcactgcctcagcgcccccctcagggccccgaggacgacagagacctgtccgagcgggcactgccacgcaggagcacgtcacccattatcgggtccccccccgtgcgcgcagttccgatcggaactccccctaagcagatggcagtgccgtcttttacacagcagatcctttgtcctaagcctgtccacgtgcgccccccgatgcctccccggtatcccgccccatatggcgagagaatgtcacccaatcagttatgttccgttcctaacagcagcctactgggccacccttttcccccttccgtgcctccagtactttctcccctgcagcgcgcccagttgctgggcggtgcccagttgcaacccggcagaatgagtccatcacagtttgccagggttcccggatttgttggaagtcccctagcagcaatgaaccccaagctactgcaggggcgagtggggcaaatgcttcctcccgcgcccggattcagagctttcttttccgcgcccccatcagccacacccccaccgcagcagcaccccccagggccgggcccccatctgcagaacttgcggtctcaggctccaatgttccgccccgacaccactcacctacatccccagcatcgacggttactgcaccagaggcagcaacaaaaccggagccaacataggaacctgaatggcgcaggggacaggggctcgcacagatcttcccatcaggaccacttgcggaaagatccatacgccaacctgatgttacaacgcgagaaggactgggttagcaagatccagatgatgcagctgcagtccactgacccttacctggacgatttttattatcagaactacttcgagaaattggagaagctcagcgcagctgaagaaatccagggtgacggccccaaaaaagaaagaaccaaacttattactccccaggttgcgaaacttgagcacgcatacaagcccgtccagtttgagggaagcttgggcaaactgacagtgagcagcgtgaacaatcccaggaagatgatcgacgcggtggtaacctccagaagcgaggacgatgaaaccaaagagaagcaagtgcgggacaagaggcgaaaaactctcgtcattattgaaaagacttactctttgctcctcgatgtggaggactatgagagaaggtacctcctcagtctggaggaagagaggcctgccctgatggatgatagaaaacataagatttgtagcatgtatgacaatctccgcggtaaattgcccggccaggagcgccccagtgatgaccacttcgttcagatcatgtgtatccgcaaaggaaaaagaatggtggccagaatcctgccctttcttagcacggaacaggccgcggatatcctgatgacaaccgcccgcaatctgccttttcttatcaaaaaagacgcacaggatgaggtcttgccatgcctgttgtctccatttagcctgttactctaccatcttccatcagtgagcatcacctcccttctgaggcagctcatgaacttgcctcagagcgcagccacacctgccctgagcaacccccacctgacggctgtgctacaaaataaatttggcctaagcctgctcctgatcctgttgtcaaggggggaagacctccagtcctccgatcccgccacagaaagtactcaaaataaccagtggactgaagtgatgtttatggccacaagagagctcttacggattccacaggccgccctggcgaagccaattagtatacccaccaatctggtgagcttatttagtagatacgtagaccggcagaaactgaatcttctagagaccaagctccagttggtgcagggaatacgatag

SEQ ID NO: 14231 - DNA, 1518 bp, synthetic construct
  source 1..1518: mol_type = other DNA; note = Synthetic coding sequence
atgcgtcttaggcgcctcgccctctttccaggcgttgcgctcttgctcgcagccgcgagacttgccgcagcgtccgatgtgcttgaactgaccgacgacaactttgagtccagaataagcgacaccgggagtgccgggctgatgcttgtggagtttttcgccccgtggtgtgggcactgtaagcggctcgcacccgagtacgaggccgcagctaccagactgaagggtattgttccattggcgaaagttgactgtacagccaacacaaacacttgcaataaatatggagtgagcggatatccaactctaaagatttttagggacggggaagaggccggcgcctacgatgggccaaggacagctgatggaatagtctcacacctcaaaaaacaggccgggccggcctctgttcctctgagaacggaggaggagtttaagaaattcatttcagacaaagacgcatccatagtgggattctttgacgatagcttctccgaggcccacagcgagttcctgaaagccgcttcaaacctccgggataattaccggttcgcacacaccaatgttgagtctttagtaaatgagtacgacgacaatggagagggcatcattcttttccgaccctctcacctcacaaacaaattcgaggataaaacggtagcgtatacagagcagaagatgaccagtggaaaaattaagaagttcatccaagaaaatatctttggcatttgtcctcatatgacggaggacaacaaggacttgatccagggaaaagacctcttaatcgcctactatgacgttgattatgaaaagaacgcgaaaggctctaattactggagaaatagggttatgatggtcgctaagaaattcttggacgcgggccataagctgaacttcgctgttgcctcccgaaagaccttttctcatgaactgagcgatttcgggttggagagcactgcaggcgaaattcctgtggtcgccattcgaacggcgaaaggtgaaaagtttgtgatgcaggaggagttttctagggatggaaaagctctcgaaaggtttctgcaagactacttcgatgggaacctgaagagatacctgaaatccgaaccaattcccgagtcaaatgatgggcccgtaaaggtggtggttgcggagaattttgatgaaatcgtcaacaatgaaaacaaagatgtattaatagaattctacgctccctggtgcggacactgtaagaatctggaacccaaatataaagaactcggcgagaagctgagcaaggaccctaacatcgtgatcgccaagatggacgcgactgcaaatgacgttccgtcaccatatgaggtgcgcggtttcccgacgatctacttctcgcctgcaaataagaaactgaatcctaagaaatacgagggcggccgagagctcagcgattttattagctacctgcagagagaagccacgaaccctccggtgattcaggaggaaaaaccaaagaaaaagaaaaaagctcaggaagacctgtag

SEQ ID NO: 14232 - DNA, 684 bp, synthetic construct
  source 1..684: mol_type = other DNA; note = Synthetic coding sequence
atgagcgttgtgcctccaaaccgctcccagacgggatggcccagaggggttacccagttcggcaataaatacatccaacaaaccaaacccctcaccctcgagcgcaccattaatctgtatcccctgaccaactacacgtttgggacaaaagaaccactgtacgagaaagactcatcagtggccgctcgctttcaacgcatgagggaagagtttgacaaaatcggtatgagacgcacggtagagggggtcttgattgtccatgagcacagattaccccacgttttgctcctacagcttggtacaacattcttcaaactccctggcggagagctcaatcccggagaggacgaagtggagggtctcaaacgcctcatgactgagattctcggcaggcaggatggggtcctgcaggattgggtaatagatgattgcatcggtaactggtggagaccaaatttcgaaccacctcagtacccatatattcccgcgcacattactaaacccaaggaacacaagaagctgttcctggttcagctgcaggaaaaggctctgttcgccgtgccgaagaattacaaactcgtggctgcccccctgtttgagctgtacgataacgctccagggtacggccctattatatcaagtctccctcagctcctgtctcgattcaacttcatttacaattag

SEQ ID NO: 14233 - DNA, 2244 bp, synthetic construct
  source 1..2244: mol_type = other DNA; note = Synthetic coding sequence
atgtcccaggtaaagagctcatactcttacgatgctcctagtgactttattaattttagcagccttgatgacgaaggtgatacacagaatattgattcctggtttgaggagaaagctaatctggaaaacaagcttctcggcaaaaacgggaccggcggcctgttccaaggcaaaacgccactcaggaaagcgaacttgcagcaggccattgtgacgcctctcaaacccgtagacaatacttactataaggaggccgaaaaggagaatctcgtggaacaatccatcccctcaaacgcgtgctcgtctctggaagtggaagcagcaataagccggaagactcctgctcagccccaacgcagaagcctcagattgagtgcacaaaaagatctcgagcagaaggagaagcaccacgtcaagatgaaagcaaagcgatgcgccaccccagtcataatcgatgaaatcctgccatccaagaaaatgaaagtctccaacaacaaaaagaagcccgaggaggaaggctccgcacatcaagatactgctgagaaaaatgctagctcaccagagaaggccaaaggcagacacaccgtgccatgtatgccaccagcaaaacaaaagtttttgaagtccaccgaagaacaggagttggaaaagtctatgaagatgcagcaagaggtggtcgagatgaggaagaaaaacgaggaatttaaaaaactggctctcgcaggaatcgggcagccggtgaagaagtcagttagtcaggttacaaaatcagtagatttccacttcagaactgacgagcgaataaagcagcacccgaagaatcaggaagagtacaaggaggttaacttcacttctgaattaagaaagcacccctcttctccagcgcgtgtgacaaagggctgtacaattgtaaagccctttaatctcagccaaggcaaaaagcgcacatttgacgagaccgttagtacctacgtccctctcgcgcagcaggtagaggatttccacaagcgaacgccaaatcgctaccatctgcggtctaagaaggatgacataaacctactgccgagcaagtcatccgtgactaaaatatgccgggacccccagaccccagttttgcagacaaagcaccgcgcccgcgccgtgacgtgcaagagcaccgcagaactggaggccgaggaactggagaaactgcaacagtacaaatttaaagcacgggaattggaccctagaattttggagggggggcccatcctccctaaaaaaccaccagtcaagccaccaaccgagcctattgggtttgatctcgaaatcgagaaacggattcaggaacgcgagtcaaaaaagaaaactgaagacgagcattttgaatttcatagtcgaccctgcccgacaaagattttagaagatgtggttggcgtgcccgagaaaaaagtgctgcctatcacagtacccaagagccctgcattcgctttgaaaaaccggattagaatgccaacgaaggaagatgaagaagaggatgaacctgtggtgatcaaagcccagccagtgccccattatggagtaccatttaaaccccagatcccagaagctcgcaccgttgagatttgccccttcagcttcgactcccgcgacaaggaacggcagctgcaaaaggagaagaaaattaaggagctgcagaaaggcgaggttcccaagtttaaagcactaccgctcccccacttcgacaccatcaacctccccgagaagaaggtaaagaacgtcactcagatcgagccgttctgtttagagacagaccgacgaggcgcgcttaaggcccagacttggaagcatcagctagaggaggagctccgccagcaaaaggaggctgcctgttttaaggcaaggcccaatacggtgatttctcaggaacctttcgtgccgaaaaaagagaagaagtctgtcgccgaggggctgtccggatcactggtgcaggagccctttcagttagcgacagagaagcgagctaaagaaagacaggagcttgaaaagcgcatggccgaagttgaggcccagaaagctcaacagttggaagaagcaagattacaagaggaggagcagaaaaaggaggaactcgctcggttgcgcagggaactggttcacaaggccaatccaataaggaaatatcaaggtttagagatcaagtcctccgatcagccccttaccgtgcccgtcagtcctaagttttccacgcgattccattgttag

SEQ ID NO: 14234 - DNA, 360 bp, synthetic construct
  source 1..360: mol_type = other DNA; note = Synthetic coding sequence
atgaaactcgtgcgttttctgatgaagctgtcccatgaaactgtaaccatcgagctgaagaatggaacccaagtacacggaacaattactggcgtagacgtttcaatgaatacacacctgaaggcggtaaaaatgactctaaagaaccgggaacccgtgcaactggagactctttccatcagaggcaataacatccggtactttattttaccagacagcctcccgctcgatacgttattggtggatgtggagccgaaggtgaaatcgaaaaaacgagaggccgtagcagggaggggccggggccgtgggagagggcgcggacgaggacgtggcagagggagaggtgggcccaggaggtag

SEQ ID NO: 14235 - DNA, 555 bp, synthetic construct
  source 1..555: mol_type = other DNA; note = Synthetic coding sequence
atgatgggcgccagtaccctacaggaacctgccctcagccctggccggtgcccacgacagcctctgcgcagcaaatttgggcatcaaggctccaccgtccagcgtaagtgcagtaaaaccaacgccctgaacgtgtcgcaaaagatgatagagatgttcgtgcgcacaaagcataaaatagacaagtcccacgagtttgccctggtagtggtgaatgatgacaccgcctggctgtccggtctgacttcagacccacgcgagttatgcagttgcctgtacgacctcgagactgcctcatgctctactttcaatatctcgggagcgagcccggcccggcagcagaaaactgagctgcctgtgaccgaaaatgttcagaccatccccccaccgtacgtcgtacggaccatcttggtctacagccgacccccttgtcagccacagttcagcctgactgagcccatgaaaaaaatgtttcagtgcccgtatttcttctttgatgtggtatacatccacaatggcacggaagaaaaggaggaggagatgtcatggaaatag

SEQ ID NO: 14236 - DNA, 1203 bp, synthetic construct
  source 1..1203: mol_type = other DNA; note = Synthetic coding sequence
atggctagcgagaaacccttggctgcggtcacatgtactgctccggtgaatatcgctgtcatcaaatactgggggaaacgcgatgaggagttagttcttcctatcaacagttccctttcagttactctgcatcaggatcagcttaagaccaccaccaccgcggttattagtaaggactttacggaagatcggatttggcttaacgggagagaggaggatgtggggcagccccgactacaggcatgcctgagggaaattcgctgtctggcgaggaagcgtagaaatagtcgtgacggcgatccacttccctcatctctgtcatgtaaggtccacgtagccagtgttaataactttcctaccgccgccggactagcctcttctgctgcggggtacgcctgcctagcctacactctcgcccgcgtgtacggagtggaatctgacctcagcgaggtcgccagacgggggagtggatcagcctgtagatctctctacggcggcttcgtagaatggcagatgggagagcaagccgatgggaaggactccattgcccgccaggtcgccccagagtcccattggcccgagcttcgggtgctaatcctcgtggtaagcgcggagaagaaactgacaggctctacagtcgggatgcgcgcctctgtggagacttcccctctcctgcgctttagagcagagtctgtggtgcctgcgcgcatggccgagatggcacggtgcatacgtgagagggacttccctagtttcgcacaacttacaatgaaagattccaaccagttccacgcaacctgcctggatacgtttccacctatttcctacttgaacgccatttcatggcgaatcatccacttggttcatagattcaacgcccatcatggtgatactaaggtcgcctatacgtttgacgccggacctaatgctgtcattttcacattggacgacactgttgcagaattcgtcgcagccgtgtggcacggattccctcccggctccaatggggacactttccttaagggattgcaggttcgacctgcaccattatccgcagagctgcaggctgccctggccatggagccaaccccggggggggtgaaatacatcatcgtcacacaggttggccctggccctcagatattagatgatccctgtgctcacctgctggggcctgacggccttccgaaaccggccgcctag

SEQ ID NO: 14237 - DNA, 1350 bp, synthetic construct
  source 1..1350: mol_type = other DNA; note = Synthetic coding sequence
atgagagaatgcattagcattcacgttggccaggccggcgtgcagatcggaaatgcctgttgggagctgtactgtcttgaacatgggatccagcccgacgggcagatgccctcagacaagaccatcgggggaggagacgacagttttaacaccttcttctccgagaccggcgcagggaaacatgtgccgagagccgtgttcgtcgatctcgaaccgacagtcattgacgaagtacggacgggcacttatcgtcagctattccacccagaacagttaataactggaaaagaggacgctgccaataattatgcccggggtcactatacaatcgggaaggagataattgatctcgtcttagatagaatcaggaaactggccgaccagtgtacaggactgcaggggttcctcgtttttcactcttttgggggtggtaccggatctggatttacgtccctgcttatggagcgcttgtctgtagattatggcaagaagagtaagctggaattcagcatctaccccgcccctcaggttagcaccgccgtcgtcgaaccttataattccatccttaccacccatactaccctcgagcactccgactgtgcattcatggtagataacgaagcgatctacgacatatgtcgacgaaatctagatatcgagcgacccacctatacgaaccttaatagactgattagccaaattgtgagtagcatcactgcaagcctgcgcttcgacggtgctttaaatgtcgacctgacagagttccagactaacctggtaccttatcctcgtatccattttcccctagcaacctacgccccggttatttctgctgagaaggcataccacgagcaattaacagttgccgagataacgaatgcttgttttgaacccgcaaatcagatggtgaagtgtgacccacgtcatggtaaatacatggcctgctgcctgttgtataggggagacgtcgtgcctaaggacgtcaacgccgctatcgcaacaattaagactaagaggactattcagttcgtggactggtgccccacagggtttaaagtcgggattaattaccagccaccaaccgtggtgccagggggagatctagctaaagtgcaacgggccgtgtgcatgctgtcaaatactaccgctgtggccgaggcatgggcacggcttgaccacaaattcgatctgatgtacgcaaaacgagcttttgttcattggtatgtgggcgaaggaatggaggagggcgaattctctgaagctagggaagatatggcagccctcgagaaggactacgaagaggtcggcgcagactcggcagatggagaggacgagggagaagaatattag

SEQ ID NO: 14238 - DNA, 1365 bp, synthetic construct
  source 1..1365: mol_type = other DNA; note = Synthetic coding sequence
atgagcacatttcgccaggaggatgtagaggatcattatgaaatgggggaagaattagggagtggtcagttcgctattgttagaaagtgccgtcagaaaggaacgggtaaggaatatgctgcaaaattcatcaaaaaacgccgcttatcatccagcagaagaggggtcagtcgcgaggaaatcgagcgcgaggttaatatactgagagagatacggcatccaaatatcattaccctgcatgatatcttcgagaacaagactgatgtcgttctcatcctcgaactcgtcagcggcggtgaactgttcgacttccttgcagaaaaagagtctcttaccgaagacgaagccacacagttcctcaagcagatactggacggcgtacactatttacattcaaagaggattgctcacttcgatttgaaaccagaaaatatcatgcttttagataagaatgtcccgaaccctcgtatcaaattgattgacttcggtatcgcacacaaaattgaagcagggaatgaattcaagaatatattcggcactcccgagtttgtggcacccgaaatcgtcaactacgaacccttgggcttggaggccgatatgtggtcaattggagtgatcacctacatcttgctcagcggagcgagtccattcctcggtgaaactaagcaggagacactaaccaatatctccgccgtgaattatgactttgatgaggagtacttcagcaacacctctgagctggctaaagacttcattcggaggctgcttgtcaaggaccctaaacggcggatgactatcgctcagtccctggaacactcctggattaaggctatcaggcggagaaacgtgagaggcgaggattccggaaggaagccagagaggaggcggctgaagaccacacggctaaaagagtacacaatcaaatcgcatagttcactcccccctaacaattcctacgcagattttgaacggttctccaaagtgctcgaggaagcagctgccgccgaggagggcctgagggaactccaacgtagtagaagactctgtcatgaggatgtagaggctctggccgcaatctacgaagagaaggaggcatggtacagagaagagtccgactctctggggcaggatctgagacggcttaggcaggaactactgaaaaccgaagctctgaagagacaggcccaggaagaggccaaaggggctctgttgggaacttcaggtctcaaacgccgcttttcacgcttggagaatcggtatgaagcgttggcaaagcaggtcgcttctgagatgcgattcgtgcaggacctggtgcgggctttggagcaggaaaagctccagggcgtcgagtgcggcctgcggtag

SEQ ID NO: 14239 - DNA, 1326 bp, synthetic construct
  source 1..1326: mol_type = other DNA; note = Synthetic coding sequence
atgaaaaagttctttcaggaatttaaagccgacattaaattcaagtccgccggcccaggccaaaagcttaaagagagcgtcggagagaaggctcacaaagagaaacccaaccagccagctccgagaccacccagacagggccccacaaatgaggcccagatggctgccgctgcagcccttgccaggctggagcagaagcaatctagagcatggggtccaacatcgcaggacaccatccgcaatcaagtgagaaaggagctccaggctgaagcaaccgtgagcggcagcccagaggccccggggactaacgtggtgtctgaaccccgtgaggagggcagtgcacacttagccgtaccgggagtctattttacctgccctctgacaggtgccaccctgagaaaggatcagcgagacgcatgcataaaggaggccattctccttcacttttcaacagacccagtcgctgccagcatcatgaaaatttacacatttaataaggaccaagacagagtgaagctgggagtggatacgatcgcgaagtacctcgacaacattcatctgcaccccgaggaagaaaagtatagaaagatcaagctgcagaacaaggttttccaagagcgaatcaactgtcttgaaggaacccatgagtttttcgaggccattgggttccaaaaggttcttctccccgctcaagaccaggaagaccccgaagagttttatgtgctatccgagaccacactggcccaacctcagagcttagaaagacacaaggaacagctgctagccgccgagccggtgcgggccaagctcgatcgccaaagacgggttttccagcctagccctttggcctcgcagttcgagctgcccggggacttcttcaatctcaccgccgaagaaatcaagcgtgagcagcgcctgcgtagcgaggctgtggaacgcctctccgtcctgaggactaaggctatgagggagaaggaggagcagcgggggctgcgcaagtataattatacccttttgagggtgcggctaccagatggttgcttgctgcaagggacgttctatgcgcgggagcggctcggtgcagtatacggtttcgttcgagaggctctgcagagtgattggctaccttttgagctgttggcttccggcggccagaagctgtcagaggacgagaaccttgctctgaacgagtgcggactggtcccctctgcactgttgacgttcagctgggacatggcggttctggaggacatcaaggccgccggagccgaaccggactctattctgaaacctgagctgttatccgctatcgaaaaactactctag

SEQ ID NO: 14240 - DNA, 900 bp, synthetic construct
  source 1..900: mol_type = other DNA; note = Synthetic coding sequence
atgcgcgacctgttactccactgggggccaggaccgcccattcgggctccccaggaagaagcagaggccctgttggagctgcagggccgcctgcaggaagcccaggataccaccgaggccttgcgcgcccagctgggggtccaagaagtgcagttgcagggtctacagggcgctctccagcagttacaacaggagactgagcagaactgccgacgtgagttacaacagatgcacgggcagcttgccggattgcgagccaggatggcatctctgagacaaggttgcggggaccttcgaggcctggtaagcacatttacacaaagctgtcagggctccctgtcggaggctcggggccaggtctcttgggccctcggagccttgtccagtggcgggccaggaacgcagttgccggagggtcagcaggggccccccgctgggtgtccgggacgtctgccagagctgaagggaaacattagagtcctgtgtcgactgagacctggtaccagctcatcactggtgagcgtcgagccaggccccggcgggacagtgactacatgctatcggggaaggcaccgtcgctttaggttagactgggtgtttccacctgacgcgagccaggaggaggtgtttcgcgagttggaacctgccgtactgtcatgcctcagagggtactccgtctgtatttttacctacgggcagaccggcaccggcaagacatattctatggaaggaccgcccgaagaccccggcatcgtgccccgcgcgctacaaagccttttccgcgagatgggagccggcagacagcaccgcagataccacggccgatgcctctcgcctgcagaatccccggaacacccacggcctgggctgcctccctgtagggcgcgctcacccctctag

SEQ ID NO: 14241 - DNA, 2517 bp, synthetic construct
  source 1..2517: mol_type = other DNA; note = Synthetic coding sequence
atgtacgcgttttactctctgttaatttatattttttattcactgttcagaagggatgggggggcagcggccgcggccgagccgggagaccccgcccagagggcgagaaagccccggggccgccggaggccggacttgcccgcaccggagctgtggacggagttgactgggctagccgccagcagcgagcccgaagacggctccgaaggcgcggccgaaggcagggccgcagccgtaagcctggaagaggccctcctccgactggctgagtttctgtcggttcagctcggggccgaggagagctgtgggggcccggcggatctgggtcagtccggcgaggtgccgtcccttcttaccgttaccagccaattgctggcactcctcgcctggctcaggtcccctcggggcaggcaggccttgctacaggggacccagcccgctccccgagttcggcccccaagccccgacgggtcgacttcacaagaggaatcccccagccacttcacagctgtccccggggaaccactgggagacgaaacacaggggcagcagccactgcagctggaggaagaccagagggcgtggcaacgcctcgagcagttgatattgggccagctagaagagttgaaacaacagctagagcaacaggaagaggaactgggcaggctgcgcctaggcgtcggagctaccgactcagagaaacgcgtgcagcatttgacgctggaaaatgaggcattgaaacagtccttaagcctcatgcgagatctgctgcttcattggggtcctggcccccctattcgagcacctcaggaggaggctgaagcccttctggagctgcaaggaagactccaggaggctcaggacaccacggaagcgcttagagctcaattgggggtccaagaagtgcagttgcaggggttgcagggagctctccagcagttgcagcaggaaactgagcaaaattgccgtcgggaactgcagcagatgcacggtcagctggcgggtctccgggcaagaatggcttccctgcggcaggggtgtggagatctccgaggtctcgtgtcaacatttactcagtcctgccagggatctctgagcgaggcccgaggacaggtctcctgggctcttggcgccttgtcctcaggtggtccaggtacacaactccccgagggacagcagggcccaccagcagggtgcccaggccggttgccggaattgaagggaaacatccgcgtcctgtgtcggctccgaccaggaacaagttctagcctcgtttctgtggagcccggccccggggggaccgtgaccacctgttatcggggaaggcaccgccgttttcgactagactgggtatttccccctgacgcttcccaagaggaagtgttccgcgaactggagcctgctgttctgtcttgtttgcgcgggtactcagtgtgtatatttacctatgggcagactggtacaggaaagacatattctatggaggggccacccgaagacccgggaatcgtgcccagagctctccagtcactgtttagagaaatgggcgccggtcgacaacatcgcgtcacactgtctatggtcgagatctataatgaagccgtgcgagacctgctggcaccaggtccccccgaacgactagcagtgcgacagggaccagaagggcaaggtggcattcaggttgctggcctgacacactgggatgtccctaatttggaaaccctacaccagatgctgaagctggggcgctctaatcgggccaccgctgcgactgccatgaatcagcgctcttcaaggtcccatgcactggtgaccttgaccctgagggccgcgagtccccccagagcgcccgggacagctggaaccctccacttggttgatcttgccggatccgaacgcgcgagaaaagctggggccgcaggacctcctcgtggggacccggatggagctagaaggctccgagaagctcaaacaatcaataggtccctgctggccctgggaggcgttatggcagcactccgtgcccatcggccccacgtcccctttcgtgactctcagctcacccggcttctgcagccagcgctcggtcctggcacaacagctgtcctccttctccaggtgggcgccggcgccgggcaagtttgtgcttgccgtagtcctcccactcgggcccggccccccgcccccttggccaggaggagccctagagggagacggatttctgggcggcagtctgctccctcctcatcacccacagagtgggtcaagtggagttggggccaaccaggcgccgccggtagcagagctccccctgggagactcctccccagtgctcctactctgagatcacccgggccacctgcacctcttcgcaggccactcgccgttcttcatgcccctgtgccaaccaccgcccgagcaagacttagcaggccccagcgcgcttgtccaagcagcccgggctcaagaccttgtccatggggtcttaggccaggcctttgctggcagcgcagatag

SEQ ID NO: 14242 - DNA, 597 bp, synthetic construct
  source 1..597: mol_type = other DNA; note = Synthetic coding sequence
atggccagcggcaacgcaagaatcggcaagcctgcacccgattttaaagccacagcggtagtcgacggcgctttcaaagaagtcaagctgagtgattacaagggcaagtacgtagtcctatttttttacccgttagacttcacatttgtgtgcccaacagagattatcgccttttctaacagggctgaggatttcaggaagttaggatgtgaggtactcggggtgtctgtcgattctcagttcacccacctcgcatggatcaatactcccaggaaagaaggcggtctggggccgttgaatattccactactggcagacgtgaccaggcgcctgagtgaggactatggtgtcctgaaaaccgatgaaggcattgcatatcgaggcttgttcattattgacggaaagggcgtgttaagacaaattactgtgaacgatctccctgtgggcagaagtgtcgacgaggctctccggttggtgcaggcctttcaatacacagatgagcacggtgaagtgtgtcctgctggctggaagccaggcagcgataccattaaaccaaacgttgacgatagcaaagaatacttttcgaaacacaactag

SEQ ID NO: 14243 - DNA, 1380 bp, synthetic construct
  source 1..1380: mol_type = other DNA; note = Synthetic coding sequence
atgtctgtgcgtttcagcagtacatccaggcggctgggctcatgcggggggacagggtcagtgcgcctctctagcggaggagcaggtttcggggccggaaacacttgtggcgtgccaggcattggctccggattctcatgtgccttcgggggatccagctccgccggcgggtacggaggggggctaggcggaggaagcgcctcttgcgccgcctttactggcaacgaacacgggctgctaagtggcaacgaaaaagtcaccatgcaaaatttaaatgacagactggctagctacttagaaaatgttagagcactggaagaggctaatgccgatctcgaacagaagataaaaggctggtatgagaaatttggtcccgggagctgtcggggactagaccacgactatagcaggtacttccctattatcgacgagcttaaaaaccagattatcagcgccaccacaagcaatgctcacgtcgtactgcagaacgataacgcccgtcttaccgctgatgatttcaggctcaaattcgagaatgagctggccctgcatcaaagcgttgaagcagacatcaacggactgagaagggtgctcgacgagctaacactgtgtcgaacagacctagagatccagctggagacactctccgaagagttggcatatctgaagaagaatcacgaggaggagatgaaagcgctgcagtgtgctgccggcgggaacgttaacgttgagatgaacgccgcacccggtgttgatctgacagtactgctgaacaacatgagggccgagtatgaggcgctggccgaacagaatagaagagatgctgaggcgtggtttaatgaaaagtccgcatcgctccagcagcagatatctgatgacgcaggagccacaacaagcgctagaaacgagctgatagagatgaagcggaccctgcaaacgctcgagatagaactccaatctctccttgctaccaaacattctctcgaatgctcccttactgagactgagagcaattactgcgcacaactcgcccaaatacaggcccagatcggggccctagaggagcagctgcaccaagtaagaacagagacagaaggccaaaagctagagtacgagcagctgctggatatcaaagttcatttggaaaaggagattgagacttactgcctactgatcgacggcgaggacgggtcctgcagcaaaagcaaagggtatgggggtcccggtaatcaaaccaaggacagcagcaaaactactattgttaagactgtggtggaggagattgatccccggggtaaagtgcttagtagccgggttcatacagttgaagaaaagtccacaaaggtgaacaataaaaatgagcaacgcgtgtctagctag

SEQ ID NO: 14244 - DNA, 834 bp, synthetic construct
  source 1..834: mol_type = other DNA; note = Synthetic coding sequence
atgccatctgtgtctaaagccgctgcagctgcactctctggcagcccgccccagacagaaaagccaacacactatcgttacctaaaggagttccgcacggaacagtgcccactgttttcacagcataaatgtgcccagcaccggccatttacttgttttcactggcactttctcaaccagagacgccggaggcccttgcgccggagagacggaactttcaactatagcccggatgtttactgtagcaagtataacgaggccacaggcgtgtgtcctgacggcgacgagtgtccatacctgcataggaccactggcgacacggaacggaagtaccacctgcgatattacaaaactggtacatgtatacacgagactgatgctagagggcactgcgtgaaaaacggactacactgtgcgtttgctcatggacccctggatttacgacctcccgtgtgcgatgtgagggaactgcaggcccaagaggctctgcaaaacggccagctgggcggcggagagggtgtgcctgatttgcagccaggggtgctggcttcgcaggccatgatagagaaaattctcagtgaagacccaaggtggcaagacgccaatttcgtgctggggtcttataaaaccgagcagtgccctaagccaccgcgcctgtgtagacagggctatgcctgcccccactatcataattcccgggaccggcgacgcaatccgagacggttccagtactcctggcaactcggtaggcgggtcttgcggctgagtccacgcgctaataaccctcgggtcgctctgcctagagttcacactggcccttctagcaccgcctag

SEQ ID NO: 14245 - DNA, 918 bp, synthetic construct
  source 1..918: mol_type = other DNA; note = Synthetic coding sequence
atggacctgtcaggggtaaaaaagaaatccttattaggagtgaaagagaataacaagaaatctagcactagggcgcctagcccaactaagaggaaggaccggtcggacgaaaagagcaaggaccggtccaaggacaaaggtgccaccaaagagagcagcgagaaagaccgggggcgtgacaaaacgcgtaagaggcgatccgctagtagcgggagttcctctacaagatcaaggtcttcttccactagttcaagtgggagctcgacgtccactggctccagtagcggatccagttcatcctccgcgagttcacgaagtggcagctcttccacgtcccgatcatccagttctagctctagttctggttctccctcccccagcaggaggcgccacgataaccgacgaagaagcagatctaaatctaaacctcccaaaagggacgagaaggaacgcaaaagacgctccccgtctcccaagccgacaaaagttcacattggaaggttgactaggaacgtgactaaagatcacattatggagatattcagcacctacggaaagatcaaaatgatagatatgccagtggagaggatgcatccccatttgtctaagggctacgcctacgtggagttcgaaaacccggacgaagcagaaaaggcactaaagcacatggacggtggacagatcgacggccaggagataacggccactgcggtactcgctccatggccccgccctccgccacgacggtttagcccccccagacggatgctccctcccccccccatgtggagacgcagtccccctcggatgcgacgtcgttctcggtctcctcgcagacgcagccctgtgcgcagacggtccaggtctcctggacggcggaggcaccgctctcgatcttcttctaactcgagcaggtag

SEQ ID NO: 14246 - DNA, 3198 bp, synthetic construct
  source 1..3198: mol_type = other DNA; note = Synthetic coding sequence
atgcgcaaacaggaggtgcgtacaggacgcgaggcaggacagggtcatgggaccggcagtccagcggagcaggtgaaagccctgatggacctacttgcaggaaagggctctcaaggtagtcaggcgcctcaggccttggaccgtactcccgacgcccctttgggcccttgttctaatgattccaggatccagcggcatagaaaggccctgttatcaaaagtcggaggagggcccgagcttggcggcccatggcatcgacttgcgtctcttctacttgtagaagggctaacggaccttcaacttagggagcacgactttactcaggtagaagccacccggggaggaggccacccagcccggacagtggctctcgatcgactgtttttaccgctctctagagtcagcgttccccccagggtaagcattacgattggcgttgcgggtatggggaagaccactctggtgaggcacttcgtgcgtctgtgggcccacgggcaagtaggcaaagatttttcactggtgttgcccctcaccttcagagatctgaatactcacgagaagctgtgcgctgataggctaatctgttccgtgttcccacacgtaggtgagccttccttggccgttgctgtccctgcccgagccttgttgatcttggacggcctggacgagtgcaggacaccattggacttcagcaacaccgtggcttgcacagacccaaaaaaagaaatcccagtagaccatttgatcaccaatatcattagggggaatctctttcctgaggtgagtatttggattactagtagacctagcgccagcggtcagattcccggaggcttggtggatcgaatgactgaaattagggggttcaatgaggaggagatcaaagtgtgtctcgaacagatgtttcccgaggatcaagccctgctaggctggatgctctcacaggtgcaggcggatcgcgcgttgtatcttatgtgtacagtacccgccttttgccgactgactgggatggcgctgggtcacctgtggcgctcccgtactggaccccaggatgcggaactctggccgccacggactctatgcgaactttattcatggtatttcagaatggctctgagcggagaaggccaagaaaaagggaaggcctctcctcggatcgaacaagtggcccatggcggtcggaagatggtaggaacactaggccggctggcgtttcacggcctcctcaagaagaagtatgttttctatgaacaggatatgaaggcctttggcgtcgacctagccttactccagggcgcgccctgcagctgctttcttcagagggaggaaactttggcctccagcgtagcatattgtttcacccatctgagcctacaggagttcgtggctgccgcctactattatggggcaagcagacgcgccatcttcgatctctttaccgagagcggcgtttcttggcctcggctgggtttcttgacacattttagaagcgccgctcagcgagccatgcaagctgaggatggtcgccttgatgtgttcctgcgcttcctgtcaggcctgctgtccccccgagtgaacgccctgctggccggtagcctgctcgcccagggcgagcaccaagcctacagaacacaggtcgcagagctgctgcagggatgtctccgtccagacgccgccgtttgcgcacgcgccattaatgttttacactgcctgcacgaactccagcatacagagctggcccgctccgtcgaagaggctatggagagcggcgccctggcccgtctcaccggaccagcacaccgcgcggcactggcttacctgctgcaggtcagcgatgcctgtgcacaagaggccaacctaagtcttagcctctctcaaggcgtgctccagtccctgctgccacagctcctgtactgccggaagttgaggctggatacaaatcaatttcaggatcccgtaatggagttgttaggaagtgtgctgtctggaaaggattgcaggatccaaaagatcagcttagcagagaaccagatttcaaataagggggctaaagctctcgcaaggtccctcctggtgaatcggtccttgacttcgctggacctgagaggcaattccatcgggccacagggggctaaggccctggctgatgctctcaaaattaatcggacgctgacaagcctgagccttcagggcaataccgtgcgagatgatggggctcgctccatggccgaagctctcgcgtccaatagaactctctctatgctgcatctccagaaaaattccattggtccaatgggcgcccagagaatggcggacgccctgaaacagaatcgcagtctcaaggagttgatgttcagttccaattctataggcgatggcggcgccaaggctctcgcagaggctctgaaggtgaaccaaggcctcgagtcgctggatctgcaatcaaactctatatcagatgccggggttgccgccttaatgggcgctctgtgcaccaaccagacgctcctgtctttgtccctgcgggagaatagtatttctccagaaggggctcaggcaattgcacatgctctatgcgcaaactctactttaaagaatctggacttaactgcgaatctgctccatgaccagggcgctcgcgcaatcgcagtggccgtccgggagaataggactctgacatcactgcatctccagtggaacttcatccaggccggagcggcgcaggccctgggtcaggctctgcagttaaatcggtctttaacctctctggacctccaggagaacgcgatcggcgatgacggagcatgcgccgtggcgcgggccctgaaggttaatacagcactgaccgcactatatctccaagtcgcctctattggggcttcaggggcgcaggtgctgggagaagctctcgcagttaatcgaacattggaaatcctggacctgcgcggaaacgccatcggcgtggcgggcgcaaaagccctcgccaatgctctgaaggtcaattcttccctgcgtagactgaatttgcaggagaattctctgggaatggatggagctatatgcatcgctaccgcactgagcgggaaccatcgtctacagcacatcaacctgcaggggaaccacattggcgattctggcgcccggatgatctctgaagcaatcaagaccaacgctcccacctgcacggttgagatgtag

SEQ ID NO: 14247 - DNA, 927 bp, synthetic construct
  source 1..927: mol_type = other DNA; note = Synthetic coding sequence
atgaatcccattgttgtagtccacgggggtggggctggcccaatcagcaaggacaggaaggagcgggtgcaccaggggatggtccgggctgccacagttggatacggaatactgcgcgagggtggatcagctgtcgatgctgtcgaaggcgcagtggtcgcccttgaagatgatcctgaatttaacgctggctgcgggagcgtgctgaacaccaatggggaggttgagatggatgcttctataatggatggaaaggatctgagcgcaggtgcggtcagtgcagttcagtgtatcgccaacccaattaagctcgctagactcgtgatggaaaaaaccccacactgcttccttacagaccaaggagcagcccagttcgccgcagctatgggggtgcccgagatcccaggtgagaaactagttactgaacgaaataagaaacggttagagaaggaaaagcacgagaagggagcacaaaaaacagattgccagaaaaacctcgggacagtcggggccgtcgccttggattgtaagggcaacgtggcatatgccacctccaccggcggtattgtgaataagatggtgggaagggtgggcgactccccttgtctgggagccgggggctacgccgacaacgatatcggtgctgtttcaactactgggcatggggagagcatcttgaaagttaacctcgccaggctcactctttttcatatcgagcagggcaaaactgtggaggaggccgccgatctgagtttgggctacatgaagagccgcgtgaaaggtttgggaggcctcatcgtagtgtcaaaaactggagactgggtcgctaaatggacatccacctcaatgccctgggctgcggctaaggatgggaaacttcacttcggcattgaccctgatgatacaaccatcaccgacctcccttag

SEQ ID NO: 14248 - DNA, 1212 bp, synthetic construct
  source 1..1212: mol_type = other DNA; note = Synthetic coding sequence
atggccggacggcgggctcagaccgggtctgctcccccaagacctgccgccccgcacccaccagcttcacgtgcttttccgcagcactgtcgcccacgggatgctgagaggcccccctctccgcgaagtcccttaatgccagggtgcgaactgcccgtggggacttgtcctgatatgtgccctgccgccgaacgggcccaaagagagcgggaacatcggctccaccggcttgaagttgtgccaggctgtaggcaggaccccccacgggccgatcctcagcgggccgttaaggaatactccagacccgcagctggcaagccccgtccacctccgtcgcagcttcgcccaccttctgtactgcttgccaccgttcgataccttgccggtgaagtggccgagtcagctgatatagcgcgggccgaagtggcctccttcgtcgccgaccgtttacgggctgtgctgcttgatcttgcactgcagggtgcaggtgatgccgaagccgccgtggtattggaagccgctttagccactttgctaaccgtggtggcgcgccttggcccagacgcagctcgcggtcccgctgatccagttcttctgcaggcgcaggttcaggaggggtttgggagtctgcgacgctgttacgcccgcggagcaggtcctcatcctagacagcccgccttccaaggcctgttcctactgtacaacctgggctccgtcgaagctctgcacgaggtcttacaattgccggccgccttgcgagcatgccccccccttaggaaggcactcgctgtcgacgcggcattccgggagggaaacgcggctcgactattcagactgctgcagactttaccgtatttacctagttgcgcagtacagtgccacgttggacacgctcgtcgagaggcccttgccagattcgcccgagccttctctactccaaaggggcagacactaccactgggttttatggtcaacctgttagcccttgacgggctgcgcgaggcccgagatctgtgccaggcccacggcctgcctctggacggcgaagaaagggtcgtgttcttgcgaggaagatatgtcgaagagggcctacctcccgctagtacttgtaaggtgctagttgagagcaagctgcgaggacgcacactggaggaggtcgttatggccgaggaggaggatgaaggcacagataggccaggaagtcccgcgtag

SEQ ID NO: 14249 - DNA, 894 bp, synthetic construct
  source 1..894: mol_type = other DNA; note = Synthetic coding sequence
atggccgagctaacggccctcgaatcactcattgagatggggtttccccgcgggcgggcggagaaggccctggcgctgacggggaaccagggaatagaggcagctatggattggcttatggagcacgaagatgatcccgacgtcgacgaacccttggagacaccactagggcacatcctgggcagggaacccacttcttcagagcaggggggcctcgaggggtctggaagcgccgctggcgagggcaaaccagccctgagcgaggaggagcgccaggaacagacgaaacggatgctcgaactggtcgctcaaaagcagagggagagggaggagagggaggagagggaggccctagagagggaacggcaacgtcgtcgtcagggacaggaactctccgcagcacggcagagactgcaggaagacgagatgcgccgggcagcggaagagcggcgccgagaaaaagccgaggaactggccgcaaggcaaagggtacgggagaagatcgagcgagataaagctgagagggcaaagaaatatggaggcagtgtcggcagccaaccccctcccgtcgcacctgagcctggcccagttccatcttcacctagccaagaaccaccgacgaaaagagaatatgaccagtgtaggatccaggtccgcttaccagatggcacctctcttacacagaccttcagggctcgggagcagctggcggccgtaagactgtatgtcgaactgcacagaggtgaggagctgggcgggggccaggaccccgtccagctgctgagcggattcccaaggcgggcgttcagcgaagcggatatggagcgcccccttcaggaactgggactcgtcccatccgccgtgttaatcgtggctaaaaagtgccctagttag

SEQ ID NO: 14250 - DNA, 570 bp, synthetic construct
  source 1..570: mol_type = other DNA; note = Synthetic coding sequence
atgcgtctttctctgcccctcctcttgttactgctgggcgcgtgggcaatcccgggaggattgggcgaccgggcccctctgaccgcaaccgctcctcagctcgatgacgaagagatgtattcagctcacatgccagctcatttgcgttgtgatgcatgccgcgccgtggcataccagatgtggcagaatctggccaaggccgagacgaaacttcatacctcgaactccgggggcagaagggagctcagcgaactggtgtacacagatgttctcgataggtcctgctcacgcaactggcaagactatggcgtgagggaagtcgatcaggtaaagcgactcactgggcccgggttgtctgagggccctgagcctagcatcagcgttatggtaaccggtggcccatggcccactaggctgtctagaacatgtctccactatctgggggagttcggcgaagaccaaatctatgaggctcaccagcaggggcggggcgcccttgaggcactgctgtgcgggggaccgcagggggcctgcagcgaaaaagtttctgccacccgagaagagctgtag

SEQ ID NO: 14251 - DNA, 3129 bp, synthetic construct
  source 1..3129: mol_type = other DNA; note = Synthetic coding sequence
atggcaaacgattctcccgctaagtctctcgtggacattgacctgtcaagccttagagaccctgccggtattttcgagctagtcgaagtggtgggcaacgggacatacggccaagtttacaaaggccggcacgtaaaaacgggccagttagcggccattaaggttatggacgtgacagaagacgaagaggaggagatcaagcttgaaattaacatgctgaagaaatactcacaccatagaaacattgccacgtattacggcgcatttatcaaaaaaagcccccccggtcacgatgatcagctttggctggtaatggaattctgcggagcaggctccatcacagacctggtgaaaaacacgaagggtaacacgctcaaagaagactggattgcttatataagcagggagattcttcgggggcttgcccacttgcacattcaccacgtgatccatcgggacattaaaggccagaacgtattactgaccgaaaacgcagaagtgaagcttgatgagacagagtacgagtatagcggaagcgaggaggaagaggaggaggtccctgaacaggaaggagaaccctcctccattgtgaacgtgccgggggaatccactttgagacgggatttcctcaggttgcagcaggagaacaaggaacgcagcgaagccctgaggaggcagcagctcttgcaagagcaacagctccgtgaacaggaggaatataagcgtcagctattggctgaacgccagaagcgaatcgagcaacagaaggagcaacgccggcgattagaggaacagcaacggcgtgaacgcgaggcacgtagacagcaggaaagagagcaaaggcgacgtgaacaggaagagaaacgtcgtctggaggagttggaacggcggcgcaaggaagaagaggagcggcgaagggcagaagaagaaaagaggcgggttgaaagggaacaggaatacattcggagacagctggaagaggaacagcgacacctggaagttctccaacaacaactcctgcaggagcaggctatgctgctagagtgtagatggcgggaaatggaggagcaccgccaagccgaaagattgcagaggcagctgcaacaagagcaggcttacttattgtcgctgcagcacgatcataggagaccacatccccagcattcccagcaaccaccgccccctcagcaagagagatccaagccatctttccacgctcccgaaccaaaagctcactatgaacccgcagatcgagcaagggaggtgccggtgcgcactacatccagatcccctgtgctcagccgccgagattcccctctccaggggagtgggcaacagaactcccaagccggccagcgtaattcaaccagctccattgagccccgattattgtgggaacgggtggaaaagctggttccgaggcccggcagtggatcttctagcggatcctcaaactccggcagtcagcccggcagtcatccagggtcccagtccgggagcggggaaaggttccgcgttaggagttcatctaagtctgagggaagtcccagtcaacgactagagaacgccgtgaaaaagcccgaagacaaaaaggaagtgtttaggcctctgaaaccagcagtgcgaattgatctgacggcacttgccaaagagttgagagcagtggaggacgtccgccccccacacaaggtcaccgattacagtagcagttccgaagagtcaggaacaactgacgaagaggatgacgacgtggaacaggagggcgccgatgaatcaacatcgggacccgaggatacgcgtgcggcgagcagtctgaacctatctaatggagaaactgagtcagtcaagaccatgatagttcacgatgatgtcgaaagtgagcctgctatgaccccttcgaaggagggtaccttgatcgtccggcagacccagtcagcctcctctacattgcagaagcataaatcaagctcaagctttaccccatttattgatccgagactcctgcagatcagtcctagctcaggcacaaccgttactagcgtggtgggcttcagttgcgacgggatgcgtcccgaagcaattagacaggatcctactaggaagggatccgtggtcaacgttaaccctaccaacacacgaccccagagcgatacccctgaaatcagaaaatataagaagcgcttcaatagcgagattctgtgcgccgctttgtggggggtgaacctgctggtgggaacagaaagtggcctgatgttgctcgaccgtagtggtcaaggcaaagtttacccattaatcaacaggcggaggtttcaacagatggacgtccttgaaggacttaatgtgcttgtcacgatatctgggaaaaaagacaagctgcgggtgtattatctgagctggttgaggaacaaaatccttcataacgacccagaagtcgaaaaaaagcaagggtggacaacagtgggtgatttagagggctgtgtccattacaaggtggtaaaatacgaaagaatcaaatttctggtgatcgccttgaagtctagcgtcgaagtgtacgcatgggcccctaaaccgtaccacaagttcatggctttcaaatcctttggggaattggttcacaagcccttgctggtggacctaacggtggaagaaggccagcggctcaaagtgatctatggtagctgtgctggcttccacgctgtggatgtggatagcggctctgtgtacgacatttatcttcccacgcatattcaatgttccattaaaccacacgccatcattatacttcctaacacggatggaatggaactgctggtatgttatgaggacgagggagtctatgtcaacacttatggcagaatcaccaaggacgttgttctacaatggggggagatgcctacttcagtggcctacatacgtagcaatcagaccatgggatggggcgaaaaggcgatcgaaataaggtcagttgaaaccggccaccttgacggtgttttcatgcacaagagagcacagagactgaaatttctgtgcgagcgcaacgacaaggtgttctttgcctccgtcagaagcggtggatcctcacaggtttactttatgacattagggcggacctcactgctgtcatggtag

SEQ ID NO: 14252 - DNA, 1113 bp, synthetic construct
  source 1..1113: mol_type = other DNA; note = Synthetic coding sequence
atgggtttcaaccgaccatcaaaaatccaggagaacgccctgccaatgatgctggccgagcctccccagaatctgatcgcgcagtcgcagtcaggcacgggcaagacggctgcatttgtgctggcaatgctgtcgcgggttgagccctctgaccgctatccacagtgcctttgcttatctcctacttacgaactcgccctgcagaccggcaaggtgatagaacagatgggaaagttttacccggagctgaagttggcctatgctgtccgagggaataagttagagaggggccagaagatttccgagcaaattgtcattgggacaccaggcactgtactggactggtgttcaaaactgaagttcatcgatccgaaaaagatcaaagtcttcgtgctggacgaagccgacgtgatgattgcgacacaagggcaccaggatcagtcaatcaggattcagaggatgctgcctcggaactgccagatgctattgttctccgctactttcgaggactccgtttggaagttcgcccagaaagttgtgccagatcctaacgttattaagctgaaacgagaggaggagacacttgatacaataaagcaatactacgtgctttgctcctccagggatgagaagtttcaggctctgtgtaacctttatggggccatcactattgcacaggcaatgatcttctgccacacgcgaaaaactgccagctggctggccgcagaactgtccaaagaaggtcatcaagtggccctgctttccggtgagatgatggtcgagcagagagccgccgtgattgagaggtttcgagaaggcaaggagaaggtccttgtcaccacaaatgtttgcgctaggggcatcgacgtggagcaggtgtccgttgtcatcaattttgacctccccgttgacaaggacggcaatccagataatgagacatacctgcatcggattgggaggaccggccggtttggcaaacgagggttggccgtgaatatggtagattccaagcatagcatgaacattcttaaccggatccaggaacacttcaataaaaaaattgaaagattagacactgatgacttggacgaaatcgagaaaattgccaactag

SEQ ID NO: 14253 - DNA, 1437 bp, synthetic construct
  source 1..1437: mol_type = other DNA; note = Synthetic coding sequence
atggcaaccgactcctgggcattggcggtcgatgagcaggaggctgcagtgaaatccatgaccaacctgcagatcaaagaagaaaaggtcaaagccgatacaaacgggatcatcaaaacctcgaccaccgccgaaaagaccgatgaggaagaaaaggaggacagagccgcccaatcgttgttaaacaaacttatccggagcaacctggtggacaacaccaaccaggttgaagtcctgcagagggaccccaatagccccttgtatagtgttaagagctttgaagagctgcggctgaaaccccagctattacagggagtttatgctatgggcttcaatcgaccttcgaaaattcaagagaacgccttgcccatgatgctggctgagcctccgcagaacttgatagcccagtcacagagcggcaccgggaaaacggctgcttttgttctggcgatgctaagccgcgtagaaccctccgacagatacccacagtgcctatgcttgtccccaacctatgaactcgccctgcagactggaaaagttattgaacagatggggaaattctaccccgagctgaaacttgcctacgcagtcaggggcaacaaactcgaacgcgggcagaaaatatccgaacagatagtcattggcactcccggtactgtgttggactggtgtagtaaactaaaattcatagaccctaagaagatcaaggtattcgtgctcgatgaagctgacgtcatgattgcaacgcagggacaccaggatcagagcattagaattcaaagaatgctgccaagaaactgccaaatgctgctgttctctgctacttttgaagatagtgtctggaaattcgcccagaaggtggtgcccgacccaaacgtgatcaagcttaaacgcgaggaggaaaccctggatacaatcaagcagtattacgttctctgttctagtcgtgacgaaaagttccaggcactgtgcaacctgtatggcgcaatcaccatcgctcaagcgatgatcttttgccataccagaaagaccgcatcatggcttgccgccgagctctccaaggaaggacatcaagttgcgctgctgtctggtgagatgatggtcgaacagcgggcagcagtcattgaacggttccgagagggtaaagagaaggtcctggtcacaacgaacgtttgcgctcgtggcattgatgtcgaacaagtttctgtagttatcaattttgaccttccggtggataaggacggcaatcccgacaacgaaacttacctgcatcggatcgggcggaccgggaggttcggcaagagaggcctcgccgttaatatggtggatagcaaacattccatgaatattttgaaccgcatccaagagcattttaataagaagatagaaaggttagacacagatgacctggacgagatagaaaagatcgcaaactag

SEQ ID NO: 14254 - DNA, 2238 bp, synthetic construct
  source 1..2238: mol_type = other DNA; note = Synthetic coding sequence
atggtgggaccgggacccactgcagccgccgctgtcgaagagcgccagcggaagcttcaagagtatttggccgccaaaggcaagcttaagtctcagaatactaagccctacctgaagtcaaagaacaattgtcagaatcagccaccaagtaaaagcacaatccggccaaagaatgacgtaactaatcacgtggtgctgcccgttaagccgaaacggagtatctcgatcaaactccagccccggccccctaatacagcgggcagccaaaagccaaagcttgagccgccaaagctcctgggtaaacgactaacatcagagtgtgtgagctcgaacccttacagtaaaccctcgtctaagtccttccaacagtgtgaagctggcagcagcaccaccggcgaactttccagaaagccagtgggtagtctaaatatcgaacagcttaagacaaccaaacagcagctcacagatcagggaaatggcaagtgcatcgactttatgaacaacattcacgtggaaaacgagagcctcgacaacttccttaaagaaactaacaaagagaacctgttggacatcttgactgaacccgagagaaagcctgatcccaaactgtacacgaggagtaaacccaagactgacagttacaatcagacgaaaaattcactggtcccaaaacaggctctcggcaaatcctctgtaaattcagccgtactgaaggatcgcgtgaataagcagtttgtgggtgagacacagagtcggacgtttcccgtgaagagccagcagctctcacggggagccgatctggcgaggcccggcgtgaaaccctcccgcactgtcccttctcatttcattagaactctctccaaagtccagagcagcaagaagcccgtggtcaagaatattaaggatattaaagtgaatcggagccagtatgaaagacctaatgagaccaaaattcggtcatacccagtgacagagcagcgcgtaaagcacactaagcccaggacctacccttctctgctgcagggcgagtacaataacaggcacccgaatattaagcaggaccagaagtcttcccaggtctgtatcccacagactagttgcgtccttcaaaagagtaaggccatctcccagcgccctaatctgaccgtgggacggttcaattctgctataccttccactcctagtattcgaccaaacggaactagcgggaacaagcacaacaataacggttttcaacagaaggcccaaacactagacagcaaactgaaaaaagccgtaccccagaaccacttcctgaataagaccgcccctaagacacaggctgacgttaccaccgtgaacggcactcaaactaatcctaacatcaagaaaaaggccactgcagaggaccggaggaaacagctggaagagtggcaaaagtcgaaaggtaaaacttacaaacgcccccctatggagcttaaaaccaagagaaaggtaattaaggagatgaacatttccttctggaagagtatcgagaaggaagaagaggaaaagaaggcccagctcgagttaagttcaaaaattaataacaccctgacagaatgtctaaacctcatagaaggtggcgtccccagcaacgagatcctgaacattctgtccagcatccctgaggccgagaagtttgcaaagttctggatctgtaaggctaaacttcttgcctcaaaaggaacattcgacgtcatcgggctgtacgaagaggccattaaaaacggtgctaccccaatccaggaattaaggaaggtcgttctgaacattctccaggattccaaccggaccaccgagggtattacctccgatagcctggtagcagagaccagtattacttctgtggaggagctcgccaagaagatggaaagcgttaagtcctgcctcagccccaaggaacgcgaacaggtgacagcaactccgcggattgctaaagccgaacagcataattatcctggcataaaactccagattggtcctattccacgtataaacggcatgcctgaggtccaagacatgaaattcatcacacccgtgaggcgcagcagccggattgagcgcgccgtgtctcggtaccctgaaatgctccaagaacacgacctggtggttgcctctctggacgaacttctcgaggttgaggagaccaaatgttttatattcagaaggaatgaagcgctgccagttactctaggttttcagacccctgaatcttag

SEQ ID NO: 14255 - DNA, 378 bp, synthetic construct
  source 1..378: mol_type = other DNA; note = Synthetic coding sequence
atgtcttccactctgggcaaactgtccaatcaggtggaggaaactctcccactgctgaagaaagttccagcaaactattttcacatttgctcagctattctgatgggcttctcactatccaaatccgccacgcaggtaagcgctattcacatggattcgaaagtggatgatcacctgattcgcggtaccgagaagtcccggctggaacccgccacacagctgttccagaacaccaaaaagatcaggttggaggatactaaccaggagaactttacacgcatcgagggaacaggcacgggcagcttgtccggcaaggccctcggatctgtagtgtatgtgaaagagagcgatggactggaaatgacagacgtggagtag

SEQ ID NO: 14256 - DNA, 4284 bp, synthetic construct
  source 1..4284: mol_type = other DNA; note = Synthetic coding sequence
atgtcaatgctaaaacctagcggactcaaggctcccacaaagatcctgaagccaggttctaccgcccttaagacccccacagctgttgtggcacctgtggaaaaaaccattagtagcgaaaaggccagctccactcctagttctgagacacaagaggagttcgtagacgattttcgtgttggtgaacgggtctgggtcaacggaaataagcctggatttatccagttccttggcgaaactcagtttgcaccagggcagtgggccggaatcgtgttggatgaacccattggaaagaatgacggtagcgttgccggagttcgatattttcagtgcgaacccctgaaagggatttttacaagaccatcaaagctaacaaggaaggttcaagccgaggatgaagccaatggactgcagaccacacccgccagccgagcgacatcccccttgtgcaccagtactgcgtcgatggtttcttcttcccccagcacaccttcaaacatcccgcaaaaaccgtcccagccagctgccaaggagcccagcgctacccccccaatctctaatcttaccaagaccgcttcagagtctatcagcaatttgtccgaagccgggagcattaaaaaaggggaacgagaacttaagatcggcgaccgtgtgcttgttggcggcacgaaggcaggcgttgtcaggttcttaggggagaccgacttcgccaagggagaatggtgtggtgttgagctggatgagccgctgggcaaaaatgatggagctgtcgccggtaccaggtactttcagtgtcaacccaaatacggactttttgcccctgttcacaaagttactaagatcggctttcccagcaccactcctgccaaagcaaaagcgaacgcagtgcgtcgcgtgatggccaccactagtgcatcccttaaacgaagtccctctgccagcagcttgagctctatgagtagcgtcgcgtctagcgtatcgtcgcgtcctagtcgcactggtctactgacggaaacctcatcgaggtacgctaggaagatcagcgggactaccgctcttcaggaggcactcaaagaaaaacagcaacatatcgagcagctgttagccgaaagggatctggaacgagcggaggttgcaaaagccacttcccatgtgggcgaaatcgagcaggagctggcccttgcacgagatggccacgatcaacatgtgctggagctggaggctaagatggaccagctccggacaatggtggaagcggcggaccgggagaaggttgaattactgaaccagctggaagaggagaagaggaaagtggaggacctgcagtttagagtggaggaggaaagcatcactaagggcgacctagaaactcagacaaagcttgaacacgcccgcataaaagagcttgagcagagcttactttttgagaaaaccaaggcagacaaactccagagagagctggaggatacaagagtggcaaccgtttcagagaagtctagaatcatggagctggaaaaagacctggcacttagagtgcaggaggtggcagaattgagacggagattggaaagcaacaagcctgccggcgacgtagatatgtctctcagcttgctgcaggagatcagttctctgcaagaaaagctcgaggtgactcgtaccgaccaccagcgtgagatcaccagcctcaaagagcattttggcgctcgcgaggaaacccaccaaaaggaaattaaagctctatatacggccactgaaaaactttctaaggaaaacgaaagcctaaaatcaaagctcgagcacgcgaacaaagagaacagtgacgtgatcgccctgtggaagtccaagctagaaacagccatcgcctctcaccagcaggcgatggaggagctgaaagtctccttctcgaaaggactggggaccgaaaccgctgagttcgctgagctcaagacccagattgagaagatgcggctagactatcagcacgaaatcgagaacctgcaaaaccaacaggattctgagagggccgcccacgcaaaggaaatggaagcactgcgagcgaagctcatgaaagtaattaaggagaaagagaacagccttgaggccatcaggagcaagctcgataaggccgaagaccaacacttagtggagatggaagataccctcaacaagctccaagaggcagaaattaaagtaaaggagctagaagtgctgcaggccaagtgtaacgaacaaacaaaggttattgataattttaccagccagctgaaagccactgaagaaaaactactcgatcttgatgctctccgcaaggccagctccgagggcaaatcagaaatgaaaaaacttcggcagcagctggaggccgcagaaaaacagataaagcacctggaaatcgaaaagaatgcggagagcagtaaggccagctcaatcacccgcgagcttcaaggaagagagttgaagttgacaaatctgcaagagaacctgagcgaggtgtcccaggtgaaggagacactagaaaaagaactccagatcctgaaggagaaattcgccgaggcaagtgaggaggcagtttcggtgcagaggtccatgcaggaaaccgtaaacaagctccaccagaaagaagaacagttcaacatgttgtcctccgacctggagaagctgcgtgagaatctcgccgatatggaagcaaagttcagagaaaaggacgagagggaggagcaactaattaaggccaaagagaaactcgaaaatgatatcgcagagattatgaagatgagtggcgataattctagccagctgacaaagatgaacgatgagctgcgcctgaaagagagagacgtcgaggaattgcagcttaaactgactaaggcaaatgagaacgcaagcttcttacagaaaagcatcgaggacatgaccgtaaaagctgaacagagtcaacaggaggctgccaagaaacatgaggaagaaaaaaaagaactggagaggaaactctccgacctagagaagaaaatggaaacatcccataaccagtgtcaggagctcaaagcacgctacgaaagagctacttctgaaacaaagactaagcacgaggaaatcttacaaaatttgcaaaaaacactcctggatacagaggataagctgaaaggtgcacgagaagagaattcaggattgctgcaagaattagaggagctccgcaaacaggctgacaaggctaaggccgcccagactgccgaagatgccatgcagatcatggagcagatgaccaaagaaaagacggagactttagccagtcttgaagacacaaagcagaccaacgccaaactgcagaatgagctagacaccctcaaggaaaataatttgaagaatgtagaagagttgaataagagtaaagagcttttaactgtggagaaccagaaaatggaagagttcagaaaggagatcgagactctcaaacaggccgccgctcaaaaatctcagcagctcagtgccctgcaggaagaaaatgtgaagctcgccgaagaactggggcgctcccgggacgaagtgaccagccaccagaaactcgaggaagaacgcagtgtgctgaacaatcagcttctcgaaatgaagaagcgagagtctaagtttatcaaggacgcagacgaggagaaggcctctttacagaaatccattagcatcacatccgccttgcttaccgagaaggacgcagagctggaaaagctgcggaacgaggttaccgtgcttcgtggagagaatgcttctgccaagagcctacactcagtcgtgcagactttggaaagtgataaggttaaactggaattaaaggtcaagaacctggaattgcagttaaaagaaaacaagagacagctgtcctcgagctctggtaacaccgatactcaggcagacgaggatgaacgggcgcaggaatcccagattgatttcttgaactctgtaattgtcgacttgcaacgcaagaatcaggaccttaaaatgaaagtagaaatgatgtccgaagcagctctaaatggaaacggtgatgacctcaacaactacgattctgatgaccaggagaaacaatctaagaaaaagccaaggttgttttgtgacatttgtgactgtttcgaccttcacgataccgaggattgtcccacgcaggctcagatgagcgaggaccccccccattcaacccaccatggttcccgtggcgaagagcggccctactgcgaaatctgcgaaatgttcggccactgggccactaactgcaacgacgatgagaccttctag

SEQ ID NO: 14257 - DNA, 975 bp, synthetic construct
  source 1..975: mol_type = other DNA; note = Synthetic coding sequence
atggcatctagcaacaccgtgctgatgcgacttgtcgctagtgcctattccattgcccagaaggccgggatgatcgtgcggagggtgatcgcagaaggggatttgggcatcgtggagaagacatgtgctaccgatctgcagacaaaagcggatcgattggcacagatgtccatctgcagttctctggcaagaaaattccccaagctcactatcattggcgaggaagacctgccctcggaagaggtggatcaggagcttatcgaagattcccagtgggaggaaattctgaagcagccttgccctagtcagtactctgctatcaaggaggaagacctagttgtttgggtagaccccttggacggtaccaaagagtacactgaaggactgctcgataacgtaactgtcctcatcggaattgcttacgagggcaaggccatcgctggggttattaaccaaccctattataactatgaagccgggccggatgccgtgctcggtcgcacaatttggggtgtgctcggccttggagctttcggctttcagctcaaggaagtcccagccggcaaacacattatcacaacaaccaggagtcactccaacaaattagtgacggattgtgtagcggccatgaaccccgatgccgtgcttcgggtgggaggggctggcaacaagatcattcagctgattgaaggaaaagctagcgcttatgtattcgccagccccggatgcaagaaatgggatacatgcgccccggaagtgatcctccacgcggtggggggtaagttaacagatatccacggcaatgtgctgcagtatcacaagggcgtctcccaccgcacatggcccaaacccgacttctttagggcccaattcttcctggagtcgcactcttgtttttccaactttaagaatgtttcaacccctattaagaacatctacgacgttatcatttacgcatatgagacggatttgtag

SEQ ID NO: 14258 - DNA, 270 bp, synthetic construct
  source 1..270: mol_type = other DNA; note = Synthetic coding sequence
atgggcacgaaacgggaagcaattctgaaggtgttagaaaatctgacgccggaggagctcaagaagttcaaaatgaaactgggcacagtccctttacgcgagggcttcgagagaattccacggggagctctagggcaactcgatatcgttgaccttactgacaagctggtagccagctattacgaagactacgccgcagaacttgtggtagcagtgctaagagatatgagaatgctggaagaagcagcccgccttcagagggccgcatag

SEQ ID NO: 14259 - DNA, 867 bp, synthetic construct
  source 1..867: mol_type = other DNA; note = Synthetic coding sequence
atgactgtagggaagtcatcaaaaatgctgcagcacatcgactatcgaatgcgctgcatactgcaagacggccgcatttttataggtaccttcaaggcctttgacaaacacatgaacctaattctgtgcgattgtgatgagtttaggaaaataaaacctaaaaactcaaaacaggcggaacgagaagagaagagagtgcttggcctggtcttgctacggggcgagaatttagtctccatgacggttgaaggtccaccccctaaggacaccggtattgcccgcgttcctctcgctggcgcggccggtggcccaggtattggccgggcggccgggcgcgggataccagcgggtgtcccaatgccacaggctcctgctgggctggcgggcccagtgagaggcgttggaggaccgagccagcaggttatgaccccacagggtcggggcacagtggccgccgctgccgcggccgccacagcaagtattgccggcgcccctacccaatacccccctggtcggggaggccctcctcctccaatgggtaggggtgccccacccccaggaatgatgggccctccccccgggatgcgtccccccatggggccaccgatgggaatcccccctggaaggggaacccctatggggatgccacctccagggatgcgcccacctcctccaggctgcgaggcattcttcgacccatggccacagtcgatggaggttgccccccagaggcggggcctggatagttctgggccgcgatatcaccgcccagtctgttttctatgctgttgttcttggagtctcatgggactgagtgggttcctgaccgggccacccccccctggcatgcggccaccgagaccctag

SEQ ID NO: 14260 - DNA, 3300 bp, synthetic construct
  source 1..3300: mol_type = other DNA; note = Synthetic coding sequence
atgcacataaaatccatcatcctagaaggtttcaagtcttatgctcagcgcaccgaagtgaatggattcgaccctctgttcaacgcaatcaccggcctcaatgggtcgggcaagagtaacatcctggattctatttgtttcctgctggggattagtaatctgtctcaggtcagggcttcgaacctccaggacttagtttacaagaacggtcaggctggcatcactaaggccagcgtgtcaatcaccttcgacaactcagataaaaagcagtccccacttggctttgaagtccatgatgagattaccgtcaccagacaggtggttattggcggacgcaacaaataccttattaacggagtgaacgccaataacacgagggtccaggatctcttctgctctgtcggcttgaatgtaaacaacccccacttcctcataatgcagggtaggatcaccaaggttcttaatatgaaaccaccagagattctctccatgatcgaagaggctgctggcacacgtatgtatgagtacaagaaaatcgctgcgcaaaaaacaatagagaagaaagaggccaagctgaaggagatcaaaactattctggaggaggagattacacctaccatccagaaattgaaagaggagaggtctagctacttggaataccaaaaggtgatgagagaaatcgagcatttgtcgagactctacattgcctatcaattcctactagctgaggacacgaaggttcgaagtgctgaagagctgaaggaaatgcaggataaggtcattaagcttcaggaggagctgtctgagaatgacaaaaaaatcaaagccctgaatcacgaaatcgaggaattggaaaagcgaaaggacaaggaaacaggcggcatccttcggtccttggaagatgccttggcagaagcccagagggtaaacacaaaaagccagtccgcttttgacctcaaaaaaaagaaccttgcatgtgaagaatcaaaacggaaagagctcgaaaaaaatatggtagaggacagcaaaacactcgccgctaaggagaaagaggttaaaaaaatcaccgacggtctgcacgcactgcaggaggctagtaacaaagacgccgaagcgttagccgcagcgcagcaacactttaacgccgtgagtgccggtctgtccagcaacgaggatggagctgaggccacactagccggacagatgatggcctgtaaaaatgatatctctaaggcccagactgaagccaagcaagcacagatgaagctgaagcatgcacagcaggaactgaaaaacaagcaagctgaagttaaaaaaatggactctggatacagaaaggaccaggaggccttggaggccgtgaaacgcctgaaggagaagctggaggccgaaatgaaaaagttgaattatgaggaaaataaagaagaaagcttgttagaaaagcgtcgccagctgagccgcgatattgggcggctgaaagaaacttacgaggcgcttctcgctcgcttcccgaaccttagatttgcttacaaagacccagagaaaaattggaatagaaattgtgtcaaaggcctggtggcttctcttattagtgtgaaagatacctcggcgaccaccgccttggaactggtcgctggcgaacgtctgtacaatgtggttgtggatacagaagtcacagggaagaagctgctcgaaagaggtgagctgaaacgccgttacaccatcattccacttaataaaatttccgcccgctgtatagctccggaaactctaagggttgcgcagaacctggtgggacccgacaacgtccacgtcgcgctgtctctcgtagaatataaacctgaattacagaaagccatggaattcgtattcggaacaacgttcgtgtgcgacaatatggacaacgccaagaaggtagcgtttgataagcgcatcatgacaagaaccgtcaccttgggcggggacgtatttgacccgcacggtacattaagcgggggtgcccgctcccaggccgcgtccattctgacaaaattccaggagctcaaagacgtacaggacgagttgaggatcaaggaaaatgaattacgcgccctggaagaggagcttgccgggctgaagaacactgctgagaaataccggcagctaaagcagcagtgggagatgaaaaccgaggaggcagacctcctccaaaccaaactgcagcagtccagttatcacaagcaacaggaagaactggatgcactcaaaaagaccatagaagagagcgaggagaccctaaaaaacacaaaagagattcagagaaaggccgaggagaagtacgaggtgctggaaaataaaatgaaaaacgccgaggcagaaagggagcgggaattgaaggatgcccagaagaaattagactgtgccaaaaccaaggcagacgccagctcaaagaagatgaaagagaagcagcaggaggtcgaggctataacccttgagctggaggagctgaagcgcgaacatacctcctataaacaacagctggaggcagttaacgaggctatcaagtcctatgaaagccagattgaggtgatggccgctgaagtggctaaaaataaggagtccgtaaataaggcccaggaagaagtgactaaacaaaaggaggttattacagctcaagataccgtaattaaagccaaatatgccgaggtggcaaagcataaggagcagaataatgacagccagttgaagattaaggagctagaccacaacattagcaagcataagcgcgaggccgaggatggcgccgccaaggtgagcaagatgctaaaggattacgattggattaacgctgagcgccatctgttcggccagccaaatagcgcctatgattttaagaccaataatcccaaggaagctggacagaggctgcagaaattgcaagagatgaaggaaaaactgggacgcaatgttaatatgcgcgccatgaacgtgctgacagaggccgaagagcgttacaacgatctcatgaaaaagaagcggatcgttgaaaatgataagagcaagattctgacaaccatcgaggatttagatcagaaaaagaaccaggctctgaacatcgcgtggcagaaagtgaataaggattttggcagcattttttcaacactgctccccggggctaatgccatgctggctccgcctgaggggcagacagtgcttgatggcctggaattcaaagtggccttgggaaacacgtggaaggagaatcttacagagctaagcgggggacagcgccagaagcagcagaaccatacgacgggctag

SEQ ID NO: 14261 - DNA, 381 bp, synthetic construct
  source 1..381: mol_type = other DNA; note = Synthetic coding sequence
atgttccagaaggatgaatactgcattctgatcctcggccttgacaacgccggcaagacaactttcctggagcagagcaaaacaagattcaataagaattataagggaatgtcactgtctaaaattacaaccactgtgggtttgaacatcggtaccgtcgacgtcggaaaggccaggctgatgttctgggaccttggcggccaggaggagctgcagtcgctgtgggacaaggacaaaactaagtgtggggacctcggcaccctccatagcagcaaggtgtctgcctccttccggctgcgggacttggccgctgatcaccacagaacccaaaagtggcagaggcctgacgtgggtactgctggatggctaccgctgccctag

SEQ ID NO: 14262 - DNA, 1119 bp, synthetic construct
  source 1..1119: mol_type = other DNA; note = Synthetic coding sequence
atgacctttcaattcaatttcactattgaggaccacctggagaacgagctgaccccaattcgagacggtgcacttactctcgatagttcaaaggagctttcagtcagtgagtcccaaaaaggggaggagcgggatcgtaaatgttccgcggagcagttcgatctgccacaggatcacctatgggagcacaaatccatggagaatgctgctccaagccaggacaccgattcaccactctccgccgcttcttcgagtcgtaatctcgagcctcatggaaagcaaccaagcctcagagcggccaaagagcatgcaatgcctaaggacctcaagaaaatgctggaaaacaaggtcatagaaacccttccgggatttcagcacgtgaagttgtccgttgtcaaaacgattcttctgaaggaaaattttccaggagaaaacatagtgtcaaagagcttttcctctcacagtgatctgatcactggtgtgtatgagggtggacttaagatctgggaatgcacatttgacctgctggcctacttcacaaaggctaaagttaagtttgctggaaagaaagtcctggatttaggctgcggaagcggcctgctgggtattaccgcgttcaagggtggcagtaaagaaattcactttcaggactacaactctatggtcatcgatgaagtcacactacctaacgtcgttgcgaactctacactggaagatgaggaaaatgacgtgaacgaacctgatgtcaagagatgccgcaaaccgaaagttacacagctctataagtgccgattctttagcggcgagtggtcagagttctgcaagctagttctgagcagcgaaaagctgttcgttaaatatgatctgatccttacctctgagacaatctataatcccgattattacagtaacctgcatcaaacgtttctccgacttctgtccaaaaacgggcgtgtgctgctggcctccaaagcccactacttcggggtgggcggaggtgtccatctttttcagaaattcgttgaggagagagacgtctttaaaactaggatacttaaaatcatcgacgagggcttgaaaagatttatcatcgagatcacgttcaagtttccaggatag

SEQ ID NO: 14263 - DNA, 1635 bp, synthetic construct
  source 1..1635: mol_type = other DNA; note = Synthetic coding sequence
atgaagtgtcactacgaggcccttggtgtgcgacgcgatgcatctgaagaggaactcaagaaagcatataggaagctcgccttaaaatggcaccccgataagaacttggacaacgctgcggaggccgccgaacagtttaagctaattcaggcggcatatgacgtcctcagcgatcctcaggaaagggcctggtacgacaaccacagggaagctttattgaaaggcggtttcgatggagagtaccaggacgactcactcgatctgctccggtacttcaccgtgacatgctacagcgggtatggcgacgacgaaaagggcttttacactgtgtatcggaatgtgttcgaaatgatcgcgaaggaggagctcgaaagtgtgctggaggaagaggtggatgactttcccacattcggggacagccagtctgactatgacacagttgtccaccctttctatgcttattggcaatctttttgtacccagaagaatttcgcatggaaagaggaatatgatacaaggcaggcctccaatagatgggagaagcgcgctatggagaaggaaaacaagaaaatcagggataaggcgagaaaagagaaaaatgagcttgtgaggcagcttgttgccttcattcggaaacgcgacaagagggttcaggctcacaggaaattggtggaagagcagaacgctgagaaggctcgcaaggccgaagagatgagacgacagcagaagctcaaacaggcgaagctggtggaacaatacagggagcagtcgtggatgaccatggccaacttagagaaggagctgcaagagatggaggctcggtacgagaaggagttcggggacgggagcgatgagaatgaaatggaagagcacgagctgaaggatgaagaggatggcaaggattcagacgaggcggaagacgcagagttatatgatgacctttattgtcccgcgtgtgacaagagtttcaagactgagaaagcgatgaagaaccacgagaaaagtaaaaaacatagggaaatggtcgctctactgaagcagcaactagaagaagaagaggagaacttctctaggccacaaattgatgagaaccccctggatgacaattctgaagaggaaatggaggatgctccgaagcagaaggttaagtacctcactttccgtttcatttttgcactgcgactgagcaaaaaacagaaaaagaagaagcaaaagcctgcccaaaactatgatgataattttaatgtgaacggtcctggagaaggcgttaaggtggatcccgaggataccaatctgaaccaggacagcgccaaggagttggaagatagcccgcaggagaacgtgagtgtgactgaaattatcaagccctgtgatgaccctaagtctgaggctaagtccgtgcctaaaccaaaaggaaaaaaaactaaagacatgaaaaagccagtgcgcgtgcctgcagagcctcagaccatgtcggtgctgattagctgcaccacttgtcatagtgagttcccaagcaggaataaacttttcgaccacctaaaagccacaggccacgctagggcgccatccagctcctcgttaaacagtgccacttctagtcaaagcaagaaggagaagcgcaagaatcgctag

SEQ ID NO: 14264 - DNA, 945 bp, synthetic construct
  source 1..945: mol_type = other DNA; note = Synthetic coding sequence
atgcctggcttcacctgctgcgtgcctggatgttacaataactcacacagagataaagccctgcacttctacacattcccaaaggatgctgagttgcgccgcctgtggttgaaaaatgtttcccgtgctggagtcagtggatgttttagcacattccaacccactaccggtcaccgcctctgttccgttcatttccagggtgggcgcaagacctacactgtgcgtgtgcccaccattttcccattgcggggcgtgaacgaaagaaaggtcgcgagaaggcccgccggagcagcagcggcgaggcgacgacagcagcaacagcaacagcagcagcaacaacagcagcaacaacagcagcagcaacagcagcagcagcaacagcagcagcagcaacaatcaagcccctctgcctcaaccgcacaaaccgctcagttacagcctaatctcgtgtcagcatccgccgcagttctactgactcttcaggctactgtggatagctcccaggcgccagggagcgttcagccagcccccattaccccgactggtgaagacgtgaagcctatcgatttgacggttcaggtggagttcgctgcagctgaaggtgccgccgccgccgccgccgcttcagaactgcaggccgcaacagctggtctggaggctgcagagtgcccaatggggccacagctcgtggtggtgggggaggaaggcttccccgacactggcagcgatcatagttactccctgagcagcgggactacagaagaagaactgctgagaaagctcaatgaacagcgcgacatcctagcacttatggaagtgaagatgaaggagatgaaaggcagcattaggcacctcaggctgacagaagctaagcttagagaggagttgagggagaaagacaggctgctggctatggcagtgatcaggaagaaacatgggatgtag

SEQ ID NO: 14265 - DNA, 645 bp, synthetic construct
  source 1..645: mol_type = other DNA; note = Synthetic coding sequence
atggccggggagaatttcgctacacctttccacggacacgtgggccgtggggcctttagcgatgtgtacgagcctgctgaggataccttcctgctcctgaatgccctggaagctgctgccgccgagttggcaggtgtggagatttgcctcgaggtagggagcggctctggcgtggtatctgccttcctggcaagcatgattgggccccaggccctctatatgtgtacagatatcaacccggaagctgccgcttgcacgctcgagaccgcacggtgcaacaaagtccacatccagcctgtcataaccgatctcgtgaagggattactgcccaggctcactgaaaaggtggatttgctcgtgtttaacccgccctatgtcgtgaccccaccacaagaggtgggtagtcacggtattgaggctgcatgggcgggtgggaaaaatggacgagaggtcatggatcggtttttccccctcgttccggacctgctgagcccgaaaggattgttctatttggttacaattaaggagaacaaccccgaagagattttgaagatcatgaagactaaaggacttcagggcacgacagccctgtcgaggcaggccggtcaggagaccctgagcgtgctgaaatttactaaaagctag

SEQ ID NO: 14266 - DNA, 1536 bp, synthetic construct
  source 1..1536: mol_type = other DNA; note = Synthetic coding sequence
atgtctgggggcttcgaattacagccaagagatggcggccctcgcgtggccctggcacccggtgaaaccgtgatcgggaggggacccctgctgggcatcactgacaaaagagtatctcgacgacatgccatcctggaagtcgcgggaggccagttgaggataaagcccattcatactaacccttgcttttaccagtcctcagaaaaaagccaattactccccctgaagcccaatctgtggtgctatttgaacccaggggattccttcagccttttagttgacaaatatattttccgtatactcagcatccccagtgaggtagagatgcagtgtacacttagaaatagtcaggtgcttgatgaggataacatactgaatgagacaccaaagagtcctgttatcaacctgccacatgaaacaaccggcgcgtcccagctggagggtagcaccgagatcgcaaaaactcagatgactccaactaattcagtgagcttcctgggcgagaatcgcgattgtaacaagcaacagcctattctggctgaacggaaaagaattctcccaacgtggatgctggctgagcatctgtctgatcagaacctaagtgtccctgccataagcggaggaaatgtcatccagggcagcggcaaggaggaaatttgcaaagacaaatcgcagctgaatactacccagcagggtaggaggcagttaattagctctggcagctccgagaatacgagtgccgagcaggataccggcgaagaatgtaagaataccgatcaggaagaaagcaccatctcttcaaaggagatgccccaaagcttttctgccatcaccttgagcaacactgagatgaataacataaagactaacgcacagaggaacaaactcccaattgaggaacttggtaaggtgagcaagcataaaatcgccactaagcgcacaccacacaaggaagatgaggccatgtcgtgtagcgagaattgtagttcagcacagggagacagtctccaggatgaaagtcagggctcgcacagtgagtcctctagcaatcccagcaatcccgaaaccctgcatgcaaaagcgacagactctgtcctacaaggtagcgaggggaataaggttaaacgcacgtcctgtatgtacggagctaattgctacaggaagaatcccgtgcatttccaacactttagccatccgggggattctgactacgggggcgtgcaaatagtgggccaggacgagaccgatgatcgaccagaatgtccatatggcccgtcctgctatagaaagaacccgcaacacaaaatagaatatagacacaacacactacccgtccggaacgttttggatgaagataatgataatgttgggcagccgaacgaatatgacctcaacgattccttcttggatgacgaagaagaagattacgagccaaccgacgaggactctgactgggaacctggcaaggaagatgaggaaaaagaagatgttgaggagttattaaaggaagcaaaacgattcatgaagcgaaagtag

SEQ ID NO: 14267 - DNA, 984 bp, synthetic construct
  source 1..984: mol_type = other DNA; note = Synthetic coding sequence
atggcagccgcagccgccgctgccgcagccacaaatggcacagggggatctagcggcatggaagtagacgcagcagttgtcccctcggttatggcctgtggtgtgaccggctccgtgagcgtggcattgcatccactggtaatcctgaacatcagcgaccactggatccggatgaggagccaggaaggaaggccagtccaggtgataggggcgctcatcggcaaacaagagggtcgtaatatcgaggtgatgaactctttcgagctgctctctcacacggtggaagaaaaaatcatcatcgacaaagagtactattacactaaggaagagcaattcaagcaggtcttcaaggagctagaattccttggatggtatacaaccgggggaccacctgacccgtctgatatccacgtgcataagcaggtgtgtgagatcatcgagtctcctctctttcttaaactgaaccctatgacgaaacacactgatttaccagtctctgtgtttgaatccgttatcgatattatcaatggtgaagccacaatgctctttgcagagcttacatatacgctggctactgaagaggctgagcgaattggggtggatcatgtcgcgagaatgacagcaaccggctctggtgaaaactccactgttgcagaacatttaatcgcacagcacagtgcaataaagatgcttcactcccgggtgaagctgattctggagtatgtaaaggcaagtgaggcaggggaggtgccttttaaccacgagatattacgcgaagcgtatgccctgtgccattgtttacctgtcttgtccacagacaaattcaagacagacttctacgatcagtgtaacgacgtcggcttgatggcttacttgggaaccatcactaaaacatgtaacactatgaaccagttcgtgaataaatttaacgtgctatacgaccgccaagggattgggcgcaggatgcgagggctgttcttctag

SEQ ID NO: 14268 - DNA, 2574 bp, synthetic construct
  source 1..2574: mol_type = other DNA; note = Synthetic coding sequence
atgaattatcaacagcagctcgcgaactcagccgctatccgggccgaaatacagaggtttgaaagcgtgcaccccaatatctatagcatctatgagcttctggaaagagtggaggagccggttcttcagaaccagataagagagcacgtgatcgccatcgaggacgccttcgttaactcccaggagtggactctgagccggtctgtccccgagttaaaagtgggtattgtcgggaatctcgccagtggcaagagtgctctggtgcaccgttatctaacggggacatatgtgcaggaagaatctccggagggcggcaggttcaaaaaagaaattgtagtcgacggacagtcttatctgttactgatacgggatgagggaggaccccctgaggctcagttcgcgatgtgggtagatgccgtgatctttgtcttcagcctggaggatgaaataagcttccagaccgtctaccactactattctagaatggccaactaccgcaacaccagcgaaattcccctagtgttagtgggcacgcaggacgcaatatcctcagctaaccccagagtgatagacgatgccagagcgcggaagctctctaatgatttgaaacgatgcacatactacgagacttgtgccacctatggcctgaatgtcgagagggtattccaggacgtagctcagaaaatcgtagccacccggaaaaaacagcaattgagtataggaccctgtaagagcctccccaactctccgtcccactcgtctgtttgttcggcccaggtctccgctgtgcatatttctcaaacctcaaacggcggcggtagcctttcagattacagctctagtgtgcccagtaccccatcgaccagccagaaggaactcagaattgatgtgccaccaaccgcaaacacgccgacccctgttcggaagcagtccaagaggaggtctaacttgtttactagtcggaaaggcagtgacccagataaggagaagaagggactagaatcccgcgccgattcaataggctcagggcgggccatcccaatcaaacagggtatgctgctgaaaaggagtggaaaatccctcaacaaggaatggaaaaaaaaatacgttacgctgtgcgacaatggggttctcacctaccacccttccctacatgattacatgcagaatgttcacggcaaagagatcgacctgctgaggaccacagtgaaagtcccagggaagcgaccgcctcgcgccactagcgcctgcgcaccaatctcaagccctaaaactaatggcctgagcaaagacatgtctagtctgcatatatcaccgaatagcggaaacgttaccagcgcctctggaagccagatggcatctggaatctcattggtctcatttaacagcaggcctgacgggatgcatcagcgcagttattccgtcagctctgcagaccagtggtccgaggccaccgtaattgccaactccgccatctctagtgacactggattaggcgattccgtttgcagctcaccgtcaatttcaagcacaacttccccaaagctagatccccctccatccccgcacgctaaccgaaagaagcaccgccggaaaaaaagcaccagtaactttaaagctgacggactgagcggtactgccgaggaacaagaggagaactttgagttcatcattgtcagcctgaccggccagacatggcatttcgaagccactacatatgaagaacgcgatgcatgggttcaagccatagaaagccagatcctggcatccctccagagctgtgaatcttctaaaaataaatccaggctcacatcgcaatctgaggcaatggccttgcaatcgattagaaatatgcgaggcaatagtcattgcgtggattgcgaaacgcaaaaccccaattgggcctcactgaacctgggcgcgctgatgtgcatcgagtgtagtggcatccatcgcaacctgggaactcacttatcacgggttaggagtttggatcttgacgactggcccgtggaactgatcaaagtgatgtctagcatcggtaacgagttggctaacagcgtgtgggaggagtcatcgcaggggcgcactaagccgagcgtagatagtacacgcgaagagaaagagagatggatcagggcaaaatacgaacagaagctttttctggccccccttccctgcaccgagttgagcctgggacaacaccttttgcgggccaccgccgacgaggacctgcgaactgctattctgctcctggcccacgggagccgcgacgaagtgaatgaaacttgtggcgaaggagacggtaggacagctctgcacctggcctgccgcaaagggaatgtggttctggcccagttgctcatatggtacggtgtggacgtgacggccagggacgcgcatggcaacaccgccctcgcatacgctcggcaggcctctagccaagagtgcatcgacgtcctgctgcagtacggctgtcctgacgaaagatttgtgctgatggcaactcccaatctgtcacgcagaaacaacaatcgcaacaactcctcaggcagagttccaacaatcatttag

SEQ ID NO: 14269 - DNA, 1653 bp, synthetic construct
  source 1..1653: mol_type = other DNA; note = Synthetic coding sequence
atgtcgcaaacttccttgaaacagaagaaaaatgagcccggtatgcgatcaagcaaagagtcattggaggcggaaaagagaaaagagagcgataaaaccggggtacggttgagtaaccaaggaagccaggagtcatcactgcggaaaacagactctaggggctacctggtgcgcagtcagtggtcacgcatatcacgatctcccagcaccaaggccccctccatcgacgaaccaagatcccgtaacacttcggccaagctgccctcatcaagcacgtcttcacggaccccttcaacgagtccatctcttcatgattcaagtcctccgccgctgtctgggcagccttccctgcagcctccagcgagtccccagcttccgagaagtctcgatagccgccccccaacgccccccgaaccagaccctggttctaggcggagcacaaaaatgcaggagaaccctgaggcatgggcccagggcatcgtcagagaaatacgacagactcgtgatagccaacccctggagtatagccggacctctccaaccgaatggaaaagctcaagccaacggaggggaatataccctgcctctacacagcttgaccggaacagcctgagtgagcagcagcaacagcagagagaagatgaagatgactatgaggcggcttactgggctagcatgcggtccttctacgagaaaaacccctcttgtagtcgtccatggcctcctaagccaaagaacgccatcaccatagcactgagttcctgcgcattgtttaacatggtggacggaagaaaaatctatgagcaagaaggcctggagaagtatatggagtaccaactcaccaacgaaaacgtgatcctgactcccggcccggcattcagattcgtgaaggcgttacagtatgtgaacgcaagattgcgcgacctgtatccagacgagcaggatctcttcgatattgtactgatgacaaacaatcatgctcaggtcggtgtcaggcttataaacagcgtcaatcattacggattactcatagatagattttgcctcacgggcggcaaggatccaattggctatcttaaagcatacttgacaaacctgtacattgccgctgacagcgagaaggtccaggaagcaattcaggagggcatcgcaagcgctactatgtttgatggcgccaaggatatggcctattgtgacacacagcttcgcgtggctttcgacggcgacgctgtgttgttcagcgacgagtcagagcacttcaccaaagagcacggactggataaattctttcaatacgacaccctctgtgagagcaaaccactggcccaggggcccctgaaaggcttcctggaggacttgggcagactgcaaaagaaattctacgccaaaaacgaaagactgttatgcccaattaggacctatctggtgaccgcaagatccgccgcatcaagtggcgcgcgggtattaaagaccctgagacgttggggtctcgagattgatgaagcccttttcctggcaggtgccccaaaaagtcctattctggtgaagatcagaccacatatctttttcgatgatcacatgtttcatattgaaggcgcccaaagactgggttctattgctgcctacggatttaacaaaaaatttagctcttag

SEQ ID NO: 14270 - DNA, 888 bp, synthetic construct
  source 1..888: mol_type = other DNA; note = Synthetic coding sequence
atgcctgttcacaccctttcgcccggggcccccagtgctcccgcgttgccctgtcgcttaagaaccagggtgccaggttatctgcttagaggccctgctgacgggggggccagaaaaccttcggccgtcgagcgcctcgaagctgataaagcaaaatacgtcaagtccctccacgtcgctaatactagacaggagcctgtccagcccctgctgtctaaacagcccctgttctccccagaaacccgccgcactgtgctgactcccagccgaagggctttgccaggaccctgccggaggccacagctagatttagatattctgtcgagcttaattgacctgtgcgacagccccgttagtccagcagaggcaagccggaccccgggccgcgctgagggagccgggagaccccctcctgccacgccgcctcgcccccccccgtccaccagcgccgtgagacgcgtagatgttaggccccttccggcatccccggcccgtccgtgcccatcccccgggcccgcggcggcatcttctccggccagacctccagggcttcagcggtctaaaagtgatctcagtgagcgcttttcacgggccgccgccgatctcgagagattctttaacttttgcggcctcgatccagaggaggctcgcggtttgggagtagcacacctggctagagccagctcagacatagttagtctggccgggcccagtgccggccccggttctagtgagggtggatgtagtaggcgaagctcagtaactgttgaagaaagggcacgggagcgcgtcccatacggcgttagtgtcgtggagcgaaatgcacgtgtgattaaatggctgtacggactccggcaggcaagggaaagtcccgccgccgagggttag

SEQ ID NO: 14271 - DNA, 549 bp, synthetic construct
  source 1..549: mol_type = other DNA; note = Synthetic coding sequence
atgtctggtcgatccgtgccccacgcgcacccggctaccgcagaatatgaattcgcgaaccctagtaggctgggagagcagcgcttcggagagggcctgctgccagaagaaatcctgacgcccacgttgtaccacggatactatgtccgccctcgggcagcccctgctggagagggatctagagccggcgcttcagagttgcgcctctccgaggggaaattccaagcctttttagatgtcagtcactttacccccgacgaggtgaccgttcgcaccgtcgacaacctactggaggtgtccgcaagacatccccagagactagaccgacacggcttcgtgtctagagaattctgtagaacatacgtcctgcctgcggacgtagatccatggagagtgagggctgcattgagccacgacggtatcctcaacctcgaggcgccgcgcgggggcagacacctcgacacggaagtgaacgaggtatatatctctctgctgcccgctccgcctgacccggaggaggaggaagaagctgccatcgtggagccttag

SEQ ID NO: 14272 - DNA, 636 bp, synthetic construct
  source 1..636: mol_type = other DNA; note = Synthetic coding sequence
atgtcaaccgccgccgtcccggaattaaagcagatctcacgggtggaagcgatgcgactcggccctggctggtctcatagttgccacgccatgctgtatgccgcaaatccaggacagctgtttggaaggatccccatgcgttttagtgttctcatgcaaatgagattcgacggcctgttgggattcccaggcggcttcgtggatcggaggttttggtcccttgaggacggccttaaccgggtactcgggcttggtctgggatgcctgcggctgaccgaagctgattatctgtcgtcacacctgacggagggaccccatcgtgtcgtcgctcacctttacgccagacaactcacgctggaacagctccatgctgttgagatttccgcagtgcacagtagagatcacggccttgaggtcctggggctggttcgtgtgccactgtacacacagaaggatagagttggcggatttcctaattttctaagcaacgccttcgtttctacagccaagtgccagctgctgtttgcgctgaaggttcttaacatgatgcccgaagagaagctcgtagaggcgctggccgcagccacggaaaagcagaaaaaggccctcgagaagttgcttccggcaagcagctag

SEQ ID NO: 14273 - DNA, 2622 bp, synthetic construct
  source 1..2622: mol_type = other DNA; note = Synthetic coding sequence
atgcaccccccaccacccgcagccgcaatggacttcagccagaacagcctatttggctatatggaagaccttcaggagcttaccatcattgagcgacctgtacggcgcagtttgaaaacacctgaagagatcgaaaggttgaccgtcgacgaggatctttctgacatcgagcgggccgtatatctcctcagtgcaggccaagacgtccaggggaccagcgtcatcgctaacttaccctttctgatgcggcagaacccaaccgagacgttgaggagagtacttccaaaagtgagggaagcgctccacgtggctggtgtggaaatgcagctgaccgccgctatgagcttcttgaccattctgcaggacgagtcagtgagcatccacgcctatacccacagctttctgcaggtaattctccttcatttggagcacagagacactggagtttcaaatgcctggctggagacattgctgtccgtgatcgaagtcctccctaaggagacattgcgccatgagatcctcaatcctctggtgtcaaaggcgcaactctcccagactgttcagagtagactggtctcctgcaagattcttggtaagctcactaataagtttgacgcccacacaatcaaaagggagatactccctcttgtcaagagcctctgccaagacgtcgagtatgaggtgaggtcatgcatgtgtcgtcagctggagaatattgctcagggaattggtacagagctgaccaaaagtgtggtactaccagaactgattgagctctctagagacgaggggagctcagtgcgactggcagcttttgaaacactggtaaatcttctggatatttttgacacagatgacagaagccagactatccttccactggtgaaaagcttttgtgaaaagtcctttaaagctgatgagtctatattgattagtctgtcattccaccttggcaagctgtgccatggtctttatgggatttttacacccgatcaacacctgcggttcctggagttttacaagaagctctgtaccctagggctgcagcaagagaatggacataacgagaatcagatccctccgcagatcttagagcaggagaagaaatatatctccgttcggaaaaactgcgcctacaattttcccgccatgatagtattcgtagatccaaagaacttccacatggaactttattccacattcttttgtctgtgtcacgacccagaggtaccggttcgctacacaatagccatctgcttctacgaggtctccaagctgctcaacagcggagtctatctaattcataaggagctgattactctcctgcaggacgagagcctggaagtgctagacgcccttattgaccatcttcccgaaatccttgagctcatgtccaccggcggcgaatcttcagtgcaggaaaacaaactcagcagcttgccagacctgatccccgcgcttacggccgctgagcagagggcagctgcaagcctcaagtggcgaacccacgagaagctgctgcaaaagtacgcatgcctccctcatgttattagctccgatcagatttactatcggttcctgcaaaggatgttcactattatgatgactaataatgtgctccctgttcagaaggcggccagccggacgctgtgtatcttcctccgctataataggaagcaggaacagcggcatgaagtgattcagaaactgatcgagcagttgggtcaagggaaaagttattggaatcgacttaggtttctggacacatgcgagttcattatcgagatctttagtaagtcattcttttgtaagtatttcttcttgcccgccatagaactgacacacgacccagttgctaacgtacgaatgaagctctgctatctactgcccaaagtgaagagcactctcaagattcccgccgataagcacctcttgcagcagctggagatgtgcgtgcgaaagctgctgtgccaggaaaaagacaaagatgtgttagcgatcgtgaaaagaaccgtactggaattagatcggatggaaatgtctatggatgcattccagaaaaagttttatgaaaaggatctgctagaccaggaaaaagagagggaagaattactgctgttggaaatggaacagctggagaaggagaaacagcagaatgacggcagacccatgtcagacaaaatgttcgaaaagaagaggagagacaccaaaacccctacgcagtccctgcccaaaaacattccaatctcggtccctggaccatcttctgtgactccatccacatcaaaggaaataaaaaaatccaagctgattcgttctcagagttttaacaaccaggcgtttcacgcaaagtacggaaacttagaaaagtgcgcttctaaatcatctaccaccgggtataccacgtccgtttccggcttaggcaagacctccgtgctctcccttgcagatgactcctttcgaactaggaatgcctccagcgtgccatccagttttagccccaatacgcctctgccttcaacaagtcggggaacagggaattctgttgaccctaagtcatccggttccaaggacacccaaccacggaaggcaacgcttaagtcccggaagtctaatccttag

SEQ ID NO: 14274 - DNA, 951 bp, synthetic construct
  source 1..951: mol_type = other DNA; note = Synthetic coding sequence
atgagacagccattgagctggggaaggtggagagcaatgctcgcacgtacgtacgggcccggtccatcggctggttaccggtgggcaagcggagctcagggctacgtgagaaatccgccagtcggcgcatgcgatctccagggggagctggaccgtttcgggggtatcagcgtgcgactagcccggctcgatgccttggacagactggatgcggctgcatttcagaaaggcttgcaggcagctgtgcagcaatggcggtccgagggacgaaccgctgtgtggttacacattccgatccttcagagcaggttcattgcacccgccgctagtttaggcttctgctttcatcacgcggaaagtgatagttccacactcaccctgtggttgcgtgagggccctagcagactgcccggctacgcatcacatcaagtgggagtggctggagccgtgttcgatgagtcgaccaggaaaattttagtcgtccaagaccgaaacaagctgaagaacatgtggaagttccccggtggactgtccgagccagaggaagacataggcgatacagcagtcagagaagtgttcgaggagactggaatcaagtcagagtttcgctccgtgctgagtattcgccaacagcatacaaaccctggcgccttcggaaaaagcgacatgtatattatttgtagattgaagccttatagcttcacaattaatttttgtcaagaggaatgcctgcgctgcgagtggatggacctcaatgacttggcgaagaccgaaaataccacccccattactagccgggtggcaaggctgctgctttatggctacagagagggattcgacaagattgacttgaccgttgaagagctgcctgctgtgtatacggggctgttttataagttatatcacaaggaattacctgagaactataagaccatgaagggcatcgactag

SEQ ID NO: 14275 - DNA, 537 bp, synthetic construct
  source 1..537: mol_type = other DNA; note = Synthetic coding sequence
atgggagaaacctggaagaatatctgcagcacagttcgccatggatggtggttgcgggatcatcgcatggctgggctccctatccctcccgagattgtgaaagaagcggaggtgccgcaggccgccctcggagtgcccgcccagggcactggggacaacggacacacccccgtggaggaggaagtcgggggcatacccgtgcccgccccaggactgctgcaggtcacggagagacgccagcctctgtcatctgtgtcttcattagaagtgcatttcgatctcctggacctcacggagctgacagatatgtccgaccaggaactggctgaagtgtttgcggatagtgacgatgagaacctgaacactgagagccccgcgggcctgcatccccttccgcgagccgggtatctgagaagccccagttggactcggaccagagcagaacagtcccacgagaagcagccactgggtgaccccgaacggcaggccactgtgctggacaccttcctcaccgtggagcggcctcaagaggattag

SEQ ID NO: 14276 - DNA, 741 bp, synthetic construct
  source 1..741: mol_type = other DNA; note = Synthetic coding sequence
atggcagaacaggaacagaggaagatccccctcgtacctgaaaatctgctcaaaaagcgtaaggcctaccaggccctcaaggccacccaagcaaaacaggcgttactggcgaaaaaggagcaaaagaagggcaaaggtctgcgcttcaaaaggctcgaatctttccttcacgattcatggcggcagaaaagggacaaggtgcgtcttaggcgcttggaagtaaagccacacgccttggaacttcccgacaagcattcactggccttcgttgtacggattgaaagaatcgacggggtcagcttgctcgttcagagaaccatagcaagactgcggctcaagaagattttcagcggcgtgttcgttaaggtgacaccacaaaatctgaagatgctccgtattgtagaaccctacgtgacatggggttttcctaatctcaaatctgtaagagaactcattctgaaacgcggacaggcaaaggtcaagaacaaaaccatcccgctgactgataacacggtcatcgaggaacatcttggaaaatttggcgtgatttgcctggaagatctgattcacgaaattgctttccctgggaaacatttccaggagatctcttggtttctctgtcccttccacttatcagtggctcgtcacgctaccaaaaatcgtgtcgggttcctcaaggagatgggcaccccaggctaccgcggcgagcgaattaatcaactgatccgccaactgaattag

SEQ ID NO: 14277 - DNA, 2442 bp, synthetic construct
  source 1..2442: mol_type = other DNA; note = Synthetic coding sequence
atggcctggccctgcattacacgggcctgctgcattgcccgtttttggaaccagctggacaaggcagatatagctgtccccttagtgtttaccaaatactctgaggcaactgagcatccaggtgcacctccgcagccacctcccccgcagcagcaggcccaacctgccctcgcccctccaagcgctagggcggtggcaattgaaacacagccagctcagggggaactggacgcagtggcaagagccacggggcctgccccagggccaacaggcgaacgggagcccgcagctggcccaggaagatccgggcccggccccgggcttggcagtgggtctacatccgggcccgctgattctgtgatgcgtcaagattatcgcgcctggaaagtgcaaaggccagagccatcctgtaggcccaggtcagaataccaaccatcggacgcccctttcgagcgggaaacccagtaccagaaggactttcgggcgtggccactcccgagaagaggtgaccacccttggatccccaaacccgtgcaaatttctgcggctagccaggcttcagcacccatcttgggtgcccccaaacggagaccacagtcccaggaaagatggcccgttcaggccgccgccgaggcacgggagcaggaggccgcccctgggggcgcgggtggattagcagcgggaaaggcttctggcgctgatgagcgggacacccgccgcaaagccgggccagcttggatcgtccgccgcgctgagggcttggggcatgaacagactcctctgcctgcagcacaggcccaggttcaggccactggccccgaggcgggacggggccgtgcagccgcggatgcgctaaatagacaaataagggaggaggtcgccagtgccgttagtagcagttataggaacgagttccgggcctggacagacattaaaccggtgaaaccaataaaggccaagccccagtacaaaccccccgatgataagatggtccacgagacttcctatagtgcgcagttcaaaggggaggcttccaagcctacaaccgctgacaataaggtgatcgacaggaggcggattcgttctctctattcagagccattcaaggagcccccaaaggtggaaaagccttcagtgcagtcttccaaacctaaaaaaacttcagcttcgcataagcccaccaggaaggctaaggacaaacaggcagtgagcggacaggcagcaaaaaaaaagagcgcagagggcccctctaccacgaagcccgatgacaaggaacagtctaaggagatgaacaataaattagcagaggctaaagaaagtctggcccagccagtcagcgacagcagtaaaacacagggaccggtagcaactgaaccggataaagaccagggctctgtcgttccaggcctcctgaagggccagggtccaatggtgcaggagccactgaagaagcagggatctgtggtcccgggcccgcctaaagacctagggcctatgattccattacctgtgaaggaccaggatcataccgttcccgagccactgaaaaacgagagccctgtgatatctgctcccgtgaaggatcagggaccttcagtgccagttcccccaaaaaaccagtcgccgatggttcccgccaaggtaaaggatcagggctccgtagtgcctgagtcccttaaagatcagggcccccgaatccctgaacctgtgaagaatcaggctcctatggttccagcgccggtaaaagacgaagggcccatggtttctgcatctgttaaggaccagggccctatggtcagtgcaccagtgaaggaccagggacctattgtgcccgccccagtgaaaggcgagggtcccatcgtgcccgctcctgttaaggatgagggcccgatggtgtcagcacctatcaaggatcaggatcccatggtccctgagcaccctaaagacgagtccgccatggcaacagcgccaattaagaatcagggctccatggttagcgaacccgtcaagaatcaagggttagttgtgtccgggccagtgaaggatcaagacgtggtggttcccgaacacgcgaaggtgcatgattctgccgtagtagcaccagtgaagaaccagggtcccgtggtaccagagtcagtgaagaatcaagatccaatcttgccagtcctcgttaaggaccaagggcctaccgtactgcagccaccaaaaaaccaggggaggatcgtaccggagcccctgaagaaccaggtccccatcgtgccggtgcctttgaaggaccaggatccgctggtgcctgttccagccaaggaccaggggccagccgtgccagagccactcaaaacacagggaccgcgcgacccccaacttcctaccgtttcacctctgcccagggttatgatcccaaccgccccacacacagaatatatcgagtcatcaccctag

SEQ ID NO: 14278 - DNA, 261 bp, synthetic construct
  source 1..261: mol_type = other DNA; note = Synthetic coding sequence
atgccccagtatcagacatgggaagagttctcacgggctgccgaaaagctgtacctggctgacccaatgaaagcgcgggtggtcctgaagtacaggcactcagacggcaatttgtgtgtgaaggtgaccgacgatctggtatgcctggtctataagactgaccaagcccaggatgttaagaaaattgaaaaattccacagtcaattgatgcgcctgatggttgctaaggaggctcggaacgtgacaatggagaccgagtag

SEQ ID NO: 14279 - DNA, 1206 bp, synthetic construct
  source 1..1206: mol_type = other DNA; note = Synthetic coding sequence
atggctcacgtgtcctccgaaactcaggatgttagccccaaggatgagctcacggccagtgaagcttccacaaggtctccactgtgcgaacatacgttccctggagattcagaccttcgctccatgatcgaggagcacgccttccaagtcctgtctcagggaagccttctcgaaagcccgtcgtacactgtttgcgttagtgaaccagacaaagacgatgacttcctctcgctgaacttcccaaggaagctgtggaaaatagtcgagtccgaccagttcaaatctatatcatgggacgagaacgggacttgtatcgttatcaacgaagagctctttaaaaaggagatcttggagaccaaagctccctaccgtatcttccagactgatgcaatcaaaagcttcgtcagacagctgaacctgtatgggttctccaagattcagcaaaactttcagcgctctgcttttctggctaccttcttgtccgaggagaaagaaagctcagtgctttccaaactcaagttttattacaatccaaatttcaagcgtggatacccgcagctgctggtgagagtcaagcgacgcattggggtcaaaaatgccagccctatatcaacactgttcaatgaagattttaacaagaagcattttagagctggggcgaatatggaaaatcacaactccgcattggccgctgaggcttctgaagagtccttgttttcagcctccaagaacctaaatatgcctcttactcgtgagagcagcgtcagacagatcattgccaactcctccgtgcctatccgaagcggttttccccccccctctcccagcacgtctgtcggaccgtctgagcagatagccacagatcagcatgccattctcaaccagctaacaacaatccacatgcatagccattctacttacatgcaggctaggggtcacatcgtcaacttcatcaccaccacaacctcacagtatcacattatctcccccctacagaacggatattttgggctgaccgtggagccctctgccgttcccactcggtaccccttggtaagcgtgaatgaggctccctaccgaaacatgctgcctgccggaaatccctggttgcagatgccaactattgccgatcggtctgccgccccccattccaggctggccctgcagcctagtccactcgacaagtatcatcccaactacaattag

SEQ ID NO: 14280 - DNA, 4302 bp, synthetic construct
  source 1..4302: mol_type = other DNA; note = Synthetic coding sequence
atgtggagtttaaccgcctcagaaggcgagtccaccacagcccattttttcctgggcgcaggcgacgagggactgggcacccgcggcatcggcatgcgtccagaggagagcgatagtgaactgctcgaagatgaggaggacgaggtgcccccagagcctcagattatcgtcggaatctgcgcgatgacaaaaaaaagcaagtctaagcctatgacacagatcctagaacgcttgtgccgtttcgattatctcacagtggttatattaggtgaggatgtgatactcaatgaaccagttgagaactggccaagctgtcactgtttgatttctttccacagcaaaggctttccacttgataaagcagtggcctattctaagctgcggaacccattcctaattaatgatcttgcaatgcagtattatatccaagaccgacgtgaagtctaccgcatccttcaagaggagggaatagacttaccccgctatgcagtccttaatcgggaccccgccagacccgaggagtgtaatttgatcgagggggaagaccaggtagaggttaacggggcagtgtttcctaaaccttttgtggaaaaacctgtgtccgcggaggatcataacgtgtatatttactatccttcctcagctggcggcgggtcccagcgcctcttcagaaaaatcggatccagatcctcagtgtactcccccgaatctagcgtgagaaagacgggctcttacatttatgaagagttcatgcccacagacggcactgacgtgaaggtatacactgtgggcccggattatgcgcacgccgaagcccggaagtctcctgcattggacgggaaagttgagagggactctgaaggcaaggagatccgctatcccgtgatgctaaccgcgatggaaaaactggtggccagaaaagtgtgcgtagccttcaagcagaccgtgtgtggatttgacctcctgcgcgctaatgggcactctttcgtgtgcgatgtgaacggtttttcattcgtgaaaaactctatgaaatattacgacgattgtgccaagattctgggtaacacaatcatgcgcgaactggcaccacagtttcagataccatggagcatacctactgaggccgaggatattccaattgttccaaccactagtggaactatgatggagctccggtgcgtaatcgctatcattcgacacggagaccggaccccgaaacaaaaaatgaaaatggaggtgaaacatcctcggttcttcgccctgttcgagaaacacggcggctataagaccgggaagttgaaactgaagcggcccgaacagctgcaggaagtgctggatattacaaggttactcctggccgaactggaaaaagagcctggaggtgagatcgaggagaagactggcaagttggaacagctaaaatccgtcctggagatgtacgggcatttctctgggattaaccggaaggtacagctcacttattatccccatggagtcaaggctagcaacgagggccaggatccacagagggagaccctagcccccagcctgctcctggtgttgaagtgggggggagaactgaccccggcgggacgtgttcaggccgaagagctcggacgggcttttcgctgcatgtatccaggagggcagggcgattatgccgggttccctggatgtggcctgctcaggctgcatagcactttcaggcacgatcttaaaatctatgccagcgatgagggacgcgtgcagatgactgccgcagctttcgcgaaaggtttgctagctttggaaggagagttgactcccatccttgtgcagatggtgaagagtgcgaacatgaacgggttgttagactccgatggtgactcactaagctcatgccaacacagagtgaaagctcggctccaccacattctgcagcaggacgccccctttgggcctgaggactacgaccagttggcccccacaaggagcaccagtttgttgaactctatgacgatcattcagaacccggtcaaagtttgtgaccaggtttttgcgctcattgagaacctgactcatcagattcgggaacgtatgcaggaccctcgtagcgttgatctgcagttgtatcactccgaaactctggaactgatgctccagcgctggagcaagctggaacgcgacttcaggcagaaaagcggaagatacgatatctcaaagatccccgacatctatgactgtgtgaaatacgacgttcaacacaatggttcactgggactgcagggtaccgccgagctcttaagactttccaaggcactggcagacgtagtcatcccccaagagtatggcatttcacgggaggagaaacttgagatcgcggtcggcttttgcctcccactgttacggaaaattctgctcgatctccaaaggacacacgaagatgagagcgtcaataagctgcaccccttatgctacttaagatattcgaggggcgtactgagccctgggaggcacgtgcggacacgcctgtactttacaagcgaatcacatgtgcactcgctcttatccgtcttcaggtatgggggactcctggacgaaacacaggacgcccaatggcaaagggcactggactacctctcagcgatctctgagctcaattacatgacccagatcgtaatcatgctgtacgaagataacacacaggatccactgtccgaagagcgctttcacgtcgagctccacttttcacccggggtgaagggtgtcgaggaagagggatccgcccccgccggttgcggatttcggcccgcctcttcggagaatgaagaaatgaagactaatcaaggaagtatggaaaatttgtgtcctggaaaggcttcagacgagccagaccgggcactgcagactagccctcagccgcctgaaggccccggcctaccccgccgctctccactgatacggaacagaaaagccgggagtatggaagttttaagtgagacttcatcctccaggccaggaggatatcgactattttcttcctcaaggcccccgactgaaatgaaacagagcggactggggtcccagtgcaccggcctgttcagcacaaccgtcctgggcgggtctagttccgcaccgaatcttcaggattacgcccggtctcatggaaaaaagctcccacctgcatcgctcaaacatcgtgacgagctccttttcgtccccgccgttaagcggttttctgtgtcttttgctaagcaccctactaacgggttcgaggggtgttctatggtcccaacaatctatcccctggagacgcttcataatgcgctgtccctcaggcaagtgtcggaattcctgagcagggtgtgtcagcgccacaccgacgcccaagcccaagctagcgctgcactctttgattctatgcacagctcccaggcatcagacaatcccttttctccaccccgtacacttcacagtcccccgcttcagttgcaacaacggtccgaaaagcccccgtggtacagctcagggccatctagcaccgtatctagtgccggtccgtcatcccctacaactgtggacggaaactcacagtttggtttctctgaccagccttcccttaacagtcacgtggccgaggagcatcagggtttagggttgctacaagagacaccaggctctggcgcacaggagttgagtattgaaggggagcaagaattgttcgagcctaatcagtcaccacaggttccgccaatggaaacatcacagccgtacgaggaggtctcccagccttgtcaggaagtcccagatatctcgcagccctgccaggacatcagcgaggcactctcacagccatgccaaaaggtacccgatatcagccagcagtgccaggaaaaccacgacaacggtaaccatacatgtcaggaggtgccacacatctcccaaccatgtcagaagtctagtcagttatgccaaaaagttagcgaggaggtgtgtcagctgtgtctcgagaattctgaggaagtatcacagccctgccagggagtctctgtcgaggtgggaaagcttgttcacaagttccatgttggagtaggctctcttgtgcaggagacactggtggaggtcgggtcacccgccgaggaaatcccagaagaagtcattcagccctaccaggagttctcagttgaggtcggaagactcgcccaggaaacatctgctattaatctgttgtctcagggaatccccgagatcgacaagccatcgcaggagtttcccgaagaaatcgatttgcaggcgcaagaagtcccagaggaaattaattag

SEQ ID NO: 14281 - DNA, 1137 bp, synthetic construct
  source 1..1137: mol_type = other DNA; note = Synthetic coding sequence
atggacagtgtgcgtagtggtgcctttgggcacttgttccggccagataattttatcttcggccaaagcggcgcaggcaataattgggctaaggggcactatactgaaggcgccgagctggtggattctgtgctcgatgtagtgcgaaaggaatgtgaaaactgcgattgtttacaggggtttcagctgacccatagcctcgggggcggcactgggtctggaatgggcaccttgctgatcagtaaagtgcgcgaggagtacccagataggatcatgaacactttttcggtcgttccatctccaaaagtgagtgataccgtggtggaaccgtataacgcaaccctgagcatccatcagctggtagaaaataccgatgaaacttattgcattgacaacgaagccctctatgatatttgttttcggacactcaaactcgccactcctacctatggggatctgaaccatctcgtttccgctacaatgtctggcgtgaccacatctcttcgtttccccggacagctgaatgctgatctcaggaagttggcagtaaacatggtcccattcccacgcctccatttctttatgccaggctttgccccactgacagcaaggggatcccagcagtacagggccctcactgttccagagctaactcagcagatgttcgatgccaagaacatgatggccgcatgtgatccgaggcacggtaggtacctgactgtggccacagtctttcgagggcggatgtctatgaaagaagttgatgagcaaatgctagctatacaaagtaagaactcgagttatttcgtggagtggattccaaataatgtaaaggtggcagtctgtgacatccctccacgcgggctgaaaatgtccagtacatttattggaaacagcactgccatccaggaactgtttaagcgaatcagtgaacagtttacggcgatgttccggcggaaggctttcttacactggtacactggagaaggcatggacgagatggagtttaccgaagctgaatcgaacatgaatgatctcgtcagcgaataccagcaatatcaggacgctaccgcagaggaagaaggggagatgtatgaagacgacgaggaggagagcgaggcacaaggacccaagtag

SEQ ID NO: 14282 - DNA, 1161 bp, synthetic construct
  source 1..1161: mol_type = other DNA; note = Synthetic coding sequence
atgtgcgagagagccgcacgactgtgtcgtgccggagcgcaccgcctgctgcgtgaacccccacagcaaggacgcgccctggggggcctgttacgctgggtgggcgccaggatgggggagccgcgggagtctctcgcgcctgctgctccagctgaccctgggccagcatcccctcgtggaggtaccgccgttatattggatatttttcggagagccgataagaatgacgatggcaagctcagtctggaagaattccagctgttctttgctgatggagtgctcaatgagaaggagttggaggatctgtttcacacaatcgatagtgacaatacgaaccatgtggataccaaagagttgtgcgactacttcgttgaccacatgggcgactatgaagatgttctcgccagccttgagacattaaaccactctgtattaaaggctatggggtatactaagaaggtttatgagggtggaagtaacgtggatcagttcgtcacccgattcctgctcaaagaaactgcgaaccaaattcagagcttgctatcttccgtggagagcgcggtggaagcaattgaagaacagacatctcagcttagacagaatcatattaagccatcacactctgccgcccaaacgtggtgcggatccccaacaccagcatcggcaccaaatcacaagctgatggccatggagcaagggaaaacgcttccctctgcaaccgaggacgcaaaggaagaggggttagaggcgcaaatttcccgtctggccgagttaatcggcaggctcgaaagtaaggccctgtggtttgatctgcaacagcggctgagtgatgaagatggaacaaacatgcatctgcaactggtgagacaggaaatggctgtctgcccggagcagctttctgaattcctcgacagtctgaggcaatacctgcgcgggaccaccggagtgcggaattgttttcacatcacagccgtgaggttgtcagatgggttcaccttcgtaatctacgaattttgggagacagaagaggcctggaaacggcacctgcaatcgccactttgcaaggctttccgtcacgttaaggtagacaccctgtctcagccagaagctctatctagaattcttgtaccggccgcctggtgcactgtgggcagagactag

SEQ ID NO: 14283 - DNA, 1482 bp, synthetic construct
  source 1..1482: mol_type = other DNA; note = Synthetic coding sequence
atggagaggtctcctgatgtgagccccgggcccagcagatccttcaaagaagagctgctctgcgccgtgtgctatgatccctttagagatgccgtgaccttacggtgtggtcacaatttctgtaggggctgcgtctcccgctgttgggaggtgcaggtgtctcccacctgccccgtgtgcaaggatcgagcctcccccgcagatcttcggacgaaccacacgctcaataatctcgtagagaagctgctcagggaggaggcagaaggagctcgctggacatcttaccggttcagtcgcgtctgcaggttgcaccgcgggcagttgagtctgttctgtctggaggacaaagaactgctgtgctgcagctgccaggcagatccacgtcatcagggccacagagtacagccagtcaaagatactgcacatgatttcagggccaagtgcaggaatatggaacatgcattaagggagaaagccaaagcgttctgggcgatgcggaggagctatgaggccattgctaagcacaatcaagtggaggccgcctggttggaggggcggattcgacaagaattcgataagctcagagagtttctgagggtcgaagaacaggcaatactggacgccatggcagaggaaaccagacagaaacaattgctggcggatgagaagatgaagcagctgacggaggaaactgaggtccttgctcacgaaatcgaacgtctgcagatggagatgaaagaagacgatgtttcctttctcatgaagcataagagtcgaaagcgccggctgttttgcaccatggaacctgaaccagtgcagcccgggatgctgatcgatgtttgtaaatatttgggatcgctgcagtaccgagtttggaagaagatgctcgctagcgttgaatcagttcccttttcatttgaccctaacaccgccgctgggtggctgtcagtgtccgatgatctcaccagtgtgacaaaccacggataccgggtccaggtggaaaatccagagagattctcttccgctccatgcctattaggcagtagagtctttagccagggttcccatgcatgggaggtggcattagggggccttcagagctggagagtgggcgtggtgcgggtgagacaggactctggcgccgaggggcattctcattcctgttatcacgataccaggtcagggttctggtacgtctgtcgcactcagggggtcgagggcgatcactgcgtaacaagcgacccggccacctccccactggttctggccatcccaaggcggcttcgcgtcgaactggaatgtgaggagggggagctcagcttctatgatgctgagagacattgccatctgtatacatttcatgccagatttggcgaagtgcggccctacttctatctggggggcgcgagaggcgctggcccaccggagccccttaggatttgccctttacacatctctgtcaaggaggagctcgatggatag

SEQ ID NO: 14284 - DNA, 2262 bp, synthetic construct
  source 1..2262: mol_type = other DNA; note = Synthetic coding sequence
atggctcccgatagcgatcccttccctgagggccccctgctgaagctcttacctctggatgccagggatcggggtactcagcgctgtcgcctgggaccagcagccctgcatgccctgggcgctagactgggctccgctgtgaagatctcattgcctgatggaggctcatgtctttgtacagcttggcctcgcagagatggggctgacggcttcgtgcagctggatcctttatgtgctagtccaggggccgcagtgggggctagcaggagccgacgcagtctgtctctgaatagattactgcttgttccctgtccaccactgagaagggtcgccgtgtggcccgtcttgagggagcgagccggggcccctggcgccagaaataccgcagccgttctggaggccgcacaagaactgttgcggaaccggcctatatccttgggtcacgtggtagttgcacccccgggggcgcctgggctcgtagcagccttacacattgtggggggtacgccctcccccgatcctgccggacttgtgaccccccgcacccgcgtgtctttgggcggtgaaccaccttccgaggcacaaccacaacccgaagtgcctctgggcggcctgtctgaggctgcagattcattgagagaactgctgagactgccgttgagatatcctagagcgctcacggcactgggcctggctgtgcctcgcggagtgctcttagccggtcctcccggtgtcggcaagacacagctagtgcgggctgtggcccgagaggctggggcagagcttctcgctgtgtctgctccagccctgcagggaagtcgtcccggggagactgaggaaaacgtgcggcgggtattccagcgcgcacgtgagctcgcttcaagagggcctagcctcctgttcttggacgagatggatgccctgtgtccgcaacggggcagccgcgccccagaatctcgggttgtcgctcaggtgctgacactgctggatggagctagtggtgaccgggaagtggtggttgtaggcgcgacaaaccgaccagacgcactcgacccagcgttgaggcggcctgggcggttcgaccgcgaggtcgttattgggacccccacactgaagcagagaaaagagatcctccaggtgattacatcgaaaatgccaatatctagccacgtcgacttagggcttctcgcagaaatgactgtgggctacgtgggagccgatttgaccgccctgtgtagggaggccgccatgcatgctttgctacactccgagaagaatcaagataatcccgtaattgatgagattgattttctggaggcctttaaaaacatccagccgagttcattcagaagtgttattggactcatggatatcaaaccagtggactgggaggaaattggtggattagaggacgtcaaattaaagcttaaacagagtattgaatggcctctcaaattcccttgggaatttgtccggatgggcctgacacagccaaaaggagtgttactgtatggaccccccggctgcgccaagacgactctggtacgcgctttggccaccagctgtcattgttcctttgtgtccgtgtcaggggccgaccttttcagtccctttgtgggggatagtgagaaagtgttgtcacagatatttcgtcaggcgcgcgcttccacccctgctattctgttcctggacgagatcgacagcatactcggagccaggagcgcttccaaaacgggttgtgatgtccaggagagggtgcttagcgtgcttctcaatgagctggatggagttggcctgaaaacaattgagcggagggggtctaaaagtagtcagcaggagttccaggaggtgttcaacaggagtgtgatgataatcgccgccacaaacagacctgacgtccttgacaccgcgctgttgagacccggacggctcgacaaaattatttacatacctccgcctgatcataagggacgcctgtccattctcaaggtctgcactaagactatgcccattgggcccgatgtgagcctggagaatctcgcggcggagacctgcttctttagtggcgccgatctgagaaacttatgcaccgaggcagctctgctggctctgcaagagaatggactggatgcgactaccgttaaacaagaacactttcttaaatcactcaagacagtgaagccaagtctgtcctgcaaggatttggccctgtacgaaaatctatttaagaaagaggggttttcaaacgtggaaggcatttag

SEQ ID NO: 14285 - DNA, 1026 bp, synthetic construct
  source 1..1026: mol_type = other DNA; note = Synthetic coding sequence
atgccaaagcggaaggtaacttttcagggggtgggcgacgaggaagacgaggatgaaatcatagtccctaaaaagaagctcgtcgacccagttgcgggctcgggtggtccaggctccaggttcaagggtaagcatagccttgattccgacgaggaggaagatgacgacgacggagggtcaagcaagtatgacattctggcctctgaggacgtggagggacaagaagcggccaccctcccttccgagggtggcgtaaggatcacgccgtttaacttacaggaagaaatggaggaaggccacttcgacgccgacggcaattacttcctaaacagagatgcacaaataagggatagctggctggataatatcgactgggtcaaaattcgagagcgccctcctgggcagcgccaggcaagcgactctgaagaagaagatagtcttggacaaactagtatgtccgcacaggctctgctagaaggactgcttgagttgttactgccccgggagactgttgccggagccctaaggcggctgggggctcgggggggaggcaaaggccgcaaaggcccaggccagcccagctcccctcagcgcctagataggcttagcgggctggccgatcagatggtggccagaggcaacctgggagtgtatcaagagacgcgggagagattggcaatgagattgaaggggctggggtgtcagaccctgggtccccacaatccaacacctcctccgagtttagacatgttcgctgaagagttagccgaagaagagctggagacgcctaccccaacccagagaggcgaagcggaatctagaggagacgggctagttgacgtgatgtgggagtacaaatgggagaatactggcgacgccgagttgtacggtccatttacctctgcccagatgcaaacttgggtatccgagggatacttccctgacggagtttattgccggaaattagacccacctggggggcaattttataattctaaaaggattgattttgatttgtacacgtag

SEQ ID NO: 14286 - DNA, 690 bp, synthetic construct
  source 1..690: mol_type = other DNA; note = Synthetic coding sequence
atggccgaagagatggaatcatctttggaggcgagctttagctcgagtggcgctgtttcgggcgcttctgggttccttcctccagcccggtcaaggattttcaagatcattgtgataggggactctaacgttggaaagacatgcctcacctatcggttttgtgcagggcgctttccagacaggaccgaagccacaattggcgtggacttccgggagagagccgttgagattgacggcgagagaattaagatccagctttgggatacggctggtcaggaacggttccgcaagtccatggtccagcactactaccggaatgttcacgccgtcgtcttcgtgtatgatatgactaacatggcctcgttccacagtctaccctcatggatcgaggaatgcaagcagcaccttttggctaatgacatcccccgtatactcgtcggcaacaaatgtgacctgaggtctgctatacaggtgccgaccgatcttgcccagaagtttgcggacacccacagcatgcctttattcgagacatcagctaaaaacccaaacgataatgaccatgttgaggcgatttttatgaccctcgcccacaaattaaaatctcataagcctctaatgctgagccagcctccggataacggtatcatcctaaagccagaacccaagcctgcaatgacctgctggtgttag

SEQ ID NO: 14287 - DNA, 2352 bp, synthetic construct
  source 1..2352: mol_type = other DNA; note = Synthetic coding sequence
atgcttttagggttccgacggggtagaagaagccacttcaagcacatcatacacggactgcttccggccgctagcgtggctcccaaagctgcagtcccacgcacacccccccctcgcagccccaatcctagtccggagcggccacggtccgctctggcagctgccattctggccactacacttacaggtagaactgtggcaattccgcagccacgacaacggtctcggtccgaatctgacgtttcttccgtagaacaagacagcttcatagagccatacgcaacaacatcacagctgcgtcccaggccaaactggcagagtgagatgggacgaaggagctctctgccttcctttgaaactcttgattacggagacgaagaggatattgaaacccaactgagtagcagcggtaaggagcttggcgacgtgtccgctcgcgaggacagagggggacactcggatgatctgtacgctgtcccacacaggaaccaggttccacttctgcatgaagtcaactctgaggatgatgagaacatctctcatcaggatgggttcccggggtctcctccagccccccagagaacccaacagaaggacggtaaacaccccgtgctgaacctcaaagatgaaaaaccacctctgtgcgagaagcccccccccagccccgatatcacaggaagggctcgacaaagatataccgaaatcaccagagagaaattcgaggctctcaaagaagagaacatggatctgaataatatgaaccagagcctgactttagaattgaacaccatgaagcaggcaatgaaagagcttcagctgaagttgaaggggatggagaaagaaaagcgtaagctaaaggaggccgagaaggcctcatcacaggaggtagcagcccctgaactgctgtacctgagaaaacaggcgcaggaactggtggatgagaatgacggactaaagatgacagttcaccggctgaatgtggagcttagccgctatcagactaagttcaggcacctatccaaggaggaaagcctcaatattgaagggctgccgagcaagggccctattcctccttggttgcttgatataaagtatcttagcccattgctgttagcctatgaagacatgatgaaggaaaaggatgagctcaatgccacattgaaagaggaaatgcgaatgtttaggatgagagtccaagaggtcgtgaaagaaaacgaagaactgcaccaagagctaaacaagagcagcgccgtgaccagtgaggagtggaggcaacttcagacccaagccaagctcgttcttgaggagaataaactcctgctggaacagctcgagattcagcagagaaaggcaaaggacagccaccaagagagactgcaggaagtgtccaagctgacaaaacagttgatgctgttagaagcaaaaacgcacgggcaggagaaagagctggcggagaatcgggaacagctggagatcctcagggccaagtgtcaagaactgaaaacacacagcgacggcaagatcgccgtggaggtgcataaatctattgtgaatgagttaaagagccagctgcaaaaagaagaagagaaagagagggccgaaatggaagagcttatggagaagctgacagtgttgcaagcacagaagaagagtctgctcctggaaaagaatagcctgaccgaacagaacaaagccctcgaggccgagttggaaagggcccagaaaatcaaccggaaaagccagaaaaagattgaggttctcaaaaaacaggtcgaaaaagcaatgggcaacgagatgagtgcacaccagtacttagccaaccttgtcgggcttgcagagaacattacacaggaaagagattctctcatgtgccttgctaagtgtctggagtccgagaaggacggcgtgctgaacaaagtgattaagtccaatatccgattagggaagctcgaggagaaggtgaaggggtataagaagcaggccgcattaaagctgggcgacatctctcacaggctgctggaacaacaggaggatttcgctggcaagacagcacagtaccgccaggagatgcggcatttacaccaggttctcaaggacaagcaagaggtccttgaccaggcccttcagcagaaccgcgagatggagggcgaacttgaggtaatttgggagtctaccttccgcgagaataggagaataagagagctgctgcaggataccctcaccagaacaggggtccaggataatccacgggctctggtggcacccagtctgaatggggtcagccaggcagatttgctggacgggtgcgatgtctgtagttacgacttaaagagccacgcacccacttgttag

SEQ ID NO: 14288 - DNA, 639 bp, synthetic construct
  source 1..639: mol_type = other DNA; note = Synthetic coding sequence
atggctgcgagacggggtgcactcatagttctggaaggtgtggacagagcagggaagtcaacacaatcaaggaaacttgtggaggccttgtgtgcggctgggcaccgagcagagttgctcaggtttccagaacgctctactgagatcggaaagctgttgtcgagctacttacagaagaagtccgacgtggaagaccactcagtgcacttgctcttttcggcaaacaggtgggaacaggtccccctgatcaaggaaaaactgtcacagggcgtcactctggttgtggacaggtatgccttctcaggggttgccttcaccggggcaaaggaaaatttctcacttgattggtgcaagcagcccgacgttggactgccgaaaccagacctggtgctctttttgcagctgcagctagctgacgccgcgaagcgtggagccttcgggcacgagcggtatgaaaatggcgccttccaggagcgggctctgcgctgcttccatcagctgatgaaagacaccactctgaactggaaaatggtggacgcctccaagagcatagaagccgtccacgaagatatccgggtccttagcgaagacgcaatccgaacggcaaccgagaagccactcggggagttgtggaaatag

SEQ ID NO: 14289 - DNA, 504 bp, synthetic construct
  source 1..504: mol_type = other DNA; note = Synthetic coding sequence
atggaggaaacgtacaccgactctctcgatcccgagaagctcctacaatgcccctatgataagaatcaccagattagggcctgccgattcccataccacctcatcaagtgtaggaagaatcatccagacgtggcttcgaagctggcgacatgtcccttcaacgcacgtcatcaggtcccacgtgcggagatctcccatcacatctcctcctgcgacgatcgtagctgtattgagcaggatgtggtgaaccaaactcggtctctgagacaggaaaccctggccgaatccacctggcaatgccccccttgtgacgaggactgggacaaagatctgtgggagcagaccagtactccctttgtctggggaaccacacattattccgacaataacagtccggcctccaatatcgtgactgaacacaagaataaccttgctagtggtatgcgcgttcccaaatccctaccttatgtactgccctggaaaaacaacggtaatgcacagtag

SEQ ID NO: 14290 - DNA, 381 bp, synthetic construct
  source 1..381: mol_type = other DNA; note = Synthetic coding sequence
atggctgcaggtccagagccacctgaatgggagccaaggtggagaaaggcccttcgcggcaaggaaaacaaaggttcagtggaaatcatgcggaaagatctaaatgatgcccgtgatctgcacggacaggcagaatctgctgccgctgtgtggaagggccacgtgatggacaggcggaaaaaagctctgacagattacaaaaaactgagagcattcttcgtagaagaggaagagcactttctccaggaggcagagaaagaggaggggcttccagaggatgagttggccgatcccactgagcggttccggagcctcttgcaagcagtgagtgaactcgagaaaaaacacagaaaccttggtctgtcaatgctgttgcaatag

SEQ ID NO: 14291 - DNA, 1668 bp, synthetic construct
  source 1..1668: mol_type = other DNA; note = Synthetic coding sequence
atgcagagctgcgagagtagcggcgactccgctgatgacccacttagcagaggcttgcggaggcgcggacagccaagggtggtggtcataggcgctgggctggccggcctcgccgcggccaaggctcttctggagcaggggttcacagacgtgaccgtgctggaggcctcatcacacataggggggcgcgttcagagcgtgaaattagggcacgcaacttttgagctcggcgctacctggatccacggcagccatgggaaccctatttaccacttggccgaagcaaacggactgttggaagaaactactgatggggagaggagtgtggggaggatctccctctactcaaagaacggggttgcttgctatctcaccaaccacggcaggagaattcccaaagacgtggtggaggagttcagtgacctgtataatgaagtgtataatctgacacaggagttttttaggcatgataagccagtgaacgctgagtcgcaaaacagtgtgggggtgtttactagagaagaggtccgaaaccgaatcaggaatgacccggatgatcctgaggccactaagcggctgaaactggctatgattcagcagtacctcaaggtggagtcttgcgagtcaagctcacacagcatggatgaggtgagcctgtccgcgtttggtgagtggactgagatccccggcgcgcaccatattatccctagcggattcatgcgagtggttgagctgctggcagaaggaattccagcacacgttatccaactcggaaagcccgtgcgctgcattcactgggaccaggcatccgctagaccccgagggccagaaatcgagccgagaggggagggggatcataatcacgataccggtgagggtggacaggggggtgaagaacccagaggcgggaggtgggacgaagacgagcagtggagcgtcgtggtagagtgtgaggattgtgagctgattccagctgatcatgtcatcgtcacagtaagcctgggcgtgttgaagagacaatatacgagctttttccgccctgggcttcccactgaaaaggtggccgccatccatcgcctggggatcggtactaccgataagatattcctggaatttgaggagcctttttggggccccgagtgtaattcactgcagttcgtctgggaggacgaagccgagtcacacacactaacctatcctcctgagctgtggtatcgcaaaatctgtggatttgatgtcctttatccccctgaaagatacggtcacgttttgtcggggtggatttgtggggaggaggcactcgtaatggagaagtgtgacgatgaagcggtggccgaaatctgtacagaaatgctaaggcagtttactggtaatccaaacatccctaaaccccggcgcatactccgatccgcatggggcagtaacccatacttccggggctcttactcttacacacaggtgggctctagcggtgctgacgtcgagaaactggcgaagccactgccttatacggagagctccaagactgcacccatgcaagtccttttctccggcgaagctactcatcgcaaatattactccaccacacacggcgctctcttgagtggacagagagaagcggcgagactgatcgaaatgtatcgcgatttatttcagcaggggacatag

SEQ ID NO: 14292 - DNA, 3153 bp, synthetic construct
  source 1..3153: mol_type = other DNA; note = Synthetic coding sequence
atggccctttatgacgaggacctcctcaagaaccccttttacctcgctctgcagaaatgtaggcccgatctgtgctctaaagtcgcccagatccacggtattgtgctcgtaccatgtaaaggttcattatcctcaagtatacagtcgacttgtcagtttgaatcatacatcttgatccccgtggaagaacattttcaaacgctcaacggaaaggacgtcttcatccagggcaaccggataaagttgggcgcgggtttcgcatgcctcctaagcgtaccaatcctgttcgaagaaacgttttataacgagaaggaggagtctttttccattttgtgtatcgcacacccactcgagaagagggaatccagtgaggagccactggcacccagcgatccgttctctctgaagaccattgaggacgtccgcgagttcctgggaagacactcagagcggtttgaccgaaatatcgcttcatttcatcggacctttagggagtgcgagagaaagtctctgagacaccacatcgacagcgccaatgccctctataccaagtgcctgcagcagctgctacgcgacagtcatctgaaaatgttggcgaaacaggaggcacaaatgaatttaatgaagcaggctgttgaaatctacgttcatcacgagatctataacctaattttcaagtacgtcggcaccatggaggcgtccgaggacgccgcatttaataagattaccaggagcttacaggatctccagcagaaggacatcggtgtcaagcccgaatttagcttcaacataccccgtgcgaaaagggaattggcccagctgaataagtgcacaagcccacagcagaagctcgtgtgtctgcgcaaggtggttcaacttatcacacagtccccaagtcagagagtaaacttggagactatgtgtgctgacgacctcctgagcgtgctgctgtatctgctggttaaaactgaaatacctaattggatggctaatctgtcgtatataaagaatttccgtttctcctcactggccaaagatgagctgggctattgtttgacatcattcgaggccgccattgagtacatccggcagggcagcctctccgcaaagcctcctgagagcgaaggattcggagaccgtctcttcctcaaacagcgaatgagtctactgtcccaaatgacatcatctccgactgactgtttgttcaagcacattgcctcaggcaatcagaaagaggtcgagcgcctgctaagtcaggaggaccacgataaggacaccgtgcagaagatgtgtcaccccctgtgtttctgtgacgattgtgagaaactggtgagtggaagactgaatgaccctagcgtagtgacacccttttcaagggacgaccgaggacataccccactgcatgtggcagctgtgtgcggccaggctagcctcattgacttattggtatcaaagggagctatggttaatgcaaccgactaccacggcgccactcctttgcatcttgcttgtcaaaaagggtaccagagcgtgaccctgctgttactgcactataaggcctcagctgaggtgcaagacaacaatggaaatacccctttgcacctggcttgcacatatgggcacgaagactgtgtgaaggcacttgtgtactacgatgtggagtcatgtcgtcttgatattggcaacgagaaaggggacactccactccatatcgcggcaagatggggttaccagggggtaattgagacacttctgcaaaacggcgccagcacagagatccagaaccgtttaaaagaaaccccactcaagtgcgccctgaatagcaagatcctgtcagtgatggaggcataccacctttccttcgaaagacgtcagaagtcctcagaagcgcccgtgcagtcaccccaacgctcagtagactcgatctcgcaggagagctctactagttccttctcttccatgtcagcttcgtcaagacaggaggaaacaaaaaaagattatagagaggttgaaaagcttctccgcgccgtggctgacggtgacttggagatggttcgctatttgctggagtggaccgaagaggatcttgaggacgccgaagataccgtctctgccgccgatccagagttctgccacccactgtgtcagtgtcccaagtgcgctccagcacaaaagcggctggcaaaagtgcccgcctcaggcctgggtgtgaacgtgacctcccaggatggatcctccccccttcatgtcgcagccctgcatgggcgagcagatctcatacccctgctgctcaaacatggagcgaatgctggggcgcggaatgccgatcaggcagtgccccttcatctggcctgtcagcagggtcacttccaagtggtgaaatgcctattagactctaacgcaaagcccaataagaaggatctgtcaggcaacacgccattgatttacgcctgttcaggaggtcaccacgaactcgtggccctgctgctgcagcacggcgccagtatcaatgccagcaacaacaaaggtaatacagctcttcatgaagccgtgatagagaagcacgtttttgtggttgagttgttactattacatggggcctcagtgcaggtcctcaacaaaaggcagaggactgccgtggactgtgctgaacagaactctaagatcatggagctgttgcaggttgttccatcctgcgtcgcatctctggacgatgtggctgagaccgatagaaaagagtatgtgacagtgaagatccggaaaaaatggaactctaagctctacgacctgcccgacgagccttttactaggcagttttattttgtacacagtgcgggacagttcaaggggaagaccagtagggaaattatggccagagaccgcagcgtgcccaacctgaccgaaggctctttgcacgagcctggccgacaaagcgttacgttacggcagaataacctccctgcccagagtggttcacatgctgctgagaaggggaatagcgattggccggagcgacctggactgacccaaactgggcccggtcaccggcgcatgctacggagacatacagtggaggatgcagtggtttcccaggggcctgaggccgcaggtcccctcagcacaccacaggaagtgagcgcaagcagatcgtag

SEQ ID NO: 14293 - DNA, 1662 bp, synthetic construct
  source 1..1662: mol_type = other DNA; note = Synthetic coding sequence
atggatgtggataaggaattgggaatggagtctgtgaaagctggtgcttccggcaagcccgagatgcgacttggaacacaggaggagaccagcgagggcgatgccaacgagtcctctttgctggtgcttagctccaatgttccacttctggctctcgaatttctagaaatagcccaggccaaggaaaaagcttttcttcctatggtgtcccatacctttcatatgcgcactgaagagtccgacgcgtcgcaggagggggacgacctcccaaaaagctcagccaacaccagtcatccaaaacaggacgattctccgaaaagtagcgaggagacgattcagcctaaggaaggcgatatccctaaggccccagaagagactatccagtcaaaaaaagaagacttgcctaagagctccgagaaagccatacagccgaaagaatctaacattcctaaatccagcgcaaagcccatccagcccaagctgggtaacataccgaaggcatctgttaagccctcccagcccaaggagggcgatatcccaaaagcgcctgaagagacaattcaatcaaaaaaggaggatcttcctaaatcttcagaagaagctatacagccgaaagagggcgatattcctaaatcaagcgccaaaccaattcaaccgaagcttggcaatatcgcaaagacatctgtcaagccctcacagcccaaggagagcgatattcccaaaagtccagaggagacaattcagcctaaggagggtgatattccgaaatcttccgctaagcccatccaacccaaactaggaaacatcccaaaggccagtgtcaagcccagtcagcccaaagaaggggacatttccaaaagtccagaggaagcgatccagcccaaagagggcgatctgcccaagtcattggaagaggccattcagcccaaggagggcgacattccgaagtctcctgaggaggccatccagcctaaagaaggagacattcctaaatctctggaggaggctatacagccaaaggagggcgatatacctaagagccctgaggagacaattcagccaaaaaagggcgacattcccaagagccccgaagaagccattcaaccaaaggagggagacattccaaaaagcccaaagcaagctatccaacccaaagaaggagacatcccaaaatccctggaggaggcaatccccccgaaggaaatcgatattccaaagagtcccgaggagaccatacaaccaaaggaagacgactcccctaaaagcctggaggaagctaccccgagtaaagagggagacatcctcaaaccggaggaggaaacaatggaattccccgagggcgacaaagtcaaagtgattctatctaaggaggattttgaggcaagcctaaaggaagccggagagcggctggtcgctgtggacttctctgctacctggtgtgggccgtgtaggacaattcggccgttctttcacgccctcagtgtaaaacacgaagatgtcgtgttcctggaggtcgatgcggataactgcgaggaggtggtccgggagtgtgctatcatgtgcgtccccacattccaattctataagaaggaggagaaggtggatgagttgtgtggggccctcaaggagaagctggaagccgttatagcagagctgaaatag

SEQ ID NO: 14294 - DNA, 2268 bp, synthetic construct
  source 1..2268: mol_type = other DNA; note = Synthetic coding sequence
atggtgagccacggtagttccccaagccttttggaagctctctcctccgatttcttggcctgcaagatctgcctcgagcagctccgggccccgaaaaccctcccttgtctgcatacatattgccaagattgtttagctcagctcgctgatggaggtcgagtcagatgtcctgaatgtagagaaactgtaccagttccccccgaaggcgtagcttcctttaaaacgaacttttttgtgaacgggctactggacctggtgaaagctagggcatgcggcgacttgcgcgctggtaaacccgcttgtgcactgtgccccctggttggaggcacgtcgacaggagggccagcaacagcacggtgtctggactgtgccgacgacttgtgccaggcctgcgctgacggccacaggtgtaccaggcaaacacacacgcatagggtagtggacctagtgggatatcgagccggctggtacgatgaggaggcccgggaaagacaggccgcccagtgtccccagcacccaggcgaggctctccgattcctttgccagccgtgtagtcagctgctttgtagagaatgccgtctggacccacacctcgaccatccgtgtctacctctggccgaggcagtgcgcgctcggaggcctgggttagaaggtctgctggcaggagtggacaacaatctggtggagttggaggccgctagacgggtagaaaaagaagctctcgcacgcctcagggagcaagccgctagagttggtactcaggtcgaggaggctgccgagggcgtccttcgagctctcctagctcagaagcaggaggttctgggccagctcagggctcacgtcgaagccgcagaagaggctgcaagagagaggttggccgaacttgaaggcagggaacaagtagcacgggcagccgcagcctttgcgcgccgagtgttgagcctcgggcgggaggccgagatcctgtccttggagggcgccatcgcgcagagactccgccagcttcaggggtgcccatgggcccccggcccggctccctgtttactgcctcagttggagctgcaccccggcttactggacaaaaactgccatttgctccgtctgtcattcgaagaacaacaaccccagaaggatggggggaaggacggagctgggactcaaggaggtgaggagtcccagagtcgaagggaggacgagcccaagacggaacgtcagggtggcgtccagcctcaggccggcgatggagcacagactccaaaagaagagaaagcgcagactacccgtgaagaaggtgcccagacattggaggaggacagggctcaaacccctcatgaagatgggggaccccagccgcataggggaggcagacccaataaaaagaagaaatttaaaggacgacttaagagtatttccagggaaccatccccagctttgggccctaacctggatggctcaggcctgcttcccagacccatcttttactgcagcttcccaacgcggatgccaggagataagcggtcccctaggattactggattgtgcccctttgggcctcgggaaatcctcgtagcagatgaacagaatagagccttgaagagatttagcctcaacggtgattacaaaggcacagtccccgtccctgaaggctgtagcccctgttccgtcgcggctcttcagagcgctgttgcgttttctgcctccgctaggctttacttgatcaaccctaatggcgaagtgcagtggcggcgcgcgctcagcctctcccaggcttcacacgctgttgctgcacttccctctggggacagagtcgcagtctcagttgctggtcatgtcgaggtgtataacatggaaggcagcctggctactagatttattcccggtgggaaagcatctagaggcctacgcgctctcgtattcttgaccactagtccccagggccatttcgtgggtagcgattggcagcagaattcagtggtgatctgcgatggactgggccaagtggtgggggagtataaaggacctggcctgcacggttgccagcccggatccgtcagcgtagataaaaagggatacatttttttgactttgagagaagttaacaaggtggtgatcttagatcctaaagggtctctcctcggcgacttcttgaccgcttaccatggactggagaagccccgcgttactactatggttgacggtaggtacctggtggtttccttatcaaacggtactattcatatttttagggttcgctcccctgatagttag

SEQ ID NO: 14295 - DNA, 1467 bp, synthetic construct
  source 1..1467: mol_type = other DNA; note = Synthetic coding sequence
atggctgctggctcagaggccactacacccgtgattgtcgctgcaggggcaggcggagaggaaggtgagcatgtcaagccttttaagcctgagaaggctaaagaaattatcatgtcattacagcagccagccatcttttgtaacatggtctttgattggcccgctcgacactggaacgccaaatatttgagccaagtgctgcacggaaagcagattaggttccgtatgggtatgaagtccatgtccactgttccccaatttgagacaacatgcaactatgtagaggccactctcgaggagttcctgacctggaattgcgatcagtccagtatctctggtccgttccgggattacgaccattccaagttctgggcctatgctgactacaaatacttcgtgagtcttttcgaggataagaccgacctgttccaagatgtaaagtggtcagacttcgggttccctgggcgcaatggacaagagtctactctgtggattggaagcctcggggcccatacaccctgccacctggattcatatgggtgcaacttggtctttcaggtccagggaaggaagagatggcacctcttcccccccgaggatactccctttctgtatccgactagaattccttacgaagaaagctccgtgttctctaaaataaacgttgtaaatcccgacctgaaaagattcccgcagttcagaaaggcccagcggcacgccgtgactctctctccaggccaggtgctgtttgtgccacgacactggtggcactatgtggaatccatcgacccggtgactgtgtctatcaacagttggatagagttggaagaagatcacctcgctcgggtcgaagaggccatcactaggatgctggtctgcgcgctgaaaaccgctgaaaacccacagaacaccagggcttggcttaatcctactgaagtggaggagacctctcatgccgtgaactgttgttacttaaacgctgccgtgagtgcatttttcgatcggtgcagaacaagtgaggtggttgagatccaagccttgaggacagatggggaacatatgaagaaggaagagcttaatgtttgtaatcacatggaggtggggcagaccgggtcgcagaacttaacaaccgggacagacaagccagaggccgcttctccattcgggcctgacctggttcccgtcgcccaacggtctgaggagcctcccagcgaacgtggcgggattttcggaagcgacggaaaggattttgtggataaggacggggaacattttggaaagctgcattgtgctaaaagacagcagattatgtccaatagcgagaatgcaatcgaggaacagatcgcttctaacacaaccacaaccccccaaaccttcattagcactgacgatctgctggactgtctggtaaaccctcaggtgactcgcatcgtcgctcagctactcattcagggccggtccctttag

SEQ ID NO: 14296 - DNA, 579 bp, synthetic construct
  source 1..579: mol_type = other DNA; note = Synthetic coding sequence
atggcacctaagccaggcgcagagtggagtaccgccctctcccacctcgtgctgggggtcgtcagtcttcacgccgcggtgtctaccgcggaagcaagccgaggcgcagccgccggatttctgctccaggttttggccgccacaacgacactggcacccggcctctccacccacgaggattgcttggccggagcctgggtagctacggtcatcggactgccactgcttgcatttgacttccattgggtgaatggagacagatcaagtgcaaatctactcctcggaggcggtatggtcctcgccgttgctggcggccacttgggccccgaggggaggtctgtcgcgggacaggctatgctgctggtagtagctgtgacaatactgatagtcgcagtgtttacagcaaatacctacggcatgtggggcggtgccatgctgggggttgccggtctcttgagcagattggaagaagatcgcctactcctgctgcccaaggaggacgtgtgccgctgggcgctggctgtgggttcttgggcttattgtagagcactgcacacgcagcggctgcaatgggaatag

SEQ ID NO: 14297 - DNA, 462 bp, synthetic construct
  source 1..462: mol_type = other DNA; note = Synthetic coding sequence
atgacttctgagtctacgtccccccctgtggttccccccttgcactccccaaagtcccccgtctggccgactttccccttccatcgggaggggagtcgagtctgggagaggggtggtgtcccacccagggacctaccttcacccttacctactaaacgcacccgcacttatagtgcaacagccagagccagcgctggaccagttttcaagggtgtctgcaagcagttcagcagaagtcaggggcacggatttataacccccgaaaacggttccgaggatatattcgtgcatgtgagcgacatcgaaggggaatatgtgcctgtcgagggcgacgaagtaacctacaagatgtgccccatacctccaaaaaaccagaagttccaagccgtggaagtcgtgctgacacagctggctccccacactcctcacgaaacgtggagcggacaagttgtggggtcctag

SEQ ID NO: 14298 - DNA, 537 bp, synthetic construct
  source 1..537: mol_type = other DNA; note = Synthetic coding sequence
atgtcgagttttagcagagccccccagcaatgggctaccttcgcacgaatttggtatttgcttgacggcaagatgcaacctccagggaagctcgcagccatggcctctatcaggcttcagggcctgcacaagccagtgtatcacgcgcttagcgactgcggtgaccatgtagtgattatgaatactcgtcatatcgctttctcgggaaacaaatgggagcagaaggtttattcgtcccacacaggctacccagggggttttaggcaggtgaccgcagctcagctgcacttgagggatcccgtggcgatcgtgaagctggccatttatggcatgttaccaaagaacctgcatcgacgtacgatgatggaaaggctgcatctctttcccgacgagtacatacctgaggatattctgaaaaatctggtggaggaactgccacagcccaggaagatccccaagcgcttagacgaatatactcaggaagaaattgacgctttcccccggctgtggactcctcccgaggactaccgcttgtag

SEQ ID NO: 14299 - DNA, 8763 bp, synthetic construct
  source 1..8763: mol_type = other DNA; note = Synthetic coding sequence
atgcgtggcaggcgaggacggcctcctaaacagccagcggcaccggctgccgagcgatgtgctcccgcccctccccccccccctccacccccaactagcggaccaattggaggactgcggagcagacatcgtggaagttcaaggggaagatgggcagccgcacaagccgaggtcgcccctaaaacccgccttagcagtccccgtggagggagcagttcccgtcgcaaacctcctccaccccctcccgccccaccttctaccagtgctccaggtcgcggtggccggggcggtgggggagggcgcacggggggaggaggggggggcggccacctggcacgcacaaccgcagctcgtcgggccgtgaataaagtcgtgtatgatgatcatgaaagcgaggaagaagaagaggaagaggacatggtgtctgaggaggaggaagaagaggatggggacgcagaggagacacaggattccgaggatgatgaagaagacgaaatggaggaagacgatgatgattctgattatcctgaggagatggaggacgacgatgacgatgcctcttactgtactgaatcctcctttaggtcccactctacatactcgtccaccccaggacgcagaaagcctcgtgtccatcgtccaagaagccctattctagaggagaaggatatccctccactcgagttcccgaagtctagcgaagatctgatggttcctaacgagcacattatgaacgtgatcgccatttacgaagtgctcaggaattttgggactgtcctgaggctttcccccttccggtttgaggacttctgcgcagccctcgtatcacaagagcagtgtacactgatggctgagatgcatgtggtcttactgaaagccgtattgagagaggaagacactagcaacaccacatttggcccagccgatttaaaggacagcgtgaattcaacgctgtacttcatcgatggaatgacttggcctgaagtgctgcgcgtgtattgtgaaagtgataaggagtaccaccacgttctgccatatcaggaggctgaggactacccatacggtcccgtggagaataagatcaaagtcctgcagtttctcgtagatcagttcctgacaacaaacattgctcgggaggagcttatgagcgaaggggtgatccagtacgacgatcactgccgggtctgtcacaagctgggcgatctactatgctgcgagacctgttccgccgtataccatctggaatgcgtaaagcctcctctggaagaggttcccgaagatgaatggcagtgcgaggtgtgcgtggctcataaagtgccaggtgtcactgactgtgtagctgagatccagaaaaacaagccatacatacgccacgaacctattggctatgatcgctctagacggaaatattggtttctcaatagaaggctgatcatagaagaggatactgagaacgagaacgagaagaaaatctggtactatagtactaaggttcagcttgcggagctcattgactgcctggataaggactattgggaggccgaactgtgcaaaattcttgaggaaatgagagaggagattcataggcacatggatatcaccgaagaccttacgaacaaagcccgggggtcaaataagtcttttcttgccgccgctaacgaggaaatcctggagagcatcagggccaaaaagggggacattgacaacgttaaatctcccgaagagaccgagaaggataagaatgaaacagagaatgattcgaaagatgcagaaaagaatcgcgaagaattcgaagaccagagtctcgaaaaggactccgatgataagactccggacgacgatcccgaacagggcaaaagtgaggtcggcgactttaaatcagaaaagagcaatggggagttgtctgaaagccccggagctgggaaaggagctagtggcagcacccggattataacaagactccgcaaccccgattctaagctcagtcagttgaaatctcagcaagtggctgcggcagctcacgaagcgaataaactgtttaaggaaggaaaagaggttctggtggtaaatagtcagggcgaaattagtcgtctatccaccaagaaagaagtgataatgaaaggtaacattaacaactactttaaactagggcaggagggaaaatacagagtataccataaccaatatagcactaattcttttgcactgaataagcatcagcacagagaggatcacgacaaacgacgtcacctggctcataagttctgccttacgcccgctggcgaattcaagtggaatggctccgtgcacggttccaaagtactgactataagtacgctaaggctgacaatcacccagctcgaaaacaacatcccttcctccttcctccatcctaattgggctagtcatcgggcaaactggataaaggccgtgcagatgtgtagcaagcctcgggagtttgcactggcacttgccatactcgagtgcgcagtaaagcctgtagttatgttgcctatttggagggagagcctaggccacaccagactgcataggatgacttcaattgagcgggaggagaaggagaaagtgaagaaaaaagaaaagaagcaagaagaggaagaaaccatgcagcaggctacctgggtgaaatacacatttcccgtgaaacaccaggtgtggaagcagaagggtgaggaatatcgcgtcacggggtacggtgggtggagttggatctcaaagacgcatgtttatcgcttcgtgcctaaattgcccggtaataccaacgtgaattaccgtaagtcactggaaggtacaaaaaataacatggacgaaaacatggacgagagtgataagaggaaatgttcgcgatcccccaagaaaatcaagatcgagccagattccgagaaagatgaggtgaaggggtccgatgcggcaaagggcgctgatcagaatgagatggacatctcaaagataaccgagaaaaaggaccaggatgtgaaggagctgctggacagcgattctgacaagccttgtaaggaggagccaatggaagtagacgacgacatgaagactgaatcacacgtcaattgtcaggagagcagtcaggtggatgtggtgaatgtgagcgaaggttttcatctgaggacctcatataaaaagaagactaaatccagcaaattagatgggctgctcgagagacgcatcaagcaattcacacttgaagagaagcaacggctggagaaaattaagctggagggaggtattaaaggaataggaaagactagcactaattcatcaaaaaacctgtccgagtcccccgtgattactaaagcaaaagagggctgtcagagtgactcaatgcgccaggaacagtcccccaacgccaacaacgaccagccagaggatctcatccaaggatgttctgaaagcgactcgtccgtcctccgcatgagcgacccttcccacaccactaataaattatatccaaaggacagagtgctcgatgacgtgtccattaggagccccgaaaccaagtgtcccaagcagaattccatcgagaacgatatcgaggagaaagtgtccgacctggcctcaagagggcaggagccaagcaagtccaaaaccaagggcaatgacttctttatagatgacagtaagttagcgtcagctgatgatatcggcacattgatctgcaagaataaaaagcccttgattcaagaggaatcggacacaattgtgagttcatcaaagtcggccctgcactcctccgtgcccaaatctaccaacgatcgcgacgccacaccgctcagtcgcgctatggatttcgaaggaaaattgggctgcgatagcgagtccaatagcacacttgaaaatagtagtgatactgtgtccatacaagatagcagtgaggaagatatgatcgtgcagaacagcaatgagtcaatcagtgagcagtttcggaccagagagcaagatgttgaggttttggagccccttaagtgcgagctagtgagcggcgagtcaacaggaaattgtgaagaccgacttcccgtgaaaggcaccgaggccaatggcaagaagccctcgcagcaaaagaaactggaggagaggcccgtgaataaatgttctgatcagattaaactcaagaacaccacagacaagaagaacaacgagaacagggaaagcgaaaagaaggggcaacgcacgagcactttccagattaacggaaaggacaacaaaccaaaaatctacctgaagggtgagtgcctgaaggaaatttctgagtcacgggtcgtatcagggaacgttgagcctaaggtcaataacataaacaaaattatccccgaaaatgacataaaatcgctgactgtgaaggaatcggctatccgccccttcattaacggagatgtgatcatggaagacttcaacgagagaaatagttcagagaccaaaagccaccttctgagcagctccgacgcggagggaaactaccgcgattccttggagactctgccgtcgacaaaggagagcgactcaacacagactactaccccttcggccagctgcccagaatctaactccgtcaatcaggtagaagatatggagattgagacaagcgaggtgaaaaaagtgacatcctctcctattaccagcgaagaggagagcaacttaagcaatgacttcatagatgagaacggactgccaataaacaagaacgagaatgttaacggcgaaagtaagcgtaaaacagtcattaccgaagtgacgactatgacctctaccgtggccacagagtcaaagacagtgatcaaggtggaaaagggggacaagcagaccgtcgtgtcctcaactgagaactgcgccaaatctaccgtgaccaccaccaccaccaccgttaccaaactgagtactccaagcactggaggctctgtggatattatatccgttaaggagcagagcaaaactgtggtgaccactactgttaccgacagcttgactactaccggtggcaccctggtgacaagcatgaccgttagtaaagagtacagcacaagggataaggttaaattaatgaaattcagccggccaaaaaagaccagaagtggcacagccctgccttcctaccggaagttcgtaactaagagtagtaagaagagcatcttcgtgctgcccaacgatgatctcaagaagctcgccagaaagggtggtattcgggaagttccctactttaactataatgcgaagccagctttggacatctggccctatccaagccccaggcctacgttcggcataacctggagatacagactgcaaactgtgaaaagcctggctggcgtttctcttatgcttcgcttgctttgggcctccctgaggtgggatgacatggccgctaaggctccacctgggggaggtactactagaacagagaccagcgagaccgagatcaccactaccgaaatcatcaagaggcgagacgtcggtccttacggcatcaggtcagaatattgcatacgcaaaatcatttgtcccatcggggttccagaaaccccgaaggagacacctaccccacagcgcaagggattgaggagttcggctctgagaccaaagagacccgagacccctaagcagaccgggcctgtgattatcgaaacatgggtggcggaggaggagcttgaattatgggaaatcagagcattcgctgagagagtggaaaaagaaaaagcccaggctgtggagcagcaggctaagaaacggctggagcaacagaaacccacagtaatcgctaccagtacgacctctcccacatcaagcaccacctcgacaatttccccggcccagaaggtcatggtcgcccctattagtggcagtgtcaccacaggaaccaagatggtattaaccaccaaggtgggtagcccagccacagtgacattccaacagaacaagaatttccatcagacctttgccacctgggtaaagcaggggcagtccaacagcggtgtggtgcaggtgcagcagaaagtgctcggtatcatacccagctctaccggcacttctcagcagacatttacctcctttcagcccagaactgcaaccgtgaccatacgtccaaacacatcaggttccggcgggaccactagtaactcacaggtgatcaccggaccccagatccgcccgggtatgacagtgatccgcactccacttcagcagtcaactctaggaaaagcaataatcaggacccctgtcatggtgcagcccggagcaccacagcaagttatgacccagattatcagagggcagcctgtgtccactgcggtgagcgcccccaacacagtctcctcaacgcctggccaaaaaagcctgacctctgctaccagcacatctaatatccagtcttccgcctcccaaccacctcggcctcagcaaggccaggtgaagctgaccatggcccagctgacccagttgactcaaggacacggaggaaatcaaggcttgacggtagtcatccaggggcagggccaaacgactggtcagcttcagctgattccccaaggagtgaccgttctgccaggccccggacagcagctcatgcaggctgctatgccaaacggcacggtgcagaggtttctgtttacacctctggccacgaccgctactacagcctccacaacaaccactactgtgagtactacggccgcagggaccggcgagcaacggcaaagtaagctaagcccacaaatgcaggtccaccaagacaagacgctgcctcctgctcaaagtagttcggtgggaccagctgaggcacagcctcagaccgctcagccatctgcccagccacagccccagacccagccgcagtcccctgcccagcctgaggtccagacacagccagaggttcagacccaaacgaccgtgagctctcacgtgcctagtgaggcacagcctacccatgctcaaagcagcaagccgcaggtcgctgcacagagtcaacctcagagcaacgttcagggccaaagccctgtgagagtccagtctccatcacagacccgaatacgccccagcactccctcgcaattatctccaggccagcagtctcaggtccaaactacaacatcccagcccattccaatccaaccacacacttcactgcagatcccttcccagggacagccccaaagtcagccccaggtgcagtcttcaacacagacactttcttccgggcaaacgctaaatcaggtgaccgtgagcagcccgtcgcggccacagctgcagatccagcagccccagcctcaggtaatcgctgtgccccagcttcagcaacaggttcaggtgctgagccagattcaatctcaggtggtcgctcagatccaggcacagcagtcaggcgtgcctcagcagattaagctgcagctgcctattcaaatccagcagtcttccgctgtgcagactcatcagatacagaacgtggtcacagttcaggctgcctccgttcaggagcagctgcagcgggtgcagcaactgagggatcagcagcaaaagaagaagcaacagcagatcgaaattaagcgtgagcatacactccaagcgtcaaatcaatctgaaatcatccagaaacaggtagtgatgaaacacaatgcggtgatcgaacacctgaagcagaaaaagtcaatgactccagccgagcgcgaggagaatcaaagaatgatcgtgtgtaatcaagtgatgaagtatattttggataaaatcgataaggaagagaagcaggccgcgaaaaagagaaagcgcgaggaaagcgttgagcaaaagagaagcaaacaaaatgccaccaagctgtccgccctgttatttaagcataaggaacagcttcgagctgagattcttaagaaacgcgcactactggacaaagatctccaaatcgaggtccaggaggagctgaaaagggacctaaaaataaagaaagagaaggatcttatgcagctcgcccaggctaccgctgtggcggcaccatgtcctccagtcacacccgcgcctcctgctccccccgcccctccgcctagcccaccaccccctcccgctgtgcaacacacagggttgctgtcaacccctaccttgcccgcagcatcccaaaagcggaagagggaagaggaaaaggactcttcctcaaagtccaagaagaagaagatgattagcaccacctccaaagagacaaagaaagacacaaaactctactgcatctgtaaaaccccctatgatgagtcaaagttttacatcgggtgcgatcgctgccagaactggtatcacggacgctgcgtcggaattctgcagtccgaggccgagctgatcgatgaatatgtgtgcccacagtgtcaaagcacagaggatgcaatgactgtactgactccactgactgaaaaggattacgagggactgaagcgggtcctgcgtagtttacaggcacacaaaatggcctggccctttctcgagccagttgatcctaacgacgcacctgattactacggcgttatcaaagagccgatggacctggccacaatggaggagcgggtgcagcgacggtattacgagaagttgacagagttcgtcgcagacatgaccaaaatattcgacaattgcaggtactacaacccaagcgatagccctttctatcagtgtgccgaagtcctagaaagtttcttcgtgcagaagttgaaggggttcaaggcttctcggagtcataacaataaactccagtctaccgcctcttag

SEQ ID NO: 14300 - DNA, 390 bp, synthetic construct
  source 1..390: mol_type = other DNA; note = Synthetic coding sequence
atggccgatccaagggtgaggcagatcaagatcaaaacaggagtcgtgaagcgtttggtaaaggaaaaagtgatgtacgagaaggaagctaaacagcaagaagaaaaaatcgagaagatgagggcagaggacggagagaactacgatattaaaaaacaggccgagatccttcaggagtctaggatgatgatccccgattgtcagagacgactcgaagcggcctatctggatctccagcgcatcctcgtctcaaaggacttctgcgtgatgtttaagttcttcttttctatccagtatatggagtcgcagaaattcaaatacctgactcttaggacttcatggcagtactttctgtttacatgccctttatacagatacattctgaaatag

SEQ ID NO: 14301 - DNA, 582 bp, synthetic construct
  source 1..582: mol_type = other DNA; note = Synthetic coding sequence
atgagcgacgacgattctagagcgagcacatcctcatccagctcatcttcctcaaaccaacagactgaaaaagaaactaacacccccaagaagaaagagtcaaaagtgtctatgtccaagaactccaaactcctttccacctcggcaaagcggatccaaaaggagctggctgatattaccctagatcctcctccgaattgtagcgctggccccaaaggagacaacatttacgagtggaggtcgaccatccttgggcccccgggatcagtgtatgagggcggtgtattttttctcgacattacgtttacacctgagtacccatttaagccccctaaggtgacttttcgcacccggatctaccattgcaatatcaattcacagggagtcatttgcctggacatcttgaaagacaactggagccccgctctcacaatatccaaagttctcctgtccatttgcagcctattaacagactgtaatcctgccgaccccctagtgggctctattgcgacgcagtatatgaccaaccgcgcagagcacgacaggatggcccgacagtggactaaacgatatgctacttag

SEQ ID NO: 14302 - DNA, 1395 bp, synthetic construct
  source 1..1395: mol_type = other DNA; note = Synthetic coding sequence
atgagtctacaattctctaacggatcccggcacgtgtgtctgcgtagcggagcaggcagcgtgaggcctctgaacgggggcgccggtttcgccggttcctctgcttgcggcggctccgtagcaggttcagagttctcttgcgcgctgggtggtggcctgggttccgtgcccggcggatcccatgccggaggcgcactgggaaacgccgcatgcattggttttgctggtagcgagggcggcctgctgagcggcaacgaaaaagtgactatgcagaacctgaatgatagactagcaagttatctggacaacgtgagagccctggaggaggcgaacgcggagctggagaggaagataaaaggctggtacgagaagtatggaccaggttcttgtcgcgggctagatcacgactatagcagataccatctgacaatcgaagaccttaagaacaagattatctcgtccacaactactaacgcaaacgtgattctgcaaatcgacaatgccaggctcgcagcggatgatttcagacttaagtacgaaaacgagttgaccctccatcaaaacgtcgaggccgacataaacggattacgccgcgtactggacgaacttactttgtgtcgtaccgaccaggagctgcagtatgagagcctcagcgaggaaatgacttacctgaagaagaaccatgaggaggagatgaaggcgttgcagtgtgcggccggcgggaatgtcaacgttgagatgaacgctgcgcccggtgtcgacctggccgtgctgctcaacaatatgcgagcagaatacgaggccctggccgagcagaaccgcaaagacgctgaagcttggttcaatgagaagtctgccagtcttcagcagcaaatatcacatgactcaggtgccgccacttttgcccgatcccagctgaccgaaatgagaaggaccctgcaaactctggagattcagctgcaatccctgatggccactaagcatagtttagaatgttccctgactgaaactgaaagcaactactgcacacaactggctcagattcaagctcagattggggctttagaagagcaacttcatcaagtgcggacggagactgaaggacagaagttggagtacgagcatcttcttgatgtaaaagtccacctcgagaaagaaattgaaacctactgccgactgatcgacggagatggcaattcatgtagcaagagtaagggtttcggctccggttcacccggtaattcgagcaaggacctctccaaaacaacacttgtgaagacagtcgtggaagagctggaccagcgcggaaaggtgttatctagccggatacacagcattgaggaaaaaacatcaaaaatgaccaacgggaaaactgaacagagagtccccttttag

SEQ ID NO: 14303 - DNA, 2013 bp, synthetic construct
  source 1..2013: mol_type = other DNA; note = Synthetic coding sequence
atggaagagttccggcgcagctatagtaggctgtgcagagaaagcggggctgagccacaggaagccgtgttgcagcagctccatcagctcccccgtggaaggctcgacctagccacgcagagcctgaccgttgagacctgccgcgctctggggaaactgctgcctcgcgaaaccctgtgtaccgagctcgtgctgtcggactgtatgctctctgaggagggagccactctactgctgcgcggactgtgcgccaacactgttctcaggttcctggacctcaagggtaacaatctacgcgctgccggggccgaagctctcggaaaactgctgcagcagaataagagcatacagagcctgacgctggaatggaactctctcggcacgtgggatgatgcgttcgcgaccttttgcggtggcttggctgccaacggcgccctgcaaagattagacctgcgtaataaccagatcagccacaagggggcagaggagctggcgttggccctgaaaggcaatacaactctgcaacagctggatctgcgttggaataatgtgggactgctgggcgggagggccttgatgaattgcctgccttctaacaggaccctctggagacttgacctggctggcaacaacataccaggagacgttctgagggcagttgagcaggcaatgggccatagccaggatagacttaccacattccaagaaaatcaggctagaactcacgtgctgtcaaaagaagtgcagcacctcagggaggaaaaatctaagcagttccttgatctcatggagaccattgacaaacagagagaggaaatggcaaagagctcgcgagcttctgctgcacgcgtgggtcagctccaggaggctctgaatgaaaggcactccatcataaatgcccttaaggccaagctgcaaatgaccgaggccgcactggctctgagtgagcagaaggctcaggacctgggggaactgcttgccacagccgagcaggaacagctctcgctgtcccagcgtcaggctaaggagctaaagctggaacagcaggaagcggctgaacgcgagagcaagttgctgcgagacctttcagccgccaacgagaagaaccttttgctgcaaaatcaagtggatgagttagaacgcaaattccgatgtcagcaggagcagctgttccagacgcgacaggagatgacttccatgtcggcagagctcaagatgcgagccatccaggctgaggaacgactggatatggagaagcgcaggtgtaggcagtctttggaagatagcgaatctttgcgcataaaggaggttgagcacatgacgcgacatctggaagaaagcgagaaagccatgcaggagcgtgtgcagaggctggaggccgctcggctgtcccttgaagaggagttaagtcgggtaaaagcagccgctctctcagaaaggggacaggccgaggaggagctgataaaagccaaatctcaggcacggctggaggaacagcaacggttggctcatttggaggacaagctgcggctcttagcccaagccagggacgaggcccagggcgcttgcctgcagcagaaacaggtagttgccgaagctcaaactagagtgtctcaactgggacttcaggtggagggactgagaagacgcctggaggaactgcagcaggaactaagcctcaaagatcaagaacgtgtagcggaggtgtctagggttcgggtggagttacaagaacagaatgggagactgcaagccgagctggcagcacaggaagctctgcgggagaaagccgctgcacttgagcggcaacttaaagtgatggcgagtgatcatagagaagccctcctggacagggaaagtgagaatgcctccttgcgtgagaagttacgactgagggaagctgagatcgccaggattcgggatgaggaagcccagagggcatcgtttctgcagaatgctgtgttggcctacgtgcaagccagccctgtgagaacgctctcccctccaaagtag

SEQ ID NO: 14304 - DNA, 1782 bp, synthetic construct
  source 1..1782: mol_type = other DNA; note = Synthetic coding sequence
atggaacctgcgactgccccacgtccagacatggcacctgagctcacccctgaggaagagcaggctactaagcagttcttggaggaaattaacaagtggaccgtacaatataacgtgtcaccactctcttggaacgtcgccgtcaagtttctgatggcccgtaaattcgacgtgctgcgggcgattgagctcttccattcctacagggaaacccgacggaaagaggggatcgtcaaacttaaacctcatgaagaacccctcaggagcgagatcctgtctggaaaattcaccattttgaacgtgagagacccaactggagctagcatagctctgtttacagccaggctacaccatcctcataagagcgtgcaacacgtggtgctgcaggcgctgttctacctgctggatagggccgttgactctttcgagacccagcgcaatggccttgtgttcatttacgatatgtgcgggtcaaactatgccaattttgaactggacttgggaaaaaaagtcctcaatcttctcaaaggcgcttttccggcccgtctcaagaaagttctaatagtcggcgctcccatttggtttagggtgccgtactcgatcattagcctgctcctcaaagataaggtccgtgaacgtatacagatcctgaagacctccgaggtcacccagcacctgccccgagaatgcctccctgaaaacctgggaggatacgtgaaaatcgaccttgccacatggaatttccaatttctccctcaagtcaatgggcatcctgatccgtttgacgagatcatactcttttccttaccgcctgccctggactgggattcagttcatgtgcccggtcctcacgcgatgaccatccaggaactggtcgattacgtgaatgctcgccagaagcagggtatctatgaggagtacgaggatattaggagggagaatcccgtcggtacttttcactgctcgatgtcccccggcaatctcgagaaaaatcggtacggggacgtgccatgcttggaccagactcgggtgaaacttaccaaacgcagcggccacacccaaactgattatataaacgcttctttcatggatgggtataagcagaagaatgcgtatattggtactcaaggccctctcgagaacacatatagagacttctggctgatggtgtgggagcagaaggttctggttatagtcatgactactcgctttgaggaggggggcagacggaagtgcggccagtattggcctctcgaaaaggatagccgcattagatttggatttctgactgtcacgaacctgggcgtcgagaatatgaatcattacaaaaaaaccaccctagagatacacaataccgaagaaagacagaagcgtcaggtgacccacttccagttcctgtcgtggccagattatggcgttccgtcaagcgcggccagtctcatagactttttacgggtggtgaggaaccagcagtctttggccgtatccaacatgggcgctcgctctaaaggacagtgtcccgaaccccctatcgtggtgcattgttcagcgggaattggtcggacagggacattttgctccctggatatttgcctggcccagcttgaggaattggggactctcaatgtgttccagacagtttctagaatgcgaacccagcgggccttctcaattcaaacccccgagcaatattacttttgttacaaggcaattctggagttcgcggagaaggagggcatggtgagctcaggccaaaatctcctggcagtggagtctcaatag

SEQ ID NO: 14305 - DNA, 1884 bp, synthetic construct
  source 1..1884: mol_type = other DNA; note = Synthetic coding sequence
atggaggggctggccgggtacgtctataaggctgcctctgaaggcaaggtgctgactttggccgcgctgcttctgaatcgctcagaatcagatattcgctatctccttggctacgtctcacagcaagggggtcagcggtcaaccccactgatcatagccgcacggaacggacacgccaaagtcgtgcgactcctgctcgagcactaccgggtccagactcagcagacaggcactgtccgctttgacggttacgtcattgacggggccaccgcactctggtgtgccgcgggcgcggggcatttcgaggtagtcaaactgctggtgtcgcatggggctaacgttaatcacaccacagtcacgaattcaaccccactgcgcgcagcttgctttgacgggagactggatattgtgaaatacttggtggaaaataatgccaatattagtattgctaataaatacgacaacacatgcctgatgatcgccgcctataagggccatactgatgtggtgcggtaccttcttgagcagcgcgccgatcctaacgcgaaagcccattgtggggccaccgccctccatttcgctgccgaggctgggcatattgacatagtcaaagaactgatcaaatggcgcgctgctattgtcgtcaatggtcatggcatgactccccttaaggttgccgctgagagttgcaaggccgatgttgtggaactgctactcagccacgccgattgtgaccgtaggagcagaatagaagctttagagcttctgggggcgtcattcgctaacgatcgagagaactatgatattatcaagacttaccactatttgtatcttgctatgttagagaggttccaggatggggataacatcctcgagaaggaggtattgcctccgattcacgcctacgggaatcgaaccgaatgccgcaacccacaagagctcgaatcaattcgacaggaccgcgacgctctgcacatggagggcctcattgttagagagcggattctgggagctgataatattgacgtgtcccaccctataatctatagaggcgcagtatatgcggacaatatggagttcgaacaatgcataaaactctggctccacgcgctgcacctgcgccagaaaggtaatcggaacacgcacaaggacttgttgcgatttgcccaagttttttctcaaatgatccacctcaatgaaacagtgaaggcacccgacattgaatgtgttctgcggtgcagtgtgctggaaatcgaacagagcatgaatcgggtgaagaatattagtgatgctgacgtgcacaatgccatggacaactacgaatgtaatctctatacctttctgtatctcgtctgcatctccacaaaaacacagtgttccgaggaagatcagtgtaaaatcaacaagcagatctataatctcattcacctggacccccgaacacgggaggggtttactctgctccacctcgccgtaaactccaacacccccgtcgatgactttcacacgaacgatgtgtgctctttccccaacgctctcgtgaccaagctcctgctggactgcggagctgaggtgaatgcggttgataacgagggtaattctgccctccacatcattgtgcaatacaataggcctattagcgactttttgacacttcatagcataatcatctcactggttgaagccggggcgcatacggacatgactaataagcaaaataagacgccactggataaatcgaccactggcgtgtcggagatactgctgaaaacccaaatgaaaatgagtttgaagtgtttggcagcaagggctgtgcgagcaaatgatatcaattaccaggaccagatccctagaaccctcgaagagtttgtgggatttcactag

SEQ ID NO: 14306 - DNA, 378 bp, synthetic construct
  source 1..378: mol_type = other DNA; note = Synthetic coding sequence
atgcccagtgaaaagacctttaaacagaggagaactttcgagcaaagagtcgaggatgtccgtcttattagagagcaacacccgaccaaaatccctgtgatcatagagagatataagggggagaagcagttgcccgtactggacaaaactaagttcctggtgcccgaccatgtgaacatgtcagagctgattaaaattatccgccgccgactgcaactgaacgcaaatcaggccttttttctgctggtgaacggacactcaatggtctcagtgagcacaccgatctcagaggtttatgaaagtgagaaggatgaggacgggttcctttatatggtgtgcgccagccaggaaactttcggaatgaaattgtcagtgtag

SEQ ID NO: 14307 - DNA, 3786 bp, synthetic construct
  source 1..3786: mol_type = other DNA; note = Synthetic coding sequence
atggggacgggagactttatatgcatttctatgacaggcggcgctccctgggggttccgcctgcaaggagggaaggaacagaaacagccactgcaagttgccaaaatcaggaaccagagtaaggcctctggcagtggcctttgtgaaggtgacgaggtcgtcagtatcaacggaaacccctgcgccgacctgacctatccagaggtcattaagctaatggaaagcataacggactcactccaaatgctcataaaacgacctagtagtggaatatctgaggccttgatttcagagaatgaaaataaaaacctggaacatctgacccatgggggatacgttgagagcacgacactacagatacgaccagccacaaagacccagtgtacagaattcttcctggcacctgtgaagacagaggtaccattagcagaaaatcagcgtagcggacctgattgtgctgggagccttaaggaggagaccggcccgagctatcagcgggccccgcagatgccagacagccagcgcggtagggttgccgaggaattgatactgcgcgaaaaggtggaagccgtgcaaccgggtccagtcgttgagctgcaactgagcctgtcacaggaacgacataaaggtgcaagtggccctctggtcgccctccctggcgctgaaaaatcaaagagccctgaccctgaccccaaccttagtcatgacaggatcgtccacataaatagcataccgacaaacgaaaaggcagatcctttcctgcgttcttccaaaatcatccagatctcctctggtcgggagcttcgggtgattcaagaaagtgaggcaggggatgctggtctccctcgggttgaggttatcctggattgttccgatcggcaaaagaccgagggctgcagactccaggccggcaaggagtgcgttgattctcctgtggaaggcgggcagtccgaagcccctccgtcgctggtgagcttcgctgtaagtagtgaaggaactgaacagggtgaagatcctcggagcgagaaggaccacagtaggccgcataagcatagggcccgacacgctaggcttaggagatcggagagtttatccgagaagcaggtgaaggaggctaaaagcaaatgtaagagcatcgcgctattgctgacagatgcacccaatcctaatagcaaaggggtgctcatgttcaaaaagcggagaaggagggcccggaaatacactctggtcagctacggcaccggagaattagaaagggaggccgacgaagaggaagagggcgataaagaagacacctgcgaggtggcattcctgggcgcgtctgaaagtgaagtagatgaagagctcttgtctgacgttgacgataatactcaggtcgtgaactttgattgggacagcggcctggtggacattgagaagaagctgaatagaggagacaagatggagatgctcccagataccacgggaaagggagctctgatgtttgcgaagagacgcgaacgaatggaccagataaccgcgcagaaagaggaggataaggtgggaggaacaccatcaagagagcaggatgctgctcagacagacggcctgagaacaaccacatcctaccaaaggaaggaggaggagtcggttaggacacagtcctccgtgtctaagtcttacatcgaagtgtcacatggccttggacatgtcccccaacaaaacggcttctccggaacctccgaaaccgcgaatatacagagaatggtccccatgaatcggacggctaagccgttcccgggctccgtcaatcagcctgcaaccccattttccccaacccgcaatatgacttctcctatcgccgattttccagccccaccgccctactctgccgttactcctcctccagatgccttcagtcggggtgtgtcttctccaatcgctggccccgcccaaccgcccccctggccccagcccgcaccatggagccagccagccttctatgactccagtgagcggatagcaagtagagacgagagaatctcggtcccggcgaagaggacaggaattctgcaagaggccaaacgacgctcaaccaccaagcccatgttcacctttaaggagcctaaggtctctccgaatcctgagttgttaagtttacttcaaaatagcgaggggaaaaggggcacaggcgctggtggtgattccggacctgaagaagattacctttctttgggcgcagaagcgtgtaacttcatgcaaagttcatccgcgaagcagaagactccgcctccagtggctcctaaacccgcagtcaagtcctcctccagtcagcctgtgacccccgtgtctccagtttggtcgccaggagttgcccccactcaacccccagccttcccaacctctaacccctcaaagggaaccgttgtgtcttccatcaaaatcgcgcaaccaagttatccaccagccaggccagcaagtacgctaaatgttgccggcccttttaaaggccctcaggccgccgtcgccagtcaaaactataccccaaaacccacagtgagcacacctaccgttaatgcagtgcagcccggtgctgtcgggccctctaatgagcttcccgggatgtctggcagaggcgcccaactattcgcaaagcgccagtcacgaatggagaagtacgtcgtggactcggacaccgtgcaggcccatgcagccagagctcagtcaccaaccccctctctcccagcaagttggaagtatagctccaacgtgcgagctccccccccggtggcatacaatcccatacactcaccgtcatatcccctagcagctctcaaatcccagccttctgctgcacagcccagcaaaatgggcaagaagaagggaaaaaaaccattaaatgctctggatgtcatgaaacatcagccttaccaacttaatgcctcccttttcacatttcaaccacccgatgcaaaggacggcctccctcagaagtcctctgttaaagtgaacagcgcactggcgatgaaacaagcgctcccaccgcggccagtgaacgcagcaagccccacaaatgttcaagcctcctccgtctatagcgttccagcgtacacctcccctccctccttctttgcagaggcttcttctcccgtgagtgccagccccgtccccgtaggcatcccgacaagtcctaagcaggagtctgcaagttcaagctacttcgtcgccccacggcccaagttttccgctaaaaaaagtggagtgactatacaggaatcaggacggtctctgtcattacctggtcgcagtgtgccgcctcccattagtacaagcccatgggtgtaccaacccacatatagttactcaagcaaaccgaccgacgggcttgagaaggctaataaaaggccgactccctgggaggcggctgccaaatcccctttgggtctggtggacgatgcattccagcccagaaatatccaggagtcaatagtcgccaacgtggtttccgccgctcgtaggaaagtactgccaggtccccctgaagattggaacgagaggctttcttatatccctcaaacacagaaggcctacatggggtcttgtgggagacaagaatacaacgtaactgcaaataataatatgtccaccacgtcacagtatggcagtcagctcccctacgcgtattaccgacaggccagcagaaacgattccgccattatgagcatggagactcgaagtgactattgcctcccagtggcagactataactacaatccccacccaagaggctggcgaagacagacctag

SEQ ID NO: 14308 - DNA, 1146 bp, synthetic construct
  source 1..1146: mol_type = other DNA; note = Synthetic coding sequence
atgagttggacagtacctgtggtacgggcgagccaaagggtgtcctctgtgggtgctaacttcctgtgtctcggcatggccttgtgtccacgtcaagcaacacgcattcccctcaacggtacatggctgtttacgcctgtgagcaaaatggctacagtgaaatctgagctgattgagagatttacgtctgaaaagcctgtgcaccacagtaaagtctcaatcatcggaactggctctgtgggcatggcgtgtgctattagtatactattgaagggactgtcggatgaactagccctggttgacctcgatgaggacaagctcaaaggcgagaccatggatctccagcacggctctccattcacaaagatgccaaatatcgtttgcagcaaagactactttgtgactgccaacagcaacctcgtgataatcacggctggagcacgacaggagaagggcgaaacacgcctcaatttagttcagcggaacgtggcgatctttaagctcatgatcagttcgatcgtacagtatagccctcactgcaagctgatcatcgtaagcaaccctgttgatattctgacgtacgtcgcctggaagctttctgccttcccaaagaatcgcatcatcggctcaggctgtaaccttgacacagctcgatttcggttccttattggacagaaactcggaatacattctgagtcttgccatggctggattctaggggaacatggcgactctagcgtgccagtgtggtccggcgtaaacatagcaggggtccctctgaaggatttgaatagcgacatcgggactgataaggatccagagcaatggaagaatgtgcacaaggaggtgaccgcaaccgcctatgaaattatcaaaatgaagggatatacctcatgggccatcgggctctcagtggccgatctaacagagagcattctgaagaacctgcggaggatccatcccgtatcgaccatcatcaaggggctttacggcattgatgaggaagtctttctgtccatcccctgtatcctaggggaaaatggtattaccaatctgatcaagatcaagctcacccctgaagaggaagcacacctgaaaaagtcggccaagacactgtgggaaatccagaataaacttaaactctag

SEQ ID NO: 14309 - DNA, 861 bp, synthetic construct
  source 1..861: mol_type = other DNA; note = Synthetic coding sequence
atgatggccacaccaaaccaaacggcctgcaatgccgagagccccgtcgctctggaggaggccaaaacctcaggagccccaggcagtcctcaaacccctcccgagagacatgattctggtggctccctgcctctgacaccgagaatggaatcccactccgaagatgaagacctggctggcgcagtaggcggactgggctggaactcccgctctcccaggactcagagccctggtggttgctctgctgaagctgtgctggcccgcaaaaagcaccgtagacgaccaagcaaacgcaagcggcactggagaccttacctggagctgagttgggccgagaagcaacagcgagacgagcgccagtcacaacgtgcctctcgagtgcgggaagaaatgttcgccaagggacagcccgttgctccctataacacgacacaattcctgatgaacgatcgcgaccctgaggaacctaatcttgacgttcctcacggcattagccacccggggagtagcggcgaaagcgaagcaggcgacagtgacggccgaggcagagcccatggagaattccagagaaaagacttctcagaaacttacgaacgtttccatacggagagcttgcagggccgttcaaagcaagagctggtccgagattatctggagcttgaaaaacgcctgtctcaagccgaggaggaaacacgacgacttcagcagctgcaagcatgcaccggacagcagagctgtcggcaggtggaagagctcgccgcagaggtacagcggctgcgcaccgagaaccaaagactgcgacaagagaatcagatgtggaatcgtgagggctgcagatgcgacgaagagcccgggacatag

SEQ ID NO: 14310 - DNA, 1206 bp, synthetic construct
  source 1..1206: mol_type = other DNA; note = Synthetic coding sequence
atggcgcatgtgtccagtgagactcaggatgtgtctcctaaggacgaactaacagcttctgaagccagcactcggtcacccctctgtgaacacacattccctggcgacagcgacctgaggagcatgattgaggagcacgcctttcaagtcctctcccaggggagcctcctagagtcaccatcgtacactgtgtgtgtcagcgaacctgacaaggacgatgatttcctttcgctgaactttccccgcaagctgtggaagattgtggaaagcgaccaattcaagtcaataagctgggacgagaatggtacttgtattgtcataaacgaagagctgttcaagaaggagattctcgaaactaaagcgccttatcggattttccagacagacgcaattaagtcttttgtacgccaactgaacttgtacggcttctcaaagattcagcagaattttcagagatcagccttcctggctaccttcttatccgaggagaaggaaagctcagtgttgtccaagttgaaattctactataaccccaactttaagcgtgggtacccccagctgctcgttcgtgtaaagcgtcgtataggtgttaaaaatgcctctcccatatcaactctgttcaacgaggactttaacaagaaacacttccgtgcaggggcaaacatggaaaatcataatagcgcactcgcggcagaagcatccgaagagtcgctcttctctgcttcaaaaaacttaaatatgccactgaccagagaaagctcagtgcgccagatcattgccaacagcagcgtgcctatacgtagcggtttcccaccaccaagtccctctacctcagtggggcccagcgagcagatcgccaccgatcagcatgctatattaaatcagttgactactattcatatgcacagtcacagcacttacatgcaagccaggggtcatattgtcaacttcataaccacaacaaccagccagtaccacatcatttcacctctccaaaacggctactttggcctcaccgtcgaaccgtcggcagtccctacccggtaccccctggtttcggtgaacgaggccccatatagaaatatgctcccagctggtaacccttggctacagatgcctaccatagctgatcgatcagccgctccacactctaggttggctctgcagcctagcccgctcgacaaataccacccaaactacaattag

SEQ ID NO: 14311 - DNA, 1728 bp, synthetic construct
  source 1..1728: mol_type = other DNA; note = Synthetic coding sequence
atggctatggctccttctccctctctcgtgcaagtgtacacaagcccagctgccgtcgctgtgtgggagtggcaggacggcctgggaacgtggcacccatacagtgcgaccgtttgctctttcattgaacagcagttcgttcagcagaaaggacagagattcggtctcggcagccttgctcactccattccactgggccaggcagatccaagcctagcaccatacatcatcgacctgcctagttggactcagttcagacaggataccggcacgatgagggcagtcagaaggcatctgttccctcagcattcagcacctggccgaggcgtggtgtgggagtggctgtcagatgacggaagttggacagcatatgaagcatcagtttgcgactacctggagcagcaggtggcaagaggaaatcagttggtcgatctggcgccccttggatacaactacactgtaaactatactacccatactcagacaaacaaaacatcatccttttgccgcagtgtaaggcggcaggccgggcccccttatcccgtcaccacaataattgcccctccaggacacacaggcgtcgcctgttcttgccaccaatgtttgtcagggtccagaacaggtcccgtcagcggtagataccggcacagcatgactaacttaccggcctaccctgtgccacagcacccccctcataggacggcgtctgtcttcggcacacaccaagcattcgctccgtacaacaagcctagtctgtccggggcacgttccgcccctcggctcaacaccacgaacgcttggggcgctgctcctccctccttagggtctcagcctctgtacaggtcctctctttcacatctcggcccgcagcatctaccaccggggtcatctaccagcggagctgtaagtgcttctctgccatccggaccatcttcgtcccccggctccgtgccagcaacggttccaatgcagatgcctaaacctagtcgcgtgcaacaggcacttgccggtgccacacctaagcccgagcccgagcccgagcaggttattaaaaattacacagaagaactgaaggtacctccagatgaggactgcataatctgtatggaaaaattgtcgacggcttcgggctattctgacgtcactgactctaaggcgataggcagcctggctgtggggcatctcactaagtgttctcacgcctttcatttgctttgccttctggcgatgtattgtaacgggaacaaagatggctcgctgcagtgcccatcctgtaaaacaatttatggtgagaagacaggaactcagccacagggcaaaatggaagtactcagatttcagatgtcattgccagggcacgaagattgcggcaccatcctcattgtctacagcatccctcatgggatccaagggcccgagcaccccaaccccgggaaaccatttacggcacggggcttcccgcgccagtgctacctgcccgataatgcacagggtagaaaggtgcttgaactcctgaaggtggcttggaaacgcagactgatcttcacagtggggaccagctccaccacgggcgagactgataccgtcgtgtggaatgagatacatcataaaaccgaaatggataggaatattaccgggcacggttaccctgatcccaactacctacagaatgttctggctgagttggctgcgcaaggggtgacagaagattgtttggaacagcagtag

SEQ ID NO: 14312 - DNA, 1095 bp, synthetic construct
  source 1..1095: mol_type = other DNA; note = Synthetic coding sequence
atggagcacaacggttcagcaagtaacgcagataagatccaccagaataggcttagcagtgtgacagaagatgaagatcaggacgccgccctcacaattgtgactgtcctggataaagtagcctcgatcgtggatagtgtacaggcatcacagaaaaggatcgaggagcgacaccgtgaaatggaaaatgcaatcaagtccgtgcagatcgacctcctgaagttgtcacagtcccactctaacaccggacatattattaataaattattcgaaaaaacacgcaaagtgtcagcccatatcaaggatgtgaaagccagggttgaaaagcaacagatccacgttaagaaggtcgaggtgaagcaggaagaaatcatgaagaagaataaatttcgagtcgtcatctttcaggagaagtttcgctgccccacatcattgtcagtggtgaaggatcgtaatttaacagagaatcaggaagaggacgacgatgatattttcgatccacctgtggatctgtctagcgatgaagagtattatgtggaggagtcgcggtccgccagactgcgcaagagtgggaaggagcacatcgataacattaagaaggccttttcaaaagagaatatgcagaagacaaggcagaacttggataaaaaggtcaatcgtattaggaccaggattgtgaccccagagaggagagaaaggttgaggcaatccggggagcgcctgagacaatcaggggagagactgcgccagtccggcgagcggtttaaaaagagtatatctaacgcggccccttccaaagaggcattcaagatgcggagccttcgaaaaggtaaggatcgtactgtcgcagagggagaagagtgcgctcgggaaatgggtgtggatataatcgcaaggtccgagtctctgggacctatcagcgagctgtacagcgatgagttgtccgagcccgaacatgaagccgcacggcccgtgtacccgcctcatgaaggtagagaaatccccacacctgagcccctgaaggttacatttaagtcccaagtgaaggtcgaagacgatgagtcactgctcctggacctgaagcattctagctag

SEQ ID NO: 14313 - DNA, 1266 bp, synthetic construct
  source 1..1266: mol_type = other DNA; note = Synthetic coding sequence
atgccaaccctcagcgtgttcatggacgttcccctggctcacaaattggaaggttcgctccttaagacctacaagcaggacgattaccctaacaaaatctttttggcctacagggtctgtatgacaaacgaaggccacccttgggtgagtctggttgtgcagaaaacccgactgcagatctcccaggatccttcactcaattatgaatacctgccgacaatgggccttaagtcttttattcaggcctctctcgccctgttatttggcaagcactctcaagcaatcgtagaaaatagggtgggtggcgtgcacaccgtcggcgactcaggggcatttcaactaggagtccagttcctgcgcgcatggcataaagacgcgagaatcgtctacataatatctagccagaaggagctgcatggtttagtcttccaggacatgggctttacagtgtacgagtatagtgtttgggaccctaaaaagctgtgtatggaccccgatatcctcctgaacgttgtcgaacagatccctcacggatgcgtgttggtgatgggcaatataattgactgtaaactaaccccaagcgggtgggcaaagctcatgagtatgattaagtcgaagcagatatttccctttttcgacattccgtgccaaggtctctacacttctgatttagaagaggacacacgcatcctgcagtacttcgtgtcccagggcttcgaatttttctgttcccaaagccttagtaagaattttggcatttatgatgaaggagtaggcatgcttgtcgtcgtcgccgtaaataatcagcagctcctctgtgttcttagccagctcgagggccttgcccaagcgctgtggcttaacccacccaatacgggcgcaagggtgattacgagtatcttatgtaaccctgccctcctgggagagtggaaacagtctctgaaggaggtggttgagaacattatgttaaccaaagaaaaggtcaaggagaagctccagttactgggcactccagggagctggggccatattacagagcaaagcggaacgcacggctatctagggcttaattcccagcaggtggaatatctggtccgcaaaaaacacatatacattcccaagaatgggcagatcaacttctcttgcattaatgctaacaacatcaactatatcactgaaggtatcaacgaggctgtgctgctgaccgaatcttccgaaatgtgtttacccaaggagaagaagaccctgatcgggattaagttgtag

SEQ ID NO: 14314 - DNA, 576 bp, synthetic construct
  source 1..576: mol_type = other DNA; note = Synthetic coding sequence
atgggaaagagctgtaaggtagtggtgtgtgggcaggcatccgtcggcaagacatctatactagaacagttgctttacgggaatcacgtggtgggttcggaaatgattgaaacccaagaagacatttacgtggggtccatagaaactgatcgaggcgttagagaacaggtgaggttttatgacacccgtgggttgcgcgacggcgcagagctgccccgacattgcttctcctgcacggatggctacgtgctggtgtattcaactgatagcagggaatcattccaaagagtcgagctgcttaaaaaggagatcgacaaatcaaaggataaaaaagaggtcacaatcgtggtcctgggtaacaaatgtgaccttcaggaacagcggcgcgtggaccctgatgtcgcccagcactgggctaagagcgagaaggtgaaactctgggaagtgagtgtcgctgataggcggtcattactcgagccattcgtgtacctggcttccaaaatgacccagccacagagcaagagcgcatttcccttatctcggaagaataagggatctggaagtttggatggatag

SEQ ID NO: 14315 - DNA, 3207 bp, synthetic construct
  source 1..3207: mol_type = other DNA; note = Synthetic coding sequence
atggtctcttctgaccgccccgtctctctcgaggatgaagtgtcgcactccatgaaagagatgatcgggggctgctgtgtctgttcagacgaacgaggatgggccgaaaatcccctggtgtattgcgacggacatggttgtagtgttgcagtgcatcaggcatgctatggcatcgtgcaagtaccgactggaccatggttctgtagaaaatgtgaatctcaggaacgtgcggcgagggtgcggtgtgaactttgtccacacaaggatggggccctgaaaaggaccgacaatgggggctgggctcacgttgtgtgcgcactgtacattccagaggtgcagttcgcaaatgttagtacaatggaacccatcgtcttacagtccgtcccccacgataggtacaataagacctgttatatttgcgatgagcaagggcgcgagagcaaagccgccactggagcctgtatgacctgcaataaacacgggtgccggcaggcattccatgtcacatgtgctcagtttgccgggctcctgtgcgaagaggaagggaacggggctgacaacgtacagtactgcggctactgtaaatatcatttctccaagttaaaaaagtccaaaaggggaagcaaccgtagttacgaccagagcctgtccgatagttcttctcatagccaagacaagcatcacgagaaggaaaaaaagaaatacaaagagaaggacaaacacaaacaaaagcacaaaaagcagccggaaccaagccctgcactggtacccagcctgactgtgactaccgaaaagacatacactagtacaagcaataacagtatctcaggtagcctgaagcgcctggaggacaccaccgcgagattcactaatgcgaactttcaggaggtgagtgcacacacatcttctggaaaggacgtttcggaaacgagaggctccgagggaaaagggaagaagtcctcggcacacagcagtggtcagcggggtaggaaacccggcggcgggcgtaaccctggcaccactgtgtctgccgcttccccttttccccaaggctctttttctgggacacccgggagcgttaaaagctcttctggcagttcagtgcagtctccccaggacttcctgtcctttacggacagtgacttgcggaatgactcctactcgcactctcaacagtcatccgccactaaagacgtccacaaaggagagtccgggagtcaagaaggaggggtcaacagcttctcaacactgataggactgcctagcacaagtgctgtgacgtcccaaccaaagtcatttgaaaactctccaggcgatttggggaatagcagcctgcctactgctggttataaaagagcccagacaagtggaatcgaagaagagacagtcaaggagaaaaagaggaagggtaataaacaatctaagcatggtccagggagacccaaaggcaacaagaaccaggagaatgtgagtcacctctccgtgtcctccgcatcccccacctcctctgttgcatccgctgctgggtcaatcacatcttcaagtctgcagaagtccccgactctgctgcggaacgggtcgctccagtctctgtccgtgggctcctctccagtcgggagtgagatttctatgcagtacaggcacgacggggcttgccctacaaccaccttcagcgagctccttaacgcgattcacaacggtatttataatagtaacgacgtggcagtttcttttccgaatgtcgtttctgggagcggatcgtctacaccagtcagctctagccacctcccacaacagagttctggtcacttacaacaagtgggagcgttatctccgtccgccgtctctagcgccgcacccgccgtcgctaccactcaggccaacactctatcgggctcttccctgtctcaagctccctcccacatgtatgggaaccgctctaattcaagcatggccgccttaatagcgcagtccgagaacaaccagaccgatcaggatctgggggacaattctagaaacctggtgggtcgcggaagcagccctcggggttctttatcgccccggtctccggtttcatcactgcagatccggtacgatcagcccggcaatagctccctggaaaatttgccacccgtggcagcgagcatcgagcagcttttggaaaggcagtggagtgagggacaacaattcttgcttgagcaaggcacgccatcagatattctcggcatgctaaaaagcttgcatcagctgcaagtcgagaaccgccgactagaagagcagatcaaaaacctgactgccaaaaaggagcgccttcagctgctgaatgctcagctctccgtccctttccccacaatcactgccaatccgtccccaagccatcagatccataccttctccgctcagactgcacccacaaccgactccctcaatagctcgaagtccccccatatcggaaacagcttcctgccggacaatagcctcccagtgctgaatcaagatttgacgagcagtggacagagcacttcatcaagtagcgccctgtctacgcccccgcctgcaggccagagccctgctcagcagggctcaggagtctccggggtgcaacaggttaacggagtgactgtgggcgcactggccagcggtatgcaaccagtcaccagcaccatacccgcggtgagtgccgtgggagggatcatcggcgccttgccaggcaatcagcttgcaattaacgggatcgtaggcgccttgaatggcgtgatgcagacgccggtgactatgtctcagaacccaaccccacttacacacacgacagtaccaccaaatgcgacccacccgatgccggccacattgaccaatagcgcctctggactgggcctgcttagtgaccaacagcggcaaattctcatccatcagcagcaattccagcagctcctcaactctcagcagctaaccccggagcagcaccaggcttttctctaccagctgatgcagcaccaccaccaacaacaccaccagccagaactgcagcagcttcagatcccagggccaactcagattcctattaacaacttactggcaggcacccaggcaccccctcttcataccgcaactactaaccccttcctgacaattcacggagataacgcatctcaaaaggtggcccgcttgagcgataaaactgggccggtcgcccaggaaaaatcttag

SEQ ID NO: 14316 - DNA, 1353 bp, synthetic construct
  source 1..1353: mol_type = other DNA; note = Synthetic coding sequence
atgtcctgtctgatggtggaacgctgtggggaaattctgttcgaaaatcctgatcagaatgctaaatgtgtctgcatgctgggcgacatccggctgaggggacagaccggggttagggccgagcgacgcgggagctatccctttatcgacttcagattgctgaacagtacaacatatagcggggagatcggcacgaagaagaaagtcaagaggttgctaagcttccaacggtactttcatgcgtcacggttgctgcggggtatcatcccacaggctccactccatctgctggacgaagactatttgggccaggccagacacatgctaagcaaggttggcatgtgggacttcgatattttcctgttcgaccggctgaccaacgggaattctttggtcaccttgctctgtcacctgttcaacacccacggactgattcaccactttaagctcgacatggttaccctgcataggttcctggtaatggtccaggaggattaccactctcaaaatccttaccataacgccgttcatgcggcagatgtgacccaagcaatgcactgttatctaaaagagcctaaattggctagtttcttgacccccctcgacattatgctgggattgcttgctgccgctgcccacgatgtggaccatcccggggtgaaccaaccatttctgatcaaaactaaccatcacctcgcaaacctatatcagaatatgtccgtactcgaaaatcatcactggagatccaccatcggcatgcttagagaaagccgccttctggcccacttgcccaaggagatgactcaggatattgagcagcagctgggaagcctgatccttgcaacagatatcaatcgccaaaatgagtttttgactcggctgaaggctcacctgcacaataaagacctgagactagaagacgctcaggatcgtcatttcatgctgcagatcgcacttaagtgcgccgacatttgtaacccgtgccgtatatgggagatgagcaaacaatggagtgaaagagtgtgtgaggaattctatagacagggggaactagagcagaagttcgaactggaaatctctcccctttgtaaccagcagaaagattccataccttcaatccagattggcttcatgtcttacatcgtcgaaccactttttcgggagtgggctcactttaccggcaattctactttgtccgagaatatgcttgggcatttggcacacaacaaggcccaatggaagagtctgcttcccaggcagcaccgatcccgaggaagctccggttccggaccggatcacgaccatgccggccaggggacagagtcagaggaacaggaaggggactcaccctag

SEQ ID NO: 14317 - DNA, 2268 bp, synthetic construct
  source 1..2268: mol_type = other DNA; note = Synthetic coding sequence
atggcaggctgtatacctgaagaaaagacctatcgccgctttctggagctgttccttggcgaattcaggggcccctgcggcggcggggagcctgaacccgagcccgagccggaaccagagccagagcccgagagcgagccagagcctgagccagagttagtggaggctgaagctgccgaggccagtgtagaggagccaggagaagaggcggccacagtggccgctaccgaagagggggaccaagaacaggatccagaacctgaggaggaggctgccgtggaaggagaagaggaggaggagggcgccgcgactgccgcagctgcacctgggcattccgcggtcccccctcccccccctcagctccctcccctgccccctctgccccggcccctctccgaacggattactcgcgaagaggtggagggcgagtcccttgatctctgcttgcaacagctgtataaatacaattgcccatcattcttggcggcggcattagcccgggcgaccagcgatgaagtcctccagtccgacctgagtgcccactacatacccaaggagaccgacggcaccgaaggcacggttgaaatcgagactgtcaaactggctcgctctgttttctccaagctccacgaaatctgctgctcttgggtgaaagacttcccactgaggcgtcgaccacagctctactacgagacttccatccatgccatcaaaaatatgaggagaaagatggaggacaagcacgtgtgcatcccggactttaatatgctgtttaatctcgaggaccaggaggaacaagcatatttcgctgtctttgatggacatgggggggtcgatgctgcaatctacgcttctatccacctgcacgtgaaccttgttcggcaggagatgtttccacacgatcccgcagaagctttgtgtagagccttcagagtgactgacgagagattcgtgcaaaaagctgctagggagagcctgagatgcggtacaactggcgtggtgactttcattcgtggcaacatgctccacgtcgcgtgggtgggcgacagccaggtcatgttagtgcggaagggtcaggccgttgaactgatgaaacctcacaaaccagatcgcgaagatgaaaagcaacgaatagaggcgcttggcggctgtgttgtttggttcggtgcatggcgagtcaacgggtcgctttcagtgtcacgtgccattggggacgctgagcataagccatacatttgcggggatgccgactctgctagtactgtacttgatgggactgaggattatcttattctcgcctgcgatggtttttatgacactgtcaaccctgatgaagcagtgaaagtggtgagcgaccacctaaaggaaaacaatggcgatagcagtatggtagcccataagctcgtggcatctgctagggacgcgggaagctccgacaatatcacagtcattgtcgtttttctgcgtgatatgaacaaagccgtgaacgttagcgaggagagtgattggacagagaacagtttccagggcggtcaagaggacggtggggacgacaaggaaaatcatggcgagtgtaagcgcccctggccacagcaccagtgttccgccccagctgaccttggatacgacggcagggtagacagtttcaccgatcggacttctttaagccctgggtcccagattaatgtgctggaagacccagggtacctggacctgacacagatcgaggcaagtaagccccactccgcacaattcctcctgccagtggagatgttcggccccggagctcccaaaaaggccaacctgatcaacgaattgatgatggaaaagaagagtgtgcaaagctcccttcccgagtggtccggcgctggggagtttcctactgcctttaatcttggtagcacaggggaacagatctatcggatgcagtctctgagcccagtatgtagcggactggagaacgagcagtttaaatcgccaggaaatagggtgtcacgattgagccacttgcgtcaccattatagcaaaaaatggcatagatttagattcaaccctaaattttattcttttctgagtgcccaagaacctagtcacaagattggtacatcattatcctctctcacaggctccgggaagcggaatcgaattagatcaagcctcccctggaggcagaacagctggaaagggtattccgaaaacatgaggaagctccgaaaaactcatgacatcccatgcccggatttgccatggagttacaaaatcgaatag

SEQ ID NO: 14318 - DNA, 771 bp, synthetic construct
  source 1..771: mol_type = other DNA; note = Synthetic coding sequence
atggcttcacgatatgaccgcgccatcactgttttttcacctgatgggcatctgtttcaggttgagtacgcccaagaggccgttaagaagggatctacagccgtcggtatccggggtactaacattgttgttctcggagtggagaagaaatccgttgctaaactccaggatgagaggactgtgcgaaagatatgcgcactcgacgaccacgtctgcatggcctttgcagttttgacgatctttatcggcctgacagccgatgctcgtgtggtgatcaacagagctagagttgaatgtcagtcacacaaattaacagtcgaggaccctgtcaccgtggagtatataacaaggtttattgccacgctaaaacagaaatacacacagtcgaacggacggcgaccttttggcatatctgccctaatcgtgggcttcgatgatgacggtatatcgcgcctttaccagactgatccaagcggtacctatcatgcttggaaggcaaatgcaattggacgctccgcaaagaccgtgagggagttcctcgagaagaactatacagaggacgccatcgcgtcagatagcgaagcaatcaagctcgctattaaagcccttcttgaggtcgttcaatcaggcggaaaaaacattgaattagcgatcattcggcgtaatcagcccttgaagatgttcagcgccaaggaggtcgagttgtacgtgacagaaatcgagaaggaaaaagaggaggccgagaagaagaaaagcaaaaagtccgtgtag

SEQ ID NO: 14319 - DNA, 3108 bp, synthetic construct
  source 1..3108: mol_type = other DNA; note = Synthetic coding sequence
atggcacctcgtctccagctggagaaggcagcatggaggtgggctgaaactgtaaggcctgaggaggtctcccaagagcacatcgagacagcatacaggatttggctggaaccatgcattcgcggggtgtgtcgcagaaactgcaagggtaatcctaattgtctcgtggggattggcgaacacatctggctgggggagattgatgagaacagtttccataacatcgatgaccccaattgcgagcggagaaagaagaactccttcgtgggactgaccaacttgggcgcgacatgttacgtaaatacatttctgcaagtctggttcctcaacctagagctgcggcaggcactgtacctctgtcccagtacctgcagtgattatatgctgggggatgggatacaggaggagaaagattacgaacctcagacgatatgtgagcatcttcagtatctgttcgcgttattgcagaacagcaacaggcgctatatcgatcctagcggcttcgtcaaagccctgggccttgacactggccaacagcaagacgctcaagaattcagtaaattgtttatgtccctgctagaggataccctgtccaagcagaaaaaccccgatgtgagaaacattgtccaacaacagttctgcggcgagtatgcctacgtaaccgtgtgtaatcaatgtggccgggaaagcaaattgctgtctaaattttatgaactcgaactgaacattcagggccataagcagctcacagattgtatttccgagttcctcaaggaggaaaagctagaaggcgataatagatacttctgcgagaactgtcagtcaaagcagaatgcaaccaggaagatcagactgctgagtctaccatgcaccctcaatttgcagctgatgcgctttgtgtttgacaggcagaccgggcacaaaaaaaagctgaacacttacatcggatttagtgagatcttagatatggagccttacgtggagcacaaaggcggttcttatgtgtacgagctatccgcagttttgattcaccgcggcgtgtcagcctacagcggtcactacattgcacatgttaaagatccacagtctggagagtggtataagttcaatgacgaagatattgaaaagatggaaggcaaaaagcttcagctcggaatagaagaagacctggctgagccaagcaaatcgcagacacgcaaacccaagtgcggtaaggggacacattgctccagaaacgcctacatgctcgtataccgcctgcagacccaggagaagccaaatacgacagtgcaggtacctgcatttctgcaggaattggttgaccgcgacaatagcaaatttgaagagtggtgcatcgaaatggccgagatgcggaagcaatccgtggataaagggaaggcaaaacacgaggaggttaaggagctgtaccaacgcctccccgctggcgcagaaccttatgagtttgtatctctggagtggctgcagaaatggctggacgaatcaacccccaccaagcctatcgataatcacgcctgtctgtgcagtcacgacaaacttcatcccgacaagatttctatcatgaaacgaataagcgagtacgccgccgacatcttctatagtaggtacgggggcggtcccaggctcacagtcaaggcgttgtgtaaagagtgcgtggtggaacggtgtcggatcctacggttgaaaaatcaattgaacgaggattataaaaccgtcaacaacctgcttaaagccgccgttaaaggctcagatggcttttgggttggtaagtcttcattacgatcctggcgccagctggcactagagcagttggacgaacaagatggagatgccgagcagtccaatggcaagatgaatggcagcactttgaacaaagatgagtccaaggaggaacgcaaggaggaagaggaacttaactttaacgaagatatcctgtgtccacatggggagctttgtatcagtgaaaatgagaggcgcctggtgtctaaggaggcatggtccaagttgcagcagtacttccctaaagcccccgaatttccttcttataaggaatgttgcagtcagtgtaaaattctggagcgggaaggcgaagaaaacgaagcccttcacaaaatgatagccaacgagcagaaaacatctctacctaacttgtttcaagacaaaaatagaccgtgcctttctaactggccagaggatactgacgtgttatatattgtgagtcagttcttcgtcgaggaatggcgaaaattcgtgcgtaaaccaacacggtgttcccccgtcagttcagtgggtaattccgcactcctgtgtccccatggtggattgatgttcacttttgcgtctatgacaaaggaggattcgaagctgattgctctgatatggccaagtgaatggcagatgattcagaaattattcgtggtcgaccatgtaatcaagattacccggatcgaggtgggcgacgtcaatccatccgaaacccaatatatctccgagcctaagctatgtcccgagtgccgggagggactgctatgtcagcagcagagggacctgagggagtatacgcaggccacgatatatgttcataaggtggttgacaacaaaaaggtgatgaaagactcagctccagagttaaacgttagcagctccgagaccgaggaagacaaggaagaggctaagcccgacggcgagaaagatcccgatttcaatcagagcaatggaggaactaaaagacagaagatctcccatcagaattatatagcctaccaaaagcaggtaattagacgctccatgcgccatcggaaagttagaggagagaaggcgcttttggtgtcagctaaccagacattgaaggaactgaaaatccaaattatgcacgccttttccgtggctcctttcgatcagaacctgagtatcgacgggaaaatcctcagtgacgattgtgcaactttggggaccctgggagtcatccctgagtctgtgatcctgttaaaggctgatgaaccaatagccgattatgcagccatggacgatgtgatgcaggtctgcatgcctgaagaaggcttcaaagggacgggcctcctaggccactag

SEQ ID NO: 14320 - DNA, 2382 bp, synthetic construct
  source 1..2382: mol_type = other DNA; note = Synthetic coding sequence
atgcttatccaatcagagaagaagacacagctttcgaagaccgaaagcgtgaaggaatctgaaagcctgatggaatttgcccagcctgagatccagcctcaggaatttctgaatagacgctatatgaccgaagttgactacagtaacaaacagggcgaagagcagccctgggaggcggactacgcacggaaacctaatctacctaaacggtgggacatgctcactgagccggacgggcaggaaaagaagcaggagagttttaagagctgggaagcctctggtaaacatcaggaagtttctaagccagccgtctccttggagcaaaggaagcaggacacttcaaagctgaggtcaactctgcccgaggaacagaaaaagcaggagatttctaagagtaaaccgtcacctagccagtggaagcaagacacaccaaagagcaaggcaggctacgtacaggaggagcagaagaaacaggagacccccaagctctggccagtacaactgcaaaaggaacaggatcctaagaaacagacccccaagtcctggacaccatccatgcagagtgagcagaatacgacaaagagctggacaaccccaatgtgtgaggagcaggacagtaagcagcccgaaacccccaaatcctgggagaataatgtagaatctcagaagcacagcttgacctcacaatcgcagatttctcccaagagttggggggtggccacagcctcactcatcccgaacgatcagctgctgcctagaaagctgaacaccgagccgaaggacgtgcctaaaccggttcaccaacccgtagggagttccagcacactccccaaagaccccgtacttcgcaaggagaaattgcaggatctgatgacacagatccagggaacatgcaattttatgcaggaaagcgtacttgacttcgataagcctagcagcgcaatccccaccagtcagcccccctccgcaactcccggatcccctgtcgcaagcaaagagcaaaatctgagtagccaaagcgactttctgcaggagcccctccaggctacttcatcccccgtgacttgttctagcaatgcttgccttgtaaccaccgaccaagcctccagtggctccgagacagagtttatgacctctgagacccccgaggccgcaattccccctggaaagcagccttctagtttagcaagccctaatccacccatggctaaaggatcagaacaaggcttccagagccctccagctagcagttctagcgttaccattaacaccgcgccgttccaggccatgcagactgtcttcaacgtgaatgcaccactgcctccaagaaaagagcaggaaattaaggaaagcccgtatagtcccgggtacaaccaatcatttaccacggctagtactcaaaccccaccacagtgtcagttgccctcgatacacgtagaacagactgtacattctcaggaaaccgccaactatcacccggacggtaccatccaggtgagcaatggttccttagccttctaccctgcccagacgaatgttttccctagaccgacacagcctttcgtgaatagtaggggttccgttcgagggtgcactcgtggaggccgcttaattactaactcttaccggagcccaggaggctacaaagggttcgacacttacaggggattacccagcatcagcaatggcaactactctcagctgcaattccaggccagggagtacagtggcgcaccgtactcccagagagataatttccagcagtgctataagcgcgggggcacctcgggaggcccgagggccaacagcagagctggctggtcggactcgtctcaggtttcgagccccgaacgggataacgagacatttaacagcggggatagcggacagggcgacagcaggtctatgaccccagtcgatgtacctgtcactaaccccgctgctacaattctgcccgtccatgtatacccactgccacagcagatgcgggtggcctttagtgctgccagaacatccaacctcgcccccggtaccctcgatcagcccattgtgttcgacctgctgttaaacaaccttggggagaccttcgatctgcagctgggtagattcaactgccccgtgaacgggacatacgtttttatttttcatatgttaaagttagctgtgaacgtacctttgtacgtaaatctgatgaaaaatgaggaagtccttgttagcgcatatgctaacgacggagcacctgatcatgagacagcctccaaccacgccatcctccagctcttccagggcgaccagatttggcttcgcctgcaccgtggagccatttacggatctagttggaaatacagtactttcagcggttatttactgtatcaggattag

SEQ ID NO: 14321 - DNA, 1083 bp, synthetic construct
  source 1..1083: mol_type = other DNA; note = Synthetic coding sequence
atggaagaactttcccaagccctggcttctagcttctctgtgtcacaggatctgaactcaacggctgccccgcacccaagactgagccagtacaaaagcaaatattctagcctagaacagagtgagaggcggagaagattactggaactgcaaaagtcaaagcggctagactacgtaaaccacgcccgcaggctggccgaagacgattggactggcatggagtcagaggaagaaaataagaaagacgatgaggagatggacatcgacacagtaaagaaactgccaaaacactatgctaaccaattgatgctctcagagtggttgattgatgtcccatctgatctgggccaggagtggatcgttgttgtgtgtccagtgggcaagcgcgcactaatcgttgcttctcggggaagcacgagcgcgtacactaaaagtggctattgcgtgaacaggttttcttcgctcctgcccggcggcaaccgcagaaactctactgcgaaggattacactatcctggattgcatttacaatgaggtcaatcagacctattacgtgctcgacgtgatgtgctggcggggacaccccttctacgattgtcagactgacttccgcttttattggatgcactcaaagctgccagaggaggaaggattaggagaaaaaaccaagctcaatccctttaaattcgtggggctgaagaacttcccctgtacaccagagagtctgtgtgacgtactgtcaatggactttcctttcgaagtagatgggctcctcttctaccacaaacagacacattactctcccgggtcaacccccttagtggggtggctcagaccctatatggtgagcgacgtgcttggcgttgcagtgcccgccggtccccttactacaaagccagactatgccggccaccagcttcagcagataatggagcataagaagtcacagaaagaagggatgaaggaaaaattgactcacaaagcgtctgaaaacggtcattacgaactcgagcacctgtctacccctaaactgaaaggaagtagtcacagtcctgaccacccgggctgcctgatggaaaactag

SEQ ID NO: 14322 - DNA, 525 bp, synthetic construct
  source 1..525: mol_type = other DNA; note = Synthetic coding sequence
ctcatccataaaccgctgaagcgggctataaccacactcatggccggaattctgaggttagtagtccaatggccgcccgggagactgcagacagtaacaaaaggtgtggagtcccttatctgtactgattggatccggcacaaatttactcgaagccgtatccctgaaaaagtgttccaggcttcccccgaggaccacgagaaatacggcggagatcctcaaaacccccataagttacatatcgtcacgcgcataaaatcgaccaggcgtcggccatattgggaaaaagacatcatcaagatgctcggcctggagaaagcgcatactccccaggtgcataagaacatcccgagcgtgaacgccaagttaaaagtggtaaagcatctcattaggataaagcccctgaaattaccccaggggcttcccgctgaggagaacatgtctaacacatgcctgaagagtaccggggaactggtggtgcaatggcatctgaaacccgtcgaacagaaggcacacgaatcgtag

SEQ ID NO: 14323 - DNA, 1434 bp, synthetic construct
  source 1..1434: mol_type = other DNA; note = Synthetic coding sequence
atggccacatatacctgcataacatgtagagtagctttccgggacgccgacatgcagcgggcacactacaaaacggattggcatcggtacaacctccgcagaaaggtggcctccatggccccagttactgcggaagggttccaggagcgagtgagagcacagcgcgctgtagcagaggaggaatctaaggggtccgctacatattgtaccgtctgtagcaagaagtttgccagctttaacgcgtatgaaaaccatttgaaaagcaggaggcacgtagaattagagaagaaggctgtccaggccgttaataggaaagtggagatgatgaatgaaaaaaacctcgagaaaggcctgggagtcgacagcgttgataaggatgccatgaatgctgctatacaacaggccattaaggcacagcctagcatgtctcccaagaaggccccccccgctcctgctaaagaggcacgtaacgtcgtcgcagtgggaacaggtggccgcgggacccacgatcgggatccatccgagaaaccacccaggctgcagtggtttgagcagcaggccaagaagctggctaaacagcaggaggaggattccgaggaggaagaggaggacctggacggtgatgactgggaggacatcgacagtgacgaagagctcgaatgcgaggacacggaagccatggacgacgtggtggaacaggacgccgaagaggaggaagccgaagagggccccccactgggagccatcccgatcactgattgtctgttctgtagccaccatagctcctccttgatgaaaaatgttgcccatatgaccaaggatcactcttttttcattccggacatcgagtatctgtccgacatcaagggtttgatcaaatacctcggggagaaggtcggagtgggaaagatatgcctttggtgcaatgaaaaagggaaatccttttacagtactgaggcagtccaagctcatatgaacgataaatcccactgtaagctgtttaccgacggcgacgccgctctggaattcgccgacttttatgattttcgaagctcttaccctgatcataaagaaggcgaggatccaaacaaagccgaggaactgccaagcgagaagaatctggagtacgatgacgaaacaatggagttgattctcccatctggggctagagtggggcaccggtctttgatgcggtattacaagcagcggtttggcctgtctcgggccgttgctgttgccaaaaaccgaaaggcagttgggcgtgtgctgcagcagtaccgcgccttgggatggaccggaagtacaggcgccgctttgatgcgtgagcgggacatgcagtacgtgcagcgaatgaaatcgaagtggatgcttaagacgggaatgaagaataatgccactaagcagatgcatttccgagtgcaagttagattctag

SEQ ID NO: 14324 - DNA, 2862 bp, synthetic construct
  source 1..2862: mol_type = other DNA; note = Synthetic coding sequence
atgatcacctccgccgccggcattatttctttgctggacgaggatgaacctcagctgaaggagttcgcactgcacaaattgaatgccgtggtgaatgacttttgggccgagatctcagaaagcgtggacaagatcgaagtgctttatgaggatgaaggatttcgatcaaggcagttcgcggctctggtagcatctaaggtgttctatcacctgggggctttcgaggagagcctgaactacgcgttgggagcaggcgacttgttcaacgtgaatgataattcagagtatgtggagacaatcatcgctaagtgcatcgaccattacaccaagcaatgtgtagaaaatgccgatctgcctgagggcgagaaaaagccaatcgatcagaggctggaaggtatagttaataaaatgttccagcggtgcctggatgatcacaaatataaacaagccatcggtatcgcactggaaacaagaagattggacgtcttcgagaagaccattctggagtcaaacgatgttcctgggatgctggcctactctctcaagttatgcatgtctctgatgcaaaataaacaatttagaaataaagttctccgtgtgctcgtcaaaatctatatgaacctcgaaaagcccgacttcattaatgtttgccagtgtcttattttccttgatgatcctcaggccgtgtcagacattcttgaaaagttagtgaaggaagataatctgctcatggcgtatcagatttgctttgatctgtacgagtccgccagtcagcagttccttagtagcgtcatacaaaacctaaggacagtgggcacgcccatcgcttctgtgccaggttcaacgaacacggggactgtgccaggctccgagaaggactctgatagcatggagacagaggagaagacctcctcagctttcgtgggcaaaacccctgaagcatccccggagcctaaagatcagactctgaagatgataaaaatcctgagcggtgaaatggccattgagttgcacctacagtttttgattcgcaataataacacggatctgatgatattaaagaacacaaaagatgctgtgcgcaacagtgtttgtcacaccgctactgtaattgctaatagtttcatgcactgtggaaccacgagcgaccagtttctacgcgataacctggagtggctagcccgcgccaccaactgggctaagtttacggccaccgcctccctgggcgttattcataaaggccacgaaaaggaagcgctccagctgatggcgacttacctccctaaggataccagccccgggtctgcatatcaggagggaggcggcctgtacgccctaggcttgatccacgcgaatcatggcggggatattattgattatcttctgaaccagctcaagaacgcaagtaacgacattgttcggcacggaggcagtctgggactgggactggccgccatgggcaccgcacgacaagatgtgtatgatctgctgaagactaatctctatcaggatgatgccgtcacaggtgaagccgccggtctggcactgggacttgtgatgctaggatcaaagaacgcacaggccatcgaagacatggtggggtatgctcaggagacacagcacgagaaaatattgcggggattagccgtggggatagcgttggtgatgtacggaagaatggaggaagccgacgctcttatagagtcactgtgcagggacaaagatccaatcttgaggcgctctggaatgtatacagtggccatggcatactgtggtagcggcaacaataaggctattcgacggctcctccacgtagccgtcagtgacgtaaacgacgatgtaaggcgggctgccgtggagtcactcggctttattctgttcaggactccagagcagtgcccaagcgtggtgagcctgctgtccgaaagttacaacccccacgtccgctatggggccgccatggcactcggcatctgttgtgcgggcaccggcaacaaggaggctataaatctgcttgaacccatgacaaacgatccagtaaattacgttcgccaaggtgcacttatagcctccgcactcataatgattcagcaaacagaaatcacatgcccaaaggtgaaccaattcaggcagctgtattctaaggtgattaatgataaacatgatgacgtgatggctaaatttggggccatccttgcacaagggattctagacgcgggaggccataatgttactatcagtctgcaatcacgcacggggcacacccacatgccctccgtggtgggcgttctcgtctttacccaattctggttttggtttcccctgtcccacttcctctcgctggcatacacaccaacatgtgtgatcggcctgaataaagatctcaagatgccgaaagttcagtataaatctaactgcaaaccttccaccttcgcatatccggctccgctcgaggtccctaaagagaaggagaaggaaaaggtttcgacagctgtactcagcatcactgccaaagccaaaaaaaaggagaaagagaaggagaagaaagaagaggagaaaatggaagtggatgaagccgaaaagaaagaagagaaggagaaaaagaaggagcccgagccgaactttcagctgctcgacaaccccgcccgagtcatgccagcacaactgaaggtgctgacgatgcccgagacatgccgttaccagccattcaagcccctgagcataggtgggatcatcatcctgaaagatacatctgaggacatcgaagagcttgtggagcccgtggcggcccatggaccaaaaatcgaggaggaggaacaggaacccgagcctccagagccattcgagtacatagacgattag

SEQ ID NO: 14325 - DNA, 984 bp, synthetic construct
  source 1..984: mol_type = other DNA; note = Synthetic coding sequence
atgtgcagcacttcaggctgcgatctggaggagatcccactggatgacgacgatctaaacaccatcgagttcaaaatattagcctactacaccagacaccatgtgttcaagtcaacgcctgccctgttttcccccaagctgttgaggactcgatcactcagtcagagaggactcggcaactgctctgcaaacgagagttggacggaagtaagttggccttgtcggaattcacaaagctctgagaaggcaatcaatctcggcaaaaagaagtcctcgtggaaggcattttttggagtggtcgaaaaggaggactcacagagtacgccggcgaaggtcagtgcacagggccaacggacactcgaataccaggacagtcactctcagcagtggtcgcgttgcttgtccaatgttgaacaatgcctggagcacgaggcggtggatccaaaggttatcagcattgcgaaccgcgtcgcggagatcgtgtactcctggcccccgcctcaggccacacaggccggaggctttaaaagcaaggagatttttgttacagaagggttaagttttcagctgcagggacacgtcccagtcgcctcctcctcaaagaaagatgaggaggagcagatattagcaaagatcgttgagctcctgaagtacagcggagaccaactggagcgcaaactgaagaaagacaaggctctcatgggccatttccaggatgggctctcatattctgtgttcaaaacaatcacggaccaggtgctcatgggcgtggatccccgaggagagagcgaggtgaaagcacagggctttaaggcagccctagttatcgacgtaacagccaaactgaccgccatcgacaatcaccccatgaatcgcgtgctcggcttcggaaccaaatacctgaaagagaacttcagcccttggatccaacagcacggcggttgggagaaaattctgggtatttcacatgaggaggtcgattag

SEQ ID NO: 14326 - DNA, 1086 bp, synthetic construct
  source 1..1086: mol_type = other DNA; note = Synthetic coding sequence
atgggtggggccgtctccgctggagaagataacgacgagttgatcgataacctcaaggaagcccagtatatcagaactgagttagtcgaacaggcattccgggccatcgatagggcagattactacctggaagagttcaaagaaaacgcatacaaggacctggcgtggaagcacggcaacatccacctgtccgccccttgtatatacagcgaggtgatggaggccttagacctgcaacctggactgagtttccttaaccttggctccggaacaggctatctttccagcatggtcggcctgattttagggccttttggtgtgaatcatggcgttgaactacattcggacgtgatcgagtatgcgaaacagaaactggatttttttattagaacttctgactctttcgacaagtttgatttttgtgagccttcttttgtcacaggcaactgcctggagatctcacctgactgttctcaatacgatagggtctattgtggcgcgggcgtgcagaaggaacatgaggaatacatgaagaacctgctcaaggtgggagggattctagtcatgccactggaggagaaactcaccaaaatcactcggaccggcccgtccgcttgggaaacaaagaagatcctcgccgtgtccttcgcgcctcttatacagccttgccacagcgagtctgggaagtcgcggctggtgcagcttccccccgtggccgtgaggtctctgcaggatttggctcgaatcgccatccgcggcacgatcaagaagatcatccaccaggagacagtctctaagaatggcaatggcctgaagaacacacctcgctttaaaagacgaagagtccggcgcaggcgcatggaaacaatcgtctttcttgataaggaagtatttgcaagccgcatctcgaatcccagtgacgacaactcttgcgaggacctagaggaggagaggcgcgaggaagaagaaaagacacccccagagaccaagcccgatccccctgtgaatttccttagacagaaggtcctgagcctgcctctgccggaccccttaaaatattacctgctctactaccgcgagaaatag

SEQ ID NO: 14327 - DNA, 780 bp, synthetic construct
  source 1..780: mol_type = other DNA; note = Synthetic coding sequence
atgaaagatgttgataacctgaagtctatcaaggaagaatgggtttgcgaaacgggctcagataaccagcctttgggaaataatcagcagagcaattgtgaatatttcgttgactcattgttcgaagaagcacagaaggtgtcatctaaatgcgtctccccagcggaacagaagaagcaggtcgacgtgaatattaaattgtggaaaaatggtttcactgttaatgacgacttccggagctactcagacggcgcttctcagcagttcctcaatagcattaagaaaggcgagttaccatccgaactgcagggcatctttgacaaagaagaggtggacgtaaaggtggaggataagaagaacgaaatatgcctgagtacaaagccggtattccaacccttctcagggcaaggccacaggttggggtccgcaacccctaagattgtgtccaaggcaaagaatatagaggtggagaataaaaataacctctctgctgtgccattgaacaacctcgaacctatcactaatatccagatttggctggccaatggaaagcggatagtgcagaagtttaatataacccatagagtttcgcatattaaggactttatcgagaaataccagggcagtcagaggagccccccattcagcctggcaactgctctacccgtactccgcctcctggatgagactctgactctagaagaggcagacctgcagaacgccgtcattattcagcggcttcaaaagacagcctcatttcgagaactaagcgaacattag

SEQ ID NO: 14328 - DNA, 990 bp, synthetic construct
  source 1..990: mol_type = other DNA; note = Synthetic coding sequence
atggtgagaactaagacctggaccttaaaaaaacattttgttggctatcctaccaactctgacttcgagctgaaaaccgctgaacttccgcccttgaaaaacggagaggtgctgcttgaggctcttttcctcaccgtagatccatatatgagagtggccgccaagagactgaaggagggagacactatgatgggacaacaagttgccaaagtggtagagagcaagaatgtggctctccctaaaggaacgattgtgctcgccagcccaggatggactacacattccatctccgacggcaaggatcttgaaaagttattaaccgagtggcccgacacgatcccgctgagcctggctctcggcacggttgggatgccaggactgactgcctactttggtctgctggagatctgtggcgtgaagggcggtgagacggtcatggtcaacgccgccgctggggccgtaggttcagtggtgggacagatcgctaaactgaagggctgcaaagtcgtgggcgccgtgggaagcgacgagaaggttgcctatctccaaaaactgggatttgatgtcgtgtttaattataagaccgtggagtccctcgaggaaaccctcaagaaggctagtccggacggatacgattgctatttcgacaacgtaggtggggaatttagtaataccgtcattggtcagatgaaaaagtttggaagaattgccatctgtggcgccatctcgacgtataacagaactggccccctgccgccaggcccacccccagaaattgttatctatcaggagctgcgcatggaagcttttgtagtctatcggtggcagggcgatgccaggcagaaggccctgaaagatctgctaaagtgggtgctggaagggaagatccagtataaagaatatattattgagggctttgagaatatgcccgcggcctttatggggatgttgaagggagacaatttaggcaaaacaatagttaaagcttag

SEQ ID NO: 14329 - DNA, 3006 bp, synthetic construct
  source 1..3006: mol_type = other DNA; note = Synthetic coding sequence
atgcagagcacagacttgggcaataaggaatcgggcaagatttggcacagaaagccttcccctgccactcgcgacgggataatcgtaaatattatccataacacgtcggactatcatccaaaggtgctgcgattcttgaacgtggcttttgatggaactggggattgcctgatcgccggagatcaccagggaaatatctacgtgtttgatctccatggcaaccgctttaacctcgtgcagaggaccgctcaggcctgtacagctttggcatttaatctgcgcaggaaaagtgaatttttggtggctctcgctgactacagcatcaaatgcttcgatacggtcacaaaggagctggtgagctggatgaggggtcatgaaagctctgtgttttcaatttcagtgcacgcctcgggaaaatatgccatcacaacaagcagtgatacggcccaactctgggatctggacacttttcagcgaaagcggaaactaaatatccggcagagcgtgggaatccagaaagtctttttcctgcctctttcaaatacaatcctaagctgctttaaagacaactcgatttttgcctgggaatgcgataccctgttttgcaaataccagttgcctgctcccccggagagcagcagcattctatataaagtattcgccgtgacccgcgacggccggatcttagcggccggaggcaaatctaatcacttacacctgtggtgcttggaggctcgccaattgtttcgaatcattcagatgcccaccaaggtccgcgccataagacacctcgaattcttacctgattcctttgacgctggttctaaccaggtgctgggtgtactctcccaggacggcatcatgcgttttattaacatgcaaacttgtaagctcctttttgagatcgggtccctggatgaaggcatctctagtagcgccatcagcccccacggccgttacatcgcctctatcatggagaacggcagcctgaacatttactcggtgcaggccctgacacaggagataaataagcctcctcccccccttgtcaaggtgatcgaagacctgcctaagaataagctgtcttcctccgatctgaaaatgaaagtgacaagcgggcgcgttcagcagccagctaagtcccgggagtccaaaatgcagacccgcatcttgaagcaggatcttactggagacttcgaatctaaaaagaatgaactgcctgacggcctgaacaaaaaacggctccagatcctgttgaaaggctacggggaataccccacgaagtatcggatgtttatctggaggagcctgctgcagcttcctgaaaatcacaccgccttcagtacactcatcgataaagggacccacgtcgcatttctcaaccttcagaagaagtaccccatcaaatctcgcaaactgctaagagtgctgcagagaacgttgtccgcgttggcacactggtccgtcatattcagtgatacaccctacctgcctctcctggccttcccatttgtgaagctgtttcaaaataaccagctgatctgctttgaagttatcgctacattaataatcaactggtgtcaacattggtttgagtacttccctaacccgccgatcaacatattatctatgatcgaaaacgtactggctttccacgataaagagctccttcagcactttattgaccatgacatcacaagtcaactctacgcatggcctttactggaaacagtgttctctgaagtgctcacccgcgaagagtggcttaaactatttgacaatatcttctccaatcacccctcattcctcctgatgacagtagtggcttataatatttgtagccggaccccattgctaagttgtaacttaaaagacgattttgaatttttctttcatcaccgcaacaaccttgatattaacgtggtaatcagacaggtgtatcacctgatggaaaccacccctaccgatatccaccccgatagtatgttaaacgtgttcgtagctctgacaaaaggacagtacccggtcttcaatcaatacccaaagtttattgtggactatcagactcaggaacgggagcggatccggaacgatgagctggactatttacgagaaaggcagaccgtggaagatatgcaggccaaagtggaccaacagagagtggaagatgaagcatggtatcagaaacaggagcttttgaggaaagccgaggaaacccggcgggagatgctgcttcaagaggaggagaagatgatccaacaacgccaaaggttggctgccgtcaaacgagagcttaaagtgaaggaaatgcatttgcaagacgctgctcggagaaggttcctcaaactgcaacaggatcaacaggaaatggagctgagaagactcgatgatgaaatcggccgcaaggtctatatgagggacagggaaatagcagcgactgcgcgcgacctggagatgcgccagctcgagctggagagccaaaaacgcctgtacgagaagaatttaaccgaaaatcaggaggccctcgcaaaagagatgcgagccgacgccgatgcttacagacgcaaggtagatctggaagagcacatgtttcacaagctgattgaggccggagagacacaatcacagaaaactcagaagtggaaagaggccgagggtaaagagtttaggctgcgttcagcaaagaaagccagtgccctgagcgacgcatcccggaaatggttcctgaagcaggagattaatgcagctgtggaacacgctgagaatccttgtcacaaagaggaacctcgcttccagaacgaacaggactcaagctgtctgcccaggacatcccagcttaacgacagcagtgagatggaccccagcacccagataagtcttaaccggagagccgttgagtgggatactaccggtcagaatcttatcaagaaagtgcgaaatcttagacagcgtctgaccgcacgagcacgccataggtgccagacacctcacttgttggccgcatag

SEQ ID NO: 14330 - DNA, 651 bp, synthetic construct
  source 1..651: mol_type = other DNA; note = Synthetic coding sequence
atgtcattcttattcggcagtcggtcttcaaagacatttaagccaaagaaaaacatccccgagggaagccaccaatacgagcttctgaaacacgcagaagcaacactgggctcggggaatctcagaatggccgtcatgctcccggaaggagaagacctcaatgagtgggtggctgtgaataccgtagactttttcaaccagatcaacatgttatatgggaccatcaccgatttctgcactgaggagagctgccccgtcatgagcgccgggccaaaatacgagtaccattgggcagatggaaccaatattaagaagcctataaagtgcagcgctcctaaatatatcgactaccttatgacctgggtgcaggaccaattagacgatgagacactgtttccttctaagatcggagttccttttccaaaaaatttcatgtccgtggccaaaactatcctgaagcgcttgttccgcgtgtatgctcacatttatcaccaacattttgaccctgttattcagctacaggaagaggcccatctcaacaccagcttcaagcactttatatttttcgtgcaagaattcaatctaatcgaccgacgggaactagctccgctgcaggagctgatcgaaaaactaacgtctaaggaccgctag

SEQ ID NO: 14331 - DNA, 477 bp, synthetic construct
  source 1..477: mol_type = other DNA; note = Synthetic coding sequence
atggccgcccagggagtggggcccggacccggcagcgctgctccccctgggctcgaggctgcacgccagaagctggcactaagacgcaagaaggttcttagcactgaagagatggaactgtatgaactcgcacaggcagccgggggcggcatcgaccctgacgtgtttaaaatcttggttgatctgttgaagttgaacgtcgcccctttggccgtgtttcagatgctgaagagtatgtgcgcagggcaaaggctagcttccgaaccacaggatccagccgccgtgtcattacccacatcaagcgttccggagaccaggggccgggacaaaggtagtgccgctctgggcggggtgctggcgctagctgaacgctctaaccatgaaggctccagccagcgtatgcctcggcagccctctgccacccgcttgcccaaaggaggcggcccggggaaatctcccacccagggctctacgtag

SEQ ID NO: 14332 - DNA, 1425 bp, synthetic construct
  source 1..1425: mol_type = other DNA; note = Synthetic coding sequence
atgaattccgtgagccccgcagcggctcagtatcgctcctcaagccctgaagatgcacgaaggcgaccggaagcaagaaggccacgaggtcctcgcgggcccgatcccaacggcttgggcccttctggggccagcgggccggctctcggatcacccggtgccggcccgtctgagcctgatgaggtcgacaagttcaaagctaaattcttaaccgcatggaacaatgttaagtacgggtgggtcgtgaaaagccgcacatcctttagtaagatctcttccatccacctgtgcggccggcgctatcgctttgaaggagagggtgacatccagaggttccagagagacttcgtaagccgactgtggctgacgtaccggcgggactttccccctttgcccggtggctgcctgacaagcgattgtgggtggggatgtatgctgagatcgggacagatgatgctcgctcagggcctgttattgcacttcttaccccgcgattggacatgggccgaggggatgggcctgggtccccctgaactgtccggttcggctagccctagccgctatcatggtcccgctagatggatgcctcctcgctgggcccagggagcaccagagttggaacaggagagacgccacaggcagatcgtctcttggttcgcagaccaccctagggctcccttcggcctgcatagacttgtcgagttaggccagagctccggcaaaaaggctggagactggtacggaccttcactggttgcccatatcctgcggaaggccgtggagtcttgctccgatgttacgagactggttgtctacgtgtctcaggactgtaccgtctataaggctgacgtggcacgcctcgtggcccggcctgatcccacagcagagtggaagtccgtggttatactggtacctgtccggctgggcggggagactctcaaccctgtttacgtcccctgtgtgaaggaactgttacgctgcgagctatgtctgggaattatgggcggaaagcctcggcacagtttatattttatcgggtatcaagacgattttctcctgtatctagacccacattactgccagccaaccgtcgatgttagccaggctgacttccctcttgagtcctttcattgtacttctccccggaaaatggccttcgccaagatggatccctcttgcacagtgggattctacgccggcgatagaaaggagtttgagactctgtgctccgagctgacccgtgtattgagcagctcaagcgcgaccgagaggtatcccatgttcacactggcggaaggacacgcccaggaccatagcctcgacgacctatgctctcagcttgctcagccaacactgaggctgcccaggacaggaaggcttctccgggccaagagaccttcctcagaagacttcgtctttctttag

SEQ ID NO: 14333 - DNA, 945 bp, synthetic construct
  source 1..945: mol_type = other DNA; note = Synthetic coding sequence
atggccttcgtgacaaggcaattcatgcggagcgtatcttctagttccaccgcctctgcaagcgccaaaaagataatagtgaagcatgtgactgtcataggaggggggctgatgggtgctgggattgcccaggtggcagccgccaccgggcacaccgtagtgttagtcgatcagacagaagacattctcgccaaatcaaaaaagggaatcgaagagtccctgcggaaggttgcaaagaaaaaattcgcggaaaatctcaaggcaggggacgagttcgtcgagaagaccttgtcaacaattgctacaagtacggatgcagcaagcgtagtccattcgaccgatctcgtcgtggaggctatcgtagaaaacttgaaggtgaagaatgaactgttcaaacgccttgataagtttgccgctgagcatactatctttgcatccaataccagttctttgcagatcacgtcaatcgcgaatgccacgacacgtcaagatcgtttcgcagggctgcacttcttcaatcccgtgcctgtcatgaaactcgtggaggttataaagactccaatgactagccaaaagacatttgagtccctagtggatttcagcaaagcattaggaaagcatccagtctcctgcaaagacacacccggctttatagtgaatcgcttattggttccatacttaatggaggccatccgactttacgaaaggggagacgccagcaaggaagacattgataccgccatgaagcttggggccggttaccctatgggtccctttgaattactggattacgtggggctggataccaccaaattcatcgtggacgggtggcatgaaatggacgctgagaacccactgcaccaaccgtccccttctctgaataaactggtagccgagaacaagtttgggaagaaaacaggcgaaggattctataagtataaatag

SEQ ID NO: 14334 - DNA, 810 bp, synthetic construct
  source 1..810: mol_type = other DNA; note = Synthetic coding sequence
atggggaattgctgctggacacaatgcttcgggcttctgcgtaaagaagctgggcgactgcagcgagtgggtggcggaggcgggagcaaatatttcaggacctgctcacgcggagagcacctaacgattgagtttgagaatttagtggaaagcgatgagggggagagccccgggagcagccatcggcctctcactgaagaggagattgtagatttacgtgagcggcactatgattctatagcggagaagcagaaggaccttgacaagaagatacagaaagagcaagagcgccagcgtattgtccagcagtaccacccctctaataacggagagtatcagtccagcggacctgaggatgatttcgaatcatgccttaggaacatgaagtcgcagtatgaagtgttccgatcttcaagattatcctccgatgccactgtcctgactccaaatacggagtcaagctgtgaccttatgaccaagacaaaatccacctctgggaacgacgactccaccagcctcgatttagagtgggaggatgaggaaggtatgaatcgcatgctccccatgagagaaaggagcaaaacagaggaagacatcctgcgagccgctttaaagtatagtaataaaaagaccgggagtaatcccacctctgcctctgacgatagcaacggcctcgagtgggagaatgattttgtttcagccgaaatggacgacaatggaaatagcgaatacagcggtttcgtaaaccccgtactagaactgtccgactcagggattcgccacagtgataccgatcaacagacacgctag

SEQ ID NO: 14335 - DNA, 1371 bp, synthetic construct
  source 1..1371: mol_type = other DNA; note = Synthetic coding sequence
atgaaatgtgagcattgcacacgcaaggagtgcagcaaaaagacaaaaacggatgaccaggagaatgtttcggctgacgccccatcccccgcacaggagaatggggaaaagggtgagttccataagctggctgacgccaaaatctttctatccgactgcttagcttgcgatagctgcatgaccgcggaggagggggtccaactatcccagcagaacgccaaggacttcttcagggtcctcaatctgaataaaaagtgtgacacctcaaagcacaaagtactagtagtctccgtgtgccctcagtcccttccctactttgctgctaaattcaatctatcagtgactgacgccagtaggcgcctatgcggctttcttaaatccttgggcgttcattatgtctttgacactactatcgcagccgacttcagtatcctggaaagccagaaggaattcgttaggcgatatcggcagcatagcgaagaagagcgcaccctgcccatgctgaccagcgcttgccccggttgggtcagatatgctgaaagggtgcttggaagacccatcactgcccacttgtgcaccgctaagagcccccaacaagtgatgggctcgctcgttaaggactactttgcccgacagcaaaatctgtctccagaaaaaattttccacgttatcgttgctccgtgttatgataaaaagctagaggctctccaggagtctttgccccccgccctgcacggatcccgcggcgccgactgcgtcctgaccagtggcgaaattgctcaaattatggagcaaggagacctctccgtgcgagacgctgcggtagatacactttttggggacctgaaggaggacaaagtgacacggcacgatggcgcttcaagtgatggccatctcgcccacattttccggcacgccgccaaagagctgttcaacgaggatgtggaggaggttacctatagagccctgagaaacaaggactttcaggaagttaccctcgagaagaatggggaggtggtacttcggtttgcagcggcgtatgggtttaggaatattcagaatatgattctgaagctcaagaagggaaagttccctttccacttcgtggaagttctggcctgtgccggcggatgcttaaacggcaggggacaggctcagacacccgacggtcatgctgataaggccctactgcggcagatggagggaatctatgctgatattcccgtaagacggccggaaagctctgcccatgtgcaggaactctaccaagaatggctggaaggcataaattcacctaaggcccgagaagtgctgcacacaacttaccaatcccaggaacggggtactcattccctggacatcaaatggtag

SEQ ID NO: 14336 - DNA, 612 bp, synthetic construct
  source 1..612: mol_type = other DNA; note = Synthetic coding sequence
atggctcacgtgtcatcagaaacccaggacgtatctcccaaagacgaacttactgcaagcgaggccagcactagaagcccgctgtgcgagcacaccttccccggtgacagcgatctgaggtctatgatcgaagagcacgctttccaggtgctgtcccaaggatctctgctggaaagtccctcatacacagtgtgtgtttccgaaccagacaaagacgatgactttctgagtctgaattttcctcgtaagctgtggaaaatcgtggagtcagaccagtttaagtcaattagttgggacgagaacggaacctgtattgtgattaatgaagaactgtttaaaaaagaaatactggaaactaaggccccttaccgaatcttccagaccgacgccatcaaatcattcgttcgccagctgaatctgtatggcttttctaaaatacagcagaattttcaacggagcgcattcttggctaccttcctgagcgaggagaaggagtccagcgtattgtcaaagatcagatttactaaaatgaagttgtcacgctccagcacctacgagaacaggtacctctgctgtaatctgcacctcaaggatgagagtaactattcttag

SEQ ID NO: 14337 - DNA, 2052 bp, synthetic construct
  source 1..2052: mol_type = other DNA; note = Synthetic coding sequence
atgaacactagtatcccctatcagcaaaatccttacaacccaaggggctcctcgaacgtgatacagtgctatcgatgtggagatacgtgcaaaggagaggtcgtgcgcgtccacaataaccacttccacatccgctgctttacatgtcaggtctgtggctgtggattagcccaatccggctttttcttcaaaaatcaggagtacatatgcacacaggattatcagcagctgtatggcacacgctgcgattcttgtagggacttcatcacgggggaagtaattagcgctctaggtaggacttatcacccaaagtgctttgtgtgttccctctgtagaaaaccatttcccatcggcgataaggtgaccttcagtggcaaggaatgcgtgtgccaaacatgttcccagagcatggcctcttctaagcccatcaagatccggggccccagccactgcgccggttgtaaggaggaaataaaacacggccagagccttctcgcgctcgataaacaatggcacgtgtcatgttttaagtgtcaaacatgttcagtgattttgacaggagaatacatctcgaaggacggcgttccgtattgtgagagtgactaccacgctcagtttggaattaagtgcgagacctgtgataggtatatttccggccgggtgttggaggcaggcggaaaacactaccatccaacttgcgctagatgtgtacgctgtcatcagatgttcaccgaaggagaagagatgtatctgacgggcagcgaagtgtggcaccccatttgtaaacaagcggcgagggctgagaaaaagctgaaacaccgaaggacctctgaaacgagcatatcaccaccagggagctctattgggagtcccaatcgtgttatttgtgccaaggtagataacgaaatcctgaattataaggacctcgctgccctacccaaagttaaaagtatctacgaagtccagaggcccgatctgatatcatatgagccgcatagccggtacatgtctgacgagatgcttgaacgctgcgggtacggggagagtttggggaccctgagtccctactcccaggatatctacgaaaatctggacctcagacaaagaagggcatcttccccaggctatattgactcgcctacatacagcaggcagggcatgtctcccacattttccaggtctccgcaccattattacagatccggccccgaatcaggccggtcctctccataccattctcagctggatgtgcgctcgtctacacctacctcctaccaagcacctaagcattttcacatcccagccggagattccaatatctaccgtaaaccacctatttacaagaggcatggggatctctctactgcaacaaagagcaagacttccgaggacatttctcaaactagtaaatatagcccaatctatagcccggatccctactatgcgtcggagagcgagtactggacttatcacggctctccgaaggtgcccagggcgaggcgatttagcagcgggggggaagaggatgactttgacagatcaatgcataaactgcagtccggcatcggccgacttatcctgaaggaagaaatgaaggcccgttcaagttcctacgccgatccctggacccccccacgctccagtacctctagccgagaggccctgcacaccgcaggctacgagatgagcctgaatggaagtccaagatcccactacttagcggactcagaccccctgatatctaaatccgcatccctgccagcttatcgacggaatggcctgcaccgcacccccagcgccgatctgttccattatgattccatgaacgccgtgaattggggcatgcgcgaatacaagatctatccatatgagctgctcctggtgaccacccgcggcaggaatagactccccaaggacgtggatcggacccgtcttgagcgccatttgtctcaggaagagttctatcaagtcttcggcatgactatcagtgagtttgatcgactcgccctgtggaaacgtaatgaactcaagaaacaagctaggctgttctag

SEQ ID NO: 14338 - DNA, 2541 bp, synthetic construct
  source 1..2541: mol_type = other DNA; note = Synthetic coding sequence
atgctgttcacagtcagttgttctaaaatgtccagtatagtggacagggatgacagttcaatctttgacggcctggttgaggaggatgataaagacaaggcgaaaagagtctcccgcaataagtccgaaaaaaagaggcgtgaccagttcaatgtgctgatcaaagaattaggctctatgctgcctggcaacgcccgcaaaatggacaaatcaactgtgctacaaaaaagcattgacttccttagaaagcacaaagaaataactgcccagagtgacgccagcgaaatacgacaagactggaagcccacatttctcagcaacgaggaatttacgcagctgatgttggaggctctagatgggttttttctagccatcatgactgacgggagcattatctacgtgtccgagagcgttacgagccttcttgagcacttgccctccgatttggttgatcagagcatcttcaactttattcctgaaggcgagcatagcgaggtctataagattctttccacccacttgctggagtccgactccttgacgcccgagtatctcaagtcaaagaatcagctggagttttgctgtcatatgctgcggggcactattgaccccaaagaaccgtccacttatgaatacgtcaagtttatcgggaacttcaaatcactgaacagtgtcagcagtagcgctcataacggctttgaagggacaatccagcggacacaccggccctcctacgaggatagggtctgcttcgtggccaccgtgagactggcaacacctcaattcatcaaggaaatgtgcactgtcgaagagcccaacgaggagtttacctctcggcatagcctcgagtggaaattcttgtttttagatcatagggctccccccatcattggctacctcccattcgaggtcttgggcactagcggatatgactactaccacgtcgacgacttagagaacctcgccaagtgtcatgaacatctgatgcaatacgggaaggggaagagctgctattaccggtttctgactaagggccagcagtggatctggctgcagacccactactacatcacttatcatcagtggaactccaggccggaattcatcgtgtgcacacacactgttgtgagctatgcagaagtgcgagcagaaaggcggagggagctcggcatcgaagaatccctgcccgagactgccgcagataaatcccaggatagcggtagcgataaccgaatcaacacggtctctctcaaagaagcattggaacgatttgatcatagtcctaccccatccgcctcttctcgatcctccagaaaaagttcacacacagccgtgagtgatccctccagcacccctaccaaaatccctactgatacttccacaccccctagacagcatctcccagctcacgagaaaatggtccagagacgaagctccttcagcagtcagtctatcaatagccaatctgtgggttcgtccctgacccagcctgttatgagccaggcgacgaatctgcccattccccagggtatgtctcagtttcagttctcagctcaactgggcgctatgcaacaccttaaggaccagctggaacagagaacccgcatgatcgaagccaatattcatcggcagcaagaagaactgaggaaaattcaggagcagctgcagatggtccacgggcaaggcctgcagatgttcctgcagcagtccaacccaggcctcaattttggaagtgtgcagctgagcagtgggaacagctctaacattcagcagctcgccccgatcaacatgcaaggacaggtcgtgccaacaaatcagatacagtccggaatgaacacgggtcatatcgggaccacacagcacatgatccaacaacaaacattgcagagtacttctacacagagtcagcaaaacgttctaagcggtcacagtcaacagacttcattgcccagccagacccagagtaccctgacagcgccgctatataacactatggtgatcagccaacctgcagcaggctcaatggtccagataccctcatctatgccccagaactcaactcagagcgccgccgttaccactttcacacaagatcgacagattcggtttagccagggtcagcagctagtcactaagctggtaacggcccctgtagcgtgcggcgcagtgatggttccatctaccatgctcatgggccaggtcgtaacagcatatcctacattcgctacacagcagcagcaaagtcagacactgagcgtgactcagcagcagcagcaacagtcttcacaggaacagcagcttacgagtgtacagcagccatcccaggcccagctgacccagcccccacagcagtttctgcagacatctaggttgttgcacggtaatccgtcaacacaactaattctgtcggcagcatttcctttacagcagtccaccttccctcagtcccatcatcagcaacatcagagtcaacagcagcagcagttgtccagacatagaacagactccctgcccgatcccagcaaggtccagccccagtag

SEQ ID NO: 14339 - DNA, 1656 bp, synthetic construct
  source 1..1656: mol_type = other DNA; note = Synthetic coding sequence
atggggaggaaggccattgtcctcgccatcgcgaacaccagcctggccttccccctttgccagcatcttgttacgttctgtctgggcgaggatgacggtgtccatacagtggaagacgctagtaggaaactcgcggtgatggactcccaagggagggtgtgggcccaggagatgttactgcgggtaagtcccgaccacgttaccctgctggaccctgcctctaaggaggaactcgaaagttatccattaggcgctattgtgagatgtgacgctgtgatgccacccggccgttctcggtctcttctgctcttggtctgccaggaacccgagagggcacagcctgatgtccatttcttccagggcttgcgcctcggtgccgagctgatcagggaagacattcagggagctctgcataactatcgctcaggccgcggagagcggcgggccgcagctttgagggctactcaagaagaactccagagggacaggagtccagccgccgaaaccccccctctgcagcggcgcccctccgtacgcgctgtgatttcaaccgttgagcgcggggcgggccggggacgcccccaagcgaagcccattcctgaggccgaggaagcccagcgcccagaacccgtgggtacctccagcaatgcggattccgcctccccagacttgggccccaggggaccagatctcgccgtcctgcaggcagaaagggaggtggatattttaaatcacgtgtttgatgatgtggagagctttgtcagcaggctccagaaaagcgcagaggcagcccgtgtgctggagcatagagagaggggaaggcgaagccgcaggagagccgccggcgaagggttactgaccctcagagctaagccaccttccgaggccgagtacacagacgtcctccagaagataaagtatgcattcagcttactcgctaggctgagaggtaacattgcggacccctcctcacctgagctgctgcacttcttgttcgggccactgcagatgatcgtgaacacttcgggtgggccagaattcgccagttccgtcaggagaccacacctgacttcggacgccgtggcactgcttcgcgacaacgtgacaccccgggaaaacgaactttggacaagcttaggtgatagctggactaggcccggcctcgagctgtcaccagaggaggggccaccctatcgtccggaattcttctcaggctgggaaccacccgtaaccgacccccagagccgggcttgggaggaccctgttgaaaagcagctgcagcacgaacggcggcggaggcaggttactcaagctacccaacagggcagaggctgggaagtgcgcggaagaggccgatctgcctggccgcgactgactcggttgtcatattttcttcagcagtccgcccctcaggttgctgtcaacggacaccgggacctcgaaccagagtcagagcctcagctcgaatccgaaactgcgggaaagtgggttctatgtaactatgattttcaggctagaaatagcagtgagctgtctgtgaagcagcgggacgtgttagaagcactgcaggataaagagaaagtcagtgaactggaggccgtcatggaaaaacagaagaaaaaagtggaaggggaggtagagatggaggtgatttag

SEQ ID NO: 14340 - DNA, 1689 bp, synthetic construct
  source 1..1689: mol_type = other DNA; note = Synthetic coding sequence
atggctgcctcagctaagagaaagcaggaggaaaagcacctgaagatgctgcgggacatgaccggactgccccataatcgtaagtgctttgactgcgaccaacggggtcctacatacgtcaacatgacggtgggaagctttgtgtgtacttcttgttccgggtccctgagaggactgaatcccccacatcgtgtgaagagcatctctatgactactttcacacagcaagagatagagttcttacagaaacacgggaatgaagtgtgtaagcagatctggttgggcttattcgatgacagaagtagcgccattccagactttcgggatccccagaaggtcaaagagttcttgcaagagaagtatgagaaaaagaggtggtatgtgccccctgaacaggctaaggtcgttgcctcagtgcacgcatcgatcagcgggagtagcgcaagctcaacgtcatccacacccgaggttaagcctctgaaatccctactcggggacagtgcacccacactgcacctcaacaaaggaacaccttctcagtctccagttgtggggaggtcacaaggccaacagcaggaaaaaaagcaattcgaccttctctccgaccttggaagcgacatcttcgccgcccccgctccacagtccacagcgaccgcaaatttcgcgaatttcgcacatttcaatagtcacgccgcacagaactcagccaatgccgactttgcaaactttgatgccttcgggcagagcagtggttccagtaatttcggaggtttccccacagcctcccattccccttttcagccacaaactacaggaggaagcgccgcttccgtcaatgcaaattttgctcacttcgacaattttcctaagtctagctccgctgacttcgggacattcaacactagtcagtcccatcagactgctagtgctgtctctaaagtttctacgaataaagcgggtctccagacagccgataagtatgctgctctggcaaacctcgataatatcttctctgccggacaaggcggggaccagggcagtggatttgggactaccggtaaggcacctgtcggatctgtggtgagtgtgccaagtcagagcagcgcctcgtcggataaatacgcggcgctcgcagagcttgactccgtattctcctcagctgcaaccagcagcaatgcctatacaagcacttcaaacgcctcctcaaatgtgtttggaaccgtgcctgtcgttgcgtctgcacaaacccagcccgcaagcagctctgtccccgccccattcggtgctaccccctccaccaatccattcgttgccgccgccggccctagcgtcgcgagttctactaatcccttccagacaaatgcacgcggggcaacggctgccactttcgggacggcctctatgtccatgccaaccggcttcgggacccctgcgccatactctctcccaacatctttcagcggttccttccagcagcctgccttccccgctcaagcagctttcccgcagcagacagctttctcacagcagcccaatggagccggtttcgcggcctttggtcagacaaaaccagtggtcacgccctttgggcaggttgctgctgccggcgtcagctctaacccctttatgactggggcgccaacgggtcaatttccgacaggaagctcctctactaatccctttctgtag

SEQ ID NO: 14341 - DNA, 2052 bp, synthetic construct
  source 1..2052: mol_type = other DNA; note = Synthetic coding sequence
atggccgctgccgttgccgctcctctggctgctggcggggaggaagctgccgccaccacttcggtccccgggtcccctggcctaccgggcagacggagtgctgaaagggccctggaagaagccgtggcgaccggtactttaaacctttcgaataggcgcctaaaacactttccacgcggcgccgcccggtcatacgacctttcagacatcacccaggcggatctctccaggaatcgcttcccggaggtgcccgaggctgcctgccagctcgtatccctggagggactatccctgtaccacaattgccttcgttgcctcaaccctgcactgggaaatcttacagctctgacttacttgaacttgtctcgcaaccagctgtccctgttgcccccctatatctgtcagctgccactgcgggtgctgatcgtcagcaataacaaattgggagcactgccccccgacatagggaccctcggaagcctgaggcagttagacgtctcatcaaacgagcttcagtccctgccctctgaactgtgtggcctgtcaagccttcgcgacctcaacgtaagaagaaaccagctttcaaccctgccagaggaactgggggatcttcctctggtgcggctcgatttctcttgcaaccgcgtctcccgtattcctgtatctttctgcagacttaggcatctgcaagtcatactgctcgactcgaaccctcttcaaagtccgccagcccaggtgtgtctgaagggaaaactgcacatttttaagtacctcagtacagaagctggccagcggggctctgctctcggagaccttgctccatctcggcctccatctttcagtccttgccctgccgaagacctgttccccgggcaccgctacgacggaggattggatagcgggttccactctgtggacagcggcagcaagcgctggagcggcaacgagagtaccgacgaattctcagaacttagtttcaggatatcggaactggctagggagcctagaggcccaagggagcggaaagaagacggctctgccgatggggaccctgtgcaaatcgatttcatcgactcccatgtcccgggggaagacgaggaaaggggcacagtcgaggagcagagaccaccagagctgagtccgggggcaggcgaccgggaaagagctccttcgtctcgccgggaagagcctgccggggaagaaagacggcggcccgatactctgcagctgtggcaggagagggagaggcgacagcaacagcagagcggtgcatggggggcacctagaaaagactctttactgaaacctgggcttagagccgtggtgggcggggcagctgccgtaagtacacaagccatgcataatgggtctcctaagagttctgcatcacaggctggggccgccgctggccagggggctcccgctccagccccagcttcccaagagcctctgcctattgctggccccgccacagcacccgcaccacggcccctcggaagcatccagcgacccaattcctttctgtttaggtcatcttcccaaagcgggtctggaccatccagccccgactcagtgctgaggcctcgtaggtacccccaggtacccgacgagaaggacctgatgacccagctgagacaagtccttgagagccgcctgcagcggccactgccagaggatttagctgaggcgctggcatcgggagtgattttatgtcagttagccaaccagcttcggcctaggagtgttccctttatccacgtgccttcccctgcggttcccaagctctctgcgctgaaagctcgcaaaaacgtggagagtttccttgaagcatgtcgcaagatgggcgtgccagaagccgatctgtgctctcccagcgacctactacagggcaccgctcgcggtctgcgaaccgccctggaagcagtgaagcgcgtgggcggaaaggccttgcctcctttatggccaccgagcggactcggaggattcgtggtattttatgttgtgctcatgctcctcctctatgtcacttacactcgcctactcggcagctag

SEQ ID NO: 14342 - DNA, 303 bp, synthetic construct
  source 1..303: mol_type = other DNA; note = Synthetic coding sequence
atgtccacatcgaccagctgtccaatcccaggagggagggaccagttgcctgattgctacagtacaaccccaggcggaacgctgtatgccacgaccccaggtggcactcggattatttatgacagaaagtttctcctggaatgcaagaatagtccgattgcaagaacccccccctgctgcctgcctcagattcccggcgtgacgactccccccactgctcccctgtcaaagctcgaggaactgaaagagcaagaaacagaggaggaaatccccgatgacgctcagtttgaaatggacatttag

SEQ ID NO: 14343 - DNA, 2382 bp, synthetic construct
  source 1..2382: mol_type = other DNA; note = Synthetic coding sequence
atgcccatggaatctgccagctctgacaacaagaaacaaattccaaacgaggccagcgctaggtccgagagggacaccagcgatctcgaacaaaactggtccctccaggaccactaccgaatgtactcacctattatttatcaggcgctgtgtgagcacgttcaaacacagatgtctctgatgaacgacctcacgtccaagaacatcccgaatggtatccccgcagtgccctgccacgccccttctcatagcgaatctcaggctacccctcactcttcctatggcctttgcacttctacccctgtgtggagcctgcagaggcccccctgcccgcctaaagtgcatagcgaggttcagaccgatggaaattcccagtttgccagccaaggaaagacggtgtccgcgacgtgtacagatgtactgcggaattcctttaatacctcccccggggtgccctgtagtctgcctaagacagacatctctgcaattccaacacttcagcagctcgggcttgtcaacggaatccttcctcagcagggcattcataaggaaacagatcttcttaaatgtattcagacctacctctccttattcagatcgcacgggaaagaaacccaccttgacagtcagactcacagaagccctacccagagtcagcccgcatttttagctaccaacgaggagaagtgcgcacgggaacagatacgggaagcaacatccgagaggaaggacctcaacattcacgtcagggatacaaagacagttaaagacgttcagaaggctaagaatgtgaacaagactgccgagaaggtgcgcattataaagtacctgttgggggagctaaaagccctagtcgccgagcaggaagacagtgaaatacagcggttgataaccgagatggaggcttgtatttcagtgcttcctacggtgtccggcaatacggatattcaggttgaaattgctttggccatgcagcccctgagaagtgaaaacgcgcagctcagacgtcagcttaggattctaaatcagcagttgcgtgaacagcaaaagacacagaagccatctggggccgtggattgtaatttagagttgtttagtctgcagagcctcaacatgagtctgcaaaaccaactcgaagagtcactgaagtcacaggagctgctgcaatccaagaatgaggaactgctcaaagtgatagagaatcagaaggacgagaataagaagttctcatctatctttaaggataaagatcaaaccatcctggagaataaacagcagtatgatattgagattaccagaatcaagattgagctggaagaagctttggttaacgtaaagtcaagtcagtttaaattggaaacagcagagaaggaaaatcagattctcgggattactctcaggcaacgcgacgccgaggtaacccgattgcgagaattgacacgtacacttcagaccagtatggcaaaattactgtccgatttgtcggtcgactcagctcgatgtaagccaggcaataacttgacaaagtccctgctgaacatacacgacaaacagctccagcacgaccccgctcctgcacacacctcaatcatgtcctatttgaacaagttggagaccaattatagcttcactcactcagagcccctgagcaccatcaagaatgaggaaaccatagagccagataaaacttacgagaacgttctgagtagccggggccctcaaaactcaaacacacggggcatggaagaggcctctgcacctggaattatatccgcattatccaaacaggactctgacgaggggtctgagaccatggccctcatagaagacgagcataatctggacaacaccatatacatcccctttgcccgatctaccccagaaaagaagtcccccctctcaaagagattgtcaccacagccgcagatacgggccgctacaactcagttagtgtcaaattcagggcttgccgtcagtggcaaagagaacaaactgtgcacacctgtcatctgcagttcatctacgaaagaggctgaggacgcacccgaaaaactgtcacgggcctccgatatgaaggacacacagctattgaaaaagatcaaggaagccattggtaaaattcccgctgctaccaaggagccggaggaacagactgcatgccatggtccttccggctgcctgagtaactccctgcaggtgaagggcaataccgtttgcgatggatctgtgttcacaagcgatctgatgtcagattggtcaatatctagcttttcaacatttacatcacgagatgaacaggattttagaaacgggctggcggccttggacgccaacatcgctcgcttacagaaatccctccgcaccgggcttctggaaaaatag

SEQ ID NO: 14344 - DNA, 1119 bp, synthetic construct
  source 1..1119: mol_type = other DNA; note = Synthetic coding sequence
atgactttccagttcaactttaccattgaggatcacctggaaaatgagttaacacccatacgcgacggtgcactcacactggattctagtaaagagcttagtgtctccgaatctcagaaaggcgaagagcgggaccgcaaatgctcggcggagcagttcgatctgccgcaagatcacctttgggaacataaatccatggagaatgccgctcccagccaggacacagactcccctttgtcagcagcttcgagcagtcgaaatttagaacctcacggcaagcagccttccctaagggccgccaaagagcatgcgatgcctaaggaccttaagaagatgcttgagaataaagtgatagagaccctgcccggctttcaacacgtgaaactgagcgtcgtgaagaccatcctgttgaaagaaaacttccctggggaaaatattgtgtcgaaatcgtttagctcccattccgatttgatcacaggcgtttatgagggggggctgaagatctgggagtgcacctttgaccttctcgcttactttacgaaggctaaggttaaatttgcaggcaaaaaagtactggacctggggtgcgggtcagggttactgggaattacggcttttaaaggtgggagcaaagagattcatttccaggattataattccatggtgatagatgaggtgactctgcccaatgtggtggccaacagcacactggaggatgaagaaaatgacgtgaatgaacccgatgtgaagcgctgtagaaaacctaaagtcacccagctgtacaagtgccggtttttcagcggcgaatggtccgagttttgtaagttggtgctctctagtgagaagctcttcgtgaaatacgatctcatccttacatccgaaactatctacaaccctgactactacagtaatttacaccagacgtttctccgattgctcagcaaaaacgggcgtgtactgctggcctctaaagcccactactttggcgtcggaggcggcgtgcatctctttcagaaatttgtcgaggaacgggacgtgttcaagactaggattcttaaaatcattgatgagggcttgaaacggttcatcatcgagatcacattcaaattccccggatag

SEQ ID NO: 14345 - DNA, 336 bp, synthetic construct
  source 1..336: mol_type = other DNA; note = Synthetic coding sequence
atgactacgctgagggcatttacatgcgatgacttgttcaggtttaataacatcaacctggacccactcactgaaacctatggcatcccgttctacctccagtatctcgcccactggcccgagtatttcattgtcgccgaagctccaggtggggagctgatgggctacataatggggaaagccgagggaagcgtcgcacgggaggaatggcatggccatgttaccgcccttagtgtggctccagaatttagacgactgggcttggctgccaaactaatggagctgctcgaggagatatcggagaggtacgaagaatctactttccaggggtattag

SEQ ID NO: 14346 - DNA, 1449 bp, synthetic construct
  source 1..1449: mol_type = other DNA; note = Synthetic coding sequence
atgaatggtacactcgaccatcccgaccagccggacctcgatgcgattaaaatgttcgtcggccaagtgccccggacatggtccgagaaggatcttcgcgagctgtttgaacagtatggcgcagtgtacgagatcaacgtgctcagagaccgctcacagaaccctcctcagagtaaagggtgttgcttcgtgactttctacaccagaaaggctgctcttgaggcccagaatgccctccacaacatgaaggtccttcccggtatgcaccatcccatacagatgaaaccagccgattccgagaaaaataacgccgtggaggacaggaaacttttcattgggatgatctcgaaaaaatgtaccgaaaatgacatccgggtgatgtttagcagctttgggcagattgaagagtgtcgcatcctgaggggtcctgacgggctgagtagaggctgcgcatttgtgacattcaccacgcgtgctatggcacagacagccattaaggctatgcaccaggcccaaactatggaaggatgttcatcgcccatggtggtgaaattcgccgacacgcagaaggataaggaacaaaaaagaatggcgcaacagctccagcaacagatgcagcagatttcggccgcgagtgtttggggaaatctggctggactgaatacgcttggcccacaatatctcgcattgcttcaacagactgccagctccggtaacttaaacacattatcctccttgcatcccatgggaggcttgaacgcgatgcagctccagaatctcgcagctttggccgccgctgctagcgcagctcaaaacactccctctggcaccaatgccctaacgacaagttcatcgcctcttagcgttctgacctcctcaggctcatccccttcctcatcttcatccaatagtgttaacccaatcgcatcactcggcgccttacaaacactggccggggcgaccgctgggttgaacgttggtagcctagccgggatggctgctttgaatgggggcctgggctcttctggcttgtccaatgggacaggtagtaccatggaggctctgacacaagcttattcaggaatccagcagtatgccgctgcggctctcccgactctgtacaaccaaaacctgctcactcagcagagcatcggcgccgccggctcccagaaagaaggcccagagggagcaaatctgttcatttaccaccttccccaggaattcggagatcaggacttattacagatgttcatgccctttggcaacgttgtgtcagccaaagtgttcatagacaaacagaccaacctatcaaagtgcttcggatttgtcagctatgataatcctgtctctgcccaggcggccattcagagcatgaacggctttcagatagggatgaaaaggctcaaggtgcaactaaagcggagcaaaaatgactccaagccctactag

SEQ ID NO: 14347 - DNA, 1347 bp, synthetic construct
  source 1..1347: mol_type = other DNA; note = Synthetic coding sequence
atgtctcctctagagtgtagtgaatgcttcggcgaccagctgctgcaccggacttacacctggcagttaactcttcactcacgccccaactacacccgcaagcgggacactaggagcgagtcactcgagatccccatctctgtcgtactgcctcaaagaggtacagccgagccattccccaggctgcacaacctgtattccacacctagatgcgcacagcaggcggctcttcccagactgtcaagacggatggcatcacaacacagctatcccctgaatcggttcagctctgtgcccctcgaccctatggagcgaccgatgagccaggctgatttggagttagactataacccgccaagagtccagctgagcgatgagatgttcgtctttcaggacgggcgttgggtgaacgagaactgcaggttacagagcccgtatttcagccccagcgcctcgtttcaccataagctgcaccacaagcgcctggccaaagagtgcatgctgcaggaagagaacaagagtctccgagaagagaataaagccctgcgtgaggaaaaccgcatgctgagcaaagagaacaagatcttacaggtcttttgggaggaacacaaggcttctcttgggagagaagaatcgagggccccatctccactcttgcataaggattccgcctcattggaggtggtgaagaaggaccacgtcgcacttcaggttccccgaggcaaagaggactccactctgcagttactccgggaagaaaatcgagcattgcaacaattactggaacaaaagcaggcatattgggctcaggcagaggacaccgcagcaccagccgaggagagtaaacctgctccttcgcctcatgaggaaccgtgcagtccagggctgctgcaggaccaaggaagcggcctaagttctaggtttgaagagccgaagggtccccctgctcggcaggaggactcaaaagaactaagggcccttagaaagatggttagcaacatgagtggaccttccggcgaagaagaagcaaaggtcgggcctgggctcccggacggctgtcagccactgcagcttttaagggagatgcgccaggcattacaagccttgctcaaagaaaataggctcctccaagaggagaacaggaccctgcaggttctcagagcagaacacagaggtttccaagaagagaataaagccctgtgggagaacaataagctgaagctgcaacagaaacttgtaattgacaccgtcactgaagtcacagctcgcatggaaatgcttatcgaagaactgtatgcattcatgccagcccgaagccaggaccccaagaaaccctctagggtttag

SEQ ID NO: 14348 - DNA, 1002 bp, synthetic construct
  source 1..1002: mol_type = other DNA; note = Synthetic coding sequence
atggcagctgccgccgctgggacggcgacatcccaacgcttttttcaaagctttagtgacgccctgatcgatgaagaccctcaggcggctctggaggaactgacaaaagcgctagaacagaagcccgatgacgcacagtactactgtcagagagcctactgccacatcttactgggcaattattgcgtcgccgtggctgatgcgaagaagtccctcgagctgaacccaaataattcgaccgccatgctgagaaagggtatctgtgagtatcacgaaaaaaattacgctgccgctctcgaaacattcactgagggccagaaattggattccgccgacgcaaatttttcagtgtggatcaaaagatgccaggaggctcagaatggctccgagagcgaagtgtggacccaccagtccaagatcaaatacgactggtatcagaccgagtcacaggttgtaatcactctgatgataaagaacgtccagaagaacgacgtgaacgtggagttttccgaaaaggagttgtccgctctggtcaaattaccatccggcgaggattataatctgaagctggagctgctgcatcccattattcccgagcaatccacttttaaggtgctttccaccaagatcgaaatcaaattgaagaaacccgaggcggtaaggtgggagaagttggaaggacagggtgatgttcccacacccaaacagttcgtggccgatgtcaaaaacctctaccccagctccagtccctatacacgcaactgggacaaactggttggcgagattaaggaagaagaaaaaaatgaaaagcttgagggggatgcagcactcaaccgtctttttcagcagatttactccgatggctccgacgaagtaaaacgcgcaatgaataaatcgttcatggagtctggcggtaccgttctgtccacaaattggtcagacgtcggcaagagaaaagtcgagataaacccacccgatgatatggaatggaagaaatattag

SEQ ID NO: 14349 - DNA, 1029 bp, synthetic construct
  source 1..1029: mol_type = other DNA; note = Synthetic coding sequence
atgtccctgcatgggaagagaaaagagatctataagtatgaagcaccctggacagtttacgctatgaactggagcgtgcggcccgataaaagatttagactggcactcgggtcttttgtcgaggaatataataacaaagtgcaactggtcggactggatgaagagagctccgaatttatctgcaggaataccttcgaccacccatatccgacaaccaagttgatgtggatccccgatactaaaggtgtgtaccccgacctcctggccacatccggagactacctgagggtgtggagggtgggggaaaccgaaacaaggctggaatgtctgctgaataacaataagaacagtgacttttgcgccccccttacctcattcgattggaacgaggtagacccatatctattggggaccagcagtatagacacaacatgcactatctggggcctggagaccggtcaggtgctgggtcgcgtgaacttagtatctggacatgtgaagacccagttaatagcacatgataaggaagtttacgacatagcctttagtagagccgggggaggccgcgacatgtttgcctcggtgggtgctgacgggagcgtcaggatgttcgatctaagacacctcgagcattccacaattatttacgaggatccgcagcaccatccgctgctgcggctgtgctggaacaaacaagaccctaactacctcgccacaatggcaatggacgggatggaagttgtgatcttggatgtcagggtcccgtgcacgcctgtagcccggctcaacaatcacagggcttgtgtgaatggcatcgcctgggccccacatagttcgtgccacatctgcactgccgctgacgaccatcaagccctgatctgggatattcaacaaatgcccagggctatcgaagatccaattttggcctatacagccgaaggcgagattaataacgttcagtgggcaagcacacaacccgactggatagcaatctgctacaacaactgcctcgagattctccgcgtttag

SEQ ID NO: 14350 - DNA, 507 bp, synthetic construct
  source 1..507: mol_type = other DNA; note = Synthetic coding sequence
atggctgagggcagcagaattccacaggcacgcgccctgctgcaacagtgcttgcacgccaggctgcaaattcgccccgcagacggcgacgtcgccgcacagtgggtggaggtgcagagggggctggtgatctacgtgtgtttctttaaaggcgccgacaaggagttgttacctaaaatggttaacaccctgcttaacgtgaagctttctgagactgagaacggaaagcacgtgtcgattctcgatcttcctggtaacattctgatcatcccacaggctacactgggaggtcgactaaagggacgcaacatgcaataccacagcaatagtggcaaagaagaaggcttcgaactgtattcccaattcgtgacactttgcgaaaaagaggtcgctgctaactctaagtgtgcagaggcccgcgtggtggtggagcacgggacctacgggaataggcaagtgttgaagcttgatactaacggtccttttacccaccttattgagttttag

SEQ ID NO: 14351 - DNA, 3069 bp, synthetic construct
  source 1..3069: mol_type = other DNA; note = Synthetic coding sequence
atggaaggcgccctaacggcacgggacaaggtaggggtacaagatttcgtattattagacgcatacaccagcgagtccgcatttgtagataacctgcggaaacgtttttccgagaatctgatctatacctatattgggaccctccttgtcagcgttaacccctatcaggaacttggaatctatacagtgagccagatggaactttatcagggggtcaactttttcgagctaccacctcacgtgtatgcaatcgcagataacgcctataggatgatgtgcgctgaattgaataatcattttattctgatatcgggtgagagcggggcgggtaagaccgaggcatccaagaagattctcgaatactttgccgtcacttgcccgatgactcagagcctacaaatcgctagggacaggttattgttttcaaaccccgtgctcgaggcgtttggtaacgctcgcactctgcgaaatgataatagctctcggtttggtaagtatatggatatccagtttgacttccagggcattcccgttggtggccatatcatctcctatcttattgaaaaaagccgcgttgtataccagaatgaaggcgaacggaacttccacatcttctatcagctactggctgggggggaggaagaacggctctcatacctggggctggagcgcgatccccagctatataagtatttatcacaaggtcactgcgccaaggagagttcaatctcagacaaaaacgactggaagaccgtcagtaacgccttctctgtgattgacttcacagaggcagacctggagaatctgttcggcatcatcgctagtgtgcttcatctaggcaatattgggttcgaagaagacgatcaaggttgcgcaactatacctgacacgcacgaaattaagtggattgccaaactcttgggtgttcatcccagcgttctcctggaggctctgacccacaggaaaattgaggcaaagaccgaggaggtcatctgtccattaactcttgagctcagtgtgtacgccagagatgctatggcgaaggcagtatacggccgcacctttacatggctagtcaacaaaattaatagctcacttgtcaacaaggatttcacacggaaaacggtgatcggattgctggacatttatggttttgaagtgtttgataagaatggttttgagcagttttgcataaattattgtaacgaaaaactgcagcagttgctcatcgaaagaacacttaaggctgagcaggccgagtatgagatggaaggcattgagtgggagccaataaagtatttcaacaacaaaattatttgtgacctggtggaggagcggcataagggtatcatctcaatcctcgacgaagagtgtattcggcctgggccggcgacagatctgagcttcctcgaaaagctggaagagaaagttgggaagcatgcccacttcgagacacggaagcttgcaggtccgaagggtagaaagaggattggctggatggagttcagactactacactatgcgggagaggttacatattgtactaagggttttctggagaaaaacaacgatctactctaccgccacctgaaggaggtgctgtgcaagtccaaaaacataatcttacgagagtgttttcttctggcagaacttgaaaatcgccgccgcccgcccaccgtgggaacgcaatttaaaaatagcctgtccagtctgctagagaccttgatatctaaagaacccagctatatacgatgtattaagccgaatgataggaaagaaccttctaagttcgacgacttcctcatccgccatcagatcaaatacttaggcttgatggagcatctccgagtgaggagagccggatttgcttatagaaggaagtatgagcacttcctccaaaggtataagagtttgtgtccggacacatggcctcattggcatggaccacctgctgagggcgtcgaacggcttattaagtatattggctacaagcctgaagaatataaactggggaagaccaagatctttatccgatttccccgtacattgtttgccaccgaggatgcctttgaattctccaagcatcaactggtcgctcgcatccaggccacctataaacggtgcctcggccgccgcgagtacgttaagaagaggcaagctgccattaagctggaagctcattggcgcggggctctggctcgtaaagcaatccagagacgcaagtgggccgttcgaataattcggaaatttattaaaggttttatttcccgtaataagccgctgtgcccagacaatgaggaattcatcgtctttgtgcggaaaaattacatactgaatctgcgctatcacttgcccaaaactgtgctggataaatcatggctgaggcctccaggcatcctggagaatgcaagtgacctgctgcgtaagatgtgcgtcaggaacctggtgcagaagtattgtcgcgggatcaccgcggaaaggaaggccatgatgcagcagaaagtggtcacgtccgaaatctttagaggcaggaaggacgggtacactgaatcactaaaccagcccttcgttaactcacggatagatgagggagacatcaatccaaaggtcctccagttgattagccacgaaaaaatccagtatggcgtccctgtgataaagtatgaccgcaagggcttcaaggctagacaacgacagttaatcttaacacagaaggctgcgtacgtcgtggagctcgccaaaataaagcagaagatagaatactctgctcttaagggggtgtctacttctaatctgtctgacggtatccttgtcatacacgtcagtccggaggacagtaagcaaaagggggatgccgtactccagtgcggccatgtgtttgaggcggtgacaaagctggttatgttagtgaagaaggagaatatcgttaacgtggtacagggcagcctgcagtttttcatctctccagggaaagaaggtaccatcgtgttcgataccgggcttgaagagcaggtttataagaataaaaacggccagctgacagtggtcagcgtccgcaggaagtcttag

SEQ ID NO: 14352 - DNA, 1044 bp, synthetic construct
  source 1..1044: mol_type = other DNA; note = Synthetic coding sequence
atgaacacattaatggacgtgctgcgtcaccggcctggctgggtggaagtgaaggacgaaggagaatgggatttctactggtgtgatgtgagctggctccgcgagaacttcgatcacacctatatggatgagcacgtcagaatctcccactttaggaaccactacgagcttaccaggaagaactacatggtcaaaaatctgaaaagattccgaaaacaattagagagggaggctgggaagcttgaggcggctaaatgcgactttttccctaagacattcgaaatgccttgcgagtatcatctctttgtcgaggagtttcgcaaaaatccaggaataacatggatcatgaaacccgtagcccgcagtcaagggaaggggatattcttatttaggcgactgaaagatatagtggattggcggaaagacaccagatcaagcgacgaccaaaaggacgatattccggtggagaattacgtggctcaacgctacattgaaaacccttatctgattggagggcgcaaattcgacctgcgcgtatatgtgttggtgatgtcatacattccccttagagcctggttgtacagagacggattcgccaggttcagcaacacgaggtttacactcaactccatcgatgaccaatacgtccatctgactaatgttgccgtgcagaaaacatcaccagactaccacccgaaaaaagggtgtaagtggactttgcagcggttccggcagtaccttgcatcaaagcacggaccagaggcagtggagacactttttcgggacatagataatatattcgtgaaatcactgcagtctgtgcagaaagtgattatttcagacaagcactgttttgagttgtatggatacgacatcttgatcgaccaagacctgaaaccctggttgcttgaggtaaacgcttctccatccctgactgccagtagtcaggaggactacgagctcaagacctgtctgttagaggatacattgcatgtcgtcgatatggaggctcggtctctgcgggccgatagtccctgttggtag

SEQ ID NO: 14353 - DNA, 444 bp, synthetic construct
  source 1..444: mol_type = other DNA; note = Synthetic coding sequence
atgagctctgagccgccgcctcctccacagcctcccacacaccaggcttccgttggcctcctggacacacctcggtcaagagagcgttcgccatctccgctacggggcaatgtcgtcccgtcccctctgcctacacgccgcacccgcactttcagcgctaccgtccgcgcatcacagggcccagtttacaagggcgtgtgcaaatgcttctgccgcagtaagggccatggcttcatcactccagctgacggcggacctgacatctttctgcacatctcagacgtagagggagagtacgttcctgtggaaggagacgaagtcacttataagatgtgcagcattccgcccaaaaacgagaaacttcaggctgtggaagtggtcataactcacctcgcaccagggactaagcacgagacgtggagcggacacgttatttcatcttag

SEQ ID NO: 14354 - DNA, 558 bp, synthetic construct
  source 1..558: mol_type = other DNA; note = Synthetic coding sequence
atggctgacggcggtggcgggggaggtaccggcgcagtgggcgggggcggcacatcacaggcctctgcaggggccgccaccggggctacaggcgccagcgggggaggcggaccaatcaacccagcctccctcccacccggcgatccacaattgatcgctctgatcgtggaacagttaaagagtagaggtctgtttgattctttccgcagggactgcttggccgatgtagatacgaagcccgcgtaccagaacttgcgccagaaagtggataatttcgtctcaacacacttggataaacaggaatggaaccccaccatgaacaaaaaccagcttcggaatggcttgcgtcaaagtgtcgtacagtcaggcatgttggaagccggagttgaccggatcatttcccaggtggtagatccaaagctaaaccatattttccggcctcagatcgaacgagccatccatgaatttttggctgcacagaagaaggctgccgtgcctgcaccacccccagagccagagggtcaggatccacccgccccatcgcaagatacctcttag

SEQ ID NO: 14355 - DNA, 6351 bp, synthetic construct
  source 1..6351: mol_type = other DNA; note = Synthetic coding sequence
atggacgaggtggagcaggaccaacacgaagctaggttgaaggagttgttcgattcctttgataccacagggactggctccctcgggcaggaggaattaactgacctgtgtcacatgctcagcctggaggaagtcgcacctgtactccaacagaccctgttgcaggacaacctgcttggccgagtccacttcgatcagtttaaggaggcgctcatcctgatactgagtcgaaccctgtcaaacgaggagcacttccaggaacctgattgctccctagaagcccagccaaagtacgtccgtggaggcaaaagatacggcagaagatcgctccctgagttccaagagagcgtcgaagaatttcccgaagtgaccgttatcgaacctctggatgaagaggctagaccatcgcacattccagctggcgactgctccgaacattggaagacccagagatccgaagagtacgaagccgagggacagctcaggttctggaatcccgatgatctgaacgcatcccaatccggctcttccccaccacaggattggatagaggaaaaattgcaagaggtgtgcgaagatctgggtattacacgtgacggccacctcaacaggaagaagcttgtcagcatctgcgaacaatacgggctgcagaatgtggatggagaaatgttggaagaagtgtttcataacctggaccccgatgggaccatgagcgtcgaagattttttctacggcctgtttaagaacgggaaaagtctcaccccatcagcatccactccctaccgtcaactgaagcgacacctttccatgcagtcatttgacgagtcggggaggcggaccactaccagctcagccatgacatcaaccataggtttccgcgtattctcctgtcttgacgacggcatggggcacgcctctgttgaacgcatcctggatacctggcaagaagagggcatcgaaaatagccaggaaatccttaaggcgctagatttctctctggatggtaatattaatcttactgaactcacactggctctggagaacgagctgctcgtgaccaagaacagtatacaccaagctgctcttgcttctttcaaagccgaaattagacatctcctagagcgtgtcgaccaggtcgtgagagagaaggaaaagctccgctccgaccttgacaaagctgaaaagttgaaatccttgatggcctctgaggtggatgaccaccatgctgccattgaacgtcgcaatgaatataacctccggaagctggatgaagaatataaagaacggatagccgccctgaaaaacgaactcagaaaggaacgcgagcagattctccaacaggccggaaagcagcgcttagagcttgaacaggagattgagaaggccaaaaccgaggaaaattatattagagatcgcctagccttgtccctcaaggaaaatagtaggctcgagaacgagcttttggagaacgccgagaacgttctggcagagaaatttggggatctggacccatccagtgccgagttctttctgcaggaggagaggctgacacagatgcgcaatgagtatgaacgccagtgcagggtcttacaggaccaggtggatgagctgcagtccgagctcgaggagtaccgcgcccagggacgggtgctccgcctcccccttaagaactcgccctcagaggaggtggaagctaacagcgggggcatcgagcctgaacatgggctcggcagcgaggagtgcaaccccctcaatatgtctatagaagccgagctcgtgatcgagcagatgaaggagcagcatcatcgcgacatttgttgcctgcggctggagctggaagataaagtgaggcactatgagaagcagcttgatgagacagtggtgtcctgcaagaaggcgcaggagaatatgaagcagcggcatgagaacgagacccacacactcgagaaacagatcagtgatctcaagaacgagatagcagaactgcaagggcaggccgctgtgctaaaggaagcacatcacgaggcaacatgcagacacgaagaagagaaaaaacagctgcaagtgaagttggaggaggagaagacccacctccaggagaaactccgcctccagcacgagatggagttgaaggctaggttgacacaggcccaagcctccttcgagagggagagagaggggttgcagtcatcggcatggaccgaggagaaggtcagggggctgacacaagagctcgaacaattccaccaggagcagctgacctccctggtggaaaagcatacactagagaaagaggaattacgaaaagaactcctcgagaaacaccagagggaacttcaggaagggcgagagaaaatggagacagaatgtaaccgtcggacttcccagatcgaagcccagttccagtccgattgccagaaggtgaccgaacggtgcgagagcgccctgcagtcactggagggtcggtaccgtcaagagctcaaagatctacaagagcagcaaagggaagaaaaaagccaatgggagttcgagaaagacgagcttactcaggagtgcgccgaggcccaggaattgctcaaggagaccctgaagcgtgaaaagaccacatctctggtcctaacccaggaacgggagatgctcgagaaaacttacaaagagcatttgaatagtatggtcgtagagcggcagcaactcctgcaggacctcgaggatctccgaaacgtctccgaaacacagcagtccctattgtcagatcagattcttgagctgaagtcctctcacaagagagagctgcgagagcgtgaggaagtgctctgccaggccggagccagcgaacagctggctagccaaagactggaacggcttgaaatggagcatgaccaggaaaggcaggagatgatgtctaaacttctcgctatggaaaatatccacaaagccacttgcgagacagcggacagggagcgcgccgaaatgtcaactgaaatctccaggcttcagagtaagatcaaggagatgcagcaggcaacttccccactaagcatgctgcaatccggctgccaagtcatcggagaggaggaggtggaaggggatggagcgctgtcattactccagcagggcgaacagttactcgaggagaacggggacgtcctgctgtctttgcagcgcgctcacgaacaggctgttaaagaaaatgttaaaatggccactgaaatcagccgcctgcagcagcgtctccagaagctggagccgggcctggtgatgagctcatgcctggatgaaccagctacagagttcttcggcaacactgccgagcagacagaacaatttctgcaacagaatagaaccaagcaggtagagggggtgacacggcgccacgttctaagcgacctggaagacgacgaagtccgggatcttgggagtaccggaacctcatcagtccaacgtcaggaagtcaagatcgaggaatcagaggcctcagttgaagggttttcagagctggaaaatagtgaagagacgcgaactgagtcatgggaattaaagaaccagatctcacagctgcaggaacagctcatgatgctatgcgcagactgcgacagagcttctgaaaagaaacaggacctgctcttcgatgtgtcagtgctgaagaagaagttaaagatgttagagcgcatccctgaagcaagcccaaaatacaagttactttatgaagacgtatcacgagagaacgattgcctgcaggaggaactcagaatgatggagactagatacgatgaagctctcgagaacaacaaagaacttacggcggaagtcttccgcctgcaggacgagctgaagaagatggaagaagtgacagaaacattcctctcattagaaaagagctacgacgaggtgaagatcgaaaacgagggcctgaacgtgttggtgcttaggttacagggcaagatcgagaaactccaggaatcagtggtccagagatgtgattgttgtctttgggaggcttctcttgaaaacttggaaatcgaaccggatggaaacatcctccagttgaaccagacccttgaggaatgcgttccacgtgtgcgtagtgtgcaccacgtgatagaggagtgcaagcaggagaaccagtaccttgagggtaacactcagctgctggagaaagtgaaggcccatgagatagcgtggcttcacgggacaatccagactcaccaagagcggcctcgggtccaaaaccaagtcatcctcgaggagaatacaactctgctggggttccaggataagcatttccagcaccaggccacaattgcagaactggaactggagaagacaaaactgcaggaactgactcgcaagctaaaagaaagagtgactatcctagtcaagcagaaggacgtgctatctcatggagaaaaggaggaggagctgaaagcaatgatgcacgatctgcagatcacttgcagcgagatgcagcagaaggtcgagctcctcagatacgagagcgaaaaactacagcaggaaaactccattctgaggaatgagataacaaccttaaacgaggaggattctatttctaacttgaagctcgggacgcttaatgggagtcaggaagaaatgtggcagaaaactgaaactgtgaagcaggaaaatgctgccgtccagaagatggtcgaaaacttgaagaagcagattagcgaattgaagattaagaaccaacagctagatctggaaaacaccgagctgtcccagaagaatagtcaaaaccaggagaaactgcaggaactgaatcagagactaactgaaatgctgtgtcagaaggaaaaggagccaggcaattcagcgctagaggagagagaacaggagaaatttaatcttaaggaggaactcgaacgatgtaaagttcagagttcaactctggtgagctccttggaggccgaactctcggaggtgaaaatccagacacatatcgtccagcaggagaatcacctcctgaaggacgaattggagaaaatgaaacagctgcaccggtgcccagacctgtcggacttccagcagaagatctcctcagtgctctcctataacgagaagctgcttaaagaaaaagaggcattgtccgaagagcttaatagctgcgtggataaactggcaaaatcatccctactggagcaccggatcgcaactatgaaacaggagcagaagtcctgggagcatcagagcgcttcactcaaatcccagctcgtcgcctcccaagaaaaggtccagaatctggaggatactgtccaaaacgtgaacctccaaatgagtcgcatgaaaagtgacttaagggtgacacaacaagagaaagaagctctgaaacaggaggtcatgagcctgcataagcagctgcaaaatgccggcgggaaatcatgggctccggaaattgcaacgcacccctcaggattgcacaaccaacagaaacgattgtcatgggataaacttgatcacctgatgaacgaagaacagcagctgctctggcaggagaatgagagactgcagacaatggttcagaacaccaaagcagagctgacacacagccgagagaaggtgcgacaattggagagcaatctactcccaaaacatcaaaaacacctcaacccctcaggcacaatgaaccctaccgaacaagagaaactgtccctgaaacgcgaatgcgatcaattccagaaggaacagtcaccggccaataggaaggttagtcagatgaattctttagaacaagaactggagactatccaccttgagaatgagggcctgaagaaaaaacaggtcaagctcgatgaacaactcatggagatgcagcacctacgctcgactgctacgccatctccatccccccacgcctgggacctgcagctgctgcagcagcaggcgtgtcccatggtgccaagggagcagttcctccagttgcagcggcagctcctgcaggccgagagaatcaaccaacaccttcaagaggagctggagaaccgtacatccgaaactaacacccctcagggcaatcaggagcaactggtgacggtaatggaagagcgcatgatcgaagtggaacagaagctgaaactggtaaaaaggctacttcaagagaaggtcaatcaactaaaagaacagctgtgtaaaaacacaaaagctgacgctatggttaaggacctgtacgttgaaaatgcgcagctgctgaaggctctggaggtgacagaacagagacaaaaaacagccgaaaaaaaaaattatctcttagaggaaaagatcgccagcctttcaaacattgtgagaaatctgacccccgctcctctgacctcaactccgcctctgcgcagttag

SEQ ID NO: 14356 - DNA, 2664 bp, synthetic construct
  source 1..2664: mol_type = other DNA; note = Synthetic coding sequence
atgcccatacttttgttcctgatcgacacctcggcctccatgaatcagcgttctcatctcggcaccacgtatttggataccgccaaaggggcagttgagaccttcatgaaactacgtgctagggatcctgcttctaggggggaccgttacatgctcgttacatttgaggagccaccttatgccatcaaagccgggtggaaggagaaccacgccacgttcatgaatgagcttaagaatctgcaagcagaagggctcacaacactcggacaaagcctgcgcacagcttttgatctccttaatctcaatcgactcgtgactgggattgacaactacggacaggggcggaatcctttttttctggagccggctatcatcatcaccatcactgatgggagtaagttgactactacctcgggcgtgcaagatgagctccatctgcccctcaactcacccctgcctggctcggagttgaccaaagagccctttcgatgggatcagagactcttcgccttggtcttgcgtctccccgggacgatgagtgttgagagcgaacaattgacaggcgtgccattggacgactctgctattaccccgatgtgtgaggttaccgggggacgctcttactccgtctgctctcccaggatgctgaatcagtgcctcgaatccctggtgcagaaggtgcaaagtggcgtcgtgatcaattttgaaaaggcgggtccagacccttccccggtggaagatggtcagccagatatatccaggccattcgggtcccagccatggcatagctgccataaactgatctacgtgaggcccaatcctaagacaggtgtgccaatcgggcactggcccgtaccggaaagtttttggcccgaccaaaactcccctactctgccccctcggacttcgcatcctgttgtcaaattttcctgcactgattgcgagccaatggtgatcgacaaattgccattcgacaagtacgaacttgagccatcaccactcacacagttcattctggagaggaaatcgccacagacctgctggcaggtgtacgttagcaatagcgccaagtactccgagctgggacacccttttgggtacctcaaggctagcaccgctctgaattgcgtgaacttgttcgtgatgccttacaattacccagtgctgctgcctctccttgacgacttatttaaagtgcataaggcaaaaccaacactgaaatggaggcaaagctttgaaagttatcttaagacaatgcctccatattaccttggtccactgaagaaagccgttagaatgatgggtgctccaaatctgattgctgatagcatggagtacggcttatcttacagcgtcatcagttacttaaagaaattaagccaacaggctaaaatagagagcgaccgcgtgatcgggtctgtggggaagaaagtggtgcaggagacagggataaaagtacggtcaagatcccacgggttgagcatggcttatcgaaaagattttcagcagctgctgcagggaataagtgaagacgtccctcatcgcctgttagatctcaatatgaaggaatacacgggtttccaggtggcactcctaaacaaagacctgaaaccacagacattcagaaacgcatacgatatcccccgcaggaatctgctggatcatctgactcgcatgaggtcgaaccttctgaaaagcaccaggcggtttctaaaagggcaggacgaggatcaggtacactccgtgcctatcgcacagatgggtaattatcaggagtacttgaaacaggtgccttcaccactgcgcgagctggatcctgatcaacccaggcggttacacacttttggtaaccctttcaagttagacaagaaaggaatgatgattgacgaagctgatgagtttgttgccgggccccagaacaaacataaaagacccggcgaacctaatatgcaggggatccccaagcgccgacgctgtatgagcccactcctcaggggccgtcagcagaaccccgtggtcaacaatcatattggagggaaagggccccccgcccccacaacacaggctcaaccagatctgattaagcccctgccgctgcacaaaatctctgagactacaaatgactccatcattcatgatgtggtcgagaatcacgtcgcagaccaactgtctagcgacattacccctaatgctatggacaccgagttctcagcctctagcccggcctcacttttagaacggcctaccaatcacatggaagccctaggacacgatcatctggggacaaatgacttgacagtgggaggcttcttggagaatcacgaggaaccccgtgacaaagaacaatgcgcagaagaaaacatcccagcatcttcactcaacaagggcaaaaagcttatgcactgtcggtcacacgaggaagttaacactgaattaaaagcgcagatcatgaaggaaatccgcaagccgggtcggaaatacgagcgcatcttcacgcttctaaaacatgtgcagggcagtctgcagacccgactgatttttttacaaaatgtgattaaggaggcttcacgattcaagaagcgaatgctgattgaacagctggagaacttccttgatgaaattcacaggcgggccaaccaaattaaccatattaattccaactag

SEQ ID NO: 14357 - DNA, 1944 bp, synthetic construct
  source 1..1944: mol_type = other DNA; note = Synthetic coding sequence
atgtctgacgaggtcttcagcactacactggcttacactaagtcacccaaagtgacaaaacgaacaacatttcaagatgagcttatcagggccattactgcccgcagcgccagacagagatcgtccgagtattcagacgattttgactccgacgaaattgtgtccctcggtgacttttctgacacaagtgcagatgaaaatagtgtgaataaaaaaatgaatgattttcacatatcggacgacgaggagaagaatccgtccaaactgctgttcttaaagaccaacaaatcaaacggcaatattacaaaggacgaaccagtgtgcgcaattaagaacgaagaagaaatggcgccagacggctgtgaagacattgtcgtgaagtcgttttcagaatcccagaacaaagatgaagagtttgagaaagacaaaataaagatgaaaccaaaacccaggattctttccatcaagagcacatcttccgccgagaataatagcctagacactgacgatcactttaagccttctccaaggcccagatctatgctgaaaaagaagtctcacatggaagagaaggacggcttggaggacaaagaaacggcattatccgaagagctcgaactgcactccgcgccctcctccctacccacaccaaatggcatccagctggaagccgagaagaaggcgttcagcgagaatctcgaccccgaggacagttgtctcacctctctcgcgtctagttcactgaagcagattttgggtgacagcttttcccctgggtctgaaggtaacgcctcgggcaaggaccctaatgaggagatcacggaaaaccataatagcttgaagtccgacgaaaacaaggagaattcattcagtgccgaccatgttacgaccgccgtcgagaagagcaaggagtcccaggttacagcagacgacctggaggaggaaaaagcaaaagcagagttgatcatggatgatgaccgtaccgtggaccctctattatcgaaatcccagtcaatcttgatcagcacatctgcaacagcttcctcgaaaaagactattgaagacaggaacatcaaaaataagaagagcactaataaccgagccagttccgcttctgcccggctaatgacatccgagttcctaaagaagtcctcctctaaacgccggactcctagtacgaccacctccagccactatttaggtacacttaaggtgcttgatcagaaacccagtcagaagcagagtattgagccagacagggccgacaatattcgcgctgcggtgtatcaggagtggctggagaaaaagaacgtgtacctgcatgaaatgcaccggatcaaacggatagaaagtgaaaatctgaggattcagaacgaacagaagaaagcagcaaaacgcgaggaggcccttgctagcttcgaggcttggaaggctatgaaggagaaagaggccaagaaaatcgctgcaaaaaagcgcctggaggagaagaacaagaagaagacggaagaggagaatgctgcacggaaaggtgaggctttgcaagccttcgaaaagtggaaggaaaaaaagatggagtatctgaaagagaagaacaggaaagaacgggagtatgagagggctaagaagcaaaaagaggaggaaaccgttgccgaaaaaaaaaaggataaccttaccgctgtggaaaaatggaacgagaaaaaagaggctttcttcaagcaaaaagaaaaggagaagatcaacgagaaacgcaaggaagaactgaagcgtgcggagaagaaggacaaagataaacaagcaatcaacgagtacgagaaatggctggagaataaagaaaagcaggaacggattgaacgaaaacaaaaaaagcgccactcctttcttgaaagcgaagcccttccaccttggtcacctccttccaggacggttttcgccaaggtattttag

SEQ ID NO: 14358 - DNA, 1074 bp, synthetic construct
  source 1..1074: mol_type = other DNA; note = Synthetic coding sequence
atgcaaacatttcttaaggggaagagggtgggctactggctgagtgagaagaagattaaaaagttgaactttcaggccttcgccgagctttgtaggaaaaggggcatggaggtggttcaactcaacctgtcccggcctattgaggaacaggggcctctcgacgtgataattcacaaactgaccgatgttatcctggaagctgatcagaatgattctcagtccctggaactggtgcacaggtttcaggaatatatcgatgcccaccccgaaacaattgtgctggacccactgccagcaattcgcaccctgctcgatcgatccaagagctacgagcttattcggaagatagaagcttatatggaagatgatcgtatctgcagcccccctttcatggaactcactagcttatgcggggacgatacaatgagacttcttgaaaagaatggtttgaccttcccttttatatgcaaaacacgtgttgctcacgggacaaactcacacgagatggctattgtctttaatcaagagggtctgaacgctattcagcccccttgtgtggtgcagaatttcatcaatcataacgcagtgttatacaaggtatttgtggtgggcgagtcctatactgtcgtccagagaccaagtctcaaaaatttcagcgctggtacttccgaccgggagtctatttttttcaacagccacaatgtctccaagcccgaatcttcctccgtgttgacagaactggataaaatcgaaggagtctttgaacgccctagcgacgaagtgatcagagagctgagcagggcgctgaggcaggcactcggagtatcactgttcggaatcgatatcatcattaacaatcaaacagggcagcatgccgtcatagacataaatgcattccccgggtatgaaggcgtctcagaattttttacggatctactgaaccatatagcaaccgtcctgcaggggcagtccaccgcaatggctgccccatctggagagtttcgggctggtgacctctgctgtgatttagggaagtcgtttcaggtgttcggaccgccacccccttgtctttag

SEQ ID NO: 14359 - DNA, 852 bp, synthetic construct
  source 1..852: mol_type = other DNA; note = Synthetic coding sequence
atgctcagatgcggccagatgatcttcgcacaggccctcgtgtgtcgtcacctggggagggattggcggtggacccagcggaagcgtcagccagactcatatttttctgttctgaacgcctttatagatagaaaagattcttactatagcatacaccaaatcgcacagatgggcgttggggagggaaaatccatcggacagtggtacggcccaaatactgtggctcaagtgctgaaaaagctcgccgtgttcgacacttggtcctcattagcagttcatatagctatggataatacagtggttatggaggagatcagaagactttgcaggacaagtgtgccatgcgccggcgctacagcctttccagccgactctgaccggcattgcaacggctttccggctggggctgaggttacgaaccgacccagcccctggagacccctggttctcctgataccactgaggctgggattgacagatattaatgaggcttacgtcgaaacccttaagcattgcttcatgatgccccagtccttaggggtgataggcggaaagccaaactccgcgcactatttcattggttacgtcggcgaggagctaatctatctggatccacatacgacccagccagcggtggaacctactgacggctgcttcataccggacgagtcattccactgtcaacacccaccgtgtcgtatgtcaatcgccgaactggacccgtctattgctgttgtgctcggggtcgggaagcagggccgcttagtgcggtccatcccatgggccccgcgaccatctagctggtgcgccgccgtgttaggggctgcagtcgtgatgtgcggcactccttag

SEQ ID NO: 14360 - DNA, 2160 bp, synthetic construct
  source 1..2160: mol_type = other DNA; note = Synthetic coding sequence
atgggcttttctaatatggaagacgacggccccgaggaagaggaaagagtcgccgagccacaggcgaacttcaatacaccccaggccctccgcttcgaggagctgctggctaacttactgaacgaacaacaccaaatcgccaaggagctgttcgaacagttgaaaatgaaaaagcccagtgcgaaacagcagaaggaggtagagaaggttaagccccagtgcaaggaagttcaccagactctcatcctggaccccgcccagcggaaacggttacagcagcagatgcagcaacacgtgcagctgctcactcaaatccacttgctggccacctgcaatcccaacttaaatcctgaggcttcatccacccggatatgtttaaaagagctaggtaccttcgctcagagcagtatcgccctgcaccatcaatataacccaaaattccaaacgctcttccagccctgtaacttaatgggggcgatgcagctaattgaggatttctccacacacgtgagcatcgactgtagtccccacaaaaccgtaaaaaaaaccgccaacgagtttccctgtcttcccaagcaagttgcctggatactggctacctctaaagtgtttatgtatcccgagctgctgcctgtgtgctctctgaaggcgaagaaccctcaagataagattctattcacaaaggctgaggacaataaatacctgttgacttgtaaaactgcccgccagcttacggtgcgtattaagaacctgaatatgaacagagccccagataatattatcaaattttataagaagaccaagcagcttccagtattgggtaagtgctgtgaagagattcaaccccatcagtggaagcctcctatagagcgcgaagaacacaggctgccattttggctgaaggcaagtctgccatctatacaggaagagctgaggcatatggcggacggggctagggaggtaggtaatatgacaggtacaacagagatcaactctgatcaggggttggagaaggacaacagcgagctggggtctgaaacccgatacccacttctcttgccaaagggcgtcgtgttaaagctgaagccagtggctgatcggttcccaaagaaggcatggcgtcaaaaaaggtcctccgtcctgaaaccactgttaatccaaccgtcaccaagcctgcaaccttccttcaacccaggaaagacaccggctcagagcactcatagtgaggcccccccatccaagatggtccttcggattccacatccaattcaaccggcaacagttcttcagacagtgcccggcgtgccccctttgggggtctccgggggggaatccttcgaaagccccgccgccctgcctgccatgccccctgaagcccgaacatcatttccgctcagcgagagtcagactctgctgtcctccgctcctgtgccgaaagtgatgatgccctcacctgcttcgtccatgttccgcaagccgtacgtccgccgtagacctagcaagaggcggggcgctcgagctttcagatgcatcaagcccgcgcccgtcattcatccagccagcgtgatcttcactgtgccagcgaccaccgtgaaaatcgtgtcattgggaggtgggtgtaacatgattcaacctgtcaatgccgccgttgcccagtcaccccagacgatcccgatcgcgaccttgctggtcaaccccacttcctttccgtgcccactcaatcagccgttggtggcctcgagtgtgagcccattaattgtgtctgggaattcagtcaatctgcctatcccaagtacgccggaggacaaggcacacatgaacgttgacatcgcctgtgccgttgcagatggagaaaacgccttccaggggctcgaaccaaaattagagccccaagaactctcccccctgtcagcaactgtatttccaaaagttgagcattccccagggcccccacctgtagacaagcagtgtcaagaaggactatctgagaattctgcctatcgttggacggtcgttaagactgaggagggacgccaggccctggagcctctgccgcagggaatccaggagtccctgaataactctagcccaggcgatctcgaggaggtggtaaagatggaacctgaggatgccactgaggaaatttctgggttcctgtag

SEQ ID NO: 14361 - DNA, 1134 bp, synthetic construct
  source 1..1134: mol_type = other DNA; note = Synthetic coding sequence
atggaagctgccgccgtcacggtgactcggagcgccactagaagaagacgaagacagttgcagggactggccgctcctgaagcggggacacaggaggaacaggaggatcaggagcccaggcctcgcaggcgacgcccaggacgatcaatcaaagacgaagaggaagaaacagtgtttcgtgaagttgttagttttagccccgacccactcccggtgcgctactatgacaaagacacaacaaaaccaattagcttttacctgagcagcttagaggaactgttggcctggaaacctcggctggaggatggctttaatgtggcactagagcctctggcctgtaggcagcctcccctgagctcacagcgccctcgcacgttactgtgtcacgatatgatgggtggctatttagatgatcgctttattcaggggtccgtcgttcaaaccccctacgccttctatcattggcagtgtatcgatgtgtttgtatacttttcacaccataccgtcaccattccccctgtcggttggaccaatacagcacataggcacggagtgtgcgtactcggcacttttatcactgagtggaacgagggagggaggctctgcgaagcgttcttggccggagatgaaagatcttaccaggccgtcgcagatcggcttgtgcaaataacgcaattcttccgctttgacgggtggttgatcaatatcgagaacagcctgtcgcttgccgccgtaggtaacatgcccccgtttttaagatatctgacaactcagcttcacaggcaggtgccaggtgggcttgtattgtggtatgacagtgtggtccagtctggacagctcaagtggcaggacgaattgaaccagcacaatcgggtgttctttgattcttgtgatggtttctttaccaactacaactggcgggaagagcatctggaacgcatgcttggtcaggccggcgagagacgtgctgatgtgtacgtaggcgtcgatgtgttcgccaggggtaacgtggttgggggccggtttgacactgataagtccttagaactgatcaggaagcacggtttcagcgtggccctctttgctccggggtgcagcgttttcccaggtgtgggaaatctactctgctgttag

SEQ ID NO: 14362 - DNA, 927 bp, synthetic construct
  source 1..927: mol_type = other DNA; note = Synthetic coding sequence
atgcggggaaaacggcggcctcagaccagggccgccaggcgattggctgcacaggagtcatccgaagcagaagatatgagcgtgccgcgagggcctatcgcccaatgggcagatggtgctatcagtcccaacgggcaccggccacagttgagggcggcctcaggcgaagacagtaccgaagaggccctagcggctgcggccgctccatgggagggggggccggtgccaggagtcgatacctccccattcgccaagtctcttgggcattcccgcggtgaagcagatctgttcgacagcggggacattttcagcaccgggactggttctcagagtgtagaaagaacgaagccaaaggcgaaaattgctgagaatcctgcaaatccccctgtgggtggaaaagctaaaagtcccatgttccctgctctcggcgaagcgagcagcgatgacgacctcttccagtccgctaagccaaaaccagctaaaaaaacgaacccgttccccctactggaagatgaagacgatttattcaccgatcagaaagtgaagaagaacgaaacaaagagttcttcccagcaggatgttatcctcactactcaggatatctttgaagacgacatctttgctacagaggcaatcaagcctagccagaagacaagagaaaaagaaaaaaccttagaatctaatctgttcgatgataatattgacatcttcgccgatctcacggtcaaaccgaaggagaaatcgaaaaaaaaggtggaggcaaagtccattttcgacgacgatatggacgatattttctctactggcattcaagccaaaaccaccaagccaaaatcgcggagcgcgcaggccgcacccgagcctaggtttgaacataaggtttccaatatctttgacgacccgctgaatgcctttggtggccagtag

SEQ ID NO: 14363 - DNA, 933 bp, synthetic construct
  source 1..933: mol_type = other DNA; note = Synthetic coding sequence
atgctgaaaaacaaaggccactccagcaagaaagataacctcgcggttaacgcggtggccttgcaagatcatatcctgcatgatctgcaactacggaacctaagcgttgccgaccactcaaagacccaggtgcagaaaaaagaaaataagtccctcaaaagggatacaaaggcaattattgacacggggcttaaaaaaaccactcagtgccccaaacttgaagacagcgagaaggagtacgtcctggatcccaaacccccaccacttactctggcacaaaagttgggcttgatcggccctcctcccccgcccctttcatcggacgaatgggaaaaggtaaagcagcgcagcctgctgcaaggggactctgtccagccttgtccaatttgtaaggaggaattcgagttacgcccacaagtgctcttgtcctgttctcatgtgtttcacaaggcttgcctgcaagcattcgagaaatttactaacaagaagacctgccccctctgccggaagaatcaatatcagaccagggtcatccacgacggagctcggctttttcgtatcaaatgcgtcaccagaattcaggcctattggaggggctgtgtcgtgaggaagtggtatcggaatctccggaagactgtgccccctacagatgccaagcttaggaaaaagtttttcgagaaaaaattcacggagatcagtcaccggatcctgtgtagttataacacgaatattgaagagttgttcgccgagatcgaccagtgtctggcgatcaatcgtagcgtgctgcaacaactcgaagagaaatgcggtcacgaaatcacagaagaagagtgggagaagattcaggtgcagaacgagacatctgcatgctttgaggacccctgtctcggggcacacggctcacacttcagccttagcaattttctgctgtag

SEQ ID NO: 14364 - DNA, 1119 bp, synthetic construct
  source 1..1119: mol_type = other DNA; note = Synthetic coding sequence
atgcgggtgggccccgtgcgctctgctatgtccggcgcctcgcagcccagggggccggctcttttattccctgcaacaaggggcgttccagccaagagattgctcgatgctgacgatgctgctgctgtggcggctaaatgcccgagactgagcgagtgcagcagtcctcctgattatctgtcacctcccggatccccttgcagcccacaaccaccaccagctgcccctggcgccggggggggatccggttctgcaccgggacctagcagaattgctgactacctgctgctccctctggctgagagagaacatgtcagcagagccttatgtatacacacaggtagggagttgcgatgtaaggtttttcccatcaagcactatcaggataagatccgaccttacattcaactcccctctcacagcaatatcacaggcattgtggaggttatcctgggggaaaccaaggcttacgtttttttcgaaaaggacttcggcgacatgcatagttatgtccggtctcgtaaaagactgagggaggaagaagcggctaggctcttcaaacagatcgtcagcgccgttgcacactgccaccagagtgccattgtgctgggtgacctaaaactgcgaaaattcgtatttagcacggaggagcggactcaattgcggctcgagtctctggaagatacccatataatgaaaggtgaagatgatgccttgtcggacaagcacgggtgtcctgcgtacgtcagtcccgagatactcaatactacaggtacatatagtggcaaagcagccgacgtgtggagtcttggtgtgatgctctataccttgctcgtaggtagatatccgtttcacgactcagatcctagcgcgttgttttcaaaaattagacgaggtcagttttgcattccagagcacatatcaccaaaagctagatgtctcatccgctccctcctgcgtagagaacctagcgagcggttaacagcccctgagattctcctgcacccctggtttgaatctgtacttgagcccggctacatcgattctgaaattggcacaagtgaccagatagtcccagagtatcaggaagacagtgacatcagctcgtttttctgttag

SEQ ID NO: 14365 - DNA, 1554 bp, synthetic construct
  source 1..1554: mol_type = other DNA; note = Synthetic coding sequence
atggaaactgaccttaattctcaagaccgtaaggacttagataagtttatcaaatttttcgctctgaagacagtgcaggtgatcgttcaggctcggcttggcgaaaaaatatgtaccaggtcctccagcagcccgaccggaagtgactggtttaacttggccataaaagacatcccagaagttacccatgaggccaaaaaggctctggcggggcagctgccagctgttggccgcagcatgtgcgtggaaatcagtttgaagacaagcgaaggagactcaatggaacttgagatctggtgccttgaaatgaacgaaaaatgcgataaggaaatcaaggtgtcctataccgtatataatagactgagcctgctcctgaaaagcctgcttgccattacgagggtcacaccggcctaccgtctgtcgcgcaagcagggtcacgaatacgtgattctttaccggatttatttcggcgaggtccaactgtccggcttgggcgagggcttccagaccgtgcgcgtgggtactgtcggtaccccagtcggcaccattacattatcctgcgcctatcggattaaccttgccttcatgagtacacgacaattcgaaaggaccccgcctataatgggcataattattgaccactttgtggatcgcccgtacccgagcagcagcccaatgcacccatgcaattatagaacggctggggaagacacgggggtgatatatccgtcagtagaagattcacaagaggtctgcactactagcttttcgactagtccccctagtcagttgagttcctcaaggttgtcataccagccagcagcccttggcgtgggatctgccgatctggcctaccccgtggtgtttgccgctggtctaaatgcaacccacccccaccaattgatggttcctgggaaagaggggggagtgcctcttgcccctaaccagccagtgcacggcactcaggcggaccaggagagactggccacctgtacgccgtcggacaggacccactgtgccgccaccccttcatcttccgaggataccgagaccgtttctaactcctcagaaggaagggcatctccacacgacgtgctggagaccatttttgtgaggaaggtaggcgcttttgtgaataagccgattaatcaggtcactctaacaagtctggacataccatttgctatgtttgccccgaaaaacttggaactggaagataccgatcctatggtgaatcctcccgactctcccgagaccgaatcacccctccagggcagccttcactcagacgggtctagcggaggcagtagtggcaatacccatgacgactttgtgatgatcgacttcaaaccggccttcagcaaagacgatattctgcctatggatttaggaaccttttatagagagtttcaaaacccaccgcaactgagctctctgtccattgacatcggggcgcagagcatggctgaggatctggattccttacctgagaagttggccgtccacgaaaagaacgttagggaatttgacgcattcgttgaaacactgcagtag

SEQ ID NO: 14366 - DNA, 1488 bp, synthetic construct
  source 1..1488: mol_type = other DNA; note = Synthetic coding sequence
atgtggaggggctgtgcccgctcgcgtaagcgcaaaaaggtcgacaacgactacaatgcactgcgcgaaagactcagtaccctcccagacaagttatcatataacattatggtgcctttcggcccattcgcctttatgcctgggaaactggtgcataccaacgaggtgacagtcttacttggcgacaattggtttgccaagtgcagtgccaagcaggcagtggggctggtagaacatcgcaaggaacacgtgaggaaaacgatcgatgacctgaagaaggtaatgaaaaatttcgagagtcgggtggagtttactgaagatctacagaagatgtcagacgccgcaggtgatatagtggatatacgcgaggaaattaagtgtgattttgaatttaaagccaaacatcggattgcccataagcctcattctaagcccaagactagcgacatcttcgaggcagacatcgctaatgatgttaagagcaaagacctcttagctgacaaagaactttgggccagactggaggaacttgaacgtcaggaagaactgttgggggagctggattctaaacctgatacagtgatcgccaatggggaggataccacctctagtgaagaggagaaggaggatcggaacacaaacgttaacgctatgcaccaggtgaccgattcacacaccccctgccataaagacgtggcttcctccgagccttttagcggccaggttaattcccagctgaactgctctgtaaatggatcaagctcataccactccgatgacgacgacgatgacgacgacgatgacgacgatgataatatcgatgatgacgacggtgataacgaccatgaggctctgggagtgggtgacaatagtatccctacaatctatttctctcacaccgtcgagcccaaacgggtgcggataaacaccgggaagaatacaacgctgaaattttccgagaagaaagaagaggcaaaaaggaagcggaagaattcgaccgggagcggacacagcgcccaggaattgcctaccatacgcacccctgcagacatttaccgcgcattcgtggacgtggtcaatggcgagtatgtcccgagaaagagcatcctcaagtcaaggtcacgcgagaactctgtgtgctctgataccagtgagtcctctgcggctgaattcgacgacaggcgaggcgtgctgcgctccatctcgtgtgaagaggccacatgctccgatacttcagaatctattttagaagaggaacctcaggagaaccaaaaaaagctcctacctctttccgtcactcccgaagcattctcaggcaccgttattgaaaaagagttcgtttctccatccctcaccccgccaccggctatcgctcatcccgcgctacccaccatcccggagagaaaagaagtgctcctcgaggcctccgaagagacaggcaaacgggttagcaaattcaaggccgctcgcctgcaacagaaggactag

SEQ ID NO: 14367 - DNA, 1458 bp, synthetic construct
  source 1..1458: mol_type = other DNA; note = Synthetic coding sequence
atgtgtcaagtaggggaggattatggagagcccgctcccgaagagccccctccggctccccggccatcgcgggagcagaagtgcgtgaagtgtaaagaggcgcagccagttgtcgtgatccgagccggtgatgctttctgtcgtgactgctttaaggcgttttacgtgcacaagtttcgggctatgctaggaaaaaaccgccttatattccctggggagaaggtcctgctggcgtggtcaggtggccctagctcatcgagtatggtttggcaggttttggagggtctcagccaggacagtgcaaaaaggctgagattcgtggctggtgtcattttcgtggacgagggggccgcatgcggtcagtctttagaggagcgcagcaagacccttgccgaggtcaagccgattctgcaggccacgggtttcccttggcacgttgtggctttagaagaggtgttcagtctcccacctagtgtactctggtgttcagcccaagaattggtgggctccgagggcgcatacaaagctgctgtggatagcttcctccagcagcaacatgtcctgggggcgggcggcgggcctggccccacacagggagaggaacagcccccacagccccctctggaccctcagaatctggcccgcccccccgccccggcccaaacagaggccctttcccagctcttttgttccgtcagaacactgactgcaaaggaggagcttctgcagactctgcgaacccacctcatcctgcacatggcgcgcgcacacggttactcaaaggtgatgacaggagattcctgtactcggctcgcgataaaattgatgactaatctggcgctggggcgtggagcctttttggcatgggatactggtttttctgacgagcggcatggagacgtagtggtggtgaggccaatgcgggaccacactctgaaggaggtggctttctataaccgcttgttttcagtccctagcgtgttcacacccgccgtggataccaaagcacctgaaaaggcttccattcaccgactgatggaagcatttattctgaggctgcagactcagtttcccagtaccgtcagcaccgtgtacagaactagcgagaaactcgtgaaaggcccacgtgacggtcctgcagccggcgattccggccctcgttgcctcctttgcatgtgtgcgctggacgtcgacgcagccgattcagccacggcctttggcgcccagacttctagcaggctctctcagatgcaatctcccataccactgaccgaaacccggacacctcctggcccttgctgctctcctggcgtggggtgggcccaacgctgtggtcagggtgcctgtcgtagagaggatccccaagcctgtatcgaagagcaattatgctactcctgccgggtgaatatgaaggacctgggcctaggtctggccggagaccccggccttagtgattag

SEQ ID NO: 14368 - DNA, 1353 bp, synthetic construct
  source 1..1353: mol_type = other DNA; note = Synthetic coding sequence
atgtcactgaggctgtcctctgccagtaggcggagttgtccaagaccgacgactggtagtctgcgactgtacggcgggggaacgtctttcggcacgggcaattcttgcggaatatccgggataggctccgggttctcatcagccttcggaggaagcagctcaggcggcaatactgggggcgggaatccatgcgctgggttcacggtaaacgaacgtggccttctaagcgggaatgagaaggtgacaatgcaaaatctgaacgacagactggccagttacctggactcagtacatgctttagaggaggccaacgccgaccttgagcaaaaaataaaagggtggtatgaaaaatttggacccggctcctgccgcggactcgatcacgattacagtaggtactttccaattatagatgacctgaagaaccagatcattgccagcaccacatcaaatgccaacgccgttttgcagatcgacaatgccagacttaccgccgacgacttccgtttaaagtacgaaaacgaactggccttgcaccagtccgtggaggccgacgtgaacggccttaggagagtcttggatgagataactctctgccggaccgacctagagatccagtacgagacactgtctgaggaaatgacttatctgaagaaaaatcataaggaggagatgcaggttctccagtgcgcagcagggggtaacgtgaatgtggagatgaacgctgctcccggtgtcgatcttaccgtattgttaaataacatgcgagcggaatacgaagcactggctgagcaaaataggcgcgatgccgaagcctggttcaatgaaaagtcagcctcgttgcaacagcagataagcgaggatgtgggcgcaactaccagtgcccgcaacgaactgacagaaatgaaaaggaccctacagactctggagattgagctgcagagcctcctggccactaagcactccctggagtgctctctgacagagacagaatccaactactgcgctcaactcgcacagattcaagcccaaataggtgctcttgaggaacagctacatcaggttcgcacagagacggagggccagaaactcgagtacgagcagctgctcgacataaagctgcatctcgaaaaagagatcgaaacttattgcctcctgattggtggcgatgatggcgcctgtaaatcaggaggttataaatctaaagattatggatctggcaatgtcggatcacaggtcaaggaccctgccaaggcaattgttgtgaaaaaagtgcttgaagaggtggatcagaggtcgaagatactcactactaggttacactcccttgaagaaaagtctcagagtaattag

SEQ ID NO: 14369 - DNA, 2679 bp, synthetic construct
  source 1..2679: mol_type = other DNA; note = Synthetic coding sequence
atggaccagcctgaggccccgtgctcttccaccggcccacggctggcagttgctagggagctgctactcgcagccctggaggaactgtcacaggagcagctgaaacggttcaggcacaaacttcgagatgtgggacctgatggacggagcataccatggggcagactggagagggccgacgctgtcgatctggctgaacagttggcccagttctacggcccagagcccgcgcttgaagtcgctcgaaagaccctgaagcgcgctgacgctagagacgttgccgcacagctgcaggagcggagattgcagcggctcgggctggggtccggaacactcctgagcgtgagtgagtacaaaaaaaagtacagggaacatgttctccagctccacgcgagggtgaaggaaagaaacgccagaagcgtgaagattaccaaaagattcaccaaactgttgatcgcccccgaatcagctgcccctgaagaggccatggggcctgctgaggagcccgagcctggaagggcaagacgaagtgatacccacacttttaacaggctcttccggcgcgacgaggaaggaaggagaccgctcactgtggttctgcaggggcccgcagggataggaaagacaatggcagccaagaagatattgtacgattgggccgctgggaaactctaccaaggacaggtggactttgcattttttatgccttgcggcgagttgcttgaaaggcccggaaccagatcactggccgatctgatcttagaccagtgcccagatagaggagcaccagtaccacagatgcttgcacagcctcagagactactgttcatcttagacggagcagacgagctcccggctctggggggaccagaagctgcgccctgtactgatccgtttgaagccgcatccggcgcccgagtcttggggggactgctttccaaagccctgctgcctacagccctgttgctcgttaccactcgcgccgccgcccctggccggctgcaggggcgcctttgtagcccgcagtgcgctgaagtgagaggtttttcggacaaagacaagaaaaagtacttctacaagtattttcgggatgaacgacgggccgagagagcttacaggtttgtgaaggagaatgagaccctgtttgccctgtgcttcgtaccatttgtctgctggatagtctgtacagtgttacgacagcaattggagttaggcagagacctgagtcgtacttcaaaaacgaccacatccgtgtatctcctgttcatcacctctgtgctgtcttcagcccccgtggctgacggtccaaggctgcagggcgacctccgcaatctttgtcgactcgccagagagggcgtcctgggacgcagggctcaattcgccgagaaggagctcgagcagctggagttacgcggcagtaaggtccaaactctttttctgagcaaaaaggaactcccgggcgtgctggagacagaagtaacctaccagttcattgatcaaagtttccaagaattcctggcggccctcagctacctccttgaagatggaggcgtgcccagaactgccgctggcggcgtcggcacgctgttacggggcgatgcccagccccattctcatcttgtgttaacaaccaggtttctattcgggcttctgagcgctgagcgaatgagagatatagagcgacacttcggttgcatggtgagcgagcgcgtgaagcaggaggccctgaggtgggtgcagggccagggacagggttgtcctggagtggcaccagaagttaccgagggagcgaagggcttagaagacacagaggaacctgaggaagaggaagaaggtgaagagccgaactacccgcttgagctcttgtactgcttatacgagactcaagaggatgcctttgtacgccaggccctgtgccgattccctgaactggctcttcagagggtcagattttgtagaatggacgtcgctgttctgtcatattgcgttagatgctgtcccgccggtcaagcactgaggctgatttcatgcaggctcgtggcagctcaggagaagaaaaagaagtccctgggaaagagactccaagcatcattgggcggaggcagctcgagccagggcaccaccaaacagctgcccgcatcgctgctacatccgctgttccaggcgatgacagaccctctgtgtcatctgtcgtctctcacgttatcccattgcaaactaccagacgctgtgtgcagggatttgagtgaggccctgagagctgcccccgctcttaccgagcttgggctgttacacaatagacttagtgaagccggcctgcgaatgctgtccgaagggctcgcttggccccagtgccgcgtccaaacagttcgtgtgcagctccccgacccccagcgggggctacagtacctggtgggcatgttacgtcagtcaccagctctcacaaccctcgatctgtcaggatgccagcttcctgccccaatggtgacttatctgtgcgccgtactccagcaccagggctgcggactgcagactttgtcacttgcatccgttgagctgtcagagcagagtcttcaggagcttcaggctgtgaaacgagccaagccagacctcgtaataacacatccagctctggatggccatccacagccacccaaggagttgatcagtactttctag

SEQ ID NO: 14370 - DNA, 1047 bp, synthetic construct
  source 1..1047: mol_type = other DNA; note = Synthetic coding sequence
atgggcaaagactattacaaaatacttggtatccccagcggcgcgaatgaagacgaaattaaaaaagcttacaggaaaatggcgctgaagtatcaccccgacaagaacaaggaacccaatgccgaagagaaatttaaggagattgctgaggcttacgatgttctctccgaccccaagaaaaggggcctgtatgaccaatatggtgaggaagggctgaaaaccggtggaggtacatccggcggatcttctggaagcttccattacactttccatggggatccgcacgctacgtttgcctccttttttggtggctctaacccgttcgatatcttttttgcttcttcacgctctaccaggcccttttctggtttcgacccagatgatatggacgtcgacgaggatgaagatccttttggcgcttttggtcgctttggatttaatggactgagccgcggccctcgacgcgctccggaacccctgtacccccgcagaaaagttcaggatcctcctgtcgtacacgaactgagagtgtcgctggaagagatctaccatggatccactaagcggatgaaaatcactcggcgccggttgaatccagacggaagaactgtgcgcaccgaagacaaaatcctacacatcgttatcaagagaggttggaaggaagggaccaagataacttttcccaaggaaggagacgctaccccagataacattcccgccgatattgtcttcgtcctcaaagataaaccacacgcacatttccgcagagacgggaccaacgtgctgtactctgccctgatctcactcaaagaggccctctgtggatgcactgtgaacatcccaactattgatggtcgagtgataccactcccttgcaacgatgtcatcaagcctggcactgtaaaaagacttagaggcgagggcctgccttttccaaaagtccctacacaacgcggggacctcatagtagagtttaaagtgcgctttccagatcggctcaccccacagaccaggcagatactgaagcagcatttaccttgtagctag

SEQ ID NO: 14371 - DNA, 1899 bp, synthetic construct
  source 1..1899: mol_type = other DNA; note = Synthetic coding sequence
atggatacgatgatgctgaatgtaaggaatttgtttgaacaactggtccgaagagttgaaattttgtccgagggtaatgaagtacagtttatccagctagccaaggatttcgaggacttccggaaaaaatggcaacgcactgatcacgaattgggcaagtacaaagacctcctaatgaaagccgaaacagagcggagtgccctggatgtgaagctcaagcatgctcggaaccaggtggacgtcgagataaaaaggagacagcgggctgaagctgactgcgaaaaactggaacgtcagattcaactgattcgggagatgcttatgtgcgacacaagcgggagtatccagctcagcgaggaacaaaagtctgcgctggcattcctgaatcgagggcaaccaagctccagcaacgctggcaacaagagactgtccactatagatgagtctggatctattctgtccgatataagctttgacaagactgacgagagcctggattgggactcgtcgctggtgaagacttttaagctgaagaagagagagaagagaagaagcacctcaagacagttcgtggatggcccacctgggcctgttaagaaaacccgcagtattggaagcgccgtcgaccaagggaatgagtccattgtggcaaagactaccgttaccgtccccaacgatggggggcccatcgaggcagtttctactattgaaacggtgccatactggactaggagcagaagaaagacaggaaccctccaaccatggaattccgactctactctcaacagtcgccagcttgagcccaggactgaaaccgattctgtggggaccccacagtctaacgggggtatgcggttacacgactttgtgtccaagactgttatcaagcctgaaagttgcgtgccctgtgggaaaaggatcaaattcgggaagctatccttgaaatgcagagactgcagagtggtctcccatcccgaatgtcgggacaggtgccccttgccgtgtatccccaccctgattggcacacccgtcaaaatcggggagggcatgcttgccgacttcgtctctcaaacgtctccaatgatcccgtcaatcgtcgttcattgtgttaatgaaatagaacaaagaggcttgaccgagaccggcctctatcggattagtggctgtgatcggacagtgaaggaactgaaggagaaattcttgagagtcaagactgtgcccttactgagtaaggtcgacgacatacacgcgatttgcagtttgttaaaggactttctccgcaatctgaaggaacctctcctgacattccggcttaatagagcattcatggaggcagcggaaatcacggacgaagacaattccatcgccgcaatgtatcaggcagtcggtgaactaccacaggcgaaccgcgataccctggccttcctgatgatccatcttcagcgtgtggcccagtctccacacacaaaaatggacgtggctaatttagccaaggtgttcggccctacaattgtcgcacacgcggtcccaaatccagatcctgtcaccatgttgcaggacattaagaggcagcccaaggtggtagaacgattgctgagcctccccctggaatattggagtcaattcatgatggtggagcaggagaatattgaccccctccacgtgatagaaaacagtaatgctttctccacaccccagacacccgatataaaagtgtccctgctgggccccgtgacaacccccgaacaccagctactgaagaccccttcttcgagctctctgagccagagggtgcggtctacattaactaagaatacccctagatttggtagtaagtctaagagcgccactaacctcggtcgccagggcaatttcttcgcctcccccatgctaaaatag

SEQ ID NO: 14372 - DNA, 12075 bp, synthetic construct
  source 1..12075: mol_type = other DNA; note = Synthetic coding sequence
atgtcaagcgagcaagataagtcggcatctaaggaaaaatccaagaagccagtgcgtttccttccacaactatccatggaaaaacttgcaagcaaggagaagttcaaggctcccgccagagcgcttccacaactctcgatggtctcgactaagccgcattggcaacaggctgccccaagcttccacctgagtgttaagcaggacgatgagtctcccgagcccttctctgtaaagaacgagcagagccacgctgagtacatggaaagatttgggaaaaagggtaagctgccccaccaggttgacgattcttatgtgggtccctccacctctaagtctaaggggaaaagcccacataaagaacgagaaaacttccgttccactctcgtgaatgtaatcatgcaacaggatgcagatctcgatagcgcggtgccagacggaagtaccataccaaaacccacagctagcgctatcgagaaggatattctacgctactactattatatccaccatgggatcgacactgaccacgtcgctcctatggaagacagctggttggaacacgttctcgacttagtcccccagcaccttaaggtctttaccgactccatagtcaccttgtccgacgagatgagggaagactaccttctgagcgtcagaaagagtattgtggatttcgtgctaaaggacccgcgcgagaaaggggatgataagaaaacagatgagctgcccgcacatcgggcggaaatggagattctgcccaagccttggcgcaaatcgttcctcgccgccagctcatacataagagatcatctaaacgcaatgaatccaacaatgcttgccgttctggacttatggcatactaacttcaagaaactccgactggtggatataaaggaatttcataactgtcaggacgctctggaactgtcttccttccaaaacatcatcatgagacacatggacagcgccaaagaaaccttactgaaaatgtggttccccgaggtgcagaacatctactaccaggggaacaagaaaaaacagttacctacaggggatagctcagctaagttagaatctttcttcaattgcgccgcagccctgatgactttgcagttgcaggatcttacccttgtctctatgcaggacttcacagacctgatcgctcaaccccccgattcagtgcgcgcctttgagcatcccggatttatcatgaggctgattcttgacaacgatactatcaagtttgagcccgagctgagcgactacattgatatattcctaaacgtgtacgatgtgatgataaaagctgtaagtttcgtaccccgcgtcgagacaaagctgtatagcaagtgggaatctaagtctaagcccacgacgctgaagcccattatcctgaacgagatcgtcgatgctcataaggagaagataaaggaagtgattatgaaagagagcgtcgctcctacagaacatctccggctgtacgacaaatatgattttctcattacacgaaaagccgagcgcgacgtcgacaatttcctcgctgagaaccatagttatgagaagatcattgatgagatctgcaagtaccagaagctgatcgaggagatccagtatacttcaattaagaccatacgcttgggtatgttcgaaatgcactgcgaggagcttatccgcgccctggtaaaacgtgccgacattatttgtgggaaattgcttgcaaagatgtttcgtgatcatcaagaagtgaacacacgcctctgcgatgagttcgaacggattgctgagaaagcattgtcaacaccccccaacacagcagaactgatggagatgaaggcctacatccagaaggtggaggtgacagatatgatcgagctcgaacaacggctggtggactctaagaactgtcttgcttttctgatcgaatatgttaacttctctccagcagatatgcggctcaataacagtgtattccagtggtacggaagaatgggcgagatcttcgaagaacatagaaaaataattaaggagaaaattgagcaatatcaggaaggtctcaagttaagatgtgagcgcttcgttgaagagttagagagctatgctaagcagtcagaggagttttactcgttcggagatctacaagacgtgcagcgttacttaaagaaggcacagatccttaatggcaagttagacctggctgctgacaagatagagcaattcaacgctgaagaggaagctttcggctggctgccctccgtgtacccccaaagaaaaaagatccaggacggcctaaacccttacttacgcctctacgagactgctgtggaattctccagtaactacagagcatggacagaggggccttatcacaaagttaatcccgaccaggtagaagcagacattggaaactactggcggggactgtacaaacttgagaagacctttcatgattccccgtacgctctggctatgaccaaaaaggtgcgtagcaaggtcgaagattttaaacagcacatacccctgatccaggtcatctgtaatccgggactgaggccgcggcattgggaagctatgagtgcaattgtcggataccctctgcagccgtccgacgacagtaccgtgtctagttttctcgacatgaacttggagccatacatagacagattcgagggcatctccgaagcagctagcaaggagtattcccttgaaaaagcgatggaaaaaatgatcaccgaatgggatgctgtggagttcgtcattcactcttaccgggagacagggacttttattcttgcatctgtcgatgagattcagatgctgcttgacgatcatatcataaaaacccagactatgagaggctcacctttcatcaagccctatgagaagcagatgagagaatgggagggcaagcttctccttctgcaagagattctggacgagtggttgaaggttcaggctacctggctgtacctagagcctatcttcagctctccagacatcatgtcgcagatgcctgaggaaggaagacggtttaccgctgttgacaagacttggcgggatattatgcggtctgtgatgcaggacaagcacgtgctcaccgtggttaccattgaccgcatgctcgaaagactcaaaaagagcaacgaactgctggagctgattctgaaaggacttaacgagtatctggagaaaaagagactgttttttcctagattctttttcctgtccaacgatgaacttcttgagattctaagcgagaccaaagatcctacccgggtccagccccacctcaaaaagtgcttcgagggcatcgccaaagtggagttcactgagacgctggatataacacacatgaaatcaagcgaaggagaagtcgtggaactgattgagataatatctaccgccaaggcaagaggccaggtcgagaagtggctagtggagctcgagcgtgtcatgataaactctatccacaaagttacaggcgacgccaccttcgcttacactaaatacgaacggatcaactgggttcgggactggcctggccagacagtgctgtgcgttagccaaatattttggaccaaggaggtccagacggccatccccatggggatcaaggcattagagcagtatctgaagacctgtaaccgacagatcgacgatatcgtgactctcgtccgaggcaagctgtccatgcagaaccgcgtcacgctgggagccctggtggtcctcgatgtccacgctcgggacgtgctgagcagcctggttaagaagaatatttcagatgactctgatttcgagtggctgtcccagctgaggtattactggcaggaaaaccatctggagactaagatgatcaacgcaggactcaggtacggctacgaataccttggcaatagccccagacttgtcattacaccccttaccgaccggtgctatagaaccctgttcggggctctccacctgcatcttgggggtgcaccagagggtcccgccggaaccggtaaaacagagaccacgaaagatctggctaaagccgtggctaagcagtgcgtggtgttcaattgcagcgacggcctcgactatctggccctgggtaagttttttaagggccttctgagctgtggggcatgggcctgctttgacgagtttaataggattgacctcgaagtgttgagtgtagtagcgcaacagattttaactatccagaggggcatcaacgctggcgcggacatcttaatgtttgagggaacagagctcaagctagatccaacctgtgccgtgttcatcacgatgaatccagggtatgccggaagaagcgaactccccgacaacttgaaggctctcttcagaacagtagctatgatggtccctgactatgctatgatcgctgaaatagtgctctattcatgcggatttgttaccgctagaccactgagtgtgaagatcgtcgccacttacaggctgtgtagcgagcagctgagttcccaacatcactacgattatgggatgagggctgttaaatcagttctcactgctgcagggaatttgaaattgaagtacccaaatgagaacgaagaaatcctcctgctgagaagtatcatcgacgtgaatttaccaaaatttctgtcgcacgacctgccgttgtttgaaggcatcacaagcgatctgtttcccggcgttaaactacccaaaccagactacaacgatcttctagccgccatcaaggataattgtgctagcatgaacctgcagatgaccgctttcttctccgaaaagattcttcaggtatacgagatgatgatagtgaggcacggcttcatgatcgtgggagagccattcggtggaaaaacaagtgcctatagggttctcgctggagctctgaatgatatctgcgaaaaaggcttgatggaagaaaataaagtccagatcactgtgttaaatcccaaatcagtcaccatgggccagctctacggccagtttgacagcgttagtcatgaatggagcgatggagtactggccgtgagcttccgtgctttcgcttcaagcgttacccctgacagaaagtggctgatcttcgacggaccagtcgacgctgtctggatagaaaacatgaatacagtcctagacgacaacaagaaattgtgtctgatgtccggtgaaatcatccagatgagtccacaaatgaatttaatcttcgagccgatggacctggaggtcgcttcaccggccacagtttccaggtgcggaatgatttacatggaaccacacatgctcggttggaggccacttatgctcagctgggtcaaccttcttcccgccagtgtcagcgtcatccagaaagagttcataatgggcctcttcgatcgtatggtgccggtgagtgtcgaattcattaggaaacacacaaaagaactgtcccctacatcagacaccaacctcgtgcgctctcttatgaacctgatagattgctttatggacgatttcgccgacgaagtaaagctaaaggaacggaacgatcgagaaacgtatagtttgctggaaggaattttcctgttcagtctgatttggtctgtgggtgcaagttgtacggatgacgacaggttaaaattcaacaagattctgagggagctgatggagtccccaattagtgaccggacccggaacacctttaaacttcagtctggcactgagcagacttctagcaaagctcttaccgttccttttcccgagaagggaaccatttatgactatcaattcgtgactgaaggcattgggaaatgggagccatggattaagaaactgaaggaagcaccccctatcccgaaagacgtaatgttcaacgaaatcatcgtgccaacacttgacactatacggtattcagcgttgatggagctgctcacaacacaccagaaaccttccatattcgtgggcccgacagggacaggcaagtccgtgtacatcactaacttcctgctcaaccagctgaacaaggaaatttacaaacctttactcataaattttagtgcgcagacgaccgctgcgcagacacaaaacattgtaatgtctaagttggacaagcgcaggaaaggtgtattcggaccccctttgggcaagaggatggttgtattcgttgacgacgtgaatatgccggcgcgagaagtctacggggcgcagccccccatcgagttgctcagacagtggctagaccactggaattggtatgacctgaaagattgctcaatgataaagctggtggacattcaaatcatgtgtgcaatggggccaccgggtggcgggaggaaccccgtcaccccacgctacatgaggcacttcaacataatcaccatcaatgaattctcagacaagagcatgtacactatcttttcccgcattctgacatggcatttagagatatgctataagtttcccgatgaattcttagacctgacgacacagatcgtgaacggtacaatgactctgtataaggaggctatgaagaacctgctccctacacctgcaaagagccactatctgtttaaccttagggacttctctcgtgttatacaaggcgtgtgcctgagtcgccctgaaaccacggagaccacagaagtcatcaagagactgtgggtgcacgaggtgctgagggtgtattacgaccgcttgctcgacaacacggatcggtcttggctaattaattacatccaggagatcctcaggaattacatgtacgaggattttcatgaactcttccaacgactcgatttcgacaatgacggcatggtcgaagctgacgatctgcgatcattaatgttttgtgactttcacgatcccaagcgggaagatacaaactatcgcgagattgcagacgtggataatctgcggatgattgtcgagatccacctcgaggaatacaacaatatttcaaagaagccaatgaacctcgtgctgtttagatttgcaatcgagcacatctcccgcatctctcgtatcttaaagcagccccgctcccacgccctgctcgtcggcgttggcggatccggaaggcagtcagtgactcgcttagcagcccatatggccgattattctgtgtttcaggtggaaatctctaagggatatgacacaacggagtggcacgaggacctgaaggtcatcctgcggaaatgcgctgaaggtgagatgcagggcgtatttttgttcactgatactcagatcaaggaggagagctttctggaggatgtatccaacctgctcaacgccggagagatcccaaacctgtttgcactagatgagaaacaggaaatctgtgacaagatgcggcagctggacagacagagggataaaaccaagcaaaccgacgggtccccaatagcactctttaacatgtttattgatcattgccgttctcagctgcatgtagtcctggccatgtctccgatcggtgacgcattccgcaatcggttacggaaattcccagctttggtcaactgctgcaccatcgactggtttcaaagttggcccgaggatgcgctccaggcagtggccagcaggttccttgaggaaatagagatgagtgaagagatcagggacggctgcatagatatgtgcaaatccttccacacctccacaattgatttgagtaagtctttcttcgtcgagctccagaggtacaattatgtcaccccaacgagctatttagaactcataagtacttttaagctccttctggagaagaagcggagcgaagtcatgaaaatgaagaagcgatacgaggtgggtcttgaaaagctagactccgcctcgtcccaagtcgcaaccatgcagatggagcttgaggcactgcaccctcagctgaaagtggcatccaaggaggtggacgagatgatgattatgattgaaaaggaaagcgtggaggtagcgaagacggaaaaaattgttaaagcggacgaaaccatcgccaatgagcaggctatggccagcaaagctattaaggatgagtgcgatgcggacttggcgggtgcattgcctatactcgaatcagcccttgccgccctggatactttgacagcccaggatattacagtggtgaaatcaatgaagtctccacctgcaggcgtaaagctagtgatggaggccatttgcattttaaagggcatcaaagcagataaaattcctgaccctactgggtccggaaagaaaattgaagatttctggggccccgctaagcgtctcctgggagacatgcgatttcttcagtctttgcatgagtacgataaggacaacatccctcccgcctacatgaacatcattcgcaagaactatatacccaatcctgacttcgtcccggaaaaaatcaggaatgcatctaccgccgcggagggtctctgtaaatgggtcattgccatggactcctacgataaagtggccaaaatcgtggctcccaagaaaatcaaacttgctgccgcagagggggagttaaagatcgcgatggatggattgaggaaaaaacaggcggcccttaaagaggtccaagacaagcttgctcggctgcaggatactctggagctgaataaacagaagaaggctgaccttgagaaccaggtcgatttatgctctaagaagctggaacgtgcagagcagttaatcggaggactggggggcgagaaaaccagatggtctcatacggcccttgagctggggcagctgtatatcaatctcacaggcgacattctgatcagtagcggtgtcgtggcatatcttggcgcatttacttccacgtacaggcagaaccaaacaaaagagtggaccactttatgcaagggacgcgacattccctgctccgatgactgctcgctgatgggaacgttgggcgaagctgtgaccatccgcacctggaatatcgctggcttgccctcggactctttctccatcgacaatggcatcattatcatgaatgccaggcggtggcccctgatgatagatccacagagccaggcaaataaatggattaaaaatatggaaaaggccaactcattatacgttataaagttgtcagaaccagattacgttcggactctcgaaaattgcatccagtttgggactcctgttctgttggagaatgtaggagaggagctggacccaatcctcgaacctctgctgctgaaacagacctttaaacaagggggaagcacttgcatacgcctgggtgatagcactattgagtatgcaccggactttcggttttatatcacaacgaaactgcggaatccgcactacctgcccgaaaccagcgtgaaggttaccctgcttaactttatgatcacccctgagggcatgcaggaccagctgctgggcatcgtggtagcgcaggaaagacctgatttagaggaagaaaagcaggccttgatccttcaaggggccgaaaataaaaggcaactcaaagagatcgaggataagatcctggaggtgctgagttcatccgaggggaatatactggaggacgaaacggcaattaagatactaagttcttctaaggctcttgccaatgagatcagccagaaacaggaagtggcagaagagacagaaaaaaaaattgataccacacggatgggctatcggcccatcgcaatacattcctccatcctcttcttcagcctggcagacctcgcgaatatcgaacctatgtatcagtattctcttacatggtttataaacctgttcatactatccatcgaaaacagcgaaaaaagtgagatcttggctaagcggctgcaaattttaaaggaccatttcacctactccctgtacgtgaacgtttgcagaagcctgtttgagaaggacaagctcctgttcagtttctgtctaactattaatcttcttctgcatgaacgcgcaatcaataaggccgaatggcgctttttgctgacggggggaattgggctcgacaacccttatgcgaatctctgtacctggctgccacagaagtcctgggatgaaatatgcagactcgacgaccttcccgcctttaagaccatccgccgggaattcatgcgactgaaagatgggtggaagaaggtctatgattctttagagcctcaccatgaagtgttcccggaggaatgggaggacaaagccaacgagtttcaacgcatgctgattattagatgcctcagaccagataaggtgatcccgatgcttcaggaattcattatcaaccgcctggggcgcgcattcatcgagcccccaccttttgatcttgcgaaggcatttggggacagcaactgctgtgccccactcatctttgtcttgtcccctggggccgatccgatggcagcactgctgaagttcgctgatgaccagggttatggcggcagcaaactgtcctccctctcgcttgggcagggtcagggacccatcgcgatgaagatgctcgagaaggccgtaaaggaaggcacctgggtagtgctccagaactgtcacctggctactagctggatgcctaccctcgagaaggtctgcgaggaactttctcctgaaagtacacacccagattttaggatgtggctgacaagctaccctagtcctaactttccagtttcagtgctgcaaaacggggtgaaaatgactaacgaggcccctaaaggactgcgggctaacattatccggtcataccttatggatccgatttccgaccccgagttttttggctcgtgtaaaaagccggaggagtttaagaagttactctacggactgtgttttttccatgctctggttcaggagagacggaagttcgggccacttggctggaacattccttacgaattcaatgagactgacctccgcatttcggttcagcagctgcacatgttcttgaatcagtatgaggaacttccatatgaagcgctacgctacatgacaggcgagtgcaattatggtgggcgggtcaccgatgactgggataggcgcactctgcgcagcatcctcaataagttttttaatccagagctcgttgagaactccgactacaaattcgatagctctggaatttactttgtgccacctagcggcgaccataagtcttacatcgagtatacaaagacactgccgcttactcctgcccctgagattttcggtatgaacgccaatgccgacattactaaggaccaaagtgaaactcagttgctcttcgataacattctgctgactcagtcaaggagcgccggggccggtgcaaaatcttccgatgaagtggtgaacgaggttgctagcgacatcctcggtaaattgccaaacaacttcgatatcgaagcggccatgaggcggtaccctaccacctacacgcagtctatgaacacagttctcgtacaggagatgggacgcttcaataaactgcttaagaccattcgtgattcctgcgtaaatatacagaaggccatcaaaggtctggccgtgatgtccacggacctagaggaagttgtgtctagtattctgaacgttaagattcctgagatgtggatggggaagtcctatccaagcctgaagccattggggtcatacgttaatgactttcttgccaggctgaagttcttacagcaatggtatgaggtgggtcccccaccagttttttggctgtccggatttttcttcacacaggccttcctgaccggggcacagcagaattacgcccgtaagtacaccatacctattgacctgctgggattcgattacgaagtgatggaggacaaagagtacaaacatccccctgaagatggtgtattcatccacgggctgttcctcgatggggcgtcctggaaccgaaagataaagaaattagccgaatcacatcccaaaatcttatatgacacagtgcctgtgatgtggcttaagccttgcaagcgggcggatattcccaaacggcccagctatgttgccccactctataagacttcagagaggcggggggtcctctctaccactggccacagcaccaatttcgtcatcgctatgaccctgccctccgatcagcccaaggaacattggattggccggggcgtagcactgctgtgccaactgaactcgtag

SEQ ID NO: 14373 - DNA, 1506 bp, synthetic construct
  source 1..1506: mol_type = other DNA; note = Synthetic coding sequence
atgtcctcccggcaggacaagagtgcctccaaagaaaagtccaagaaaccagtgcggttcctgccccagctcagtatggagaagctggctagtaaagagaaatttaaagcgccagcaagggcccttcctcagctgtctatggtgtcaactaagccccactggcaacaggccgccccatccttccatctgtccgtaaaacaggacgacgaatctccagagccattctccgtgaagaacgaacagtcccacgctgagtatatggaaagatttggtaaaaaggggaaactcccccatcaggtggatgacagctatgtgggcccttctaccagtaagagtaagggcaagtcacctcataaagaacgcgagaactttcgtagcaccctagtcaacgtgatcatgcaacaggacgcggatctagactcggctgtgcccgacggctcaacaattccaaaaccaaccgcctccgcaatcgaaaaagatattctcagatactattactacatccatcacggtattgacacagaccatgtggcaccgatggaagatagttggctcgagcacgtgttagatcttgtgcctcagcatttaaaggtgtttacagatagtattgttaccctgtcagatgagatgagagaagattacctgctcagcgtgaggaagtcaatcgtggactttgtgttaaaggacccgagagaaaagggagacgataagaagacagatgagctgcccgcccatagagcagagatggagatcctgcctaaaccatggcgcaagtccttcctggccgcctccagctacataagagaccatttgaatgctatgaatcctaccatgctcgcggtgctcgacttgtggcatacaaacttcaagaagctcaggcttgtcgacatcaaagaatttcataactgtcaggacgctctggaactcagctccttccaaaacatcataatgagacacatggacagtgctaaagaaactctgctgaaaatgtggtttcctgaagtccagaacatctattaccaggggaataaaaagaaacaactcccgaccggcgattcaagcgcgaagctggagagtttctttaattgtgccgctgcgcttatgaccctccagttgcaggacctgacattagtttccatgcaggacttcaccgatctcatagctcagcctccggacagtgtcagagccttcgagcacccggggttcattatgcgcttaatactcgataatgatactataaagtttgagcctgaactctccgactacatagatatctttttaaacgtgtacgatgtgatgatcaaggcggtttctttcgttcctcgagtcgagacgaagctgtacagcaagtggagaaacaaggcaaagcccgggcatttctactttagccacatacagaggtctgtcacatttcagcacagcgaggtgagttctcctcagaactcccatttcaaaatagtgtcgcccttttccgtgctaggtttcacttggagatgtcagctttag

SEQ ID NO: 14374 - DNA, 840 bp, synthetic construct
  source 1..840: mol_type = other DNA; note = Synthetic coding sequence
atggccgcacctgtgaggcgaacgctgctgggtgtggccggcggctggcgcaggttcgagcggctgtgggccgggagcctatcctcacgaagccttgcactggctgccgcacctagttctaatgggagcccgtggaggttgcttggtgcactctgcctgcagcgcccgcccgtggtgtctaagcccctgacaccactacaggaggaaatggcaagtctcctacaacagatcgagattgagcgaagtctgtacagcgaccatgagcttcgagcactggacgaaaaccaaaggctcgctaagaagaaggctgacctgcacgatgaggaggacgaacaggatatactgcttgctcaggatctggaagatatgtgggaacagaagttcttgcagtttaagctcggggccagaataactgaggcagatgagaagaacgataggacctctctgaataggaagctggatcgaaatttggtgctgttggtccgggaaaaattcggagaccaggacgtgtggatcctgcctcaagctgagtggcagcccggtgaaactcttcgaggtacagctgaacgcaccctagctacgctcagcgagaataatatggaggccaagtttctggggaacgcaccatgcggccattacacatttaagttcccccaagcaatgaggacagaatccaacctgggtgccaaggtgttttttttcaaggcgcttctgctgaccggtgacttcagccaagcaggaaataaagggcatcacgtgtgggtcactaaggatgagcttggggactacctgaagcccaagtatctcgcccaggtccggagattcgtgtcagatctgtag

SEQ ID NO: 14375 - DNA, 609 bp, synthetic construct
  source 1..609: mol_type = other DNA; note = Synthetic coding sequence
atggaagccgaagcaggtggattggaggagctcacagacgaagaaatggcagcactgggcaaggaagaacttgtgagacggctgagaagggaggaggcagctcgactcgcggccctggtgcagcgcggcaggctgatgcaagaggtgaacagacagcttcagggtcacctgggcgagatcagggaattgaagcagctgaaccgtcgactccaggccgagaaccgagagttgagagacttgtgctgctttttggacagcgagcgacagcgtgggaggagagcagctcgccaatggcagctcttcgggactcaggcgtctcgagccgtccgcgaggacctcggcggttgctggcagaaactggctgagctcgagggccgtcaggaggagctcctacgagagaacctggctcttaaggagctgtgcttggccctgggagaagagtggggcccaagaggcggcccttccggtgccggagggagcggcgcaggccccgcgccggaactggctctgccgccatgtgggcctagagatctgggggacggtagttcgtccaccgggtccgtgggctcgccagaccagctgcctttagcctgctcaccagacgattag

SEQ ID NO: 14376 - DNA, 1353 bp, synthetic construct
  source 1..1353: mol_type = other DNA; note = Synthetic coding sequence
atgagggagtgcatttctattcatgtaggccaggctggagtgcaaattggaaatgcctgttgggaactgtattgcctggagcacggcatccaacctgacgggcaaatgccctccgacaagactattggtggaggcgacgactccttcaataccttctttagcgagactggcgctggcaaacatgtgcccagagccgtgttcgtggatcttgagcccactgtggtggacgaggtccggacaggcacatacagacagctgtttcaccccgagcagctgatcaccggaaaggaagatgccgcaagcaactatgcacgcggccattacacaattggcaaggaaattgtggatttggtgctggatagaattcggaagcttgccgacctgtgtactggattgcagggttttctcatcttccattctttcggtggagggactggctccggattcgccagcctcctgatggaacgtctcagcgtggattactcaaagaagtcaaaactggagttcgctatctatcctgcaccccaggtgagcacagccgtcgtggagccatacaattccatcctcaccacccacactacactagagcatagtgattgtgcattcatggtcgacaatgaggccatctacgacatttgtaggaggaatttagatattgagcggcctacctacacaaaccttaataggctgatcggacaaatagtctctagtatcacagcctcactgagattcgatggggccctaaacgtcgacctgaccgaattccaaactaacttggtgccttatccacggattcacttcccgttggcaacctatgcgcccgtgataagcgctgagaaggcttaccacgaacagctatctgttgcggagattaccaacgcatgtttcgagcccgccaatcagatggtgaagtgtgaccctcgccacgggaagtacatggcatgttgtatgctttatcgtggtgacgttgtacctaaagacgtaaatgcagccattgccacaatcaagactaagcggacaatccagttcgtagattggtgcccgactgggtttaaggtcgggatcaattatcagcctcccacggtggtcccaggtggagaccttgctaaggtccagcgggcagtgtgcatgttgtctaatacaactgccattgcagaagcttgggcgcggttggtgcacaaatttgacctgatgtatgcaaaatgggcttttgtacactggtacgtgggtgaggggatggaggagggtgaattctcggaagctagagaggatctggccgctctcgagaaagactgtgaagaagtcggcgtagacagtgtcgaggctgaggcggaggaaggcgaggcctattag

SEQ ID NO: 14377 - DNA, 3078 bp, synthetic construct
  source 1..3078: mol_type = other DNA; note = Synthetic coding sequence
atggtggctatggccgaggctgaagctggagtggctgtagaagtacgaggactgccacccgccgttccagatgagttgttgactctctactttgaaaaccggcggcgctctggcggaggacccgttctgtcctggcaaaggctgggttgcggcggcgttttaacatttagagagccggcagatgccgagcgggtacttgcacaggctgaccatgagctccatggtgctcagctctctttgaggcccgccccacccagagctccggcccgtctcctcctgcaaggactccctcccggtacaaccccacagaggctggaacaacatgtccaggctctgctcagggcctcaggtctgccagtgcaaccttgttgcgcccttgcctcaccacgacccgacagggccctcgtgcaactgcctaaacccctgagtgaagcagacgttagggtactggaggagcaggcgcagaatctgggactggaaggcactctcgtatcactggctcgcgtgccacaggctagagccgtgcgagtggtgggcgacggggcatccgtggacttgttactgctggaattgtacttagaaaatgaacggcgctcaggaggaggaccattggaggacttgcagcgcctgcctgggcctctgggaaccgtagcgtctttccagcagtggcaggttgccgagagggtgctgcagcaagagcataggctgcaaggttccgagttgtcactggttccccattatgatatcctcgagcctgaagagttggccgagaatacctcgggcggtgatcacccctctactcaaggcccgcgggcaacaaagcacgccctgttgcgcacgggaggcctcgtgacagccctgcaaggagccggcacagtgaccatggggagcggcgaggaaccgggacagagcggggcgagcctgcggactggtcccatggtgcagggccgggggattatgacaacaggtagcgggcaagagcccggacagagcggaacgtccttgcgtacaggtccaatggggagtctggggcaggccgagcaggtctcaagtatgcctatgggcagcttggaacacgaagggctggttagcctgcgccctgttggcctgcaggagcaggagggcccaatgagccttggtccagtgggcagcgccggtcccgtcgagacgtcaaagggcttgctgggccaggaaggcctcgtggagattgcgatggacagtcccgagcaggagggacttgtgggtcccatggagatcactatgggctcgctggaaaaagctgggccagtgtcccctgggtgtgtgaagttagccggtcaggaaggattggtggaaatggtgcttctaatggagccgggcgccatgcgctttttgcaactgtatcacgaggacctcctggcaggactcggcgacgttgccctacttccgcttgagggtcccgatatgaccgggttcagactgtgcggagctcaagcgagttgccaggcagcggaggagttcctgcggtcattgcttggaagcatttcctgccacgtcctgtgccttgaacacccaggatccgcgcggttcctcctggggcccgagggtcagcatctgctacagggtctggaagcccagtttcagtgcgtgttcgggactgagcgattggccactgccaccttggacaccggactggaagaggtggaccctactgaggcactgccagtgctgccgggtaacgcccataccctgtggacgccagactctaccggaggggaccaggaggatgtgagcctcgaggaagtccgagagctgctggccactttggaaggactggacctggacggtgaagattggttgcctagagaattggaggaggagggccctcaagaacagccagaggaggaggtgaccccaggccacgaagaggaagaacctgttgcgcccagcacagtggccccccgctggctggaggaagaggcagcccttcagctggccctgcaccgatcactcgaaccacagggccaggtggccgagcaggaggaagccgcagctctgagacaagcactaaccctctcattgctagaacagcccccactagaggccgaggagccacctgacggaggaacagacgggaaggctcagttagtggtacacagcgccttcgagcaagatgtcgaggaattggatagggcccttagggccgccctggaagttcatgtacaggaggaaacagtgggcccctggaggagaacgctgcctgcagagctgcgagccagactggaaagatgccatggcgtaagtgttgctcttcggggtgactgtaccatcttgagaggttttggagcacatcccgcgcgggctgcacgtcatctggtcgccctgcttgcggggccatgggaccagtccctggcgtttcccctggccgccagtggccctacactcgcgggacaaactctgaaggggccctggaataatctcgagaggctggctgaaaatactggagagtttcaagaggtggtgcgagcattctacgacacgcttgatgctgcaaggagttcgattagagtggtgcgagtagaacgcgtgtctcaccctcttctgcaacagcaatatgagctgtaccgggaaagactgctccagaggtgcgaacgacggccggtagaacaggttctgtaccatggcacaaccgcccccgccgtgcctgatatatgcgcacatggattcaacaggtctttttgcgggagaaatgcaacagtttacggcaagggagtttattttgctcggagggcgagtctgtctgtgcaggataggtattcgcccccgaatgctgatggccataaagctgtatttgtcgctagagtgcttacaggcgattacgggcaaggtcgacggggcctcagagctcctcctttacgaggtcctggccacgtcctgctcagatatgatagtgccgtggattgtatttgtcagcctagcatcttcgtgatatttcatgatacccaggctctgccaactcatcttatcacttgcgaacatgtgccccgggcaagccctgatgatccgagcggactgcctggccgctcccccgatacttag

SEQ ID NO: 14378 - DNA, 390 bp, synthetic construct
  source 1..390: mol_type = other DNA; note = Synthetic coding sequence
atgtcacatctgcagtcactattgctggacacactcttgggtaccaaacacgtggacagcgccgccctgattaagatccaagagcggtcactgtgcgtggcctcacccggattcaatgtaaccccatctgacgtgcggaccctggtgaacggattcgctaagaatccactgcaggcccgcagagaaggactgtactttaagggcaaggactacaggtgcgtgcgcgccgatgaatattctctatatgctaagaacgagaacacaggcgtagttgtcgtcaaaacccacttgtaccttcttgtggccacctacacggagggtatgtatccttccatttgtgtcgaggccactgaaagcttgggtgattaccttcgcaagaaaggatcctag

SEQ ID NO: 14379 - DNA, 945 bp, synthetic construct
  source 1..945: mol_type = other DNA; note = Synthetic coding sequence
atgctaggcaagggcggaaaacggaagttcgatgagcacgaggatggactggaaggcaagatcgtcagcccatgcgatggaccatccaaagtgtcttatacactacagcggcagacgatcttcaatatttctctcatgaagctgtataaccatcggcccctaaccgagccgtccctccagaagacagttttaattaataacatgttgcggagaatccaggaagaactgaaacaagaggggagcttgcgcccaatgttcactccttccagtcagccaaccactgagccaagtgactcgtacagagaagccccacctgccttttcccatctcgcttcaccctcttcacacccctgcgatctgggctcaactacaccactggaagcttgtcttacaccagcctccctccttgaagacgacgatgataccttctgtacgtcacaggcaatgcagcccacggctccaacgaagctgtctcctcccgccctgctgcccgaaaaggactctttttcgtccgctttggatgagattgaagagttgtgcccgacaagcacctctaccgaagccgctacggccgccacggacagcgttaaaggcacctcgagtgaagctggcacacaaaaattggacggccctcaggaaagccgagcggatgactcgaagctcatggactcactgcctggtaatttcgagatcactacttcgacaggctttctgacggatttaactctcgatgatatactgttcgccgatattgatacgagcatgtatgatttcgacccatgtacttccagctctgggacggcaagcaaaatggctcctgtctctgccgatgacctgctgaagacccttgccccatacagcagccagcccgtgaccccgagccagcctttcaagatggacctcacagaactcgatcacatcatggaggttctagtaggcagctag

SEQ ID NO: 14380 - DNA, 246 bp, synthetic construct
  source 1..246: mol_type = other DNA; note = Synthetic coding sequence
atgaagggcagcaggatcgaattgggtgacgtcacaccacataacataaagcaactcaaaagactgaaccaagtgatttttccagtaagctataacgacaaattttataaaaagttcggattcgagatcattgaaaccaagaaaaattactacaaacgcattgaacccgccgacgctcacgtgctgcagaagaatctgaaagttccatccgggcagaatgctgatgtccagaagactgacaattag

SEQ ID NO: 14381 - DNA, 1437 bp, synthetic construct
  source 1..1437: mol_type = other DNA; note = Synthetic coding sequence
atggcgagcgctaccgaggacccagtgctggagcgctacttcaagggccataaggcagcaataacatcccttgatctgagtcctaacggcaagcaactggccactgcttcctgggacacttttctgatgctctggaactttaagccacacgcgagggcttaccgctacgtgggtcataaagacgtggtgacctccgtgcagtttagcccacacgggaacttactggccagcgcaagccgagaccgtaccgtgcggttgtggatcccagataaaaggggtaaattcagcgagttcaaagctcacaccgctcccgtcagatcagtggatttttctgcagatggccagtttcttgcaacggccagcgaagacaagagtattaaagtgtggagcatgtataggcagcggtttttgtactctctctacagacacacacattgggtgaggtgtgccaagttctctcctgacggacgcctgattgtctcatgctcggaggataaaaccataaaaatctgggacactaccaataagcagtgtgtgaataacttttcagattcagtggggtttgccaactttgttgatttcaatccgagcgggacctgtatcgcatctgccggcagcgatcagacagtcaaggtctgggacgtacgagtcaataagctgctgcagcattatcaggtccattccgggggcgtgaattgcatttcttttcaccccagcggaaattacttaataactgctagcagtgatggaaccctcaaaattctcgatctgctcgaaggtagactaatctacactttgcagggccacactgggcctgtctttaccgtgtcatttagcaagggcggggaactgttcgctagcgggggagctgacactcaggtgcttctgtggcgcactaattttgacgaactgcattgcaagggtctaactaagagaaatctcaaaagacttcacttcgattctcctccccacctgttggatatataccccagaacccctcatccacacgaagagaaagttgagactgtcgagattaaccccaagctggaggtcatcgatttgcaaatttctacccctcctgtgatggacatactgagttttgattcaactaccactactgaaacatcaggtaggacactaccggacaagggcgaagaggcgtgtggatacttcctaaatccatccctaatgtccccagaatgtctcccaaccaccactaaaaaaaagactgaagatatgtccgacctcccttgtgaatctcagaggtcaattcccctagccgtgacagacgccctggaacatattatggaacaattgaatgtgctgactcagacggtaagcatcctggagcagcggctcaccctgacagaggataagctgaaggattgcctggagaatcagcagaaactgttttctgctgtgcaacagaagagttag

SEQ ID NO: 14382 - DNA, 1263 bp, synthetic construct
  source 1..1263: mol_type = other DNA; note = Synthetic coding sequence
atgctgaaggccgtcattcttattggtggaccccagaagggaacccgcttcagacctctgagcttcgaggttcctaagcctttgtttccggtcgctggggtaccaatgatacaacaccacatcgaggcatgtgcccaagtccctggtatgcaggagatacttctcatcggcttttatcaaccggacgaacctctcacacagtttctcgaggcagcccagcaagagttcaacctgccagtgcgatatctgcaggaattcgcacctctcggcaccggaggaggactctatcatttcagggatcaaatccttgcaggctcccccgaagcgttcttcgtgctgaacgcagacgtatgctctgatttcccactgtcagccatgctagaggcacaccgccggcagcgtcacccctttctgctcctggggaccaccgccaaccggacccagagcctgaattacggatgtattgtggagaatccacagactcatgaagtgctccactatgtcgaaaagccctctaccttcataagcgatatcatcaactgtggcatctacctcttttcacctgaggccctcaagcccttgagagacgtgttccagcggaaccagcaggacggtcagttggaagattcacccgggctgtggcccggggctgggactattcgactcgagcaggatgtgtttagtgccctggcaggtcagggccaaatttacgtgcacctcactgatggaatctggtcacagattaagtccgccggatcggctctatatgcttcaaggctttatctgagccgatatcaggacactcacccagagaggctggccaaacatacccctgggggaccctggattaggggcaatgtttatatccatccaacggcaaaggttgcaccaagcgcggttctcggtcccaatgtctccatcgggaagggcgtgacagtgggagagggcgttcgcctcagagagagtatcgtgctccacggagcaacactgcaggaacacacctgtgtgctccattccatcgtggggtggggctccaccgtcgggcggtgggcacgggtggagggcaccccttctgaccccaacccgaatgacccgagagcccgcatggattccgagagcttgttcaaagacggcaaattgctgcctgccataacaatactaggatgtagagtcagaattccagccgaagtgctcatcttgaacagcatcgtgctgcctcacaaggagttgtccaggtcttttaccaatcagatcattctgtag

SEQ ID NO: 14383 - DNA, 1215 bp, synthetic construct
  source 1..1215: mol_type = other DNA; note = Synthetic coding sequence
atggatcaggattacgaaagaaggctcctccgccagattgttatccagaatgaaaataccatgccacgcgtgacagagatgagaagaaccttaactcccgcaagttcacctgtctcctcgccatctaaacacggagaccgatttatcccatcaagagccggagcaaattggtctgtgaacttccatcgcataaatgagaacgaaaagagtcctagccagaatagaaaggctaaggacgctacttccgacaacggaaaggacggcctggcctatagtgccttgctgaagaatgagctcctcggggcgggcattgagaaggtgcaggatcctcagacagaagaccggcgacttcagccatcgacccctgagaaaaaaggactctttacagtaaccaggctgtgcgacctgtctgtggagggggattccgtgacgtccgtggggtggtccgaacggggaaacctcgtggctgtcggaacacataaggggttcgttcagatctgggacgccgcggcagggaaaaagctgtcaatgctggaagggcatacagcccgggtcggggcactcgcgtggaacgcggagcagctctctagcggaagtcgagaccggatgatactccagagagacatcagaactccacccctccaatcggaaaggagacttcagggacatcggcaagaagtgtgcggcttgaaatggagcaccgatcatcagctccttgcgagcggaggcaacgacaacaaactcctagtgtggaaccattcatccctgtctcccgtgcaacagtacacagagcatctggcagcagtcaaagccattgcctggagcccccaccaacatggactgttggcaagtggcggcggcactgccgatcgatgtattaggttctggaacactctaaccggtcaaccgttgcaatgcatagataccggaagccaggtgtgcaacctagcttggtccaagcacgccaatgagctggtgagcacacacggctatagtcagaaccagatattggtctggaagtacccatcgctcactcaagtcgccaaactcaccggacacagctaccgagtcctgtatctagccatgtctccagacggcgaagcgattgttaccggagccggcgacgagactctcaggttctggaatgtcttttcaaagacgcgttccactaaggagagcgtgtccgttctgaatctgttcactaggatcagatag

SEQ ID NO: 14384 - DNA, 5892 bp, synthetic construct
  source 1..5892: mol_type = other DNA; note = Synthetic coding sequence
atgaagcagagaaagggccaggggagtgggggttcccggggccgcaaaaaacgtggcctaagcgacatttcaccgagtacttccctccctcctcttgtggagggacaactgaggtgcttcctaaagctgacggtgaacagggtgatctggaaaatagctaagccccccacctgtgtcctggtccgggttaggtggtggggtgagacaagcgatgggacactattctgtccaagggatgcccttcagaccgaaccaaaggcagtaaggaccacgacccggtacgcaattcggtgcggaccaaagcaatttaccagctatctcacagacatggctgtgttggttctggaggtaataactaagcttgacggtctgccgattggccgagtccagataaatggcctggctcagctctctccaacgcatcagataaacggattcttcactatcgtgagctcaacaagcaagaaactgggggagttgcaagttagcctggccttagaacctttatctgagacgtatgacagctaccacccactgcctaccactgacatgactgaaaatgtgctactgtctaagcagggattcagagaaaataccgaaccttcctcaacacaattccaggtgccatcccgccccagggatatccacaccataaaaattgacggtaaggagctggcggcaaattcttcccgctctacgactcccagaggcaaggatcatgtgtgtttcgcagagaaccccgataccatcaaggactcttctttcggcttgcaacatagtctgaattctggacagtcactagagagcgtcacactgaagggtcgcgcgccccgtaagcagatgagtctcctcaatagttccgaattccagccccagattcggaccgtagctaagagccatagcgactcctgcatcctgtcctcgaataaccttcctacaaaggacctgctttccgctctcttagaacagggcaataagctcagaaatgcaatggtgatctcagccatgaaatcaagcccagaaacttctatgctgctggatcaggtccacccacccataaacgaagactctctgagggcttccacccagataagagcgttttcacgaaatcggttcaaagatcatattgaggaccacttgctgccttccaccgagaacactttttggcgccatgacacaaaagctgacaccagggccatccagctgctgctgggtagtgccgagctcagtcagggcaatttctgggatggcctcggcagtccacccgattcaccttcacctgggagtgatgtgtattgcatttcagaactcaacgatccacaatacgaccagagtctgttagagaatctcttctacactgcacccaaatcagacacatccatttcggactttctatctgaggaggatgatatcgtcccaagtaagaaaattagccagagcactgcccttgcacgatcctcaaaggtcctggagagttccgaccacaaactgaaaaaaaggtctgcagggaagcgaaatagaaaccttgtcgagcagcagatgctgagcgaaactcccgaggatgctcagactatgacactgtctgtagatcggctggctctgttggggcggacacactccgttcgcataattatcgagacaatgggagtccctcctgattctccgcagatgacacctggaaagaaatcgtatgccggccctcccccaaaagtaactacagccaagaagcggacgttttttgtagaataccactttcctgtcggcttctcagaatccggactcggcaagaccgctctgatcactgaagtggtgagactcgctagcagcaagattacagatggtaaggtgaagtttcagcagagatttgtattcccagtccaattcggtggcccgatgatagagcactggtggaatagcaatcttacctttcagatatacgtgaaaaagaccccacaaaaaaagccggaggttataggatccgtatcattgagcttacgtgcggtgatccagagcgaactgttgagcttctccgatcaactccccgtgcagcaagaaaatgggcagtcaccatttggaccactgaaggtgacaatggaactgatcacagataacaaagatttcacaggcattaataccaaacttagtggaaatacacactatacccccctgtgcgccccgacttcacctaacaaggccttgcccgagctgaatcaagatatgacttgcacaaagaaccctcaaaatctgaatcagatccacgaagagacagccaagaaagcgcaaaacctagtcctccccaaccgaaagagcccgtccccagtggccccacacccaagtacctttgttgctactcccgcctcccacaacctagtgaatcagaccaacggaaccacaaaggagtcagccctgttgctccatgtcctgctcatggtgcccgacggaaaggattttataagcggcgagagtgagaagcagagcccctgtaacgtgtaccttaactgtaagttgttctcaactgaggaggtcactcgttccgtgatcgcctgggggactacacaacctgtgttcaatttcagccaggtgattcctgtctcccttagctctaagtacctggaacgcctaaaaaacaacgtgatggtcatcgagacatggaataaagtccgctcacccggccaagataagctcctgggactggtcaagttaccactgcatcagttctacatgtcgtttaaggacgccaaaatctccaggctgctgttagatgctcagtaccctgtcgtcgccgtcgattcttacatgccagtgattgacgtctttagcggacaccagaatggcagtctgcgggtcttcttggccatgggcagttccaaccagatcatggctttacagcgtctgaaaaacgaggagggcaccctccctccttttagccctagacctgctcacttcttagatcagcctacggcagcgtccgtggcaatggccgaggatcgcggaaacggtctgatggagcactgctttgagatccacatcgaaatggttaaggggcttgcaccacttcaggcgaccgtatggggtgaagctgactgttacgtccaatattactttccagtgcaacatagtcagagcagcgtgctgaagggacccgagtttctggagaacggtataaccctgaagcccttccgaaccgccaccaccctgtgtgtcccggatcccatattcaattccgaacaccaccacagcctactgctccccgcagaggtcccagtccagagactgctgctgtcagcgttcagcgcacaaggcctggtacctggggggggagttcagtttgagatctggtgcaggtattactaccccaacgtaagggaccaaaaagttgctaaaggaactctgcccttaagtaggatttgtgctatggtcaccacccagcatcgggaggatgtaggcattcagactttcaatctgccactgaccccacgtatcgagaataggaaggaactgagaaatcagtcatccggactgctggacgtcgggctgaggtataggcggtctcctagaactgctgagggcgtgctagccgcccggacagtgtctataagtgtgcaaatcatccgggcttgtggcttacaggcggctgcaaaagctctggctgagcgcgaacctgctctccagtttagtgcaaccgtcggcgttaacgcgtccgtcacgacccacctgtccttcctgccacagggtgagcagcgccgtacccaccccgtggcatgctcgttctgtcctgagttttcccaccatgtcgaattcacctgtaacctggtgacccaacactgctccggcgaggcctgtttcctcgccgagctgctcgagtttgcagaagtgatattcgctgtctaccacgaaaatacaaagagcgcgtctgatatcatttcaatcgagtcttgtaaagaatatttactaggggtcgtgaaagtgccgactaaggaactcctgatcaaacgtagtggcataactggatggtacccgattattctgccagaagacgggggcctgcctcacggcctggaactgatgcagaaaattgtggggggcctggaactctctataagctttactcatcgaggcgacagagaaagggtcctggaggcggctgaacacttgggatggtccttcgagaatagcttgaaagacttcgtcagaatggacgagggcgaaccagctaccgtcactatctccactcccagactttggcttcccatccactgcgtcctcctggccggccataaccatattcacaagaatacgtactgttatctgagatataaattttatgatcacgaggccttttggacgccccttaaaaagcctaaggagtccgtcaataagaaacaaattatggtcacattcaaggcgtctaagcgagcagaagtgaccaggggcccttccctcttgtggtacttccgtgaagagagactcgagatccaggtttggcgggcttacggaaatgattccgtcgagaggccccaccaaacagatagctggatcggttccgcctatgtcgacctggcgcgcctgggagagaggtctgcccgaactttaacggtatctggggtataccccctattcggccgaaatgctagcaatctcagcggagccgccttaagggtccatgtagtcctgtcctccttgtccagccacctggaaccaacacacgagctcgattcaatggactgctctagtcattctgaaagcgaacaactgcccagacggaatgatgaggtgcagctttcgcctcccgaagtcatttcttgccaccaaaagagtcccgctagcacacaggtgccctgtagtagcactaccgccgaggtgcgtctgactcaagagggccctgcggatttggacggcacttttgctgtgtcaatcctcgtagagagggctatgcacctgtcattaaaagggtcacccctcacagaaagaaaagtgtcaatcccatcttgttgcgtaagtttcgccacagccgacgagtcatcccctgtctatacccaggtggttgagaacactgactcccccatttggaacttccaacaacagtctcgcctgagcaaggagttgctcctagatcctcagcagactctggtcttcaaagtctggcataagggtgatgaagagcgggtgatcggattcgcaagtgttgacttgtcccctttgctaagcggatttcagttcgtctgcggctggtataacatcacagacttcagtggtgaatgccagggacagatcaaggtcgcagtgtcacccttggagtcacttatccatttcaaagaagaacgtcaggcccgccgcggggtggaaacctctaaatctctcatccccatatacagccccttttcgttcccagcgtctgacacttatgcggccttttcctcgcacatggctagacagacactggaccagttggcccatgcaagctccaaagagttggacttcagcagtcccggtaggagcgatactaccaggagtcaggcctcccgtcacgaggaacacgtgcagaatattaggaggtttcacgagagcctccatctgcaaggcgaagctccattgccatgcgacgacaagttgaccacgtcacctctgtcctcccagacctctatcttgaccagtctgagaaaaaacttaagcgagctcgaccagatccagcggtatttcagacagaagctcactaagcccttcctccctctgtctccacaaacccagactgccatttcccagcatcaagagtcatgccgcgatcatctcggacctggtgccagctctctggaccccggaagtcaatgcatcctggagaaaagctctaatttggtgctgcaggtgtcctcgttgattacaggctcatactag

SEQ ID NO: 14385 - DNA, 5586 bp, synthetic construct
  source 1..5586: mol_type = other DNA; note = Synthetic coding sequence
atgaagcaacggaaggggcagggctcaggcggcagcaggggacgcaagaagcgcgggctttcggacattagtcctagtacgtcactgcctcccctcgtggagggccagcttcggtgctttctgaaactgactgttaaccgagtgatttggaagatcgccaaaccacccacatgcgttcttgttcgtgtcaggtggtggggcgagacctcagacggcacacttttttgtccacgcgacgctctccaaactgaacctaaggccgtacgcaccactaccaggtacgccatacgttgcggtcccaagcagttcacatcttacctcaccgacatggcggttctggtgctggaagtcatcacaaaactcgacggcctgcctatcggaagagtccagattaatgggctggcccagctgtcacctacacaccagatcaacggtttctttactatagtatcctctacctctaaaaagctcggggaattacaggtgagcttggcgttggaacccctcagcgagacgtacgactcctatcacccattacctactacagacatgaccgaaaacgtgctgctttcgaaacagggctttcgggaaaatactgagccaagtagcacgcagttccaggtgcctagtagaccccgggacatacacacgattaaaatcgacgggaaggagctggcagcaaacagttcccggagcaccacacctcgcggcaaggaccatgtctgcttcgctgaaaaccccgacactattaaggacagttcgtttggtctgcagcactccctgaactctggacagtctctcgagtctgtgacactcaagggacgggcacctaggaaacagatgtcgctgcttaatagctcagagttccaaccgcagatacgcaccgttgccaagtcacactcagactcatgtatcctgtcatctaataacctgcctacaaaggatctgctgtctgcacttttggagcagggtaataagctaagaaacgcgatggtgatatccgctatgaagtcatcacccgaaacatccatgctactggaccaggtacacccgccaatcaatgaagattctctccgcgcttccacccagatacgggctttttccaggaaccgtttcaaggaccatatagaagatcacctgctgccctctacagaaaacacattctggcgacacgacacaaaggctgacacccgggcgatacagctcctccttggatccgccgagctctcacagggaaacttttgggatggcctcggctccccgcctgacagccctagcccagggtcagacgtgtactgcatctcggagctcaacgatcctcagtatgatcagagtctgctcgagaacctcttttatactgcgcccaagagtgacacatccataagcgatttcctatccgaagaggatgacattgtgccctctaagaaaattagtcagtccactgcccttgcccgtagtagtaaggtgcttgaatccagcgaccacaaactaaaaaagaggagcgcaggtaagcggaacagaaacctagtcgagcaacagatgctgtcggagactccagaggacgcgcagacgatgacactgtctgtagataggctggccctactgggccggacacacagcgtgcggattatcatcgaaaccatgggtgtgcctcctgattctccgcagatgacccccggtaaaaaaagctacgccggtccgccacccaaggtgactaccgccaaaaagcggaccttctttgttgaatatcacttccctgtcggtttttccgaatccgggcttggaaaaaccgctttgattaccgaagtggttcgtttggcatctagcaaaataaccgatggcaaggtgaagttccagcaacgcttcgttttcccagttcaattcggtggccctatgattgagcactggtggaactcaaacctgacattccaaatctacgttaagaaaaccccgcagaagaagcctgaggtgatcgggtcagtcagcctctccctgcgagccgtcatccagtctgagctgctgtccttttcagatcagctgccagtccagcaggagaatggacagtctcccttcggccccttgaaggtgaccatggaattaattacagacaacaaggattttactggaattaatacgaagctaagtggaaatacccactatacacctttatgtgcccctacctctccaaacaaggctctccctgagctgaatcaagatatgacgtgcacaaagaatccacagaatctcaaccagatccacgaagagactgccaagaaagcccagaacttagtattgccaaatcgaaagtctcccagtccagtcgctcctcacccctcaactttcgtggcaacaccagctagccacaaccttgtgaaccagacaaacgggactactaaagagagtgcattactactgcatgtattacttatggtccctgatggaaaggattttatttccggagaatctgaaaaacagtcgccatgtaatgtgtatcttaattgtaagctgtttagtaccgaggaggtgactcggtctgtcattgcctgggggacaacccagcctgtgttcaatttttcccaagtgattcccgtgagcctgagctctaagtatctggagcgtctgaagaacaacgtcatggttattgaaacctggaataaagtcaggagcccagggcaggataaactactgggcctcgtgaaactccccctgcaccaattctacatgtcgttcaaagacgctaagatttcgcgcctgctcctcgatgcccagtatccagttgtggccgtggatagctacatgcctgtgatcgacgttttctccggtcatcaaaatggtagccttcgggtttttttggccatggggtcgtcaaaccagatcatggctctgcagcggctcaaaaacgaggagggcacactgcctcccttttccccccggcccgcacattttctcgaccaacccacagccgcatccgtggctatggccgaggacaggggtaacggactgatggagcactgctttgagatccacatagagatggttaagggactggcccccctgcaagcaaccgtgtggggagaagccgactgctacgttcaatactattttcccgtccagcacagccagagttctgtgctgaagggtcccgagttcctggagaatggaatcacactcaagccttttagaaccgccactacactctgcgtgcctgatcctatcttcaactcggaacatcaccacagcctgcttcttccagctgaagtgccggttcaaaggctcctcttgtccgcgtttagcgcccagggccttgtacccggcgggggagtgcagttcgagatatggtgccgttactactatccgaatgtcagagatcaaaaggtcgccaagggcactctgccactctcgcggatctgtgccatggtcactacccagcaccgcgaagacgtaggcattcaaacatttaatctgccactgactccccgtatcgagaatagaaaggagctacgaaatcagagtagtgggttgctggatgttggcctccgctatagacgaagtccacggaccgctgaaggtgtgctggcagcacgtactgtctccatttctgtgcagataatcagggcctgtggacttcaagcagccgccaaggccctcgctgagcgcgaacctgcattgcagttttctgctacagttggggtgaacgcatcagttacaacccatttatcgtttctgccacagggggagcagaggcggacccatcctgtagcttgtagtttttgccccgaattcagtcatcatgttgaattcacatgcaatttggttacacaacactgtagcggcgaggcttgcttcctggctgagttgcttgaattcgccgaagtaatcttcgccgtatatcacgagaacaccaagagcgcgtccgatattatatcaatcgagtcttgtaaggaatacctgctgggcgtggtcaaggtgccgaccaaagagcttctgattaaacgctccggaattactggatggtaccccataatactacctgaggacggtgggctaccgcacggactggaactgatgcagaagattgttggaggccttgagcatctcgggtggtcattcgagaatagcctaaaagacttcgtgcgcatggatgagggggagccagcaacagtcacgatctccactccacgtctgtggctcccaattcactgcgtcttgctggccgggcacaaccacattcacaaaaacacgtattgctacctgcggtataaattctatgatcatgaggccttttggacccctctcaaaaagcctaaagaatcagtgaacaagaaacagattatggtaacttttaaagcatcaaaacgtgctgaggtcacccgtggtccctctctcctctggtatttccgggaggagagactggagattcaggtctggcgcgcttacggaaacgattccgtggaacgtccgcaccaaacagattcttggatcgggtcagcctacgtcgatttggctcgcctgggagagagatcggcacggacactcacggtgtctggggtatatcctctgttcggcagaaatgcctccaatctgtctggcgctgcccttcgcgtgcatgtggtgttgtcaagcctctccagtcatctggagccaactcacgaactcgactctatggactgctctagccactccgagtctgaacaattaccacggcgaaacgatgaggtgcagctatctccccctgaggttatctcatgccatcaaaagagtccagcatccacccaggtaccttgctcctccaccaccgcagaggttcgtttaactcaggaggggcctgcggacttggatgggacgtttgccgttagcattctggttgaacgagccatgcacctgagtctcaaaggctcaccactgactgaaagaaaagtgtctatccccagctgttgcgtgtcctttgccaccgcagatgaatcctcacccgtctacacccaggtcgttgaaaacacagactcaccaatctggaattttcagcagcaatcgcgtctaagcaaggaactgctgctagacccccagcagactctggtctttaaagtttggcacaaaggggatgaggagagagtgatcggatttgccagcgtcgacctgagtcctctcctatcaggctttcaatttgtgtgcgggtggtacaatattacagatttcagtggggaatgccaggggcaaatcaaagtagctgtttcccctctggagtccctcattcactttaaggaggaacggcaggcgcggcgaggagtcgaaacatccaaaagcctgatccccatctacagtcccttctccttcccggcaagtgacacatacgccgccttcagctcccatatggcccggcagaccctcgaccagctggcgcacgcaagcagtaaagagctcgacttttcctccccaggcaggtcagataccaccagatctcaagcctcccgccacgaagagcacgtgcagaacatacgccgctttcacgaaagcttacatctacagggtgaagcccctttgccctgtgacgataaactgactaccagcccgctgagcagccagacatag

SEQ ID NO: 14386 - DNA, 1131 bp, synthetic construct
  source 1..1131: mol_type = other DNA; note = Synthetic coding sequence
atgctcactttcctgcagcagcttagggtagactggcctgccgccagtgagcgggcttccagtcacaccctgaggtcgcacgccctggaggagctgacgtccgctaatgacgggcggacgctgagtcctggcatcttgggcagactctgcctaaaggagcttgtggaggaacaaggccggactgctggttatgacccaaacctcgataattgtctggtgacagaggatctcctcagtgtccttgctgaactgcaggaggcactgtggcattggccagaggattcacatcccggtctggctggggctagcgacactggaaccgggggatgtctcgtcgtccacgtagtgagttgcgaggaggaatttcagcagcagaaactggaccttctctggcagaaattggttgataaggctcccctgaggcaaaaacacttgatctgtggacccgtaaaggttgccggagcaccaggaacgctcatgactgccccggagtactacgagtttaggcacacccaggtgtgtaaagcatccgccctgaagcacggcggcgacttggcccaagatccggcctggacagaaattttcggggtcctgagcgtagcgacgatcaagtttgagatgttgtctacagccccccaatctcaactgtttctggctctggcggattccagtatatcgacaaaggggacgaaatctgggacattcgtgatgtataattgtgcgcggctggcaactctcttcgagtcctataaatgttctatggagcagggcctctaccccacctttccacccgtgtcaagtcttgacttttccttactgcatgatgagggggaatggctcctccttttcaactctattctgcccttcccggatctgctgtcgaggactgccgttctggactgcaccgctccaggcttgcatattgcggtgcgcactgagatgatttgtaagttcctggtgcagttaagtatggacttctctagctactataaccgggtgcatatactgggggagcctcgtcctcacctgtttgggcagatgttcgtccgcttgcagctgttgcgtgcagtccgggaggttctgcatacaggcctcgccatgctcggactaccccctctgagccatatctag

SEQ ID NO: 14387 - DNA, 1572 bp, synthetic construct
  source 1..1572: mol_type = other DNA; note = Synthetic coding sequence
atgaaccaaccttgtaactcaatggaaccaagggtgatggacgacgacatgctgaaattggccgttggtgatcaggggccccaagaggaggcgggccagctggccaagcaggaagggatcctcttcaaagacgttttatcactgcagctagattttcgcaatattctgcgcatagataacctgtggcagttcgagaacctgaggaagctacagctggacaacaatattatcgagaaaatcgagggtttggagaaccttgcacatctcgtgtggttagatcttagcttcaacaacatcgagaccattgagggactggacactctggtcaacttggaagacctttccctatttaacaacagaatcagtaaaatcgacagtctggacgccctggtgaaactgcaggttttgagcctcggaaacaacagaatcgacaacatgatgaatattatctacctgcgacgtttcaagtgtttacggacgctgagccttagccgcaatccaatctctgaggctgaagattacaaaatgtttatatgtgcctacctccctgatttgatgtatttggattaccgacgaatagatgaccacaccaagaagctggccgaggcaaaacaccagtacagcatcgacgagctgaagcatcaggagaacctgatgcaggcgcagctggaggatgagcaggcccagagggaagaactggaaaaacacaaaaccgcatttgtggaacacctgaacggcagcttcctcttcgacagcatgtacgcagaggattcggaggggaacaacctcagttacctgccgggtgtcggcgaacttctcgagacctacaaagataaattcgtaattatctgcgtgaatattttcgagtatggactcaagcagcaagagaagaggaaaacagagcttgatactttctctgagtgtgtgcgggaggctatccaagaaaatcaggagcaggggaaacgaaaaatcgccaagtttgaggagaagcacttgtcaagccttagcgccatccgagaagagctagaattgccaaatattgagaagatgatcctagagtgctccgctgatatatcggaattgtttgacgcccttatgactctagaaatgcagcttgtggagcagcttgaggagacaatcaatatgttcgaaagaaacattgttgatatggtggggctgtttattgagaacgtgcaatctctcatggcccagtgccgggatctcgaaaaccatcatcatgagaagctcctggaaatttccatctctacactggaaaagatcgtggagggagaccttgacgaagaccttcccaatgacctcagagcattatttgtggataaagatacgatagtgaatgccgtgggagctagtcacgatatccaccttttaaaaatcgataatagagaggatgaactggtgacacgcataaattcttggtgcacgagactcattgatagaattcacaaagacgagatcatgagaaatagaaagcgcgtgaaagaaattaatcagtatattgatcatatgcagagcgagctggataatctggaatgcggagatattcttgactag

SEQ ID NO: 14388 - DNA, 1680 bp, synthetic construct
  source 1..1680: mol_type = other DNA; note = Synthetic coding sequence
atgaaagtgattacatgcgaaattgcctggcacaacaaggagccagtgtattccttggatttccagcacggcacagcagggagaatccaccggctggcttcagccggagtcgacaccaatgtgagaatctggaaggttgaaaaggggcccgacggcaaggccatcgtggaatttctgtctaacctcgccaggcacacaaaggccgttaacgttgtccggtttagcccgacaggagagatccttgcttccggaggggacgatgcagtaatattgctgtggaaagtgaacgataataaggagccagagcaaatagcgttccaggacgaggatgaagcacagctaaacaaggagaattggaccgttgtgaaaacactccggggacatctagaggatgtgtatgacatttgctgggccacggacggcaatctcatggcttctgcatctgtagacaatactgccatcatctgggatgtgtcaaagggacaaaagatctcaatatttaacgaacacaagtcttacgttcaaggcgtaacctgggaccctctcggccagtatgttgccaccctgagctgcgacagagtgctacgagtatactctatccagaagaagcgtgtcgctttcaacgttagcaagatgttatccgggattggagccgagggggaggcgcgtagctatcgcatgtttcatgacgactctatgaaatccttctttcgccggttatcatttacgcccgatggaagtctgctcttgactcccgccggctgtgtggaaagtggtgagaacgtgatgaatactacatacgtcttttcacgcaaaaatctgaaaaggcctatcgcacacctgccttgcccaggaaaggctacactggccgtgcgttgctgtcctgtctatttcgagctgagacctgtagttgaaaccggagtcgagcttatgtcgctgccgtacaggctggtcttcgctgttgcttcagaagactcagtgctgctgtacgacacacagcaatccttccccttcggatacgtgtcaaatatccactatcacacactgtctgatatatcctggagcagtgacggcgcgttcttagcgattagttccaccgacggctactgtagctttgttaccttcgaaaaagatgagcttggtatcccgctgaaagaaaaaccagtgttgaacatgcgtaccccggataccgcgaaaaagactaagtctcagacgcatagaggttcctcaccgggtccaagacccgtagaggggacccccgcctcaagaacgcaggacccgagctctcctggtactacaccaccacaggctagacaggcaccagcccctacggttataagggaccccccttcaattaccccagctgtgaagagcccccttccaggcccctccgaggaaaaaacactgcagccaagctcccagaatacgaaagcccacccttccaggcgcgtaacgttaaacaccttgcaggcctggtcaaagaccacaccccgacgcattaacttgacaccccttaaaaccgatacgccccccagctcagtgccaacatccgtcatctccactccatcaacagaagagattcagagtgagacgccaggcgacgcccaaggaagccctcccgaactaaaaagaccgagactggacgaaaacaaaggtggcacagaatctcttgatccatag

SEQ ID NO: 14389 - DNA, 1527 bp, synthetic construct
  source 1..1527: mol_type = other DNA; note = Synthetic coding sequence
atggcagacgggcaggtcgcggagctcctattgagacgactggaagccagtgacggcggcttggatagtgccgaacttgcggctgaactgggcatggagcaccaagcagtagtcggcgctgtgaaaagtttgcaagctcttggggaggttattgaagcagaacttcggtccacaaaacattgggagttaaccgccgaaggggaggagatcgcacgtgagggcagtcatgaggcccgcgtgttcagatcgatccccccggaaggcctagctcaaagtgagctgatgagactgcccagcgggaaagtgggattctccaaggcaatgtcaaacaaatggatccgtgttgataagtccgctgccgatgggccccgggtgtttagggttgttgactccatggaagacgaggtgcaaaggcggcttcagctcgtgagaggtggacaagcagagaaacttggagaaaaagaacggtctgaactccgtaagagaaaattacttgccgaagttactcttaagacctactgggtcagcaagggaagcgccttcagtaccagcattagcaagcaagaaaccgagctgagtcctgaaatgattagctctggctcatggagagatagaccctttaaaccctataatttcttggcacacggagtcctgcctgacagtggacacctccaccccctcctgaaagtgaggagtcagttcaggcagatatttttggagatggggtttactgagatgccaacagacaactttatcgaatcctcgttttggaattttgacgccctcttccaaccacagcagcatcctgccagagatcagcacgatactttttttctgcgagaccctgccgaagccttgcagctgccaatggactatgtgcaacgcgtgaagaggacccatagccagggggggtacggcagtcaaggttacaagtacaactggaagctggatgaagcccgcaagaatttgctccggacccacactactagtgctagcgcccgcgccttatacagattggctcaaaagaagcctttcacaccggtaaagtacttctcgattgatagggtgttcagaaatgaaaccctagacgccacacacctagctgagttccatcagatcgagggagttgtggctgaccacggcctgacactggggcacctgatgggcgtactgagagaattcttcaccaagctgggtatcacacagctcaggtttaagccagcatataacccctacacggagccttccatggaggtcttttcctatcatcagggtttaaagaaatgggttgaagtcggaaactccggagtgttccgacctgagatgctgttacccatgggcctgcccgagaacgtaagcgtcatcgcttggggcttatcactggagagacctaccatgattaagtatggaatcaacaacatccgtgagctggtcggtcataaggttaacttgcagatggtctacgattctcctctgtgtaggctggatgccgagccccggcccccccccactcaagaagcagcatag

SEQ ID NO: 14390 - DNA, 1203 bp, synthetic construct
  source 1..1203: mol_type = other DNA; note = Synthetic coding sequence
atgtcatcccctctggcttcgctgagtaaaactagaaaggtgcctctcccatctgagcccatgaaccccggccggagaggaatccggatctatggtgacgaggacgaagtggatatgctctccgacggctgtggcagtgaagagaagatcagcgtcccatcttgctacggtgggatcggagcccctgtcagcaggcaaggcgatagtctggcacctccagaggttgactttgataggctgctggcaagcctccaagacttatcggagctcgtagtggaaggggacacccaggtgacgcccgttccagggggggcccgcttacggacacttgaacccatacccttaaaattatatcgcaatggcatcatgatgttcgacggaccatttcagccgttctacgatccctccactcagaggtgccttagggatattctcgacggattttttccctctgagctccaaaggctatacccgaatggtgtaccattcaaggtctctgacctgcggaatcaggtctatctagaagacggcctcgaccctttccccggtgaaggcagggttgtaggccggcagttaatgcacaaagctctggatcgcgttgaagagcacccagggtcccggatgaccgccgaaaagttcctaaatagactgccgaaattcgtcatcaggcagggggaggtgattgacataagggggcccatccgcgatactctccagaattgctgtcccctccccgctaggattcaagagatcgtggtcgaaactccgacattggccgctgaacgggagcggtcacaggagagtcctaacactccagccccgccactctccatgttgcggatcaagtccgaaaatggtgaacaagctttcctgctgatgatgcagccagataacactatcggagatgtgagagcgctcttggcccaggcaagagttatggatgcctctgcctttgaaatcttctcaacctttcctcccaccctttaccaggacgacacactgacattgcaagcagcaggcctggtcccaaaagccgccttacttttgcgggcacgacgagctcccaagtctagtctgaaattctccccgggaccctgccccgggcccggcccaggcccatcccctggtcccggaccaggcccttctcctggccccggtcccggcccaagcccttgtcccgggccatccccctccccacagtag

SEQ ID NO: 14391 - DNA, 1350 bp, synthetic construct
  source 1..1350: mol_type = other DNA; note = Synthetic coding sequence
atggcttccgccctgcggccacctcgggtgcccaaacctaaaggcgtactgccatcccactactatgaatccttcctggaaaagaaagggccctgtgaccgagattacaaaaagttttgggctggccttcagggtctcactatctacttctacaattcgaacagggatttccagcacgtcgagaagctgaacctgggcgcttttgagaaactaactgatgagattccttggggaagttcacgcgatcctgggactcatttttcactgatacttcgtgaccaagagataaagttcaaagttgagaccctggaatgccgtgagatgtggaaggggttcatcctcaccgttgttgagctgcgcgtgcccaccgatcttacgctgctcccaggccatttgtacatgatgagcgaggtcctggctaaggaggaagcacgccgcgcactcgagaccccatcatgcttcctgaaggtttcacgcctcgaggcacagctgttgctagagaggtaccctgagtgtggaaatttgcttcttcgaccgagtggcgacggcgcggatggggtgtcggtaacaacgaggcaaatgcacaacggtacacatgtggtaaggcactataaggttaagagagagggccccaaatatgtgatcgacgtggagcaacccttcagctgcacctcgctcgacgccgtggttaactacttcgtaagccacactaaaaaggccttggtacctttcctgctcgatgaggactacgagaaagtcctgggttatgtcgaagctgacaaagagaatggagagaatgtatgggttgcccctagcgctcccgggccaggaccagctccttgcaccggtggtccaaagcccctaagtccagcctccagccaggacaagctccctcctctgcccccgctgccgaatcaggaggagaactatgtcacacccataggcgacggaccagccgtggactatgaaaatcaggacgtggcatctagctcttggcctgttatcttaaaacctaaaaaacttcctaaaccacccgcaaagctacctaaaccaccggtaggccccaaacccgttgagaaaggattccaccatgtggctcaagctggccttgaactgctgacatcgtctgatccccctacgagcgcttcgcagtccgccggaatcaccggcgtgagccatcatacttggccgcacctgagctccctgcctgaaccgaaggtgtttaatggaggcctagggcgtaagttgcccgtgtcttctgcgcagcctctctttccaaccgccggccttgctgacatgaccgctgaactgcagaaaaaactggagaagaggcgggcattggaacattag

SEQ ID NO: 14392 - DNA, 1239 bp, synthetic construct
  source 1..1239: mol_type = other DNA; note = Synthetic coding sequence
atggaccccatccgtagcttctgtggaaagctgcggtcccttgcttctacccttgattgtgaaacggctcggctgcagcgtgcactggatggagaagaatcagattttgaagactatcctatgaggatcctctatgacctccacagtgaggtacagacattgaaagacgacgtgaacatcttactggacaaggcccgcctcgagaaccaggagggcatagatttcatcaaggccactaaggttctgatggaaaaaaattctatggacattatgaagataagggaatactttcagaaatatggctattcaccccgtgtgaagaaaaattccgtgcatgagcaggaggctattaatagtgatcccgagctgtccaactgtgagaatttccagaagaccgacgtgaaggacgacctatcagatccacccgtggccagctcatgcatctcggaaaagagcccccggtctcctcagttaagtgactttgggctggagagatacatcgtgtcacaggtgttgcctaatcccccacaggctgtcaataactataaagaagagccagtaatagtgactccacccacaaagcagtcccttgtgaaagtattgaagacccccaagtgtgctcttaaaatggacgacttcgaatgcgtgacacccaagctggaacacttcgggatttcggagtatactatgtgcctcaatgaggactataccatgggcctgaagaatgcaaggaataacaagagtgaagaagcaatcgacaccgagtcccgcctcaatgacaacgtgtttgccactcctagtccgattatacaacagctggaaaaatcggacgctgaatacacgaactctccccttgtcccaacattttgtacccccggcctaaagataccgtccacaaaaaattcaatcgcccttgtttccacaaactaccctctcagcaagaccaatagctccagtaacgaccttgaggttgaggaccggacctcgctagttttaaactccgacacatgtttcgaaaacctgacagacccctccagcccaactatttcctcctacgaaaatctgctgcgaactccaactccgcctgaagttacaaagatcccagaagacatccttcaactgctatctaagtacaactccaacctggccacgcccatcgcaattaaagccgtcccgccatctaagcggtttttgaaacacgggcagaacatccgtgacgtgagcaataaagaaaactag

SEQ ID NO: 14393 - DNA, 2583 bp, synthetic construct
  source 1..2583: mol_type = other DNA; note = Synthetic coding sequence
atgaccgagggcacaaagaaaacctccaagaagttcaaattcttcaaattcaaaggcttcggtagcctgagcaatctaccccggtcatttactctgaggagaagttccgcttctatcagccgccagtcccacctcgagcccgacactttcgaggcaactcaggatgacatggttacggtaccaaagtcaccaccggcatatgcaaggtcctcagatatgtactcccatatgggtaccatgccccgcccatccatcaaaaaggcccagaactcgcaagcagcacgccaggcccaagaagctggcccaaagcctaacctggttcccggtggagtccccgatcctcccggcctggaagccgctaaggaagtcatggtgaaagcgactggtcctctggaagacacaccagccatggagcctaatccatccgcagtggaggtggaccctatcagaaagcccgaagtgcccaccggcgatgtggaagaggaacgccccccacgcgacgtgcactccgagagggccgccggagagccggaggctgggtcagattatgtgaagttcagcaaggaaaagtatatcctggactctagcccagaaaagctccacaaagagctggaggaagaattaaaactctccagcaccgacctgagatctcacgcctggtatcacggtagaattccacgagaagtgagcgagactctggtccagcgaaacggcgactttctgataagggactcccttacctctctgggagactatgtgctgacatgtagatggcggaaccaggcactgcacttcaagataaataaagtcgttgtgaaggccggggagagttacacacacatacagtatttattcgaacaggaatcgttcgatcacgtgcctgccctggtccggtatcatgtggggtctcgcaaggcggttagcgaacagagcggcgcgattatctactgtccagttaacagaacctttcccttgaggtacctggaggcctcatatggactcggacagggttccagcaagcccgcatccccagttagcccatccggcccaaaggggagccacatgaaacgtcggtctgtgactatgacagacggtcttacagccgacaaagtgacacgcagcgatggttgtcctacctctacttcccttcctcgaccacgtgatagtattaggagctgcgctctgtccatggatcagatccctgacctccatagccctatgagccccatttccgaatctccctcatccccagcatacagcacagtgactagggtacatgcagccccagctgcaccctcagcaactgctcttccagcatccccggttgcccggaggagctccgagccccaactctgtcctgggtccgcccctaagacgcatggggagagcgataaaggaccacacacttccccctcgcatactctggggaaggccagcccgtctccctccctgtcttcatattctgaccccgacagcggtcactactgtcagctgcaacccccagtccgaggatcccgggaatgggcagctaccgagaccagttctcaacaggctagaagttacggcgaacggttaaaggaattgtctgagaacggagcccctgaaggcgattggggtaagacttttaccgtccctattgtggaggtcaccagcagttttaatccagctacctttcagagcctgctcattccccgggacaaccggccacttgaagtgggactcctgcgaaaagtcaaagagttgctggcggaggtggacgccagaacgctcgccaggcatgttacaaaggtggattgcttggtggcccggatcttaggagtcacaaaggaaatgcaaacacttatgggcgttcgctggggaatggagctcctgacactgccccatggcaggcagctgcgcctggacctgcttgagcggttccacaccatgtctattatgttagcggtggatatcctgggatgtacagggtccgcggaggagcgagcagctttactgcacaagacgatccaacttgcagccgagctgcggggcaccatgggcaacatgttttcattcgctgcagtcatgggagcgctcgacatggcccagatatccaggttagaacaaacctgggtgacattgcgacagcggcataccgagggcgcaatattgtatgagaagaagctcaagcccttcctgaagtcgctcaacgaagggaaagaaggaccacccttgtctaatactacatttccccacgtgctcccgctgattactctgctcgaatgtgactctgccccccccgaaggccctgagccatggggttcgacggaacacggggtggaagtagtacttgcccacctcgaagctgctcggaccgtcgcccatcacgggggcctgtatcatacaaacgcggaggtgaagctgcaaggtttccaggccaggcccgaattgctggaggtgttctcgactgaattccagatgaggcttctctggggctcacagggcgcaagttcaagccaagcgcgcaggtatgaaaaatttgataaggttctgaccgcgctgtcccataagttggagcctgccgtgcgttcctctgagctctag

SEQ ID NO: 14394 - DNA, 573 bp, synthetic construct
  source 1..573: mol_type = other DNA; note = Synthetic coding sequence
atgactgtgccttggaggcctgggaaacgaagaataacatacaaggaggaagaggacttgaccctacagccaagaccagctagtagtgcccctgagtccctggtaggccttcaggagggaaagtcaacggagcaagggaaccacgatcagctgaaagagctttattcagccggaaatcttacagtgctggctacagacccactgttgcatcaggatcctgtccagctcgacttccattttagactgacctcacaaacctctgcccactggcacggacttctatgcgataggcggctgttcctggatatcccttatcaggccttggatcagggcaatagagagtcccttactgcaaccttggaatatgtggaagaaaagacgaatgttgattcagtgtttgtgaacttccagaatgacagaaatgatcggggtgcactgctgcgcgcattttcttatatgggcttcgaggtcgtacggccggaccaccctgctcttccacccctagacaatgttatcttcatggtgtatcccttagagcgtgacgtcggacatctgcctagtgaacccccttag

SEQ ID NO: 14395 - DNA, 1527 bp, synthetic construct
  source 1..1527: mol_type = other DNA; note = Synthetic coding sequence
atggctacagattggctcggtagtatcgtgagtatcaattgtggggatagtctgggcgtttaccaggggagagtgtccgcggtcgaccaggtgagccagactattagtctcacccgcccttttcataatggcgttaagtgtctcgtgcccgaggtgacattccgcgcgggagacattactgaattgaagatcctagagatccctggcccaggcgataatcagcacttcggcgacctgcaccagacagaactgggcccttcaggcgccggatgccaggtcggcatcaaccagaacggtactggcaagttcgtcaagaagcccgcttcaagcagctccgccccccagaacattccgaaacgcacagacgtgaagtctcaggacgtcgccgttagtccgcagcagcaacagtgctcaaagagctacgtggacagacacatggagagcttgagccagtccaaatcctttcgaagacggcacaattcatggagctctagctcccgccacccaaatcaagccacccccaagaaatccggactgaagaatggacagatgaagaacaaggatgacgagtgtttcggagatgatatagaagagattcctgacactgactttgactttgaaggaaatctggccctgttcgataaggccgccgtgtttgaggagattgatacatacgagcggaggagtggaaccaggtcccgcgggatccctaatgagcgccccactcgataccgtcatgacgaaaacatccttgagagcgaaccaatcgtgtatcgtcgtatcatcgtaccccataacgttagtaaggaattctgcacggattcagggctggtagtgccctccatcagctacgagttacataaaaaactactgtcagtcgccgagaaacacggcctgacccttgagcggcggctcgaaatgaccggcgtttgtgcatctcagatggccctcacgctgctcggcggacccaacagactgaaccccaaaaatgtccaccaacggcccactgtagctctgttgtgtgggccccacgtcaagggcgcccagggaattagctgtggacggcatctcgcaaatcatgacgtccaagtaattctctttctccccaacttcgtaaagatgttagagtccattactaatgagctaagcttgttcagcaagacacaaggacaacaggtgtcatccctgaaggacctccccacaagcccagtggacctggtcatcaactgtctggattgtcctgaaaacgtgttccttcgtgaccagccctggtataaggcagccgtggcatgggccaaccaaaaccgcgcacccgtgctttcaatcgatccccctgtgcacgaggtcgaacaggggatcgacgctaaatggtccttggccctgggtctgcctctcccattaggggagcacgcagggaggatttatttatgtgacattgggataccgcagcaagttttccaggaggtcggcatcaactatcacagccccttcggatgtaagttcgtgatcccgctgcatagcgcatag

SEQ ID NO: 14396 - DNA, 1158 bp, synthetic construct
  source 1..1158: mol_type = other DNA; note = Synthetic coding sequence
atggggcggtggtgccagaccgtcgcccggggtcagcggcccaggacttcagcaccgtcccgagctggagccttgctattgctgttgctgctgctacgaagcgcaggttgttggggggctggtgaggcacccggagcgctcagtaccgccgatcctgctgaccagagtgtccaatgcgtgccaaaggccacttgcccgtcctcacgtccgcgcctgctgtggcagacacccactactcaaactctcccctcaacaacaatggaaactcagttccctgtgagcgaaggcaaggtggacccgtataggtcctgcggcttctcttacgagcaggacccaacgctgcgggatcccgaagctgttgcaagaaggtggccctggatggtcagtgtacgcgcaaacggtacccacatttgcgcaggaacaattattgccagccagtgggtgctcactgttgcacactgtctaatctggcgggacgtgatttactccgtcagagtggggagtccgtggattgatcagatgacccaaactgcttcagacgtgcctgtgttgcaggttatcatgcatagccggtatcgagcccaaagattttggagctgggtcggtcaggccaacgacattgggctgctgaaactaaaacaggagctcaaatattccaattatgtgagacctatttgtttgcccggcaccgattacgtgctcaaggatcattctcgatgtactgtaactggctgggggctgtccaaagctgacggcatgtggccacaatttcggacgatacaggagaaggaggttatcattctcaataacaaggagtgtgataatttttaccacaatttcactaaaatcccaacactggtccaaatcatcaagtctcagatgatgtgcgcagaggacacccaccgggaaaaattttgttatgagttgacaggggaaccattagtatgtagcatggagggcacctggtatctagtgggtttagtgagctggggggccggatgccagaaatcggaagccccccctatctatcttcaggtgtccagctatcagcactggatctgggattgtctgaatggccaggccttggctctgccagcccccagcagaaccctgctgctggccttaccactgcctctgagccttttagccgcgctgtag

SEQ ID NO: 14397 - DNA, 750 bp, synthetic construct
  source 1..750: mol_type = other DNA; note = Synthetic coding sequence
atggttgaccgcctggctaattcagaagctaataccaggcgcatttcaatcgtggaaaattgctttggagccgctggtcagcctctgacaatccccggaagggtgttgatcggagagggcgtgctgactaaattgtgtcgcaagaagcctaaggcaagacaattttttctgtttaatgatatcctagtgtatggcaatatcgttattcagaagaaaaagtacaacaagcaacatattattcctttagagaatgttaccattgattccatcaaagatgaaggggacctgcgaaacggctggctaattaagaccccaacgaagtccttcgccgtgtatgccgccacagccactgagaaatcggaatggatgaaccacatcaacaagtgtgtcactgacctgctgtccaaatcgggaaagaccccatcaaatgaacatgcggctgtctgggtgcccgactctgaggccactgtgtgcatgcgctgtcagaaagccaaatttactccggtgaacaggagacaccactgtcgcaaatgtggtttcgtggtgtgtggcccttgctctgaaaagcggttcctgcttcctagccagtccagcaaacctgtcagaatctgtgatttctgctatgacctcctttccgcaggcgatatggccacttgccagccagcgcgctctgactcatactcccagtccctgaaaagcccattaaacgacatgagcgacgatgacgacgacgatgattcatcagattag

SEQ ID NO: 14398 - DNA, 2745 bp, synthetic construct
  source 1..2745: mol_type = other DNA; note = Synthetic coding sequence
atgggtgattccagggatctgtgtccacacctcgattccattggcgaggttacgaaagaagacctccttctgaaatccaaaggaacttgtcagtcatgtggcgtcacaggtcccaacctttgggcttgcctgcaagtagcttgcccttatgttggatgtggcgagtcctttgccgaccatagcacgatccatgctcaagccaaaaagcacaatctgaccgtcaatttgactacattccggctttggtgttacgcctgcgagaaggaagtgtttcttgagcagcgtttagcggcgccattattggggtcctcaagcaagttctcagaacaagattcccctcctccctcccaccctctgaaggctgtcccgattgctgtggccgatgagggagagagcgaaagcgaagacgacgacctcaaaccacgaggactcacgggcatgaagaacctgggcaactcctgctacatgaacgccgccctgcaggccctgtctaactgtcccccactcacccagttcttcctcgagtgcggaggcctggtacggactgacaagaagcccgcactatgtaaaagctatcagaagctggtctcggaagtttggcataagaagaggccatcatatgtcgttcccacttctcttagccacggtatcaaattggtcaatcccatgttccgcgggtacgcccaacaggacacccaagagttcctcaggtgcctcatggaccagttacacgaagaactgaaggagccagtcgttgcaacagtcgcactgaccgaagctagggactcagattccagcgacaccgatgagaaaagagagggggacaggtccccatccgaggacgaatttctgagctgtgacagcagctcagatcggggagagggagatggccagggcagaggcggtggctctagtcaggcagagacagagctgcttatcccagacgaagcagggcgggccattagtgagaaggaacgcatgaaggataggaaattctcgtggggccagcagcgcacaaactccgagcaggttgacgaagacgcagatgtggacaccgctatggcagcattggatgaccagcctgccgaagcccagcccccgagccctcgaagttcttctccttgtagaacgcctgaaccagataacgatgcacacctccggtccagttctcgcccgtgttctcctgtgcaccatcacgagggtcacgctaagctttctagtagcccaccaagggcctcgcccgtgagaatggccccatcttatgtcctgaaaaaggcacaagtgctgtctgccggaagccggcgtcggaaagagcaacgctatagatcagttatttccgacatttttgacggctctatcttgtctctggttcagtgcctcacctgtgaccgcgtatcaacaacggtagaaactttccaggacctgtccctacctattccaggaaaggaagacctggcaaaactccactcagctatttaccaaaacgtccccgcaaaacccggcgcatgtggggattcctacgcggctcaaggatggctcgccttcatcgtggagtatattcggaggtttgtggtgagctgcacgcccagctggttctgggggcctgtggtcactcttgaagattgtttggctgccttcttcgccgcagatgagttgaaaggcgataatatgtacagctgtgagaggtgtaagaaattgcgcaacggggtcaaatactgtaaggtgttgagattacctgagatcctgtgcattcacttgaagaggtttcgccacgaggtaatgtattctttcaagatcaacagccacgtctctttcccactcgaaggattagacctcagaccctttctggcgaaggaatgtacaagccaaatcacgacctacgatcttctgtcagtcatctgccaccatggaaccgctgggtctggccactatattgcttactgccagaacgttatcaacggacagtggtatgaatttgatgaccaatatgtcacagaggtgcacgaaaccgtcgtgcagaacgccgagggttacgtcttgttctatagaaagagcagcgaggaagcaatgagggaacggcagcaagttgtgtccctggccgctatgagggagccctccttgctgaggttttacgtctctagggaatggttgaacaaattcaacacatttgcggaaccagggcctatcaccaaccagacatttctgtgctctcacggtggtattccacctcacaaatatcattacatcgatgaccttgtggtgatactacctcagaacgtttgggagcacctgtataacagatttggcggcggccctgccgtgaatcatctgtatgtgtgctccatctgccaggttgaaattgaggctctggcgaagcggagaaggatcgagatcgacacattcatcaaactgaataaggccttccaagccgaagagtcgccaggagtcatctactgtatcagcatgcagtggttcagagagtgggaggccttcgtgaagggcaaggataacgaaccccccgggccaatcgataacagtcggatcgcccaggtgaaggggtctggacatgtgcagctgaagcagggcgcagactacggacagatcagtgaggaaacatggacctatctgaacagcctgtacggtggcggccccgaaattgccatccggcagagtgtggctcagccacttggccccgagaacttgcatggggagcagaagatagaggctgaaactagggcggtttag

SEQ ID NO: 14399 - DNA, 1341 bp, synthetic construct
  source 1..1341: mol_type = other DNA; note = Synthetic coding sequence
atgagggcggcacgtcggggattgcattgcgctggtgccgagagacctcggagacgaggacggctttgggatagctcaggggttccccaacggcagaagcgaccaggtccatggaggacacagacacaggagcagatgagcagggacgtgtgtatacatacatggccatgcacttactaccttgagcccaagagaaggtgggtcacaggacagttgtccctgacctctctttccctgcggtttatgaccgacagcacaggcgaaattttagtgtcatttcccctctcatccattgtcgaaatcaagaaagaggctagtcattttattttcagctccatcaccatcctcgaaaaaggccatgccaagcattggttctcttctctcaggcctagcaggaacgttgtgttctcaatcattgagcatttctggcgggaactgctgctgtctcaacccggggcagtggccgatgcgagtgtgccccggaccagaggagaagaactgacaggtctgatggcaggctcacagaagaggctcgaggatacggcacgggtgctgcaccatcaaggacagcaacttgactccgtcatgcggggcctcgataaaatggaatccgatcttgaagtcgctgatcgcctcctgactgagctcgaatcccctgcttggtggcccttctccagtaaactttggaaaaccccaccagaaactaagcctcgtgaggacgtgtctatgaccagttgtgagccattcgggaaggaggggatactcattaaaataccggctgttattagccacagaacggagagccacgtcaagccagggcgccttaccgttctcgtttcagggctggaaattcacgactcaagctctctcctgatgcatcgatttgaacgcgaagacgttgacgacatcaaggtgcactcaccatacgaaatcagtattcgacagaggtttatcggaaaacccgatatggcataccgtcttatatctgccaagatgccagaagttatccccatcctagaagtccaattcagcaaaaagatggagctactagaggatgccttggtgcttagatctgctaggacctcatccccagctgagaaatcctgctccgtgtggcatgctgcctcagggcttatggggcggacattacatagggaacctcccgctggggaccaagaaggcactgcacttcatttacagacatcgctccccgcgctttccgaggcggatactcaggagctgacacaggggttcagaccaatgtcgctgagcacgcagactgtccttgttatgctgtgctccgaatctgccggcgccttatggagacagaggctatcctag

SEQ ID NO: 14400 - DNA, 1896 bp, synthetic construct
  source 1..1896: mol_type = other DNA; note = Synthetic coding sequence
atggctatcgtccagacgctgcccgtccccctggaacctgccccggaagccgccaccgccccacaggcacccgtaatgggctctgtgtcatctctgatctccgggagaccctgccccgggggacccgctccccccaggcaccacgggccgcccggtcctacttttttccggcaacaagatgggctgctgaggggaggatacgaggcccaggagcccctttgccctgcggtaccacctcgcaaagctgtgcctgtgacgtcttttacctacatcaatgaggactttcgaactgaatctcccccttcccctagctccgatgttgaagatgcacgggagcagcgagctcacaacgcccacctgagaggcccacccccaaagctcatccccgtgagcggaaagctcgaaaaaaacatggaaaagattctgattagaccgacagcatttaagccagtgttacctaagccccggggcgctccaagccttcctagttttatggggcctagagccaccggactgtcagggtcccaaggatcccttacacagcttttcgggggtcctgcttcctcctcatcgagcagctctagctccagcgctgccgataagccactggccttcagtggctgggctagcgggtgtccttcgggaaccttgtctgacagcggtcgaaacagtctgtcctccctgcccacttatagcacaggcggcgccgagcctaccacctcttcaccaggaggccacttaccctctcacggatccggcagaggagcgttgcctggtccagctagaggcgtgccaactggacccagtcactctgactcaggcaggtctagctccagcaaatctacaggatcccttggggggcgcgtggcaggcggcttgctggggagtgggacacgtgcctcacctgactctagcagttgcggagaaaggtctcctccacctcctccacccccaccctctgacgaagcgttgcttcattgcgtgctcgaaggcaaactgagagatcgtgaggcagaactgcagcagctgcgcgactctctggatgaaaatgaagccaccatgtgccaagcgtatgaggagagacaacgccattggcagagggaaagagaggccctgagagaggattgtgcagcacaggctcagcgggctcagagagcacaacaactgctacagcttcaagtgtttcagctgcagcaggagaaacggcagctccaagatgatttcgcccagttattacaggagagagagcaactggaacgcagatgcgctaccctggagcgcgaacagagagagttaggcccaaggttggaagagactaaatgggaggtttgtcagaaatcaggcgaaatctccctgttgaaacagcagctcaaggagagccaggctgaattggtccagaagggatcggagctcgtggcattgagggtggcgttacgtgaggcgcgggctactttgagagtgtctgaggggcgtgcccgcggactgcaggaagcagcacgggctagggagctagaactggaagcatgcagccaagagctacagcgccaccgacaagaagccgagcaactgcgagaaaaggcgggccagctcgacgctgaagccgctggactgcgcgaacctcccgtccctccagcaaccgccgacccttttctgctcgccgagtcggatgaagcttcagccacggctaatccggtgcacagacgctttcagcctacgccagcacgcggtgccgggaaaaaaaaaggcctccctccattgcatattccgcccgatcccaaggctcgtgaaagccagatggctccagccgcccctgatgttcctgcccacatcggggggcagggccgagcatgggctcggtttcctggactgagctctgcagcttcacttctggagtag

SEQ ID NO: 14401 - DNA, 1473 bp, synthetic construct
  source 1..1473: mol_type = other DNA; note = Synthetic coding sequence
atgaacggcgctctcgaccatagtgatcagccggaccccgatgctattaaaatgttcgtgggtcaaatcccgcggtcatggagcgaaaaagagctcaaggagttatttgagccatacggcgctgtctaccaaataaacgtgctgcgggataggagccagaacccgccccagtcaaagggatgttgctttgtgaccttctataccagaaaagccgcactcgaagctcagaatgctctccataatataaagaccttgcctggcatgcaccacccaattcagatgaagcctgccgacagcgagaagagcaatgccgttgaggatcgaaaactgttcatcggcatggtgagcaagaagtgtaatgaaaacgacatccgggtcatgttctctcctttcggtcagattgaagagtgccgcatcttacgcggccccgacggtctttcacggggctgtgcattcgtgacattcagcacccgagcaatggcgcagaacgcaattaaggctatgcatcagtcccagaccatggaaggttgtagttcccccatcgtcgtgaaatttgccgacacccaaaaggacaaagagcagagaagattgcagcagcagctggctcagcaaatgcagcagcttaacaccgccacctgggggaatctgactggtctgggcggcctgacaccccagtacctggcacttctgcaacaggcaaccagtagttctaatttgggagctttttcaggaattcagcagatggctggtatgaatgctctccagttacagaacctggctacactagccgcagctgctgccgccgcacagacttctgctacttccaccaacgctaatcccctgagcaccaccagcagcgccctgggcgctctcactagcccagtcgccgcatctacaccgaatagtaccgccggggcagcaatgaattcattaaccagcctcggaactctgcagggcctcgcaggagctaccgtcgggctcaataatataaacgccctggccgttgcgcagatgctctccggaatggctgccctgaatggtggtttaggcgcaaccggtctgactaatggcactgctggcactatggatgcactcacacaggcatacagcggcatccagcaatatgcggctgctgccctaccaaccttatactcacagtccctgctgcagcagcagagcgccgcgggaagtcagaaggagggtccggagggcgcaaacctgttcatctatcacttaccccaggagtttggcgaccaggatattctgcagatgttcatgccatttggaaacgtgattagcgctaaagtatttattgataagcagaccaatctgtcaaaatgtttcggtttcgtgagctacgataatcccgtgtctgctcaggccgccatccaggcaatgaacggtttccagatcggcatgaagcggcttaaagtgcaattaaaaagaagtaaaaatgactccaagccatattag

SEQ ID NO: 14402 - DNA, 627 bp, synthetic construct
  source 1..627: mol_type = other DNA; note = Synthetic coding sequence
atggccgccagcgtggagcaacgcgagggtacaatccaagtccaaggtcaggccctgtttttccgagaggccttgccaggaagcggacaggccaggttctctgtgttgctgcttcatgggatccgattttcttcagagacttggcagaatcttgggaccctccatagacttgcacaggcggggtacagagccgtcgcaatagaccttccaggcctgaaaggcgagccccctgcacaggaacctctcttgtcacagtcacgggcatctttccttgctgccgtggtggacgcccttgaattaggtccaccagtagtgataagtcctagtctgtctggtatgtattccctgccatttcttacagcaccgggcagccagctgccaggcttcgtcccggttgctccgatttgtactgataagataaacgcagccaactatgccagcgttaagactcccgcactcattgtgtacggcgatcaagaccctatgggacagacctctttcgagcatctcaagcaattacccaaccatcgggtcctaattatgaagggcgcagggcacccctgttatttagacaaacccgaagagtggcacaccggcctgctggacttcctgcagggactccagtag

SEQ ID NO: 14403 - DNA, 546 bp, synthetic construct
  source 1..546: mol_type = other DNA; note = Synthetic coding sequence
atggagagtagatcagtcgcacaggcaggcgtacagtggtgcgatctaggaagtctccaacctccgcccccaggctttaagcagttttcttatttctcgctacagtccagctgggattaccgatatgtcccgccctgcccagcaaattttgtatttctggttgagatggggttcctccacgtcgatcaggccggactgaagttactgacctccggtatagatttcgccacaaggaagattgctaagttactgaaaccgcaaaaggttatcgagcaaaatggcgattcgttcacaattcataccaacagtagtctccgtaactactttgtcaagttcaaagtgggcgaggagtttgacgaggataataggggcctagacaacagaaagtgcaaatccctggtcatatgggacaatgatcgattgacctgcattcaaaagggcgaaaagaaaaaccgggggtggacgcactggatcgagggggacaagcttcacctggaaatgttctgcgagggacaggtgtgtaaacagacctttcagagggcctag

SEQ ID NO: 14404 - DNA, 1647 bp, synthetic construct
  source 1..1647: mol_type = other DNA; note = Synthetic coding sequence
atgtccgcctctctcaattataaatcgttctccaaggagcagcaaacaatggataacctcgaaaagcagcttatctgccccatctgtctggagatgtttacaaagcctgtggttatacttccatgtcagcacaacctgtgccgcaaatgtgctagcgacatcttccaggcctctaacccatatctccctaccaggggcggcaccacaatggcgagcggaggtcggtttcgctgtccgtcctgtcgccatgaggtggtgctggatcgacacggcgtctacggtcttcagcgtaacttgctggtcgaaaatataatcgacatctacaagcaagaaagcacacgacccgagaagaaatcagatcagccaatgtgtgaagaacacgaggaggaacgaatcaacatttattgcctgaactgtgaggtccccacttgcagcttatgcaaagtgtttggagcccacaaggattgccaggtggcccctcttacccacgttttccaacggcagaaatccgagctctccgacggaatcgctatcttagtgggctccaacgatagagtacagggagtcatctcccagctagaagacacatgtaagacgattgaggagtgctgccgcaagcagaagcaagagctgtgtgagaagttcgattacctctatggcatcctagaagagagaaaaaacgagatgacccaagttattaccaggactcaggaggagaaactcgaacacgtaagggcactgataaagaaatattcagatcacctggagaacgtgagcaagctggtagagtcgggcattcagttcatggacgaaccagagatggccgtttttctgcagaatgctaagaccctcctgaaaaagatctcggaggcctccaaagccttccagatggaaaagattgagcatggttatgagaacatgaaccacttcacagttaatctgaacagagaggagaagataattcgagagatcgatttctatcgcgaagacgaagacgaggaagaggaagaggggggagagggggagaaagagggcgaaggcgaagtgggaggggaagcggtggaagtagaggaagttgaaaacgtgcagactgagtttcccggcgaagacgagaatcctgagaaggcctctgagctatcccaggttgagctgcaggcagcacctggcgctctgccggtgagttcgccggagcctccccccgctctcccaccagccgcagacgcacctgtcacccagggtgaagtcgttccaaccgggtcagagcagaccacagagtctgagactcctgttccagctgccgccgagacagccgatccattgttttaccctagctggtataaaggccagactcgaaaagcaacgacaaatcccccttgcacccccggtagcgaggggctgggacaaatcggccctcctggctcagaagactctaacgttaggaaggccgaagtcgcggccgcagcagcctctgaaagggccgcagtcagcggcaaggaaacgtcagcccctgctgcaacctcgcagatcgggttcgaggcacccccgctgcaggggcaggcagccgcccccgcatcgggatctggtgccgactccgaacctgcccgtcatatttttagctttagttggctaaactctcttaatgaatag

SEQ ID NO: 14405 - DNA, 1374 bp, synthetic construct
  source 1..1374: mol_type = other DNA; note = Synthetic coding sequence
atgtttcctaagttttctctccggagcatgttccacggggccggcggtgggaacgatatacagtggtgtttcagccaggtcaaaggggctgtcgatgatgatgtggccgaggccgacataattagcacagtggagttcaaccatagtggggagttgctggctacaggtgataagggcggtcgcgtagtgatttttcagcaagagcaggaaaataaaatccaatctcatagcagaggcgaatacaatgtctactccaccttccaatctcacgagcccgagttcgactatctcaagtcattggagatcgaggagaaaattaacaagattcggtggctgccacagaaaaacgccgcccaattcctcctgagtaccaatgataaaaccatcaaactgtggaagataagtgagagggataaacgccccgagggttacaacctgaaggaggaagatggccggtacagggatccaacgactgttactactctgcgcgtacccgtattccgccccatggacctgatggttgaagcatccccccgccgcattttcgctaacgcacacacttatcatatcaacagcatttcaataaatagcgattacgagacttatttaagcgccgacgacctcagaatcaacctatggcacctagaaatcactgaccggagttttaacatagtcgacattaagccggccaatatggaagaactaacggaagtgattactgccgcggagttccatcctaactcttgcaatacatttgtctatagctcctcaaaaggtaccattcggctgtgcgacatgagagcctctgctctgtgcgatcggcatagtaagctttttgaggaacccgaggatcctagcaataggtctttcttctcagaaatcatctcaagtatcagcgacgttaaattcagtcacagcggtagatatatgatgactagagactatctctccgtgaagatatgggacctgaatatggagaatcgacctgtcgaaacctaccaagtccacgaatatctccgttctaagctgtgtagtctttacgagaacgattgcatatttgataagttcgaatgctgctggaatgggtccgactccgtcgtgatgacaggtagttacaataacttcttccgcatgtttgacagaaataccaagcgggatattacattggaggcaagcagagagaacaataagcctcggaccgttctgaaacccagaaaggtctgcgcatccggcaaacgcaaaaaagacgagatcagtgtggattcactcgacttcaacaagaagatcctgcacaccgcttggcatcctaaagaaaacattattgccgtggccactaccaacaatctttatatttttcaggataaggtcaattag

SEQ ID NO: 14406 - DNA, 738 bp, synthetic construct
  source 1..738: mol_type = other DNA; note = Synthetic coding sequence
atggcaggcttggagcttctgtccgatcaaggctatagggtcgatggacggagggcaggagaactgagaaaaattcaggcccggatgggagtttttgcgcaggccgacgggagtgcctacatcgaacagggaaacaccaaggctcttgcagtcgtgtacgggcctcatgaaatacgggggagtagagcccgcgctctaccggatcgagccctggtgaattgtcagtacagctcagccacattttcgactggggagagaaagcgccgccctcacggcgatcgcaagagctgcgagatggggctccaacttcgccagacgttcgaggcggcaattctgacgcagctgcaccctcgctcacagattgacatttatgtgcaggtgttacaggctgacgggggtacttacgccgcctgcgttaacgcagccaccctggcagtgctggacgccgggataccaatgagagacttcgtctgtgcatgtagcgccggctttgtcgacggtacagccttggcagacttgagccatgttgaagaagccgcaggagggccgcagctggccctggccttgctgcctgcttccggacagattgccctgttagaaatggatgcccgtctacatgaagatcacttagagcgggttcttgaggcagccgcccaggctgcccgagatgtacacactcttctcgatagggttgtacggcagcacgtcagggaagccagcattctgctcggggactag

SEQ ID NO: 14407 - DNA, 2631 bp, synthetic construct
  source 1..2631: mol_type = other DNA; note = Synthetic coding sequence
atgatggctgacggtgccgctgctggggccggcgggtcaccttcacttagagaactgcgcgctaggatggtggcagccgcaaacgaaatagccaaggagagaagaaaacaggatgtggttaacagggtcgctacacactccagtaacataaggagtacattcaaacccgtaatagacggaagcatgttaaaaaacgatatcaagcaaaggcttgcacgcgaaagaagggaggagaagcgacgacagcaggacgctaataaagagacacagctgcttgagaaagagcggaagactaagttacagtacgagaagcagatggaagaaagacagcggaagctaaaggagagaaaggaaaaagaggagcaacgtagaatcgccgccgaagagaagcgtcatcagaaggatgaagctcagaaagagaagttcacagccatactgtaccgaacattagaacggaggaggctcgctgatgattaccaacaaaagagatggtcttgggggggaagtgccatggccaactctgaatctaaaacagctaataagagatcagctagcacagaaaagcttgagcagggtacaagcgctctgattagacagatgcctctgtcatcagccggtctgcagaactccgtggcgaaacggaagactgacaaggagcggtcatccagtttgaacaggcgagactcaaacctccacagctctaccgataaggagcaggcagagcgcaaaccgagagttacaggtgtgacaaactacgttatgcagtacgtgactgtccccctacggaaatgcaccagcgacgagttgagagcagtcatgtttcctatgtccaccatgaagataccaccgcagactaaagttgaagagagtcctctggagaaggtggagaccccccctaaggctagtgtggatgctccaccacaagtcaacgtagaggtgttttgcaacaccagtatggaagcttctccaaaagcgggtgtcgggatggcccccgaggtaagtacagatagcttccccgtcgtcagtgtagacgtgtctcccgttgtaagcacctatgattctgagatgtccatggatgcctccccagaactctcaatcgaagccctgccaaaggtggacctcgagacagtacccaaagtgagcattgttgcctctcctgaggcctccctggaggcccccccggaggtgtctctggaagcgctgccagaagtgagcgttgaagccgcacccgaagggagcttagaagcaccaccgaagggttctgccgaggtagctcctaaagagtcggtgaaaggatccccaaaagagtcgatggaagccagccctgaggcaatggttaaggcctctcctaaaacttcgctggaggcatctatggaggccagtcccaaggcaaaagctcgagatgcccctaagaagtcagagatggacaagcaggcgcttatcccaattgccaagaagaggcttagcagctacaccgagtgctacaaatggtctagttcaccggagaatgcttgcggccttccatccccaatcagtaccaaccggcagatccagaaaaactgtcccccttcacccctgcccctgatttctaagcaatccccccagacatcatttccatataaaatcatgccgatccagcacaccctatctgttcagagcgcttctagcaccgtgaaaaaaaagaaagaaacagtctctaaaacaaccaaccggtgtgaagcactgtctcagcgccacatgatttatgaggagtcagggaacaaatcaactgcgggaatcatgaatgcagaagcagcaactaaaatactgacagaacttaggcggctagctcgggagcagcgagagaaagaggaggaggagaggcaacgggaggagatgcagcagcgggtaattaagaagtccaaagacatggcaaaggaggccgtgggcgggcaggcggaagaccacctgaaacttaaagatggacagcagcagaatgaaaccaagaagaaaaaagggtggctagaccaagaagatcaagaagcaccactgcagaaaggcgatgccaaaatcaaggcccaagaggaggcggataagaggaagaaagaacacgaaagaattatgctccagaacctgcaagaacgcctggagcgcaagaagcggatagaggagatcatgaagaggactagaaaaactgacgtgaacgctagcaaggtgaccgagaccagtagtcacgatatctatgaggaagctgaggctgacaacgaagagtcagataaggacagtttgaacgaaatgttcccaagtgccatcctgaacgggaccggatcccccacaaagttcaaaatgcccttcaataacgccaagaagatgactcataagctcgtttttctggaggatggtacttcacaggtgagaaaggaacccaagacctacttcaatggagacctgaagaactttaggcagaaatccatgaaagacaccagcatccaagaggtcgtgagcagaccgtcgtctaagcgcatgaccagtcacaccactaaaacacgaaaggctgatgagacaaatacaactagccggtcaagcgctcaaacaaaatctgagggattccacgatatcctgcccaaaagctcagatacttttaggcagtag

SEQ ID NO: 14408 - DNA, 6291 bp, synthetic construct
  source 1..6291: mol_type = other DNA; note = Synthetic coding sequence
atgtgcagcacacccggtatgccagctccaggcgcgtcactagctctacgcgttagctttgtagacgtgcaccctgatgtgattcctgtccagctgtggggactggttggcgagcgcaggggcgagtacctgcgcctcagccgggaaatccaagaagccgctgctacacgaggacaatgggccctagggtcagccagcgcatctcctggagaattgtgcttggttcaggtgggattgttgtggcacaggtgcagggtcgtgtcgcgccaggcccaggagtcgcgtgtgtttctcttagatgaaggaagaaccattacggcgggcgcaggtagtctggctccgggtcgaagggaatttttcaacctccctagcgaggttctgggctgtgtcctggccggcctcgtcccagcagggtgtggcgctggctctggggaaccaccacagcactggcctgctgacgctgtggactttctctcgaacctgcaaggcaaggaggtgcacggatgcgtcttagatgtgctcttgcttcaccggttggtactgctcgaagtaccggacgtgtttcaacagatgcgagagctgggtctggcccggcgggtcccggactccctgtttagaagcttgcttgagcgttatctcacagccgccactgctagtgttggctctggcgtaccggtgctctctcgcgtaccactgaagcaaaagcagcctggattagattacttttaccctcaactccagcttggagtaactgaagctgtcgtgatcacacaggtgtgtcatccccaccggattcattgtcaattgagaagtgtcagccaagaaatccacaggctgtccgaatcaatggcgcaagtctaccggggctcaacgggcaccggtgacgagaattccacttcagcaacttgggaggagcgagaagagagcccggataaacctggtagcccctgcgcctcctgtgggttggatggacattggtatagggctcttttgctcgagacctttcgcccccagagatgtgcccaggtgcttcatgtagattacggacgcaaggaactggtgtcgtgtagttctcttaggtacctcctgccagagtacttccgcatgccggtggttacctatccttgcgccctgtacggcctgtgggatggcggcagaggatggtcaaggtctcaggtgggggacctcaagactctcatactcgggaaggctgtaaacgccaagatagaattttactgtagctttgagcatgtgtactacgtctccctctacggcgaggatggcattaatctgaatagagtctttggagtgcagagttgttgtttggccgatcgggttctgcaatctcaggccactgaagaggaggaacccgagacatcccagtctcaatcccctgccgaggaagtggacgaagagatcagcctccctgccctgaggtcaattcggctcaaaatgaatgccttttatgatgcgcaggtcgagttcgtgaagaacccttcagaattctggattcgtctaaggaaacataatgtgaccttttcaaagctaatgcgccgaatgtgcggcttttattccagtgcgtccaagctcgatggtgtcgtgctgaagcccgaaccggatgacctctgctgcgtgaagtggaaggagaacggctactaccgtgccatagttaccaagctcgatgataagagtgtggacgtgtttttggtggatagaggcaactctgaaaacgtagactggtacgacgtgcggatgttgttgcctcagtttaggcagttaccaatcctggcagtgaaatgcacccttgccgatatctggccgctcggaaagacatggagtcaagaagcagtctctttcttcaagaagacagtgctccacaaggaactggtcatccatatcttagacaaacaagatcaccaatatgtcatcgaaatcctcgacgagtcccgcactggtgaagagaatatttctaaagtgattgcgcaggctggctatgctaagtaccaggagtttgagacaaaggagaacatcctggtcaacgctcacagccccgggcatgtctcaaatcatttcaccaccgagtccaacaaaatcccgtttgctaagacaggggagggcgaacagaaggccaaaagagagaataagactactagcgtctccaaagccctatctgacacaaccgttgttacgaatggctccaccgagctcgtcgtacaagaaaaggtcaaacgggcctccgtgtacttccccctcatgcaaaactgtctggaaatcaagccaggctcctcaagcaaaggtgaactggaggtgggctcaactgtggaagttcgcgtttcctatgtcgaaaatccaggttacttctggtgtcaactgactcgtaatatccagggtctgaagaccctgatgtctgacatccagtattattgcaagaatacagcagcgcctcatcagaggaatacactggcttgtctggccaagaggaccgttaaccgccagtggagccgagctctgatcagcggtatccagagcgtcgagcacgtcaatgttacatttgtcgattatggagatagagagatggtgtctgtcaagaatatctacagcatctccgaggaattcttaaaagttaaagcccaggcatttaggtgctcactgtataatctcattcagccagttggacagaacccatttgtgtgggacgtgaaagcgattcaggcctttaatgaattcattgacaatgcgtggcagaagaacctagagttgaagtgcactatctttgctttggcgagcataaatgaggaattgtttaatattgtggacctccttactccattccagtcagcttgtcatttcttagttgagaagcgcctagcgcgccctgtgaagcttcagaagcccctggagagctctgtgcagttacattcttacttctattcaacccacgacatgaagataggttctgaggagcttgtgtacattacccatatcgacgatccttggacattttactgtcagctcgctagaaatgcgaacatccttgaacagctgagctgcagcatcacacaactcagcaaggtcttgctgaacctcaagacgagccctctgaacccgggcaccctgtgtctggccaaatacaccgacggaaattggtaccgggggatcgtgatcgagaaggagccaaagaaagtcttctttgtggatttcggaaacatctacgtcgtcacatctgacgacctgctaccaataccatctgacgcatatgatgtgctgctattgcccatgcaggctgtgcggtgctctctttctgatattccagatcatatcccagaagaggtggtggtttggtttcaggagactatcctggataaaagcctcaaggctttggtggtcgcaaaggatcctgatggtacgctcattattgagctgtacggggataacatccagatttcggccagcatcaacaaaaagctgggtcttctgtcttacaaggatcggataagaaaaaaggaatcagaggtcctgtgtagcacgacggaaaccctggaggaaaaaaatgagaatatgaagctgccttgtaccgagtatttgtccaaaagcgttggatataaacttcccaacaaggaaatacttgaagagagctataagccccaaattaatagttcctacaaagagcttaagctgttgcagagcctgacaaaaacaaatctcgtaacccagtatcaagattctgtcggcaacaaaaactcacaagttttccccctgactaccgagaagaaagaggagatctccgccgaaactccacttaagacggcaagagtcgaagccacattaagcgagagaaaaattggggatagttgcgacaaggacctccccctgaagttctgtgagttcccccagaagaccattatgccggggttcaaaacgacagtttatgtttcccatatcaatgatttgtccgacttttacgtgcagctcattgaggacgaagcggagatcagccatctgtctgagcggcttaattccgtgaagacaaggcctgaatattatgtcggccctccactgcaacggggcgatatgatttgcgccgtattcccggaggacaatttgtggtaccgagcagtgatcaaagaacaacaacctaatgacctgcttagcgtgcagtttatagactatggcaacgtgtcagtcgtgcacacaaacaagatcgggaggctagatctggtgaacgcgatcctgcccggtctttgcatccattgcagcttgcaggggttcgaagtgcctgacaacaagaactccaaaaaaatgatgcattacttcagccagagaacttctgaggccgccatacggtgcgaattcgtgaagtttcaagatcgttgggaagtgattctcgcggacgaacatggaattatagccgacgacatgatttccaggtatgcactcagcgagaagagtcaagtggagctctcaacgcaggtgattaagagcgcctcgtctaagagcgtgaacaaatcagatatcgatacatcagtgtttctgaactggtacaacccggaaaaaaaaatgattcgagcttatgctactgttatagatggccccgaatatttttggtgtcagttcgcagacaccgagaaattacaatgcttggaagtggaggtgcagacagcaggcgaacaggtggccgacagacgcaattgcattccctgcccctatatcggtgatccctgcattgtccgctatcgagaggatggacactactatagagccctcataactaacatttgtgaagactatctggttagcgtgcggctagtcgacttcggaaatattgaagactgtgtggatcctaaagccttgtgggccattccgagcgaattactgagtgttcccatgcaggcatttccctgttgtttaagcggcttcaacatcagcgaaggcctctgcagtcaagaaggcaacgactacttttacgagataatcacagaggatgtcttggagataacaattctcgagattcgccgagatgtttgcgacattccattagcaatagtggacctcaagtcaaaagggaagagcatcaatgagaagatggagaagtattcaaagacaggaataaagtcagcactaccgtacgaaaatatcgacagtgaaattaaacaaacactgggctcttacaacctcgatgttggactaaagaagctgagtaacaaagccgtgcaaaataaaatctacatggagcagcagacagatgaactggctgagataacagagaaggatgtgaatatcattggcactaagccatccaacttccgcgaccctaaaacagacaacatctgcgagggatttgagaacccttgcaaagacaagattgatactgaagagctggaaggcgagctggaatgccatctggtggacaaggccgaatttgacgataaatacttaatcacaggctttaataccctgctgcctcatgctaacgagacaaaggaaatcctcgagttgaattccctggaggtgccattatcccctgacgacgagagtaaagagtttttagagttggagagtatcgagctgcagaattcactggtggttgatgaagagaaaggagaattgtcacccgtgccaccaaatgtgcccctgtcccaggaatgtgtgacaaaaggagctatggagctcttcaccctgcagctcccgctttcgtgcgaagccgagaagcagcctgaactggaactgcctacagcccaactgcccttagacgacaagatggatcctctctccctgggcgtgtctcagaaagctcaagaatctatgtgtaccgaggacatgagaaaatcgtcctgtgtggagagctttgatgatcagcgacgaatgtcactgcatttgcacggagccgactgcgatccaaagactcagaacgaaatgaacatctgtgaagaggaattcgtggagtacaagaatagagacgccataagcgcgctaatgccactgtttagcgaggaggagtcctctgacgggtctaagcacaataacggcctaccagatcatatatccgctcagctgcagaacacctacacactgaaagcctttaccgtcgggtcaaaatgcgtggtgtggagcagcctcaggaatacctggagcaagtgcgaaatactcgagactgcagaggaaggcacacgtgttttgaatctaagcaatggcatggaggagattgtgaaccctgagaatgtctggaacggtatcccaaagctcgacaaatcaccacccgagaaacgaggactggaggtgatggaaatatag

SEQ ID NO: 14409 - DNA, 690 bp, synthetic construct
  source 1..690: mol_type = other DNA; note = Synthetic coding sequence
atgggcaaatcctgtaaggtggtggtttgcgggcaggcatccgtggggaaaacctccatacttgaacagttactctacgggaaccacgttgtcggctccgagatgatcgaaacacaggaggacatttacgtcgggagcattgaaacagatagaggtgtgcgggagcaggtgcggttttacgacacaaggggcctgcgagatggcgcagaactccctcgtcactgtttttcttgtacggacgggtatgtgctggtgtattccactgatagcagagagtcatttcagcgtgtggagctgctaaaaaaggaaatcgacaagtcaaaggataagaaagaagggctgactctccccccgcgacttgagtgctctggcatgatcacggcacattgttccctgaacctgccacggttgcgctggagtagctgccttagccctttgctgaggctgcaagtcacaatcgtggtcctcggtaacaaatgcgacctccaggagcagaggcgagtcgacccagacgtggcccaacattgggccaagagcgagaaggttaagctgtgggaggtctctgttgcagaccggaggtcgctgctcgagccttttgtatatttggcaagcaagatgacacaacctcagagtaagtccgcattcccgctcagtcgtaagaacaagggcagcggctcactcgatggctag

SEQ ID NO: 14410 - DNA, 2412 bp, synthetic construct
  source 1..2412: mol_type = other DNA; note = Synthetic coding sequence
atggagagcggtcctcgggcagagctaggggcaggggctcccccagccgtggtggcccgcaccccacccgagccaagaccctcccccgagggagaccctagccccccccctccaccaatgagcgcattagtgcctgataccccccccgacaccccacctgcgatgaagaacgcaacctcttctaagcagctgcctctggagccagagtcccccagtggccaagtgggccctagaccggcacccccacaggaggagtctccaagcagcgaggctaagagcagaggaccaacacccccagcgatgggacctagggacgcccgcccccctagacgctcgagtcagcccagccccacagctgttcctgcctcagactctcccccaaccaagcaagaagtcaagaaagccggtgagagacataagctggccaaggagaggcgagaggagcgagccaagtaccttgcagccaagaaggctgtttggttggagaaagaggagaaagctaaggccttgagagagaagcagttacaggaaaggcgtaggcgcctagaagaacagaggctaaaagccgagcagcgccgggcggcgctcgaggagagacagcggcagaagctagaaaaaaataaagagcgctacgaagccgcaattcaaagatctgtgaagaaaacttgggctgagatcaggcagcagcgttggagttgggccggggctctccaccactcatcacccggccataaaaccaacaggtccttacagttgtctgcctgggagagttctattgttgaccgcttgatgactcccaccctgagcttccttgccagatcaaggtcggccgtcacactgcctcgcaacggccgggaccagggccggggctgcgatcccggccgcgggcccacgtggggacgggctggggctagcttggcaagggggcctcagccagatcggacccatccctccgccgcagtgcccgtgtgccctcgctccgcctccgcaagccctctgactccatgctctgttacacgaagtgtacaccgttgtgcgcccgcaggggagcgcggagagcgcaggaagcctaacgccggagggtcacccgccccagtgcggaggaggcccgaggccagtcccgtccagaaaaaggagaagaaggacaaggagcgggagaacgagaaagaaaagagcgccttggctcgggagcggtctctcaagaagcggcagtcattacctgctagcccccgtgccagactgagcgctagcaccgcctcagagctatctcctaagtcaaaagcaagaccaagtagcccttcgaccagttggcatcggcccgcttcgccatgcccttcccctgggcccggccatactttacctcctaagcccccctctccaaggggaacaaccgcctcacccaagggacgggtacgcagaaaggaggaggccaaagagtcacccagcgcggctgggccagaagataaaagtcagagcaagcgcagagcctctaacgagaaggaatcagccgccccagccagccccgccccttctcctgcacccagcccgactcccgcgccaccgcaaaaggagcaaccacctgccgagaccccgacagacgctgccgtccttacatctccacctgcacccgcaccccccgtcacgccttcaaagccaatggctggcaccactgaccgcgaggaagccacaaggctccttgctgaaaaaagaagacaggcccgcgagcagcgggagcgcgaggaacaggaacgcaggttacaagccgagagggacaagaggatgcgcgaggagcagctcgcccgagaggccgaggccagagccgaacgcgaagcagaggcccgcagacgcgaggagcaggaagctagggagaaggcccaagccgagcaagaggaacaagagcgcctacagaagcagaaagaggaggccgaagctcgctcgagggaagaggctgagcggcagcgcctcgagagagagaagcattttcaacagcaggagcaagagcgccaggaacgacgcaaaagactcgaagagattatgaagaggacccgtaagagcgaagtctccgagaccaaaaaacaagattcaaaggaagcgaacgccaacggatcatcacctgagccagtgaaagctgttgaagctcgcagccccggactacagaaggaagccgtccaaaaagaggagcctatccctcaggaaccacagtggagcctcccttccaaggagcttccagcatccctcgttaatgggcttcagccgttgcccgctcaccaggagaacggcttcagcacgaacggtccttccggcgacaaaagcttatcccgcacaccagagactctgctgccattcgccgaggccgaggcgtttctgaaaaaggccgtcgtccaatcccctcaggtgacagaagttctttag

SEQ ID NO: 14411 - DNA, 1125 bp, synthetic construct
  source 1..1125: mol_type = other DNA; note = Synthetic coding sequence
atgcgcgctccaatgctccaaaagcagcaagctcctcggatggataccccaccgcccgaggagaggcttgagaaacagaacgaaaagttgaataatcaggaggaagagacagaatttaaggaactggatggtctacgagaggctctggccaacttacgcggattgtcggaggaggagagatccgaaaaggcaatgctgaggtcccgtattgaggagcaatcccagctcatttgtatcctaaaacgccgatccgacgaggcattagagagatgccagatccttgaattacttaacgctgagctcgaggagaagatgatgcaggaggctgagaagctgaaggcacagggagagtattctcgcaaattggaggagaggttcatgactctcgccgccaaccacgagttgatgctgaggttcaaggatgaatacaagagcgagaatataaaacttcgagaagaaaatgagaagctccgattggagaactcctcgctgttctcacaagccctgaaagatgaagaagccaaggtgttgcagctgactgtcaggtgcgaggctctcaccggagagcttgaaacgctaaaggaacggtgcgctcaagatgcttgccaggcacaggccagggagaaagagctgctcgaactccagtcccagcaggcttgtacacacaccaaggagaccgagcagcttcggtcgcaactgcagacactgaaacagcagcatcaacaggccgtggaacagatcgccaaggctgaagagacccatagtagtctttctcaggagttgcaagctcggctccagacagtgacgcgcgaaaaggaagagctattgcagctgtccatcgagcgcggaaaggtactccagaataagcaggccgaaatctgtcaactcgaggaaaaattagaaatcgccaatgaggatagaaagcacgcattggagcgatttgagcaggaggccgtcgccgtcgatagcaacctgcgtgttcgcgagctgcaacgcaaagtcgacggcatccaaaaagcgtatgacgagttgcggctgcaaagcgaggctttcaagaaacactctctagacttgttgtctaaggagcgggaattgaatggaaagctgaggcacttgtctccctag

SEQ ID NO: 14412 - DNA, 585 bp, synthetic construct
  source 1..585: mol_type = other DNA; note = Synthetic coding sequence
atggaagacgggctgctagagatcatgactaaggatggcggggacatgccagccccactggaagtgagcaccgtgcctgctgtgggggatgtgatttcaggcgagtataacggaggcatgaaggagttgatggaacacctcaaggcccagctccaggctcttttcgaagatgtgcgcgccatgcggggtgctctggacgaacaggcctctcatattcaagtgctgtcggacgacgtctgcgccaaccagcgggccatagtcagcatgtgtcagatcatgaccacagcacctcgacagggtggccttggagtcgtcggtggaaagggctccttccagagcgatcctcaagagcccgaaacaccaagccctggaatcggcgactccggactcctcggacgggaccctgaggatgaagaagaggaagaggaagagaaggagatgcccagcccagctaccccttcgagccattgtgagcggcctgagtctccatgtgccggcttgctcggaggtgacggaccactcgtggaaccccttgatatgccagatatcacactgctccagttggagggtgaagcctcattatag

SEQ ID NO: 14413 - DNA, 1281 bp, synthetic construct
  source 1..1281: mol_type = other DNA; note = Synthetic coding sequence
atggctcacctgaggggctttgccaaccagcactcacgcgttgacccagaagaactgtttacaaagttagaccggattggcaagggcagcttcggagaagtgtataaaggtattgacaatcacactaaggaagtggtcgcgattaaaatcatagacctcgaagaagctgaggacgagatcgaagacattcagcaagagatcaccgtgttgagccaatgtgattcaccgtacattacccgatacttcgggagttacttaaagtctaccaagctgtggattattatggagtacctaggaggaggttccgcgcttgatttgcttaaacctgggcctctggaagagacctacatcgcaaccattctcagggaaatcttgaagggactggactatttacactctgaacgcaagatccatcgggacataaaggccgccaatgttctcctgagtgaacagggggacgtgaaactggctgacttcggcgttgccgggcagctgacagatacacagatcaaacgcaatacctttgttgggactcccttttggatggcacccgaagtcatcaagcagtctgcctatgatttcaaagctgacatttggtctcttggcatcactgccatcgagctggcaaaaggcgagccaccaaattctgatttgcatccaatgcgggtactgtttcttattcctaaaaatagtcccccaacattggaaggccagcacagcaagccctttaaggagttcgtggaggcatgcctgaacaaggatccgcggtttcgccccaccgctaaggagttgttgaaacacaagtttataactcgctataccaaaaaaacgtcttttctgaccgaactgattgataggtataagcgttggaagtcggaaggtcacggggaggaaagctcgagcgaggactcagatatcgacggtgaagccgaagatggggagcagggccctatctggactttccctcccaccattcgacctagcccgcactctaagcttcataaaggaacagccctccattcatcgcagaaacccgcggaaccagtaaagaggcagcctcgctcacagtgcctgtccacgctcgttcgtcccgtgttcggggagttaaaggagaagcataaacagagtggcggctctgtgggggccctggaagagctggagaacgccttctctctggctgaagagtcctgcccggggatctcggacaagctgatggtgcatctggtcgagcgagtgcagaggttctcacacaaccggaaccatctaacctcaactaggtag

SEQ ID NO: 14414 - DNA, 1350 bp, synthetic construct
  source 1..1350: mol_type = other DNA; note = Synthetic coding sequence
atgatgttgtctaccgagggcagagaaggttttgtagtgaaagtgaggggcctgccatggtcatgcagcgccgatgaagtcatgaggtttttttcggactgcaagatccagaatggcacatccgggattcggtttatttataccagggagggaaggcccagtggggaggccttcgtggagctggaaagtgaggaggaggtgaagctagcactcaagaaagacagggagactatgggccaccgatacgtggaagtcttcaagagcaactcagtggagatggattgggttttgaagcacaccggccctaacagccctgacaccgctaacgacggattcgtgcgactccgcggattgccttttggctgctctaaggaggaaatagtgcagtttttcagcgggctggagatagtgccgaacggcatgaccctaccagtcgacttccaggggagaagcaccggggaagccttcgtacaattcgcatcccaggagatcgcagagaaggcgttaaagaaacataaagagcggatcggccatcgctatatcgaaatctttaagagttcacgcgccgaggtgagaacccactacgacccccctcggaaattgatggctatgcaacggccgggcccatacgatcgtcctggggccggtaggggctacaattctatcgggagaggagctggctttgagagaatgagacgtggagcttacggaggcggatatgggggctacgatgactatggtgggtacaatgatgggtacggcttcggatcagatcgcttcggccgagacttgaactactgtttcagcggtatgtccgatcataggtacggggatgggggttcatcattccaaagtactacaggccactgcgtgcacatgcgaggcctcccttatcgcgcaacggagaacgatatttataacttctttagccccttgaacccaatgcgagttcacatcgagattggtcccgatgggcgcgttactggggaagccgatgtggagttcgcaacacacgaggatgctgtcgctgccatggcaaaggacaaagccaatatgcagcatcgctatgtcgagctcttcctaaacagcactgcgggcaccagcggaggcgcgtacgaccattcatacgtggagctgttcctgaacagtaccgccggtgctagcggcggtgcttatggctcccagatgatgggtggaatgggactatcgaatcagtccagctacgggggtccagcttctcagcagctgtcaggcggttatggcggggggtatgggggccaaagcagcatgtctggctatgatcaggttctgcaagaaaacagctctgattaccagtccaacctagcttag

SEQ ID NO: 14415 - DNA, 1317 bp, synthetic construct
  source 1..1317: mol_type = other DNA; note = Synthetic coding sequence
atgtgtcctaagaacgccagttactatgggaatcgcgctgctactttgatgatgttggggcgattccgggaggctctgggagacgcccaacagagcgtccgattggatgactccttcgtccggggacatctgagggagggaaagtgccacctgtctctcgggaatgctatggcggcttgcagaagctttcaaagggccctggaattagaccacaagaatgcacaagcccagcaggagtttaaaaatgccaatgcagtcatggaatatgagaaaattgctgaaacagattttgagaaaagagatttccgaaaagtggtgttctgcatggatagggccttggaatttgctcctgcatgccatagattcaaaatcctgaaggccgaatgcctcgccatgctgggccggtatcctgaagcccagtctgtggcatcagacattcttaggatggattcaaccaacgcagatgccctgtatgtgcgcggactctgcctgtattacgaggattgcatcgaaaaggctgtgcaattctttgtgcaggcacttcgtatggcgccggatcatgaaaaggcgtgtattgcgtgtcgcaacgcaaaggctctcaaggctaaaaaagaagatgggaacaaagcttttaaggaaggaaattacaagcttgcctatgaactatataccgaagcactcgggattgatcctaataatatcaagaccaatgccaagctgtactgcaaccgaggtacggtcaacagcaaattgaggaagctggacgatgccattgaggactgcactaacgctgttaaacttgacgatacttacattaaggcctacttgcgtagggctcagtgttacatggataccgagcagtacgaagaggccgtacgggattatgaaaaagtgtaccagactgagaaaaccaaggagcataagcagttattgaaaaatgctcaacttgagttgaagaagagtaaacgcaaggactattataagattctaggggtggacaaaaacgcctctgaggacgaaattaaaaaggcctaccggaaacgagcacttatgcaccaccctgataggcactctggggcgtcagctgaggtacagaaggaagaggagaaaaaattcaaggaggtcggtgaggcgtttaccatcttgtcggaccccaaaaaaaagacaagatatgatagcggccaagacctggatgaagagggcatgaacatgggcgatttcgacccaaataatatttttaaagcttttttcggcgggcctggcggcttctcattcgaggcgtcaggacccgggaatttcttttttcaatttggatag

SEQ ID NO: 14416 - DNA, 165 bp, synthetic construct
  source 1..165: mol_type = other DNA; note = Synthetic coding sequence
atgccgggcaaaaaggccaggaaaaatgcccagccctccccggcaagagcgccagccgaacttgaagtcgagtgcgctacccagctgcggagattcggtgacaaattaaattttaggcaaaagctcctgaatttgatttcgaagctcttctgctcaggtacttag

SEQ ID NO: 14417 - DNA, 1404 bp, synthetic construct
  source 1..1404: mol_type = other DNA; note = Synthetic coding sequence
atggcctccgttgctgctgctagggctgtgcctgtgggatctggactccgcggactgcagcggacgctcccattagttgtgatacttggtgccacaggaacgggtaaaagcaccttagccctacaattggggcaaagattggggggggagatagtctcggcagacagcatgcaggtgtacgagggactcgacattatcaccaataaggtgtcagctcaagagcagagaatctgccggcaccacatgataagcttcgtcgacccactggttacgaactacaccgtggttgacttccgaaatagggctaccgctcttatcgaggacatcttcgctagggataaaattcctatagttgtcggcggcacaaactactacatcgagtcgctgctctggaaggtattggttaataccaagccccaagagatgggcacagagaaagtcatcgacaggaaagtcgaactcgaaaaggaagatggtttggtcctgcacaagaggctgagtcaggtggaccccgagatggcggcaaaactgcatccccacgacaaaagaaaagtggcaagaagtctgcaggtcttcgaagagacaggaatcagccattctgaattcctgcatcggcaacacaccgaggagggcggcggccccctcgggggcccattaaagttttccaacccttgtatcttgtggctgcacgccgatcaggctgtgctggacgagcgccttgataaacgcgtagacgacatgctcgccgcaggcttattggaagagttaagggattttcaccgtagatacaatcaaaagaatgtcagcgagaacagccaagactatcagcacggcatattccagtcaattggcttcaaagaattccacgaatacctaatcaccgaaggcaagtgtactctcgagacatccaaccagctcctcaagaagggaattgaagcactaaaacaggtgaccaaacggtacgctaggaaacagaaccggtgggttaagaatcggtttctttctaggcccggccccattgtgccaccagtttacggcctggaagtgtcggacgtgagtaagtgggaggaatccgttctggaacccgcccttgaaatagtacaatcgttcatacaaggtcacaaacctaccgccaccccgattaaaatgccatacaatgaggcggagaataagcgttcataccatctatgcgatttgtgcgacaggatcattatcggcgatagagagtgggccgcccatattaagtcaaagtcacacttgaaccagctaaaaaaacggaggcggctggattccgacgctgtgaacaccatcgaatcgcaatccgtttctccagatcacaataaggagccgaaggagaaggggtctcctggtcaaaacgaccaggagctgaaatgttcagtatag

SEQ ID NO: 14418 - DNA, 558 bp, synthetic construct
  source 1..558: mol_type = other DNA; note = Synthetic coding sequence
atgggagtaaatttaacccgaagcaacaaggagaccgtgaaacacagtgatgtcttatttctcgctgtcaaaccacatatcatcccctttattctggacgagatcggggccgatgtgcaggcacgccacattgtggtatcctgcgcagccggcgtgactatatcatctgttgaaaaaaagctgatggcattccagccggcacctaaagtgattcggtgtatgacaaacaccccagtagttgttcaagaaggggcgaccgtttacgcaacaggcacacacgcactggtggaagacggacaattgctggagcagctgatgtcctctgtggggttttgcacagaggtggaggaggacttgatcgacgctgtaaccggcctcagcggctcaggaccagcttatcagagcatggctgatcaagagaagatttcccccgcagccttgaagaagacactgctcgaccgagtaaaattagaaagcccgaccgtcagcactctgaccccaagttcaccagggaagctgctgacgagaagcctggcgctgggcggcaaaaaagactag

SEQ ID NO: 14419 - DNA, 960 bp, synthetic construct
  source 1..960: mol_type = other DNA; note = Synthetic coding sequence
atgagcgtgggatttatcggcgctggacagctcgcgatgctgtggcggggggcctcccggccacagcacccagttggcagtcaggacaatagccaactgccccgaaacgagccagcccacggtgtgcgcgcgcaagaggacggttgtgagcccgatacccaacagcagggcgatggggaagcccaaaggcgaccagtgagcggttgtgaagcccacatcatcccatttatccttgatgagatcggcgctgacgtgcaggctaggcatatcgtggtcagctgcgccgcaggtgtgacaatcagctcagtggagaagaagttgatggcctttcagccagccccgaaagtcatccgatgcatgaccaatacgcctgtggtggttcaagagggcgcgaccgtttatgccaccgggactcatgctttagtggaggatgggcagctcctcgaacagctgatgagcagtgtagggttttgcacagaagtggaagaagatctgattgatgccgtcacagggctcagtggatctggtcccgcctatgcctttatggctttggacgcattggcggacggcggagtcaaaatgggattaccacggaggctagccatccaactgggtgcccaggctctgctaggtgcagccaaaatgctccttgatagcgaacaacacccatgccagctgaaagataacgtttgctcacctggtggagctacaattcacgccctccattttcttgagagtggagggttccgcagtctattgattaacgcagttgaagcatcctgtattcggacgcgagaactccaatcaatggccgaccaggaaaagatctcaccggctgcactcaaaaaaacattgctcgacagggtgaaactcgagtcaccaactgtgtctaccctgacaccatcttctccaggcaaacttctgactcgctcccttgccttgggcgggaagaaggattag

SEQ ID NO: 14420 - DNA, 708 bp, synthetic construct
  source 1..708: mol_type = other DNA; note = Synthetic coding sequence
atgttgtcagcgactaggcgagcttgtcagctgctgcttctacactcacttttccctgtgccccggatgggcaatagcgcaagtaatatcgtgagcccccaggaggccttgccaggtagaaaagagcagacacccgtggccgccaaacaccacgtgaatgggaaccgaacagttgaaccattcccggaagggactcagatggcggtcttcggcatggggtgcttttggggcgcggaacggaagttctgggtcctcaagggggtttatagcactcaggtgggatttgctggaggctatacaagcaaccctacttataaggaggtgtgtagcgagaaaacggggcatgccgaagtcgtgcgggtagtgtaccaaccggaacatatgtcttttgaggagctcctgaaagtgttctgggagaaccatgatccaactcaggggatgaggcaaggaaatgaccatggcacacagtatagatccgccatctatcccacctccgccaaacagatggaagctgccttgagttctaaagagaactatcagaaggtactgtccgagcatggattcggccccatcaccacggacattagagaggggcagactttctactatgctgaagactatcatcagcagtacctgagtaaaaatccaaatggttattgtggcttaggtggcaccggagtgtcatgtcccgttgggattaaaaagtag

SEQ ID NO: 14421 - DNA, 3873 bp, synthetic construct
  source 1..3873: mol_type = other DNA; note = Synthetic coding sequence
atgtccggtcctctggagggggcagacggaggcggggatccacgcccaggagagagcttctgccccgggggggtgccgtcccccggacctccccagcatcgcccctgccccgggcctagcctggcagacgacacggacgctaattccaatgggtcctctggcaacgagtcaaacggacacgaatccaggggggcttctcaacgatctagccactcctctagctcagggaacggtaaggattcagccctgctcgaaactaccgagagttctaagtccacaaattcccaatcgcccagcccaccctcgagctcgattgcctactctctgctgagtgcaagcagcgagcaggacaatcccagcactagtgggtgctctagtgagcagtccgcccgggcgcggacccagaaagagctgatgactgctcttagagagcttaagttacgcttgccacctgaacgcagaggtaaagggagaagcggaactctcgctacactacagtacgccctggcatgcgtgaagcaagtccaggccaaccaggaatattaccagcagtggagtctggaggaaggcgagccctgttccatggacatgtctacctacactctggaagagctggagcacataacatccgagtatacacttcagaaccaggacacttttagtgtggccgtgtcgttcttgaccggcagaatcgtctacattagcgagcaagccgccgtgttgctgaggtgtaagagggatgtcttccggggaactaggttctccgaactcctggcccctcaggacgttggggtgttctatgggagtactgccccgtccaggcttccgacatgggggacaggggcatccgccggatcaggtctgagggacttcactcaggagaagtcagtgttctgtcgaattcgcggtggacccgatagggacccaggtccccggtaccaacctttccgattaacgccctacgttacgaagatccgagtgtcagatggggcacccgcgcagccctgctgcctgctgatcgctgagagaatccatagcggctacgaggcgcctcgcatacctccagacaagagaatcttcacaaccaggcataccccttcctgcctgtttcaggatgtcgacgagcgagccgctcccctgttgggttaccttccccaagacttattaggggccccggttcttttgttcttgcaccccgaggaccggcctctcatgcttgcaattcataagaagatcctgcagttagctggacagccttttgaccattcaccaatccgcttttgcgcaaggaatggcgaatacgtcacaatggatacctcctgggctggcttcgtccacccctggtctagaaaagtcgcctttgtgttgggcagacacaaggttagaacagctcccctcaacgaggatgtgtttacaccaccagccccttcccccgcaccatcgctcgacaccgatattcaggagctgagtgagcagatccacaggctgcttctgcaaccagtgcattcaccatccccaacgggcctttgcggcgtgggagcagttacatcccctggtcccctgcactccccagggagcagcagcgattctaacgggggcgacgctgaggggcctggaccacccgccccagtgacatttcaacaaatttgcaaggacgtacacctcgtaaagcaccaaggtcagcagctctttatcgagtcgcgcgctcgtccacagagtcgcccgcgactgcccgcaacaggcacctttaaggcaaaagccctgccgtgccagagtccagacccagaacttgaagcggggagcgctccagtgcaggcccccctggcacttgttccagaggaggcggaacggaaggaggcctcaagctgcagctaccagcagatcaactgtctggattcaatactacggtacctcgagagttgcaacttgccctctacaacaaaacggaaatgtgctagctccagttcttacaccacatctagcgcctcagatgacgatagacagaggacaggtcctgtgtctgtggggacaaaaaaagaccccccctctgccgccctgtccggagaaggggcaacacctcggaaggaacccgtggtcggagggacattgtcccctctagctctggctaacaaggccgaatcagttgtttctgtaacttcccagtgtagtttctcgtccacaatcgtgcatgttggcgacaagaagccccctgagtcggacatcatcatgatggaagatcttccgggtttggcccctgggccagctccatctcctgccccttcgccaacagtagcaccggaccctgcaccagacgcctatagacccgttggcttgaccaaagccgtgctgtcgctgcacacacagaaggaagagcaggcttttctctctcgctttagggatctagggaggttgcggggcttggactctagctcaacagccccttccgctttgggagaaaggggatgccatcacggtccagcccctccctcccgacgccatcattgtaggtctaaggctaagaggagtcgacaccaccaaaacccccgggccgaagcgccttgctacgtgtctcacccgtcccctgtaccgccctccactccttggccgacgccaccggcaacaaccccttttcccgccgtggtccaaccttatcccctgcccgtgtttagccctcgcggtggacctcagccgctacctcctgccccaacctcggtcccacctgccgcgttccccgcaccgcttgtgacacctatggtggccctggtgctacctaattatctatttcccacaccgtccagctatccatatggcgcattacagacgccagcagaagggcccccgaccccagcctctcattctccaagcccttctctcccagcgctggcgccctcaccccctcataggccagatagccctctattcaattcaaggtgctcctccccgttgcagcttaacctgctgcagcttgaggaactcccaagggcagagggcgccgctgtggccggcggtccaggatccagtgccggcccacctccaccttcagctgaggcagcagagcctgaggccaggctagctgaggtcacagagagttccaatcaggatgccctgtccggttccagtgaccttctcgagctgctgctccaggaagacagccgaagcgggaccggttcagccgcgagtgggtcactcggatcgggcctgggtagcggcagtggcagtggatcacatgagggcggaagcacctctgcctcaatcaccaggagctctcagagcagtcacactagcaaatatttcggaagcatagatagtagcgaagccgaagcaggagcggccagagggggggccgagcccggcgatcaagtgatcaagtatgttctccaggacccaatctggttactcatggcgaacgctgaccaacgcgttatgatgacttatcaagttccgagcagagacatgacaagcgtcctgaaacaggatcgggagcgcctgagagccatgcagaagcagcaacccaggttctcagaagatcagcggcgcgagctcggcgctgtgcattcatgggtccggaaagggcaactcccacgagctctcgacgtgatggcctgcgttgactgcggtagttccacacaagaccccggccacccagatgacccgctgttctccgagctggatggactgggtctagagcctatggaagaaggcggcggcgagcaaggatcatcgggcggtggttccggggagggtgagggctgtgaagaggcacaaggcggggcaaaggccagcagtagtcaggacctggccatggaggaggaagaggagggtaggtcaagttcctcacctgccttacccactgctggcaattgcacatcctag

SEQ ID NO: 14422 - DNA, 2022 bp, synthetic construct
  source 1..2022: mol_type = other DNA; note = Synthetic coding sequence
atggagaaggcggtcaacgacggaagccactctgaagaactgttttgccatctgaagacaatctctgagaaggaggacctccccagatgcacttccgagagccacctcagttgtctgaaacaggatattctcaatgagaagaccgaattggaggctacccttaaggaagccgagttggttacccatagcgttgagctgctcctgcctctcttcaaagatacaatcgaaaaaattaactttgagaatgccaatttgagtgcgcttaatttaaaaattagtgagcagaaggaaatcctgattaaagaactggatacgtttaaaagcgtgaaactggcacttgagcatctgctgcggaagagagactacaagcagacaggggacaacttatcctctatgttactggagaacctgacggacaacgagagcgagaatactaatctgaagaaaaaggtgttcgaaaaagaggcacatatacaggagctgagttgtttattccagtccgagaaagccaatacactaaaggctaatagattttcacagtccgttaaggtggtgcatgagcgacttcagatccagattcacaagcgtgaggcagaaaatgacaagctgaaggagtacgtgaaatcccttgagacaaagatcgctaagtggaatcttcagtccagaatgaataagaatgaggccattgtcatgaaggaagccagccgacagaaaactgtggccctgaaaaaggccagtaaggtgtacaaacagaggctagaccattttaccggtgccatagagaagctgaccagtcaaatcagagatcaggaagccaaattgtccgaaacaatttctgcctcaaacgcatggaaaagccactacgaaaagattgttatcgaaaaaacagaattggaggtgcagatagaaactatgaaaaagcaaatcattaatctccttgaggacttgaagaaaatggaagatcatggcaagaatagctgtgaggagattctacggaaggtgcattcaatagaatacgagaacgaaacactgaatcttgaaaataccaagcttaagctccgttttccatgtaggataactgagtctaaaaacatgaacattttgatcgtgctggatatgttgtgttatatttcaagcgagaagaccaccctggcagccctgaaagacgaagtcgtttccgtggagaatgaactgtccgagctccaagaggtggaaaagaaacagaagacgttgatcgagatgtacaagactcaggtacagaaactgcaggaggcggccgaaatcgtgaaaagccgctgcgagaacctgttacataagaataaccagattaccaaaactaaaaacaagaacgtggagaagatgagggggcagatggagtcgcacctgaaagaactggaacgagtgtgtgacagcttaaccgcagccgaacgccgcctgcacgagtgtcaggaatcgctccaatgttgtaagggaaagtgtgctgaccaggaacacaccatcagagaactgcaggggcaggttgatggaaaccacaatctgctcacgaagcttagcctggaggaagagaattgcctgatccagttaaaatgcgagaatctgcagcagaagctagaacagatggacgccgagaacaaggagctggaaaaaaaattagctaatcaggaggagtgcttgaagcactcaaacctgaagttcaaggagaagtccgcagagtatacagccctcgcccggcagctggaagcagcactggaggagggccgccagaaagtcgccgaggagatcgagaaaatgtcctcgagggagagcgccctgcagatcaagatccttgatttagaaacagagctgcgcaagaagaacgaggagcagaaccagttagtctgcaagatgaattctaaagcacagcatcaggaagtctgcctaaaagaagtacaaaacagcctcgaaaaatcagagaatcagaacgagagcatcaagaattatctacagttcttgaaaacctcttacgtcacaatgttcgaatag

SEQ ID NO: 14423 - DNA, 798 bp, synthetic construct
  source 1..798: mol_type = other DNA; note = Synthetic coding sequence
atggatgataaggctagcgtaggtaagatatctgtatcgtccgacagcgtcagtaccttgaacagcgaggacttcgttctcgtcagcagacaaggggatgaaactccatccaccaacaatggttcagatgacgagaagaccggtcttaagattgtggggaacggttcggaacagcaactgcaaaaagagctggccgacgtattgatggatcctccgatggacgaccagcccggcgagaaagagctagtgaaacggtcccagcttgacggcgaaggcgacggacccctctcgaaccagctctccgcaagctcaacaatcaaccccgttccgctggttgggctccagaagcccgagatgagcctccctgtaaagccgggccagggtgactcagaagcctctagccctttcaccccagtcgccgatgaggacagcgtggtcttctccaaactgacctacctgggatgtgctagtgtgaatgccccaaggtccgaggtggaagctctgagaatgatgtctatcttgcgttcacagtgtcagatctccttagacgtcacactaagcgtgccaaacgtgtctgaggggatagtgagactattagatcctcagaccaacaccgaaattgcaaattatcctatctataagatacttttttgcgttcgcgggcacgatggcacaccggaatccgattgctttgctttcacggagtctcactataatgctgagctctttcggatccacgtattccggtgtgaaattcaggaagcagtgtctcctcaggagaaaactctgtgtaaatag

SEQ ID NO: 14424 - DNA, 636 bp, synthetic construct
  source 1..636: mol_type = other DNA; note = Synthetic coding sequence
atgtgggcttctcttagtctcgaccatccaagcgcaaaagaaaatcaggcccttaggttgattgaaatgagagaggaaaacggtaatgtcccaaaaacagagcaggccggatcccttaaacctctgagagacactggaaagagtaatttgaaagagaaaaaggcaaatagcaagctcaagcagatagagaaggagtatactcagaagctcgcaaagagctcacagattatcgccgagcttcagactacaattagcagtcttaaggaagagaattcacaacagcagctggctgcggagaggcgtctgcaggatgtccgacagaagttcgaagacgagaaaaagcagctgataagggacaacgaccaggccataaaggtgctgcaggatgaacttgagaaccgcagcaatcaggtcagatgcgctgagaaaaaactgcagcacaaagagctggaatcacaggaacagatcacatacatccggcaggagtatgagacaaaactgaaaggactgatgccagccagtttgcgccaggaattagaagacactatttcctctctaaaatcacaggtgaattttttgcagaagagagctagcatcctgcaggaagagcttacaacttatcaaggcaggcggtag

SEQ ID NO: 14425 - DNA, 867 bp, synthetic construct
  source 1..867: mol_type = other DNA; note = Synthetic coding sequence
atgagctctagtatgtggtatattatgcagtctattcagtcaaaatattccttatctgaacgcctgattcggactatcgccgctatcagatcatttccccacgacaacgtggaagacctcatccgtggtggcgccgatgtgaattgcactcacggaaccttgaagccccttcactgcgcatgcatggtgagcgacgccgactgtgtggagttgctcctggaaaagggcgccgaagtgaatgccttagacggatataaccggacggccctgcactacgccgccgaaaaggatgaagcctgcgttgaggttttactggagtatggagccaacccgaatgccctcgatggcaatagggatactcccttacattgggcggcattcaagaataatgctgagtgcgtacgagctctcctggagtctggcgcgagcgttaacgccctcgactacaacaatgacactccattgtcctgggctgccatgaagggaaaccttgagtccgtgtccatcttgttggattatggcgctgaagtgcgtgtgatcaacttgatcgggcagacacctatcagcagactagtcgcccttcttgtaagaggcttgggcaccgagaaggaagacagttgctttgaactgctgcaccgcgcggtaggccactttgagctgaggaagaatggcaccatgcccagggaggtagctcgcgacccccagctgtgtgagaagctgaccgttctgtgcagcgcacccggtacgctcaagaccctagcaagatatgcggtacgtcggagcttaggcctgcagtaccttcccgacgcggtcaaaggcctgccattgcccgcctcgctcaaagagtatctgctgctgctggagtag

SEQ ID NO: 14426 - DNA, 1341 bp, synthetic construct
  source 1..1341: mol_type = other DNA; note = Synthetic coding sequence
atgcgagaaatagtccacattcaggctggacagtgcggcaatcagattgggactaagttttgggaggtgatctcagacgagcatggcatcgatccggctggaggctacgtcggtgactctgcactccaactcgagcggataaacgtgtactacaatgaatctagtagccagaaatacgtgccaagggcggccctggtcgacctggagcccggaaccatggattccgttcggtccggcccttttggccagctgtttcgccctgataatttcatcttcggccagaccggcgcaggcaataactgggctaaggggcactatactgaaggcgccgagctggtggatgcggtactcgacgtggtgcgtaaggaatgcgaacattgtgactgtctgcaggggtttcaacttactcactcacttggcggtggaaccggtagcggcatgggcacactgttgatttctaagattagagaggaattccccgaccgcattatgaacacgttttcagtaatgcctagcccgaaagtgtccgatacagtagtggagccctataacgccaccctgtcagtgcaccagctggtggaaaacaccgatgaaacatattgtatcgacaacgaggctctgtacgacatttgctttaggacgctcaagctcaccacccccacctatggcgatctaaaccatctggtaagtgcaactatgtctggtgtgacaactagtctcagatttccgggacagctgaacgcagacctgaggaaattggctgtaaacatggtaccatttcctagactgcacttcttcatgccagggttcgcccccctgacgagtcgcggctcgcagcagtacagggccctgactgtcccagagctgacccagcagatgtttgatgcaagaaatatgatggcggcatgcgacccgaggcacggaagataccttaccgtggcgacagtgtttcgggggcctatgtcaatgaaggaggtcgacgagcaaatgctggccattcagagcaaaaattcaagttattttgtagaatggatcccaaataacgtaaaggttgccgtgtgtgacatccctcctcgaggactcaaaatggccagcacttttataggaaactcaactgccattcaggagcttttcaagcgcatctcggagcagttctcagcgatgttcaggagaaaggccttcctccactggttcaccggggagggaatggatgagatggagttcactgaggcagagtccaatatgaacgatctggtgtcagagtatcagcagtaccaggacgcaacagcaaatgatggcgaggaggcttttgaagatgaggaagaagagatcgacggatag

SEQ ID NO: 14427 - DNA, 792 bp, synthetic construct
  source 1..792: mol_type = other DNA; note = Synthetic coding sequence
atgttgtcctccaagggacttaccgtagtagacgtctaccagggatggtgcggcccatgtaaacctgtcgtttccctttttcagaagatgcgaattgaagttggcctcgacttattgcacttcgccttggcagaggctgatcggctggatgtcctggagaagtaccgggggaaatgcgagcctacatttctgttttatgcgatcaaggatgaagcgcttagcgatgaggatgagtgcgtcagccatggtaagaataatggcgaggacgaggacatggtcagtagtgaaagaacatgcacactggcaattataaaaccagacgctgtcgcccatgggaagactgatgagattatcatgaagatccaggaggctggcttcgagatactgaccaacgaagagcgaaccatgaccgaagctgaagtccgcctgttttatcagcataaggccggggaggaagcttttgaaaaactcgttcaccacatgtgctccgggcccagccacctattgattctgacaaggaccgagggctttgaggatgttgtcacgacttggcgaactgtgatgggccctcgggacccgaacgtagcccgacgcgaacagcctgaatccctccgggcacagtatggaactgagatgccattcaacgctgtacacggatctcgagatagagaggatgcagaccgggaactcgccttactgttcccctctctgaaattttccgataaagataccgaggcaccacaaggcgaatcgtcgactcagcctaggctcaagattaccgacttagattag

SEQ ID NO: 14428 - DNA, 1089 bp, synthetic construct
  source 1..1089: mol_type = other DNA; note = Synthetic coding sequence
atgctcaagaacaagggccattccagtaagaaagataacttggctgtgaacgcagtcgctctgcaggatcatatactgcatgatctgcagctgagaaacctcagcgtcgccgatcactcaaaaacccaggtgcaaaagaaagaaaataaatctttgaaacgggacactaaggccattatcgacacaggcctgaagaagacaactcagtgcccgaaactggaagactccgaaaaagagtatgtcctggacccgaagcccccacctctcactctcgcccagaaactggggcttataggcccacccccaccacctctcagctctgatgagtgggaaaaggtgaaacaaaggagcctgctccagggcgactcagtgcagccatgtccaatctgcaaagaggagttcgagctgcgcccccaggtgctgctaagctgttctcacgtctttcacaaggcctgtctccaggcttttgagaaatttacaaataagaaaacctgcccactctgccggaagaatcagtatcagaccagagtcattcatgacggagcaagattattcagaatcaagtgcgtgacccgtatccaggcctactggcgcggctgcgtcgttaggaagtggtaccgaaacttaaggaagacagtgcccccaactgatgcaaaactgagaaaaaagttcttcgagaagaagttcaccgagatcagccacagaattttgtgcagctataatacaaacatcgaggagctcttcgccgaaatagatcagtgcctcgctatcaatcgctccgtgctgcagcagctcgaggaaaaatgcggtcatgagatcacagaggaagaatgggaaaaaatccaggtccaagctctgagacgggagactcacgagtgttcaatttgtctagccccattatccgccgctggcggccagagagtcggggcgggccgtaggagtcgagaaatggccctgctttcatgttcccacgtgtttcaccatgcatgcctgctcgcacttgaggagttttcagtcggcgatcggcccccatttcatgcttgtccactctgccgctcctgctaccagaaaaaaatattagaatgctag

SEQ ID NO: 14429 - DNA, 291 bp, synthetic construct
  source 1..291: mol_type = other DNA; note = Synthetic coding sequence
atgatcgagaagatgcagggatccagaatggacgagcagaggtgtagctttcctccccccttgaaaacagaggaggattatattccatatccttcagtccatgaggtcctaggcagagagggtccgttccccctcatcttgctgccgcagttcggcggatattggattgaaggtactaatcacgaaatcacttcaatccctgagaccgagccactacagagcccaacaaccaaagtgaaattggagtgcaatcccaccgcccggatctacagaaagcattttctgggatag

SEQ ID NO: 14430 - DNA, 459 bp, synthetic construct
  source 1..459: mol_type = other DNA; note = Synthetic coding sequence
atggcagggctccccagaaggataataaaagagacccagagacttctggctgaaccagtccctggcataaaggccgaaccggatgaatccaacgctaggtactttcacgtggtgatcgccggtcctcaggacagcccttttgagggcggcactttcaagctggaactttttctcccagaggaatatcctatggctgcgcctaaagttcgcttcatgaccaagatctatcatcctaatgttgataagctggggcgcatttgcctcgatatcttgaaagacaagtggtctcccgctctgcagattcggaccgtactcctctccatccaagctctgttgagtgctcctaatcccgacgacccattggcaaatgacgtggcagagcagtggaaaactaatgaagcccaagccatagaaacggcaagagcttggacccgtctatatgccatgaacaatatttag

SEQ ID NO: 14431 - DNA, 3354 bp, synthetic construct
  source 1..3354: mol_type = other DNA; note = Synthetic coding sequence
atgtatagatcttccgcccggtctagtgtgagtagtcatcgtcccaaagatgatggcggtggaggcccccgctcggggaggtccagcgggtctagtagcgggccggctcgacgcagctcgcccccaccacctccttctggctccagttcacgaacacccgccaggcggccacggagtcctagtggacatagggggcgacgtgccagccccagcccacctcgtggcaggagggtatccccctctccccccagagctagaaggggatcaccttccccaccacggggtagacgactttttccacccggtccagctggcttccgcggatcctctaggggggagtctcgcgcagactatgctcgagatggtaggggcgaccaccccggggacagcggcagccgcaggagatctcccgggctgtgtagtgattcactcgagaaatccctgcggatcacggtgggcaacgatcatttctgtgtgtctacccccgaacgtcgtcgactttctgaccggcttggctcaccggtggacaatcttgaggatatggacagagacgacttgacagatgacagtgtgttcacgcgaagcagccagtgttctcgcggactcgagcggtatatatcccaggaggagggtccactcagcccgtttctgggccagctggacgaggactatcgcacaaaagagacttttttacatcggagcgattattccccccatatttcttgtcatgacgagttgctcagggggactgagcggaaccgagaaaagctcaaaggctactcaatcaggtccgaggagaggagccgagaggccaaacggccccggtatgacgataccgtgaagattaattcaatgggtggagatcatccatcattcaccagtgggacaaggaactacagacaacggcgtcgcagcccatcaccacgattcttggacccagagtttagggaattagatctggccagaagaaagcgagaggaagaagaagaacgtagtaggtctctgagtcaggaactggtgggggttgatgggggcggcactggatgcagtatcccagggctgagcggagtcctaactgcttctgaaccaggatattcgttgcacaggccagaggaagtgagtgtcatgcctaaaaagagcatactgaaaaagaggatagaagttgacattatggagcccagtatgcaactcgagtctttttcaagttcaacttcaagcagccaagaccacccgctctattcaggccatccttctctgcctttgtctggagccattgctgctttcgcgagtgaaattgagaacaaaggcaccatggtcgagactgccctgaaggaaccccagggaaatctgtaccagtggggcccattgcccggaatccccaaggataattcgccccttagagagaaattcgggtcattcctgtgtcacaaggacaatttggacctaaaagcagagggaccggaacggcatactgactttttactgccccatgagagggcttctcaagacgggagtggattttccagaatcctgagcatgctcgccgactccaccagcacgcaagaaaagcgacgacgatcatttcctgatatcgaggatgaagagaagtttctgtacggagatgaggaagaggatcttaaagctgaaagcgtgcccaagcccttaggcagtagcgagagcgaagtcatgcggcagaaggctagctcgcttccgtcttctgccccagccgtgaagctggagtccctggaggagaccaacccggagtatgctaagatccacgatcttctgaagactatcgggctcgatattggcgttgctgaaattagccaactggccgcccgaacccaagaacgactccatggaaagaagccatcactgaggagctccgcagataggcgcagctccgtcgatcggtacttctccgcagaccattgcagcagcgtagatcaccgtttcagcgcagacaggtgctccagcgtggatcactgctttagcgctgaccggcggtcttccgaccctcacagactcgaaagccgggaggcccaccatagcaatacacattccccagaagtcagccatccccatccaccatctcccgtggacccatatttgctaacaaagaacagccctccatttctgaaaagcgatcatccagttggccacatcagcggaccagaggtggtcggatctggcttccaatcttcagttgccgtcaggtgcatgctgcccagcgcaccttcagctcctatccgtctcccccataccgctgccttatcccagttccacatgccgcgggccagtcaattcgccgccgcccggatacctccaaattatcaaggccctgccatcccacctgcctcttttgacgcttatcgtcactacatggcttatgccgccagcagatggccaatgtacccaacctcacaaccttccaaccacccagtgccggagcctcaccgtataatgccaattacgaagcaagccacaaggtcgcggccaaatctaagagtcatccctactgttaccccagataaacctaaacagaaagagtccctgagaggatccattccggccgcccaggtgcccgttcaggttagcatcccttctttaattcggtacaaccctgagaagatatccgacgaaaagaatagagcttctcagaagcagaaggtgatcgaggagagagagaaattgaagaatgacagggaagccagacagaaaaagatgtactatctccggactgaactggaacgcctgcacaaacagcagggagaaatgctccggaaaaagcgccgtgagaaggacggccacaaagacccccttctggtcgaggtctctagactgcaggataacatcatgaaagatatcgcagagctccggcaggaggctgaggaggccgagaagaagcagtccgagcttgataaagtggctcagatcctgggtatcaatatcttcgataagtctcagaaaagcctgagcgatagtcgtgaaccaactgaaaaaccaggtaaggccgaaaaatcaaaaagcccagaaaaagtgtcttcgttctcaaattcaagcagcaacaaggaatccaaggtgaacaacgaaaaatttagaaccaagtctccgaagccggcagagtctcctcagagtgctacaaagcagctcgaccagccgaccgcagcatatgaatattatgacgccggcaatcattggtgtaaggattgcaataccatctgtggaacaatgtttgacttcttcactcacatgcataataaaaagcacacgcaaggacaattccagaagagctccgattttcaaaaagagggacttcagcagacattcctcccaccggagaggcagggttag

SEQ ID NO: 14432 - DNA, 576 bp, synthetic construct
  source 1..576: mol_type = other DNA; note = Synthetic coding sequence
atgtatgtgtgcctatgcgtgtccgtcgctaaagtcacgatggccgatcgcgccgctgccgagcgagcatgtaaggacccgaaccctattatcgacggccggaaagcaaatgttaacctcgcctatctcggcgccaaaccaagaatcatgcagcctgggttcgcattcggagtgcagcagttgcacccagcgctgatacagcggcctttcgggatccccgcccattacgtgtacccccaggcatttgtgcaacccggcgttgtgatcccacacgtgcagcccaccgcagccgcggctagcacaaccccctacatcgactacaccggggcagcctatgcccagtattctgccgccgccgccgctgcggctgcagcggctgcctatgatcagtacccctatgccgcatccccggctgccgccggctacgtgaccgcaggaggatacggatatgctgtgcaacagccgattacagccgctgcaccaggcactgctgccgcggctgccgccgcggctgcagccgctgccgcttttggccaatatcagccgcaacaattacagacagaccggatgcaatag

SEQ ID NO: 14433 - DNA, 330 bp, synthetic construct
  source 1..330: mol_type = other DNA; note = Synthetic coding sequence
atggccggcgctcctactgtctctctccccgagttgaggtctctccttgccagcggccgagcacgactattcgacgtgcgttcacgggaagaagcagctgctggaacaattcctggggcactgaacatacccgtctctgaactagagtcggccctgcaaatggagcccgcagccttccaggctctctacagtgccgagaagccgaagttggaagatgagcatttggtctttttctgccagatgggcaagaggggccttcaggctacacagctggcacgctcactggggtacactgggtatggcgaagtttggttgcttgcaggccgatag

SEQ ID NO: 14434 - DNA, 630 bp, synthetic construct
  source 1..630: mol_type = other DNA; note = Synthetic coding sequence
atggcgctgctagctgagcacttgctgaaaccacttccagcagacaaacagattgagaccggaccatttcttgaagcggtctcacacctgccaccattttttgattgcttgggctctccggttttcacaccgattaaggcggatatttctggcaacatcacaaagattaaggccgtctatgatacgaatccggccaagttccgaacactccagaacattctagaagtcgagaaagaaatgtacggcgcagagtggccaaaggtgggggccacactcgccctaatgtggcttaagcggggcctcagattcattcaggtctttctgcagtccatctgcgatggcgagcgcgatgaaaatcatcctaatctgatcagggtgaatgccacaaaggcttatgaaatggcacttaagaagtaccatggctggatcgtccagaagatttttcaggcagcattgtatgccgccccctacaagagcgacttccttaaggcgctctctaagggtcagaacgtgacagaggaggaatgcttggaaaagattcgtcttttcctcgtgaactatactgccacaatcgatgtcatctacgagatgtacacacaaatgaacgcggaactgaactataaagtttag

SEQ ID NO: 14435 - DNA, 474 bp, synthetic construct
  source 1..474: mol_type = other DNA; note = Synthetic coding sequence
atggaagaggcccagaggaaaagaacccagctgcgcgaggctttcgagcagttgcaggctaagaagcagatggccatggagaaaagaagggctgtccagaatcagtggcaactgcagcaggaaaagcatctccagcacctggccgaggtctccgccgaagtacgcgagcgaaaaacaggtacccagcaagagctagaccgggtctttcagaaattgggcaatctgaaacagcaagccgagcaggaaagagacaagttgcagagataccaaacgttcctgcagctgctctacacgctgcagggaaagctcttgtttccggaggccgaggcagaggccgagaatcttccagatgacaaaccccagcaacctacccgacctcaggagcagagtactggagacacaatgggcagagacccgggggtgtcttttaaagccgtgggcttacagccggccggcgacgtcaatctgccatag

SEQ ID NO: 14436 - DNA, 639 bp, synthetic construct
  source 1..639: mol_type = other DNA; note = Synthetic coding sequence
atggaagttctccgcaggagttcagtcttcgccgccgaaatcatggatgctttcgaccggtcaccgaccgataaagagctggttgctcaggctaaagccttgggaagagagtatgtccatgctagattgctcagggctggtctgtcctggtcggccccggagagagctgcccccgttcctggtagactggctgaagtatgtgctgtcctcctccgtctgggtgacgagttggaaatgatacgaccttccgtctatcggaatgtcgcgcgacagttgcacatctccctgcaaagcgaacctgttgttactgatgcgtttctagccgtagctggtcatatctttagcgctggcatcacatggggcaaagttgtgtccttgtatgccgtcgcagcgggccttgcggtcgactgcgttcggcaagctcagcccgctatggtgcacgctctggtcgattgtctgggggagttcgttcgcaaaacccttgccacatggcttaggcgtcgcggcgggtggacagatgttctgaaatgcgtggtgtctaccgatcccggcctgagatctcactggttggtggctgctttgtgctctttcggccgattcctcaaagccgccttttttgtgctactccctgaaagatag

SEQ ID NO: 14437 - DNA, 2148 bp, synthetic construct
  source 1..2148: mol_type = other DNA; note = Synthetic coding sequence
atgtcccagtccggggccgtgtcttgttgcccgggtgctacgaacggtagcctcggaagaagtgatggcgtagctaaaatgtctccgaaggacctctttgagcaaagaaaaaaatatagcaactctaacgtcatcatgcacgaaacatcccagtatcatgtgcagcacctcgcaacattcataatggacaagtccgaagcaattacaagcgtcgacgacgcaatcaggaaactggtccagctgtcgtctaaggaaaagatctggactcaagagatgctcctgcaggtgaatgatcagagtctccggctgcttgatatcgagtcccaggaggaactggaggattttcctcttcctacagtgcagcggagtcaaactgtgctcaatcaacttcgctatccctccgtgctgctgctcgtgtgtcaggatagcgagcaatctaagccagatgtgcacttcttccactgcgacgaagttgaagcggagctggttcatgaggatatcgagtctgctctggctgattgcaggctggggaaaaaaatgcgcccacagaccttaaaaggacaccaggagaaaatccgtcaaaggcagtctatcttacccccaccgcaaggtccagctcccatcccatttcaacacagaggcggagactctcccgaggccaaaaaccgagtgggcccacaggtcccattgtcagaacccggatttcggagaagggagagccaggaggagccgcgcgccgttctcgcccagaagattgagaaagagactcagatcctgaattgcgcattggacgacattgagtggttcgtagccagactccagaaagccgctgaggcctttaaacagctgaaccagagaaagaaaggcaaaaagaagggaaaaaaggctccagcagagggtgtgcttactctgcgggctcggccgcctagcgagggagaatttattgactgtttccagaaaataaaactggctatcaacttattggccaaactacagaaacacattcagaaccccagcgcagctgagctggtgcactttctgtttgggccccttgatcttatagtgaatacctgttccgggcccgatatcgcaagatccgtatcttgccctttgttatctcgcgacgccgtggactttttgcgaggccacctcgtgccgaaagaaatgtctttatgggagtctcttggtgagtcctggatgcgaccgagatctgaatggcctagggaaccgcaggtccccctatatgtcccaaaattccacagtgggtgggagccgccagtggacgtgttgcaggaggcaccatgggaggttgagggactggcttccgcaccgatcgaagaagtttctccagttagcagacagagcattcgtaacagtcagaaacacagtcccacatcagaaccaactcctcccggtgatgcattgccacccgtgagttcaccacacacccataggggctatcagcccacgccagccatggccaagtacgtgaaaattctctacgatttcaccgctagaaacgcgaacgagttgtctgtactgaaagacgaggtgttagaggttctggaagatggtaggcaatggtggaagctgaggtctaggagcggccaagcaggctacgtgccttgcaatatcctgggtgaggccagacccgaagacgccggagctccgttcgaacaagccgggcagaaatactggggcccagcatccccaacccacaagctgccaccctcttttccggggaataaagatgagctcatgcagcatatggatgaggtgaacgacgaattaatccgaaaaattagtaacatccgggcccaaccacaacgccactttagggttgaaaggagtcaacctgtcagtcagccactgacctacgaatccggacctgatgaggtgagagcctggctggaggccaaggccttcagcccacggatcgtggaaaatctggggatcctgaccggaccacaactgtttagtttaaacaaggaggaactcaaaaaagtatgcggcgaggagggagtccgggtgtatagccaactgaccatgcagaaggcatttcttgaaaagcagcagtcagggtccgaactcgaagaattaatgaacaagtttcactccatgaatcaacgccggggggaagattcttag

SEQ ID NO: 14438 - DNA, 600 bp, synthetic construct
  source 1..600: mol_type = other DNA; note = Synthetic coding sequence
atggcctggccctgcatctccagactgtgttgtctagccagacgatggaatcagcttgataggtccgatgttgcggtgcctctgaccctgcacggctactctgatctggactccgaggaacctggaactggaggagcagcgtcaagacgtgggcagcctcctgccggcgcccgggacagtggccgggatgtcccgttgacgcagtaccaacgggactttggcctgtggactacccccgcagggccgaaggatcctccccctggtcgcggaccaggggctgggggccgtagggggaaaagttcagcccagtccagtgcgccacccgcaccgggtgccagaggggtgtacgttctgccgataggcgacgccgatgcagctgccgcggtcacaactagttatagacaagaatttcaggcatggacgggcgttaagccttcacgatcgaccaagaccaagcccgctagagtgatcacaacacacacatctggttgggattctagccccggggcaggtttccaggtccccgaagttaggaaaaaatttacacccaatccctcggccatcttccaggcctccgccccccgtattcttaacgtctag

SEQ ID NO: 14439 - DNA, 5106 bp, synthetic construct
  source 1..5106: mol_type = other DNA; note = Synthetic coding sequence
atgggtaattcagacagtcagtataccctgcaaggaagcaagaatcattctaataccataacaggtgccaagcagattccttgttcactgaagatccgaggcattcatgcaaaagaggagaaaagtcttcacggctggggacacggcagtaacggtgcggggtacaagtcccgttcgctggcacggtcatgtctttcccatttcaagagcaatcaaccctatgcatcaagactcggcggcccaacatgtaaagtatcccggggggtggcctatagcacacaccgtaccaacgccccaggaaaggatttccagggtatctccgcagccttttccaccgagaacggtttccactccgtgggacacgagcttgccgataaccacatcacgtcaagggattgtaacggccaccttctcaactgctacggccgtaacgagtctatagcatcaacacctcccggcgaggacagaaagtctcccagggttctcataaaaaccctggggaaacttgatggatgtttgcgggttgagttccacaacggcggaaacccgagtaaggtccccgccgaggattgttcagagccagtccagctcctgagatattccccaacactggcatccgaaacctctcctgtgccagaggcccgccgcggctcttcagccgactctcttccctcccaccgtccctcacccaccgatagcagactgcgctcttcgaaggggtccagcttaagctcggaaagttcttggtacgacagcccttggggtaatgcaggggagctatctgaagcagaaggatcttttcttgccccaggcatgcctgacccatcactacatgccagtttcccgccaggcgacgctaagaagcctttcaaccaaagctcatctctctcaagcttgagggaactgtataaggacgctaacctcggctcactgagtccatccggcattcggctgtccgatgagtatatgggcacccacgccagtttgtcgaatcgggtgagcttcgcttcagatatcgatgtcccttctagagtggcgcacggagacccaatccagtactcctcctttaccctcccctgccgaaagcccaaagcatttgtggaagatacagccaaaaaggattcactgaaagcgcgcatgagacgcattagcgattggacaggttccctgtcacgtaaaaaaaggaagctgcaggagccacgttctaaggagggttcagattacttcgactcccggtcagatggacttaataccgatgtccaaggctcatcacaggcatcagcctttctgtggagcgggggttctactcaaatcctgtcacagcggagcgagtccacgcatgctatcggttccgacccgctgcgacagaatatctacgaaaacttcatgcgagaactggaaatgtcaagaaccaacactgaaaatatagaaaccagtaccgagacagcagagtcttcttcagagagtctgtcaagcctcgaacaactcgacctgctgtttgaaaaggagcagggagtggtgagaaaggccggctggcttttcttcaagcctctggtcacagtccagaaggagaggaaactggaactcgtcgcacggagaaaatggaagcagtattgggtcacattgaaaggatgcacactacttttttacgagacctacggaaaaaactctatggatcagagtagcgccccaagatgtgcactctttgctgaggatagtatcgttcagtcggtgccagagcaccctaagaaggagaacgtgttctgtctgagcaactcatttggagacgtatatctgtttcaggctaccagccagaccgatctggaaaactgggtcacagctgttcactcagcgtgcgccagcctgtttgctaaaaaacacgggaaagaagataccctgagactgctgaagaatcagacaaagaatctgctccagaagatagatatggactccaagatgaagaagatggctgagctgcagctgagcgttgtgtcagaccccaagaataggaaagccatcgagaatcagattcagcagtgggagcagaacctagaaaagtttcacatggatctgttccggatgcggtgttacctggcctcccttcagggcggcgaactgccaaatcccaagtcactgctcgccgccgccagtcggccctccaaattggccctcggccgattgggtattctctcagtgagctctttccatgccctggtatgtagtcgcgacgattccgctcttaggaagaggacgctgtctcttacacagcgaggacggaacaaaaaaggtattttcagcagtctgaaagggcttgacaccttggccaggaagggcaaggaaaagcgtccttcgatcactcaggtggacgagctcctgcacatctacggctccacagtggatggcgtgcctcgcgataacgcttgggaaatacagacatatgtgcactttcaggataatcacggggtaactgtgggaatcaagccggagcatcgggtcgaggacatcctgacactggcatgcaaaatgcgccagctagagccctctcactatggactccagctgagaaagctggtggacgataacgttgaatactgcatcccagcaccatatgaatacatgcagcaacaggtttacgatgagatcgaggtctttcctctgaacgtctatgatgtccagctcactaaaacaggatcagtgtgtgatttcggatttgctgtgaccgcacaggttgacgagcggcagcatctgtcgcggatcttcatcagtgatgtgcttcccgacggcctcgcctacggagaaggactccggaaaggaaatgaaattatgaccctcaatggtgaagctgttagcgatcttgatctaaaacagatggaggctctgttcagcgaaaagagcgtcggcttgacccttattgcccggcctccagacactaaggccacactttgtaccagttggagtgacagcgacctcttttctcgcgaccagaagtccctgctccctcctccgaaccagagtcaactgctggaggagttcttggacaacttcaagaagaacaccgccaatgatttttcgaatgtgccagacattactactggacttaaaaggagccaaaccgatggtacactcgatcaagtctcacacagagagaagatggaacagacattcaggtccgcagagcagattaccgccctgtgtcgctcattcaatgacagtcaagccaatggaatggaggggccaagagaaaaccaagaccctcctcccagaagccttgcgagacatctcagcgacgccgacagacttcgaaaggtcatccaggagttagtagatacggagaaaagctatgtaaaagacctatcctgtctgttcgaactgtatctcgagccactccagaacgagaccttccttactcaggacgagatggagagcctcttcggttccctgcccgaaatgttagaatttcagaaagtattccttgagaccttggaagatgggatttcagcttcatcagatttcaatactctggagacaccgagccaatttaggaaactcttgtttagcctggggggctccttcttatactacgcagaccacttcaaactgtatagcggattttgcgccaatcacattaaggtgcaaaaggttctagaacgcgccaagaccgacaaggcattcaaagccttcctagacgcccggaatcccactaagcagcattcgagtaccctggaaagctacttgatcaagcccgtgcagcgggttctcaagtacccattgctgctgaaagagctagtttctttaactgatcaggaatcagaagaacactaccacttgacagaagccctgaaggccatggaaaaggtcgcctctcacataaacgagatgcaaaagatttacgaagactacggtactgtcttcgaccagctcgtcgccgagcaaagtggcacagaaaaagaagttaccgagctcagtatgggagaactcctgatgcatagcaccgtgagttggctgaatccttttctgtcactgggcaaagcccggaaagacctagaactcactgtgttcgtctttaaacgcgccgttatcttggtgtataaggaaaattgcaagctgaagaaaaaactaccctcaaatagccgccccgcccataattccacagacctggacccattcaagttcaggtggctgatacccatctcggcacttcaagttaggttgggcaaccccgcagggacggagaacaattccatttgggaacttatccacacaaaatccgagatagaggggagacctgagaccattttccaactgtgttgtagcgactctgagagtaaaactaacatcgttaaagtgatcaggtctatcttaagggaaaactttcggagacacataaaatgcgagttacccctcgaaaaaacttgtaaagatagactggttcccctcaaaaaccgggttccagtgtctgccaagttagcgtcctcacgcagtttaaaagtgctgaagaacagtagcagtaacgaatggacaggggagacgggcaaaggcactctgctggacagcgacgaaggatccctcagctcgggcacccagagctccggttgtcctacggccgagggtagacaagactcaaaaagcacttcacccggaaagtacccccatcccggccttgctgatttcgccgataacctaatcaaggagtccgatatcttaagcgatgaggatgatgatcacagacagaccgtcaagcaggggagccccacaaaggacattgagatccagttccaaagactgcggatttccgaggacccggatgtccatccggaagccgaacagcaaccaggacccgagtccggagaaggccagaagggcggggagcagcctaaactggttagaggccatttttgcccaattaaacggaaggccaatagcacgaagcgcgatagaggaacactgctgaaggcccagatacgccaccagagtttagacagccagtcagagaacgctaccattgacttgaattccgtgctggagcgagagtttagcgttcagtctctgacttccgtggtaagtgaagaatgtttctatgagaccgaatctcatgggaagtcttag

SEQ ID NO: 14440 - DNA, 3177 bp, synthetic construct
  source 1..3177: mol_type = other DNA; note = Synthetic coding sequence
atggacttgggaccattgaacatctgtgaggagatgacgatcctgcacggtgggtttttactggctgaacagctattccacccgaaggccctggccgaattaaccaagtcggattgggagagggtggggagaccaatcgtggaggccctccgagagatttcctcagccgctgcccatagccagccatttgcttggaagaagaaggctctgattattatatgggccaaggttctccagccacatcctgttacaccaagcgataccgagacacgctggcaggaggatctgtttttctcggtgggcaacatgattccaaccattaatcacaccatactctttgagttgctcaagagcctggaagccagcggcctgtttatacagctgcttatggccttgcctacaacaatctgccatgctgaacttgaacgatttctggagcacgtgactgttgatacttcagccgaggatgtggccttcttcctggatgtttggtgggaggtgatgaaacacaaaggtcacccgcaggatcctctgttgtcgcaattctctgcgatggcccacaagtatctgcctgctctcgacgagtttccacaccccccgaaaaggctccggtcggatcctgatgcctgtcccactatgccgcttctggcgatgctactgcggggtttaactcagatccaaagtagaattttgggacctggcaggaaatgctgcgccctagctaatttagctgatatgctgactgtctttgctctgaccgaggacgacccacaagaagttagtgcaacagtctaccttgataaactcgctaccgtaatctcagtttggaattcagacacccagaatccctatcaccagcaagcactggcagaaaaggtgaaggaagcagaacgggacgtgtccctgaccagcctggctaagctcccatctgagaccatctttgtgggctgcgagtttctgcaccacctcttgagggagtggggcgaggagctccaagctgtgcttagatcatcgcagggaacatcctatgactcttaccgactgtgtgactctttaacgtctttctctcagaacgcaacactctatctgaaccggacctccctgtccaaggaggacagacaggttgtttccgaactagccgagtgtgtacgcgactttctccgcaaaacctccaccgtccttaagaatcgtgccctggaggacattaccgcctccattgccatggccgtcattcaacagaagatggacaggcacatggaagtgtgttatatattcgccagcgagaaaaagtgggccttttctgacgagtgggttgcatgcttagggagcaaccgggccttattccgtcaacccgacctagtgcttcgattacttgaaactgtcatagatgtgtcaactgcagatagggctatcccggaatctcagattagacaggtaatccatcttatcctcgagtgctacgctgatctcagcttgcctggcaagaacaaggtgttggcgggcatcctcaggtcttgggggcggaagggcctgtccgaaaaacttttagcttatgttgagggttttcaggaggaccttaacacgacctttaatcaactgacgcagagtgccagtgagcaggggttggccaaagcagtcgcctccgtagccaggcttgttatcgttcaccccgaagtgaccgtgaagaaaatgtgttccctagcagtggtcaacttaggcacacataaatttcttgcccagatcctgaccgcttttcccgccctcaggtttgtcgaggaacagggaccgaacagctcggcaactttcatggtgtcatgtctcaaagaaacagtctggatgaagttttcgacccccaaggaggagaaacagttccttgagctgctgaactgtcttatgtcccctgtgaaaccacaggggattccagtcgccgccttgctggagccggatgaagtactgaaagagttcgttctacctttccttagattggacgtagaggaggtcgatttgagtctccggatattcatacagacactcgaggccaacgcttgtagggaggaatattggctgcagacttgctccccctttcctctgctctttagcctttgccagctcctcgatcgtttctccaaatattggcagctgccgaaagaaaaacggtgtctttccctcgatcgcaaggacctcgccatccatattttggaactgctatgcgaaatcgtttccgcaaatgccgaaaccttctccccagacgtgtggatcaaatcgttgtcatggctgcatcggaagctagagcagctggattggacggttggattacggctgaaatcattctttgagggtcacttcaagtgcgaagtgcccgccaccctattcgaaatctgcaaattatccgaagatgaatggacaagccaggcccatcctgggtatggggctggaactggcctcctggcatggatggagtgctgctgtgtttccagtgggatatctgaacggatgctttccctgcttgtggtcgacgtggggaaccccgaagaggtccgactgttttctaaaggtttcctcgtggcactggttcaggtcatgccgtggtgttctccccaggagtggcagcggctgcaccagctgactagacggctgctcgaaaagcaactgctacacgtgccctacagtcttgaatatatccagttcgtccccctgctgaacctgaagcctttcgcccaagaattacagctttcggtacttttcctgcgcacattccagttcctgtgctcacattcttgtcgcgactggctccctctggaggggtggaatcacgtcgtcaaactcctgtgcggcagcttgacccgtctgctggactccgtgcgggcaatacaagccgccggcccgtgggtgcaaggacctgagcaggatctgacccaagaagcactctttgtttatacacaggtattctgccacgcactacatatcatggccatgctgcaccctgaggtctgcgagcccttgtacgttctagccctggaaacattgacctgctatgagacactgtctaagacaaatccctccgtctcatcccttctccaaagggcccatgaacagaggtttctgaagtctatcgccgagggaattggtcctgaagaacggcggcagacgttgctgcaaaagatgagttccttctag

SEQ ID NO: 14441 - DNA, 267 bp, synthetic construct
  source 1..267: mol_type = other DNA; note = Synthetic coding sequence
atgtctgggctgcgggtctattccacgtctgttaccggcagtagagaaattaagtcccagcagtccgaggttacccgtatcctagacggcaaaaggattcagtaccagctcgtcgacatcagccaggacaatgctcttcgggacgagatgagagccctggcaggcaaccccaaggccactccaccccaaatcgtgaacggagaccagtactgtggcgtctgggctgggggtcgtggtggcggtggttcagtggggaggggcctctag

SEQ ID NO: 14442 - DNA, 933 bp, synthetic construct
  source 1..933: mol_type = other DNA; note = Synthetic coding sequence
atggatggatcttttgtccagcacagcgtccgggtacttcaagagctgaataagcaacgcgaaaaaggccagtactgcgatgccacactcgatgttggtggcttggtgttcaaggcacactggtccgtgctggcatgctgttcacatttttttcaaagtttatacggtgatggatcaggaggttccgtcgttttacctgccgggtttgctgaaatttttggcctgttactagattttttttatacaggccacctggcattgacatccggcaatagggaccaagtcctgctggcggcgagagaactccgagtcccagaggccgtggagctgtgtcaatcattcaagcctaagacctcggtcggacaggctgcggggggccaatctggcctgggtccgcccgcatcccagaacgtgaatagccacgtcaaggagccagctggcctggaagaagaagaagtaagtaggactcttgggcttgtcccgcgggaccaggagccaagaggcagccactccccacagcggccccagcttcactctccagcacagtctgagggcccgagtagcttatgtggcaaacttaaacaggccctaaagccctgtcccctcgaggataagaagcctgaggattgtaaagtgccacctcgccctctcgaagcagagggtgcccaactccaggggggtagcaacgagtgggaggtggtggtgcaggtggaggacgatggggatggcgactacatgagcgaaccagaggcggtgttgacccggagaaagtctaatgtcattagaaaaccatgcgctgccgaaccggccctgagcgcaggaagtctcgctgctgagcctgcggagaaccggaaggggacagccgtccccgtcgaatgtcctacatgtcataagaagttcctgagcaagtactatctcaaggttcacaactag

SEQ ID NO: 14443 - DNA, 600 bp, synthetic construct
  source 1..600: mol_type = other DNA; note = Synthetic coding sequence
atgagtagcggtaacgctaaaatcggccacccagcgcctaattttaaggcaaccgcggtgatgcccgatggtcagttcaaggatatctctttgtctgattacaaggggaaatacgtcgttttcttcttttaccccttggattttacattcgtctgtcccacggagatcattgccttcagtgaccgcgccgaagaatttaagaagctcaactgccaagtgattggtgcaagtgtcgattcacacttctgtcacctcgcatgggtgaatacacctaaaaagcaaggcggcctgggtcctatgaacatcccccttgtaagcgatccaaaacgcaccatcgcacaggattacggcgtgttgaaggcggatgaagggatatcgtttcggggcctctttatcattgatgataaggggatactgaggcagattactgtgaatgacctacccgtgggaagaagtgtggatgagacgttaaggctggtccaagcctttcagttcactgacaaacacggcgaggtgtgccctgcgggatggaagcctggcagcgacactatcaaaccagatgtgcagaaatcaaaggagtacttctccaagcaaaagtag

SEQ ID NO: 14444 - DNA, 513 bp, synthetic construct
  source 1..513: mol_type = other DNA; note = Synthetic coding sequence
atgtccgtagccggcggcgagatacgaggcgacactggcggggaggacacagcagctcctggacgcttttccttttccccagagcctaccctggaagatatccgccgcttgcatgccgaattcgctgccgagagggactgggagcagtttcaccagcctcgcaacctcctgcttgccctggttggggaagtcggcgaactggccgagctctttcagtggaagacggacggggagcctgggccacaaggctggtcacccagggagcgggctgctctgcaggaggagctgtccgatgtgttgatctatttggtggcactggccgctagatgtcgggttgatctgccactcgccgtcctgtctaaaatggatatcaataggcggagatatcctgctcacttagctcgcagctcaagccggaaatatacggagctgccacatggggcaatctccgaggatcaggcagtaggccctgccgatattccttgtgattccactggccagacaagtacttag

SEQ ID NO: 14445 - DNA, 702 bp, synthetic construct
  source 1..702: mol_type = other DNA; note = Synthetic coding sequence
atgagcgctaagcgagctgaactcaaaaagacacacctttcgaagaattacaaggcagtctgcctggagctaaagccggagcccaccaagacttttgattacaaggccgtgaagcaggaggggcgatttaccaaagcaggggtcactcaggacctgaagaatgaactcagggaagtgagggaggagctgaaagaaaaaatggaagaaatcaagcagatcaaagacctaatggacaaggatttcgataagctgcacgagtttgtggaaatcatgaaggaaatgcagaaagacatggacgagaaaatggacatactgataaatactcagaagaactacaaattgccattgcggcgcgctcccaaggaacaacaggaattaaggttaatggggaagacccaccgcgagcctcagctccgcccgaaaaagatggacggggccagcggagtgaacggcgccccatgcgctcttcacaagaagaccatggctccccaaaaaacaaaacagggcagtcttgaccctctgcaccactgcgggacctgttgtgagaagtgcttgctttgcgcactcaaaaacaattacaatagggggaacatcccaagtgaagcgtccggtctttacaaggggggcgaagaacctgttacaacccaaccgtctgtaggacacgctgtccctgcccctaagtcccaaactgaaggacggtag

SEQ ID NO: 14446 - DNA, 2196 bp, synthetic construct
  source 1..2196: mol_type = other DNA; note = Synthetic coding sequence
atgtccgtcacacttacttctgtgaaaagggtgcagtcttctcccaatctgctggccgcaggtagagacagtcagtcgccagacagcgcatggcgcagctacaatgatggcaaccaggagaccctgaatggtgatgcgacgtactcttccctcgccgctaaaggttttagatccgttcgccccaacctccaagataaaagatcccccactcaaagccaaatcacagtgaatggcaattcagggggggctgtatcaccgatgagttattaccagagacccttcagccctagtgcatattcactgcctgcatcccttaatagcagcattgtcatgcagcacggaacctccctggactccactgacacatatccgcagcatgctcagtctctggacggcactacgtcttcctcaatccctctctaccgcagttcagaggaagagaagagagtaacagtcattaaggcccctcactaccccggtattggacctgtggacgagagcggcatccctactgctattagaaccaccgtcgaccgacccaaggattggtataagacaatgttcaagcagatacacatggtgcacaaacccgatgacgacactgacatgtacaacaccccctacacctataatgcggggctgtataaccccccgtattcagcccaatcgcacccagcagccaagactcaaacctaccggcctcttagcaaatctcactccgacaactccccaaacgcctttaaagacgccagttccccggtgccaccacctcacgtgccaccaccagtgccccctctgagacctcgtgaccgtagcagcacagagaagcatgattgggatcctcccgatcggaaggtggacacacggaagtttcgaagtgagcctcgaagcatttttgagtatgagccaggcaaaagttccatccttcagcatgagcggcctccccctctacctactactccaactcccgtacctagagagcctggacggaaacctctgtcttcatcacgccttggagaagtgacaggctccccttcgcccccacccagatccggtgcccccaccccatctagcagggcgcccgccctctcacctacacgcccccctaagaagcctttagactacgtgcaggaccacagttctggcgtgtttaatgaggcctccctttaccagtctagcattgatcggtcgttggaaagacctatgtctagcgcatctatggcatccgattttaggaagagacggaagtccgagcctgcagtcggcccgccaagaggactgggagatcagagtgcgtctagaacgtctcccggaagagttgatctgccaggcagctcgaccactctgaccaaatcctttacttcttctagtccatcttctccttcacgcgcaaaagacagagaaagcccccgatcctactcgagcacgctgacagacatgggaagaagcgcccctagagagcgacgaggaactccagaaaaggaaaagctgcccgcgaaggcagtttatgattttaaagctcaaactagtaaagagctctcatttaagaaaggggacactgtatacattctgcgaaagatagaccagaattggtatgaaggtgagcaccatggccgcgtggggatcttcccaataagttacgtggagaaactgacacccccagagaaagcccagcctgcacgcccacccccacccgcccagccaggagagatcggcgaggctattgccaaatataacttcaatgccgacacaaatgtggaactgtccctgcgcaaaggcgatcgagtcatcctactcaagcgtgttgaccagaattggtacgaaggtaaaattcccggcacgaacaggcagggaatctttccagttagttatgttgaagtggtgaagaagaacaccaagggcgccgaggattatcctgatccgcctattccacactcatattcctccgatagaatccacagcctcagttccaataagccacagcgccccgtgtttacacatgagaacatccaggggggcggtgaaccctttcaggccctgtataattacacccctagaaatgaagatgaattggaactgcgggagagcgatgttatcgatgttatggaaaagtgcgacgacggctggttcgtaggaacatctcgacgcaccaaattctttgggaccttccccggcaattatgtcaagaggctgtag

SEQ ID NO: 14447 - DNA, 969 bp, synthetic construct
  source 1..969: mol_type = other DNA; note = Synthetic coding sequence
atgaccctggaggcgatccgatactctcgaggtagccttcagatcttggatcagctgctcctgccaaaacagagcagatatgaggccgtggggagcgtgcatcaggcgtgggaagcgatccgggcaatgaaagtgcgtggagccccagctattgccttagttgggtgcctgtcgctggctgtggaattacaggcaggagcaggcgggcccggtttggccgctctggtagcattcgttcgggacaaactgtcatttctagtgaccgcccgccccacggctgtgaacatggctcgcgcagcccgggatctggccgacgttgccgcacgggaggcagagagagaaggtgcgactgaggaggccgttcgtgagcgtagagagactgaactttgcgagcattgggaggaacacaccaggcagcgagagcttccgcttagaggtcccctgggcggaaccgttctagagacgcgcccttacaaccagggggcgagactgaccgccttcgagctagtatacgaacaaattcctgcaacgctgattacagattcaatggttgccgctgccatggcccacagaggagtgtctgcagttgtcgtgggagctgatcgggtcgtggcaaacggcgacacagctaacaaagttgggacctatcaactagccattgtcgctaagcaccatggcatccccttctatgttgcagctccaagctcttcatgcgacctccggttggagactggaaaagagatcattatcgaagagcgacctggccaggaactaacagacgtgaacggggtgagaatcgccgccccaggcatcggagtgtggaaccccgcatttgacgtgactccacacgatctgattacaggaggtatcataacagaactaggagtgttcgctccagaggagcttcgcaccgcattgactacaaccatttcgagtcgggacgggaccttggatggaccccagatgtag

SEQ ID NO: 14448 - DNA, 5169 bp, synthetic construct
  source 1..5169: mol_type = other DNA; note = Synthetic coding sequence
atggggaatcaagatggtaaacttaagaggtccgcgggagatgccctccacgagggcgggggcggagccgaggatgcgctgggaccgcgcgacgtagaagccactaagaagggcagtgggggaaaaaaggcactgggaaaacacggcaagggtggcggggggggtggtggtggaggcgagtcaggcaaaaaaaaatcgaagtcagacagtagggcgagcgtgttctccaacctaagaatcaggaagaatcttagtaaaggaaaaggcgcaggggggtccagggaagatgtcctcgattcgcaggctctgcagacaggggaattagattcagcccatagtctgttgacaaaaactccggacctgagcctctctgctgatgaagccggtctgagcgacacggagtgtgctgacccctttgaggtgaccggccccggtggccctggtcctgccgaggccagggtgggcgggcggcccatcgccgaggatgttgagactgctgctggagcccaagacggtcagcgcacttcaagtggtagtgacacggacatctatagctttcattccgcgactgaacaggaagaccttttgtcagacatccagcaggccataagactccaacagcaacagcagcaacagctacagctccagctccaacagcaacagcagcagcagcagctgcaaggtgctgaggagcctgccgccccccctacagctgtgtccccccagcccggcgcattcttaggtttggaccggtttctgctcggcccttccggtggagccggggaggcgcctgggagccctgatacagagcaggcccttagtgccctgtccgacctgcctgagtctttggcagccgaacccagagagccacaacagccaccatcgccaggcggcttgccggtatctgaggccccatccctgcctgccgcccagcccgctgcaaaagacagcccaagtagcacagcctttcctttcccagaggcagggcccggggaagaggcagctggtgctccagttcgtggagccggggacaccgacgaagagggtgaggaggacgctttcgaggacgcccccaggggtagcccaggggaagaatgggcacccgaggtgggagaggatgctccccagagacttggagaagagccagaggaggaggctcaagggccggatgcacctgccgccgctagtttacccggcagtccagccccatcccagagatgtttcaagccatacccgctcattaccccttgttatatcaaaaccacaactcgccagttatcgagtcctaatcactcccccagccagtctcccaaccagtcaccgcgcatcaagcgccggccagagccttccttgtcaagggggtcacgaacagccctggcgtcggtggctgcgccagcaaaaaagcaccgcgcagacggcggcctcgctgctggcctctcacgctctgcagattggaccgaagagctgggggcacggactcctcgggtcggaggctctgcccatcttctggaaagaggagtggcttccgattcaggtggcggcgtctcccctgccctcgctgctaaagcctcaggcgctcctgcagccgccgatggcttccaaaatgtctttactggccggacgctgttagagaaattattctctcagcaggagaatgggccccccgaggaagcagagaagttttgctcccgtataattgccatggggctgctattgccattctctgattgcttccgagagccctgcaatcagaacgcccagaccaatgccgcgagcttcgatcaggatcagctgtacacttgggccgccgtaagtcaaccaacacatagcttggattattccgaaggccagttcccccgaagggtgccctccatgggtcctcccagcaagcctcccgacgaggaacatcggctggaggacgcagagaccgaatcccagtctgccgtgtctgaaacgcctcaaaagaggtcagacgccgtgcagaaagaagtagtggatatgaaatcagagggtcaggctactgtgattcagcaactggagcagactattgaagatctgcggacaaaaattgcggagcttgagcggcagtaccccgcactagacaccgaagtggccagcggtcaccagggactggagaatggcgtgacagccagcggagacgtgtgcttagaggctttgcggctcgaagagaaagaggtgagacaccaccggatcctggaggctaaatctatccagacttcacctactgaggaaggtggcgtcctgactctgccgcctgtagatgggctcccaggtcggccgccatgtcctcccggcgccgagtcaggaccgcagaccaagttttgctccgaaatctctttaattgttagtccccggcgcatctcagttcaactggacagccatcaaccaactcagtctatttcccagccaccaccacctccatctctgctctggagcgcaggccagggccaacccggcagtcagcctccacactccatctcaacagaatttcaaacatcacatgagcatagcgtttcgagtgctttcaagaactcctgcaatatcccttcaccaccgccactgccatgcacagagagctcatctagtatgcctggcttaggcatggtgcccccacctcctccgcccctgccaggcatgacagttccaacgctgccaagcactgccattcctcagccccctcctcttcagggtaccgagatgttgccaccacccccacctcctctgccaggggctggcatacccccgccgccacctttgcctggcgcaggtatcttgccgttgccccctctccccggggcaggcatcccaccaccaccgcctctgcccggtgcagccatccctcctcctccacctctgcccggagccggaattccccttcctcctcctcttcccggagcagggatcccgcctcctcccccgctgcccggtgctgggatccctcctccgcccccgctgcccggagcagggatcccacctccaccgccactcccaggtgcagggataccaccccctcccccccttcccggggctggtatccccccgccacccccgctgcccggagcaggaatccccccccccccgccgctgcccggcgccggaattccacctcccccacccctcccaggcgccggtataccgccccccccacctctaccgggagccgggattccacccccaccacccctccccggggcagggataccacccccccctcccttgccgggcgctggaatcccgccgccgcctccattgccaggcgccggcattccacccccaccgcccttacccggcgtcgggatcccaccaccaccacctctgcctggcgccggcatcccccctccgccccccttgccaggtgcgggtatacccccccccccccccttacctggagccgggataccccccccaccacctcttccacgggtgggcatccccccccccccaccactgcccggggccggtatcccccctcctccccctctgccaggcgccggaatacccccaccccctccgctgccaggagtgggaatccctcctcctccccctcttccaggtgttggcattccaccccctccacctttacccggcgccggcatacccccaccaccgcctctgcccgggatgggtatcccacctgcccctgccccccccctgccgcctcccggcactgggatcccaccaccccctctgcttcccgtatctggccctccccttttaccacaagttggatcctctacgctgccaactccgcaggtgtgcggcttcctgcccccccctctgccctccggactgttcgggctaggcatgaatcaggacaaagggtcccggaaacaacccattgaaccctgtcgccctatgaagcctctctactggacgcgtatccagctacacagcaagcgggattccagcacctccctgatctgggaaaagattgaggaacccagcattgactgccacgaatttgaggagctcttttctaaaaccgccgttaaggagcgcaagaaacctatatccgataccatttctaaaacaaaggctaagcaggtagtgaaactgctaagcaataaaagatctcaggccgttggcatcctcatgtcctccctgcatctggatatgaaagacatccagcatgccgttgtgaatttggataatagcgtcgtggatttagaaacactgcaagctttatatgagaaccgggcgcagtctgacgagctggagaagatagaaaagcacggaaggtccagcaaggataaagagaacgccaagtcactcgacaaaccagagcagtttctttacgagctcagtctgatcccaaatttttctgaacgggtcttctgtattctgttccagtctacgttctcagagtcaatctgttccatccggcggaagctggagctgctgcaaaagctgtgcgaaactctgaagaacgggccaggcgttatgcaagtactgggcttagtactggcctttggaaattacatgaacggcgggaacaagacaagaggccaagcagacggctttggcctagatatcttgcccaaactgaaggacgttaagtcatcagacaattcgcgatctttgctgagttacatcgtctcctactaccttcgcaatttcgatgaggacgccggtaaagagcaatgcctctttcccctgcctgagccccaggacctcttccaggctagtcagatgaagtttgaggatttccagaaggatctaagaaagctgaagaaggatctgaaagcttgcgaggtcgaggccgggaaggtctaccaggtgtcctctaaggaacacatgcagcctttcaaagagaacatggaacaatttattatacaggctaaaattgatcaggaggcagaagagaattctctgactgagacccacaaatgcttccttgagaccaccgcatatttttttatgaaacctaagctcggcgaaaaagaggtcagccccaacgccttcttctctatttggcacgaattcagtagcgacttcaaagacttttggaagaaagagaacaagcttctcctacaggaacgcgtgaaagaggccgaagaagtgtgtcgtcagaagaagggaaagagcctctacaagataaaacccaggcacgacagcggaatcaaggccaaaatttcaatgaagacctag

SEQ ID NO: 14449 - DNA, 3048 bp, synthetic construct
  source 1..3048: mol_type = other DNA; note = Synthetic coding sequence
atgaccgtcagccagaaggggggtccgcagccaacaccatcacctgccgggccagggacgcagctgggccccataactggtgaaatggacgaggcggattctgcgtttttgaagttcaagcagacagcggatgattctctgtcacttacctctccaaacaccgagtccatctttgtggaagatccttatactgcctcgttgcgatctgagatagaatcagacggccatgaattcgaagctgaatcttggagcctggccgttgatgctgcgtacgcaaagaaacagaagcgagaagttgtcaaacgccaggacgtgctctacgagctgatgcaaactgaagtgcaccacgtgcggacactgaaaataatgttaaaagtctacagtcgggccctccaagaggagctgcagttttcaagcaaagcgattggacggcttttcccttgtgccgatgacctacttgagactcactctcatttcctggcacgtcttaaggagagacgccaggagagcctcgaggagggaagcgaccgtaattacgtgatccagaagattggcgatctgctggtacaacagttttctggggagaacggagagagaatgaaggagaagtatggagtgttctgttcagggcacaatgaggcagtatcccattacaagttactgttacagcagaacaagaagtttcagaatctgatcaagaagatcggaaacttcagtatcgttcggcgtctgggagtgcaggaatgcattctccttgttactcagagaatcacgaaatatcccgttctggtggagaggatcattcagaatactgaagctggaacagaggattacgaagatctgacacaggcccttaacttgattaaggacatcatttctcaggtggacgcgaaagtgtccgaatgcgagaaggggcagcgtcttagagaaattgccgggaagatggatttaaagtcgtcctccaagctaaaaaatggcctgactttccggaaagaggatatgctgcagagacagctccatcttgaagggatgctgtgctggaaaaccactagtggccggctcaaggacatcctggctatcttgctgaccgacgtcctgcttctcctgcaggaaaaggaccagaagtacgtgtttgcttcagtcgacagtaagcccccagttatttcgctacagaaactgatagtgcgagaggtggccaacgaagaaaaggccatgttcctgattagtgcatctctgcagggcccagagatgtacgaaatttacactagcagcaaggaagaccgaaatgcctggatggctcacatacaacgggccgtggaatcgtgcccagatgaggaagagggtcctttctcgctgccagaagaggagcgaaaagtggtggaggccagagcgacaagacttcgcgactttcaggagagattgagcatgaaggatcagctgatcgcccaaagtcttctagaaaaacaacagatctatctggagatggcggaaatgggcggcttagaggatctccctcagccccgcggattgttccggggcggtgacccatccgagaccctccagggagaactaatcctcaagtctgccatgagcgaaatcgagggcatccaaagcctcatctgcagacagttagggtcagcaaacggccaggccgaagatggtggatcctccactggccccccacggcgcgccgagacatttgctggctatgactgtaccaacagcccaaccaaaaatggcagcttcaaaaagaaagtaagcagtaccgatccccgcccaagggattggaggggaccgccaaacagtccagatctcaaactcagtgacagcgacatccctggaagctcagaagaatcacctcaagtggtggaggctccagggaccgagtctgatcctagactgcccacagtgctggaatccgagctagtgcagcggattcagaccttgagtcagttgttgctgaacttacaggcagtgatagcacatcaggacagctatgtcgaaacgcaacgggctgccatacaggagagggaaaagcagttccggctgcagtctacacgtggcaaccttttgctggagcaagaacgtcaaagaaattttgaaaagcagcgcgaagagcgcgctgctcttgagaaactccagtcccagctgcgacacgagcaacagcgctgggagcgcgagcggcaatggcaacatcaggagttagagcgcgctggggcgcggctgcaggagcgcgagggagaggcgcgacagttgagggaaagactggagcaagagcgggccgaactggagaggcagcggcaagcctatcagcacgacctggagagactgcgtgaagctcagcgagccgtggagagagaaagagaaagattagaactactgagacggctgaagaaacagaacacagccccaggggcactcccacccgataccctggccgaggcccagcctccaagccatccaccgtcatttaacggcgaagggcttgaaggaccaagggtttccatgctgccatccggggtcggacctgagtacgctgagcgaccagaggtcgctagaagggactccgcgccaactgaaaataggctcgccaagtcagatgttcccattcagttgctaagcgcgacgaatcagtttcaacggcaggccgctgtgcagcaacagattccaactaaactggcagcctccacgaagggcggaaaggataagggggggaagtctcgcggatcgcaacggtgggagagttctgcaagctttgacctcaagcagcagctattactgaacaagttgatgggcaaggacgaatccacatcccgtaaccggcggtcgctcagccctattctccccgggaggcactctcctgccccaccaccggatcccggattcccagcccccagcccacctcccgcggactcaccttccgagggcttcagcttgaaggccgggggtacagctctgctgcccggtcctccagccccatctcctctacccgcaaccccgctgtccgcaaaggaagatgcctccaaagaggacgtgattttcttctag

SEQ ID NO: 14450 - DNA, 2544 bp, synthetic construct
  source 1..2544: mol_type = other DNA; note = Synthetic coding sequence
atggaggcgctggggcctggcggcgaccgggcaagcccggcatcaagtacaagcagtctcgatttatggcaccttagcatgcgagctgattcagcatattcttcattttccgcagcaagtggcgggccggagccaagaacccagtcaccgggaaccgatctcctgccatatttagactgggattacgttcgcgtcgtgtggggcggacccggccctgcccctcccgacgctgccttgtgcacctcaccacgaccacggccggccgttgcagctcggtctggaccccagccaaccgaagttccagggactccagggccccttaataggcaggccactccgctcctatacgccctggccgctgaagctgaggccgcagcccaggcagccgagccacctagtcctcctgcctcacgggccgcttaccgccaacgcctccagggagctcagcgcagggtcctccgggagactagcttccaacgcaaggagctgcgcatgtccctgcccgcccgacttagacctacagtgcctgcacgccccccggcgacgcatccaagaagtgcgagtctgtcccatcctgggggggagggagagccggcgcggagccgggcaccagccccaggcaccgccggcagggggccactggccaaccagcaacgtaaatggtgcttctctgagcccggaaaactggaccgggtcggcaggggtggtgggcctgcccgtgagtgcctgggggaagcatgcagctcttctgggctccctggaccagaacccttggagttccaacatccggccttggctaagttcgaagatcatgaggtcggctggctccctgagacacaaccacagggcagcatgaatctcgactccggttccctgaagttgggcgacgcattccgacctgcgtcaaggtctagaagtgcaagcggcgaggtgctgggtagctggggaggaagtggcggtacaataccaatagtgcaggcggtgccccagggggcagagacgcctcgccccctcttccagactaaactgagccgcttcctcccacaaaaggaggctgctgtaatgtaccccgccgagctgcctcagagtagccccgcggatagtgagcagcgcgtttcggagacgtgcatagttcctgcctggctccccagtttacctgacgaggtttttctggaagaagcgcccctggtccggatgcgttctccaccagatccccatgcctctcaaggtcccccagccagcgtgcacgccagcgaccagccttatggtaccggtctaggacagagaactggccaggtgacagttcccacggagtaccccctccacgagtgccccggaaccgctggcgccgacgactgttggcagggtgtgaacggttcggttgggatttcccgtcccacctcccacacgcccaccggcaccgctaacgataacataccaacaatcgacccaaccggcctcaccacaaatccccctacggcagctgagtcggatttattaaagcccgtaccagccgacgccctgggacttagtggaaatgatactcccggaccatcccacaatactgctctggccagagggaccggacaacctggctccagaccgacctggcctagtcagtgcctggaggagctggtacaggagttggctaggctcgatccgagcctgtgcgaccctttggctagtcagccatcacctgaaccacctctcggattgctggacggactgatacctttggctgaagtccgggccgcaatgcgacctgcctgtggcgaggcaggggaggaggccgcatctacctttgagcccgggtcttaccagtttagttttacacaactcctgccagcccctcgagaagaaacacgcctggagaatcccgcaacacaccccgtgctcgaccagccatgtggccagggcctcccagccccaaacaactcaatccaggggaagaaagttgaacttgccgcacgcctgcagaaaatgctacaggacttgcacaccgagcaggaaaggttgcagggggaagcccaggcctgggccagaaggcaggctgcactggaggcagcagtgagacaggcctgcgccccccaagagctggaaagattttcaaggttcatggccgatctcgagcgcgttctgggcctgctccttctgctagggagccggttagcccgcgtgagacgggcgctcgccagagccgctagtgattcagacccagatgaacagcgccttcggctccttcaacgccaggaggaggatgccaaagaactgaaggaacacgttgccaggagggagcgggccgtgcgtgaggtcctcgtccgagccctgcccgtcgaagaattgcgcgtgtactgtgcactgctcgctggcaaggcagcagtgttggcccagcagagaaatctggacgagcgcattcgccttcttcaggatcagctcgatgcaattagagatgacttaggccatcatgcccctagccccagccctgccaggccacctggcacttgtcccccggttcagccaccgttcccccttctgctgacctag

SEQ ID NO: 14451 - DNA, 2502 bp, synthetic construct
  source 1..2502: mol_type = other DNA; note = Synthetic coding sequence
atgaagttcaccaatacaaaggtccaaatgatgcagaatgtacacctggccccagagactgacgaggacgacttgtattccgggtacaacgattacaaccctatctatgatattgaggagttagagaacgatgctgcatttcaacaggcggtgcggacatcccacggccgccgccctccaatcaccgccaaaatcagctctaccgccgttactcggccaattgctacaggctacggctcaaagaccagtctcgccagttccataggcagacctatgacaggcgctatccaggatggggttaccaggcccatgacagccgtccgcgccgccgggttcaccaaagccgccctgcgaggatccgcatttgatcctctcagccagtctaggggtcccgcttctcccctagaggccaaaaagaaggactcccctgaggaaaaaatcaagcagcttgaaaaggaagtcaatgaattggtggaggagagctgtatagccaattcttgtggtgatctgaaattggcccttgaaaaggcaaaggatgctggccgcaaagaaagggtgttagtgaggcaaagggaacaagtgactactccagagaatatcaacctggacttgacctactcagttctctttaacctggcctcccagtacagtgttaacgagatgtacgcggaagctctgaacacctatcaggtaatcgtgaagaataagatgttcagcaacgctggcatcctgaagatgaacatgggtaatatttatctgaaacagagaaactacagtaaggcaataaaattttatcggatggctttggatcaagtgccatccgttaacaagcaaatgcgaatcaaaatcatgcagaatattggagtcacattcatccaggcaggccagtattcagatgctattaatagctatgaacacatcatgagcatggcgccaaacctgaaggccggatacaaccttacaatatgttatttcgcgataggcgatagggaaaaaatgaagaaggcatttcagaaattgataactgtgcccctggaaatagacgaagataagtacatttccccctcagacgaccctcataccaatctggtgacagaggccatcaagaatgaccaccttaggcagatggagcgcgagaggaaagccatggctgagaagtacatcatgacaagcgcgaaactcattgctcccgtcattgaaacttctttcgcggctggctatgattggtgcgtggaggtggtaaaggcctctcaatacgtggagctggctaatgatctggagatcaataaggccgttacctatctcagacaaaaggattacaaccaagcagtcgaaattctcaaggtgcttgaaaagaaggatagccgcgttaagtccgctgccgcaactaacctctccgccttgtattatatggggaaggacttcgcccaagccagttcttacgcggacatcgccgtcaactcggatcgctataacccagccgccctgaccaataagggtaacaccgtattcgccaatggggattacgaaaaagcggccgagttctacaaggaagccctgcgcaatgatagctcctgtacggaagccctgtacaacattgggctcacctacgaaaagctgaatcgcctggacgaagccctcgactgttttctcaagctccatgcgatcttgcggaattctgccgaagttctttatcagattgctaacatctacgagcttatggagaatcccagccaggccatcgagtggttaatgcaggtagtatcagtgattcccaccgatccccaggtactctctaagctgggcgagctttacgacagagaaggagataagtcccaagccttccaatactattacgaaagttaccgctatttcccatgtaacattgaagttatcgaatggcttggcgcttactacattgacacccagttctgggaaaaggcgattcagtacttcgagagggcatctctcattcagccaacacaggtgaaatggcagctgatggtggctagctgtttccgcagaagcggaaactaccagaaagccctggacacatacaaagacacacatcggaaattccccgaaaacgtggagtgtcttaggttcctcgtgcggctgtgcacagacctcgggctgaaggatgcgcaagagtacgcgcggaagctaaaacggcttgagaagatgaaggagatccgcgagcaacggatcaaaagcggcagagacggcagcggtggctcccggggaaaaagggagggctctgcaagtggcgacagcgggcagaattactccgccagttctaagggggaacggctgagtgcgcgtctgcgggcactccctgggacaaatgaaccttatgagtcatcctccaacaaggagatcgacgcctcttacgttgaccctctcggtccccagattgagaggccaaagaccgccgccaagaagagaattgatgaggacgacttcgcagatgaggagttaggtgatgatttgcttcccgagtag

SEQ ID NO: 14452 - DNA, 918 bp, synthetic construct
  source 1..918: mol_type = other DNA; note = Synthetic coding sequence
atggacttatctggggtgaagaagaagtccctgctcggagtgaaagagaacaacaaaaagagtagtaccagggccccaagccccaccaaacgcaaggaccgttccgatgaaaaaagtaaggacagaagtaaggacaaaggcgctacaaaggagtcttctgaaaaggatagaggcagggacaagactcgaaaaagaaggagcgcaagctctgggagttcctctacccgctccagatcttcaagcaccagcagctctgggtcttcgacttccacgggatcaagctccggaagttcttcatcatccgcaagcagcagatcagggtcctcctccactagccgatcttctagttcttcctcctcgtcaggttccccgtcccctagtcgtcgccggcatgataaccgtcggcgatctcggtctaaaagcaaacctcccaagcgggacgaaaaggaacggaaacgtaggagtcccagtcccaagccaactaaagtccatataggcagattgacacggaacgtgaccaaggaccacataatggagatctttagtacatatggcaagattaaaatgatcgacatgcctgtcgagaggatgcatccacatctttccaagggatatgcctatgtcgaatttgagaacccggacgaggctgaaaaggctctcaaacatatggatggcggccagattgacgggcaggagatcactgccactgccgttttagctccctggccacggcctccccctaggagattcagccctccacggcgcatgctgccccctcccccaatgtggcgcagaagtccacccaggatgcgtagaaggagtcgctctccacggcgaaggagtcccgttaggcggaggtcccggagtcccggcagacggcgacaccgtagcaggtcttccagtaattcaagtcgatag

SEQ ID NO: 14453 - DNA, 1119 bp, synthetic construct
  source 1..1119: mol_type = other DNA; note = Synthetic coding sequence
atggacgtgctgtctccactttcgtttatcaaggtgtcgcacgtgcgaatgcaggggatcctgctcctggtcttcgctaaataccagcaccttccatacattcagatcctgtctacaaagtccacccccaccggcctgttcggttactgggggaacaagggcggcgtcaacatctgtctgaagctttacggctattacgtttctatcatcaactgccatctcccaccccacatcagtaataactaccagaggctggagcactttgatcggatcctcgagatgcagaattgcgaaggcagagatatccccaatatcttggaccatgatctgatcatctggtttggagatatgaactttcgcattgaagatttcgggctgcattttgtccgcgagagtatcaaaaatcggtgttacggcggtctatgggaaaaagaccagctaagtatcgctaaaaagcacgaccctctgcttagggagttccaggaaggccggctgctgttccctccaacatataagtttgaccggaactctaacgactatgatacatctgagaaaaagagaaaaccagcttggacagaccgcatactgtggaggctgaagcggcagccttgtgccggaccggacaccccaatccccccagcttctcatttctcactgtccctcaggggctattcaagccatatgacgtatgggatctccgatcacaagcctgtgagcgggacgtttgacttagaattaaaaccactggtcagcgctcccctcatcgtgctcatgcccgaagatttgtggactgtggagaacgatatgatggtctcttactcttccacttctgactttccttcatccccctgggactggatcggactctataaagtaggacttcgcgatgttaatgactacgtgagttatgcttgggtaggtgatagtaaggtgtcctgcagtgataacctcaatcaggtgtacattgacatatccaatatccctacaactgaagacgagttcctgctgtgttactacagcaacagccttcgcagcgtcgttgggataagccgcccttttcagatccctccaggatccctgcgggaagacccactcggagaagctcaacctcagatttag

SEQ ID NO: 14454 - DNA, 1692 bp, synthetic construct
  source 1..1692: mol_type = other DNA; note = Synthetic coding sequence
atgcgcctggacctggcatctctgatgtctgctcctaaaagtctcgggtctgcattcaagagttggaggctggacaaggcccccagtccccagcacacctttcccagcacttcgataccgggcatggctttcgcgttactagcctcagttcctccagtctttgggctgtacacttctttctttccagtactgatctactccttacttgggaccggtcggcacctcagcacaggcacttttgcgatccttagtctgatgacaggatccgcggtggaaaggctggtgccagaaccactcgtcggcaacttgtccggcatagagaaggaacagctagatgctcagcgcgtgggggtagccgcagcagtcgctttcggatcaggagcattaatgctggggatgttcgtgcttcaacttggcgttttgagtaccttcctgtccgaaccagtggtgaaagctctgacgtcgggggccgccctccatgtgcttctatcccagctgccgtccctgctggggctcagtcttccgcggcaaattggctgcttcagcctctttaagacactagcctcattgctgacggcgctgcctcgttcttcacccgccgaacttaccatcagcgcactgagtcttgcattgcttgtgccagtgaaggagctgaacgtccgcttcagagatcggctccctacacctattcctggagaggtcgttctcgtgctgttggccagtgtactgtgcttcactagttcagtggataccagataccaggtccagatcgtggggctgctccctggcgggttccctcagccattacttcctaatctcgctgagctccctaggatacttgcagatagcctgccaattgctctggtgagcttcgcagtctccgcgtctctggcatccatccacgccgataagtactcttatacaattgactcaaatcaggaattcttagctcatggagccagcaacctgatcagctccttattcagttgcttccctaactctgccaccctggccaccaccaatcttctggtggatgccggtggaaaaacacagttggccggacttttcagctgcacagtggtgttgtctgtgctgctttggctaggaccttttttctattatcttccaaaagcggtgctggcatgtataaatattagttccatgcgtcaagttttctgtcagatgcaggaactgccgcagctgtggcatattagccgggtggatttcctacttcaggtgcccggtttatgcatccttagttacccgacaccattgtatttcggtacccgaggccagttccggtgcaatttggagtggcatctgggtttaggagagggtgaaaaagagacaagtaagccagacggccccatggttgccgtggccgagcccgttcgcgtagtcgtacttgacttttcgggcgtaacctttgcagacgctgcaggggcccgagaggtagttcaggtgcgggagagattagcctccagatgtagggacgcccgtattcgtcttttattggcacagtgcaatgccttggttcaagggactctcactcgggtcggtcttctagacagggtcactcctgaccagttatttgtctctgtccaggacgcggccgcttacgctcttggcagcctgttgcggggctcaagtactaggtcaggaagccaggaggccctcggatgcggtaagtag

SEQ ID NO: 14455 - DNA, 2892 bp, synthetic construct
  source 1..2892: mol_type = other DNA; note = Synthetic coding sequence
atggccgagagaggcggcgccggaggcggtcctggaggtgctgggggcggatcggggcagagaggaagcggagtcgcacaatctccccagcagcccccaccccagcaacaacagcaacagccccctcagcagcccacaccccccaagctggcacaggccacctcctcttcgtcgagcacatccgccgccgcagcatcctcttcctccagttcaacaagcaccagcatggccgtggccgtagcttccggcagcgccccccccggcggcccgggacccggtaggaccccggcccccgtccagatgaatttgtatgctacatgggaagtagacaggtcaagtagcagctgcgtgccccggctgttctctttaactttaaaaaagctagttatgctgaaagagatggacaaggacctgaacagcgtggtgatagcagttaaactccaaggcagtaaacgaatcctccggtccaacgagatagtcttgcccgcatctgggctggtggagacagagctgcagctgactttctccctccagtatccacactttttgaagagggacgctaataagctccagattatgcttcaacggagaaagagatacaaaaaccgtaccatactggggtataaaaccctcgcggtcggtctcattaacatggccgaagtcatgcagcaccctaatgagggcgcactggtgctgggactgcactctaatgtcaaggacgtgtccgttcccgtggctgaaatcaaaatttattcactgagtagtcagcccatcgatcacgagggaattaaatctaaactgtcagacagatctccggacatagacaactactcagaggaggaagaggagtctttctcgagcgagcaggagggttctgatgatcctcttcacggtcaggatctgttctacgaagacgaggatctgagaaaagtcaagaagaccaggaggaagctgacctcaacttcagctatcacccgccagcctaatatcaagcaaaaatttgttgccctgctgaaaaggttcaaggtttcagatgaggtgggcttcggattggaacacgtgagccgagaacagattagggaagtggaagaggatttggatgagctgtacgacagtttggaaatgtacaatccaagtgacagcggacccgaaatggaggagaccgaaagcatcctgtccacgccaaaaccaaagctcaaaccattcttcgagggtatgtcgcagagttcgagtcaaacggaaatcgggtcattaaacagtaagggatccctaggaaaggatacaaccagtcctatggagctcgccgcattggagaaaattaagagcacatggattaagaatcaggacgattccttgaccgagacagatacgctcgagatcaccgatcaggacatgtttggcgacgcttcaacgagtctggtggtgcccgagaaggtaaagacaccaatgaagagtagtaaaacagatctgcagggcagcgccagcccatcaaaggttgaaggggtgcatacccctaggcagaagaggtctaccccactcaaggagcgccagttgagtaaaccactttccgagcggacaaattcaagcgacagtgaaagaagtccggacctgggccattctactcaaattcctcgaaaagtcgtatacgaccaactgaatcaaattctggtgtcagatgcggcgcttcccgaaaacgttattctagtgaatactactgactggcaggggcagtacgttgccgaactattgcaggatcagaggaagcccgtggtgtgcacctgctccaccgttgaagttcaggctgtgctgtcagccttgttaacgcgcattcagaggtactgtaattgtaactcaagtatgcctcggcccgtgaaagtcgccgcagtgggcgggcagtcatatttgtccagcattctgagatttttcgtaaagtctcttgcaaacaaaaccagcgactggctaggttacatgcggtttcttattattccccttggaagccacccagttgctaagtatttgggctctgtggactccaaatatagctcgtcattccttgacagcggctggagggacctgttctccagatcagaaccgcccgtgtccgagcaactggatgtggccgggagggttatgcaatatgttaatggcgccgctaccacacatcaactcccggtagccgaagccatgctcacttgccggcataagttcccagacgaggattcttatcagaagtttattccttttatcggagtggtcaaggttggactggtggaagatagcccaagcactgcgggggacggggatgactccccagtcgtgagcctgactgtgccatctactagcccaccctcctcttccggtttgagtcgagacgccacagccacaccacctagttcccctagtatgagctctgcacttgccatcgttggaagccctaattccccctatggcgacgtcatcggattgcaggttgattattggctggggcatccaggagaacgaaggcgcgaaggagacaagagggacgccagctccaaaaacaccctgaagtcggttttccgatccgtccaagtatcacgactaccccattccggggaagcccagctgagcggaaccatggcaatgactgtggtgactaaggagaagaataaaaaggtacccactatctttctcagcaagaaacccagagaaaaggaggtggattccaagtcacaagttatcgaaggcatatcccggttaatctgctcagccaagcaacagcagacaatgcttagagtgtccatagatggcgtggagtggtctgatataaaatttttccagctcgccgcccagtggcccacccacgtaaagcatttcccggtcgggttgttctccggttctaaagccacatag

SEQ ID NO: 14456 - DNA, 546 bp, synthetic construct
  source 1..546: mol_type = other DNA; note = Synthetic coding sequence
atggaggagatacccgcacaagaagccgccggaagcccaagagttcagttccagtccctggagacccagagtgaatgtttgagtcctgaaccccaattcgtccaggacacagacatggaacagggtctgactggagctcctcctgtgccccaggtcccagccttgccccgggagggtagtcctggcgaccaagctgccgcgctgctgactgccagataccaggaattcgtgacctttgaggatgtcgccgtgcatctaaccagagaagagtggggctatctcgatcccgttcaaagagatctctatcgggaggtcatgctcgagaactacgggaacgtggtgagcctcggaatcctgctccggcttccaaccactcgaattcattcagtcaactcctgcccagcactgagccatacacaagcaagtgctttttcaggtgagacactggccgtcttgaccgccggaatatctaagagatggccaaagtacagacttcccatcgatatcgctaggccatgttcggagacccccttccctcggttatag

SEQ ID NO: 14457 - DNA, 1410 bp, synthetic construct
  source 1..1410: mol_type = other DNA; note = Synthetic coding sequence
atggtgctggagggcaaccctgaggtgggctcccctagaacatcagacctgcagcatcgaggcaataaaggaagttgtgttcttagctccccaggagaagatgcccagccaggggaagaacccatcaagtatggtgaactgatcgtgctgggatgctgcgaagaaggtggggaggaaacagaggctcaacggggggaggtcactggcccaagggctcattcatgttacaacgggtgccttgcatcaggtgataagggtcgacgtcgaagcagattagcactttcccgcaggagccacgccaatggcgtcaaaccggacgtgatgcaccacataagcacccctttggtgtccaaggcattgagtaacagaggccaacactcaattagttatactttatcaaggagccactcagtcatcgtggaatacacccacgatagtgataccgacatgttccagattggacgtagcactgagaatatgatcgattttgtggtgactgatacaagcccaggcggcggagctgcggagggcccaagcgcgcagtctacgatctcacggtatgcctgtaggattctgtgcgacagaagacccccctacacggccaggatctacgccgcgggctttgatgcatccagtaatattttcctgggcgaacgcgccgccaaatggaggacaccagacggtttgatggatggacttactactaatggagtgctggtaatgcatcctgcggggggtttttctgaggacagtgccccgggagtctggcgtgagattagcgtctgtgggaacgtttacacactgagagactcccggagcgcccagcaaagagggaaacttgtcgaaaacgagagcaatgtgcttcaagacggatcccttatcgatttatgtggagctaccctcctgtggcgcacccccgccgggttgcttagagccccgaccctcaaacagcttgaagctcagcgccaggaagctaacgctgcgcgaccacaatgtccagtcgggctgagcactctcgccttcccttcaccagcgagaggccgaactgcacctgacaagcagcagccgtgggtgtacgtgcgatgcggccacgtgcatggttatcacggctgggggtgccgcagagagcgtgggccgcaggagagggaatgcccgctgtgtaggttggtgggaccatacgtgccactgtggctcggtcaagaggctggactgtgcctcgaccctggacccccttcacacgcattcgccccatgcggccatgtgtgttcagaaaagacagcgcggtactgggcgcagaccccactaccacatgggacccatgcgtttcatgcagcctgcccgttctgcggcgcctggctaacgggcgaacatgggtgcgtgcgcctgatattccaaggcccgctagactag

SEQ ID NO: 14458 - DNA, 3312 bp, synthetic construct
  source 1..3312: mol_type = other DNA; note = Synthetic coding sequence
atggccggtgccagcgtcaaagtggcggtgcgcgtgagaccgttcaacgcccgggaaacaagccaggatgccaaatgtgtggtgtccatgcaggggaacactacatctataatcaatcctaaacaatctaaggatgctcctaaatcctttacgttcgattacagctactggtcccacacctccactgaagacccacagttcgcgagtcaacagcaggtatatagggatatcggcgaagaaatgctgttgcatgcattcgagggatacaatgtgtgcatcttcgcgtatggtcagacaggagccgggaaaagttacactatgatgggcagacaagagccaggccagcagggaatcgtgccacagttgtgcgaggatctgttcagtcgcgtctctgagaaccaaagtgcccagctgtcatatagcgttgaggtgagttacatggagatatactgcgagagagttcgcgatttgctcaatcctaagtcccgtgggagcctgcgggttcgcgaacaccctatcctaggtccttacgtgcaggacctctcaaaactagcggttacttcatatgcggacatcgcggacctcatggattgtggaaacaaagctcgcaccgtggctgctaccaacatgaatgagacatctagcaggtctcacgcagtgttcaccatcgtattcacccagcggtgtcacgaccaactgactggtctggacagcgagaaggtgagtaaaatcagtctggtggatttggcaggcagtgagcgggccgacagctctggcgcgcgcgggatgaggttaaaagaaggcgcaaatatcaacaagagcctgactacactgggcaaggtgatttcagcgctcgccgatatgcaatctaagaagaggaagtcagatttcattccttacagagacagcgtgcttacttggctgctgaaagaaaatctgggaggcaactcaagaactgctatgatcgccgctttatcacccgcagatattaactacgaggagacactctctacactgaggtacgctgatagaaccaagcaaatcaggtgtaacgccattatcaatgaggacccgaacgcacgcctcatcagggagctgcaggaggaggttgcccgccttagagaactgttgatggctcagggtttgagcgcatcagcattggagggacttaaaaccgaagaaggttcagtaaggggggctcttcccgcagtttcatctccccccgcgcctgtttctcccagctcccccaccacccacaacggcgagctggagccaagctttagcccaaacactgaatcccaaattggacctgaggaggcaatggagagactgcaagaaaccgagaagattatcgcagagctgaacgagacgtgggaggagaagctgcggaaaacagaggctcttcgcatggaacgggaagccctgttagccgagatgggagtagccgtgcgcgaggacggcggcaccgtgggggtcttttcacctaagaaaacaccccatctcgtgaatctgaatgaggacccactgatgagtgaatgtctgctgtatcatatcaaagacggcgttacacgagttggccaagtggatatggacatcaagctgaccggtcagttcatcagagaacagcactgtctgtttaggagcatcccacagcccgacggcgaggtagtggtgaccttggaaccttgtgaaggcgcagagacctacgtgaacggtaaactagtgacggaacctctggtgctcaaatccggcaatcgcatcgtgatgggcaagaatcatgtttttcggttcaatcatccggagcaggctcgactagagcgggagaggggcgttccacctccgcccggtcccccgtctgaacctgtggattggaattttgcacaaaaagaactcctcgagcaacagggcattgatatcaagctggagatggaaaagcgcctgcaggacctcgaaaaccaatacaggaaagagaaggaagaagcagatttattattagagcaacagcggctgtatgccgattctgactccggggacgacagtgataagcgcagctgcgaagagtcgtggaggctaatctcaagcctgagagaacaactgccccccacaacggttcagaccatcgtcaaacgatgtggtctcccaagtagtggcaaaagacgagcccctaggcgggtgtatcagattcctcagagacgcaggctgcagggaaaggatcccaggtgggcaacaatggccgatctgaagatgcaggccgtcaaggagatatgctatgaggttgctctcgcagattttcgccacggaagggctgagatagaggctctcgcggccctgaagatgcgggagctgtgcaggacctacggcaagccagacggccccggtgatgcatggcgcgctgtagcccgtgacgtttgggacactgtaggcgaagaggagggtggcggcgctgggtcaggaggtggctctgaagaaggggcaaggggtgctgaagtcgaggacctgcgtgcccatatcgacaagctgaccggcattttacaggaagttaagcttcagaactcttccaaggacagagaactgcaagcgcttagggatcggatgctgcgcatggagcgcgttattcccctcgcacaggatcacgaggacgagaacgaggagggaggagaggtgccatgggcacctcctgagggatccgaagccgctgaggaggcagcaccgagcgaccgaatgcctagtgccaggccaccttcacctcccctgtcttcatgggagcgggtgagccggcttatggaggaagatcccgctttccgccgaggccgccttaggtggctcaagcaggagcagctaagactgcaggggctgcaaggcagcggcgggcgcggaggaggcttgagacgaccccctgctagattcgtgccaccgcacgattgcaaactgcgctttccttttaagtcaaacccccagcaccgggaatcctggcccggcatgggaagtggcgaggccccaacccctttgcagccgccagaggaagtaacgccccatccggccacacctgcacggcgccctccatcacctcggagatcccaccatccccggaggaattctctggatggaggcggtaggtcaagaggcgccggatccgcccagcccgaaccacagcatttccaacctaaaaagcataattcatatcctcagccccctcagccctaccctgcccagcgaccccccgggccaagatatcccccctacactacccctcctcggatgagacgtcagcgtagcgcgccagacttgaaggagagcggggcagcagtgtag

SEQ ID NO: 14459 - DNA, 1260 bp, synthetic construct
  source 1..1260: mol_type = other DNA; note = Synthetic coding sequence
atggccgagcctgtaggcaaaagagggcgatggagcggcggctcaggagctggccggggggggcgcggcgggtggggcggcaggggtcgcagaccccgggcacagagatcgcctagtagggggaccctcgatgtggtaagcgtggacctggttactgacagcgacgaagaaatcttggaggtagccactgctagaggggccgctgacgaggtggaggtagagcctcctgaaccccccggcccagtggcctcacgggataattctaattctgacagtgagggcgaggaccggcgtcccgctggcccgccccgcgaacctgtacgtaggaggagacgactcgtactggaccctggggaggccccgttagtgcctgtgtattcaggaaaagtgaaatcgagtctgcgattgattcctgacgatttatcccttctgaagttgtatccaccaggcgacgaggaggaagccgagctggctgactcatccggactttatcacgagggatccccctcacctggctccccatggaaaaccaaacttcgaaccaaggataaggaggagaaaaagaaaacggagtttctggatctcgataattcacccctgtccccaccatcgccgcggacaaagagccgcactcacactagagctttaaagaagctgtccgaggtgaacaagcggctgcaggacctgcgtagttgtctctcaccgaagccaccccaaggccaggagcaacaagggcaggaggacgaggtagtcctggtcgagggcccaaccctgcctgagacacccaggctgttcccccttaagatccgctgtcgagcagatctcgttcgactgcctcttaggatgtcagagcctctccaatccgttgtcgatcatatggctacacatctgggtgttagcccttcacggatattgctgctgttcggtgaaacagaactttctcccaccgctacaccccggaccttgaagctgggcgtcgccgatataatcgactgtgtggtgcttacaagctcgccagaagccacagagacatcccaacagttgcagctccgggtacaaggtaaggagaaacaccagacactggaggtttctctctcaagggattctccgttaaaaaccctgatgagccactatgaagaagccatggggctgtcaggccgaaagctgtcatttttctttgatggaacaaaactgtcaggtcgagaactgcctgctgacctgggcatggagagtggcgatctcattgaggtgtggggctag

SEQ ID NO: 14460 - DNA, 384 bp, synthetic construct
  source 1..384: mol_type = other DNA; note = Synthetic coding sequence
atgaggcccctggatatcgtggaactagccgagcctgaggaagtcgaggtccttgagcccgaagaagactttgagcagttcttgctgcctgtcatcaatgagatgagggaagacattgcaagtctgacccgtgagcacggaagggcgtaccttagaaatcgcagcaaactctgggagatggacaatatgcttattcagatcaaaacacaggtagaggcgtctgaggaatccgccctcaatcaccttcagaatccaggggatgccgcagaggggcgggctgctaagcggtgcgaaaaggctgaagagaaagctaaggaaatcgcaaagatggccgaaatgctggttgaattggtgcgccgaatcgagaagtccgagtctagctag

SEQ ID NO: 14461 - DNA, 1263 bp, synthetic construct
  source 1..1263: mol_type = other DNA; note = Synthetic coding sequence
atgcccttgcaggtcagcgactattcatggcaacaaaccaagacagccgtatttctgtcactacctctcaagggagtctgcgtcagagataccgatgttttctgtacagagaactacctgaaagttaatttccctccctttttgttcgaagcctttctgtacgcgcccatcgacgatgaatccagcaaggccaagatcggtaacgacaccattgtgttcacactttacaagaaagaggctgctatgtgggagaccctctccgtaaccggtgtggacaaggagatgatgcagagaatacgggaaaagtcaattctgcaggcccaagagcgcgctaaggaggctaccgaggccaaggccgctgctaagagagaggatcagaaatacgcactgagcgttatgatgaaaattgaagaagaagaaagaaaaaagattgaagatatgaaggaaaatgaaaggattaaggctactaaagccttagaggcgtggaaggagtatcagcgaaaggccgaggaacagaaaaagatccagcgcgaagagaagctctgccagaaggagaaacagatcaaggaggaacgcaaaaagataaaatacaagagtctgacccgcaacttggccagcagaaacctggcacccaaaggaagaaactctgagaacatttttaccgagaagctcaaggaagacagtatccctgcgccgagatctgtgggaagtatcaagataaacttcaccccgagggtgttcccaaccgcacttcgggagtcccaggtcgcagaggaggaggagtggctccacaagcaggcagaggccaggcgggccatgaacaccgacattgctgaactgtgtgacctcaaggaggaagagaaaaaccccgaatggcttaaagacaaggggaacaagctgttcgcaaccgaaaactatttggccgctatcaacgcctataacctggcgattaggctcaacaacaagatgcctcttctatacctcaatcgggcagcttgtcacttgaagcttaagaatctccacaaagccattgaggactcctccaaagctctggagcttctcatgccacctgtgactgataacgccaacgctcggatgaaggcgcacgttcgtagagggaccgcattttgccagctggagctgtacgtagaagggttgcaggactacgaagctgctttgaagattgatcctagtaataagattgtacagattgatgcagagaaaatcagaaacgtgatccagggaactgagttgaaatcgtag

SEQ ID NO: 14462 - DNA, 348 bp, synthetic construct
  source 1..348: mol_type = other DNA; note = Synthetic coding sequence
atgcgctacgtggctagctacctgctagcagccctcggagggaactccagccctagcgccaaagacattaagaaaattcttgactcggtggggattgaggctgatgacgacaggcttaacaaggtgatctcagagctgaatgggaaaaacattgaggacgtaattgcgcagggaattggtaagctcgcctccgtccccgctggcggcgctgtcgcagtctccgccgcaccagggagcgcagctccagcagcgggcagcgccccggcggctgcagaagagaaaaaagatgaaaagaaggaggaatctgaagagtccgacgatgacatgggtttcggacttttcgactag

SEQ ID NO: 14463 - DNA, 1233 bp, synthetic construct
  source 1..1233: mol_type = other DNA; note = Synthetic coding sequence
ctgaacagggcgtgtttttgcgttaccggggtccccgagctggaggtcatctgcggcctgcaacaagctgagtggccaagactcggattgtctcacctgggcgccgtgggcggcggatggggtgggctgcccacctccacttgggtctccctgcatacccaggaagtggatttggcctccgaagtggcactggaagtggtgaggaccgccgagccgggcgtttggctagaagctcaagcccccgtcgcacttgtggcccagcctgaacccctgcccgccactgcaggcgtcaaacgcgaatctgttggaatggaggtggcggtgttaaccgatgaccctctgcctgttgtggaccaacagcaagtattggccaggctgcagctacttgagcagcaggtagtggggggcgagcaagctaaaaacaaagatctgaaagaaaagcacaagaggaggaagcgctacgccgacgaacgcaggaagcagttagtcgctgctctccagaattccgatgaggacagtggagattgggtcctcctgaacgtgtacgactccatccaagaggaagtaagagcgaagagtaagttattggagaagatgcaacgaaagctgcgggcggccgaagttgagattaaagatctgcagtccgagtttcaattggagaaaatcgattatctagctaccattcggaggcaggaacgagattccatgcttttgcaacagctgcttgaacaagtccaacccctgattcgtcgggattgcaattattctaacttagagaagatcctgagagagagctgctgggacgaggacaacgggttctggaaaattccacaccccgttattacaaagaccagcctgccagtggctgtctccacaggcccacagaataagcctgccagaaagacttcagctgctgacaatggcgagccaaatatggaagatgacagatatagactcatgctttcccggtctaacagcgaaaacattgcctcaaattacttccggtcaaaaagagcaagtcagattctgtctactgacgcacgtaagtctcttacacaccataactcccccccgggcctaagctgccctttgtccaacaacagcgctatcccccctacgcaagcccccgagatgcctcagccacggccgttccgcctggagtccctggatattcccttcaccaaggcaaaacggaaaaagtcaaaatcaaactttggatccgagcctctgtag

SEQ ID NO: 14464 - DNA, 1353 bp, synthetic construct
  source 1..1353: mol_type = other DNA; note = Synthetic coding sequence
atgcgggaatgtatcagcatccacgtcggacaagccggcgttcaaatcggcaacgcatgttgggagctgtactgcctcgagcatgggatccagcctgacggccagatgcccagcgacaagactattggtggaggcgatgactcatttaatacttttttttcagaaaccggcgccgggaagcacgtacctcgggctgttttcgtcgatctggagcccactgttgtcgacgaagttcgcaccggaacatataggcagcttttccatccagagcagctgataacaggcaaagaggatgcggccaacaattacgcccgcgggcactatacgatcggcaaggagatagtggatctggtcttggaccgcattcggaaactagccgacctgtgtacaggactgcagggctttctgattttccattcgttcggaggcgggacaggcagcggctttgcctccctcttaatggagcgcctgagtgtggattatggcaaaaagagcaagctggagtttgctatttatccggcccctcaggtgtccaccgctgtggtcgaaccatacaatagcatcctgaccacccacactacccttgagcatagcgactgtgcttttatggtggacaacgaggccatttacgatatttgccggcgcaatttagatatagagcgaccaacgtacactaaccttaacaggttaatcggccagattgttagctcaatcacggctagcctgcggttcgacggcgccctgaacgttgacctaaccgaattccaaacaaatctcgttccctaccctagaatacattttccactcgccacttatgctcctgtgattagtgcagaaaaagcataccacgagcagctcagcgtcgcagagattaccaatgcttgtttcgaaccagccaaccaaatggtaaaatgtgatccaagacatggcaaatacatggcttgttgcatgctttatcgtggggacgtcgttcccaaggatgtcaatgcagcaatcgccactattaaaacaaagcgaaccatccagttcgtggattggtgtccaacaggcttcaaggtggggattaattatcaaccccccaccgttgtgcctggaggagaccttgccaaggtgcagcgggcggtgtgtatgctatccaacacaacagcaatcgcggaggcgtgggcccggcttgaccataaatttgatctgatgtacgccaagcgggctttcgtgcactggtatgttggcgagggcatggaggaaggcgaattcagcgaggctcgggaggatctggcggccctggagaaggactatgaagaagtgggcgttgatagtgtggaggctgaagccgaagaaggagaggagtattag

SEQ ID NO: 14465 - DNA, 471 bp, synthetic construct
  source 1..471: mol_type = other DNA; note = Synthetic coding sequence
atgtcaggtggactgcttaaagccttacgctcagactcatatgtggaactgtcacaatatcgggaccaacactttcgtggagacaacgaagaacaagagaagctgctgaagaagagttgcacgctctacgtcggcaatcttagtttttacaccacagaggaacaaatctatgagttattttctaaatctggggatattaagaagatcatcatgggcctggataagatgaagaagacggcctgcggattttgctttgtcgagtattacagcagggccgacgctgaaaatgccatgcgatacattaacgggaccagattggacgataggattatcagaaccgactgggacgctggctttaaggaaggcagacagtacgggaggggccggtcagggggccaggtaagagatgagtatagacaagattacgatgccggccggggaggatatggtaagctggctcagaatcagtag

SEQ ID NO: 14466 - DNA, 996 bp, synthetic construct
  source 1..996: mol_type = other DNA; note = Synthetic coding sequence
atggggggcgagcaagaggaagaacgctttgatgggatgcttctggcaatggcccagcagcacgaaggcggggtccaggaacttgtgaatacctttttcagcttcctgaggagaaagaccgactttttcatcggcggggaagaaggcatggcagagaaactcattacccagacattttctcaccacaaccagctggcgcaaaagacccgtagagagaaacgggccagacaggaagccgaacgccgcgagaaggcagagagagctgcccggctggctaaggaggcaaaatctgaaacaagcgggccgcagatcaaagaactgaccgacgaggaggcagagcgattgcagttagagatcgatcagaaaaaagacgccgagaaccatgaggcccaactcaagaacggctcacttgactctcccggtaagcaggatactgaggaagatgaagaggaagacgagaaagacaaaggaaagctgaaacccaaccttggcaatggcgccgatcttcctaactatagatggacacagaccctgagcgagctggacctagccgttcccttttgcgtgaacttcagactcaagggaaaggatatggtcgtcgatattcaacggagacacctgagagtagggctgaagggacagcccgccatcatcgacggggagctctataacgaagtcaaggtggaggaatcatcctggctaatcgaagatggcaaagtggtgaccgtgcacttggagaagattaataaaatggagtggtggagtcgcctggtgtcaagtgaccctgaaatcaatactaaaaaaattaacccagagaattctaagctcagcgatctggatagcgagacccggtctatggtggagaaaatgatgtacgatcaacggcaaaagtcgatgggcctccccacatccgacgaacaaaagaagcaggagatcctcaagaagttcatggaccagcacccagagatggatttttcgaaagcaaagttcaactag

SEQ ID NO: 14467 - DNA, 1860 bp, synthetic construct
  source 1..1860: mol_type = other DNA; note = Synthetic coding sequence
atggccggcccaggcgtcccaggggcccctgccgcgcgttggaagagacacatcgtgcgccaactgcggctccgggacaggacgcagaaagccctatttctggaactggtaccagcctacaaccaccttctcgaaaaagctgagctactggataaattctctaagaaactgcagccagagccgaattctgtgacgcctaccacacatcagggcccctgggaggaatccgaactggatagcgaccaagtcccgtcacttgtcgccctgagagtaaagtggcaagaggaggaagaaggcctgagactggtgtgcggtgagatggcctatcaggtagttgaaaagggggccgccctagggaccctcgagtccgagttgcagcagcggcagagcagactggccgccttggaggctcgggtggcacagctgcgcgaagcacgcgcacagcaagctcagcaggtggaggaatggcgagctcaaaacgcagtccagcgcgctgcctatgaggctctgagagcccacgttggtctgcgcgaagccgcactgagaaggttacaggaagaagcgagggatttgctggaacgcttggttcagagaaaagcaagagcagcagctgagcgcaacttgaggaacgaaagaagagagcgcgctaagcaagctcgtgtcagccaggaactaaagaaggccgccaaacgcaccgtatctattagcgaaggcccggatacattgggagacggcatgagagaacgccgcgagaccctcgccctggcgccagagcccgagccactggaaaaggaagcctgtgagaagtggaagagaccgttcaggagtgcctctgctacgtctttgaccctgtcacactgtgtagatgtagttaaaggactcttagacttcaaaaaaagaagggggcactccatcggaggtgctccagagcagcgataccaaatcattccagtatgcgtagccgcccgtctaccgacacgtgcccaggacgttcttgacgcacatctgtctgaagtgaacgcagtgcgattcggccccaacagcagcctgttagcgactggcggggccgaccggctgatccacttgtggaatgtggtcgggagccgcctggaggccaatcagactctggaaggcgctggtgggagcattacctctgtcgactttgatccatctgggtatcaggtcctagccgctacttacaaccaggccgctcagttatggaaggtaggtgaggcccaaagcaaagagacactgtcggggcacaaggacaaggttactgcggcgaaattcaaactgacccgccaccaggccgtgaccggatcacgggaccggacagttaaggaatgggatctgggccgcgcctactgcagcaggaccatcaacgtgctgtcttattgtaatgacgtggtttgtggggaccacatcattatctctgggcataacgatcagaagattcgcttttgggactcccgggggccccactgtacacaggtgatcccggtccagggccgggttacgtctctgtccctatcacacgaccagctccacctgctgtcctgttctcgggataatacactgaaggttatagatcttagggtctcgaacatccggcaggtttttagggcagacggcttcaagtgcggcagtgattggaccaaggccgtatttagccctgacaggagctacgcccttgctggcagctgcgacggagccctgtacatctgggatgtggacaccggcaagctggagagcagattgcagggaccccattgtgcagcggtaaacgctgtggcttggtgctacagcggttcacatatggtgtcagtggaccagggtaggaaggtggtgctttggcagtag

SEQ ID NO: 14468 - DNA, 5049 bp, synthetic construct
  source 1..5049: mol_type = other DNA; note = Synthetic coding sequence
atggagggaaatgggacagagaactcctgtagtagaacccggggatggcttcagcaggacaatgacgccaagccatggctgtggaaattctctaactgcttcagtaggccagagcagacactgccgcactctcctcaaacaaaagagtatatggagaataaaaaggtcgccgtcgagttgaaagacgtgccatcacctctgcacgcggggtccaagctgtttccggcagtgcccctccccgacatacggagcctgcagcaaccaaagatccagctctcaagcgtccccaaagtgagctgctgcgcccattgtcccaacgaacctagcacttcccccatgcgcttcgggggaggcggcggcggaagcgggggcacatcctctctcatacaccctggtgcgctcctcgactcccagagcacccgcaccataacctgtcaagtcggctctggctttgccttccagtctgcgtcaagcctgcaaaacgcctccgcccgaaacaatctcgcgggcattgcgagcgactttccctcaatgtgtcttgagagcaatctgtcttcttgcaaacacctgccatgttgtggaaagctccatttccagtcctgccacggtaatgtgcataagctgcaccaattcccttcactgcagggttgcacaagcgccggttacttcccctgctctgattttacttccggggcaccaggccacctagaggagcacatctctcagtccgaactgaccccacacttatgcaccaattctttacacctcaatgtggtgccacccgtctgccttaaaggaagcctgtattgcgaggattgtctgaataaaccagctcgcaacagcataattgatgccgctaaggtgtggcccaatatcccccccccaaacactcagccagcacctcttgcagttccactctgcaatggctgtggcactaaaggaaccggcaaagaaaccacccttttactggcaacatctctgggaaaagctgctagcaagtttggatcgcctgaagttgccgtggctggacaggtgctcgaaaatctaccaccgattggtgtgttctgggatatcgagaattgctcagttcccagcggaaggagcgccaccgcagtggtccagaggatccgagaaaagttctttaaaggacaccgcgaagcagagttcatctgtgtttgcgacatcagtaaagagaacaaagaggttattcaagagctgaacaattgtcaggtgacggtggcacacattaacgccactgcgaaaaatgctgccgatgataagctgaggcagtcattgaggaggtttgccaacacccacactgcccctgctacagttgtgctggtctctaccgacgtcaatttcgccttggaactgtctgacctgcggcacagacacgggtttcacatcattttggttcataaaaatcaggcgtcagaggccctgttgcaccatgccaacgaattgatacggttcgaggagttcatctcagatttgcctccccgtctgccactcaagatgcctcagtgtcatacactgctctacgtttataacctgcccgcaaacaaggacgggaagagcgtcagcaaccgcctacgaaggctatcagacaactgtggtggtaaggtgctcagcataaccggctgttctgccatactcagattcattaaccaggattctgccgagcgggcccaaaaaagaatggaaaatgaggacgtgtttggcaaccgcattatcgtgtccttcacccctaagaaccgagagctctgtgagacaaaatcttcaaacgccatcgcggataaggtgaaatctcccaagaagctaaaaaaccctaagctctgtttaatcaaggatgcttcagaacagtcttcttctgctaaggcaacccctggtaaaggttctcaggctaatagtggctcagccacgaagaatacaaatgtcaaatcccttcaggagctgtgccgaatggagtctaagactggacacaggaactccgagcatcaacaggggcatcttaggttggtggtgcccacccatggcaactcttctgctgcggtgtctacccccaagaattctggtgttgctgaacctgtctacaagacatcacagaaaaaagaaaacttaagcgctagaagcgtgacatcctcacctgtggagaagaaggataaagaggagactgtatttcaagttagctacccatctgctttctccaaactggtcgcttccaggcaggtgtcacccttattggccagtcaatcatggagctcgagatctatgagccctaatctgctgaaccgtgcttctcctttagccttcaacatcgccaacagcagtagtgaagctgattgtccagaccccttcgcaaatggagcagacgtccaggtctctaacattgactacaggctcagtcgaaaggagcttcagcagcttttgcaggaggcttttgcacgccatggaaaggtgaaatccgtcgagttgagccctcacacagattaccagctcaaagctgtggtccagatggagaacctacaggatgctataggggctgttaattcactgcatcgttataagatcgggtcaaagaaaatcctggtgagtctggctacgggcgcggcgagcaagtccctttcgctgctctcagcagagacaatgagtgtgttgcaggacgcccccgcttgctgtctccccctttttaagttcacagatatatacgaaaagaagttcggacacaaactgaacgtaagtgacctgtacaagcttacggatactgtcgcaatacgggaacagggtaatggcagacttgtttgtttgctgccgtcttctcaagccaggcagtcaccattaggaagttcccagtcacacgacggttcttccactaactgtagtccgattatttttgaagaattggagtaccacgaaccagtgtgccggcagcactgttctaacaaggattttagtgaacatgaatttgatcctgactcatataaaataccctttgtgatattatcccttaaaacctttgccccacaggtgcattctctacttcagacacacgagggtacagtgcccctcctggacccttggctgctaagatcaaaatcaccggtaggaaatccgcagctgatccaattttcaagagaggtgattgatctcctcaagtcacagccatcctgtgtaatacccattagtcattttatccctagctatcatcaccatttcgctaagcagtgccgggtgtcagactacgggtactctaaactcatcgaactgctggaagctgtcccacacgtgcttcagatactgggtatgggctccaaacggcttttgactttaacccaccgcgcccaggtgaaaaggttcacgcaagatcttctcaaattgctgaaatcacaagctagcaagcaggtaattgttagggagttttcccaggcctatcattggtgtttttccaaggattgggatgtcactgaatatggggtctgcgaactgatagacattgtcagcgagatcccggacacaacaatctgcctgagtcagcaggacaacgaaatggtaatatgcatccccaaacgggaaagaacccaggatgaaatcgagcggacaaagcaatttagcaaggatgtcgttgatttgctgcggcatcaaccacacttcaggatgcctttcaataaattcatccccagctatcaccaccattttgggaggcagtgtaagctcgcctactacgggttcaccaaactgctcgagctctttgaggcaatcccagacacgttacaggtactcgagtgtggcgaagaaaagattttgacgcttaccgaggtagagcgctttaaggcccttgcggctcaattcgtcaagttactgcgaagccagaaggataactgtcttatgatgacagacctgctgactgagtacgcaaaaacatttggatatacgttcagacttcaggattatgatgttagctctatcagcgccttgactcaaaagctatgtcatgttgtcaaagttgcagatatcgaaagtggccggcaaatacagctgatcaatcgcaaatccctccggtcactgacagctcagcttttagtgctcctgatgtcctgggaggggacaactcatctctcggtggaagagttaaaaagacactacgaatctacccacaacaccccactcaacccttgtgagtacggtttcatgactttgactgagctccttaaatcactgccatatctcgtggaggtcttcaccaatgacaaaatggaggagtgtgtcaagctgactagtttgtacctctttgccaaaaacgtcaggtcattgttgcatacctatcattaccagcagatattcctccatgagttcagtatggcatatacaaaatacgtcggcgagacactgcagccaaaaacctatggccattcatcagtagaggagttgctgggcgcaatacctcaggtcgtgtggattaaggggcacggacacaagcgcattgtcgtgctaaaaaatgacatgaagtctagactttcgtcattatcattaagcccagccaaccacgaaaatcagccctcagagggcgagaggattctggaggtcccagagagtcacacggctagtgaattgaaactgggtgctgacggaagcgggccgtctcacacagaacaggaactcctaaggttaaccgatgactcaccagtggacctgttatgcgccccagttcccagctgcctcccatccccacagcttaggccagatccggtgatcctccagagtgctgatctgatccagtttgaggagcgcccacaagaacccagcgagattatgattcttaaccaggaggagaaaatggaaataccgatcccaggtaagtcaaaaacacttacctcagacagttccagttcttgcatctctgcagcagtgcctgtccccccgtgcccatcatccgaaactagcgaatcgttactcagtaaggacccagttgaaagcccagccaagaaacagcccaagaatcgagttaagctcgccgcaaattttagcctggcccctatcaccaagctgtag

SEQ ID NO: 14469 - DNA, 735 bp, synthetic construct
  source 1..735: mol_type = other DNA; note = Synthetic coding sequence
gggggcgggtatgatctaaatctgttcgctagtccacccgatagcaatttcgtatgctcagtgtgtcacggcgtgttgaagcggcctgcgagactgccttgtagccacatattctgcaagaaatgtatactccggtggttggcacgtcaaaaaacttgtccctgttgcaggaaggaggtgaagcggaagaaagtggtgcatatgaataaattgcggaaaaccataggacgactggaagtaaagtgtaagaacgccgacgccggttgcatcgtcacatgtcctctggcgcataggaaaggacaccaggatagttgtccttttgagttaacggcttgtccgaatgaggggtgcacctcccaggtcccgagaggaactttggccgaacataggcagcattgccagcagggctcgcaacagcggtgtccacttggatgcggggccactctggaccctgcagagcgcgctcgacacaactgctaccgtgagttgcacaacgcttggagtgtgagacaggagaggaggagacccttgttgctttcactcctgcgacgagtgagatggctggatcaagcaacctctgtcgtgagaagggaattggctgaactttccaacttcctcgaggaggacactgctctgctggagggggcccctcaagaagaggctgaggccgcccccgaggggaatgtcggggccgaagttgtgggcgagccacgggccaacatcccctgtaagtag

SEQ ID NO: 14470 - DNA, 705 bp, synthetic construct
  source 1..705: mol_type = other DNA; note = Synthetic coding sequence
ttgccctgtaagcgatgtcggccctcagtgtactccctcagctacataaaacgtgggaaaacacgcaattacctttatccaatatggtctccatacgcctattacctctattgttacaaatatagaatcacactgcgagagaaaatgttgccccgatgctacaaaagcattacatacaaagaggaggaagatctgacattgcagcctcgatcatgtcttcaatgcgaaagtctggtgggacttcaagagggcaagtctaccgagcaagggaatcacgatcaattgaaagaactctacagtgccggcaacctgacggtgctggcaacggatccccttctgcatcaggacccagtgcagctcgatttccactttaggctgactagccagacttctgcacattggcacggccttctgtgcgatagacggctgttcctggacataccatatcaggcactagatcaggggaaccgagagtctctgaccgcaaccttggagtatgtggaagaaaagacgaacgtggactctgtctttgttaactttcagaacgatcgcaatgacaggggtgcactgttgcgcgccttcagttacatgggtttcgaggtggtaagacccgatcatcccgcccttcccccacttgacaacgtcatcttcatggtgtacccccttgaacgcgatgtgggccatttgccctctgagcccccttag

SEQ ID NO: 14471 - DNA, 2403 bp, synthetic construct
  source 1..2403: mol_type = other DNA; note = Synthetic coding sequence
atggcagcagcggcctccgtgactgggagagtgacttgggcagcgagcccgatgagatccctaggcctgggccgccgactgtctcttcctggtcccagactggatgcagtaaccgctgcggtcaaccccagcctttccgatcatgggaatggcctcgggagggggacccgggggtctggttgctcaggaggttctttagtggccgactggggcggcggcgccgcagctgctgccgctgttgccctggcgttggcccctgctcttagcaccatgaggagaggttcttcagagtctgaactcgctgctcgctgggaggcagaggcggtagctgcggccaaagcagccgccaaggccgaggctgaagcgacagccgaaaccgtggcggaacaggtacgagttgatgctggggcggccggcgagccagaatgtaaggccggcgaggagcagccaaaggtactggccccagcgcctgcgcaaccctctgccgccgaggagggcaatacacaagtgctgcagcggccccccccaacgttaccaccaagcaagcctaaacccgtgcaaggcctctgtccacatggaaaacctcgcgacaagggcaggtcatgcaaaagatcctcaggccatgggtcaggggagaacggttcacaacgtcctgtcaccgtcgatagtagtaaagcccgaaccagtttggacgccctgaagatctcaatccgccagctaaagtggaaggagttcccgttcggtcgtcggctcccctgcgacatctattggcacggggtaagttttcacgacaacgacattttttctggacaggttaacaagttcccaggtatgacggagatggtacgtaaaataacacttagcagagcagtgaggacgatgcaaaacctgtttcccgaagagtataatttctacccgaggtcatggatcctcccagatgaattccagctgttcgtggcccaggtgcaaatggtgaaagacgatgatccctcgtggaagcctacatttatcgtcaaaccggacggaggttgtcagggagatggcatctacctcattaaagatcctagtgacattcgcttagccggcactctgcagtcaaggccagccgtggtgcaggaatacatctgcaagccccttctcattgataagcttaaatttgacattcggctgtatgttctccttaaatccctggatcctttggagatttacattgccaaggacggattgtcccggttttgcacagagccctatcaggaacccacccctaaaaacctccacaggatatttatgcaccttacgaattatagtctgaatatccacagtggcaattttatccacagcgactccgcgtctactggctccaagcgaacctttagctctattctctgcagactaagcagtaagggcgttgatatcaagaaggtctggtccgacatcatttccgtggtaattaaaacagtaatcgccctgacaccggaactcaaggttttctaccagtctgacattccaactggccgtccaggacccacctgcttccagattttaggattcgatattctgttgatgaaaaacctcaagcctattcttctcgaggttaatgctaatccctccatgcggattgagcatgagcacgaattgtcgccaggcgtgtttgagaacgtgcctagtttggtcgatgaggaggtgaaggtagcagtgatcagggacacactgcggctaatggacccactgaaaaaaaagcgcgagaaccagagccagcagctcgaaaagcctttcgcaggaaaggaggatgctctggatggagagctgacaagcgcacctgattgcaacgctaaccccgaagcacatttgccaagcatctgcctcaagcaggtcttcccgaagtacgctaagcagttcaactatctgcgtttggtggatcgaatggccaatctctttatacggttcttgggcattaaaggaaccatgaaactaggccccactggcttcaggacattcatacggagttgtaaactgagttcttctagcctgtctatggctgcagttgatatcctgtacattgatatcaccaggagatggaactccatgacactggatcagagagactccggcatgtgcctccaggccttcgtggaggcatttttcttcttggcccagcgcaagtttaagatgttgccattacacgagcaggtggcatccctgatcgacttatgcgaatatcacctgtcacttctagatgaaaaacgcttggtgtgtggccggggcgtcccctctggaggccggccaccccaccgcggtcctcctcaggaaccatctccttctgcgcaacctgccggcgacaacccaccaccaagaacctcctgtgcaaataaactgagccaccccagacatactctgtcatag

SEQ ID NO: 14472 - DNA, 981 bp, synthetic construct
  source 1..981: mol_type = other DNA; note = Synthetic coding sequence
atgagggagtgtatctctatccatgtcgggcaggcaggcgtacagatcggcaacgcatgttgggagctctactgtcttgaacacggcatccagccggacggacagatgccatcggacaaaactatcggaggtggcgacgacagctttaatacatttttcagcgagacgggcgcaggcaagcatgtccctcgcgcggtttttgtcgacctcgaaccaacggtgatagacgaggtgcgcacaggtacctacaggcagctattccatccagagcaacttatcactggaaaagaggacgctgccaacaactatgccagaggccattacaccatcggcaaggagattattgacctggttctagatcggatccggaaattaaaaagttttttcgcaacgaagccccgcatccattttccattggccacttacgctcctgtgatctccgcagagaaggcctaccatgaacagctgacagtcgctgaaatcaccaatgcatgcttcgagcctgctaaccaaatggtgaagtgtgatccgagacacggaaagtacatggcttgctgcctgctgtacaggggggatgtggttcccaaggacgtgaacgcagcaattgctaccatcaaaacgaaacgaacaattcaattcgtggactggtgccctaccgggtttaaagtcggtattaattaccagccaccaactgtggtgccaggaggtgaccttgctaaggtccagagggcagtttgcatgttgagcaatactacagccgtcgcagaagcttgggcccgacttgatcataagttcgacttgatgcccctgagaagaatcatgaggcgactggaacagatcgtactcaccgagagaatgcgggtgaagagcataaatttgtgcgccgtcctactgcacagcttcgtgcttgagctctcttatttttgtagcgtcaacgtatactgcagaaaactgctgataaagctgaaatttccattctag

SEQ ID NO: 14473 - DNA, 1005 bp, synthetic construct
  source 1..1005: mol_type = other DNA; note = Synthetic coding sequence
atggttggacgggaaaaggagctgtccatccacttcgtgcccggcagctgcagactcgtggaggaggaggttaatatccctaaccgcagggtgcttgtcactggagccacggggctcttaggccgggccgtccataaggaatttcaacagaacaactggcatgccgttggctgcggtttccgcagagcccggcctaagtttgaacaggtcaaccttctggattcaaatgcggtgcaccacataatacacgacttccagccccacgtgatcgtgcactgcgccgcagagagacggcccgacgtcgttgagaatcaaccagacgctgcaagccagcttaacgtggatgctagtgggaatctcgccaaggaagcagctgccgttggcgcgtttttgatttacatctcttctgactacgttttcgatgggaccaacccaccatatcgcgaagaagatatccccgcacctctgaacctctatgggaagacaaagctagatggcgaaaaagcagtacttgaaaacaatctgggcgccgctgtactcaggatccccattctctacggtgaggtggaaaaactggaggagagcgccgtaacagtgatgtttgataaagtacagttctcgaacaaaagtgctaacatggatcattggcaacagcgatttccgacacacgtgaaggatgtggcgacagtctgcagacagctcgctgaaaaacgcatgctggatccctctattaaggggacttttcactggtctggaaatgaacagatgacaaagtacgaaatggcttgtgctattgctgacgcgtttaacctgccctcttcccatttgcgtccaattaccgatagtccagtgctaggcgcacaacgtccgcgaaacgctcagcttgactgctccaaactcgaaacattggggattggccagaggaccccatttaggatcggaatcaaggagagcttgtggcctttcctgatagacaagcggtggaggcagaccgtcttccactag

SEQ ID NO: 14474 - DNA, 513 bp, synthetic construct
  source 1..513: mol_type = other DNA; note = Synthetic coding sequence
atggcttctgaggctgagaagacattccatcgctttgccgcattcggggaatcctcgagctcagggaccgagatgaacaacaaaaacttcagtaagctatgtaaggattgcggcataatggatggcaagaccgtgacttcaacagacgtagacatcgtgttctccaaggtcaaggcaaagaatgcacgcactatcacatttcaacaattcaaagaagctgtgaaagaacttggccagaaacgctttaaaggcaagtctccagacgaagtcctggagaatatatatggtcttatggaaggaaaggatcctgccaccacgggggcaacaaaggcgacaactgtgggcgccgtggaccgactgactgacacaagcaagtatactggaactcacaaagaacgctttgatgaatccggtaaaggcaaaggaatagccggtcgcgaagagatgaccgataatactggctacgtgtccggttacaaaggaagcgggacttacgataagaaaacaaagtag

SEQ ID NO: 14475 - DNA, 3582 bp, synthetic construct
  source 1..3582: mol_type = other DNA; note = Synthetic coding sequence
atgtggagagtcaagaaactgtctctttccctcagcccctccccacaaaccggaaaaccctcgatgcggactcccctgcgggagctcacgctccagccgggagccttgactaattcggggaaacgcagtcccgcctgcagctctctgacaccttctctgtgtaaacttgggttacaggagggtagcaataacagctcgcccgtggacttcgtgaacaataaacggactgacctgagcagtgagcactttagccacagttcgaaatggctggaaacctgccagcatgaatccgatgaacagcccctggatcccattcctcaaatttcttcaacccctaagacatccgaggaagccgtggacccacttgggaactatatggtgaaaaccatcgttctggtaccaagccctttgggacagcaacaggacatgattttcgaggcccgtttggacaccatggcagagaccaacagcattagcctgaatggccctctccgaacagacgatctggtccgagaggaagtggccccctgtatgggggaccgatttagtgaggttgcagccgtaagtgagaagcccatatttcaggagtcccccagtcatctgttagaagaatctccccccaacccgtgctctgaacagctgcattgtagtaaagagagtttatcatcgcggacggaagcagtccgggaagacctcgtaccctcagaatctaacgccttcctgccaagttcagtgctctggctcagtccatcaacggccttagcagccgacttcagggttaatcacgttgatccagaagaggagatcgtggagcacggcgcaatggaagagcgggaaatgcgctttccaacccacccaaaagagtccgagactgaggaccaagctttggtgagttctgttgaagacatactgtcaacatgtctcacacccaacctggtggagatggagtctcaagaggcccccggccctgctgttgaagatgtaggccggattctgggaagcgacaccgaatcctggatgagtcctttggcatggctcgagaaaggggtgaacaccagcgtgatgcttgagaatctgaggcaatccctctccctgcccagcatgctaagggacgctgcaatcggcacaactcctttctcgacgtgcagcgtcgggacttggtttaccccaagtgccccccaggagaaatccaccaacacctcacagactggattggtgggtaccaagcacagcaccagcgagacggagcaactgctgtgtggcaggccaccagaccttactgctctttcacggcatgacctggaggataatctgctcagctccttagtgatcctggaagtcctgagccggcagctgcgcgactggaagagtcagctggccgtcccccacccagagacccaggattcttcaacccaaacagacacaagccacagtgggattaccaacaagctgcagcacctgaaggagtcccacgagatggggcaggcactgcagcaggctcgaaacgtgatgcagtcatgggtgttaatttctaaggagctgatctctcttttacatttaagtctgctccatttggaggaagacaagacaacagtaagtcaggagtcacgacgcgccgagacactagtgtgctgctgcttcgacctcctaaagaagctgagagcaaagctgcagagtctgaaggctgaacgcgaagaggctcgccacagagaagagatggcgctgcgcggtaaggatgctgcagagatagtgcttgaagctttttgcgcacatgcctcacagcggatttcccagcttgaacaggacctggcatccatgcgcgagttcagaggcctgctgaaagatgcccagacccaactggtgggtctccatgccaaacaggaagaactcgtgcagcaaacagtgagcctcacctcaactctgcagcaggactggcggagcatgcagctggactacactacgtggacggcgctgctctcccggagccggcagctgactgaaaagctaaccgtgaagtcccagcaggccttgcaggagagagacgtggccatcgaggagaaacaggaggtaagccgcgtgctggaacaagtgtcagcacagctggaagagtgtaaggggcagacggagcagctcgagctggaaaattcccggcttgctacagacctcagggcccaattgcagatactcgcaaacatggatagtcagctaaaggagttgcagtcccagcatactcattgtgcgcaggacctggccatgaaggacgaattgttgtgtcagctgactcaatccaacgaggagcaggcagcccagtggcagaaggaagagatggctctcaaacacatgcaggcagaactgcagcagcagcaggctgttcttgccaaagaggtcagggacctcaaagagaccttggagttcgccgatcaggagaaccaagtcgcccatctcgagttggggcaagttgagtgccagctcaagacaactctggaggtgcttcgagaaaggagcctgcagtgcgagaacctaaaagacacagttgaaaacttaactgccaagctcgcctctacaattgctgacaaccaggagcaggacctcgagaagactaggcaatactctcagaagcttggccttctcaccgagcaactgcagagcttaaccctctttttgcagacaaaactgaaggagaaaacagagcaggagaccctgctactatctacggcgtgcccaccgacacaggaacacccattgcccaatgatcggacattcctgggctcaatcctgactgctgtggccgacgaggagccagaatctacccccgtaccactgcttggctccgataagtcagctttcacgcgggtcgcgagcatggtctcccttcagcctgccgagacgcccggaatggaagagagcctggcagaaatgagtattatgacaacagagctgcaaagtctctgcagcctactacaggaaagcaaggaggaggctattagaacgctccagcgtaagatttgcgagttgcaggctagacttcaagcccaggaagagcaacaccaggaagtgcagaaggctaaggaggccgatatcgaaaagttgaatcaggcattatgcttgcgctataaaaatgaaaaggaattacaagaggttattcaacagcagaatgagaagatcctcgaacaaattgataagagtggggagctgatctctctacgggaagaagtcacacacctaacacgctccctccgccgggccgaaacggagactaaagtgctccaagaggctttggctgggcagttggactcgaattgccaacccatggctaccaactggatccaagagaaggtgtggctttcccaggaagtggacaagctcagagttatgttccttgaaatgaagaatgagaaggagaagcttatgattaaatttcagtctcatcgaaatatacttgaggagaatctgagacggtctgacaaggagctggagaagctggacgacattgttcaacacatctacaagacgctgctttctatccctgaagtggtgaggggatgcaaggaactccagggactgcttgaatttctctcttag

SEQ ID NO: 14476 - DNA, 9141 bp, synthetic construct
  source 1..9141: mol_type = other DNA; note = Synthetic coding sequence
atgcgcggcagaagaggtaggccacccaagcagcccgccgcaccagcagcggagcgatgtgcacctgccccgcctcccccccccccaccccctacttccgggccgattgggggcttacgttctcgacatagaggaagctctcgtggaaggtgggctgctgctcaggctgaagtcgcacctaaaacacgcctgtcctcccctcgcggggggtcaagcagccggaggaaaccccctccccctcctcctgcaccccccagtacttctgccccaggacgcggcggtcggggcgggggaggaggacgcactggtggcggtgggggcgggggccatttggcccgcacaaccgctgctcggcgggctgtgaacaaagtcgtatacgacgaccatgagtccgaggaggaagaggaggaggaagacatggttagcgaggaagaggaggaggaagacggcgacgccgaggaaacccaggattctgaagatgacgaggaggacgagatggaagaggacgatgacgattctgactaccccgaagagatggaagatgatgacgacgacgccagttactgcaccgaatcatcatttcgttcacatagcacctattcttcaacccccggccgaagaaaaccaagggtgcacaggcctagatcccccattctggaagagaaagatattcctccattggaattccccaagtcctctgaggacttgatggtacccaatgagcacatcatgaatgtaatcgctatctacgaggtcctgagaaactttggtacagtgctcagactgagccccttccgcttcgaggacttctgtgctgccctcgtgtcccaggaacagtgcacattaatggctgaaatgcatgtagtgctcctgaaagcagtcctccgcgaagaagatacctcaaatacgacattcggccccgcagatctcaaggattctgttaatagcactctctattttatcgacggtatgacctggcccgaagtgttacgcgtgtattgcgagagcgataaggaatatcaccatgtgctcccctaccaggaggctgaggactatccctatggccctgtggagaataagatcaaggtgttgcagttcttggtcgaccagttcttgaccaccaacattgccagagaggaactgatgtccgaaggagtgattcagtacgatgaccactgtcgagtatgtcataaactgggtgaccttctgtgctgcgaaacatgctccgccgtttaccacctggaatgcgtcaagccccccttggaagaggttccggaagacgaatggcagtgcgaagtctgcgtcgcccacaaagtgcccggtgtaactgactgcgtcgctgagattcaaaagaacaagccctacatccgacacgagcccataggatacgaccgatccagacgcaagtattggtttctaaatagaagacttattatcgaagaagataccgagaacgagaatgagaaaaagatctggtactattccactaaggtgcagctagctgaactcattgattgcctcgacaaagactattgggaggccgagctctgtaaaatactggaagaaatgcgcgaggagatacaccgccacatggacataactgaagacttgaccaataaggccagaggttcaaacaagagctttctggccgccgcaaacgaagaaatcctggagagtatacgtgcgaagaaaggcgacatcgataacgtcaagagccccgaggaaacagaaaaagataaaaacgagacagagaatgactctaaagatgcagagaagaatagagaggagttcgaagaccagtccctggagaaagactccgacgataagactcctgatgatgatccagaacaaggtaagtctgaagaacccaccgaggtaggagacaaagggaacagtgtctccgcaaacctgggggacaacacaacaaatgctacatccgaggagaccagtcctagcgagggcagatcacccgtcgggtgtctgtcagaaaccccggattcttcaaacatggccgaaaagaaggtggcatcagaactgcctcaggatgtgcccgaagagccaaacaagacgtgcgaatccagtaatacgtcggctaccacgaccagtatccagccaaaccttgagaacagtaatagtagttcggaattgaatagctcacaatccgaaagcgccaaagcagctgatgatcctgaaaacggcgagcgcgagtctcacacgccagtgtctattcaggaggaaatagtaggagattttaagtcggagaaatcaaatggcgaactgagcgaatcaccaggggcaggcaagggagctagcggcagcacccgtattatcacacgactgcggaaccctgacagcaagctgtctcagttgaagagccaacaagtggccgctgcggctcacgaagctaacaaactgttcaaggagggtaaggaggtcctagtggtgaactcacagggagagattagccggctctcaaccaagaaggaagttattatgaagggcaacatcaacaactacttcaaactcggacaggaagggaagtatcgggtctatcataatcaatacagcacgaattcctttgctctgaacaagcaccagcatagagaagatcatgataaacgacgccatctggcgcataagttctgtctgactcccgcaggggagttcaaatggaacgggtcggtacatggtagtaaggtgctgacaatttctacactccgccttactattactcagctggagaataacatccccagttcctttcttcatcccaattgggctagccaccgggctaactggattaaggccgtccagatgtgcagtaagccccgtgaatttgcactagcactggccatcctggaatgcgccgtgaaaccagttgtgatgctgccgatctggagagagagcctcgggcacaccagactgcataggatgacttcaatcgaaagagaagaaaaagagaaggttaaaaagaaagagaaaaaacaggaggaggaagaaaccatgcagcaggctacctgggtgaagtatacattccctgttaaacaccaggtctggaaacaaaaaggcgaagagtatcgcgtaaccggctacggcggatggtcctggatttccaaaacacacgtgtataggtttgtcccaaaactgcccgggaacacaaacgtcaactatcggaaatctcttgaaggtaccaagaacaatatggatgagaacatggatgagtctgataagaggaagtgctcgcgtagcccgaagaagattaaaatcgaaccagactcggagaaggatgaggttaagggctctgacgcagcaaaaggggcagaccagaacgaaatggatatctccaagatcactgagaaaaaggaccaggacgttaaggagctcttggattcagacagcgacaagccatgcaaggaggaaccaatggaggttgatgacgacatgaagacagaaagtcacgtaaattgccaggagtcttcacaggtagatgtggtgaatgtctctgaggggtttcacctgcggacatcttataagaaaaagaccaagagctctaaattagatggcctgttggagcgccggattaaacaattcacattagaggagaaacagagactggagaaaattaagcttgagggagggataaaggggatcggcaaaacttctacgaattcctcaaagaatctatctgagtccccagtcattaccaaggctaaagaaggctgccagtcggacagcatgcggcaggaacagagtcccaacgccaacaacgatcaacctgaggacctgattcagggctgttcagaaagtgacagttccgtcctgaggatgtctgacccaagccataccacaaacaaactctatcccaaggatcgcgtgttggacgacgtcagcataaggtctccagaaacaaagtgtccgaagcagaattcaattgagaatgatatagaagaaaaagtatcagacctcgcctcacgggggcaggagccctcgaagagcaagacaaaaggaaatgatttttttattgatgatagcaagttggcctctgccgatgacatcgggacccttatatgcaaaaataagaagcccctgatccaggaggaatccgacactattgtcagctcttctaagagcgctctgcactcctctgtgcccaaatccacaaacgaccgtgacgcaactcccctgagtcgtgcaatggattttgagggcaagctgggctgcgatagcgagtccaattctactctcgagaactcttcagatactgtgtctatccaagactcgtctgaagaagacatgatagttcagaattccaacgaatcaatcagtgagcagttcaggaccagggagcaggacgtcgaggtgttagaaccgttgaaatgcgagctggtgtctggtgaaagtacaggtaattgcgaggaccgtcttcctgtgaagggcacggaagctaacggcaaaaagcctagtcaacagaagaagctggaagagcggcctgtgaacaagtgcagtgaccaaattaagctgaagaacacgaccgataagaaaaataatgaaaacagggaatccgaaaagaagggacagcgcacctctaccttccaaattaatggaaaggataacaagccgaagatatacctcaagggcgaatgcctcaaagagatctccgagagtcgggttgtctcagggaatgtagaacctaaggtgaacaacatcaacaagattattcccgagaacgacatcaaatccctaacagttaaagagagcgctattcgacccttcatcaatggcgacgtgatcatggaagatttcaatgagcggaactcctccgagaccaagagccacctgctctcgtcatccgacgccgagggaaattaccgtgacagtctcgagacactcccgagtaccaaggagagcgactccacccagacaacaacaccctccgccagttgtccagaatcaaatagtgtaaaccaggtggaggacatggagatagagaccagtgaggtaaaaaaggttacctcttcccccatcacctcagaggaggaaagcaatctgagcaacgactttatagacgaaaatggcttgccaataaacaaaaacgagaacgttaatggcgagtctaaacgtaagactgtaataacagaagtgactactatgacctcaaccgtcgccactgaaagcaaaacagttataaaagtggaaaagggagacaaacagaccgtagtgagctcaaccgagaactgcgcaaagtccaccgtgaccaccaccacaaccacagtgaccaagttgtctacaccaagcaccggtggatccgtggatataatctctgttaaagagcagagtaaaaccgtggttacaaccacagtgactgattccctgaccaccactggagggacgctcgtgactagtatgacggtgtccaaagaatactctacccgggacaaagttaaattaatgaaattctctagacccaaaaagacccgatcagggactgccctccccagttatcgcaagttcgttactaagagctctaagaaatctattttcgtcctacccaacgatgacctgaagaagctcgcccgcaaaggcggcatcagggaggtcccatactttaattataatgccaagccggcgctagacatctggccatacccgtccccgagacctacattcggaataacttggcgttatcgcttacagaccgttaaatccctggctggggttagtcttatgcttcgcttgctttgggcctccctccggtgggacgatatggcagccaaagccccaccagggggtggcaccaccaggacagagacttccgagaccgagattacaactaccgagatcattaaacgcagggacgtgggcccatacggcatacggtcagagtactgcattaggaaaataatctgtccaataggcgttcctgaaacccccaaggaaacgccaaccccacaaaggaagggccttcgttcctccgccttgcggcctaaacgaccagaaacaccaaagcagactggccctgtgataatcgagacttgggtcgctgaggaagagctcgagctgtgggaaatacgtgcctttgcagaacgggttgaaaaggaaaaagcccaagccgtggaacaacaggccaagaaacgcctggagcagcagaagccgaccgtaatcgccacatccaccactagtcccaccagcagcaccacgagcactatttcccccgcccagaaggtgatggtggcgcccatcagcgggtcagtcacaacgggcaccaagatggttctgactaccaaagtgggcagtcccgcaactgtgacctttcagcagaacaaaaatttccaccagacgtttgctacttgggtgaaacaggggcagtcgaattccggcgtggttcaagtgcagcagaaagtgttgggtataatcccctctagtactggtacgagccagcagacattcacctctttccagcctcgcacagccaccgttaccatacgtcccaatacctcgggcagcggaggaactacaagcaacagtcaggtcatcactggccctcagataagacccggaatgactgtgatcaggaccccgctccaacagtccactctgggcaaggctataatccggacccccgttatggtgcagccgggcgctccacagcaggttatgacgcagatcatacgcggtcagcctgtgtccactgcggtttcagctccaaacaccgtcagctccaccccaggccaaaagtcattaacctccgctacgtcgacttctaatattcagtcctcagcatcccagccacctcgcccacagcagggccaggtgaagttgaccatggcccagctcactcagttgacacaggggcatggaggcaatcagggactcacggttgtcatccaggggcaggggcagactacagggcaattgcaattgatcccccagggcgtaaccgtgctgcctggacccgggcagcagctcatgcaagctgctatgcctaacggcaccgtgcagagattcttgtttacacccctggctacaacagcaaccacggctagcacaacaaccacgactgtatccacaacggctgccggaaccggcgagcaacgccagtccaagttgagcccacagatgcaggtacatcaagacaagacactcccaccagcccagagttccagtgtggggccggccgaggcacagccccagactgcccagcccagtgcccagcctcagccgcagacccaaccgcagagccctgcacagcccgaggtacaaactcaacctgaggtgcagactcagaccaccgtgtccagccacgtcccctcagaggcgcagccaacacacgcccagagctctaaaccacaagtggcggcacagtcacagccacagtccaacgttcagggccagtccccagtcagggtgcagagcccttctcagactagaatcaggccaagtaccccaagccagctgagtcccggacagcagtctcaggtgcaaaccaccacaagtcagccaatccccatccaacctcacacaagccttcaaattcccagccagggtcaacctcagagccagccccaggtccagtctagtactcagaccctgagcagcggccagaccctcaaccaggtgacagtgagcagcccctcaagaccacaactgcagatccaacaaccacaaccacaggtgattgcagtcccgcagctacaacagcaggtgcaagttctctcacaaatccagagccaagtagtggcccaaatccaggcccaacagtccggggtcccacagcagattaaattgcaactgcctatccagatccagcaaagttctgcagtccagacgcatcaaatccagaacgtagtcactgttcaggccgcttcagtgcaggagcagcttcagcgggttcagcagttgcgcgatcaacagcagaagaagaagcaacagcagattgaaataaagcgcgagcacaccctgcaggctagcaatcaaagcgagatcattcaaaagcaagtcgtgatgaagcacaacgctgttattgagcatctgaaacagaagaaatctatgacgcccgctgaaagagaggaaaaccagcggatgatcgtttgtaatcaagtcatgaagtatatattagataagattgacaaagaggaaaaacaggcagctaaaaaacgcaaaagggaagaaagtgtggaacaaaaacggtctaaacaaaacgccaccaagcttagcgcactgctgttcaagcacaaagagcaactcagagctgagattctgaagaagcgcgcgttgctggataaggaccttcaaattgaggttcaggaggaactaaagagagatttaaagattaagaaagagaaggacctgatgcaactggcacaagctactgccgtggccgccccctgtcctccagtaacacctgcgccacccgcccctcctgcacctcctccctccccccctccgcccccggctgtgcagcatactggactgctgagtacaccaactctgcctgccgccagtcaaaaacggaagagggaggaagaaaaggatagcagcagcaaatcaaagaagaagaagatgatctctaccaccagcaaagagacaaaaaaagataccaagctttattgtatctgtaaaactccatacgacgagagtaagttttatattggatgcgatcggtgccagaactggtaccatggccggtgcgtggggattctgcagagcgaggcggaactaattgacgagtatgtctgcccccagtgccagagcaccgaggacgcaatgaccgtcctcacgcccttgaccgaaaaagactacgagggtctaaaacgggtgcttaggtcactacaggcgcataaaatggcctggccttttttggaaccagtcgacccaaatgatgcacctgactattatggcgtcattaaagagcccatggacctggccactatggaggagagggttcagcgccgatattacgagaagttaacggagttcgttgcggacatgaccaagattttcgacaattgtagatactacaatccaagtgattcccctttctaccaatgtgcagaggtgttagaatcattctttgtgcagaagctgaaaggatttaaggcctcccgatctcataataataagctgcaatcaaccgcgagctag

SEQ ID NO: 14477 - DNA, 927 bp, synthetic construct
  source 1..927: mol_type = other DNA; note = Synthetic coding sequence
atggcttctagcaacaccgttttaatgcgcttagtggccagcgcatactctatagctcagaaggcaggcatgattgtgaggagggtaattgccgagggggatttgggcatcgttgagaaaacatgtgcaacggacctacagacgaaggcggaccggctggctcagatgtcaatctgtagctctctcgcgaggaaatttcccaagctgaccatcatcggcgaggaagacctgccctcggaggaggtcgatcaagagttgatcgaggatagccaatgggaggaaatcctgaaacagccgtgtccatcacagtatagcgcaatcaaagaggaggaccttgtggtgtgggtggaccctcttgacgggactaaagagtatacagaaggcctgctggacaacgtcactgtccttatcgggattgcctacgagggaaaagccattgccggcgttattaatcaaccgtactataactatgaggcagggcccgacgccgtattaggccgaacgatttggggtgtacttggcctaggcgccttcggcttccagttgaaggaggttcctgccggtaagcacattatcaccacaaccagaagccattccaataagctggttacagactgcgtggccgcaatgaatcccgatgccgttctcagggtggggggggcgggaaacaaaattatccagttaatcgaggggaaagccagcgcttatgtgtttgcctctccaggttgcaaaaagtgggacacatgtgcacctgaggtgattctccacgctgtcggagggaagttgacagacatacatggcaacgtcctgcagtaccacaaagacgtgaagcacatgaattccgccggcgtcttggccacattaaggaattacgattactatgccagccgagtgcccgaatccataaagaatgcgctggtaccctag

SEQ ID NO: 14478 - DNA, 1212 bp, synthetic construct
  source 1..1212: mol_type = other DNA; note = Synthetic coding sequence
atgagtggctctgatgggggacttgaagaggagcctgaactgagtatcaccctgacactccgcatgctgatgcacggtaaagaagtgggctccataatcggtaaaaaaggggagactgtgaaacggattcgggagcagagctcagctaggatcaccattagcgagggctcttgtcctgaacggatcacgaccattaccggatctacagccgccgtgttccatgccgtgagcatgattgcgttcaaactggatgaggacctgtgcgccgcaccggcgaacggcgggaatgtatccaggccgcctgtgaccctgaggctcgtcattcctgctagccagtgcggcagcctcatcgggaaagcgggaactaaaattaaagagatccgtgaaaccacgggagcgcaagtgcaagttgccggagacctcttgcctaactccactgaacgagcagtgaccgtttccggggttcctgacgcaatcatcctctgcgtgcgtcagatctgtgcggttatactggagagcccacccaaaggagctacaattccctatcatcctagcctctctctcgggactgttctgctcagtgcaaaccaagggtttagtgtgcaaggccagtacggagccgttacacctgctgaagtcaccaagctacagcaactgtccagtcacgcagtcccctttgctacaccttctgtcgtgccaggtctcgaccccgggacgcagacgagctctcaagagttcctggtgccgaatgatctgataggttgtgttatcggtcggcaggggtctaaaattagtgaaatcagacagatgagcggagctcacatcaaaattgggaaccaggcggagggcgccggtgaaaggcacgtcacaatcaccggctctcctgtttccatcgcgttagcacagtacctgattactgcctgtctggagactgctaaaagtacgagcggagggacacccagctccgctcctgccgatctccccgccccgttttcacctcctctcaccgcactgccaactgctccacccggactgctgggaaccccttatgcaatctctcttagtaacttcatcggtctaaaacctatgcctttcctagccctcccccccgcgtcccctggaccgccacccggtctggcagcttatacagcaaaaatggctgctgccaatggcagtaagaaagccgaaaggcagaagttcagtccctactag

SEQ ID NO: 14479 - DNA, 654 bp, synthetic construct
  source 1..654: mol_type = other DNA; note = Synthetic coding sequence
atgtcaagtaaggtgtcacgcgacaccctctatgaggccgtgcgagaggtgttacatggtaatcagcgtaaacgccgcaaattcctggagacagtcgaactgcaaatcagcctgaagaattacgatccgcaaaaggacaagcgattctcaggcacagttcggcttaaaagtacccctaggcccaagttttctgtctgtgttctcggggatcaacaacactgtgacgaagcaaaggccgttgacattccccacatggacattgaagctctcaagaaacttaataagaacaagaagctggtgaaaaagctcgcgaagaaatatgacgcttttctggcatctgaaagcctgatcaaacagattcccaggattctggggcctggattaaacaaagctggcaagttcccctcactgttaactcacaatgagaacatggttgccaaagtggacgaggtcaagagcacgattaagtttcagatgaaaaaagtattgtgtttagcagtcgccgtgggacacgtcaagatgacagatgatgagctcgtgtataatatccacctagctgtgaatttcttagttagccttctgaagaagaactggcagaatgtacgagctctctacattaaaagtacaatgggaaagcctcaacgtctgtattag

SEQ ID NO: 14480 - DNA, 3159 bp, synthetic construct
  source 1..3159: mol_type = other DNA; note = Synthetic coding sequence
atggaagggtcagagcccgttgccgcgcaccagggcgaagaggctagttgttcatcctggggcacaggttctacaaacaagaatctacccatcatgtctactgcaagcgtcgaaatcgacgatgcactatactccaggcaacgttacgtgctgggagacactgctatgcaaaaaatggccaaatcacacgtttttctgtcagggatgggcggcctgggcttggaaatcgccaaaaacctcgtgctggctggtattaaagcggtgacgatccacgacacagagaagtgccaggcttgggatttaggtaccaactttttcctgtctgaggacgacgttgtgaataaacgcaacagggccgaggccgtgcttaagcatattgcagaactcaacccatacgtccacgtgacaagttcaagtgtgcccttcaatgaaacgacggatttgtcctttctggacaagtatcaatgcgtggtgctgactgagatgaaattacccttgcagaaaaaaattaacgatttctgtcggagccagtgtccccccattaaattcatctccgccgacgttcacggcatttggagtagattgttctgtgatttcggggatgaattcgaagtactggataccacaggagaagaacccaaagaaatctttatctccaatattacccaagccaaccccggcatcgtcacatgcctggaaaaccaccctcacaaacttgagacggggcagtttctgacattcagggagataaacgggatgactggcttgaacggcagcattcaacagatcacggtgatatccccattctctttcagcataggtgatacaaccgagcttgagccctacctgcatggcgggatagcggttcaagtcaagacgccaaaaactgtcttcttcgagtccctggagaggcagcttaagcaccccaagtgtttaatcgtggatttttctaaccctgaggctccgctggagatccatactgccatgctggccctggaccagttccaggagaaatatagccggaagccaaatgtcggctgccaacaggactcagaggagctcttgaaactggccacttccataagtgagactctcgaggagaagccagatgttaacgcggatatcgtccactggctcagctggacagcgcagggtttcctgtcacctttagctgccgccgtcgggggggttgcatcccaggaggtactgaaggcagttaccggcaaattttcccccctctgccaatggctctatctggaagctgccgatatcgttgaaagtctgggaaagcctgagtgcgaggagtttcttccccggggggatcgctacgatgctcttcgagcctgtataggagatactttgtgccagaagttacagaatcttaatatctttctagtagggtgtggcgctattggctgtgagatgctcaagaatttcgccctcctgggagtaggtacctccaaagagaagggtatgatcaccgtgaccgatccagatcttatcgaaaagagtaatcttaatcgacaatttcttttccgtccccaccatatccagaagcccaagtcgtatacggctgctgatgccacccttaagattaattcgcaaataaagattgacgcccatctaaataaagtttgtccgactacagaaacaatctacaacgacgaattctacacgaaacaggacgttataattaccgctctagataacgtggaggctcggaggtacgttgattctcgctgcctcgctaacttgcgccctctgttggattcaggcacaatgggtaccaagggccacacagaggtgatagtccctcatctaactgagtcttataattctcatagggacccaccagaagaggagatccctttttgtaccttgaagtcatttccagccgctatagagcataccattcagtgggctcgagacaagtttgagagttcattcagtcacaaaccttccttatttaataagttctggcagacctattcgtccgctgaggaggtgttgcagaagatacagagcggccactcattagaaggctgtttccaagtgatcaaactgctgagccgccggccgaggaattggagccaatgcgttgagcttgcgagattgaagttcgaaaaatatttcaaccataaagcgctgcagttactgcactgttttcccctggacattaggcttaaggatggtagcttgttctggcaaagtcctaaacggccccccagccccattaagttcgacttgaacgagcctctccacctgtcttttctgcagaatgccgcgaagctgtatgccacagtttactgcatcccattcgcagaagaagatctctctgccgacgctctccttaacatcctctcagaggtcaagatacaagaattcaagcccagcaataaagttgttcaaactgacgaaaccgcccgcaagccggaccatgttccgatctcctctgaggatgagcggaacgctatcttccaactcgaaaaggccatcctctccaatgaggcaactaagtcggatctacaaatggccgtgctcagctttgaaaaggacgatgaccataacggacacatcgattttatcacagccgccagcaacctccgcgccaaaatgtactcaatagagcccgccgatcgattcaagactaaaaggatagctggcaagattatccccgcaatcgccacaactaccgctacagtctctggactggtagcacttgaaatgatcaaggtgactggcgggtatccattcgaggcctataagaattgcttcctcaacttggccatccctatcgtagtgttcaccgagactacagaggtcagaaagaccaagatccgcaacggcatctcattcaccatttgggaccggtggacggtgcacgggaaggaggactttaccctgttagactttatcaacgcggtcaaggaaaagtacggaatcgaacccaccatggtggtgcagggtgtcaaaatgttatatgtacctgtcatgcccggccatgctaagaggttgaagctgacaatgcataaactcgtgaagcctacaacggaaaagaagtacgtagaccttaccgtgtctttcgccccggatattgatggcgacgaagacctgcccggtccaccagttcgttactatttctctcacgacacagattag

SEQ ID NO: 14481 - DNA, 1134 bp, synthetic construct
  source 1..1134: mol_type = other DNA; note = Synthetic coding sequence
atgttaaggctagtgccaaccggagctcgagcgatcgtggatatgtcatacgcaagacattttttggatttccagggatctgcaattcctcaggccatgcagaagctggttgtcacccgcttgagcccaaactttcgcgaggccgtgacgttaagccgagactgcccggtgccactccccggagacggcgatctcctggttcgaaataggttcgtgggtgtaaatgcatccgacatcaactattcagctggcagatatgacccatctgtcaagcccccttttgatatcggttttgaaggaatcggcgaagttgtcgccctgggattatctgcttctgcccggtacactgtagggcaggctgttgcctatatggctccaggctcatttgcggagtataccgtcgtgcccgcctcaatagccaccccagtgcccagcgtcaagccagaatacctgactcttctcgtgtccggtacaacagcctacatcagccttaaggaactgggcgggctcagcgaagggaagaaggttttggtgacggcagctgctggcggcacagggcagttcgctatgcagctcagtaaaaaagcaaaatgtcatgtgattgggacttgctcctccgatgaaaaaagcgcgtttctaaagtctctcgggtgtgacagacctatcaactataagaccgaacctgtgggcacagttctcaagcaggaataccccgagggtgtggatgtggtgtatgagtctgttggtggtgccatgttcgacttggcagtagacgcgctggccaccaaaggtcggctcatcgttatcggatttatatcaggctatcagacaccaacaggactgtctcccgtcaaggccggaactctgccggccaagctcctgaagaaaagcgcttcagtgcaggggttcttccttaatcattacctgtcaaaatatcaggcggcaatgtcacacctactcgagatgtgtgtgagtggagatctggtgtgcgaagtcgatctgggggacttgtctccagaaggccgtttcactggattagaatctatcttccgagcagtcaactacatgtacatggggaagaacaccgggaagatcgttgtcgaattaccccacagtgtgaattctaagctatag

SEQ ID NO: 14482 - DNA, 2538 bp, synthetic construct
  source 1..2538: mol_type = other DNA; note = Synthetic coding sequence
atgtccaatagtcgcccccgatcgcgccgggacgccggcggcggtgctggagccgccgggcgggatgagctggtgtccagatctttgcagagcgccgagcactgtctaggcgtgcaggattttgggacggcctacgcccactaccttctggtgctgtctttagctcccgagttgaagcacgacgtcaaagagacatttcagtacacacttttccgctgggccgaagagctggacgcactcagcagaatccaggatcttttgggatgctatgagcaggccttagagttgtttcccgatgatgaggtgatctgcaactcaatgggggagcacctgttccgaatgggttttagggacgaggccgcagggtatttccacaaagctgttaagcttaatcctgatttctctgatgccaaggaaaatttttatcgagtagctaactggctggtcgaaagatggcacttcataatgttgaacgataccaagcgcaatactatctacaatgctgccatccagaaagccgtatgtctggggtccaagtctgtactggatataggagccgggactggaatcttaagtatgttcgccaagaaggccggcgcccactctgtatacgcatgtgagctatctaagacgatgtacgaactggcatgcgatgtagtggccgccaataagatggaggcggggatcaaattgctgcacaccaaaagcctggacatcgaaatccctaaacacatccccgagcgcgtttccttggtggtcaccgaaacggtggatgcaggtctgtttggagagggtattgtcgagtccctaatccacgcctgggagcatctgctgctgcagcctaagacaaagggtgagtccgccaactgcgagaagtacgggaaagtaatccctgcgtcagccgtgattttcggaatggctgtggaatgcgcagagatcagaagacaccaccgcgtgggcattaaggacatagctggcattcatttgcccactaacgtcaagttccagtcccccgcctattcaagtgttgataccgaagaaaccattgaaccgtacacgaccgagaaaatgagtagggtgcctggtggttacctagctctgactgagtgctttgagataatgacagtggattttaataacctgcaagagttgaaatccctcgccaccaagaaaccagacaaaatcggaatccctgtcattaaagaaggaatcttagatgctatcatggtttggtttgtgctgcagctcgatgacgagcattccctttcaacgagccctagtgaggaaacatgctgggaacaggctgtttatcctgttcaggatttagccgattattggatcaaacccggagatcatgtcatgatggaagtcagctgccaggattgctatttaaggatccagtccatctccgtgctcgggctcgagtgtgaaatggatgtcgccaagagttttacccaaaacaaagatttactgagcttgggaaacgaggccgaactttgctccgccctggccaacctccaaacgtctaaacccgacgcagtggagcagacatgtattctagagagcacagagattgctctcctgaataacatcccatatcacgaggggtttaaaatggcaatgtctaaggtactgagtagcctgacccctgagaagctgtaccagacaatggacactcattgccagaacgagatgagctcaggtacaggacagtcaaacactgttcagaatatcttagaaccattttatgtgttggatgtgtcagaaggattctctgtgctccctgtgattgccggaaccctcggccaggtcaagccttatagcagcgtagagaaggatcagcaccggatcgccttagacctcattagcgaagcaaatcatttcccaaaagagactctggaattctggttacgacacgtggaagatgaatccgcaatgcttcagcgtcccaagagtgacaagttgtggtcaattattattttggatgtgatcgaacccagcggccttatccagcaggagatcatggaaaaggccgctatttctagatgcctgcttcagtccggcgggaaaatcttccctcagtacgtattgatgttcgggctcctggtcgagtctcagacgctgctggaggaaaatgccgtccaggggacagaacgaactctcggactgaacatagcccccttcatcaaccagttccaggtacccatcagggtctttcttgatctgagtagcctcccatgcatcccacttagcaagcccgtagagctgctgcggctggatttgatgacaccttacctcaacacctctaacagggaggtcaaggtttacgtgtgcaagagcgggcgattgactgcaattcccttctggtaccacatgtacctcgatgaggaaatacgcctcgacacctcaagtgaagcctcacactggaagcaggccgcagtagtgcttgataaccccattcaggtcgaaatgggggaagaactcgtactttcaattcagcaccacaagtctaatgtatccatcaccgttaagcagtag

SEQ ID NO: 14483 - DNA, 756 bp, synthetic construct
  source 1..756: mol_type = other DNA; note = Synthetic coding sequence
atggcggatctgacatctgtgctgacgagcgtgatgttttcacccagttccaagatgtttattggaggattatcctggcagacatcaccagactccctcagggattatttttcgaagtttggtgaaattcgggaatgcatggtcatgcgcgatccaaccaccaaaaggagtcgcggcttcggtttcgtgacgttcgcggatcccgcaagcgtggataaagtgttagggcaacctcaccatgaacttgactccaaaaccattgatccaaaagtcgctttcccccgtagagcccagcctaagatggtcacccgtacaaaaaagatcttcgtcggtggcttaagcgccaatacagtcgtggaggatgtgaaacaatactttgagcaattcggaaaggtggaagatgccatgcttatgtttgacaagacaaccaacaggcatagaggcttcggctttgtcacctttgagaatgaggatgtagtggaaaaagtctgcgaaatccacttccacgagattaacaataagatggttgaatgtaaaaaggctcagcctaaggaagtgatgttcccgcccggaacccggggaagagcccggggattaccatataccatggacgcatttatgctgggtatggggatgttaggatacccaaatttcgtcgcaacgtacggccgggggtatccaggatttgctccttcctacgggtaccagttccccgactatctgcctgtgagtcaggacataatttttataaattag

SEQ ID NO: 14484 - DNA, 510 bp, synthetic construct
  source 1..510: mol_type = other DNA; note = Synthetic coding sequence
atggccccaaaacgggctaagcgacggaccgtggaaggtgggagtagctccgtgttttccatgtttgaccagactcagattcaggagtttaaggaagcattcaccgtgatcgaccaaaacagagacggtattattgataaagaagatttaagggatacattcgcagcaatgggaagattgaacgttaaaaacgaagagctcgatgcgatgatgaaagaagcttctggtccaatcaactttaccgtgtttcttacgatgttcggtgagaagttgaaaggagccgatcctgaagacgtgattaccggcgcttttaaggtgctggaccccgagggcaaggggaccattaagaaaaagttccttgaggagctgttgactacacaatgtgatcgatttagccaggaggagatcaaaaacatgtgggccgccttccctcccgacgttgggggcaatgtggactataaaaatatctgttatgtgataacacacggggacgccaaggatcaggagtag

SEQ ID NO: 14485 - DNA, 546 bp, synthetic construct
  source 1..546: mol_type = other DNA; note = Synthetic coding sequence
atggctaccgagcctgaagctgctgagcccgtcgtacccagtttggtcgatcgctattttactcgatggtataagcctgatgtgaaaggcaagttttgtgaggatcactgtatccttcaacattctaaccgtatttgcgtgatcactcttgcagagtcacatccggtgctgcagtccggaaaaactatcaaatctatttcttaccagatttctacgaactgtagccggctgcagaacaaggtaagtggcaagtttaagaggggcgcccagtttttaaccgaattagcccctttgtgtaaaatctattgctccgacggtgaagaatacacagtgagcagttgtgttcgaggccgcctcatggaggtcaacgaaaacatcctccacaaaccctccatcttgcaggaaaaaccctccacggagggctatatcgcagtggtgttgcccaagtttgaggagagtaaatctattaccgaggggctccttactcagaagcagtatgaagaggtgatggttaagagaattaacgcgactacagccacatcatag

SEQ ID NO: 14486 - DNA, 2154 bp, synthetic construct
  source 1..2154: mol_type = other DNA; note = Synthetic coding sequence
atggagctgcggtgtgggggcctacttttttcgagtcggtttgacagtgggaatctcgcccacgtagagaaggtggagagcttgtcttccgacggcgagggggttggcgggggagcatcagcgctgacgtcaggaatcgcgagctcacctgactacgaattcaacgtttggacgaggcccgactgcgccgagactgagttcgagaatggaaaccggtcttggttttactttagtgttcgtggaggaatgcctgggaagttgatcaaaattaacatcatgaacatgaacaaacaaagcaaactctacagtcagggcatggctccattcgtgaggacacttcctacccggccaaggtgggagaggatccgtgatcgccccactttcgaaatgacagagacccaatttgtcttatccttcgtacaccgctttgtcgaggggcgtggggcaacaacctttttcgcattctgctacccctttagctattctgattgccaggagttgttgaaccagttggatcagcgtttcccagaaaaccacccgacccactcttccccgctggacaccatatactatcaccgcgaattactgtgttactccctggatggcctaagagtggacttacttacgattacctcctgtcatggtttgagggaggatcgggagccgaggttggaacagttgttcccggatacgtctacaccaaggcccttcaggttcgcgggcaagcggatctttttcctgagtagccgcgtgcatccgggggaaacgcctagcagtttcgttttcaacggattcttggattttatattgcggccagatgacccacgcgctcagaccctcaggaggctctttgtgttcaaactgatccccatgctgaatccagacggagtggtccgtggacactacagaaccgatagccgtggcgtgaacctcaatcgccaatatctgaagccagatgcggttcttcaccctgccatttacggcgcaaaagccgtgttgttgtaccaccatgtgcattcaaggctaaatagtcagtcttcctctgaacaccagccctcgtcttgcctaccacccgacgcccccgtgagcgatctggaaaaggccaataatctccagaatgaagcccagtgtggccatagtgctgaccgccataacgcagaggcctggaaacaaacggagccagctgagcagaagctgaacagcgtgtggatcatgccacagcagagtgcggggctggaggaatctgcccctgatactataccccccaaggagtccggtgtagcttattacgtagatcttcatggccacgcctcgaaacgaggatgcttcatgtatggtaactctttttccgatgagtccactcaggtcgagaacatgttataccctaagcttattagtctaaatagcgcccacttcgattttcaaggctgtaacttttctgagaagaatatgtatgcccgcgaccggcgggacggccagtccaaggaaggcagtggccgagtggcaatctataaggcatcagggatcatccatagctacacgctggagtgcaactataacacaggccggtccgtgaactccattcccgctgcctgtcacgataacggtcgtgcatctccacctcctcccccagctttcccctccaggtatacagtggagctcttcgaacaggtgggcagagccatggctatagctgcacttgacatggcagaatgtaatccttggcctaggatcgtgctgtccgagcactcttctctgacgaatttgcgtgcctggatgctgaaacacgtgcggaattctagagggttatcctccaccttgaatgttggcgtgaacaagaagcggggcctccgcacaccgcctaagagccataatgggctgcctgtttcctgctctgagaataccctatcaagagccaggagtttctccaccggaactagcgccggtggcagcagctcgtcacagcagaattctccgcagatgaagaattccccttctttcccctttcatgggagcagaccagctggcctgcctgggctgggatcatcgactcagaaagtgactcatcgggtgctcgggccagttagaggtaaacctgtttgggagccgctgcagcacgtcttcggttgcttaggacactgctggggcaagtag

SEQ ID NO: 14487 - DNA, 678 bp, synthetic construct
  source 1..678: mol_type = other DNA; note = Synthetic coding sequence
atggtgatggcagaaggcaccgccgtgctgaggagaaatcgccccggcactaaggcgcaggacttctataattggccggatgagtctttcgatgaaatggatagtacactggccgtccagcagtacatccagcagaatatccgggcagactgcagtaacatagataaaattctggagcctccagagggtcaggacgagggagtctggaagtacgagcatctacgccagttctgcctagaactgaatggcctggcagtgaaactgcagtcagagtgccacccggacacgtgtactcagatgactgctaccgaacagtggatatttttgtgtgctgctcataaaacgcccaaggagtgccctgcgattgactatacaagacatacacttgatggagctgcttgccttctcaacagcaacaagtacttcccatcacgtgttagcattaaggagagctctgtggcgaagctggggtcagtttgtagacgcatctacaggattttttcacatgcatacttccatcatcgacagatcttcgatgaatacgagaacgaaaccttcctgtgtcatagattcactaaattcgtgatgaagtacaatctgatgagtaaagacaatctgatcgtccctattctggaagaagaggtgcagaacagcgtgagcggagagagtgaggcctag

SEQ ID NO: 14488 - DNA, 1173 bp, synthetic construct
  source 1..1173: mol_type = other DNA; note = Synthetic coding sequence
atggccgcccagaaggatttatgggatgcaattgtgatcggtgctggaattcaggggtgtttcaccgcgtaccacctggcgaagcacaggaaaaggatcttgctcctagaacaattctttctcccacattccagggggtcttcccacggtcagagccggatcattcgaaaggcctatctcgaagatttttacacccggatgatgcacgagtgctatcagatttgggcccagctggagcatgaagccgggacccagctgcaccggcagactgggttgctgcttcttggtatgaaagagaatcaggaactgaaaaccatccaagcaaatctgtcccggcaaagagtggagcaccagtgcctctcatccgaagagctgaaacagaggttccccaatattcgactcccacgcggtgaggttggcctgctagacaactctgggggggtgatctacgcatataaggccctcagggctctccaagacgctatccggcagcttggtggaatcgtaagagacggagaaaaggtggtggagatcaatcctgggctcctggtcaccgtcaaaaccacttctcggtcataccaagctaagagcctagtgatcaccgctgggccatggacaaatcagctgcttcgcccactcggcatcgaaatgccactccagaccttacggatcaacgtatgttattggagggagatggtacctggtagctatggtgtgagtcaagcgtttccatgttttctgtggctgggtctgtgcccacaccacatttatggcttgcctacaggggagtaccctggattaatgaaagtttcctaccatcacgggaaccacgctgaccccgaggagagagactgccccacagctcgcacagacataggggatgttcagatcttgtcatctttcgtgagggatcacctgcctgatctgaagccagagcctgccgttatcgagagctgtatgtatacaaatacaccagatgaacaattcatcttagatagacacccgaaatacgataatatcgtgataggggccggcttcagcggccacggattcaagcttgcccctgtggtgggcaaaattctgtatgagctcagtatgaaactgacccccagttacgacctggcacctttccgtatttcacggtttccgtcgctcggcaaagcccatctgtag

SEQ ID NO: 14489 - DNA, 135 bp, synthetic construct
  source 1..135: mol_type = other DNA; note = Synthetic coding sequence
atgagcgataagcctgacatggctgagatcgagaagtttgataaaagcaagctaaaaaagaccgagatgcaagagaagaaccctctccccagcaaggagacgattgagcaagagaagcaggctagcgagtcttag

SEQ ID NO: 14490 - DNA, 1323 bp, synthetic construct
  source 1..1323: mol_type = other DNA; note = Synthetic coding sequence
atgcctatccctcctcctccacctccaccacccggtccacccccccctcctacattccaccaggcaaacacagaacaaccaaaactatcaagggacgagcaacgaggccgcggggccctcctccaggatatttgtaaaggcactaaactgaaaaaagtcactaatataaatgaccgaagcgcacccatcctggagaaacccaagggctcttcaggggggtatggatcgggtggggccgcacttcaaccgaaaggcggcttgtttcagggaggagtgctgaagctgcggccagttggtgctaaggacgggagtgaaaacctcgctggcaagccggccctccagattcctagcagccgcgccgcagctccccgaccaccggtcagcgctgccagcggtcgaccgcaggacgatactgactcttcccgcgccagccttcccgagctgcctcggatgcagcgcccctccctcccggacctgtccagacctaataccacctcgtctacggggatgaaacactccagttccgctcccccaccaccaccaccagggcgaagggccaacgcacctcctacccctcttcccatgcactcctcaaaggcccctgcctataatcgggaaaaacctcttcccccaaccccagggcagcgcttgcaccccggacgtgagggcccaccggcaccaccgccagtgaaaccgcctccttccccagttaatattcgcactggcccctcgggccagagcctcgcgcctccaccgcccccctaccgccaacctcctggagtgcctaacggcccaagctctcctacaaacgaaagtgccccagagctgccgcagcgtcacaattctctgcatcgcaaaaccccaggaccagtacgaggtctggcgccgcctccacctactagcgcgtccccatctttattgagtaatcgcccacctcccccagcgcgcgatcccccatcaagaggagcggcaccaccacccccacccccagtgatacgcaatggcgcacgggatgcaccccccccgccaccaccctatcggatgcatggctccgaaccaccatctcgcgggaagccaccaccaccgccatcgcgaactcctgcagggccaccccctcccccccctccgcccctccggaacggccatagggacagcatcacgacggtgaggtcttttctggacgatttcgaaagtaaatatagttttcatcccgtcgaagattttcccgccccggaggagtataagcattttcagaggatttacccgtctaagactaatcgagccgctaggggtgctccgccattgccgcctatcctgaggtag

SEQ ID NO: 14491 - DNA, 2703 bp, synthetic construct
  source 1..2703: mol_type = other DNA; note = Synthetic coding sequence
atgaattatcccggaagagggtctcccaggagccccgaacataacgggcgggggggcggaggcggagcttgggaactggggagcgacgctaggcccgcgtttggaggaggggtgtgctgctttgagcatcttcctggaggagatcccgacgatggagacgttccactagccctcttacggggagagcccggtctgcacctggcaccaggaactgacgaccataatcaccacctcgctctggatccgtgtttgtcagatgaaaactacgacttcagttcagctgaatcggggtcaagcttgaggtactatagtgaaggtgagagcggtggaggaggctcatctctgagcctccatcctccacaacaacctcctctggtgcccaccaattccggaggcgggggagcgactggtgggtctccgggggagcgcaagcgaaccaggctggggggacccgcggcccgccacagatacgaagtggtgactgagttagggcctgaagaagtaaggtggttctacaaagaagataaaaaaacctggaaaccatttataggctatgattccctaagaattgagctggcctttcgaactcttttacagacaacaggcgctcgcccacagggcggggatcgcgatggcgatcacgtctgctccccaactggacctgcatcttcttcaggtgaagatgatgacgaggaccgggcctgtgggttctgccagtctactactggccatgaaccagaaatggttgaacttgttaacattgagcccgtgtgtgtgagaggtggcttatacgaggttgacgtgacacagggagaatgttacccggtgtactggaatcaggcagacaagatcccagtgatgcggggtcagtggtttatagacggaacatggcaaccactagaagaggaggagtctaatctaatcgagcaggaacatctgaactgttttagaggacaacagatgcaggaaaatttcgacatcgaggtatctaagagcatcgacggaaaggatgccgtccattccttcaaactgtctaggaaccatgtggactggcacagcgtggatgaggtctacctttatagcgatgccacaacgtctaaaatcgcccgaacagtgacacagaagttaggtttcagtaaggcctcctctagcgggacacggctccatcgcggctatgtggaagaagccacactggaagacaaaccctcccagacaacacacatagttttcgtggtgcacgggataggacaaaaaatggatcaaggcagaataataaaaaacacagctatgatgcgggaggcagcccgcaagatcgaagaaaggcacttcagcaaccacgctacgcacgtggaatttctgcccgttgaatggcggtctaaactgacactagacggggatacggtggattcgataaccccggacaaggtccgtgggttaagagatatgctgaacagctccgccatggacatcatgtattacactagccctctgtaccgggatgagctggtaaaaggcctccagcaagagctgaaccgcctctatagcctcttctgcagtcggaatccagacttcgaggaaaaggggggtaaggtgtcaatagtgagtcattcacttggttgtgttatcacctatgacattatgaccgggtggaaccccgttcgtctctatgaacagctattacagaaagaggaagagctgcccgacgagcgctggatgtcttatgaggagcgccacttgctcgacgaactttacatcaccaaacggcgattaaaggaaatagaagaaagattacatgggcttaaggctagttctatgacccaaactcctgcgttaaagttcaaagtcgaaaacttcttctgcatgggtagtccattagctgtatttcttgccttacgcggaattcggccggggaacacaggctctcaggaccatatactgccacgcgaaatttgcaatagactgttgaacatctttcacccgaccgaccccgtcgcatataggctggagccgctgatactgaaacactatagtaatattagcccagtgcagattcactggtacaacactagcaaccccttgccttatgaacacatgaagccctctttcctgaacccagctaaggaacccactagcgtaagcgagaacgaagggatctccaccatccccagccccgttaccagccccgtcctgagccgcagacactacggcgagagtattacaaatattggcaaagctagcatcctgggtgctgcaagcattggtaagggtctgggtggaatgctgttctctaggttcggacggtctagcactacccaatcttccgaaacctcaaaggatagcatggaagatgagaaaaagcctgtagcgtcaccatctgcgaccactgttggtacacagacactgccacattccagcagtgggttcctggactccgcctatttccgcctgcaggagtcgttctttaacttgccacaattactgttccctgagaacgtaatgcagaacaaagataatgctctggtcgagctagaccatcggattgactttgaactgagggagggtctcgtggagagtaggtactggtcagcggtaacctcccacacagcgtactggtcaagcttagacgtggctctctttcttcttactttcatgtacaagcatgaacatgacgatgacgcaaagcccaacctggacccgatttag

SEQ ID NO: 14492 - DNA, 1278 bp, synthetic construct
  source 1..1278: mol_type = other DNA; note = Synthetic coding sequence
atgaacaaaatgccagccggcgagcaagaatgcgagtataataaagaggggaaatactactcaaagggagtaaaactcgtgcgcaagaagaaaaaaattcctgggtaccgatggggagatattaaaattaacattattggtgagaaagacgacttacccattcatttctgcgataaatgtgatctaccaatcaaaatatatgggcggataatcccctgcaagcatgctttttgttaccattgtgctaatctgtatgataaagtcgggtacaaagtttgccctcgctgtcggtatcctgtcttaagaatcgaagcccataagagaggaagtgtgtttatgtgttccattgttcagcaatgtaagaggacttacctgagtcagaaatccctgcaggcacatataaagcggagacacaaaagggctcgaaagcaagtcacgtccgcgtctcttgaaaaggtacgcccccacattgccccaccacaaactgagatctcagatattccaaaacggctccaggaccgcgatcatctgagctacattcctcccgaacagcataccatggtgagcttgccatcagtgcagcatatgttacaggagcaacataaccagcctcataaggatatccaggcaccgccccccgagctcagtttaagcttgccattcccgatccagtgggaaacggtcagtatcttcacccgaaagcatggcaaccttaccgtcgaccacattcagaacaactcagattccggagcaaaaaagccaactcctcccgactattacccggaatgccagtcacagccggccgtctcttccccacatcacattatccctcagaagcagcactacgctcctcctccctctccgtcgagccccgtgaatcaccagatgccctacccccctcaggatgtggtgaccccaaatagcgttcggagtcaggtaccggccctcacgacaacctacgacccctcatcagggtacataattgtcaaggtgccgcccgacatgaatagcccccccctcagagcaccacaatctcagaacggtaaccctagcgcctctgagttcgcctctcatcactataacctcaacatactgccacaattcactgagaaccaggagacactttctccacagttcacacaaacagacgcaatggaccatcgacggtggcccgcctggaaaaggctttcaccatgtcctcctacccggtcaccacccccttctacactacatggcaggtcgcaccactcccatcagcggagacatcgccgatattag

SEQ ID NO: 14493 - DNA, 1926 bp, synthetic construct
  source 1..1926: mol_type = other DNA; note = Synthetic coding sequence
atgggaccccccctgaaactgttcaagaatcagaaataccaggaactaaagcaggagtgtatcaaggactctaggcttttttgtgatccgacctttctaccagagaacgactcattattttataaccgtctgttgccaggtaaggtggtctggaagcgaccccaggatatctgcgacgacccgcacctgatcgttggcaatataagcaaccatcagcttacgcaaggacgactggggcataagccaatggtgtctgccttttcttgtctcgccgtccaggagagccactggacgaaaaccattccgaatcataaagagcaggaatgggatccacagaaaacagagaaatatgccggaattttccattttcgattctggcattttggggagtggactgaagtggtcatcgatgatttactccctactatcaacggcgatcttgtgttcagcttttctacaagcatgaatgagttctggaatgctctgctggagaaagcctatgcaaagctgctgggatgctacgaagcccttgacggcctcactattacagacattatcgtcgattttacggggaccctggctgaaacagtggacatgcaaaaaggccgctataccgaactagtggaagagaagtataagctattcggggagctgtacaaaactttcaccaagggaggccttatttgctgtagtattgagtctcctaatcaagaagagcaggaggtggagacagattggggactcctgaaaggtcacacctacactatgaccgatatcaggaaaattcgtctcggcgagcggctggtagaggtctttagcgccgagaaggtgtatatggtgcggctcaggaatccactgggccgccaggagtggagtggaccatggtcggaaatttccgaagagtggcagcaactgactgcctctgacaggaaaaatctgggactggtaatgtctgatgacggcgaattctggatgtccttagaagacttttgtcgaaacttccacaaactaaacgtgtgcagaaacgtgaacaaccctatcttcggcagaaaagagcttgaaagcgtgttgggctgttggaccgtggatgacgacccattaatgaacagatccggcggttgctacaacaacagagatacgttccttcaaaacccgcagtacatttttaccgttcccgaagatgggcacaaggttatcatgtctctccagcagaaagacctgcggacctacaggagaatggggcgccccgacaattacataatagggtttgagctgtttaaagtggaaatgaataggaagttccgtctgcaccacctttacatacaggaacgagccgggacatctacctacatcgatacgcgaacagtgtttctgtccaagtacctgaaaaaagggaactacgtactggttcccaccatgttccagcacggacggacctctgagttcttgctgcgaatcttttctgaagtgcccgtgcagctgcgggaactcacccttgacatgcctaagatgtcttgttggaacctcgccaggggctatcccaaggtggtgacacagattaccgtccactccgcagaggatctagagaagaaatacgctaatgaaaccgtcaatccatatctggttatcaaatgcggaaaggaggaagtgaggagcccggtgcagaagaacaccgtacacgctattttcgacacgcaggcgatattctatagaaggacaaccgacattcctattatcgttcaggtctggaactccagaaaattctgtgatcagttcctaggccaggtcactctggatgccgacccgtctgactgtcgggatcttaaaagcctctatctgaggaagaagggcggccccacggccaaggtcaaacaaggacacatcagttttaaagtcatctcttctgatgatttaacagaactctag

SEQ ID NO: 14494 - DNA, 3180 bp, synthetic construct
  source 1..3180: mol_type = other DNA; note = Synthetic coding sequence
atggccgcagtagccgggagtggagccgcagccgccccaagcagcctgcttctggtggttgggtcagagtttgggtcacccgggctgctgacatacgtgctggaagagctcgagcgaggaattcggagctgggacgtggatcctggggtttgcaacctggacgaacagctgaaagtatttgtttccagacactccgctacattttcctcaattgtgaagggacaaagatctttgcatcataggggtgataacctggagactctggtgcttttaaacccgagcgacaagagcctgtacgacgagctgaggaatctgctgctggatcccgcgtctcataaacttcttgtcctcgccggcccatgcctggaagagacaggtgagctgcttctgcagaccggtggcttctcacctcaccatttcctacaagtgctgaaggatcgggaaatacgcgatatcctggcaaccactcccccccccgtccagccacctatcctaactatcacgtgcccaacatttggagattgggcccagcttgcgcctgctgtgccaggactccagggcgccctgcgtctgcagctgaggttaaacccacctgcgcagctgccaaattccgagggcctctgcgaattccttgagtacgtggccgagtcactggaaccacccagccctttcgagttgctggaaccacctacctccggcggatttctccgtctagggcgtccatgctgctatattttccctggaggtttgggggacgcagcatttttcgccgtcaatggattcactgtcttagtaaatggcgggtcaaaccctaaatcttctttttggaagttagtgcggcacctcgaccgcgtggacgccgtattggtgacccatccaggagcagacagtctgcctggattgaatagtcttctccgacgcaaacttgcggagcgtagcgaagttgctgccggggggggcagttgggatgaccgacttcggaggctgatatcacccaatctcggggttgtgttctttaatgcctgcgaggcagcctctaggctcgcccgcggcgaagatgaggcggagctggcactgtccctgctcgctcagctgggaattaccccgctccccctgagccggggcccagtgccggctaaacctacagtccttttcgagaagatgggtgtggggcgtctggatatgtacgtcctgcacccaccaagcgccggagcagaaagaaccctcgcctctgtgtgcgcgctgcttgtgtggcaccccgcagggccgggcgagaaggtggtgcgggtgctttttcccggatgtactcctccagcatgcttactagatggactagtacggctgcaacatttgcgatttcttcgcgagcccgtcgtaacaccacaggacctggagggcccagggcgcgccgaaagtaaggagtctgtcggatcccgagactcatcaaagcgcgaaggcctgctcgcaacccaccctagacctggccaggaacgaccaggtgtggcccggaaggagccagccagggctgaggcccctcggaaaaccgagaaggaggcaaaaaccccacgggaactgaagaaggacccaaaaccgtccgtgagccggactcagccgagggaagtgaggagagccgccagctccgttccgaatctgaagaagacaaacgcacaggctgcgcccaaaccccggaaagccccgagcacatcacattcagggtttcctcccgtcgcaaacggcccccggtcccccccgtccctccgctgtggagaggcatctcctcctagcgcagcttgtggcagccctgcaagtcagctggtggccacgccctcccttgaacttgggcccatccctgcaggagaagagaaggccctcgagttgcctcttgcggcttcaagtatcccaagaccccgcaccccttcaccggagtctcacaggtctccagccgagggcagtgaacgtttatcattgagccccctgcgaggaggcgaggcgggcccggacgcctcgccgaccgtgactacccccactgtgaccacgccctccttacccgcagaagtgggaagtccccattcaacagaagtggatgagagtttaagcgtgtcattcgaacaggtactgccaccaagcgcacccacatccgaagcgggcttgtcacttccactgcgaggccctagagccagaaggagtgctagtcctcatgacgtggatctatgcctcgtcagcccatgcgaattcgaacataggaaggcggtgcccatggcccccgcacctgcctccccaggctcttccaatgactccagcgccagaagtcaggagcgcgccggcgggctcggcgcagaagaaacccctcccacttccgttagcgaaagtctacctactctgagtgatagcgacccagtccctctcgctcccggggccgccgattcagacgaagacacagaaggatttggggtgccaaggcacgaccccctgcccgaccccctgaaggtcccccctccactcccagacccctcgtccatctgcatggtggatccagaaatgttgccaccgaagactgcccgacagacggagaatgtgagtcggactagaaagccgctggccagacctaattcgagagccgccgcccctaaagctacccctgtcgccgcggcaaaaacaaagggactggcgggaggggaccgagccagtcgacctctgagcgcacggtcagagccttcagagaaaggcgggcgagctcctctctctaggaagagctctactcctaagaccgcaaccaggggcccctccgggtccgccagctctaggcctggcgtgtctgcaaccccccctaagagtcccgtgtatttagaccttgcttacctgccatctggaagttcagctcacttggtggacgaggagttcttccaacgcgtacgggccttgtgctacgtcatctcaggacaggaccagagaaaggaggaaggcatgagggccgtattagacgctctgctggcttccaagcaacactgggacagagatctgcaggtgactctcatccctacctttgattcggtagcaatgcatacttggtacgctgaaacgcatgcgagacaccaggcactgggcatcacggtgctgggtagtaacagcatggtttctatgcaggatgacgcctttcctgcctgtaaagtggaattttag

SEQ ID NO: 14495 - DNA, 4734 bp, synthetic construct
  source 1..4734: mol_type = other DNA; note = Synthetic coding sequence
atggaagcgggctccgtggtccgcgccatctttgacttttgcccgtcagtctccgaggaactcccactgtttgttggagacatcattgaagtgttggctgtggttgatgaattctggttactgggtaaaaaggaggacgtcacaggccagtttccttcctcttttgttgagatcgtaactattccaagcctgaaggaaggagagagactttttgtgtgcatctgtgaatttaccagccaggagctggacaatctgcctctgcatcgaggagatctggtaatcctggatgggattccaacagctgggtggctccaggggcgtagttgctggggcgcccgcggcttctttccctccagctgcgttagggaactgtgtctgtcctctcagagcaggcagtggcattcacagagcgcgctgttccagatacccgaatactccatgggtcaagcgcgtgctctgatgggattgagcgcccagctcgacgaggaactggattttcgcgagggggacgtgatcacgatcatcggcgtccctgagcccggctggttcgagggcgaactggaaggccgtcgcggcatattcccagaaggctttgtggagttgctcggccccctcaggacagtggacgagagcgtgagcagtgggaaccaggacgactgtatcgtcaacggggaagtggacactccagtcggtgaagaagaaataggcccagatgaggacgaagaagaaccgggcacttatggcgttgccttgtaccgcttccaggccttggaacctaatgagctggattttgaggtcggtgacaagattcgtattcttgcaaccttagaggatgggtggttggaagggagtttgaaaggcagaaccggaatcttcccataccgcttcgtcaagctgtgtcctgatactagagtagaagaaacgatggcgctacctcaggaagggtctctggccaggatcccagagaccagcctcgattgcctggagaataccttgggagtggaagagcagcgccacgagacatctgatcacgaggccgaggagcccgattgcattatctcagaggctccgacctctcccctcggacaccttacaagcgaatacgacaccgatcggaattcttaccaggacgaagacacagcaggtggtccccccaggagcccgggagtggagtgggagatgccgttagccaccgactcaccaacctctgatcccaccgaggtggtcaatggaattagctcccaaccacaagtacccttccacccaaacctccagaagagccagtactatagtaccgtcggggggagccacccacactctgaacagtatcccgatttattaccgctcgaggcacgtacccgcgactacgccagcctaccacccaaacggatgtacagccaactgaagacgttgcagaagccagtgctgccattgtaccggggctcatccgtgtccgctagtcgcgtggttaaaccgcgccagtcctccccacagctacacaatctcgcctcctataccaagaaacatcacacctcttccgtgtacagcatctctgaacggttggagatgaagccagggcctcaagctcaggggctggtcatggaggccgcaacccattcacagggtgatggaagcactgacctggattcgaaattaacgcagcagcttattgagtttgagaagagtctcgctgggcctggaaccgaacctgacaaaatccttcggcacttctctatcatggactttaactctgagaaggatatcgtgagggggtcaagtaaattgatcacggaacaggagctgccagagcggcggaaagcgctgagacctccgcctcccaggccttgcacacccgtaagtacctctccccacttgctggtggatcagaacttgaaacccgccccaccgctcgtggtacgtccttcccgccctgccccactgccccctagcgctcagcagcgcactaacgccgtgtcgcccaagttgctatccagacatcgacccacatgtgaaaccttagagaaagagggcccgggacacatgggccgctctttagaccagactagcccttgcccccttgtcttagtccggattgaagagatggaaagagatcttgatatgtacagcagggcacaggaggaattaaatctgatgctggaagaaaagcaggacgaatcttcacgggcagaaactctagaggacttgaaattctgcgagagtaacattgagagcctaaatatggaacttcaacagttaagagagatgaccctgttaagtagccagagctcatccctggtggccccctcggggtcagtaagtgccgagaatccggagcaacgaatgctggaaaagcgcgccaaagtgatagaggaattgctccagacagagcgagactacattcgcgatctcgaaatgtgtatcgaaaggatcatggtgcccatgcagcaggctcaagtacctaatatcgactttgagggcctcttcgggaacatgcagatggttatcaaagtttcaaagcagcttctcgccgctcttgagatttctgacgcagtcgggccagtatttttaggacaccgcgatgagctggaaggaacatacaaaatttactgccagaatcacgacgaggctatcgcactcctcgaaatatacgaaaaggacgaaaagattcaaaaacacctccaagattctctcgcggacttaaagtcactatataatgaatggggttgcacaaactatatcaacctgggaagtttcctgatcaaacccgttcagcgggtgatgagataccctctcctcctcatggaactcctaaatagcacacccgagagtcatccagacaaagtgcccctcacgaacgcggtgcttgcagttaaagaaattaatgtgaacattaatgagtacaagcgcaggaaggacctcgtcctgaagtatagaaaaggcgacgaagatagccttatggaaaagatttctaagctgaatatccattcaataatcaagaaatctaatcgggtgtcatcacaccttaagcacttaacaggctttgccccgcagattaaggatgaggttttcgaagagactgagaagaattttcgcatgcaggagaggcttataaagagcttcatcagagacctgtctttatatcttcaacacatcagagaatccgcatgtgtgaaggtggtggccgctgtctctatgtgggatgtttgtatggaacgcgggcaccgtgatctcgaacagttcgagagagtgcacagatacatctcggaccagctgtttacaaattttaaggagcgcacagagcgccttgttatatctccactgaaccagctgctgagcatgtttaccggacctcataagctcgtgcaaaaaagatttgacaagctgttggatttctataactgcacagagcgtgccgagaagcttaaggataaaaaaaccctggaggaactccagagtgctaggaataattacgaggccctgaatgctcaacttcttgatgaactgccaaagtttcatcagtacgcacagggactcttcactaattgtgtgcatgggtatgccgaggctcactgtgattttgtccatcaggccctagagcagcttaagcctctcctgagcctcctgaaggtagccggtcgtgagggtaatcttattgctatctttcacgaggaacattcacgggtgctgcaacagctgcaagtcttcaccttctttccagagagtcttccagctaccaaaaaaccatttgagcgaaaaaccatcgatagacagagtgcacgtaagcccctgttggggctgccatcatatatgcttcagagcgaggagctaagagcgagcttactggctcgttatcccccagagaagttgttccaagcagaacggaacttcaacgccgcacaagacttggatgtgagtctacttgagggagatctggtgggtgttatcaaaaaaaaggaccctatgggctcacagaatcggtggctgatagacaacggcgtaaccaagggattcgtgtactcctcatttctgaaaccgtataaccctaggcgttcacattcagatgcttccgtgggttcacatagttctaccgaatctgaacacggaagtagcagtccacgattcccgaggcagaattctgggagtacactgaccttcaacccttccagtatggcagttagcttcacttccggttcctgccagaaacaaccacaggatgcatccccccctcccaaggaatgtgatcaagggaccctgagcgcaagcctcaatccctcaaactctgaatcaagtccaagtagatgtcccagcgatccggacagtacctcccaacctaggtcgggcgactcagctgatgtcgcaagggacgtcaagcagcccaccgccactcccagatcatatcggaatttcagacacccggagattgtgggctactctgtcccaggcagaaacggacagagtcaggacttggttaaggggtgtgcccggaccgcgcaggcgcctgaggataggagcacagagccagacggcagcgaggccgaagggaaccaagtgtacttcgcggtgtacacatttaaggcacggaatccaaatgaattgtccgtctcggcaaaccagaaactgaaaatcttggagttcaaggacgtcaccggaaatactgagtggtggctagcagaagtcaatggtaaaaagggttacgtaccatccaactatatcagaaagaccgagtatacttag

SEQ ID NO: 14496 - DNA, 3186 bp, synthetic construct
  source 1..3186: mol_type = other DNA; note = Synthetic coding sequence
atgctgcgaacggccggacgggacggcctatgtcgcctctctacatatctggaagagctagaggccgttgagcttaagaagttcaagctgtacctcggcactgcaacagaattaggtgagggcaaaatcccttggggcagtatggagaaggcgggcccccttgagatggcccagctcctaattactcattttggcccagaggaagcctggcgtttggccctctccaccttcgaacggatcaacaggaaggacctgtgggagaggggtcaaagggaggacctagtccgcgacacaccgccggggggaccctccagccttggaaatcaatctacgtgcctacttgaggtgtctttagttacacctaggaaggacccacaagagacatatcgggactatgtcaggaggaagttccggctgatggaagataggaacgcccgtcttggagagtgcgtcaatctctctcatcgatacaccaggcttttgctagtgaaagaacactccaatcccatgcaagtccagcagcagcttctcgatacaggcagggggcatgcgaggaccgttggtcaccaagcgtcgcctattaaaatcgagacattgttcgaaccagatgaagagcgtcccgagcctcccaggacggtcgtcatgcaaggcgcagccgggatagggaaaagcatgctggctcacaaagtcatgctagactgggccgatggcaagctatttcaggggagattcgattatctgttctatataaattgccgggaaatgaatcagagtgcgaccgaatgtagcatgcaggaccttattttttcttgctggcccgagccatccgccccattacaggagctgatacgcgtgccagagaggttgctattcatcattgacgggttcgacgagctgaaaccctcattccacgatccccaggggccatggtgtctgtgctgggaggaaaagcggcctactgaactgctcctcaactccttgatccggaaaaagctattacctgagctgtccttgttaattaccactcggcccactgctcttgagaaactgcacagactgttggagcatcctagacacgtggagatcctgggattctccgaggctgagcggaaagaatatttctataagtactttcataacgcagaacaggccggtcaagtgtttaactacgtgagggataacgagccgttattcacaatgtgcttcgtgccgctagtatgttgggttgtctgtacatgtctgcagcagcagctggagggcggaggtctgttgcgacaaactagccgaaccacaactgccgtgtatatgctctatctgctgtcactgatgcagccaaaacctggcgccccaagattgcagccaccccctaaccagcgaggtctctgcagcctggccgccgacggtctgtggaaccagaaaatcttatttgaagagcaggacctgaggaagcatgggcttgatggtgaagacgtgtccgccttcctgaatatgaatatcttccagaaggacattaattgcgaacgatattattcctttatccacctctctttccaggagtttttcgcagcaatgtactacattctggatgaaggagaggggggcgccggtcctgatcaggatgtgactcggctattgaccgaatatgccttcagcgagcgatcattcctggccctgaccagtcggtttctgttcggattactgaatgaagagacgcgcagccatctggaaaagtctttgtgctggaaggtttcaccccacattaaaatggatctcttacaatggatacaaagtaaggcccagtctgacgggagcaccctgcagcaggggtcactcgagttcttttcctgtctgtatgaaatccaggaggaggagtttatccagcaggccttgtcacatttccaggtgatagtcgtctctaatattgcctccaaaatggaacacatggtatccagcttctgcctgaagcggtgccggtccgcccaggtgctgcacttgtatggtgccacatattctgctgacggggaggaccgggcgcgatgtagtgcgggggcccacacccttttggtgcagctacccgaaagaacggtcctgttagacgcatatagtgaacatctagccgcggccttgtgtacaaacccaaatctgatcgaactctccttatacaggaacgctctggggtcccgtggcgtgaaactcctgtgccagggtctgaggcacccgaattgtaaattgcagaacctaagactcaagcgttgccggatctcttctagcgcttgtgaagacctctcagccgctctgatagctaacaagaatctcacaaggatggacttgagtgggaatggtgtgggttttcccggaatgatgctgttatgcgagggtctccggcacccacagtgtaggctccaaatgattcagctgcggaagtgccagctggagtctggtgcttgccaagaaatggcgtccgttttgggaactaacccacacctggtagagctcgatctgaccggcaacgcgttagaagacctagggcttaggcttctatgccaggggctgaggcatccggtttgccggctaagaacgctttggctgaagatttgcaggttgaccgctgcagcctgcgatgaactggcaagcactctgtccgtaaatcaaagtctgcgggaactggatttgagtctcaacgaactgggcgacctaggggtgctgttgctgtgtgaagggttgaggcaccccacatgcaagcttcagaccctgcgtttaggcatttgcagattggggagcgcagcgtgtgaggggttgtctgtggtgctgcaggctaaccacaatttacgcgagcttgacctttcattcaatgacctcggggattggggcttgtggttgcttgccgaaggactgcagcatcccgcgtgccgcctgcagaagttgtggcttgatagctgcgggctgaccgccaaagcatgcgaaaatctatatttcacgttaggaataaaccagactttaactgatttatacctaacaaataatgccctgggcgacaccggtgtaagattgctctgcaagcgtctctcccacccgggctgcaagctccgagtgctgtggctattcgggatggatctgaacaagatgactcactcgagacttgctgcgttaagggtaacgaagccctacttagacatcggttgttag

SEQ ID NO: 14497 - DNA, 3963 bp, synthetic construct
  source 1..3963: mol_type = other DNA; note = Synthetic coding sequence
atggctaatgactcccccgccaagtcccttgttgacatcgaccttagttcactgcgagatccagccggaatcttcgaactggtggaagtggtggggaatggcacgtacggccaggtctacaaagggcgacatgtgaagacagggcagcttgctgctattaaggtcatggatgtcaccgaagatgaagaggaggagatcaagttagaaattaatatgctcaagaagtactcacaccacagaaatatcgctacctattacggcgcctttattaagaagtctccgcctggacatgacgaccagctctggctcgttatggaattttgcggtgcgggttctatcactgacctggttaaaaacactaagggtaacactctgaaagaagattggatcgcctacatatctcgggagattctgcgtggcctcgcccacctacatatccaccacgttatacaccgagatatcaaagggcagaacgtcctgctgaccgagaatgctgaggtgaaactcgtagacttcggtgtttcagcccagctggatagaacggtgggccgccgtaacacttttattggcaccccatattggatggctcctgaagtgatagcctgtgacgagaatccagacgctacctatgactatcgctccgacctgtggtcatgcggcatcacagccatagagatggccgagggcgctccaccactgtgcgatatgcaccccatgagagcattgttcctgataccaagaaatccacccccccgcctgaaatctaaaaagtggtcaaagaaattcttcagcttcattgaaggatgcttggtcaaaaattacatgcagagaccttcgaccgaacagctgttaaaacacccatttatcagggatcaaccgaacgagaggcaggtacgtatccagctgaaggatcacatcgaccgcacgaggaagaaacgcggagaaaaggacgagactgagtacgaatattctggttctgaggaagaagaggaggaagtgcccgaacaggagggtgaaccaagctctattgtcaacgtgccaggggagagcaccctgcgaagggactttctcagattacagcaagaaaataaggagcggagcgaagccctacgcagacagcagctgctccaggagcagcagttgcgagagcaagaagaatacaagcggcaattactggcagagcgtcagaagcgcatcgagcagcaaaaggaacagcggaggaggctggaagaacaacagcggcgcgaacgcgaggcccgtcgacaacaggaaagggagcaacggagaagggaacaagaggagaagcgtcggcttgaagaattggagcgccggagaaaagaggaggaggaacgtaggagagccgaggaggaaaagcgcagagtcgagcgggagcaggagtatatcagacggcagttggaggaagagcagagacacttggaggtgctgcagcagcagctgctgcaggaacaagccatgctattggaatgtagatggcgagagatggaggaacatcgacaggctgagaggctgcagagacagctgcagcaagaacaagcctacctactttcgttgcagcatgaccatagaaggccccatccccagcatagccagcagcctcctcctccccaacaggaacgttctaagcccagcttccatgccccagagcccaaggctcattatgagcccgccgaccgagcgcgcgaagttgaagatcgatttagaaagactaatcacagctcccccgaggcacaatccaaacagacagggcgggtgctcgagcctcccgtgccttcaagaagcgaatcattttctaatggcaactccgagtctgtccaccccgctcttcagaggcccgcggagccacaggttcagtggtcacatcttgcaagtctcaaaaataacgtgagccccgtgtctaggagccactcattcagcgatcccagtccaaagttcgcgcaccaccacctcagatcccaggacccctgtccgccttcccggtctgaggtcctgtctcagagctctgattctaaatctgaagctccggaccccactcagaaagcgtggtcccggtcagatagcgacgaggttccgcctagggtgcccgtaagaacaactagcaggtcacccgtgctgtcacgcagggactctcctctgcaaggctcagggcagcagaacagtcaagcaggccaaagaaactccacctcatcaatcgagccacgtctgctttgggagagagtcgaaaaactggtcccccgacctggttcaggttctagctcgggatctagcaactctggctcgcagccaggaagccatccaggatctcagtcgggatcaggcgagaggttccgggttcgttcaagttcaaaatctgaaggcagcccttcccaaagactggaaaatgctgttaaaaagcccgaggacaaaaaggaggtattccgtcctcttaagcccgccgtccggatcgatctcacagctcttgccaaggaactccgcgctgtggaggacgtccgacctccccataaggttacagactatagcagttcctctgaagaatccggaactactgatgaggaagatgatgacgttgaacaggagggagcagatgaatccacgtctggtcctgaagacacaagagcagcctccagcttaaacctgtcgaacggcgagaccgagagtgtgaagaccatgatcgtccatgacgacgtggaatccgaacccgccatgactccctcaaaagagggtacgctcattgtgaggcaaactcagtctgcctcatccaccctgcagaaacataaatcttcatcctctttcacgccattcattgaccctcgcctgcttcaaattagccccagtagcggcactacggtaacctctgtggtgggcttcagttgcgacggtatgaggcccgaggcgatccgtcaagaccccacccgaaaggggagtgtggtgaacgtcaacccgacaaacacacgtccacagtctgataccccggagatcagaaagtacaaaaaacgcttcaactcagagatcctctgcgccgccctgtggggtgtgaacctgctggtcggtactgagtctggtctgatgttgctcgacagatcaggacagggtaaagtctacccactaatcaacaggaggcggttccagcagatggacgtgttagagggactgaatgtgctggtcacaatatccggtaaaaaagataaactgcgggtctattatctatcatggcttaggaacaagattctacacaacgatccggaggtcgaaaaaaagcagggctggacaacagtgggtgaccttgagggctgcgtgcactacaaggtcgtaaagtatgagcggattaagttcctggtgatcgccctgaagtcctccgtggaagtgtacgcttgggcccccaagccttatcacaagttcatggcctttaagagtttcggcgaactggtgcacaaaccgctgttagtcgacctgacagtagaggaagggcaacgtctgaaggttatatacggatcgtgcgctgggttccacgcagtggatgtggatagtgggagtgtctacgatatttacttgcctacccatatccagtgcagcatcaaaccgcatgccatcattatactgccaaacactgacgggatggagctactggtctgttacgaggacgagggggtctacgtaaacacttacggaagaatcactaaagacgttgttctgcagtggggagagatgccaacatccgtcgcctatattagatctaatcagactatgggctggggggaaaaagcaatcgagattcggagcgtggaaaccggacatctggacggcgtcttcatgcacaagcgagcacagcgactaaaattcctttgcgagaggaacgataaagtgtttttcgctagtgtgcggagcggcggaagcagtcaggtctatttcatgaccctgggaagaacctcattactcagttggtag

SEQ ID NO: 14498 - DNA, 606 bp, synthetic construct
  source 1..606: mol_type = other DNA; note = Synthetic coding sequence
atgtacactctgttgtcaggcttgtataagtacatgttccagaaggatgaatactgcattctaatcctaggcttagataacgctgggaaaaccacattcctggaacaaagtaagacaagatttaataaaaactacaaaggaatgagcctctcaaagataaccactactgtcggtctcaacattggaactgttgacgtgggcaaagctcgcctgatgttttgggacttggggggccaagaagaactacagtctttgtgggataaatactatgctgagtgccatggcgtaatttacgtcattgacagtaccgatgaagaacgactagccgagagcaagcaggccttcgagaaggtggttacatcagaggcactgtgcggcgtgcctgtgctcgtgctggcgaacaagcaagacgtagagacgtgtctgtcaatacccgatataaaaactgctttctctgattgcacatccaaaatcggtcggcgggactgtctgactcaggcctgtagcgctctgacgggaaagggagtgagggaaggaatcgagtggatggtgaagtgtgtggtgcggaacgtgcaccggccaccccgccagagggatatcacctag

SEQ ID NO: 14499 - DNA, 1329 bp, synthetic construct
  source 1..1329: mol_type = other DNA; note = Synthetic coding sequence
atgcgaggagcaatggagttggaacctgagctcctcctgcaggaggcaagggagaatgtggaggccgcacagtcttatcgacgggagttaggccacaggcttgaagggctgagagaggcacgtcgacagataaaagaaagcgcatcacaaactagggacgttctgaagcaacatttcaatgacctgaaggggactttggggaaacttctggacgaaaggcttgtcactctcctgcaggaagtagatactattgaacaagagactatcaaacctctggatgattgtcagaagctcatcgagcatggagttaacacagctgaagatctggtgcgtgagggggagatcgcgatgctggggggcgtaggcgaggagaatgaaaaactctggagctttaccaagaaggcctctcatattcaactggatagcttgcctgaagtgcctctgctggtagatgttccatgcctcagtgcacagttggacgactcaatcctgaacatcgtaaaggatcatatcttcaagcacggtacagtggcgtcccggccacccgtacaaattgaggagctcattgagaagcccgggggcatcatagtgcgttggtgtaaggtcgacgacgatttcaccgctcaggactatcggctgcagttccggaagtgtacgagcaatcactttgaggatgtctacgttggctctgagaccgagtttatcgtcctccatatcgacccaaatgtggattatcaatttagagtctgcgcacggggcgacggcaggcaggaatggtctccgtggtccgtgccccagatcggccattccacactggtgccacacgagtggactgctgggtttgaaggatactccctgagctccaggcggaacattgccctaaggaatgatagtgaatcctccggagtactgtatagcagggcccctacctacttctgtgggcagacgctgacatttcgcgtcgagaccgtggggcagcctgatcgaagagactctatcggagtctgcgccgaaaagcaggacggctacgacagtttacaaagagatcaggcggtatgtattagtacgaacggggcggtatttgtaaacggaaaagagatgactaaccagcttccggcagtgacgagcggatcgaccgtaaccttcgatattgaggcagttacgctagggaccaccagcaacaatgagggaggccacttcaagctgcgcgtgacgatttcttccaacaaccgcgaggttgtgttcgattggttgttagatcagagctgcgggtccctatactttgggtgcagcttcttctacccagggtggaaagtgcttgtattctag

SEQ ID NO: 14500 - DNA, 1428 bp, synthetic construct
  source 1..1428: mol_type = other DNA; note = Synthetic coding sequence
atggcagcattgaccacactgtttaagtatatcgatgagaaccaggatcgttacatcaagaagcttgccaaatgggttgcaatacagtccgtgagcgcatggccagaaaagaggggcgaaataaggcggatgatggaagtggccgctgctgacgtgaagcagttgggagggtcagtggaactggtggatatcgggaagcagaaactgccagacggctccgaaattcccctgccccccatcttgttgggccggttaggctccgatccccaaaagaagaccgtgtgcatctatggccatctggacgtccaacccgcagccttggaagatggatgggacagtgagcccttcacactcgtcgaacgtgacggaaaactgtacggtcgaggaagcaccgatgataaaggtcctgtggcagggtggatcaacgctctggaagcttaccaaaagacaggacaggagatcccagtaaatgtccgcttctgcctggaaggcatggaagaaagcggaagcgagggtttggacgaattgattttcgctaggaaagatacctttttcaaggacgtcgactacgtctgtatttcagataactattggctcggcaaaaagaagccatgtataacatatggcttgcgcgggatatgctactttttcatagaggttgagtgttccaacaaggacctgcactcaggcgtctacggcgggagtgtacacgaggccatgactgatttgattctcctgatgggatcacttgtcgacaagcgtggaaatattctgatacccggcattaacgaagcggtcgctgctgttaccgaggaggagcacaaattgtatgacgatatcgacttcgacatcgaggagttcgctaaggacgtcggcgcacagattctcctgcactctcacaaaaaggacatcctcatgcaccgctggaggtatccctccctcagcttgcacggtatcgaaggagccttttcgggatcaggagcgaagactgttattcctcggaaagtggtaggaaaatttagtatccgcctcgtacctaacatgaccccagaagtggtgggggagcaagtgacctcgtacctgacaaagaaattcgcagagctcagatctccaaacgagtttaaggtatacatgggccatggaggaaagccttgggtgtcagatttttcccatcctcactacctggcaggccgacgcgccatgaaaaccgtctttggcgtggagcccgatttgaccagggagggtgggtccatccctgtaaccctcacctttcaggaagctactggtaagaatgttatgttgctccccgttggcagcgcagatgacggcgcccatagccaaaacgaaaaacttaacagatacaattatatcgaggggacaaagatgcttgctgcctacctttatgaggtcagccagcttaaggattag

SEQ ID NO: 14501 - DNA, 6291 bp, synthetic construct
  source 1..6291: mol_type = other DNA; note = Synthetic coding sequence
atggccgaggttaccgtgcctagagtgtatgtcgtatttggcatccattgtatcatggccaaagcatcgtcagatgtccaggtgtcgggatttcaccggaaaattcaacatgtgaagaacgaactgtgtcacatgctgtccctggaggaagtcgccccagttctccaacaaaccctgctccaggataatttgctgggtcgtgtgcattttgatcagttcaaggaggctcttatcctgatcctgtctcgtaccctgagcaatgaagagcatttccaggaacctgactgttcactggaagcccaaccaaaatacgtgcggggagggaaaagatatgggcggcgctccctgcccgaatttcaggagagcgtggaggagttcccagaagtgacggtgatagaacctttggacgaagaggcacggccctcacacatccccgccggcgactgttctgaacattggaagactcaacgcagtgaggagtacgaagccgagggtcagctccggttctggaaccctgacgacctgaacgcgtcacagtccggcagctctcctccccaggactggatcgaggagaaactgcaggaggtgtgtgaggacctcggaatcacaagggacggccatttaaatcgcaagaaactcgttagtatctgcgaacaatacggactgcaaaatgttgatggagaaatgctggaggaggtattccataacctagaccccgacgggaccatgtctgtggaggactttttttatgggcttttcaagaacggcaaaagtctcaccccatcagcctctaccccatatcgccaactgaaacggcacctgtcaatgcagagttttgatgaatctggcaggagaactaccaccagcagcgccatgacgtctactattggattccgagtgttctcttgccttgatgacggtatgggacacgccagcgtggagcgcattctagatacctggcaagaggaggggatcgaaaattcccaggaaattctcaaggcacttgatttttctctcgatggtaacattaacttgaccgagctgacccttgccttggaaaacgagttgcttgtcaccaagaactcaatccatcaggctgccttagcgagttttaaagccgagattcgccatctgttggaacgtgtcgaccaggtggtaagagaaaaagagaaactgaggtcagatctggataaagctgaaaagctgaaatcactgatggcctctgaagttgacgatcaccatgccgccatcgaaagacgcaatgaatataacctgaggaagctcgacgaggaatacaaggaaaggatcgcagcgctgaagaatgagcttcgcaaggaaagggagcagattctccagcaggccggcaagcaacgcctcgaattggagcaagagattgagaaggctaagaccgaggagaactacattcgggacaggctggcactctcactcaaagagaatagcaggctggagaacgaactactcgagaatgctgagaaactagcagaatatgagaacctgacaaataaacttcagcggaatttagaaaatgtgttggccgagaagttcggcgacctcgatccctcctccgctgagttttttctccaggaggagcgcctgacccagatgcggaacgagtacgagcggcagtgccgggttctgcaagaccaagtggacgaacttcagagcgagctggaagaatacagagctcaggggcgagtcctgagactcccactgaagaattcacccagcgaggaggtagaggccaacagcggtggcatagaaccggaacacggactcggcagcgaggaatgtaatcctcttaatatgagcattgaagctgaattggtgatcgaacagatgaaggaacagcatcatcgtgatatctgctgtctgaggctggaactggaagataaagtgaggcactacgaaaagcagctggatgagacagttgttagttgtaaaaaggcacaggagaatatgaagcagcgacacgaaaatgagactcatactctggaaaaacagataagcgaccttaaaaatgaaatcgcagagctccagggccaggctgcggttcttaaggaagcccatcacgaggcaacttgccgccacgaggaagagaaaaagcagctgcaagtgaaattagaagaagagaagacacacttgcaagagaaactgaggctccaacacgagatggagctcaaagccagattaacacaggcgcaggccagctttgagagggagcgtgaagggcttcaaagcagcgcttggaccgaggagaaggtgcgaggcctcacacaggagctcgaacagtttcatcaggagcagctgacatccctggtcgagaagcacacactggagaaggaggagcttcgcaaggagctgctggaaaagcaccagcgcgaactacaggaagggagagagaagatggaaactgaatgcaacagaagaactagccagatcgaagcgcaatttcagtccgattgccagaaggtgaccgaaaggtgcgagagtgcacttcagagcttggagggacgttaccgccaagagctaaaagatctacaggagcagcagcgcgaggagaagtcgcagtgggaatttgaaaaggacgaattaacccaggaatgtgctgaggctcaggagcttctgaaagagacacttaagcgcgagaagaccacctcacttgtactaactcaggaacgggagatgctagagaaaacctacaaagagcatctgaatagcatggtggttgaacgacagcagctgctccaagacctcgaagatctacgaaacgtcagtgaaacacagcagtctctgttgtccgatcagattctggaacttaaaagttcccacaaacgcgaactccgcgagagagaggaggtgctgtgccaggccggggcctcagagcagttagctagccagagattggagcgcctagagatggagcacgaccaagaacgacaagagatgatgagtaagctactggccatggaaaatattcacaaagcaacttgcgagacagctgaccgcgaaagggccgaaatgtcaacggagattagccgtctccagagcaagataaaggagatgcagcaggcaaccagccccttgtcgatgttgcaaagtggatgccaagtgattggcgaggaggaagttgagggggatggtgccctttctctactccagcagggggagcagttactggaggaaaacggggatgtcctgctgtccctgcagcgagctcacgaacaggccgttaaggagaatgtgaagatggccacagagatttctaggctgcagcaacggctccagaagctggagccaggactggttatgtcctcctgcctcgatgaaccggctaccgaattcttcgggaacactgcggaacagacagaacagttcctccagcagaacaggacgaagcaagtcgaaggcgtgactaggcggcacgtgctgtctgatctggaggatgatgaagtacgtgacctggggtccactgggacatcgtcggtacagcgccaagaagtgaagatcgaggagagcgaggcttccgtagaagggtttagcgaacttgagaactctgaagagactagaacagagagctgggaactgaaaaaccagataagccagctgcaggagcagttgatgatgctctgtgcagattgcgaccgtgcttccgagaagaagcaggatcttctcttcgacgtgtcagtcctcaagaagaaattgaagatgttggaacgcattcccgaagcttccccaaagtataaactgctctatgaggacgtgagccgtgagaacgattgcctgcaggaagaactccgcatgatggaaactagatacgatgaggccctcgagaacaacaaggaactgactgcagaagtatttagactgcaggatgagctgaaaaagatggaggaggtgacagaaaccttcttaagcctggagaagtcttacgacgaagtgaagatcgagaacgagggtcttaacgttttggtactgaggttgcagggtaaaattgagaaattacaggagtctgtggtacaaagatgcgactgttgtctttgggaggcaagcctcgagaatctggaaattgagcccgatggtaatattcttcagctgaatcaaacactcgaggagtgtgtcccaagagttagatctgttcaccatgtcatcgaggagtgcaaacaggaaaaccagtatctggaaggaaacacgcagctactggagaaagttaaggcacacgagatagcctggcttcacggcacgatccagacgcatcaggaacgacccagagttcagaatcaggtcattctagaggaaaatacaaccctgcttggattccaggataagcacttccagcaccaggctaccattgccgagttagagctggaaaagaccaagcttcaggagctgactcgaaagcttaaggagcgcgtgactattctggtgaagcagaaggacgtgctgagtcatggtgagaaagaggaggagctcaaggctatgatgcacgatctccagatcacatgctcagagatgcagcagaaagtagagctgctgcggtatgaatccgagaagcttcaacaggagaactctatcttgcggaacgaaatcaccaccttgaacgaagaggacagtatttctaatttgaaacttggcacactcaatggatctcaagaagaaatgtggcagaagacagaaacagtcaagcaggagaacgctgcagtccagaaaatggtggaaaacttaaaaaaacagatttcggagttgaagattaaaaaccaacagctggatttggagaacacggagctgagtcaaaaaaactcccaaaatcaagaaaaattgcaggagctgaaccaacgactgaccgaaatgctttgccagaaagagaaggaaccaggcaattcagctctggaagagagagagcaggaaaaatttaatttgaaggaagagctggagaggtgtaaagtgcagtccagtactcttgtaagcagtctcgaagccgagctctctgaggtcaagatccagacacatatcgtgcaacaggaaaatcacctgctgaaggatgaactggagaaaatgaagcagctccacaggtgccccgatctgagtgattttcagcagaagatctcctccgtgctgtcctataatgaaaagctgctgaaggagaaagaagccctgtctgaagagctgaattcatgcgtggacaaactagcgaaatcatccctgcttgaacaccgaatagctacaatgaagcaggagcagaagtcctgggagcatcagtctgcaagtctgaagtcgcaacttgtggcgagtcaggaaaaggtccagaatctggaagatactgttcagaacgtaaacctgcagatgagtaggatgaaatcagatttgagagtgacacaacaggagaaagaagctcttaagcaggaggttatgtccctgcacaaacagctgcagaatgctggaggaaagtcttgggcacccgagatcgcgacccacccttccggtcttcacaaccaacagaagcggctttcttgggacaaacttgaccacctgatgaatgaagagcagcagctgctttggcaagagaatgaacgactgcagacaatggttcagaacacaaaggctgagctaactcacagtagagaaaaggttcgccaactcgaaagtaatctcttacctaagcatcagaaacacctgaatccatcaggcacaatgaatcctactgagcaagaaaaactctctctgaagcgggaatgcgatcaattccaaaaggaacagtccccagctaacaggaaagtctctcaaatgaatagcttggagcaggaattggagactatccacttggaaaatgaaggattgaagaaaaaacaggtaaagttggatgaacagcttatggagatgcaacacctgagatcgacggctacccccagcccctccccacacgcctgggacttgcagctgctgcaacagcaggcgtgtcctatggtgccccgagagcaattcctgcagctccaaagacaattactccaggcagagcgtatcaatcagcacctacaggaagaattggaaaatagaactagtgagaccaacaccccgcagggtaatcaggaacagctcgtgaccgttatggaggagagaatgattgaggtagagcagaagttgaaacttgtaaagcgactgctgcaagagaaggtgaatcagctaaaagagcaagtctccctcccgggacacctgtgctcaccgacctctcatagttccttcaatagctcctttaccagtctttactgccactag

SEQ ID NO: 14502 - DNA, 1176 bp, synthetic construct
  source 1..1176: mol_type = other DNA; note = Synthetic coding sequence
atggctgctctgaccacactgttcaaatacattgacgaaaaccaagatcggtacattaagaagttggctaaatgggtggccattcagagcgtgagcgcgtggccagaaaaacgtggcgaaatcaggcgaatgatggaggttgcagccgctgacgtcaaacagctaggcgggagcgtagagctggtagacattggtaagcagaaagagattcctgtgaacgtacggttttgccttgagggcatggaagagagtggtagtgaaggactcgacgaactgatctttgcccggaaagatactttttttaaagatgtagactatgtttgtataagcgataattactggctgggaaagaaaaaaccgtgtattacatacgggttgcgggggatctgctacttttttatagaagtagagtgcagcaataaagacctacactccggggtgtacggcggcagcgtccacgaagccatgaccgatctcattctgcttatggggtcactagtagacaaaagagggaatattctcatacccggcattaatgaagctgttgccgccgtgacagaggaagaacacaaattgtatgatgatatcgatttcgatatcgaagaatttgcaaaggacgtgggcgcccagatactgctccatagccacaagaaggacatactgatgcaccggtggagatatccatccctgagtcttcatgggattgagggggccttctctggcagcggagcgaaaacagtgataccgcggaaggtggtgggaaaatttagtatccgattggtccccaatatgactcccgaggtggtaggggagcaggtgaccagctacctcacgaaaaagttcgcggagctgcggtcccctaatgaattcaaggtgtatatggggcatggtggcaagccctgggtttcagatttttcccatcctcactatctggccggccggcgggctatgaaaaccgttttcggcgtcgaaccagacctgacgagggagggaggctcaatccccgtaaccctcaccttccaagaagccactggcaagaatgtgatgctacttccagtgggcagtgcggacgatggcgcccacagccaaaatgaaaaattgaatcggtataattacatcgaggggacaaagatgctggctgcctatttgtatgaggtgagccagctgaaagactag

SEQ ID NO: 14503 - DNA, 5970 bp, synthetic construct
  source 1..5970: mol_type = other DNA; note = Synthetic coding sequence
atggacgaggtggagcaggatcaacacgaagccaggttgaaggagctcttcgatagctttgacaccaccggcactgggtctctcggacaggaggagttaaccgacctttgtcacatgctgtccctcgaggaagttgctcctgttttgcaacagacacttcttcaggataacctgcttgggcgtgtacactttgaccaattcaaggaggccctcatactgatcctttcccggactttgtccaatgaggagcattttcaagagccagattgcagtctggaagcacagcctaaatacgtgcgggggggtaaacgctacggccgcagatcccttcccgagttccaggagagcgtggaggagttcccagaagttaccgtcatcgaaccactggacgaagaggctaggccctctcatatccccgcaggtgactgtagcgagcactggaaaacacaaaggagtgaggagtacgaggctgaagggcagctacgtttttggaaccccgacgacttaaacgcatctcaatctggaagctccccacctcaggattggatcgaagaaaagctgcaagaagtttgtgaggacctgggcattacccgggatggacacctcaatcgcaagaagcttgtaagtatttgcgaacagtacggcttgcaaaacgtcgatggcgagatgctcgaagaagtgttccacaaccttgacccagatggaactatgagtgtagaggattttttttacggactatttaaaaacggcaaaagcctgacaccaagcgcttccacgccatatagacagctgaaaagacatctgagcatgcagagtttcgatgaaagcggcaggagaaccactacttcaagcgcgatgacctccacgattggatttagggtcttttcctgtttggacgatggcatggggcatgctagcgttgaacgtatcctggacacctggcaggaggaaggcattgagaactcccaggagatcctgaaagcgctggatttcagcctggatggcaacatcaatctaactgagctaactctggctctggaaaacgagctgcttgtaaccaagaacagcattcaccaggctgcactcgcaagttttaaggcggagataaggcatcttttggagcgcgtggatcaggtggtccgtgagaaagaaaaattgcgctcagatctggacaaggctgaaaagttgaagagtttaatggcctctgaagtggatgaccatcatgccgccatcgaaaggcggaatgaatataaccttagaaaattggacgaagaatacaaagaaagaattgccgctcttaaaaatgagttgaggaaagaacgggaacagattctgcaacaggccggaaaacagcggctagagctggagcaggaaattgaaaaggccaaaacggaagagaactatatacgcgaccgcctggctctttcattaaaagagaactctcggctggagaatgaactgctcgaaaatgcagagaagctcgctgagtacgagaatctgacaaacaaattgcaacggaacctcgagaatgtcctcgctgaaaaattcggggatctcgacccatcttcagctgaatttttcttgcaagaggagcgacttacacagatgcgcaacgaatacgaacgacagtgccgggtgcttcaggaccaagtggatgaactgcagtccgagctggaagagtatagagcacagggaagggttctgagactgcccctgaaaaactctcctagcgaggaggtcgaagcaaattcaggcggaatcgaacctgaacatggcctgggcagtgaggagtgcaatcccttgaacatgagtatagaagccgaactggtgattgagcagatgaaagaacagcatcaccgcgatatatgctgtctgcgcctggagctcgaggacaaagtgcgacattacgagaagcagcttgacgagacggtggtgtcgtgcaagaaagcccaggagaatatgaaacagaggcatgagaacgagacacacaccctcgagaaacagatttctgacctgaaaaatgagatagccgaacttcagggtcaggccgcggtgctaaaagaggctcatcacgaggcgacatgccgccacgaggaggagaaaaagcagttacaagtgaaactcgaagaagagaaaacacacctgcaggagaaactgcggctgcagcacgagatggaactcaaggcccggctaactcaggctcaggcctctttcgagagagaacgcgaggggctgcaatcctcggcgtggacagaggaaaaagtacgggggctcactcaggaattagagcagttccaccaggagcagctcacttctttggttgaaaaacacacccttgagaaggaggaactgcggaaagagctactggaaaaacatcagcgtgaactgcaggaaggccgcgaaaaaatggaaaccgagtgcaatagaaggacctcacagattgaagcccaatttcaaagcgactgccagaaggtgaccgaaagatgtgaatctgccctgcaaagcctggagggaagataccgccaggagcttaaagacttgcaagagcagcagcgggaggagaaaagccagtgggagttcgaaaaagatgagttgacacaagaatgcgcagaagcgcaggaattgcttaaggagactttgaagagagaaaaaaccacctcgttggtgttaacccaagaaagagagatgttagagaagacttataaggagcacctgaatagcatggtggtggaacggcagcagctgttgcaggatctggaggacctgcggaatgtgtctgagacgcagcagtctctccttagtgaccagatactggagctaaagtcttctcacaagcgagaactccgggaacgggaagaggtgttgtgccaggctggtgcttccgagcaactggcctcacaacgactggagcggcttgaaatggaacacgaccaggagagacaggaaatgatgtctaagctgttggctatggagaatattcacaaggctacatgcgagacagcagatagggaaagagcggagatgtccaccgagatctctagacttcagagcaagattaaagagatgcaacaagccacttctcccctgtcaatgctgcagagtggatgtcaggttatcggagaagaggaggtagagggggatggcgccctgtcattgttgcaacagggagagcagctgctcgaggagaacggtgatgtgctgctgtcgcttcagcgtgctcacgagcaggcagtgaaggagaacgtgaaaatggccacggagatctctcgtctccagcagagattgcagaagttagagcctgggcttgtgatgtctagctgcctcgacgaacctgctactgagttttttggtaataccgctgagcaaaccgaacagttcctgcagcagaataggacaaaacaagttgagggtgtaactaggcggcacgtactgtctgaccttgaagacgatgaagtaagagatcttgggagcaccggcacatctagtgtacagagacaggaagtaaagatagaagagtcagaggccagcgtggaggggttttccgaactcgagaattctgaggaaactcgaactgagagctgggagctaaagaaccagatctctcaactgcaggagcagctgatgatgctgtgcgctgactgtgatcgcgcttctgaaaagaaacaggacctgctatttgacgtgagcgtgctgaagaaaaagctgaaaatgttggagaggattcccgaggcttctcctaaatataagttactgtatgaggacgtgagcagggaaaatgattgcctccaggaagagctgcggatgatggagacccgctacgatgaggcgctcgagaataataaggaattgaccgcggaggtctttcgtctgcaggacgaactgaagaagatggaagaggtgactgagacgttcctgtcactagaaaaaagttatgacgaagttaagatagaaaatgaggggctaaatgtccttgtgcttagacttcaggggaagattgagaaactgcaggagagcgtggtgcaaagatgtgattgctgcctctgggaggcatccttagagaatctggaaatcgagcccgacggcaacattctgcagctgaatcaaacattggaggagtgcgtgcccagggtacggagcgtccaccacgtgattgaggagtgtaaacaagaaaatcagtacttagaagggaacactcagctgctggaaaaagtcaaagctcacgagattgcttggctccacggtacaatccagacacaccaggaaagaccaagggtgcaaaaccaggtcattctcgaagaaaacaccactctactggggtttcaggataaacacttccagcaccaagcgactatagcggagctggaactcgaaaaaaccaaactgcaagaattgaccagaaagcttaaggagcgggtgaccatcctggtcaaacagaaggacgtcctgagccacggcgaaaaggaggaagagctcaaggctatgatgcacgacttgcaaattacatgtagtgaaatgcagcagaaagtcgagctcctcaggtacgagtccgaaaaactgcagcaggaaaattcgattttacgtaatgagattacaaccctgaatgaagaggatagtatttcaaatctgaagctaggcacactgaacggctctcaggaggaaatgtggcagaagaccgaaacagtgaaacaggagaacgccgcagtgcaaaagatggtggagaatctgaaaaaacagatttctgagcttaaaataaagaatcagcagcttgaccttgagaacaccgagttgagccaaaagaattcacagaaccaggaaaaactgcaggagttgaatcagcggctaacagagatgctctgccagaaagagaaagagcccgggaacagcgccttagaggagcgtgagcaggaaaaatttaaccttaaggaggagcttgaacgctgcaaagtgcagtcttcaacactggtgtcgagtttagaagccgaactgtcagaagtaaagattcaaacccatatcgtccagcaggaaaatcatctgctcaaagatgagctggagaaaatgaaacagctgcacagatgccccgacctgtccgactttcagcagaagattagtagcgtgcttagctataatgagaagctgcttaaggaaaaggaggctctctctgaagaactgaactcatgcgttgataagctcgctaaaagtagcttgctcgagcatcggattgccactatgaagcaggaacagaaaagttgggaacaccagtcagcgtcactgaagagccaacttgtggcctcccaggaaaaagtgcaaaatttggaggatacagtacaaaatgtgaacttacagatgtccaggatgaaatccgatttgcgcgtcactcaacaggaaaaagaagctctcaagcaggaggtgatgtccctgcataaacagctccagaatgccggcggcaagtcttgggctcctgaaatcgccacacacccgagcgggctccacaatcagcagaaacgactgtcatgggacaagctcgaccacctcatgaacgaagagcagcagctgttgtggcaggaaaatgagcgccttcaaaccatggttcagaataccaaggcagaattgacacacagtcgggaaaaagtccgccaacttgagtctaatctcctcccaaaacatcagaagcacttgaatcctagcggtactatgaaccctaccgagcaagaaaaactgagtctgaaaagggagtgtgaccagtttcagaaggagcaatcacccgctaataggaaagtctcccagatgaattccttggagcaagagctggagactatccacctggagaacgagggcctgaagaagaaacaagtgaagctcgacgagcagctaatggagaactctgtcgtcggaagttctcgagagggctgctcctccctccctgaaattgtctgcgaagacgcagcacctgaggtccactgtgacgcctag

SEQ ID NO: 14504 - DNA, 915 bp, synthetic construct
  source 1..915: mol_type = other DNA; note = Synthetic coding sequence
atgggacaatgtgtgacaaaatgcaagaacccctcttctaccctcggatcaaaaaacggagaccgggaaccttcaaacaagtctcactcaagacgaggcgctggccaccgcgaagaacaagtgcctccttgcgggaaacctggtggcgacattcttgtcaatggaacgaagaaagctgaggccgcaaccgaagcctgccagctgccaacatccagcggagacgctgggcgggaatcaaaatccaacgcagaagagagtagcttgcagcgcctcgaggaactgttcagacgttacaaagatgaaagagaagacgctatcctagaggaggggatggagcggttttgcaacgacctgtgcgtggatccaacggaatttagggtgctacttctagcttggaaatttcaggcggccactatgtgtaagtttactcgcaaagaattcttcgatggttgtaaggccatttctgccgactctattgatggtatctgcgcacgcttcccaagcctgttaactgaagccaaacaagaagacaagtttaaggatctgtatcgtttcacttttcagtttggtcttgatagcgaagaagggcagcgaagtcttcaccgcgagatcgccatcgcattgtggaagctggtgtttacacagaacaatcccccagtgctcgatcagtggcttaattttctgaccgagaatccgagcggtataaagggaatctcaagagatacatggaatatgtttcttaactttacgcaggtgatcggtccagacctctctaattattctgaggacgaagcctggccatccctgtttgatacgtttgtagaatgggaaatggaacggcgcaaaagagaaggggagggtagaggtgcgctctcctcgggccccgaaggcctgtgccctgaagaacagacctag

SEQ ID NO: 14505 - DNA, 1914 bp, synthetic construct
  source 1..1914: mol_type = other DNA; note = Synthetic coding sequence
atggctgcaatggctgttggcggcgctggtgggagcagagtttcatctggcagggatctgaactgcgttccggagattgctgacaccctgggagcagtggctaaacaagggtttgacttcctgtgcatgcctgtgtttcacccacgatttaagcgtgagttcattcaggagccagcaaagaaccgcccaggcccgcaaacccgatcagatctgctgctgtcaggccgggactggaacactcttattgtcgggaaactgtcaccatggatcaggcccgatagcaaagtcgaaaaaatacggcgcaatagcgaggcggccatgctgcaagagctgaattttggggcttacctcggtctcccagccttcctgctcccacttaaccaggaggacaacacaaacctcgctagagtactgaccaaccacatccacaccggccatcacagcagcatgttttggatgagagttccactcgtggccccagaagacctgcgggatgatattattgaaaatgctccaacgacacacaccgaagaatactctggagaggaaaagacctggatgtggtggcataatttcaggactctgtgcgattatagtaagcgcattgctgtggcgctagagattggggctgatcttcctagcaatcatgttatcgacagatggttaggcgagcccatcaaagcggctatcctgcccacctcaatcttcctaacaaacaaaaaagggttcccggtactgtccaaaatgcaccagaggttgatatttcgtttattgaagctcgaagtccagttcatcataaccggaaccaaccaccactctgaaaaagagttttgttcttatttgcaatacctcgagtacctgagtcaaaatagacccccccctaatgcctatgagctcttcgctaaaggttatgaggactatctgcagagccctctgcagccattgatggacaatctcgagtcacagacatatgaagtgttcgagaaagacccgataaagtatagccagtaccagcaagcaatttataagtgcctgctagatcgtgtgccagaggaggagaaggatactaatgtccaggtcctcatggtgttaggagcaggccggggtccgttggtgaatgcatctctgcgggcggccaagcaggccgacagaagaattaaattgtacgctgtggaaaagaaccccaatgcagttgtgacgctcgagaattggcaattcgaagaatggggttctcaggtaactgtagtctcttctgatatgcgagaatgggtggctcccgaaaaggcagacataatcgtcagtgagctgttgggcagttttgccgataacgagctgagtcctgaatgtctagatggggcacagcacttcctgaaggacgatggcgtgtctataccgggggaatatactagctttctggctcccatctcatcatccaagctttacaacgaggtgcgagcatgccgagaaaaggatcgggatcctgaggctcagtttgaaatgccgtacgtcgtgaggttgcacaattttcaccagctctcggccccacagccttgctttaccttcagccatcctaatcgtgatccaatgattgataacaaccgatactgcacactggagtttcctgtggaggtgaataccgtgctgcacggcttcgctggttatttcgagactgtgttataccaagatataaccctgagtatcaggcccgagacccacagtcctgggatgtttagctggtttccaatattgtttcccattaagcagcctattacagtgcgggaaggacaaaccatatgtgtccgcttttggcggtgcagcaactcaaaaaaagtttggtacgaatgggccgtaaccgccccagtttgctcagccattcacaaccctacgggccggagctatacgattggactatag

SEQ ID NO: 14506 - DNA, 1041 bp, synthetic construct
  source 1..1041: mol_type = other DNA; note = Synthetic coding sequence
atggcacctggtagtgtgacgtccgatatttccccatctagtacatctacagcaggctcatcacgatccccagagtcagaaaagcctggaccatctcacgggggcgttccccctggcgggccatctcattcttctctccccgtgggacgccgccatcccccagtactgcgtatggtattagaagcactacaggctggagaacaacggagaggcacatcagtggcagcaattaaactctatattctacacaagtaccctaccgtcgacgtcctgaggttcaaatacctgttgaagcaagccttggctacaggtatgcggcggggcctgctggctagaccactcaatagcaaagcaaggggcgcgactgggtcttttaagctggtgcccaagcacaaaaagaaaatccagccacgcaaaatggcacctgccactgctcccaggcgtgctggggaagcaaaaggaaaaggacccaagaagccgtccgaggccaaggaagatcctccgaacgttggaaaggtgaaaaaagccgccaagcggcctgctaaggtccagaagcctccaccaaaacctggggccgctacagagaaggccaggaaacagggaggcgccgctaaggacacgagagcacaaagtggagaggcacgaaaagtgcctcctaaaccagacaaagcaatgcgggctccatcatccgccggggggttaagtcgaaaagctaaggcaaagggaagcagatccagccaaggagacgcagaagcgtatcgtaagactaaagctgaatcaaagagcagcaagcctactgcgtctaaagtgaagaacggggccgcctccccaactaaaaagaaggtggtggcaaaggccaaggcacctaaggccggccagggcccgaacaccaaggctgctgctcccgccaagggctccggcagtaaggtggtcccggcgcatctgagccgcaagacagaggcccctaagggtccccggaaagccgggctaccaatcaaggctagttcaagtaaggtttcctcccaaagggccgaggcctag

SEQ ID NO: 14507 - DNA, 1869 bp, synthetic construct
  source 1..1869: mol_type = other DNA; note = Synthetic coding sequence
atggccatggcgccctcaccttccctcgtgcaagtctatacctctcctgccgcggtagcagtgtgggagtggcaggacggactgggaacatggcacccatacagcgctaccgtctgtagtttcatcgagcagcagtttgtgcaacagaaaggccagcgcttcggtcttggtagcctggcccacagcatacccttggggcaggccgatccgtcgctggctccctacatcatcgacctgccaagctggacacagttccgtcaggataccggcactatgcgcgcagttagacggcatctgtttcctcagcactccgcccctggtagaggagttgtatgggagtggctcagtgacgatggcagttggacagcttacgaagcttccgtctgtgactatctggaacaacaagtcgctaggggaaaccagctggtggacctggcgccgctaggatacaactatacagtcaattacacaacacacactcagactaacaagacttccagtttctgccggagtgtgcgcagacaggccgggccaccttaccccgtgacaacaatcatagcacctccaggtcatacaggagtagcttgttcttgccaccagtgtctctcaggtagtcgaacagggcctgttagtggtcgctatcgtcactccatgacgaatctgcccgcataccccgtcccacaacatccgccccatcgtaccgcctccgtcttcggcacccaccaggccttcgcaccctacaacaagccttccctgtccggcgctagatccgccccccggttaaatacgacaaacgcctggggtgctgcccctccatctctaggcagccaaccactgtatcgcagcagtctctcacatctgggccctcagcacctgccgcctggaagttccacatctggggccgtcagtgccagtctccctagcggccccagcagcagccctggctctgttccggcaaccgtgcctatgcaaatgccaaaaccttcgcgggtccagcaagccctcgccggaatgacatctgttctcatgtcagctattgggctgcccgtttgtctgtcgagggctccgcagccaacttcaccccccgcctctagactcgcaagcaaatcccacgggagcgtgaagcgcctccggaaaatgtcagttaaaggtgcaaccccgaagcccgagccagaaccggagcaggtgattaagaattatactgaagagctaaaggtcccccctgacgaagactgcattatttgcatggagaagctgagcacagctagtggctattctgacgtcacagatagcaaggcgatcggatccctggccgtcggtcatctgaccaagtgcagccacgccttccacttactgtgcttactggccatgtattgtaatggcaacaaggacggttcactccaatgtcccagttgtaaaacaatttacggggaaaaaactggaacacaaccacagggcaaaatggaagttctgcgcttccagatgagccttccagggcacgaagactgcggcactattctgatcgtttattcaataccccacggcattcaaggcccagagcaccccaatcctggcaaacctttcaccgccaggggattcccccggcagtgttacctgcctgacaatgctcagggtaggaaagtgctggagctcctcaaagtcgcgtggaaacggcgactgatctttaccgtgggaactagttccaccacaggcgaaactgacaccgttgtgtggaacgaaattcaccacaagaccgaaatggaccggaacatcactggccacggatacccagatccaaactacctacagaatgtcctggcagaattggcagcacagggagtgactgaagattgtctggagcaacagtag

SEQ ID NO: 14508 - DNA, 786 bp, synthetic construct
  source 1..786: mol_type = other DNA; note = Synthetic coding sequence
atggccgccactgcaagggaagacggcgcatctggccaggaacgagggcaacgcggctgcgagcactacgatagaggatgcctcttgaaggcaccgtgctgtgataagttgtacacttgccgcctgtgtcatgataacaacgaagatcatcagctggaccggtttaaggtgaaggaggtgcagtgtattaattgcgagaagattcagcatgcacaacagacctgtgaggaatgctctactctcttcggcgaatactattgcgacatttgtcatctatttgacaaagacaagaagcaatatcattgtgagaattgcgggatctgtcgcatcggacctaaggaagatttcttccactgcctgaaatgcaatctgtgtctcgctatgaatctccaaggacgccacaaatgcatagagaatgtcagccgccagaattgccctatttgcctcgaggacatccacacctcccgagtggttgctcatgtcttgccctgcggccatttacttcatcgaacttgttacgaggaaatgttaaaagaagggtaccgttgtcccttgtgcatgcactcggccctcgacatgacaaggtactggagacagctggatgacgaggtagctcaaactcctatgccctccgagtatcagaacatgaccgtggacatcctgtgtaatgattgtaacggccgaagcactgtgcaattccacattctaggaatgaagtgcaagatatgtgagagttataacacagcccaggcgggcggccggcgtattagcttagaccagcagtag

SEQ ID NO: 14509 - DNA, 1983 bp, synthetic construct
  source 1..1983: mol_type = other DNA; note = Synthetic coding sequence
ctaagcctcccgagtgtgacgtatctgctgttagaggtgattccggactctatgcggaaacaagaggtgaggaccggacgtgaggccggccagggccacgggacgggtagtcctgccgaacaggtaaaggctctgatggacctactcgctggaaaggggtcacaggggtctcaggcccctcaggcgctggaccgaacccccgacgcacccttaggcccctgcagtaatgacagccgcatccagcgccaccggaaagccctcctcagtaaggttgaagctacacggggcggcggacacccagctcggacagtagcattggacaggctgttcttgccgttatcccgagtttctgtgccacctagggtcagcattaccatcggggtcgcaggcatgggcaaaacaaccctggttaggcacttcgtgcgcctgtgggcccatggccaggtcggcaaggatttctccctggtgctgcctttgactttccgagacttgaacacccatgaaaaattgtgcgccgatcgcctcatctgttcagtgtttccccatgtaggcgagccctccctggcagttgcagtccccgctcgggcactactgatactggacggtctcgacgagtgcagaactccattggatttctccaacactgtggcctgtactgacccaaagaaggaaatacccgtggaccatcttatcaccaatattatccggggcaacttatttccagaggtgagtatctggattacgtcgcgtccttcagcaagcggccagattcctggaggactcgtcgatcgcatgaccgaaattaggggctttaatgaagaagaaattaaggtttgtctggagcagatgtttccagaagaccaggccctcctcggctggatgctatctcaggtgcaggccgatagagccctctacctcatgtgcaccgtgcccgctttctgccgcctgacgggcatggccctgggccacttgtggcggtccaggacaggcccccaggacgcagagctgtggccacctcgaaccttgtgcgagctttacagttggtactttaggatggctctgtccggagagggacaggagaagggcaaggcatcaccaaggatcgaacaggtggcacacggcggccgaaagatggtcgggacgttaggacggctggctttccacgggctcctgaaaaagaaatacgtgttttacgaacaggacatgaaggcctttggagtggatctcgccctgctgcaaggcgcgccatgctcatgcttccttcagcgcgaggaaaccttagcatcgagcgtggcgtactgtttcactcatctcagtctccaggaattcgtggccgctgcctactactacggagcctctagacgcgccattttcgacctctttacagagtcaggggtgtcgtggccaagactcggctttctgacgcacttccgctctgccgcccagcgagctatgcaggccgaagacggccggctcgacgtgttcctcaggtttctgagcggccttttatctcccagagttaacgcactactggccgggtccttattggcccagggggagcaccaggcctatcggactcaggtggctgagctccttcaggggtgcttgcgccccgatgctgcagtatgcgcccgtgctattaacgtgcttcattgccttcacgaactccagcacaccgagctggccaggtcagtcgaagaagccatggagtccggcgcactggcccggctcactgggccagcccatagagctgcactggcatacctcctacaagtgagcgacgcctgtgcccaggaagcaaatctgagccttagcctgagccaaggcgtccttcagtccctgctgccccagctcctgtactgcaggaagcttcggtggatcccgggtcagggggccggggccggcgagggtgcggaggagagagccgaggcggtcccttctccccctccaagcttctccgtaagcctgctgggcctcccatag

SEQ ID NO: 14510 - DNA, 1152 bp, synthetic construct
  source 1..1152: mol_type = other DNA; note = Synthetic coding sequence
atgctgtcccgaaaaaagacaaaaaatgaggtctccaagccggctgaggttcagggcaaatacgtgaagaaggagacttccccattgctgaggaaccttatgccttctttcatccgtcacggacctaccattcctagacggactgacatatgcctgccagacagcagcccgaacgccttctccacttccggggatgtcgtgtctcgaaatcagagctttctgcgcacccccatccagaggaccccccacgagattatgcgtcgcgaatcgaaccgattatctgcacctagctaccttgccaggtcgctcgcggatgtgccgagagagtacgggagcagccaaagcttcgtcaccgaggtatcctttgcggtcgaaaatggcgactcaggctctaggtattactattctgataacttcttcgatggtcaacgcaagcggcccctgggagacagagcccacgaggattatagatattatgagtacaatcacgacctctttcagagaatgccacagaaccaaggcaggcacgcttctggcattggccgcgttgcagccaccagcctcggcaatctgaccaatcatggctccgaggacttgccattaccacccggttggagcgtggattggacgatgcggggtcgcaaatactacattgaccataacacaaataccacgcattggagtcaccccttagagcgggagggtctgcctcctggatgggagcgggttgaatcatccgaattcgggacatattacgtggaccatactaataaaaaggctcagtaccggcatccatgcgccccctctgtgccacgttatgaccaacctcctcccgtcacatatcagccacagcagacggaaagaaaccaaagcttgttggtgccagcgaacccttaccacacagcagaaattccagactggctgcaggtctacgcaagagctccggtcaaatacgaccacatcttaaagtgggagctgtttcaactggcagacctcgacacttatcaggggatgctgaagttgctatttatgaaagaactggagcagatagtgaagatgtatgaagcttataggcaagctttgctcacagagttggagaaccgcaaacagagacaacagtggtacgcccagcagcatggaaaaaatttctag

SEQ ID NO: 14511 - DNA, 2376 bp, synthetic construct
  source 1..2376: mol_type = other DNA; note = Synthetic coding sequence
atgtccaatcaacaagagaaatatgaagcgcagaacatcgtcaactccacagaggagagcgatgatgccttcgacacggtcacgattcctgtcccttctgaggaaccccaggagtctgatcagacagaggagcatgaatccggcattgagcagttttccgaatctcatgcaatccatgttgaggaacagtctgatcaaagtttctcctccttggaacctgacaatgaacagctgatggaagaagtgatctctccgcgccaggtgagctacacaccgcagcaccacgaaaagcagtacgccatgcagaggcccaacgatgacagccttgctttcctggataaaattaaatctgtgaaggagagcttgcaggagtctgttgaagactcattagctacagtgaaggtggtgctaattccagttgggcaggagattgtcattcctttcaaggtagacacaatcttgaagtatctgaaggaccactttagtcacttactcggcatacctcattctgtcctacagattcgatacagcggtaagattctgaagaataacgaaaccctggtgcagcatggcgtaaagccccaggagattgtgcaggtggaaatttttagcacgaatccagatctctatccagtacgtcgcatagatgggttaactgatgtgtctcagattatcacagtcactgtccagacaggtctcgaccagtatcagcaggtacccgtggaaattgtaaagagcgactttcacaaacctttcctgggcggtttccggcacaaagttaccggggtggagtatcacaacgccggtacccagacagtccctaagcgcattccagaaagactgagcattttttgcagggacacacagacagtgtttcaaaagaagaatctacaacagaccactaacaccaccagcacacagatgaccaatatcggcgtgtacgtgagcaatatgaccgataaactggttacccccggtaaatactttagtgctgcagagtatcatgctcaaagattgaaagcagtgattgtgatccagacatattataggcagtggcatgccaagatctttgtggaaaatctgagacgccagaagtctctcagactcgagtgggagacccaacaggaacttagaaagataagggagaaagaggagtggatcaaactcgattatcatagacgccataatcccaagacgaacgaggatttcgaattcctatataatgccctagagttctggcgccaggaagagctcacgcgtataaaccagtcatttacaggagccgagcggaaggcagccctctgtgaactgttagagaaggagacccagatcatcgctagtattggccgacaccgctatatagcctacatggcgaatcaagaggcagcgattcaggcgttccttgataagtgttcagctcccaagatatggagaacccccaatggtaagaccatcgaaatggatactcagttcaccatcagggccagggagcttcagaacatctacaaatgtatcatgctgaaaaatatctctcaggacgaacgcctagacgtacttctcacgctgaaacatacagtgaaagagcacgagtgcaaactcacccaggagatcctagagctgattgacagagaggtggacctcatgatgcgcggtgtgaagcaccacaacttggaggggctcaggaaacgtatagcaacgctattcttccattacataaagacccctctattcaatcctgaagtggccaagtacttaaaggtccctcaggaccctctcaagttttacaagaaaatctatttttgccatagctgccagctgtacttgccaagcacagagttttcagtttctagtacctccaggcgtatctatagatgtcgtaactgcatcaatctgcagaacgaggctcagaaaagggaatcattcttgaagtataagtgccttctccaacagctgtattacaccgaagccgactatgaagatgattccaaaattgctttcctcatgcagctgcaagacatacaatatcttacagaaaacatttgggcatcccagtctgtgctctccgcctgcgataacttgagtgatcttgtgatggtgcgatggaataaatccctcgagtggagcccttggaattgcattttactcacgaaagacgaagccgcagcccacctgaaactgacttctattgaggaaggatacgaacgaagcttcattcacaaaattaagcataagcatatactcgccaaaaactacttctcccaggtccctgttttagcgtcttttatcctcgatgacggagaaatcgatgaaatccgttggaaatatcacagcgataccacgcccaagatcattgaaagtcagaggcctcctcattag

SEQ ID NO: 14512 - DNA, 1767 bp, synthetic construct
  source 1..1767: mol_type = other DNA; note = Synthetic coding sequence
atgtcctcttgcgttagctcacagccttctagcaatagagcggcaccacaggatgaactggggggacgaggaagctcaagctccgagtcgcagaagccctgcgaggcactccgcggacttagctctctgagtattcacctgggtatggaatctttcattgtagtgacagagtgtgagcccggatgcgctgtcgacctcgggctggctagagaccgcccgctagaggcagatggtcaggaggttcccctggacacatctgggtcacaggccaggccacatctgtctggtcgaaagctgagtctgcaggagcggagtcaggggggcctcgctgctgggggctccttggatatgaatggccggtgcatttgcccctcactgccctatagccctgtatcctctcctcagagcagccccagactacctagacgccctactgttgagagccaccatgtgagtatcacagggatgcaggattgcgtacagctgaaccagtacaccctgaaagacgaaataggcaagggatcttatggcgtggtgaagcttgcttataatgaaaacgacaatacatattacgcaatgaaggtgctgtccaaaaaaaaactcatccgccaggcgggttttcccaggcggccgccaccaagaggcacaagacctgccccggggggttgcatccaacctagggggcctattgaacaggtataccaggagatcgctatcctcaaaaaactagatcatcctaacgtcgtgaagcttgtcgaggttctcgatgatcctaacgaggaccatctgtatatggtgttcgagctagtgaatcagggacccgttatggaagtgcctacattgaaacccctgtccgaggatcaggcccggttttattttcaagacctgattaagggaattgagtatctccactaccagaagataatccaccgagatatcaaaccttctaacctgctcgtaggcgaagatgggcatataaagatcgctgatttcggggtgtctaacgagtttaagggttccgatgccttactgtccaacactgtgggcacgccagcattcatggccccagagtccttgtccgagacacgcaagatcttcagtgggaaagcattagatgtatgggctatgggagtgacactgtactgcttcgtattcggacaatgtccatttatggacgaaagaatcatgtgcctacactcgaaaattaagagccaggccctagaatttcctgaccaacccgatatcgcggaggacctgaaggatctgatcaccaggatgctggacaaaaatcctgagagccgaatagtagtccccgaaataaagctacacccgtgggttacccggcacggtgcagagccccttcctagtgaggatgagaactgcactctcgtggaagtcaccgaggaggaagtagagaactctgtaaagcatatcccctccttggccactgtaattctggtgaaaaccatgataaggaagcggagtttcggcaatcctttcgagggttcacggcgcgaagagaggtccttgtccgcccccgggaacctactgaccaagaaacctaccagagagtgtgagtctctgtctgagctgaaggaggctcgacagcgacggcagccccctggccacagacctgcccctaggggcgggggagggtccgcactggtccggggctccccctgtgtggagagctgttgggctcctgcccccgggagtcctgcacgaatgcatcccttgcgtcccgaagaggctatggagcctgagtag

SEQ ID NO: 14513 - DNA, 2052 bp, synthetic construct
  source 1..2052: mol_type = other DNA; note = Synthetic coding sequence
atggccctaagtaaacgggagcttgatgagctgaagccttggatagagaagacggtgaagagagtgctgggcttctccgaacctaccgtcgtcaccgccgccctcaattgcgtcgggaagggtatggataaaaagaaggccgctgaccacctgaagccatttctggacgactccacccttcggtttgttgataaactttttgaggctgtggaggaaggacgcagttctcggcactcaaagtcctcttccgacagaagccgcaaacgcgaactgaaggaagtgttcggcgacgatagcgaaatttccaaggagtcctcaggcgtgaagaagcgtcgaattccccgcttcgaggaagttgaggaggagcccgaggtgattcccggacctccatccgagtctccaggaatgctcaccaaactgcagatcaagcagatgatggaggcggctacacgtcagattgaggaaaggaaaaaacaactgagctttatatccccacctactccccagccaaaaacaccatcttcctctcagccagagagattacctatcggtaacaccatccagccttctcaggccgccactttcatgaatgacgccattgagaaagcccgaaaggctgccgagttacaggctcgcatccaggctcagctggccctgaaacctggcctcattgggaacgctaatatggtgggcctggcgaaccttcatgcaatggggatcgcgcctcccaaggtggaactgaaggatcaaactaagcccacacctctaatccttgacgagcaggggagaacagttgatgccacgggtaaggagattgagctgacacatcgcatgcccacccttaaagcaaacattcgtgctgtcaagagagagcagtttaagcagcagcttaaggagaaaccgtcggaagacatggagagtaataccttcttcgacccccgcgtttcaatcgccccctcccagcgacaacgccgcaccttcaagtttcatgataaggggaaattcgaaaagatcgcacagcggctgcgaacaaaggctcagttagaaaagctgcaggccgaaatcagccaagccgcccgtaaaaccgggatccatacctctacccgcctggcccttatcgctccaaaaaaagagttgaaggagggggacatccctgaaatcgaatggtgggacagttatatcatacctaacgggtttgatctgaccgaggagaatccaaagagagaagactactttggaattactaacttggtggaacaccccgcacaattaaatcccccagtggacaacgatacgccagtaacattgggggtctacctgaccaaaaaggaacagaaaaagcttagacggcagaccaggcgcgaggctcagaaagagctccaagaaaaagtgaggcttgggctaatgcccccgccagagccaaaagtgaggatttcaaacctcatgagagtactgggcaccgaagccgtgcaggaccccacaaaggtggaagcacatgtgagggcgcagatggcaaagcgccagaaggcccatgaagaggctaacgccgccaggaaactgactgcggagcagcgcaaggtcaaaaaaataaagaaactcaaggaggatatcagtcagggtgtgcacatcagcgtgtatcgcgtgaggaatctatctaacccagccaaaaagttcaaaattgaggctaacgctggccagctgtacctgacaggggtcgtggtgttacacaaagatgtcaatgttgttgtggtggaaggaggacccaaagctcagaagaagttcaagaggctaatgttgcaccggatcaagtgggatgaacagactagtaatacaaaaggggacgatgatgaggaatcagatgaagaggccgtaaagaagacaaacaagtgtgtcctggtatgggagggtaccgccaaggaccggagtttcggggagatgaaatttaagcaatgtcccaccgagaatatggcccgggagcattttaagaaacatggggccgagcactattgggatctcgctttgtccgaaagcgttctggagtctaccgactag

SEQ ID NO: 14514 - DNA, 1938 bp, synthetic construct
  source 1..1938: mol_type = other DNA; note = Synthetic coding sequence
atgagcgacaagagcgatctgaaggctgaattagagcgcaagaagcagcggctggcacagatccgggaggaaaagaagcggaaagaagaagagaggaagaaaaaagaggctgatatgcagcagaaaaaggaacctgtgcaggatgactcagatctcgataggaagagacgggagactgaggccctgcttcagtcaatcggtatctctccggagccaccgctcgtgcagccgctgcacttcctgacgtgggatacctgttacttccactacctggtccccacgccaatgtctccatcgagcaagagtgtcagtactccctccgaagctggcagccaggattctggcgatctggggcccctgacaagaaccctgcagtgggacacagacccttctgtcctgcaactgcagtcggatagcgagctgggccggagactgcacaaactgggggtttccaaggttacccaggtggactttctgccacgagaggtggtctcctactctaaagaaacccagacgcccttagccacacatcagtccgaagaggacgaggaggacgaggagatggtggagtctaaggtcggccaggatagcgagcttgagaaccaggacaagaaacaggaagtgaaggaggcacccccgagggagttaactgaagaggagaaacaacagatcctgcatagcgaagagttccttattttttttgatcgaaccatcagggtgatagagagggctttggccgaggacagcgatattttttttgattatagcggcagagaactcgaagagaaagacggagatgtccaagcaggagccaaccttagtttcaatagacagttctatgatgaacattggagcaagcaccgagtggtcacatgcatggactggtcactccagtatccagaactcatggtggcaagttacaacaacaacgaagacgcaccacatgagccagacggagtcgccctcgtatggaacatgaagtttaaaaaaacaactcccgagtacgtttttcactgtcagtcttccgtgatgtctgtgtgttttgcacggttccacccaaacttagttgtgggaggcacatacagcggccaaattgttctgtgggataaccgttctcatcggaggactccagtgcaaaggacaccattatcagccgcagcccacactcatccagtatactgtgtgaacgttgttggaacacagaatgctcacaatctaattacagtttctacggacggcaagatgtgcagttggtccctagatatgctcagcacaccacaggaatctatggaactggtgtataacaagagcaagcccgtggcggtgactgggatggcgttccctaccggagatgtgaacaattttgttgtgggaagcgaggagggtacagtgtacacagcttgcaggcatggctctaaagctggcattggagaggttttcgagggacaccagggccctgttacagggatcaactgtcacatggcagtcggcccgatcgatttctctcacctttttgtgacctcctctttcgattggacagtgaagttgtggacaaccaaacataataagccactttactcttttgaggacaacgcagattacgtctacgatgtgatgtggagtccggttcatccagcactattcgcttgtgtggacgggatgggtcggctggatctgtggaatctgaataatgacaccgaggtgcccactgctagtgtggccatcgagggagcctccgcccttaatagggtaagatgggcccaagccgggaaggaggtggccgtaggcgactctgagggccgcatctgggtttacgacgtgggcgaacttgctgtaccacacaatgacgagtggaccagattcgccaggaccctcgttgagattcgggccaatagggccgactccgaagaagaaggaacggtggaactgtccgcttag

SEQ ID NO: 14515 - DNA, 7806 bp, synthetic construct
  source 1..7806: mol_type = other DNA; note = Synthetic coding sequence
atgaagaggaaggtggttaatacccataagctgcgtctgtctccaaacgaggaggctttcattctcaaagaggattacgaacgccggcgcaagctccgcctactgcaggtccgtgagcaggaaagagatatcgcgttacagatccgcgaggatatcaagcagaggaggaatcagcagtttacaaggctagcggaggagctcagagctgagtgggaagagtcacaaacacagaagatccagaatttggagaagctctacctggcctctctaaggtcaatgggcgagggacacaggcaggccaaagagaatgaaccagatctggatgcgctcgcccagcgcgccgctgagcggaagcgcaaggcagatctgaggcataaagaggcccttaaagttcaaaaaaatcagaaggagatcctactcaaacaaaaaacatggcatatcaaagcaaggaaagaggctctgcttgtggaaaaagagcggagtgctaagatcacttccctgccccctcctcctccgactctgttcgagaacatcgaggttaaacgtatctccgccgttaagaccaacagctctacgtatcaccatctgcatacattcgtcaaccgcgaaaccgataccaagcgaccagacgcccgactggctgccgaggaggaagcaaaacggctcgaggaactccagaaacaggccgcccaggagcggatggagcgattcgagaaagcacatgtcagaggttttcaggctatgaagaaaattcacctcgcccagaatcaggaaaagctgatgaaggagttaaaacagctgcagcaagaagatctcgctaggcggaggcagaccgtggcacaaatgcccccgcagcttgtggagctaccttataagcggagcgaaatgaaagaggattggcaacgagagctggagttcgcattcgaggacatgtacaatgccgatcggaaggtgaagggtaatctgatcctgcacctggaaccagaacctctcccaactgtgacaaatcagatccaggacgaggaactggacctgagcatggagcaggagaatctaggagcagctgaggatctgccagttaccgaagccgagatctgctcgagcgagaccgacgtgcctctggtgatgaagacccaacagattccgagtaaggtgctgttcaaaaagctgctgaataagattcggtcccagaaatccctctggacaatcaaaagtatgtctgaggacgaaagtgagatgatcaccacagtttccgagattgagtctaaggcccccactgttgagagcgggaccatcgcgtcgaaggagcgcactctctcttccggccaggagcaagtcgtggagagcgatactctgaccatcgagagcgggccgcttgccagcgaagacaagccactgtcttgtggtactaatagtggtaaagaacaggaaatcaatgagactctgcccattacgacggtagcacagtcttccgtgctcctccaccctcaggaagcggccgccaggatccgcatgagcgcacgccagaagcagatcatggagatagaagaacaaaagcagaaacagctggagctcttagagcagatcgaacagcagaagctcaggctggagacagattgcttccgggcacagttggaggaggagaagcgcaagaagactcaaccaacaggcgttgggatcgcaccggcttcctgtccagtgatctccgatgaggacagtcacaggcagatgattaggaattatcagcatcagctcctgcagcaaaatcgactccacaggcagagcgtagagacagccaggaagcagctacttgagtatcagacaatgttgaaaggcaggtgcccctccgtctccgctccatcactgatcaccgacagcgtcatttctgtgccaagttggaagtcggaaaggcctaccgctatctctgaacactgggaccagggacagcgactgaaactttctccgaacaagtatcagccaattcagcccatccagactagtaagctggaacaagaccattttcaggttgctcggcagaaccactttccccagaggcaggttgagacaaccgaaactctcagggccagcgatattctgaccaatcaggcactggaatcacaggaacatctgcggcagtttagccaaactgagacacagcaaagggactacaagcttgtgccgaaggactcagagacgcttagtagggcattatcccacgacaggcagttgatcagtcaggacgcaaggaagatctccgagactttcggtgcaactacctttcagagcctcgagtcacaacagctgttttctgagaattctgagaatatcagctatcaccttacggaaccatcaagcttcgtgccattggtgccccagcacagcttctctagcttgccagtaaaagtggagagcggcaaaatccaagagccatttagtgccatgtccaagtccaccgtgtcaacttctcactctattatctcccaaatgcacgatcgtcctctgcttccttctgagaatattacagcacagcagggcaatatgaaagccctacaggagcagctcgacctacaaaagaaagtgctgcaggccacccaggaggcccaggaacagctcctgctctgtaagcaaaaggaggtggagcagcagaccgggctctctgtgttcctgcccctagttacacccgacagtagtgcacttttacctagcgcaaaagctgatctcggccgcatacaggagagctcccccacaaagaataatatcgctgtatcctcagaccatcacgtcatctcccaattgcaagacaaaagactgagcctcagtcaacccatcctgtcccagcagaataatttcaaattcttgcaagagcagctcaacatccagaaagattccctccaagctcgcagggaggcccaggaggttctatacgtgcataagcaaagcgaactggatcgaagggtgtgtagcgagcaggcggaaccttcttttccattccaggtggctcagcacactttcacgtctttgccatccgccgacaccaaatctggcaaaatacaagagcagcatagtagtaagtctgaaaaaggattggtgtcctgccagtccgacattcccatttcccaggatggcagcctctcgttcctccagcagttcctgccccttcatgatagtctgaaactgctacaagaacagctgactaaacagagagacacacttcaggctagacatgaggcccaggtggagctcctgttacatcggcaacgcgatcttggcgattcaaagagcggtctggtcagctcttcgagctcaccggtcgtcgtccagcactccgtggcatcgcaggcttcggcaaaggcagagccgagaagaattcaggagctttacttgtccgaaaaggagaacgtaggaccctcctgccacctcatcattccaaccttccaggacaagagccttagttttccccaacatagtctggctcagcaggaaaatctcacaatcctccaagagcagagccagatccaacgggtaattctgggcgcaaaagaaggtacacaggagttcgttcacaccgagtccgagctggagaaaagaatttcttctgagcagactggaacctcctcatcattgtctcaagtggacgagagcgaacgcttccaggaatgtatttccatcaaatccgacagtaccatacctctctcgcacccaaagattccccggtgtcaggagaggctgctccgggttagtcagcacatgcttccattacaggacaaccttgaggaacatcaggcatggctcgacaccgaaaaagaagcattccatttcagccagaaaacacaggaaaatacgtcgtcagagcagactggatcaagtagcttcattccacagctggtccagttatcattcactagtctggccagcgctgagagtggcaccatcttggaaccgctgtttacggaaagtgagtccaagattttttcaagtcacctccaaattccccagctgcaggataggctcctgcgcatctcgcagctcatccagccccagcaggacaatttgaaagcactgcaggaacaactcgctacacagagagaagcaataatactagctcgccaagaagctagggaggagctgctgcttcaccagagcgaatgggaggggcgcatctccccggagcaggtggatacttcaagtttgcctctggtgccccagcactccttcgctagcctgcctttgaatgaaagcgagcgaaaccaggagccatgcagtataaattctgataacatagtatcgtcagggcatagcgaaatcccaacgttgcctgacggcctcctgggcctgagtcacctggttctcccacaacaggacaatcttatcgccttagaggagcacctgcatgcacaaacagactttctgcccagcatagaaaaaacgcagaaagaactggtgctctctaaaccatgtaagtttgaagagaaagtttcttccgagcactttatccagagtcaccacggagatctgcaggcccttcagcagcagctggatacacaaaagaaagctataaggtcgatccaggaagtacaggaggagctgctgttgcagaggttgtctgaactggagaagcgcgtttcctctgaacaggtctgcagtagctcattcgtgtctcaggtgcccgtggcggactctgaaagaacacagaagagcttccccactaagagtaatgatacactccctagctctcatcgtgaaatcccccggctccaggatcggctgctgtccttatctaagcccatcctgcctcagcaggacaatatgaccgcgcaattagacgcccagcgggaggtgatgtatagctatgaaaagcctcaggaggaactcagcctaaacaaacagcgaaaactgaacaagtcagaatcagctgaacacaccattccttctttatttcttcccaaagagactgagcattccttcattccactgcctttcgctgaggccaaacccaagtctacttgtgagctgtatagttctcagaatgagcacgcagcgccaccgtcgaacccggtgatcccaggatttcaggatagattgctgagtttctcacaatcggtccttacccagcaggacaatctggggcttcagaagcaactggacctgcagagggaagttctgcactatagccagaaagctcaggagaagcttcttgtccaacgacagaccgcactccagcagcagatccagaaacacgaggaaacattaaaagatttctttaaagactcccaaatttcaaagccaaccgttgaaaatgatctgaagacgcagaaaatggggcagctgagggactggttccctaatacgcaggacctggccggcaatgaccaagaaaatattcggcacgcggaccgtaataattccgatgacaaccatctagcctctgaggacacaagtgccaaacagagcggggagcaccttgaaaaggatctcggccggaggtcaagtaagccccctgttgcaaaggtaaagtgcggattagatctaaatcagcatgaattatcagcaatacaggaagttgagagtcccgccattggtagaacaagtatcctcggtaagccgggcatttacgaggacagggatcctctcagagtgagcatatcacgcgaacagtctttcttcggtagccccctggcacacgatccttttagttgcctccagctcgtcggacaagagaacgtgtgcggcgatgattatgatgaggctgtcaagttaaaggagtcagttgtagagaatcacgccgtgttatcatacgctgttgaagaggagcatgcatatctgggtccgaccgtaaaaccggacgacaaagcaaaaaccctctcatacgagccgttatcaagcgccactgtgtctacaggaagtcttctgagctatgaaaacaccgacctgagcctgactgacccagagtccttctccgaacacatggacgatagcaagcaggagagtaccacatcgaaggaggaagagacaaacattatttcgagtattgtgccgtccacacaggacatctatcagagacagaatagcagtgatgtgcacaaatccttgctacccgctgtcgacgagacaacctgcggtcacacacactttcaacagatgatcgacaaatacattaatgaagctaatctgatcccggagaagaccgatctgcaagagttagagcatatctttcccaacctgcatcatcaattattcaagcctcttgaacctcaccccgacttcgatctgagcagcagcagttcgggtatcagccccgataaccgggatttctaccagaggtccgattcaagcagtgagtctcactgcgctactggtctctctaagtcaaccgtgtacttcactgctctgcggcgaacttcgatgcacagcagtctcaatactagccctaatcagcagcccgatactaatctggcccatgtgggcgcccatagcttcgccaccgagaacatcatcgggggctcggagcagtgttttgagcagctccagcctgaatacagctctcaggaagagtcccagcacgccgacctgccttcaatatttagcatagaggccagagatagcagccagggcatgaaaaaccagaactaccccagcgaagagcacaccgaaatactacagaacaaaaaaaagatcgtccatttccagttgagcattgggaacctcagcagcgtctactcctcatctgatgaagcaaacgtgtttgaccaactgaatgtccagcacagcactccctgtggcagtaactcctccgagtgttctaccaagcaccagctggagtcccgaaaggagagcatgggttttgaagagctttcaaaacgcggggtggtgacaatgttgcaaagccaaggtctgattgaggataataagaacgagacatgccgggtgctcgatattaacccacaggtggaggaaactgactcaagactgtgcgtccggaccgtcgagatgggtacttccattcaggccccatacagtctcacgactcagaatgagaaatattttgaaaactcggcggagactgatatcccgaaaatcacgaaaaagctgtctcagcttggcgagtctgaactgttcgcctctagcgggtcgttttcccttcaatcgtctattccggtttgggagacagagaccggccacggaattatggaggaacccgagctgacactgatcagcactaccgatacatctattgcagagatggatttcgctaacttaacacttgaagaaaaatctgagaacgaggctaaatgcttcttccaagtatccgaattcctgccgctggtctctgcaaccgaggcatccgattacccagcagtcagcgagctgtcaattgagaaacctcggaccgccagtaccgagactcctaggcgtctgactcccgtacctggcagcctccaggaagctttcattaaacgcaagaagtctttcatggaacggtctcaccaacggcagaaagagattcggaataagatccatgtgtccgaaaattcacaaattaaaactgtgaaggagaagcctagtatttctagctccgtgtcacgcctgaagggagtgaacaaggtccgagcctccttccccgaggatcggaagacgacgcaggcattacgccaccagcgcggcctgcggctgtacaaccagctcgccgaagtgaagcagcaaaaagaggaaaaaaccaaacaggaggcgtacgcccaaaatcgcgcaagggccaaggaatttcacaagaaaacgctggagaagctcagggccaaaaacacatgttag

SEQ ID NO: 14516 - DNA, 2397 bp, synthetic construct
  source 1..2397: mol_type = other DNA; note = Synthetic coding sequence
atggcggctagcctacccgggccgggatctcgcttgtttagaacctacggagctgcggatggacgtcggcaacgacgacccggcagagaagcagctcagtggttccctccccaggatagacgccggttctttaacagcagcggctccagcgatgcctcaattggtgatcccagccagtctgatgatcccgacgaccctgatgaccctgattttccaggtagtccggtccgaagacgacggcggcgtcccggtggccgggtgcccaaagacaggcctagcctcactgtaacacccaaaagatggaagctgagagcaagaccctcactgacggtaacccccagaaggctgggtctgcgtgcacggccaccccaaaaatgttccactccctgcggtccactgaggctccccccctttccctccagggattcgggccggcttagccctgacttgtcagtgtgtggccagccccgcgacggggatgaattagggatctccgctagtctgtttagctccctcgcatccccctgccctggctcacccacaccaagggatagcgtcatcagcattggcacatcagcatgcctggtggctgcaagcgctgtcccctccgggttacacctcccagaggtaagtctcgaccgggcctccctcccctgttctcaggaggaggccactggcggcgccaaagacactaggatggtccaccagactcgcgccagcctgaggagcgtgctgtttggattaatgaattcagggacgcctgaggattcagagtttcgcgcagatggcaagaacatgagagaatcttgctgtaagcgtaaactggtggtcggaaacggaccggaaggcccaggactgtcttctactgggaagcgccgtgctacaggacaggatagttgccaagagcgcggactccaggaggccgtgcgtcgtgagcaccaagaggctagcgtgcctaaggggcgaatcgtcccccggggcattgatagactggagcgaacccgctctagtcggaagtccaagcatcaggaagcgacagagacaagtctcctacacagccacagattcaaaaagggtcagaaactcggcaaggactcatttcccactcaagatcttacccccttgcagaacgtgtgcttttggaccaaaacaagggcttcattttcctttcataagaagaagatagtcactgacgtgtcagaagtctgtagcatttacacgacagctacctctctttccggctctctgctttctgagtgcagcaacaggccagtcatgaaccgaacctctggtgcaccttccagctggcacagcagtagtatgtacctgctttctcccctcaacactttgtctattagtaacaaaaaggcttcagacgccgagaaggtgtacggtgaatgttcacagaagggaccagtacctttctcacactgcctgcccaccgaaaaactgcagcggtgtgagaaaattggtgagggcgtgttcggcgaggtgtttcagacaatagctgaccacacacctgtagctataaagataatcgctatagagggccctgatctggtgaatggaagccaccagaaaacgttcgaggaaatacttccagagatcattatttccaaggagctgtcacttttaagcggtgaggtgtgtaaccggacggaaggattcattgggttaaacagcgttcactgcgtccaaggatcttatccaccactgctgctcaaggcctgggaccattacaattcaacaaagggctccgccaacgataggcctgatttttttaaggacgatcaactgttcatcgtgcttgaattcgaattcggaggaatagacctagagcagatgaggaccaaattatcatctttggccacagccaaatcaatcctgcatcaacttactgcgtcactcgccgtggcagaagcttctctgcgtttcgagcaccgggacttgcactgggggaatgttttactgaagaaaacatcactgaagaagctgcattacacacttaacgggaagtccagcacgattcccagctgcggcttgcaagtaagcataatcgactatactctgagcaggctggagcgcgatggcatcgtagtattctgtgatgtcagcatggatgaagatctctttactggcgacggagattaccaattcgacatttaccgccttatgaagaaagagaataacaataggtggggagagtatcacccctatagtaacgtgctgtggctgcattacctgactgataagatgttaaaacagatgacctttaagaccaaatgtaacacacctgcaatgaagcagattaagcgtaaaatccaggaatttcacagaaccatgctgaacttttcaagcgctactgacctgctgtgccaacactccctttttaaatag

SEQ ID NO: 14517 - DNA, 765 bp, synthetic construct
  source 1..765: mol_type = other DNA; note = Synthetic coding sequence
atggttcgggaggccaatataaagcaggctaccgctgagaaacagctgaaggaagctcagggcaaaattgacgtgcttcaagccgaagttgctgcccttaagacactggtgctgtcatcttcccctacgtctcctactcaggagcctctgccagggggcaagacccctttcaaaaagggccataccagaaataagagcacttcctctgctatgtctggatctcaccaggatctctccgtgattcagccaattgttaaggactgtaaggaggcagacttgagcctctataatgagtttagactgtggaaagacgagccaactatggacaggacctgcccattcttagacaagatctaccaagaggacattttcccctgcttgaccttttccaagagcgagctggctagcgccgtactcgaagcggtggagaataataccctgtccatagaacctgtcgggcttcagcccatacgttttgttaaagcatctgctgtggaatgcggggggcccaaaaaatgtgctcttaccgggcagtccaaatcctgcaagcaccgcataaagctgggagactcctctaattactactatattagccccttttgtcgctaccgcattacaagtgtgtgcaatttcttcacctatattagatatatccaacaggggctggtgaagcagcaggacgtagaccagatgttttgggaagtgatgcaactgcgcaaagagatgtcactcgcaaagctgggttacttcaaggaagaactatag

SEQ ID NO: 14518 - DNA, 1077 bp, synthetic construct
  source 1..1077: mol_type = other DNA; note = Synthetic coding sequence
atgtatgcttctcagtggttcttgacattatttaccgcgaagttccccctttgcatggtctttcatattattgacctgcttctctgtgagggactcaacatcattttccatgtagctctcgcactgctgaagactagtaaggaagacctacttcaggcagacttcgaaggtgccctcaagtttttccgcgtgcaattgccaaaacgctatagagcggaagagaacgcacggcggttgatggaacaggcctgcaatattaaggttccaaccaagaaacttaagaaatacgagaaagagtatcagacaatgagagagtctcagctccagcaggaggaccccatggatcggtataagcgagagaaccggaggctccaggaagcctccatgcgtctggaacaggagaacgatgacctcgctcatgagcttgtcaccagcaaaatcgcacttcgtaatgaccttgatcaggctgaggataaggccgacgtgttgaacaaggagctgcttctgacaaagcaaaggttagttgagaccgaagaagagaaaaggaaacaggaggaagagaccgctcaactgaaggaggttttccggaaacaacttgaaaaagccgaatatgaaatcaagaaaaccactgccataattgcggagtataaacagatctgctctcagctttcaacacgcctggagaaacagcaagctgcctccaaggaagaactcgaagtggtgaaggggaagatgatggcctgcaaacactgttccgatatctttagcaaggagggtgcattaaagctggccgcgactggccgggaggaccagggaattgagacagacgatgaaaaagattctctgaaaaaacagcttagagaaatggaattggaactcgcccagaccaagctgcaattggttgaagccaagtgcaagatacaggagctggaacaccagcggggggctctgatgaacgagattcaggccgccaagaactcttggttctctaagacgttaaactcaatcaaaacagcaaccggcacgcagcctcttcagcccgcgcctgtgacccaaccaccaaaggaatctacatag

SEQ ID NO: 14519 - DNA, 2436 bp, synthetic construct
  source 1..2436: mol_type = other DNA; note = Synthetic coding sequence
atgcccctgagctctccaaacgccgctgccacagcaagcgatatggacaaaaacagtggttctaactcttcctccgctagtagcggaagttccaaagggcagcagccgcccagatctgcatctgccggacctgccggcgaaagcaaacctaagagtgacggaaaaaacagcagcggatcgaagagatataatagaaaacgagagctctcatatccaaagaatgaaagtttcaataatcagtcgaggaggtcttcttcacagaagtcaaagactttcaacaagatgcctccacagaggggcggggggtcatccaagctttttagctcctcctttaacggcggaaggcgggatgaggtcgccgaagcccagagagctgagttcagccccgcacaattttcaggccctaaaaaaatcaatttgaatcacttgctgaacttcactttcgagcctcgtggccagactggccactttgagggttctgggcatggttcctgggggaaacggaacaaatggggacacaaacctttcaataaagaactcttccttcaagcaaattgtcagttcgtcgtgtccgaggatcaggattatacggctcacttcgcggatccagacactctcgtgaactgggacttcgtcgagcaggttagaatctgctctcacgaggtcccaagctgtccaatatgtctatacccacccacagctgcaaaaatcacccgctgcggacacatcttctgctgggcctgtattcttcattatctgtcgctcagcgagaaaacctggagcaagtgccccatctgttatagcagcgtccacaaaaaagatttaaagtcagtggtcgcaactgagagtcaccagtatgtcgtaggagacacgatcacaatgcagctcatgaaacgggagaagggcgtacttgtagcactccctaaatcaaaatggatgaatgtagaccaccccatccacctgggagacgagcagcattcccaatactcgaagctcctcctggcatccaaggagcaggtgcttcacagggtggtgttagaagaaaaggtcgccctggaacagcaactggccgaggaaaaacacacgcctgagagctgctttatcgaggccgccattcaggaattgaagacaagagaagaggccctcagtgggctggcagggtcccgacgggaggtgactggggttgtcgccgccttggaacaattagtgcttatggcccccttggctaaggaatctgtttttcagcctaggaagggtgtgctggaatatctgagcgcctttgatgaggaaactacagaagtgtgttctctggatactccctccaggcctctggctctgcccttagtggaagaggaagaggcagtgtctgagcccgaacctgagggcctgcctgaagcctgtgacgacttggaactggccgatgacaatttaaaagaaggaacaatttgcactgagtcatcgcagcaagagccaattactaagtcgggttttacaagactgagctcaagcccctgctactacttctaccaagcggaagacggccagcatatgtttttacacccggtgaacgtccgttgtctcgtaagagagtatggcagccttgaacggtcacccgaaaaaatcagcgctaccgtggtggagattgctgggtactcaatgtccgaggatgttaggcaaagacatcgatacctgtcacatctcccgctcacctgcgaattctcgatctgtgagctcgccctgcagccccccgtcgtttccaaggagacactggagatgttcagcgacgacatcgagaagcggaagcggcagagacaaaagaaagctcgagaagaaagaagaagggaacgacgtattgaaatcgaagaaaacaagaaacaaggaaaatacccggaagtgcacatacccttggagaacttgcagcagttcccagccttcaactcctacacctgctcctctgatagcgcgctaggccccacttctaccgagggccacggggccttatcaatttctccacttagccgaagcccaggttctcatgcagactttttacttacaccactgagccctacagcatcacaaggcagcccctcattttgtgtgggttcacttgaggaggattctcctttccccagcttcgcccagatgttacgagttgggaaagctaaagcagacgtgtggccaaagacggcgcctaaaaaagacgagaactctctcgtgccgccagccccagtcgatagcgatggagaatccgataactccgatcgagtgcccgtgccttctttccaaaattccttcagccaggctatcgaggccgctttcatgaaactggacacccctgccacaagtgatcctctgagcgaagagaagggagggaagaagaggaagaagcagaagcaaaagttgcttttctcaaccagtgtcgtgcacacgaaatag

SEQ ID NO: 14520 - DNA, 5826 bp, synthetic construct
  source 1..5826: mol_type = other DNA; note = Synthetic coding sequence
atgaaaacatcagaccttgtgcccagtttcgggtatttcattaggtcccctgaaaaaagggaaccaatagccctgattcggaagtcagacgtgtcaaggggaaatctagaaaaagaaatggctcacttgaatcacgatctctactccggggacctcaatgaacagtcccaggctcagctcagcgaaggctctattacgctccaggtggaagccgttgagagtacttcacaggtagatgagaatgatgtgaccttgacagctgacaaaggtaagacagaagatacattttttatgagcaataagccgcagcggtacaaggataagctgcccgatagcggcgattcaatgctacgcataagtaccatagcatccgccatcgccgaagcttcagtcaatactgatccatcgcagttggcggcaatgatcaaggcattgtccaacaaaacccgggataagacatttcaggaagatgagaagcagaaagactattcacatgtgcggcatttcctgcccaacgatctggagaagtctaacgggtcaaatgccctcgacatggagaagtaccttaagaaaactgaagtcagccgttatgaaagtgctttagaaaatttttcccgggcatcgatgagtgatacatgggacctctccttgcctaaggaacagaccactcaagacattcatcccgtggacttgtccgccacttcagtgagtgtgcgtgcccccgaagaaaatacagccgccatcgtgtacgttgaaaacggtgaaagcgaaaatcaagaatcctttagaacaatcaactcctctaatagcgtgaccaaccgagaaaacaattcggctgttgtcgacgtgaaaacctgttcaatcgacaataaactacaggacgtgggtaatgatgaaaaggcgacatccattagcacacctagcgacagctacagctccgtgagaaatcctcgtattaccagtctttgtctactgaaagattgcgaagagatacgcgataatcgcgagaatcagagacaaaacgaatgtgtgtccgaaatttctaactcagagaagcatgtcacctttgaaaaccaccgaatcgtttcaccaaagaacagcgatttaaagaataccagcccagagcacggggggcggggcagtgaggacgaacaggaatcttttcggccgtccacctctcccttgtcacactcatccccatccgagattagcggaaccagtagctctggatgtgcactagaatcatttggctccgccgcccaacagcagcaacctccgtgtgagcaggagctgagccctctggtgtgtagccccgcgggcgtgtctcggctcacgtacgtgagtgagcctgagagctcttacccaaccacggctactgacgacgcattggaggatcgaaagtccgatataaccagtgagctttccacgactattatacaagggtcaccagccgccttggaggaacgtgctatggagaagcttagggagaaggttccatttcagaaccgaggaaaagggactctgtcttccatcatccagaacaacagcgatacccgaaaggcgaccgagaccacctctctgagctccaagccggaatatgtgaagcccgatttcagatggagtaaggatcctagcagcaagtcaggaaacctactggaaacgtcggaggtgggctggacatctaatccagaagaactggaccccattagattagccctcctgggcaagtccgggttatcatgtcaagttggcagcgccacaagccatccagtgagctgccaggaacctattgatgaggatcaaagaatctctcccaaggataaaagcaccgctggcagagagtttagcggtcaggtgtcccatcagacaacttccgagaatcagtgtacgcccatcccctcctccacggtgcactcctccgtcgccgatatgcagaacatgcctgctgcagtgcacgcactacttactcaaccatcgctgagcgccgctccatttgcccagaggtacctcggaaccctgccgtctactggcagtacaacactccctcaatgccacgccggaaacgccactgtgtgcggattctcaggcggcctgccataccctgctgtggctggcgaacccgtccagaacagcgtggctgttgggatatgcctcggttctaacatcggatctggttggatgggaacatcatccctctgtaacccgtatagcaatacccttaaccagaatctgctgtctactacaaagcccttccctgtgcctagcgtggggaccaactgcggaatcgagccatgggattctggtgttacatcaggcctagggtccgtgagggtacctgaggaactcaagctgccacacgcttgctgcgtcgggatagcctctcagaccctgttatccgtgttaaaccctactgataggtggcttcaagtttctatcggtgtgctgtcaatctccgttaatggagaaaaggtggacttgtccacctatcggtgcctggtcttcaagaacaaagctatcataagacctcacgccaccgaggagattaaggtgctgttcattccaagctctcccggggtgttccggtgcacctttagcgttgcgtcctggccctgtagcaccgatgcagaaaccatcgttcaggcagaggccttggccagcactgttacgctcactgccattgcagagtcccccgtgattgaagtcgagacagagaagaaagacgtgcttgactttggcgatctcacctacgggggatggaaggctctcccgctcaagcttattaacaggacccacgctacagtccccatcaggcttattattaacgctaacgcagtcgcatggcgatgctttacattcagcaaggaatccgtccgagcacctgttgaagtggcgccctgcgccgacgtggtcactcgtctggctgggcccagtgtcgtcaaccatatgatgcccgcctcctacgacggtcaggatcccgagtttctcatgatctgggtgctctttcatagccccaaaaaacagatctccagcagcgatatcctcgactctgcggaagaattttctgcgaaagtcgatatcgaggtcgactcccctaatccaactcccgtgctcagaagcgtgtcactgcgggccagagccggcattgcccgtatacatgcacctagggacctgcagacaatgcacttcttagccaaggttgccagtagccgcaagcagcacctgcccctcaagaacgccgggaatattgaggtctaccttgatattaaggtgcctgagcaaggctcccatttctccgttgatcctaagaacctgctgttgaagccgggcgaagaacacgaagtgattgtgtcttttacaccgaaggatcccgaagcttgtgaggagcgcatcttaaagattttcgtacaaccctttggcccacagtatgaggtggtgctgaaaggtgaggtcatctcgtccgggtccaagcctctgagtcccggcccatgccttgacattcctagcatcctttccaacaaacagtttctcgcatggggcggagtaccgttgggcaggacacagttgcagaaactggctctacgtaacaactctgccagcaccacacagcatctgcgtctcctgattaggggacaggatcaggactgtttccagctgcagaacaccttcggctctgagcagcggctcacttctaactgtgagattcggatccatccaaaagaagatatttttatcagcgtcctctttgcacctaccagactatcttgcatgcttgcccgccttgagattaagcagctcggcaatagaagccagcctggaataaagttcacaattcctctgagcggctacggcggaacaagcaacctgatcttagaaggagtcaagaaactgagcgattcatacatggttactgttaacggtctcgtgcccggaaaagaaagcaagatcgtattcagcgttcgcaacactgggtcccgcgcagctttcgtgaaggcagtcggattcaaggatagtcaaaaaaaggtgttgttagacccaaaagtcctgcgaatctttcccgataagtttgtattgaaggagcggacacaggagaacgtgacactcatttacaatccgtccgacaggggaatcaataacaaaaccgctactgagctctcgacagtgtatctgtttggcggggatgagattagtagacagcagtataggcgcgccctgctgcacaaacctgaaatgattaagcagatcctccccgagcattcagtcctgcagaatatcaacttcgtggaagcctttcaagacgaactacttgttactgaggtgtatgacctgccccagcgccccaacgacgtgcagctcttctatggttcaatgtgtaagatcatcctgtcagtcattggagaattcagagactgtatctcttctagagagttcctccagccatccagtaaagcgagcttggagtccacgtccgatctgggtgcatccggaaaacacgggggaaatgtttcactcgacgtgttgcctgtgaaaggtccacagggctcgcccctcttgtcccgagcggctagaccacctctggaccagctcgcttctgaggagccatggacagttcttccagagcacctgatcttggtggctcctagtccatgcgacatggctaagactgggcggtttcagatcgtgaacaactccgttagactgttgagatttgaactctgctggcccgcacactgcctgaccgttacgccccagcacggctgtgttgctccagaatccaaactccagattctggtgagccccaactcaagcctgtcaactaagcaatctatgttcccctggagcggactaatatacatccactgcgatgacggacaaaagaaaatcgtcaaggtacagattagagaggacctgacacaagttgagctgctcactcgccttacctctaaacccttcggaattctttcccctgtgagtgagccatccgtcagtcatcttgtgaaaccaatgactaaacccccttccaccaaagtggagataagaaataaaagtattactttccccaccacggagcccggtgaaacatccgagtcatgtcttgagctagaaaatcacggaaccacagacgtcaaatggcacctttcgtctctggccccaccctacgtgaaaggggtggacgaatcaggtgatgtgtttcgggccacatatgctgcgttcaggtgctcaccaatctctggtctactggagtcacacggtatccaaaaagtcagcatcaccttcttgccaagaggaaggggggattacgcccagttctgggatgtcgagtgccacccgctgaaggagccccatatgaaacataccctgaggttccagctctctggccagtctatagaggctgaaaatgaaccagaaaacgcctgtctgagcacagactccttaatcaagatcgaccacctagtcaaaccacggcggcaggcggtcagcgaagcaagcgcccgcatcccagagcaactcgacgttacagcccgcggtgtatacgctcccgaagacgtttatcggtttcgccccaccagcgtgggcgaaagtaggactctcaaagtgaatctgcggaataatagttttatcacacactccctgaagtttctttccccacgcgagcctttctacgttaagcacagtaaatattcactcagggcacagcattacataaacatgcctgtccagtttaagcctaaatcagccgggaagtttgaggccctgctggtgatccagacggatgagggtaaaagtattgccatccgcctgattggcgaagcattgggtaagaactag

SEQ ID NO: 14521 - DNA, 4167 bp, synthetic construct
  source 1..4167: mol_type = other DNA; note = Synthetic coding sequence
atggccccaggctgtaaaacagagcttagatcggtgacaaatgggcagtcaaaccagcccagtaacgagggcgatgctatcaaagtgttcgtgcggatacggcctccggccgagcgctcaggctcagccgatggggagcagaatctgtgcttgagtgtactgagttccactagcctcaggcttcacagcaatccggaaccgaagactttcacatttgatcatgtggccgatgtggatactactcaggagagtgtttttgccactgtcgccaaatctatagtggagtcttgtatgtcgggttacaatggaacaatcttcgcgtacggtcagactggaagtgggaaaacatttacaatgatgggaccgtcagagtcagataacttttcacacaacttacggggcgtgatacctagatctttcgagtatctgtttagccttattgacagggagaaggaaaaggcaggcgccggcaagtctttcctgtgtaaatgctcatttatcgaaatttacaatgagcagatctacgatctgctcgacagtgcgtcggccggactgtacctgcgggaacacataaaaaagggcgtcttcgtggttggtgcagtcgagcaagtagtgacttcagctgccgaggcctaccaggtcttaagcggtgggtggcggaaccgtagagtggccagcacaagcatgaaccgagaatcatcacgatcccatgctgtctttaccatcacaattgagtctatggagaaatccaacgagatcgtgaatataagaacctctctgctgaatctcgtcgatctggcaggctccgagcggcagaaagatactcacgcagaaggaatgcgtcttaaggaagctggaaatatcaatcggtccctgtcctgtcttggacaggttatcaccgccctagtagacgtgggcaacggaaaacaacggcacgtgtgttacagggatagcaagctgacgtttcttctaagagactccctgggaggcaacgccaagactgctatcatcgccaacgtgcacccaggatcgaggtgttttggagaaaccctgtctacactgaatttcgcccagagggccaaattgataaaaaacaaggccgtggtgaacgaggatacgcaaggcaacgtcagccaactccaggccgaggtgaaaaggctcaaggagcagctggcagagctggccagtggtcagactccccccgagtcgttcctgactagagataagaagaaaaccaattatatggagtattttcaggaagccatgcttttttttaagaaaagcgaacaggaaaaaaaaagcctgattgaaaaggtaacacagctggaagacctcaccctgaagaaggaaaagtttatacagtctaataagatgattgttaagttccgtgaagatcagattatccggcttgaaaaactgcacaaggagtccagaggcggcttcctcccggaagagcaggacagactgctttctgagctaagaaatgaaatccagactttgagagaacagatcgagcaccatcctcgagtagccaaatacgcgatggagaatcacagcctgagagaggaaaatagaagactgcgcctactagaaccagttaagagagctcaggaaatggacgctcaaacaattgcaaagctcgaaaaggctttttccgaaatttcaggaatggagaagagcgataagaatcaacagggatttagcccaaaagctcaaaaagagccttgccttttcgccaacaccgagaagttgaaagctcaactcctgcagatacagaccgaactcaataattcgaaacaggagtacgaagagtttaaagagctgaccagaaaacgtcagctcgaattggagtcggagctccagagcctccagaaggctaatttgaacttggagaaccttctagaagcaacaaaggcatgcaagagacaggaagtgagtcaactaaacaaaatccatgccgagaccctgaagataattactaccccaaccaaggcctatcagttgcattcccgtccagtaccgaagctatctccagagatggggtcttttggaagtctctacactcagaacagctcgattttggataatgatatattaaacgagcccgttcctccagaaatgaacgaacaggctttcgaggctatctctgaggagctcaggacggtccaggagcaaatgagtgccttgcaggctaaattggacgaggaagagcataaaaacttgaaactccaacagcatgtggataagttagaacatcatagtacccagatgcaggagctcttctcctctgagcgaatcgactggacaaagcaacaggaagaacttctgagtcagttgaatgtactggaaaagcagctccaggaaacccagaccaaaaacgattttcttaagagcgaggtgcacgatttacgggtggtgctgcactctgctgacaaggagctatcaagcgttaaactggagtactcctcctttaagaccaatcaggaaaaagaattcaataagttgtctgaaagacatatgcatgtccagctccagctcgataacctgaggctggagaatgagaaactgctggaatccaaagcttgcctgcaagactcatacgataatctgcaggaaatcatgaagtttgaaatcgatcagctcagcaggaatctgcaaaactttaagaaagaaaatgaaactctaaaatcggatttgaataacctgatggaactcctagaagccgaaaaggaacgcaataacaagcttagtctccagtttgaagaagataaggaaaactcttctaaggagatcctgaaggtgttggaagcggtccgtcaggaaaaacagaaagagactgctaaatgtgagcagcaaatggcaaaggttcagaagcttgaggaaagtctgttagccaccgagaaagtgatttcgtccctcgagaaaagccgggactctgataaaaaagtcgtggccgacctgatgaatcaaatccaggagctccggacctccgtctgcgagaagaccgagaccattgacactctcaaacaagaactgaaggacatcaactgtaaatataatagcgcgctggttgatagagaagagtcccgggtcctcataaagaaacaggaggtggacatcctggatctgaaggagaccttgagactacgaatcctcagcgaagacatcgagcgggacatgttgtgtgaagaccttgctcatgccaccgagcagctgaacatgctcacggaagcctctaagaaacattcaggactccttcaatccgctcaggaggaactcactaagaaggaggctctcattcaggaactgcagcacaagctcaaccaaaaaaaggaggaggtggagcagaagaagaacgaatacaactttaagatgagacagctggagcatgtaatggattcggcagccgaggatccccagtcaccgaaaacccccccgcattttcagacacatctcgcaaaactcctagagactcaggagcaggaaattgaggatggcagggcctcgaaaacttctctggagcatctcgtcaccaaactcaacgaggatagggaggttaaaaatgccgagatcctgaggatgaaagagcaattacgcgagatggagaatctgcggctggagagccagcagctgattgaaaaaaattggttgttacagggccaattggacgacattaagcggcaaaaggaaaatagcgaccaaaaccaccctgacaatcagcagctcaagaatgaacaggaagagagcattaaagagcgtttggccaaatccaaaatagtcgaagagatgctaaaaatgaaagcggatctggaagaggtacaaagcgctctttacaacaaggagatggagtgtctgcgtatgacagacgaggtggaacgcacccaaacgctggagtcaaaagccttccaggagaaggaacagttgcgatccaaactggaagaaatgtacgaggaacgtgaacgaacatcacaggagatggagatgctgaggaaacaggtggaatgcctggccgaggaaaatggcaagctggtagggcaccaaaacttgcatcagaagatccaatacgtggtgagactcaagaaggagaacgtgaggctcgccgaagagactgagaagttgagggctgaaaacgtctttctgaaagagaaaaagcgcagtgagtcatag

SEQ ID NO: 14522 - DNA, 4767 bp, synthetic construct
  source 1..4767: mol_type = other DNA; note = Synthetic coding sequence
atgttgccacctaaacacctgagcgctacaaaaccaaaaaagtcctgggcccctaatctgtatgagctagatagcgatttgaccaaggagcccgacgtgattatcggcgaagggccgactgacagtgagttctttcaccagagattccgcaacctgatatacgttgagttcgtgggaccaaggaaaactttgattaagcttcgcaacttgtgtctcgattggctacagcccgaaacaaggaccaaagaagagatcattgagcttctggtgttggagcagtacttgaccataatccccgagaaactgaagccctgggttcgcgccaagaaacccgaaaattgtgaaaaactggtgaccctcctggaaaattataaagagatgtaccaacccgaggacgacaataactcagatgtgaccagcgacgatgacatgacgcgaaaccgccgcgagtccagtcccccccactctgtccatagtttcagtgaccgcgactgggatcggcgcggacggagccgggatatggagccccgggacagatggagccacactcgtaatccccgatcaagaatgccccccagggacctctccttacccgttgtcgccaaaacatcatttgaaatggacagggaggatgacagagatagccgcgcatatgagagccgatcccaggacgcagagtcttatcaaaatgtggttgacctggccgaagatcgcaagcctcacaacactatccaagacaatatggaaaactatagaaagttgctgagccttgtgcagctagcagaggacgacggacattctcacatgacccagggccactcctcccggagtaagaggtcagcgtatcctagtacatctcgcggcctgaagactatgccagaagcaaagaagtcaacacatcgccgcgggatctgtgaggatgagtccagccatggggtcatcatggaaaagttcatcaaggacgtgagccggagttctaagtctgggagggccagagagtcaagtgaccgatctcagcgatttcctaggatgtctgacgataactggaaggacattagcctgaataagagagagtcagtgattcagcagagagtgtacgaaggcaatgcctttagaggcggctttagatttaactcaaccctcgtgagtagaaagagagttctcgagcgcaagcgaagatatcattttgataccgatgggaaaggtagtattcatgaccagaaaggctgtccaagaaaaaagcctttcgaatgtggctccgagatgcgaaaggctatgtccgtctcctcgctctccagcctgagtagtccttccttcaccgagagtcaacccattgacttcggcgctatgccatatgtctgtgatgagtgcggcagaagctttagcgtaatctccgaatttgtcgaacaccaaatcatgcatacacgcgaaaacctatatgaatacggcgagtcgtttatccacagtgttgcagtctctgaagttcagaaaagccaggttggcggaaaacggttcgaatgtaaagactgtggtgaaactttcaacaagtccgctgccttggccgagcaccgaaaaatacatgcccgcgggtacctcgtggaatgcaaaaaccaggagtgcgaagaagccttcatgccctcccctacatttagtgaactgcagaaaatctacggtaaagataaattctacgagtgccgtgtatgtaaggaaactttcctgcacagttccgcgctgatcgagcatcagaagattcactttggtgacgataaggacaatgaacgagagcatgaaagagagagggagagagaaaggggagagacatttagaccgagcccggctttgaatgagtttcaaaaaatgtacgggaaggagaagatgtacgaatgtaaggtgtgtggggaaacttttctccactccagctcactgaaggaacaccagaagatccatactcgcggaaatccctttgagaacaagggcaaagtgtgtgaagagaccttcattcccggacagtccctaaaacgcagacaaaagacatacaataaagaaaaactctgcgatttcactgacggaagagacgcattcatgcagagctctgagctctccgagcaccaaaagatacatagtagaaaaaatttgtttgagggcaggggatacgaaaagtctgtgattcactcaggcccctttacagaaagccagaagagtcataccatcacacgtccgcttgagtccgatgaggacgaaaaagcattcaccatctcttctaacccatacgagaatcagaagattccaactaaggaaaatgtgtacgaggccaagtcttatgaaagaagtgtgatccactctctggcctccgtggaggcacaaaagtcccatagtgtcgcggggccatcgaagccgaaagtcatggccgagtcgaccatccagtccttcgatgccatcaatcaccagcgagtgcgggccgggggaaacaccagcgagggtcgcgagtacagcagaagcgtcatccattccctggtcgcgtctaaaccacccaggtctcacaacgggaacgaactggtcgaatccaacgaaaagggggagtcctctatatacatctccgaccttaacgataaacgccaaaagataccagcaagagaaaatccttgcgagggggggagcaagaatcgaaactacgaagattctgttatccagagtgtgttccgcgccaagccccagaagagcgtgccaggtgagggcagtggcgagtttaagaaagatggtgaattttccgttccatctagtaatgtgcgggaatatcagaaggccagagctaagaaaaagtatatagagcacaggtcaaatgaaaccagcgtgatacattccctaccttttggagagcaaacatttcgccctagagggatgttgtatgagtgccaagaatgtggggaatgtttcgcccattcttcagacttaaccgagcatcagaaaatccatgatagagaaaaacccagcggttccagaaactatgagtggtcagtcattcgcagcctggccccgactgacccccaaacttcttacgctcaggagcagtacgcaaaagagcaggcgcgaaataaatgcaaagatttcaggcagttcttcgcgacaagcgaggatttgaacaccaaccaaaaaatttatgaccaagagaaaagccatggcgaagaatcacagggcgagaacaccgacggcgaggaaacacattcagaagagacccatggtcaggaaactatcgaggatccggtgattcagggctctgacatggaggacccacagaaagacgatccggatgataagatatatgagtgcgaggactgtggtctcggattcgtggaccttacagacctaactgaccaccagaaggtgcactcaagaaaatgcctagttgattccagagagtacacccattctgttattcacacgcactcaatctcagagtaccagcgggactacaccggcgagcagctgtatgagtgcccgaagtgcggcgagtcatttattcatagtagctttttgtttgagcaccaacggatccatgagcaggaccaattatacagtatgaaagggtgcgacgatggcttcattgcactgctccccatgaagcctcgcagaaaccgtgccgctgagagaaacccagcactggcaggctcggctatccgttgtttattgtgtggccaagggtttattcacagtagcgccctgaatgagcacatgcggttgcaccgtgaggacgatctacttgagcagtctcaaatggcagaggaggcaataatccccggcctcgctttaacggagttccaacgctctcagacagaagagagactgtttgagtgtgcagtctgtggggagagcttcgtgaaccctgccgaattagcggaccatgtcacggtgcacaagaacgaaccttatgaatatggcagctcttatactcacacttctttcctgacagaaccacttaaaggagcaattcccttttacgagtgcaaggactgcggcaaatcctttatacattcaaccgtgctgactaaacacaaggaacttcacctggaagaagaggaagaggatgaagctgctgctgcagccgcggccgcggcgcaagaggtagaagcgaatgtgcacgtgccacaagttgttctcagaatccaaggtctcaacgtcgaggctgccgagcccgaggtggaagccgctgaaccggaggtggaagctgccgagccggaagtggaggccgccgagccgaatggggaggcagagggacccgatggagaagccgccgagcccattggtgaggccggccagccgaatggagaggccgaacagccgaatggagacgctgacgagccagacggcgccggcatcgaggaccctgaggaaagggctgaggagccagaaggaaaagctgaagaaccagaaggggacgctgatgagcctgacggagtggggatcgaggacccagaggagggagaggatcaggagatacaggtggaggaaccatactatgattgccacgaatgcacagagacgtttacctcctccacggctttctctgagcatctcaaaacgcacgcctctatgataatcttcgagcccgcaaacgcttttggggagtgcagtgggtacattgagagggcctctacaagcactgggggagccaatcaggcagacgagaagtatttcaaatgtgatgtttgcggtcaacttttcaatgaccggttgagcctggcgaggcaccagaatacccacaccgggtag

SEQ ID NO: 14523 - DNA, 2508 bp, synthetic construct
  source 1..2508: mol_type = other DNA; note = Synthetic coding sequence
atgggcaattataaatcccggcctacacagacatgcactgacgagtggaagaagaaagttagcgagtcctacgtaatcaccattgaaaggctcgaggacgacttgcagatcaaggagaaagagctaacagaactgcggaacatatttggctctgatgaggcttttagcaaagtgaatctgaattacagaaccgagaatggcctatccctcctgcacttgtgctgtatttgtggcggaaagaaaagccacatcaggacccttatgttgaaaggactccggccatctcgtctgactcggaacggttttacagccctgcacctggctgtgtacaaggacaatgccgagctcatcacttccctgctgcatagcggcgcagacattcaacaggttggctatggaggactcaccgcattgcacattgccacaatcgccggtcatctggaggctgctgacgtgttattacagcatggcgccaacgtcaacattcaggatgctgtgtttttcacccctcttcatattgccgcctactatgggcatgagcaggtcacacgcctgttgctcaaattcggagccgatgttaacgtgagcggagaggttggggatcggcctctgcacctggcctctgccaagggttttctcaacatagcgaagctgctcatggaggagggatccaaggctgacgtcaatgcccaggacaatgaggaccacgtacccctccacttttgctctcgctttggacaccacgatatcgtaaagtatcttctgcaatccgatcttgaagtgcagccccacgtcgtgaacatttacggagatactcctcttcacctggcttgctataatgggaaattcgaggtggctaaagagattatccaaatatctggcacagaaagcttgaccaaggaaaatatcttttcagagacagcatttcacagcgcatgtacctacggtaagtctatagaccttgtcaaattcctgttagatcaaaacgtgatcaatattaatcatcagggaagggatggacacacgggcttgcactcagcctgctaccacggccatataaggttggtgcagtttttgctggataacggcgcggatatgaatctggtggcctgtgatcccagccgatccagcggtgagaaggacgagcagacgtgtcttatgtgggcttatgaaaaaggccatgacgcaattgtgactttgctcaagcactacaaacgccctcaggatgagctaccatgcaacgagtacagtcagcccggaggcgatggctcctacgtcagtgtgccatctcctctagggaagattaaatcaatgactaaagagaaggcagatatcctgctgctgagagcaggcttgccgagccattttcacctacagctgtccgaaattgagtttcacgagattattggctccggctccttcggaaaggtgtataaagggcggtgtcgcaacaaaatcgtcgcgatcaaaagatatcgggccaatacctattgctccaagtcagatgtggatatgttctgtagggaagtgtcaatcctgtgccaactcaaccatccatgtgttatacagttcgtcggagcttgtctgaatgaccccagtcaatttgctattgtgactcaatacatttccgggggtagcctctttagcctactccacgaacagaagcgtatacttgatctccagtctaaactgatcatagcagtagacgtagcaaaaggaatggaatacctgcataacctgacccaacctattatacaccgcgacttgaattctcataacattctgttgtatgaggatggccacgcagtggtcgctgatttcggcgaatctagatttctccagtccctcgatgaggataacatgacgaaacaacccggtaatctcagatggatggctccggaggtgttcacgcagtgtacgagatacacaatcaaggcagacgtgttcagctacgccttgtgtctgtgggagatccttaccggggagatcccattcgcccacctgaagcccgcagcagccgcggccgatatggcctaccaccatattcgacccccaattgggtactcaattcctaagccaatcagctccctgcttatccggggatggaatgcctgcccagagggccggccagaattctccgaagtcgttatgaagctggaggagtgtttgtgcaacatcgagctgatgtcccctgcatccagtaatagttctgggtctctcagcccctcgtcttccagcgactgcttggtcaatcgcggtggaccagggcgcagccacgtggctgccctgaggagccgattcgagctcgaatatgctcttaacgcaagaagctatgccgctctaagtcagagtgctggccagtacagctcacagggcctgagcctagaggagatgaagcgaagcctgcagtacacccctattgataaatatggttatgtctccgacccaatgtcctcaatgcattttcactcatgtagaaatagtagctctttcgaagacagttcctag

SEQ ID NO: 14524 - DNA, 1767 bp, synthetic construct
  source 1..1767: mol_type = other DNA; note = Synthetic coding sequence
atgaacacctctatcccctaccagcagaatccatataatcccagagggagctctaatgtaatccaatgctacaggtgtggtgacacatgtaagggcgaggttgtccgcgtccacaacaatcactttcacataaggtgcttcacgtgccaggtttgcggatgcggacttgctcagtccggattctttttcaaaaaccaggagtacatctgcacacaggactaccagcagttgtacgggacaagatgtgacagctgtcgagacttcatcaccggggaggtgatctccgccctcggaaggacataccatcccaagtgttttgtctgttcactgtgcagaaagccctttcccatcggagacaaggtgactttttcggggaaggagtgtgtttgtcaaacatgctcccagtccatggcatcttcaaagcccatcaagattcgggggccatctcattgcgccggctgtaaggaagagatcaagcatgggcaatccctgcttgcccttgacaagcagtggcacgtgtcctgcttcaagtgtcaaacctgcagcgtgatcctgacaggggaatacatctcaaaagatggcgtgccatattgcgaaagcgattatcatgctcagttcgggatcaagtgtgagacgtgtgatcgctatatcagtggaagggtgcttgaggctggcggaaaacattatcatcccacatgcgcgaggtgtgtgcgctgtcaccagatgttcacggagggcgaagaaatgtatctgacagggtctgaagtgtggcaccctatctgtaaacaggccgctagagcagagaagaaacttaagcaccgtcggacctccgaaaccagtatctcccccccagggtcatctatcggcagtcctaaccgagtgatctgcgatatctatgaaaatctagacctgcgacagagaagagcctcgtcgccaggctacattgattccccgacctacagtcgtcagggcatgagccctacattcagccgttcaccccatcattactatcggagtgctggcgacagtaatatctacaggaagccccctatctacaagcggcacggtgacctgtctaccgctacaaagagcaagacgtccgaggatatctcccagaccagcaaatactcccccatttacagtcccgacccttattacgcttccgaaagcgagtactggacctatcatggctcacctaaggtgccaagagccaggagatttagttctggcggcgaagaggatgatttcgatcgatccatgcataagctgcaatctggtattggcaggctgatcctgaaagaagagatgaaagccaggtcctcttcttacgcagacccttggacgccccctcggtcctctacttcttcccgagaggccctgcatacggccggatacgaaatgtccctgaacggttcacctcgtagtcattaccttgcggatagcgaccctcttataagcaagtccgctagcctgcctgcttatcggaggaacgggttacataggacaccgtcagccgacctctttcattacgattccatgaacgccgtgaactggggaatgcgcgaatataaaatttatccttatgagttactgctggtgactactcgcggaaggaataggcttcccaaggacgtggatcgtacacggctagaaagacatctgtcccaggaggagttctaccaagtcttcggcatgacgattagtgaatttgacagactcgctctatggaaacgaaacgagctaaaaaagcaggccagactgttttag

SEQ ID NO: 14525 - DNA, 1050 bp, synthetic construct
  source 1..1050: mol_type = other DNA; note = Synthetic coding sequence
atggctatacctattacagtgttagactgtgacctgcttctctacggccggggacaccggacattggatcgattcaaactagacgacgtaactgatgaatacttaatgtccatgtatgggttcccccgccagtttatctactacctggttgaactgttaggtgcaaatctgtctaggccaacacagcgaagccgggccatttcacccgaaacgcaggtgctggctgcactagggttttacacatcaggatcttttcagacgagaatgggggacgccatcggcatttctcaagcttcaatgagtagatgtgtggctaacgtcacagaggcactagtggagcgggcgagtcaattcatccgctttcccgcagacgaagctagcatccaagccttaaaagacgagttttacggccttgcagggatgccaggtgtgatgggggtggttgattgcatccacgtggccatcaaggctcccaatgccgaagacctttcatatgttaataggaagggtttgcactcattaaattgcctgatggtgtgcgatataagagggactctgatgacagtggagaccaactggcccggaagtctacaggactgcgcagtcctccaacagagttctctttccagccaattcgaagcaggcatgcataaggattcttggctcctgggtgatagctctttcttccttagaacgtggttaatgacccccctccatataccagaaacaccagcggagtatcggtataatatggcgcactccgccacacactccgtcattgagaaaacctttcgtacactgtgttcccgttttcgatgtctggacggtagtaaaggagcccttcagtacagcccggaaaaaagtagccatatcatccttgcgtgttgcgtcctgcataacatatccctggagcatggcatggacgtgtggtctagtccgatgacgggtccaatggagcaaccaccagaggaggagtatgaacatatggagtccctggacctagaagccgaccggatacgccaggaactcatgcttacacatttttcctag

SEQ ID NO: 14526 - DNA, 1794 bp, synthetic construct
  source 1..1794: mol_type = other DNA; note = Synthetic coding sequence
atgagcagcaaaggatctagcacagacggtcggacagatctcgccaacggtagtctctccagtagtcccgaagaaatgagtggggctgaagaaggcagagagacaagcagtggaatcgaggtggaagcaagtgatctctcactgtcactgaccggagacgacgggggcccaaaccgcacatccaccgagtcaagggggacagacacagagtcttcgggcgaggacaaagactcagactcgatggaagataccggacactacagcataaatgatgaaaaccgggtccacgatagaagtgaggaagaagaggaggaggaggaggaagaagaggaagagcagccgcggaggcgagtgcagcgcaagagggccaacagagaccaggacagctctgacgatgaacgagcccttgaggactgggtttcttcggagaccagcgcactcccaagaccaagatggcaggccctgcctgccttgcgcgagagagaactgggatcatccgcacgattcgtgtacgaggcctgtggcgcaagggtgtttgtccagagattcagactccaacatgggctggagggacataccggatgtgtcaacactctccattttaaccagagggggacatggttagcttctggttcagatgatctgaaggtagtcgtgtgggactgggtccgtagacagcccgtcctggattttgaaagcggccacaagtcaaatgtattccaagccaagtttctccccaattccggtgattctaccttagctatgtgtgccagagacgggcaggtccgagttgccgagctttccgctacacaatgttgtaagaacactaagagagtggcacagcacaagggtgcatcccacaagctagctctagagccagatagtccatgcaccttcctatctgcaggcgaggacgcggttgtttttaccatcgacctgaggcaagaccgacccgcatccaaactggttgtgacaaaggagaaagaaaagaaggttgggctctatactatctacgtgaatccggccaatacccaccagtttgccgtgggtggcagggatcaatttgttaggatttacgatcagcgaaagatcgacgagaatgaaaataacggcgttttgaagaagttttgtccccaccatctcgtcaactcagaaagcaaagccaatatcacatgcttagtgtacagccatgacgggacagagttgttagccagctataacgatgaggacatatatctgtttaacagttcccattctgatggggcccaatacgttaaaagatataagggccaccgcaataatgcaaccgtgaagggtgtgaacttttacggcccgaaatctgaattcgtcgttagcggcagcgattgcgggcacatttttctgtgggagaagtctagttgccaaattattcagttcatggagggggacaaggggggagtcgtgaactgtctggagccccatcctcatttgcccgtgcttgcaacatctggacttgaccacgatgtcaaaatctgggcccccaccgcagaggctagtaccgagttaacagggctgaaggatgtgattaagaagaacaaacgggaacgggacgaggactctctgcaccagaccgatctcttcgatagccacatgctgtggtttctgatgcaccatctgcggcagaggcggcaccatagacgctggagggagcccggtgtgggagcgacagacgctgacagtgatgaatctccctccagctccgacacatctgacgaagaggaaggtcctgaccgagtacagtgcatgccgagctag

SEQ ID NO: 14527 - DNA, 933 bp, synthetic construct
  source 1..933: mol_type = other DNA; note = Synthetic coding sequence
atgtcccaacagctgaaaaagcgggccaagacgcggcaccaaaagggccttggagggagggccccctctggtgccaaacccagacaaggaaagagcagccaggatttgcaggctgaaattgagcctgtgagcgccgtgtgggctttgtgcgacggatacgtgtgttatgaacctggccctcaagccttggggggggacgatttctccgattgttacattgaatgtgtgattcgcggcgaatttagccaacccatcttagaggaggattcgttattcgagtccctggaatatttgaaaaaagggtccgagcagcagctgtctcagaaggtcttcgaggcaagcagcctggaatgctctctagagtatatgaaaaagggagtaaaaaaggaactgcctcagaagattgtcggagaaaattctctggagtattccgagtacatgaccgggaaaaagctcccccctggcggcattcctggtatcgacttgagtgacccaaagcagcttgcagagttcgcccggaagaagccacccatcaataaggaatatgatagcttatcggccattgcatgcccacaaagtggatgcaccagaaagctgcggaatcgcgctgccttacggaagcacctgttgatccacggtccacgggaccatgtgtgcgcagaatgcggcaaggcatttgtagagtctagcaagcttaaacgccactttctggtgcatactggggagaaacctttcagatgcacatttgaaggatgcggaaagcggttctcactggacttcaatttaaggactcacgttcgcatacatacgggcgagaaacgtttcgtgtgcccttttcaggggtgtaatcggaggtttatacagagtaataacctgaaagcccatatcctgactcacgccaataccaataaaaacgaacaggagggaaaatag

SEQ ID NO: 14528 - DNA, 1149 bp, synthetic construct
  source 1..1149: mol_type = other DNA; note = Synthetic coding sequence
atgctgcgatggaccgtgcacctcgagggagggcctaggagggttaaccatgcagccgtggccgtgggacacagggtctactcatttggtggctattgctctggggaggattacgagactctacggcagatagacgtgcatatcttcaatgctgtcagcctgaggtggaccaaacttcccccagtcaagtccgccattagaggacaggctcccgtggtgccatacatgcggtacggacattcaacagtgctcatcgacgatactgtcctcttgtggggaggccggaacgataccgaaggagcctgtaatgtactttacgcatttgacgtgaacactcataagtggtttacaccacgcgtcagcgggaccgtacctggggctagagacggacacagcgcatgtgtgctcggcaaaatcatgtatatatttggcggttatgagcaacaggccgattgtttcagtaacgatatccacaagctggatacttctaccatgacatggaccctgatctgcaccaaagggtcccctgctcggtggcgggacttccattccgctacaatgctgggctctcacatgtacgtctttggaggacgcgccgacagatttgggccattccattctaacaatgagatctattgtaatcgtatccgcgttttcgacactcggaccgaagcttggttagactgtccaccaacccccgtgctacccgaaggacggaggtcacactcggcctttggatacaacggagagctgtatattttcggcggctacaatgcccggttaaatagacactttcatgatctctggaaatttaatccagtaagctttacctggaagaaaatcgagcccaaaggcaagggtccctgccccaggcgacggcaatgctgctgtattgttggcgacaagatcgttctgttcggcggcacaagtccaagccctgaagagggcttgggagacgaatttgacctgattgatcactccgaccttcacattttggacttctccccatccctaaagaccctgtgtaaactggcggtcatacagtataatcttgatcagagctgcctgcctcatgacattcggtgggaactgaatgctatgacgactaatagcaacattagcaggcccattgtcagcagccatggttag

SEQ ID NO: 14529 - DNA, 1827 bp, synthetic construct
  source 1..1827: mol_type = other DNA; note = Synthetic coding sequence
atggcagctgccgccgccgcagttggcccaggagcgggcggcgccgggtctgccgtgcccggaggcgccggcccctgcgccaccgtctcagtgtttcctggagctcggctgcttactatcggcgacgccaacggggaaatacagcgacatgctgagcagcaggccttgaggctggaggtgagggctggccccgattcagcgggcatagccttgtacagccatgaggatgtgtgcgtattcaaatgctccgtttctcgagagactgagtgctccagagtcgggaagcagagctttattattacccttggctgcaattcagtcctgattcagttcgccactcccaacgacttctgttcattttacaatattttaaaaacctgccgcgggcatacgctggaaaggagcgtcttctcagaaaggaccgaagagtctagtgctgtgcagtatttccaattttatgggtacctaagtcaacaacagaatatgatgcaggattacgtcaggaccggaacatatcagcgtgcaattcttcagaatcacaccgatttcaaagacaagatcgtgcttgatgtgggctgcggatctggcatcctcagcttcttcgcagcccaagccggcgctcgtaagatttacgccgtcgaagcgtccaccatggcccaacacgccgaggtgttggtcaaatcaaacaacctgactgacagaatcgtagtgataccgggtaaggtcgaagaagtctctctgcctgagcaggtcgatatcatcatttccgaacccatgggatacatgttgttcaacgagaggatgctcgagagctatttacacgcaaaaaagtacctaaaaccttccgggaatatgttccctaccatcggggatgtccatttagcgcccttcacggacgagcagctctatatggagcagttcactaaggccaatttctggtatcagccctcgttccacggagtcgacctttctgccctgcggggggcagccgtggacgagtatttccgccaacctgtcgttgacaccttcgatataagaattttaatggcaaaaagcgtgaaatacacggtcaactttcttgaggccaaggaaggcgacctacatcgtattgagattccattcaaattccatatgctacactccggactagtgcatggcttggccttttggtttgatgtggccttcatcggctctattatgaccgtgtggctatccaccgcgccaactgagcccttaacgcattggtatcaggtccgttgtctgttccagtcccctctgttcgcaaaagctggggacacattgagcggaacctgtctgctgatcgccaataaaaggcagtcttacgacattagtattgttgcacaagtggaccagacaggatctaagtcttccaatctcctagacctgaaaaacccctttttcaggtatactggaaccacgccttcgccccccccaggttcccactatacatctccctccgagaatatgtggaatactggcagcacctacaacctgagtagtggcatggctgtggcaggtatgccgacggcctatgacctgtcaagcgtaattgcttcgggcagcagcgtggggcataacaacctgatcccgctcgcgaataccgggattgtaaatcatacacatagcagaatgggctctattatgagcacagggatcgttcagggttctagcggagcacaaggctccgggggtggaagcacgagtgcccactatgccgtaaacagccagttcaccatgggcgggccagccatctcgatggcttccccaatgagcatacctacaaacactatgcattacggatcatag

SEQ ID NO: 14530 - DNA, 2913 bp, synthetic construct
  source 1..2913: mol_type = other DNA; note = Synthetic coding sequence
atgcaatctactgatctgggaaacaaagaatctggcaagatttggcacaggaaaccatccccggcaactcgggacggaattattgtgaacattattcataatacatcagattatcatccaaaggtgctacggttcttaaatgtggcctttgacgggacaggcgactgcttaatcgctggagaccatcagggaaacatttacgtgtttgatcttcatggcaaccgcttcaacctcgttcagcggactgcccaggcctgcaccgcactggccttcaatctaagacggaaatccgagtttcttgtggcgcttgccgactactctatcaaatgctttgatactgtgacaaaagagctggtgagctggatgaggggccatgagtcaagcgtcttctccatttccgtgcatgcttccggaaagtacgcaattactactagcagtgataccgcccaactgtgggatcttgacactttccagaggaagaggaaactcaacattcgccagtccgtgggcattcaaaaagtgttcttcctgccgttaagcaacaccatcttgtcttgctttaaagacaactccatttttgcatgggaatgtgacacactcttttgcaagtatcaactacccgccccacctgagtcttcaagcattctgtataaagtcttcgcagttactcgcgacggcagaattcttgcggctgggggtaaatctaatcacttacacttgtggtgtctggaggcccgccaactgttccgcatcatacagatgcccactaaggtgcgggccattcggcatcttgagtttctgcccgattcatttgatgcaggatccaatcaggtcctcggagtgctgtcacaagacgggatcatgcgctttattaacatgcagacttgtaagctgctgttcgagattggcagtctggacgaaggcattagttcttccgcgatcagcccacatggccgatacatcgcttccataatggaaaacgggtcgcttaacatttatagcgtgcaggccctgacccaggaaattaataaaccccccccaccactggtgaaggtgattgaggatctgcctaagaacaagctctcttcctcagacttgaagatgaaggtaaccagtggtcgagtccaacagccggctaaatccagagagtccaaaatgcaaactcggatcctgaagcaggatctgactggcgactttgagagtaagaaaaacgagcttccagatgggctcaataaaaagaggctacagatcttgttaaagggctacggcgagtatccgaccaaatatcgaatgttcatctggagaagcctactgcagctacccgagaaccacaccgcgttttctacgctcatagataaagggacacatgtggcctttttgaatttacagaaaaaatacccaatcaaaagcagaaaactactccgtgttctgcagcgcactctgtccgccctggcgcactggagtgttattttttcagacaccccttacctgccactgttagctttcccatttgtaaagttgtttcagaataatcagttgatatgcttcgaagtcattgctacactcatcatcaattggtgtcagcactggtttgagtactttccaaatccacccatcaatatactatctatgatcgaaaacgtgctggcttttcacgacaaggagctactgcagcactttatcgatcacgacatcaccagtcagctatatgcctggcctctgcttgagactgtgtttagtgaagtgctcactagggaggaatggcttaaattattcgacaacatatttagtaatcacccaagctttctgctgatgactgttgtcgcttataatatctgcagcaggacccccctgctgtcttgcaatcttaaagacgatttcgagttcttcttccaccaccgcaataatctggacattaacgtggtcatcagacaagtataccacctgatggaaaccactcccaccgatatacatccagatagcatgttgaacgtgtttgtcgcgttgacaaaagggcagtaccccgtcttcaatcagtaccctaaattcattgtcgactaccagacacaggaaagagaaaggatccggaatgacgagctcgattatctaagggaaagacagaccgtagaagatatgcaggccaaggtggaccagcaacgggttgaggacgaagcttggtaccagaaacaagagctgttgagaaaagccgaagagaccagaagggagatgttgcttcaagaggaggagaaaatgattcagcagcggcaaaggttggccgctgtcaagcgtgagctgaaagtgaaggaaatgcacctgcaagacgctgcccgccgcagattcttgaaacttcaacaggaccagcaggaaatggaactgcgccgcctcgacgacgagatcgggaggaagaatttgacagaaaatcaagaggccctcgccaaagaaatgagagccgacgcagatgcttaccggagaaaggtggacctggaagaacatatgttccataaacttatagaagcaggagaaacccagtcgcagaagacacagaagtggaaagaggctgaggggaaggagttccggcttcggtctgccaaaaaggcctcagctttgtctgatgctagccgcaagtggttcttgaagcaggagatcaatgctgctgtggagcatgccgagaacccctgtcataaggaggagcccagattccagaatgaacaggactcaagttgtctcccacgaacctctcaattgaacgactctagtgaaatggacccaagcactcagatctctctcaatcgtcgtgccgtggagtgggataccacaggacaaaacctgattaaaaaggtcaggaacctgcggcagcggctgactgcacgagcaagacaccgttgtcagacacctcatctgctggctgcttag

SEQ ID NO: 14531 - DNA, 648 bp, synthetic construct
  source 1..648: mol_type = other DNA; note = Synthetic coding sequence
atgtcctgcaccatcgagaaagccctggcggacgcaaaagccctggtcgagaggttaagggaccacgatgatgccgccgagtcgctgattgaacagacgacagcactaaacaagagggttgaggccatgaaacagtaccaggaagagattcaggagctgaacgaggtcgcgcggcataggccgcggtcaacgctcgtgatgggaattcagcaggaaaacagacagattcgtgaacttcaacaggagaacaaagagttgcgaactagcctagaagagcaccagtctgccttggagcttattatgtcaaaatatcgggaacagatgttccgactgctcatggccagcaagaaggatgacccaggtattatcatgaagctgaaagagcagcatagcaaggaactacaggcccatgtcgatcaaattaccgagatggctgccgtgatgcgcaaagcaattgagatcgacgagcagcagggctgcaaagagcaagagagaatttttcaactggagcaggagaataagggactgagggaaattctccagatcactcgcgagtctttcctcaacctccggaaggacgacgcaagcgaaagtacttcactttcagcacttgtcacaaactccgacctttccttacggaagagctag

SEQ ID NO: 14532 - DNA, 2676 bp, synthetic construct
  source 1..2676: mol_type = other DNA; note = Synthetic coding sequence
atggccgtggcacgagtggatgcggcgctaccccctggagagggaagtgtcgtaaattggagcggccaggggctgcagaaattaggcccaaatttgccttgcgaggcggatatccacactctgattcttgataaaaaccaaataattaaactggaaaacctcgaaaagtgcaaaaggcttatccaactatccgttgccaacaaccggcttgtcagaatgatgggagttgctaaactgaccttgctccgggtacttaacctccctcacaactcaattggctgtgttgagggtctcaaagagttggtgcacttggagtggctgaatctggccgggaacaacctcaaagccatggaacagatcaattcctgtacagcgctacaacacctggacctgagtgacaacaatatctcacagataggggatctgagcaaactagtcagcctgaaaaccctcttgctccatgggaatatcataacatctctgagaatggcacctgcctacctccccaggtctctggccattctgtctttggctgaaaacgaaattagggacttgaacgagatttccttcctcgcatcattaactgagctggagcagttgtccatcatgaataacccatgcgtgatggccactccatctattccaggctttgactatcggccatatattgtctcctggtgcctaaacctgcgcgtgcttgacggctatgttatctcccagaaggaatctctgaaggccgagtggttatatagccagggaaaagggagggcatacaggccaggccagcacattcaattggtgcaataccttgctaccgtgtgccccctcacttctactctgggcctgcagacagcagaggatgccaagctcgagaagatactgtcaaaacagcgtttccatcagagacagctaatgaaccagtctcagaacgaagagctaagtcctctggtgcccgtcgagacccgtgccagtttgattcccgagcacagtagcccagtgcaggactgtcagatttcacaggaaagtgagcccgtaatccaggtgaactcctgggtaggaataaatagtaacgatgatcagctgtttgcagtcaagaataatttccccgcctccgtacatacaaccaggtattcaaggaacgatctccatctcgaggatattcagacagacgaggataagctcaattgctcattgctgagctctgaatctacattcatgccagttgcaagcggcctaagcccgctgtcacccactgtggaacttcgactgcaggggataaacctcggtctggaggacgatggtgttgccgacgaatcagtgaaaggcctagaatcccaggtgctggataaggaagaggaacaacctctgtgggccgccaacgaaaacagtgttcaaatgatgcgaagcgaaattaacactgaagttaacgagaaggccggactgctgccctgccctgaaccaacaatcatcagtgctatcctgaaagatgacaatcatagcctgaccttttttcccgagagtactgaacaaaaacagtcagacattaaaaaaccagagaatacacagcccgaaaacaaggaaaccatcagccaggctaccagcgagaaattgccaatgatcctgacacaaaggagcgttgccctcggtcaggacaaagtcgccctccagaagctcaacgatgccgcaacaaagttgcaggcttgctggcgcggattctacgcccgtaactacaacccacaggcaaaggacgtgcgatatgagatcaggctccgtcggatgcaagagcatatcgtgtgtttaacggacgagattcggcggctcagaaaggagagggatgaagaacggattaagaagttcgtacaggaagaggcttttagatttctgtggaaccagaaatggggtttggctatcttacccagaccagtgagtaacttctgggctcaagctgtgttccctccccagcctcctaaagtgcggtctctgcaagtttggcagcagactgtggatcaacgcctctcctcctggcatacggatgtcccccccatctcgagcactctagtgccatcgaaacacccactgttcacgcagagtcaggagtcaagctgcgatcagaacgctgattggtttatcgccagtgacgtggccccacaagaaaaaagcctgccagaatttcccgattctggatttcacagcagccttacagagcaggtgcattcactgcaacactcattggatttcgagaaaagttccacggagggttccgagagctcaattatgggcaattccatagatacagtgcgctatggcaaagagagcgacctcggcgacgtctctgaggagcacggagagtggaataaagaatcctcaaataatgaacaggataatagcttgcttgagcagtacttgacatcggttcagcagctggaagatgcagacgagcgtaccaatttcgacacagagacacgggattccaaactgcatatagcctgtttccccgtgcagttggatactctgtccgacggggcgtctgtagatgagtcacatgggatatctccccccctgcaaggggagatctcccagacacaagaaaactctaagctcaatgccgaagtccagggacagcagcctgagtgtgattccactttccagttattacacgtgggtgtcactgtgtag

SEQ ID NO: 14533 - DNA, 828 bp, synthetic construct
  source 1..828: mol_type = other DNA; note = Synthetic coding sequence
atggctgaaccagcaagtgttgccgcggaatctctagccggctcccgcgctcgggcggctcgcaccgtgctgggacaggtcgtcctcccaggcgaggagttactccttccagagcaggaagacgccgaaggcccaggcggggccgtagaaaggcctctttcactcaacgcacgagcctgtagcagagtccgggtcgtatgtggacctggtctaagacggtgcggcgatcggttgttggtaacaaagtgcggcagactgaggcataaagagccagggtctggcagcggcggcggggtctactgggtagactcccagcaaaagcgctacgtgccagttaaaggcgaccacgtgatcggcatcgttacagccaaatctggtgatatatttaaggtcgacgtgggcggatctgaacctgcttccttatcttatttatctttcgagggggccaccaaacgcaaccgaccgaatgttcaggtcggcgatttgatctatggccagtttgtggtggctaataaggacatggagccagaaatggtttgcatcgactcttgcgggcgggcaaatgggatgggcgtcatcggtcaggacggcttactctttaaagtgacattaggactgattagaaaactgcttgctccagactgcgagataatccaggaggtgggcaagttataccctcttgagattgtttttggaatgaatggtcggatctgggtaaaagccaaaacaatccagcaaaccttgattttggcaaacattctggaagcctgcgagcatatgacctcagaccagagaaaacaaatcttctcccgtctcgcggaatcctag

SEQ ID NO: 14534 - DNA, 1620 bp, synthetic construct
  source 1..1620: mol_type = other DNA; note = Synthetic coding sequence
atggccacatcagctcctctcagatcactcgaggaagaagtcacttgtagtatttgtcttgactacttaagggaccctgtcacaatagactgtggtcatgtcttctgtaggagctgtactaccgacgtaaggcctattagtggatccagaccggtgtgtcctctctgcaagaagccctttaaaaaggaaaatattagacccgtgtggcagctggccagcctcgttgagaacatcgagcggctgaaagtagataaaggcagacagcctggagaagtcacacgtgaacagcaggacgctaagttatgcgagcgccaccgggaaaagctccactattactgcgaagatgatggcaaactgttatgtgtgatgtgcagggagtcgagggagcaccgaccacataccgccgtcctgatggagaaggccgcccagccgcatagggagaagatccttaatcacctgagcacgttgcgccgggatcgtgacaaaatccaaggttttcaggctaagggagaagcggacatactggccgctctgaaaaagctgcaggatcagcgtcagtatatagtggctgaattcgagcaggggcatcagtttcttagagaacgcgaagagcatctgctcgaacaactggccaaattagagcaggaactcactgaaggccgggagaaattcaagtctcgcggcgttggagagttggccaggctggctctggttatttctgagctcgaggggaaggcacagcagcccgccgcagaactgatgcaggatactagagactttctgaacagatacccaagaaagaagttttgggtagggaaacccattgcccgcgtggtaaaaaagaagaccggcgaatttagcgataaactgttgagtctccaaagaggtctccgcgagttccaagggaagctgctgcgtgacctcgaatacaaaactgtctctgtgacattagacccgcaaagtgcctcaggatatttacagcttagtgaggactggaagtgcgtgacctataccagtctatacaaaagcgcctatctacacccacagcagtttgactgtgagccaggagtgctggggagcaagggcttcacctggggtaaggtgtactgggaggttgaggtagagagggaaggatggagcgaggacgaagaagaaggggacgaggaagaagagggagaggaagaggaggaagaggaagaagcgggttatggggatggctatgacgactgggagacagatgaagatgaagaatctttaggggacgaggaggaagaagaggaagaagaggaggaagaagtgctggagtcttgtatggtgggggtggctagggatagcgtgaagcgcaagggtgacctgagtctacgccccgaggatggtgtgtgggcgttgaggctctcgtctagtggcatttgggccaatactagccccgaggccgagctctttccagctctgaggcccagaagggtaggcatcgcactggattacgagggaggcactgttacatttaccaacgctgaatcccaagagctcatatacactttcactgccactttcacccggcgcctggtgcctttcctgtggcttaaatggcctggcactaggctcctgcttcggccttag

SEQ ID NO: 14535 - DNA, 1233 bp, synthetic construct
  source 1..1233: mol_type = other DNA; note = Synthetic coding sequence
atgttcaataatgaattaatggcggatgttcacttcgtcgttggtccaccaggcgcaacaaggactgtgcccgcccataagtacgtcctggcagtagggtccagcgtgttctacgccatgttctacggcgaccttgccgaggttaagtccgaaatacatatacccgatgtggagcccgctgcgttcctgatccttctgaaatatatgtattctgatgagatcgatctggaggcagataccgttctggctaccttatatgccgctaagaaatacatcgtccctgcattagccaaggcctgtgtgaatttccttgaaactagtctggaggccaagaatgcttgcgtcctgctgtctcagtccaggctttttgaggagcccgagttaacccagagatgctgggaggttatcgacgcgcaagcagaaatggcgctgagaagtgaggggttctgtgaaattgatcgacagacactagagatcatcgtcaccagggaggcgctgaacacgaaagaagccgtggtttttgaggcagtgctcaattgggctgaggcagagtgcaagaggcagggtctgccgatcactcctagaaataagcgccatgttctcggccgcgctctgtatcttgtccgaataccaactatgacattagaagagtttgccaatggtgccgcacagtctgacatactgacgctggaagagactcactccatctttctgtggtatacagccacaaacaagccacgccttgactttcctctcactaaaagaaagggtttggcaccgcaacgctgtcaccggttccagtcctctgcctataggtctaaccagtggagatacaggggccggtgtgatagcattcagttcgccgttgaccgacgtgttttcattgctggcttggggctgtatggatcctcaagtggaaaggctgagtacagtgtaaagatcgagttaaaacgcctgggagtggttctggcccagaatctcaccaagtttatgtctgacggcagctccaacacctttcctgtttggtttgagcatcctgtccaagtggagcaggatacattttacaccgcttctgccgtgctggatggcagtgagctctcttacttcggtcaggaaggcatgaccgaggtccaatgtggaaaggtggcctttcagttccaatgctcttccgactccaccaatgggaccggtgtgcagggcggccagatccccgaattgatcttttacgcatag

SEQ ID NO: 14536 - DNA, 966 bp, synthetic construct
  source 1..966: mol_type = other DNA; note = Synthetic coding sequence
atgcgcgccctggcagccctatccgcacctccaaatgagcgcttgttaccccgtgatcctgctgccactagggaccccgatgccgcaaggcccgcacgccgaagcgcagtggaacgtctcgccgctgaccgagcaaagtatgttcggggcaggccaggcaccgggcgtggagtggcttctgaaggctccggtcccggcgccattaaatgccccggaaacgaccctggtcccccagctagggctcctgcccccgttgcaagacgggccatcgccaggaaacccctgaggcccgactccctgatcatctacagacaaaagtgcgaatttgtgcgcgggtcaggggccgacggcccacgcgcaagtctcgttaagaagctatttcagggtccaggcaaagacaaggcccccgtcccccgtactggtgacgagggaaaagctggaaatcccgaaaccgtgcctactactccaggacccgccgcagatcccgccatcccggagaccccggcaccagcagcccggtctgcagccccgtctagtgttcctgctgccccgcctggtcccgaacctcgagtcgtccggagacggggcctgcaaagaagccaatctgatctctcatccagatactctgccgcactcgcagaaagtgatactttctttcagtactgtgggctggacccagaagttgtcgaagctctgggaagggaaaacttcacggccgggagcgattgcgtcaccttgaaagtgagatccgtgtccgtggctaccagtggctcgggcttcagtcgccattcaggcggcgatgacgaaggcctccaggaggaggagctcatcgagcaggttccatcaaccacgtccgtcatcgaacgcaatgctagaatcataaagtggctttatacctgtaagaaggcaaaggagaccccaagtcaggagcagtccaggacccgaggtagcaaacctagtagatag

SEQ ID NO: 14537 - DNA, 945 bp, synthetic construct
  source 1..945: mol_type = other DNA; note = Synthetic coding sequence
atgtcagagaatgccgccccggggctaatctctgaattgaagctcgctgtcccgtggggccatattgcggccaaagcgtggggctcactgcagggcccccccgttctttgtctgcatggatggctggataatgccagctccttcgaccggctgatccccctgctaccccaggatttttactatgtggccatggatttcgggggccacggcctatcatcacattacagccccggagttccatattacctgcagaccttcgtatccgagattaggcgtgtggtggctgccctaaagtggaatagattttctatcttggggcactccttcggaggcgtggttggggggatgttcttctgtacatttcctgaaatggtcgataagctaattcttttggatacaccactgtttctcctagagagtgacgagatggagaaccttctgacatacaaaagacgagccattgaacacgtgctgcaggtcgaggcgtcacaggaaccgagtcacgtattctcgttgaagcagctgttgcagcgactgcttaaaagcaattcacatctatctgaagagtgtggcgagcttctactgcagagaggcactaccaaagttgccacaggccttgtcctcaatagggatcagaggctcgcctgggcggaaaattccatcgattttatctcacgtgagctgtgcgcccattctattaggaagttgcaagcacatgtgctgctcatcaaggccgtgcacgggtactttgactctcggcaaaactatagcgagaaggagtcactgagttttatgattgacaccatgaaatcaactctgaaagagcaatttcagtttgtggaggtgccaggtaaccattgtgtgcatatgtctgaaccacagcacgtcgcctctatcattagcagctttctccagtgcacccatatgcttccagcgcagctatag

SEQ ID NO: 14538 - DNA, 3945 bp, synthetic construct
  source 1..3945: mol_type = other DNA; note = Synthetic coding sequence
atggcctctaagggcgctgggatgtcctttagccgaaagagctacagactgaccagcgacgcagagaagagccgggtgacaggaattgtgcaagagaagttgctcaacgactatttgaacaggatctttagtagctccgagcacgccccccccgctgctacatcacggaaaccactaaattttcagaatctaccagagcaccttgaccagttacttcaggtagataatgaggaggaggagagccagggtcaagttgagggccggttgggcccttcaactgttgtgttagaccacacgggtggttttgaaggcctgttgttggtggacgatgacttgctgggtgtgatcggacactccaatttcgggacaattcgctccacaacatgtgtctacaagggtaaatggctgtacgaggttctgatcagctcacagggactaatgcagatcggctggtgtaccattagttgccggtttaatcaggaagaaggagtcggggacactcacaactcatatgcctatgacggtaatagagtgcgcaagtggaatgtgaccacaactaattacgggaaagcttgggccgcgggtgatatcgtgtcatgtttaatagatctcgatgatggcaccctttccttttgtctgaacggggtgtctctgggtacagcattcgagaatctctctagagggctgggaatggcgtacttcccagcgattagcctgagttttaaagagagcgtcgcattcaattttggatctcgtcctttgcgctatcctgttgccggctaccgcccactgcaagaccccccctcagccgacctcgttagggcgcagaggctgcttgggtgtttccgggccgtgctcagcgtcgagcttgatcctgtcgagggacggctgttggataaggagagcagcaagtggaggctgcgaggacagcccacagtcttactgaccttggcccatatctttcatcacttcgctccgttgcttcgcaaggtgtaccttgtcgaagcagtcctgatgtcgttcctcctgggcatagtggagaagggtacaccaacacaggcacagtccgtcgtgcatcaggtcttagatttgctttggctatttatggaggactacgaggtccaagactgtctgaaacagctcatgatgtctttgctgcgtctctaccgattctcacctatagttcctgatcttggcctgcagattcactatttgcggctgactatagcgatcctccgccatgagaagagccgtaagttccttctgtcaaatgtgctttttgatgtcctgcgcagcgtggtatttttttatataaagtctccattaagagtggaggaagccggacttcaggagcttatccctacaacatggtggccacattgcagtagccgggagggcaaggagagcaccgaaatgaaagaagagactgctgaagaacgactgaggcgtcgagcctatgagcgcggctgccagcgcctgagaaaaagaatcgaagtcgtagaggaactccaggttcagatactgaaactcctccttgacaataaggacgacaacggcggcgaggctagtaggtacatctttctcaccaaattcagaaagtttctgcaggagaacgcctccggaagaggcaatatgcccatgctgtgtcccccagagtatatggtttgcttcttacaccggcttatctcagccttgcgatattactgggatgaatacaaagcctctaacccccacgccagtttctctgaggaagcgtatataccaccacaggtgttctacaacggaaaggtcgattactttgatttacagcgcctcggcggcctcctgtctcacctgagaaagactctcaaggatgacctggccagcaaagccaatattgtcattgatcccctggaactacagtcaacggccatggatgatttagacgaagacgaagaacccgcacccgctatggcccaacgtcccatgcaagcccttgccgtcggaggtccgctgcccctgcccaggcctgggtggctgagttccccaactcttgggcgcgcaaaccgatttctgtctacagcggcagttagccttatgactccacgcaggcccttgagtacctcagaaaaggtcaaagtcagaacactatctgtcgaacagagaacgagggaagatattgaagggtctcattggaacgagggcctcttgctgggcagacccccggaagagcccgagcagcctttgactgagaacagcctcctagaagtgttggacggggcagtgatgatgtataatctgagcgtgcaccagcagctgggcaagatggttggggtttcagatgacgtaaatgaatatgccatggccctgagggatacggaagataagctgagacggtgcccaaagcggcgaaaggatatcctggctgagctcacaaagtctcagaaagtcttttccgaaaaactggatcatctgtcccggaggttggcctgggtgcacgctactgtgtactctcaggaaaagatgttggatatttactggctgcttcgcgtctgccttcgaaccattgaacacggggatagaaccggatccctgttcgcctttatgcctgaattctatctcagcgtggctattaactcttactctgccctgaagaattatttcggtccagtgcattctatggaggagctgcctggctacgaggaaacactgacccggctcgccgcgattctggcaaagcacttcgccgacgccaggatcgtcggcacagacataagggactcgttgatgcaggccttagcaagttacgtgtgttaccctcacagcttgagagctgttgagcgaatccccgaggagcagcgtatcgcaatggtgagaaatttgctagccccctacgaacagcgtccctgggcgcaaactaactggattctcgtaaggctgtggagaggatgtggtttcggctaccgatacaccagactgcctcaccttctgaagactaaactggaagacgcaaatctgcctagcctccagaaaccgtgcccctccaccctgttgcaacagcacatggccgatctgctccaacagggacctgatgttgctcctagcttcttgaactcggtgctgaaccagctcaactgggccttcagtgagttcattggtatgatacaagagattcaacaggctgccgagcgactcgagcgcaatttcgtcgattcccggcagttgaaggtgtgtgccacttgcttcgatctttcagtttctttgttgcgcgtgctggagatgacaattaccctggtgcccgaaatctttctggattggacccggcccacttccgagatgttgctgcggaggctcgcgcagctacttaaccaggtactgaatcgagtgacagctgaaaggaacctattcgacagagtcgtcactctccgccttccgggtctcgagtcagtggaccattatcctattctggttgccgttactggtatactggtccagttgctggtgcgtggacccgctagcgagcgcgaacaggcaacaagcgtcttattggcggacccttgctttcaattgaggtcgatttgttacctgcttggacaaccagagccccctgcgcctggaaccgccctcccggcccccgatcgtaagcgattcagtttgcagagttacgccgactatatcagtgcggacgagctggcacaggtggaacaaatgctagcgcatcttacatccgcctccgcacaggcagcagccgcctctctgcccacctcagaggaggatctctgccctatatgctacgcacaccccatttctgctgttttccagccttgtggccataaatcatgtaaggcttgtatcaaccaacatctgatgaataacaaagattgctttttctgtaagacgacaattgtctccgtggaggactgggaaaagggggccaatacttcaacaacctcctcagctgcttag

SEQ ID NO: 14539 - DNA, 2646 bp, synthetic construct
  source 1..2646: mol_type = other DNA; note = Synthetic coding sequence
atggcaggcgctgccccacgtgtgcggtacttagctggattctgttgtccactgggtggccttgcagcggggaaaccaagggtgctgtgccacgaggcagaggtctttttatcgaccggatcagagttggtgtatgtctacgatcaggagggcggtctcctgacagccgcatttcgcttccctgaccaggtgtggcatctggagttgctagcacctagacgactgctctatgccctgtgtgccaggagagggctctattgtctcagtctggatcatcctggtcggagcagaagtacctcccaggacgatcgcgattctgaggacggagaccagccgagcccagtgatacccgtggaccccgatgcttgtattctgcccgacgctgcattgtgtgccttcacattattagacagcgttctagtgaccctcgtgcaaggccccgccagatggaaaatgcaactattcgagcaaccatgtccgggcgaggaccctcggcctgggggccagatcggcgaagttgaactcagctcctatacacccccagccggcgtacctggcaagccagccgctcctcactttttacctgtgctgtgtagtgtctccccgagtggctctcgggtgccgcacgacctgctgggggggagtggcggcttcactctagaagatgccctgttcgggcttctcttcggcgctgacgcaactctcttgcagtccccagttgtgctgtgcgggcttccagatggccaactgtgttgcgtgattctcaaggcactggtaacgagtaggtctgctcccggagatcctaacgccttagttaagatcctacatcatttggaggagccagtaatcttcatcggcgcactcaagactgaacctcaggctgctgaagccgctgagaactttttgccagatgaggacgttcattgtgattgtctggtggccttcggacatcatggcaggatgctggctatcaaggcctcctgggacgagtcgggtaagctcgtgcccgaactgcgggaatactgtctgcccggaccagtgctatgtgctgcctgtggtggagggggacgcgtctaccatagtacccccagtgacctgtgtgtggtagacctgagcaggggttcaaccccgcttgggcccgagcagcccgaggagggcccgggggggctgcccccaatgctgtgccctgccagccttaatatatgtagcgtagtgagccttagcgcgagccctaggacccatgaggggggaacaaaattgttggctttgagtgcaaaaggcaggctgatgacctgcagtcttgatcttgacagcgaaatgcccggacctgctagaatgaccaccgagagcgctggccaaaaaatcaaggagctcctgtccggcattggaaatatcagcgagcgagtgtcctttttgaagaaagctgtggatcagcggaataaagctctcacgagcttgaacgaggcgatgaacgtgtcctgtgcgcttctatcaagtggtactggacctaggccaatttcgtgcactacaagcactacgtggtcccggcttcaaacccaagatgtgctgatggccacatgcgtgttggagaattcctcaagctttagtctcgaccaaggctggaccttgtgtattcaggtattgacatcgtcatgtgcccttgatttggatagtgcgtgctctgcaatcacctacacaatccccgtggatcagctggggcccggagcccggagagaagtaaccttacccctcggccccggggaaaacggaggcctagatctgccagttaccgtatcctgcactctgttttatagtctgagggaggtcgtaggtggtgctctggctccttccgattccgaagacccattcctggacgaatgcccctcagatgttctcccagaacaggaaggcgtctgcctacccttatctcgtcacaccgtggatatgctgcagtgcctccgctttcctggcctggccccacctcatacaagagcaccctctccccttggtccaactcgggatcctgtcgccaccttcttggaaacgtgtagggagccgggaagccaacctgcaggccccgccagcttaagagccgaataccttcccccctcagtcgcctccataaaagtctctgccgagctcctgagggccgcactaaaagacggacactctggcgtaccactctgttgcgcaacactccaatggctattggccgagaatgccgccgtcgacgttgtccgcgctagggcactgagctctattcagggcgtggcaccagatggggctaacgtccaccttatagtgcgcgaggtggctatgaccgacttatgccctgccggtccaattcaggctgtggagatccaggtggaaagctcgtcgttagctgatatctgccgcgcccaccatgccgtggtgggcagaatgcagacaatggtgactgagcaggccacccagggtagttctgccccggatctacgggtgcagtacttaagacagattcacgccaatcatgagaccctgttacgcgaagttcagacgctgcgcgacaggctgtgtacggaggatgaagcttccagctgcgccaccgctcaacggctactgcaggtgtataggcaactccgacacccatctctcatcctgctgtag

SEQ ID NO: 14540 - DNA, 471 bp, synthetic construct
  source 1..471: mol_type = other DNA; note = Synthetic coding sequence
atgggtgataagaaatcccccacacgccctaaaaggcaacctaagccatcaagcgatgaaggttactgggactgctctgtctgcaccttcagaaattccgcagaggctttcaaatgtatgatgtgtgacgtgcgcaagggtacctccactcgtaaggagaaaaaggataaggtggagaaagagaagtccgaaaaagaaaccacctccaagaagaacagtcacaagaaaacccgaccccgactgaaaaatgtagatagatcttcagcacagcacctggaagtgacagtcggcgacctgactgtgattatcaccgattttaaagaaaagaccaagtcacccccagcttccagtgcagcttccgcggatcagcacagccagagtggtagctccagcgacaacaccgagcgagggatgtcccgatcttcatctccccgaggcgaggcctctagcctgaacggtgaatcccactag

SEQ ID NO: 14541 - DNA, 777 bp, synthetic construct
  source 1..777: mol_type = other DNA; note = Synthetic coding sequence
atgtgcgcacttgagatggccgtcctggaaatccagaccaacggtgacaccagagtgacagaagaggccatagcccgggcgcggcactctttatcagatccaaacatgagagaattcattttgtgttgtctcgcccgcgatcctgcaagacgccctagcgcccactcattgctgttccacagagtcctcttcgaggtgcatagcctgaagctgttagctgctcactgtttcatccagcaccagtatctcatgcccgagaatgtggtggaagagaagacaaaggcaatggacctacatgcagtgcttgcagagctccccagacctcgtcggcctcctctgcagtggagatactccgaagtatcatttatggagctggacaaatttctggaggatgttagaaacggtatttatccgctaatgaatttcgctgctacaagaccactgggattgccaagagtcctagctcctcccccagaagaggtccagaaagctaagacaccaacacctgagcccttcgactcggagactcgcaaggttatccagatgcagtgcaacctggagaggtccgaagacaaggcgagatggcatctgacactgctcttggtgctggaagaccgcctgcacaggcaactcacatacgacctactccccactgactctgcccaggacttggcaagcgagctggtccactacgggtttctgcacgaagatgatagaatgaagctcgcagcgttcttggaatccacatttctcaaatatcgaggaactcaggcgtag

SEQ ID NO: 14542 - DNA, 564 bp, synthetic construct
  source 1..564: mol_type = other DNA; note = Synthetic coding sequence
atgctgggccgatacagggaatacagcaatggccaggctggggctatcgagcacctcaaggaaagcctggaacagagcattgaccagctgaggtcacaacgccttttaaggaattcaggtggtcgttcaatttctgtgacttccttatctgcttccgacctggacgggggaaccggctccgaactgcaccatttcccaccaacaagccccttgaaggattacggagatcctcagggaattaaacggatgagaagtcggacaggagttagattcgtgcaggaaactgatgatatgactcagctgcacgggttccaccagagcctccgcgacctgtcctccgaacagattcggctcggagatgatttcaacagagaactctctagacgtagtaggagcgatgccgagacgaagcgcgccctggaagagctgacagaaaagcttaatgaagcccagaagcaagaggtgttcttcgtcaaaagtcttggcaaagtgaagattcagtgcctgagttctgccgaggtggacaatgtctttcctataaatgtgtggcagtgcggcatctag

SEQ ID NO: 14543 - DNA, 927 bp, synthetic construct
  source 1..927: mol_type = other DNA; note = Synthetic coding sequence
atgatggacgtgagtggggtggggttcccctctaaagtcccatggaagaagatgagcgcagaagagctggagaatcagtactgcccgagccgctgggttgtccgattgggagccgaggaggccctgaggacatacagccagattggcatagaagcgacgacgcgcgctagggctacaagaaaaagcctactccacgtgccctacggtgatggcgagggcgaaaaggtggacatatactttcctgatgagtctagtgaggccctccctttttttctgtttttccatggcggctattggcaatctggtagtaaggacgaatcagcttttatggtgcatcctttgactgcccagggagttgcagtcgtgattgtggcctatggcattgcacccaaaggcactcttgatcacatggtggatcaggtgaccaggtcagttgccttcgtacaaaagcgttatccttctaacaaagggatatatctatgtggacactcagccggcgcgcatctcgcagccatgatgcttttagctgattggaccaagcacggggttacccccaacctgcgggggttctttcttgttagtggcgtgttcgacttggagccaatcgtttatacatctcagaacgtagcactccagttaactctggaggacgcccagcgcaacagcccacagctcaaggtggctcaggcccagcctgtggatccaacgtgtagagtgctcgtggtcgtgggtcagttcgacagtcctgaatttcatcggcagagctgggagttctaccaggtgcttccagtccagactctttgtcagggggagtggaaggcttcttttgaagagttgcatgacgtggaccactttgaaatcgtagagaatttgactcagaaggataacgtcctgacccagataattttgaaaacaatcttccaatag

SEQ ID NO: 14544 - DNA, 1461 bp, synthetic construct
  source 1..1461: mol_type = other DNA; note = Synthetic coding sequence
atgagtgggagtacccctttccagatgcggttggttcacctcgacttgaagggagctccccccaaagtgtcctatctgtccgagattttcccactgttcagagcactgggtgctaatggattgctgatcgagtacgaagacatgttcccttatgaaggtccgctgagactgctgcgggccaaatatgcttactccccatccgaaattaaggagattcttcacctggctggcctcaacgagcttgaagtaatacccctcgtgcagacattcgggcatatggagtttgtcctgaaacacactgcctttgcacatctgcgggaggtgggctcttttccatgcacactgaatccccatgaagccgaatcattggccctggtgggcgctatgatcgatcaggtcctagaactccaccctggcgcccagagattgcatataggctgtgatgaggtgtattacttgggtgaaggcgaggccagccgtcggtggctacaacaggagcagaatagcacagggaaattgtgtctttctcacatgcgggctgtagcgagcggcgtgaaagcccgacgcccgtctgtaacgcccttagtatgggacgacatgctgcgggaccttcccgaagatcagctggcagctagcggcgtgccccagttggtcgaacccgtcctgtgggactataccgcagatctcgatgtgcatgggaaagtgcttctgatgcaaaagtataggcggtgcggcttcccgcaattgtgggccgcttctgcctttaagggcgcgacgggaccatcgcaggctgtgccacctgttgaacatcacttaagaaaccacgtacagtggctgcaagtagccggctctgggcctaccgatagtcttcaaggtatcatcctgacaggatggcaacgctacgaccattactcagtgctgtgtgaactcctccctgcgggagtcccctcactggcggcttgcctgcaactgctgcttaggggcgggttcgatgaagacgtcaaagccaaagtcgagaatctccttgggatctcctcattagaaaagacagacccagtgcgggagggcgcaggatcttttcctggttcaaatatccttgcactagtgacacaagttagcctgcacctgcgaagctctgttgacgcccttctggaaggaaacagatacgttaccggatggttcagcccatatcacaggcagaggaagctgatccatcccgtaatggtgcagcacatccaaccagcggccctgtctctgcttgctcaatggagtactctggtccaggagctcgaagcggccctccaactggctttttatcctgatgccgtcgaagagtggctggaagaaaacgtgcacccttctctgcagaggttacaggcgctgctccaggacctgtctgaggtctctgccccccctctgccaccaactagccctgggagagacgtcgctcaagacccatag

SEQ ID NO: 14545 - DNA, 240 bp, synthetic construct
  source 1..240: mol_type = other DNA; note = Synthetic coding sequence
atgtcaagccagcagcagcagcgacagcagcaacaatgtcctccacagagggcacagcagcagcaggtcaagcagccatgccagccaccacctgtgaagtgccaggaaacatgtgcccctaagacaaaagacccttgcgcccctcaagtgaaaaaacagtgtccccccaaagggaccatcattcccgctcagcagaaatgcccatcggctcaacaggcgtctaaaagcaaacagaaatag

SEQ ID NO: 14546 - DNA, 822 bp, synthetic construct
  source 1..822: mol_type = other DNA; note = Synthetic coding sequence
atgggtcagaaggtaacgggaggaattaaaacagtggacatgagagatcccacctatcgtcctcttaagcaagaattgcagggcctcgattattgcaagcccacacgcttggatttactgcttgatatgcctcccgtgtcctacgacgtgcagttgttgcattcctggaataataacgatagatccctgaatgtattcgtgaaagaggacgacaaactgatattccatagacatccagtggctcagagtactgacgcgattcgcggcaaagttggatatacacggggcctgcacgtgtggcaaattacatgggcaatgagacagcgggggactcacgctgtggtcggggttgccactgccgacgccccgctacactcagtcggttatacaactctagtcggcaataaccacgaaagctgggggtgggacctcggacgtaatagattgtaccatgatggaaaaaaccagccaagcaagacctatccggcattcctggaaccagatgagacttttatcgtaccagatagcttcctggttgccctcgacatggatgacgggacactgtccttcattgtcgacggtcagtacatgggagtcgccttccgcgggcttaaaggtaaaaagctgtatccggtggtgtctgcggtgtgggggcattgtgaaattaggatgcgatatctgaacggattagaccccgaaccgcttccgctcatggacctatgtcgtagatctgtcagactggctcttggacgggaacggttgggcgagatacacaccttgccactccctgcttctcttaaggcgtatctcctctaccagtag

SEQ ID NO: 14547 - DNA, 3315 bp, synthetic construct
  source 1..3315: mol_type = other DNA; note = Synthetic coding sequence
atgggcaacgccgcagggtctgctgaacagcccgccgggccggcagcaccccctcccaaacagcccgccccccccaagcagcctatgccagctgcgggggagctggaggaaaggttcaatcgagctctcaactgtatgaatctcccccctgataaagtgcagttgcttagccagtatgacaatgaaaaaaagtgggaattgatttgtgatcaggaacggttccaagtgaagaaccctcctgccgcctacatccagaagctgaagtcctacgtagacaccggaggggtgtcacgaaaggtggctgccgactggatgtcaaatttggggtttaaaaggagggtccaagaatcaacccaggtcctcagagaactagagactagtctcagaaccaaccacattgggtgggtgcaggaattcttaaatgaggagaacagaggactggacgtgttgctcgagtatcttgcattcgcccagtgtagcgtgacgtatgacatggagtctactgataacggtgcttccaatagtgagaagaataaacccctcgaacaaagcgtagaagaccttagcaaaggaccaccctcttccgtgccaaagagccgacatctcacaatcaaactcacccctgcgcacagcaggaaggccctgcggaactctaggatcgtttctcagaaggacgacgttcatgtctgtattatgtgcctcagggctataatgaactaccagagtggcttttctctggtgatgaatcaccccgcctgtgtcaatgagattgctctgagcctcaataataagaaccctcggacgaaggccctagtgctagagctcttagccgccgtctgcctcgttcgaggaggccatgacatcatactggctgcgtttgacaactttaaggaagtgtgcggcgagcagcaccgatttgagaagctgatggagtactttcggaatgaagattcgaacattgactttatggttgcatgtatgcagttcataaatattgtggtccactctgtggaaaacatgaactttcgcgtttttctccaatatgaattcacacacctgggcctggatttatatcttgaacgcctgaggttaacagaatccgacaaactccaggtgcagatacaagcttacctcgacaacatcttcgatgtaggcgccctgcttgaagatacagagactaagaacgccgtgctcgagcacatggaggaattacaggaacaggttgcgttgctcacggagcggctgcgtgatgccgagaacgagtccatggccaagatcgccgaactggaaaagcagttgtcacaggccagaaaggaactggagaccttgagagaacggtttagcgagagcacagctatgggccccagccgccgcccacctgagccagagaaagccccacccgctgctcctactaggccaagtgcgcttgagctgaaagtagaggagctggaggaaaaaggcctcattcggattctgcgtggccccggcgatgccgtgtccattgaaattctccctgtggcagtagcaaccccctctggtggcgacgctccaacacctggcgtgccgactggtagcccttcccccgatctggcaccggctgcagagcccgcgcccggcgctgccccccccccaccgccacccctgcctggacttccctcccctcaagaggctccaccctctgccccaccccaagccccaccactgcctgggtcacccgagccaccgccagcaccccccctgcccggcgacctccctcctccgccgcccccccccccacctccccctggcacagacggtccagtgcctccccctcccccacccccccccccaccacccggagggccccccgacgcactcggtcgcagagattccgaactgggaccaggtgttaaggcaaagaagcctattcaaacaaagtttagaatgcccctcctcaattgggtcgcactcaaaccaagccagattactggtacagtgtttaccgagctcaatgacgagaaggtcctacaagagttggacatgtccgattttgaagaacagttcaagacaaagtctcagggtccatctctggacctgtctgcactcaaaagtaaggccgctcagaaagctcccagcaaggcgacactgatcgaggcaaatagggccaagaatctggctataacactgaggaagggtaacttaggagctgaacgtatctgtcaggctatcgaagcttatgaccttcaggctttagggctcgatttcctggagctcctgatgagattcttgcctaccgagtatgaaaggagcctgatcacgcgcttcgagcgcgaacagaggccgatggaggagttgtctgaagaagaccgctttatgctgtgctttagccgcataccacgactgccagagaggatgactaccttgacctttttaggtaacttccccgacactgcacagctgttgatgccccagttaaatgccattatcgccgcttctatgtccatcaaatccagtgacaagcttagacaaattttagaaatcgtcttggcttttggaaattatatgaactcctccaagagaggagcagcatatggctttaggctgcaaagcttggatgccctacttgagatgaaatcaacagaccgtaagcagacactgctgcactatctggtgaaggttatcgccgagaagtaccctcagcttacaggtttccactccgatttacattttctcgataaagcaggctcagttagtctggattctgtgctagcagacgtccgcagtctgcagcgcggactggagctcacacagcgggagttcgtgaggcaagatgattgtatggtgctgaaagaattcttacgcgctaacagcccgacaatggataaactgctggcagactcaaaaactgcacaggaggcttttgaatctgtggtggaatattttggagagaatcccaagaccacaagcccaggcttgttcttttcattgttcagcagatttattaaagcctacaagaaggcagaacaggaagtggaacagtggaagaaggaggcagccgcacaggaggccggcgccgatactcctggtaagggggaacccccagcccctaaatctcccccaaaagccaggaggccccagatggatttgatttccgagctcaagagaagacagcaaaaagaaccattgatctacgagtcagatcgggacggggcaattgaagatattataacagaccttcggaaccaaccgtatattagggctgataccgggcggaggagtgcccgacggcgtccacccgggcctccactccaggtgaccagcgacctttccctctag

SEQ ID NO: 14548 - DNA, 603 bp, synthetic construct
  source 1..603: mol_type = other DNA; note = Synthetic coding sequence
atggaggaaaagccttcgaaggtatcccttaagtcatccgataggcagggcagtgatgaagagagcgtgcactctgacactcgcgacctatggaccacgactaccctgagccaggcccaactcaatatgcctttatcagaggtgtgcgaaggatttgacgaagaggggcgcaatatctccaagactcggggctggcacagccccgggcgcggatcactggacgagggatataaagcaagtcacaagcctgaagagctcgatgagcacgccctggttgaactggagctgcatcgcgggtccagcatggagatcaacctgggggagaaggacaccgcctctcaaatagaggcagagaagtcgagttctatgagcagcttgaacattgccaaacacatgcctcacagagcttactgggctgaacagcagtcacgcctccccctgcccctgatggagctaatggagaatgaggctctggagattctcacgaaagcactcagaagctaccagctcggcatcggtcgagaccacttcctcactaaggagcttcagagatatattgagggtttaaagaaaagacgatcgaaaagactctacgtgaactag

SEQ ID NO: 14549 - DNA, 1044 bp, synthetic construct
  source 1..1044: mol_type = other DNA; note = Synthetic coding sequence
atgaagttaacaagtgagaagcttccgaaaaatcccttctacgcctctgtctcccagtatgcagccaagaatcagaaattctttcagtggaagaaggagaagaccgactatacccacgccaatcttgtagacaaggctcttcaattgttaaaagagcgtatactgaaaggggatacgcttgcctactttttgagaggccagttatacttcgaggagggctggtatgaggaagcccttgagcagttcgaggagatcaaggaaaaagaccaccaagcaacgtaccaactgggtgtgatgtactatgatggcctagggacaaccctggatgccgaaaaaggcgtcgactatatgaagaagattctggattcaccctgcccaaaagcaagacatctgaagtttgcggccgcatataacctgggtagggcttactatgaaggaaaaggagtgaaacgttcaaacgaggaagctgaacgattgtggctaatcgcagcagacaacgggaatcccaaagcttctgtcaaggcccagtctatgttaggcctgtattatagcacaaaggaacctaaagagctcgagaaggcgttctactggcattctgaggcatgcgggaacggcaatctggagagccaaggcgcattaggcttgatgtatctgtatggtcagggcattagacaggacacagaggccgccctacagtgcctccgagaggccgccgaaagagggaatgtgtacgcacagggtaatctggtcgagtactactataagatgaaattcttcacaaagtgtgtagcctttagcaagcggatcgccgactacgatgaagttcatgacattcctatgatcgcgcaggtcaccgactgcctccccgagttcatcgggagaggtatggctatggcctctttctatcacgcacgatgcttacagttagggctagggataacccgggatgaaacgaccgccaaacactattactctaaagcctgtcggcttaatcccgccctggctgatgagctgcattccctgctcatccggcagcgtatctag

SEQ ID NO: 14550 - DNA, 3525 bp, synthetic construct
  source 1..3525: mol_type = other DNA; note = Synthetic coding sequence
atgccactcccgttcggcctgaagctcaaaaggacaaggagatataccgtgagctccaagagctgtctcgtggcacgcattcagctgctcaataacgaattcgtggagttcacactgtcagtggagagcactggccaggagtcactggaagctgtggcccagcggctggagctgcgcgaagtgacatacttctctctttggtactataacaaacagaatcagcgtcgctgggtggacttggagaagccacttaagaagcagttagataaatatgccctggagcccactgtttactttggcgtcgttttctacgttccaagcgtgagccagttacaacaggaaattacccgttaccagtattatctccagcttaagaaggatatcctggagggctctatcccatgtacactggagcaggccattcagttggccgggttagcagtgcaggctgactttggagacttcgaccaatatgagagccaggactttctgcagaagtttgcattattcccggtggggtggcttcaggacgagaaggtcttagaggaggctacgcagaaagtggccttactgcaccaaaagtatagagggttgactgcacccgatgcagaaatgctctacatgcaagaggttgagcggatggatggctatggagaggaatcatacccagctaaagacagccagggcagtgacatttccattggcgcctgcctggaaggcatatttgtgaaacataaaaatggcaggcatcctgttgtgttccgttggcatgacattgctaatatgtcacacaataagtcctttttcgccctggagcttgctaacaaggaggagactatccagttccagacagaggatatggaaaccgcaaaatatatctggagactgtgtgtcgcccgccataaattctaccgactgaaccagtgcaaccttcagacgcaaaccgtgactgtaaatccaattcggagaagaagctcctctcggatgagccttcccaagccgcagccgtatgtgatgccaccccccccccagctgcactacaatggtcattacacagaaccttatgcttctagtcaggataatttgtttgttcccaatcagaacgggtactattgtcactctcagacctcattagatagggcacagatcgacctgaatggccgcatccgtaacggttctgtttattcggcccactcaactaattccctcaataatccccagccttatcttcagcccagcccaatgagctcaaacccttccatcacaggaagtgatgttatgcggccggactacttgcccagtcaccggcattcagcagtgattcccccctcttaccggccaacccccgactacgaaaccgtgatgaagcagctcaaccgcggcttagtccatgcagaacgccagagtcattccttgagaaacctaaatattgggtcctcctacgcttactctaggcccgcagccctcgtttatagccagcctgagataagagaacacgcacaactcccatcccctgccgccgctcattgtccctttagtctatcatacagttttcactctccttccccctacccctatcccgctgagagacgtcccgtggtgggggccgtttcggtccccgagctcaccaacgcacagctccaggcccaggactatccgtctccaaacatcatgcgcacacaagtgtatcgcccccctccgccctaccctcctccacggcccgcgaacagcactcccgatctttctcgccatctgtatatttcatcttctaacccagatctgatcaccaggagagtgcaccatagcgtacagacctttcaagaggatagtcttccagtcgcacatagccttcaggaggtatcagagcccctcactgccgcaaggcatgcacagctgcataaacgaaactcaatcgaggtggctggtctgtctcacgggctcgaagggctgaggctcaaagaaagaacgctgtccgccagcgccgcagaggttgctccccgggcagtgagcgtcgggtcccagccatccgtatttacagaacgaacgcagcgcgagggccctgaagaagcggaaggattacggtacgggcataaaaaatcattgtccgacgccaccatgctcattcactcatccgaggaggaggaagacgaagatttcgaagaggagtccggggcccgggcacccccggcgagggctcgggaaccccgcccgggcctcgcacaggatccacccggctgtccgagagtcctactcgctggacccttgcacatcctggaacctaaggcacacgtccctgatgccgaaaaaagaatgatggacagttcacccgtcaggacgacagctgaggctcagagaccttggagggacggattgctcatgccttccatgagtgaaagcgatttgaccactagcggaagataccgggcacgaagagactccctcaagaaacgaccagtgagcgatctactgtcgggaaaaaagaatatcgtggaaggattaccaccactcggaggcatgaaaaaaacgcgggtcgacgctaagaaaatcgggccattgaagctggctgccctgaacggtctgagcctcagtcgagtgccccttcccgacgaggggaaggaggttgcaacccgggcaactaacgacgaacgatgtaagattctcgagcagagactcgagcagggcatggtattcacagagtacgaaagaatactgaaaaaacggctggtcgacggtgagtgctcaactgcccggcttcccgaaaacgcagagaggaacagatttcaggatgtgctcccttacgatgacgtgcgcgtagaactcgtacccacaaaggaaaacaacaccggctacatcaacgcttcgcatatcaaggtatccgtatccggtatcgagtgggactatatagcaactcaaggcccattacagaacacttgccaggacttctggcagatggtctgggagcaaggtatcgccatcatcgccatggtcacagcggaggaggaaggcggcagggaaaagtctttccgctattggcctcgcttagggagcaggcacaataccgtgacctacgggcgattcaaaattaccacccggtttcgcactgacagtggttgttatgccacaacgggccttaaaatgaaacacctgctgactggccaggaacgtaccgtgtggcacctccagtatactgattggccagaacatgggtgcccggaagatctgaaaggtttcctgtcatacttagaggagatccagtctgtgaggagacacacaaattcaacatcagatcctcagagtccaaacccacccttgctggtgcactgctccgctggggtagggaggactggcgtggtcatccttagtgaaattatgattgcctgcctggagcacaatgaagtgctggatattcctcgggtgctggatatgctccggcaacagagaatgatgctggtgcagacgctttgtcaatatactttcgtgtatagggtgctcatacagttccttaagagtagcaggctgatttag

SEQ ID NO: 14551 - DNA, 2235 bp, synthetic construct
  source 1..2235: mol_type = other DNA; note = Synthetic coding sequence
atggcagctgacaagccagccgatcagggggctgagaagcacgaggggactgggcagagttctggaatcaccgaccaagaaaaggagctgtccaccaatgcctttcaggcttttactagcggtaactacgatgcctgcctacagcaccttgcttgtctgcaagacatcaacaaagacgactacaagataattctcaataccgcggtggctgagttttttaaaagtaatcagacaacgaccgacaatctaagacaaacactcaaccagctcaagaatcaggtgcacagtgccgtggaggaaatggatggtctggatgatgtggagaacagcatgttgtactacaatcaggcagtgatactttaccacctccgacagtacactgaggctatcagcgtgggcgaaaagctgtatcagtttattgaacctttcgaggaaaaattcgctcaggcagtctgtttcctgctcgtcgatctctatattctcacctatcaggccgagaaagctctgcatctcctggcagttttggagaagatgatctctcagggaaataataacaagaatggcaaaaacgaaactggtaataacaataacaaggacggaagtaatcataaggccgagagtggagcacttatagaagctgctaagagcaaaattcatcagtataaggttcgtgcctacatacagatgaaaagcctgaaggcttgtaagagagaaattaaatcagtgatgaacacagccggcaactctgccccttccctttttctgaaaagcaatttcgaatatctgcggggcaactacaggaaagccgtgaagctgctcaactcctctaacatcgccgagcaccccggattcatgaaaacaggcgagtgcttgcgctgcatgttctggaataacttaggatgcattcattttgccatgagcaagcataatctgggcatcttttattttaaaaaagctctgcaggaaaatgacaatgtttgcgcacagctttctgccggcagtactgatcccggaaagaagttctcaggcagaccgatgtgtaccttgctgaccaataagcgctatgagctgctgtataattgtggtattcaacttctacacatcgggaggccgcttgcagcattcgagtgcctgatcgaggctgtccaggtctaccatgcgaatcccagattgtggttgaggctggcagaatgttgtatcgccgcgaataaaggaacaagtgagcaggaaacgaaaggccttcccagtaagaagggaatcgtgcagagcattgtcggtcagggataccacaggaagatcgtcctcgcctcccagagtattcagaacaccgtgtacaatgacgggcagtcttcagccattcctgtggcatcaatggagttcgcggcaatctgtcttcgaaacgcactgcttctgcttcctgaagagcagcaggatccgaaacaggagaacggggcaaagaacagtaaccagctggggggaaacacggaatcatctgagtcctctgagacctgctcttcaaaatctcacgatggcgataagttcatccctgccccaccttcctccccactcagaaagcaggaactggaaaatctgaaatgtagtattttagcctgctccgcatatgtggctctcgctctgggggacaatttaatggctctgaatcacgccgacaaactgcttcagcagccaaagctgagtggctctctgaaatttctggggcacctgtatgccgccgaggccctaatctccctcgatagaatcagtgatgcaattactcacctaaacccagaaaacgtcaccgacgtgagccttggaatcagctcaaacgaacaggatcagggtagcgacaaaggagaaaatgaagccatggaatcttctggcaaaagagcccctcagtgctacccatccagtgtgaattccgctcggacggtaatgctctttaatcttggtagcgcctattgtctgcgctccgagtacgacaaagctcgcaagtgtttgcatcaggcagcgtcaatgatccaccccaaggaggtcccaccagaggccatcttgctggctgtgtacctcgaactgcagaacggaaacacacagctggctctgcaaattataaaacggaatcagttactgcctgctgtaaaaacccattcagaggtacgcaagaaaccagtgtttcagcccgttcaccctattcaaccaatccagatgccagcgttcacgaccgtccaaaggaagtag

SEQ ID NO: 14552 - DNA, 363 bp, synthetic construct
  source 1..363: mol_type = other DNA; note = Synthetic coding sequence
atgcaccctccaccaccagccgcagcgatggacttctcacagaacagcttgttcgggtatatggaggatttacaagagctgaccatcattgagcgacctgtccgcagaagcctaaaaactccagaggaaatcgaacgcctcacggtggacgaggacctgtcggatatcgagagagctgtctacctcctgtctgccggccaggacgtgcaaggcactagcgtgattgcaaacttgccattcttaatgcgccaaaatcccactgaaactctgcgcagggtgttgccgaaagttcgagtgcacgaggatgctcatctctttattcagagagtgtggatctcacacatgttcgtgcagagggtttag

SEQ ID NO: 14553 - DNA, 1335 bp, synthetic construct
  source 1..1335: mol_type = other DNA; note = Synthetic coding sequence
atgcgcgagatcgtgctgacacaaatcgggcaatgcggcaaccaaattggagcaaagttctgggaagtgattagtgatgagcatgcaatcgatagtgccggcacgtaccacggcgatagccacctccaattagaaagaattaacgtctattacaatgaggcgagtgggggcaggtacgtgcccagggccgtgctggtagacctcgaacccggcaccatggacagtgtgcgcagcggtccattcggtcaggtttttagaccagataattttatcttcggccagtgtggagccgggaataattgggccaaaggccattacacagaaggagccgagctgatggaaagcgtgatggacgtggtcaggaaggaggccgaatcatgtgactgtctgcaagggtttcagctgacacattccttaggtgggggcactgggtcaggaatgggtaccctccttctgtctaagatcagggaggaataccctgataggatcatcaataccttctctatcctacccagcccgaaggtgtccgacaccgtggtcgaaccttacaacgctaccctctcagtccatcagctcatcgagaatgccgatgaaactttctgtattgataacgaggccttgtacgatatttgctcaaaaaccttaaagctgcccacccccacttacggcgatctaaaccacctggttagcgcaactatgtctggtgtcaccacctgcctgcgttttccaggccagctgaacgctgacctgagaaagctggccgtcaacatggtgcctttccctcgcctccacttctttatgcctgggttcgcccccttgacaagccgcggaagtcagcagtaccgtgccctcacagtggccgagctcacacagcagatgtttgacgccaagaatatgatggccgcctgcgacccgagacatggcaggtatctcacagcggcggcaatattcagaggccggatgcccatgcgcgaagtggatgaacagatgttcaacatccaggacaagaactcatcctactttgcggactggctgccaaataatgtcaagaccgccgtatgtgatatccccccacggggcctgaagatgtctgctactttcattggtaataacacagccatacaggaactctttaaacgcgtgtccgaacagttcaccgctatgtttcgcagaaaagcctttttacactggtacacaggcgaagggatggacgagatggagtttaccgaagcagaatcaaacatgaatgacctggtgtctgagtatcagcaataccaagacgctaccgccgaagaagaagaagatgaggaatacgcggaagaggaagttgcatag

SEQ ID NO: 14554 - DNA, 915 bp, synthetic construct
  source 1..915: mol_type = other DNA; note = Synthetic coding sequence
atggctaaaattgaaaagaatgcaccaaccatggagaagaagcccgaactgttcaacatcatggaggtggatggcgtgccaacgttaatactctcaaaggagtggtgggaaaaggtttgtaattttcaggctaaacctgacgatctcatactggccacttaccccaaaagtggcacgacctggatgcacgagatccttgacatgattctgaacgacggtgatgttgaaaaatgtaaaagagcgcagaccctcgacaggcatgcgttccttgaactgaagttcccacacaaagaaaaaccagacctagaattcgtcctagaaatgtcatctcctcagttgattaagactcatctgccctctcacctgatcccaccctcaatctggaaggagaattgcaagattgtgtatgtagcacgaaatcccaaggattgcctggtttcctattaccacttccataggatggctagtttcatgcccgatccacaaaatcttgaagagttttacgaaaagtttatgtctggcaaagtcgtagggggaagttggttcgaccatgtgaagggctggtgggccgctaaagacatgcacagaattctgtaccttttttacgaggacatcaagaaggacccgaagcgggagatcgagaagatactgaagtttctggagaaggacatttccgaggagatactgaacaaaatcatctaccatacttctttcgacgtaatgaagcagaaccccatgaccaactacaccactctgcccactagcattatggaccatagcatcagcccattcatgcggaagggcatgccgggcgattggaagaattactttaccgtggctcaaaatgaagaatttgacaaagactatcaaaaaaaaatggctggctcaactctgacatttcgaacagagatctag

SEQ ID NO: 14555 - DNA, 216 bp, synthetic construct
  source 1..216: mol_type = other DNA; note = Synthetic coding sequence
atgtgcggcagctactacggaaattattacggcactcctggatacggattctgtgggtacgggggactagggtacggatacggcggcctggggtgtggttacggctcgtgctgtggatgtgggtttcgacgactgggatgcggctatggatacgggagccggtccttatgcggatatggatacggctgtgggtctggaagcggctactattattag

SEQ ID NO: 14556 - DNA, 2094 bp, synthetic construct
  source 1..2094: mol_type = other DNA; note = Synthetic coding sequence
atggacaaaaagagcacagctgagaagttaggtaaggaacttgggctgcaggcaaaagagctaagcgcagtccacagcagccatcatgaaatcggggttaacgactctaatctgttcagtctcgagatgcgagagcccctggaaagcagcaatacgaagagtttccattcagctgtggaaatcaagaaccgatctcaacacgaactcccctgcttccagcatcacggcatagatactcccacttctctgcagaagcggtccgcctgttgtcccccctcattactccgactcgaggagaccgccagctcatcacaggatggcgatccccagatttgggacgaccttcccttctccgagtcattgaataagttccttgctgtgctggaatcagagatcgcggtgactcaggccgatgtgagcagccgcaagcaccatgtggataatgatatcgataagttccacgccgaccactctcgcctcagcgttacacctcaaagaaccacgggtgcactacatacaccaccaatcgctctgcgctcaagccaggtcatcgtgaaagcgaattgtagcaaagacgattttctctttaactgcaaggggaacctgtccccttccgtggaaaaagagtcacaacccgataacaaggtcgaggctgtgtctgtgaatcacaacggtagggacatgtcagaatacttcctgcccaacccctacctgagtgctttgtcttctagctccaaagaccttgagacgatcgtgaccctgaaaaaaacaatcaggattagcccccacagagagtctgaccactcttcactgaataataagtatttgaatggctgtggagagatctctgtctcagagatgaacgagaagctgaccaccctgtgttacagaaagtataatgatgtgtcagatctctgtaaactggagaacaaacagtactgcagatggtcgaaaaaccaggatgacagcttcacgatctgtcgtaaattaacttatccgttggaaaccctgtgcaactctccaaacagatcaacgaatacccttaaagaaatgccgtggggccatatcaataacaacgttacccaaagctacagtattgggtacgagggaagttacgacgcttctgcagatctgtttgatgacatcgccaaagagatggacatcgccacagaaataactaaaaagtctcaggacatactacttaagtggggaacttctctggctgaaagccatcctagtgagtcagacttctctctgagaagcctaagtgaagactttatacagccctctcagaaactcagcctgcagtctctcagcgacagccgacactccagaacttgttcccctacaccccactttcagtcagatagcgagtacaacttcgagaattcccaggattttgtgccgtgttcacaaagcacgccaatatccggattccatcaaactagaattcacgggatcaatcgggccttcaaaaagcctgtcttctactctgacctcgatggcaactacgagaagattaggatattcccagagaatgacaaacagcaggcatctccttcttgtcccaaaaatatcaaaacaccctcccagaagattcgttcacccatcgtcagcggggtcagtcagccagatgtgttcaaccattacccttttgccgagtgtcatgagactgattctgacgagtgggtcccgccaactacccagaagattttcccctctgatatgttaggatttcagggaatcggccttggaaaatgtctggccgcttaccacttcccagatcagcaggagctgccacgtaagaagttgaagcatatcagacagggaaccaataagggcctgatcaaaaagaagttgaagaacatgctggccgcagtggtaactaagaagaaaactcataaatacaactgtaagtcaagcggatggatctcaaaatgccccgatatccaagtccttgcagcccctcagctgcaccctatactcggccctgattcctgttctgaggttaagtgctgcctgccattcagtgaaaaaggtccaccatctgtgtgtgagacacgttccgcgtggtcgcctgagctttttagctag

SEQ ID NO: 14557 - DNA, 306 bp, synthetic construct
  source 1..306: mol_type = other DNA; note = Synthetic coding sequence
atgtctaacacccaggcggagcggtctattattggcatgattgatatgttccacaagtataccggcagagacgggaagatcgagaaaccatccctgttgacaatgatgaaggaaaacttccccaatttcctatcagcttgtgataaaaagggcattcactatttggccaccgtcttcgagaaaaaagataagaacgaagacaaaaagattgactttagcgaatttctgtctttgttgggagatatagccgctgattatcataagcagtcgcacggggcggcaccctgctctggcggaagccaatag

SEQ ID NO: 14558 - DNA, 678 bp, synthetic construct
  source 1..678: mol_type = other DNA; note = Synthetic coding sequence
atggctgtgaggtccctctgggccggacgcctcagagtgcagcgacttctcgcatggagcgctgcctgggagtctaaaggttggcctttacccttttctacagccacacagcgaacggctggagaagattgtcgctccgaggaccctccagacgagttgggacctccactggcagaaagggccctacgagtaaaagccgttaagttggaaaaggaggtccaagacctcacggtacgataccagagagctattgcggactgtgagaatattcgaaggcggactcagcgttgtgttgaggacgctaaaatatttggaatccagagcttttgcaaggacctcgtggaagtggccgacatcttggagaagacaactgagtgcataagcgaggaatcagagcccgaagaccagaaactcaccctggagaaggtattcaggggcttgctgttgttagaggcaaaattgaaaagtgtcttcgccaagcatggcctggagaagcttacccccatcggggataagtacgatcctcatgaacatgagctcatctgccacgtgcccgccggcgtcggagtgcagcccggcacagttgccctggtgcgtcaggacggatacaagttgcatggccgaaccatacggctggcccgagtggaggttgccgttgaatcacagagacgtttgtag

SEQ ID NO: 14559 - DNA, 1203 bp, synthetic construct
  source 1..1203: mol_type = other DNA; note = Synthetic coding sequence
atgaccacgaagaatctggaaacaaaagtgaccgtcacttcctcccctatccgaggggccggtgacggaatggaaactgaagaaccaccgaagtcagttgaagtgacaagcggagtgcagagtcgtaaacatcactccctgcagagcccatggaaaaaggccgtgcccagtgagtctcccggagtgttgcagctcggtaaaatgctgactgagaaggccatggaagtgaaagccgtccggatcctcgtcccgaaggccgccatcactcacgacatacccaacaagaacaccaaggtcaagagtctaggtcatcacaagggggagtttttgggacagagcgagggagtcattgaaccaaacaaagaattgtcggaagtaaaaaacgtgctggagaaacttaagaactccgagcgtcggttactgcaggacaaggaaggactatccaatcagctgcgcgtgcagaccgaagtgaacagggaactcaagaagctgctggttgcaagtgttggcgacgatctccaatatcatttcgagcgactagcccgggagaagaaccagctaatcctggaaaacgaggcactgggacggaacactgctcagctgagcgagcagctggaacggatgtctatacaatgcgacgtatggaggagtaagttcttggcctcacgcgtcatggccgatgagttgacaaactcccgggcagcactgcagaggcagaaccgagatgctcacggtgccatccaggaccttctgagcgaaagggagcagttccgccaagagatgatcgcaacacagaagcttctggaagagttgctggtaagcctgcagtggggccgagaacaaacatattcccccagcgttcagcctcactccacagctgagttggcgctcactaatcataagttagcaaaagcagtgaattcccatcttctcggcaacgttggtatcaacaaccagaagaagataccatccactgtggagttctgtagtacaccagctgaaaaaatggcggagacagttcttcgtatcctggacccagtcacatgcaaggagtcgtctccggataatccctttttcgaatcgagccccactaccctcctggccactaagaagaacattgggcgattccacccctatacacggtatgaaaacattacctttaactgttgcaaccactgcaggggcgagttgatcgccctctag

SEQ ID NO: 14560 - DNA, 735 bp, synthetic construct
  source 1..735: mol_type = other DNA; note = Synthetic coding sequence
atggatccaggagccgccctgcagcgacgagcgggcggtggtggtggtctcggcgccggatcccccgccttaagcgggggtcagggaagacggcgaaagcagcctcccaggccagccgacttcaaactccaagtaattatcatcggaagccgcggcgtaggtaagacgagcctgatggagcgcttcaccgacgacactttctgtgaagcatgtaaatccacagtgggggtggacttcaaaattaagactgtggagttgcgcggcaaaaaaatccggctgcagatttgggacaccgctggtcaggagagattcaatagcatcacttccgcctattatcggagcgcaaaaggaataattctagtctatgatatcaccaaaaaggagacattcgatgatctgcctaaatggatgaagatgatagacaagtatgcttcggaagacgccgaattactactcgtgggcaataagctggattgtgaaacggatcgggaaattacgaggcagcagggcgaaaagttcgcgcagcagatcaccgggatgaggttctgtgaagcaagcgccaaagacaatttcaacgtggacgagatttttcttaaattggtggatgatatcctaaaaaagatgcctctggatattctgagaaacgagctttccaacagtattctcagcctgcaacccgagccagagatcccaccagaattgcctccacctcgcccacacgttagatgctgttag

SEQ ID NO: 14561 - DNA, 1158 bp, synthetic construct
  source 1..1158: mol_type = other DNA; note = Synthetic coding sequence
atggccctgccccacgatagcaacgagactagttacttgctgccccccaacaacgaagactgggggcgccagactatccctgattttgtttatggccagaaagatctcatggccgaaggcatccagtggccccggaacgcccccgggattcctgacgccctcccacagagcccctttgatgcagcactttgcagtgcctggaagcagcgcgtcgagttgggcttattccgatatagactgcgggagctgcagacacaaattctgcccggtgccgtcgggttcgtggcccaactgaacgtggagcgcggggtccagaggagaccaccccagaccataaagagtgtgcgccaagcctttgaccccgtccagtttaacttcaacaaaataaggcctggcgaggtcctctttcgcctgcaccgtgagcctgacctgcccgggaccctgctccaggaggatattcttgtcgtgatcaatgtctctccgttagagtggggccacgtgctgttggtccctgagccagctcgtcaactgccacagagacttctcccaggcgcccttagagcaggtatcgaagctgtgttactgtcgctgcatcccggatttcgggttggctttaactctctggggggcctggcctccgtcaatcatcttcaccttcatggttactatctggcccatagactccccgtggagcaggcccctagcgagcccttggatcccggcggtcatctgcatctgctgcaagatttgcctgcccctggctttttgttctacactcggggtcctggtcctgatttggagtcactcatatcccgggtgtgtagggctacagactacctgacagatcatgaaattgcccacaacctgtttgtcactcgaggggccccgcccggaaaaaccagtccttcatctgccttgacgggagtgcgagtgattttgtgggcccggaaatcctcattcggaatcaaggatggagaggccttcaacgtcgcactgtgtgaactggccggacacttacccgtgaaaactagccaggacttctcaagcctgaccgaagccgccgcagtcgctctcatccaggattgtcgcctcccccccagtcaggccgaagacgtgcaggccgccctggttgccctgatgagccaggaagagcaatag

SEQ ID NO: 14562 - DNA, 192 bp, synthetic construct
  source 1..192: mol_type = other DNA; note = Synthetic coding sequence
atgttgtgtgataacttccctggcgctgtatttcctggctgctattggggcagctatggctaccccctgggatatagcgttgggtgcggttatggctctacatactcgcctgtcggctatggctttgggtacggctacaatgggtgcggcgctttcggctatcggagatattcaccttttgctctctactag

SEQ ID NO: 14563 - DNA, 1083 bp, synthetic construct
  source 1..1083: mol_type = other DNA; note = Synthetic coding sequence
atgctgggtagcgggttcaaagccgaaaggttgcgggtgaacctgcgtctggtgatcaacagactcaagcttctggaaaaaaagaaaaccgagctggcccagaaggcccgcaaagagatagccgattacttagccgccggaaaggatgaacgcgcacgcatcagggtcgagcatattatacgtgaggattatctcgtggaagctatggaaattttagagctgtattgcgacctgcttcttgctagatttggattaatccagagcatgaaggagttagacagtggcctcgccgaatcagttagtactttaatctgggctgcaccgcgcctacagtctgaggtggccgagctcaagatagtggccgatcagctttgtgctaagtatagcaaagagtacggtaaactgtgtcgcaccaaccagatcggaacagttaacgaccggctcatgcataaactgtccgtggaagcacccccaaagatcctggtcgaaaggtatctgatagaaatagccaagaattacaatgttccttatgaacccgacagtgtcgtgatggccgaagctccgccgggagtggagactgatctcatagatgttgggtttaccgatgacgttaaaaagggcggccccggtagaggcggctcaggtgggttcaccgctcctgtggggggacccgatggaacagtgcccatgcccatgcctatgcctatgcccatgcccagcgcaaataccccctttagttatccactccccaaaggtcccagcgacttcaacggattgccgatgggcacgtatcaggccttccccaacatccacccaccacagattcctgctactcctccatcatacgaaagcatgactcttatgctaatcagaatttccctgcttcatcggctgctggtccttgacccatcccagaagccattgcagtcctttctcccagacttacagatcacaatgactaccctctcataccagagctgccacctgtgccaaacccactaccagctacacctcttagtgcccgcccctcagcacttgaaaacactcacacttatgatcttccctggtggcctgaagagctag

SEQ ID NO: 14564 - DNA, 528 bp, synthetic construct
  source 1..528: mol_type = other DNA; note = Synthetic coding sequence
atgccaaagcggagttgtccctttgctgatgtggctccactccagctgaaagtccgagtctctcagcgggaactgtcccggggagtgtgcgcggagcgatactctcaggaagtatttgagaaaacaaagcgcttattgttcctcggtgcacaggcatatctcgatcacgtatgggatgagggctgtgcggtggtgcacctcccagaatcaccaaaaccagggcccaccggggcgcccagggctgcccggggccagatgctgattggccccgatggaagacttattcgctcactgggccaggcttctgaagctgacccttccggagttgcttccatcgcatgtagctcatgtgtgagagcggtggacggcaaagcagtttgtgggcagtgtgaacgcgccctctgcggtcagtgcgttcgcacctgttggggatgtggtagtgtggcctgtactctctgcgggctcgtcgactgctcagatatgtatgaaaaggttttgtgcacatcatgcgctatgtttgagacatag

SEQ ID NO: 14565 - DNA, 366 bp, synthetic construct
  source 1..366: mol_type = other DNA; note = Synthetic coding sequence
atggaggctgaagtcgacaaactcgagcttatgtttcagaaagccgaaagtgatttggattacatccagtaccgtttggagtacgagatcaagacaaaccacccagactcagcctcagaaaaaaatcctgtgaccctcctgaaagagctgtccgttatcaagagccgatatcaaaccttatacgcacgattcaaacctgtcgctgtcgaacaaaaggagagtaagtctcggatttgtgccaccgtcaaaaagacaatgaatatgattcagaagctccagaagcagacggatttggagctgtccccgctcactaaagaagagaaaaccgcagcagagcagttcaagtttcacatgccagacctctag

SEQ ID NO: 14566 - DNA, 1968 bp, synthetic construct
  source 1..1968: mol_type = other DNA; note = Synthetic coding sequence
atggtgactaccctcgggcccaaaatggctgctgagtggggggggggcgttggctacagcggctctggcccgggtcgctcaaggtggcggtggagcggctccgtgtgggttcggagtgttttactgttgttgggcggattgagagcttccgctacctctactcccgttagcctggggagctcacctccgtgtcgtcaccatgtgccctccgatacagaagtaattaacaaggtccacctaaaagccaatcatgtggtgaagagggacgtggacgaacacctgaggatcaaaactgtgtacgataagtcagtggaggagctgctccctgagaagaaaaatctggtcaaaaataaattattcccccaggcaatttcatacctggaaaaaaccttccaagtgcgtcggcccgctggcacgatcttactcagtagacagtgtgccaccaatcagtatctcagaaaagagaatgacccacatcgctactgtacaggtgagtgtgctgcccacacaaaatgcggtcccgtgatagttcctgaggagcacttacagcagtgccgggtgtaccgcggcggaaagtggccacatggcgccgtgggagtccccgatcaggaaggtatcagtgatgctgatttcgtgctatacgtcggcgctctggctacagaacgttgctcccacgagaatattataagctatgccgcatactgtcagcaggaggctaacatggatcgccctattgcaggatacgcgaacttgtgtcctaatatgatctcaacacagccacaagagttcgtgggaatgctgtctactgtgaagcatgaagtgattcacgcactcggattcagtgccgggttgttcgccttttatcatgataaagatggcaatcccctgacgtcccggtttgctgatggattaccgccgtttaactatagtctcgggctataccagtggagtgataaggtggtgaggaaagtggagcggctgtgggacgtgcgggataacaaaatagtgcgtcacacggtctacctgctcgtgacaccgcgcgtcgtggaggaagctagaaagcatttcgactgcccagtcctggaaggaatggagctggagaaccaaggaggagtcgggacagagctgaatcattgggaaaaacgcctgctggaaaacgaagcaatgaccgggtctcatacccaaaatagagttttgagccggatcacgctggctctgatggaagacactggtcggcagatgctttcaccgtactgtgatacgttaaggtctaaccctttgcagctcacatgccgccaggaccagagagccgttgcggtgtgcaatcttcaaaaatttcctaaacctcttccacaagaatatcagtacttcgacgagctttccggaattcccgctgaagacctcccatactacggcgggtccgttgaaatcgcggactactgcccgttctctcaagagtttagttggcacctgagtggcgaataccagcggagctctgactgccgcatcctggaaaatcaaccggagatcttcaaaaactacggcgctgaaaagtacgggccccactcagtgtgcctgatccagaaatctgccttcgtaatggaaaagtgcgaacgaaaattgtcttaccctgactgggggtccggctgttatcaggtgagttgttccccacagggcctgaaggtgtgggtacaggacacctcctatctttgcagtagagcaggtcaagtgctgcccgtgagcattcagatgaatggctggatccatgatggaaacctgctttgtccttcctgttgggacttttgcgagctctgtcctccagaaactgaccccccagccacaaacttgactcgcgctcttcccttagacctgtgctcttgttcaagctctctggtggtgactctatggctcctgctcggcaacctttttcccttactcgcaggcttcttgttgtgcatttggcattag

SEQ ID NO: 14567 - DNA, 408 bp, synthetic construct
  source 1..408: mol_type = other DNA; note = Synthetic coding sequence
atgggtagagtgaggaccaagacagtgaagaaggcagccagggtaattatcgagaaatattacacccgtctgggaaacgactttcatacgaataaacgagtgtgcgaggaaatagccatcattcctagcaagaaacttcgtaataagattgctggatacgtgacacacctgatgaagagaattcaacgtgggcctgtccgcgggattagcataaagttgcaggaggaagaacgggagaggagagataattatgtacctgaggtttcagccttggatcaggagatcatcgaggtggatccagatactaaggaaatgctcaagctactggattttggctctttgtcaaatctccaggttacccaaccaactgtgggaatgaatttcaaaaccccgaggggcccagtttag

SEQ ID NO: 14568 - DNA, 1119 bp, synthetic construct
  source 1..1119: mol_type = other DNA; note = Synthetic coding sequence
atgaatcactgtcagctgcctgtcgtgatcgataatggatccggtatgattaaagcaggcgtggccggttgccgcgaaccccagttcatctaccctaacatcattggcagagccaaaggccagagcagggccgctcagggcggactggaactgtgcgtgggagaccaggctcaggactggagaagctcactgtttatttcgtatcccgtggaaagaggcttgattactagttgggaggatatggaaatcatgtggaagcacatctacgactataatctcaaacttaagccgtgcgatggccccgtgctgatcacagaacctgccttgaatccattagcaaatcgacagcagattaccgaaatgttctttgagcatttgggtgtacccgctttctacatgtcgatccaagccgtgttggctctgtttgccgccgggtttacaacaggattggtcctgaattctggagctggagttacacagagcgtgccgatcttcgaggggtactgcctcccacatggtgttcaacagctcgacctagccggccttgatttaaccaattacctcatggtactcatgaaaaatcacgggatcatgctgctgagtgcaagcgatcgcaaaatcgttgaggacatcaaggagtctttctgttacgtggcaatgaattacgaggaagagatggccaagaagcccgactgcctcgaaaaggtctaccagctcccagacggaaaagtgattcagctgcatgatcagcttttcagctgccccgaagcactttttagcccatgtcacatgaatttggaagcaccagggattgataagatatgcttttccagtataatgaaatgcgacacgggattacggaatagtttcttcagcaacatcatcctggccggtggatcaacttcatttcccgggctcgataagcgtctggttaaggatatagcgaaggtggcccctgccaacactgcagtgcaggtgattgctccacccgagagaaaaatatcagtctggatggggggatcaattctcgccagcctaagcgccttccaagacatgtggatcacagctgccgagttcaaggaagtggggcccaacatagtgcatcagaggtgcttctag

SEQ ID NO: 14569 - DNA, 3072 bp, synthetic construct
  source 1..3072: mol_type = other DNA; note = Synthetic coding sequence
atggatgccaattccaaggacaagccacccgagactaaagagagcgcaatgaacaacgcaggcaacgcaagcttcatattgggtacaggaaagatcgtgaccccccaaaaacatgccgaattgcctccaaatccatgcactcctgacacgttcaaaagccctctcaacttcagcacagtgactgtggaacagcttggcattacaccagagtcttttgtgcggaattctgcgggcaaaagctcaagctatctgaagaaatgtcgacggcgcagcgcggtaggtgccagaggtagtccagagaccaaccaccttattagattcattgcccggcaacagaatatcaaaaatgcaaggaaaagtcctttggcacaagacagcccttcacaaggcagcccggctctataccgcaacgtaaacacactccgcgaaaggatatcagcgttccagagcgccttccatagtataaaagagaatgagaaaatgactgggtgcctcgagttcagtgaggcgggaaaggaaagcgagatgacggatttaacccgcaaggagggactctcggcttgccagcagagcgggtttccagctgtcctgtcgagcaaaagacgaaggatttcctaccagcgcgattccgatgagaacttgacagatgcggaggggaaagtgataggtctgcagattttcaacattgatacggacagagcatgcgctgtggagacgtccgtagatcttagtgaaatctcctcgaagctgggaagcacacaaagcgggtttctcgtggaggaaagcctaccactgagcgagttgaccgagacgtctaatgctttgaaggttgccgattgtgtcgttggcaagggctcgtccgatgccgtttcccctgatacgtttaccgcagaggtaagctccgacgctgtgcccgatgttcgcagccccgccacaccagcctgtcgccgagatctgccgacacccaaaacgttcgtcctgaggagtgtcctgaaaaagccatccgtaaaaatgtgccttgagagtctacaggaacattgtaacaacttgtacgacgatgatggtacacacccttccctgatctctaacctgcccaactgttgcaaggaaaaggaggcagaagatgaagagaacttcgaggctcctgctttcctgaacatgcgcaagcggaaacgcgttacctttggggaggacttatctcccgaggtttttgacgagtctttaccagccaatacaccactgcgaaaaggcggcacccctgtgtgtaagaaagacttctctggactcagcagtctgctgttggagcaaagcccagtcccagagccactgccccagccggattttgacgataagggcgaaaatttggaaaacatagaaccactacaggtgagctttgcggtgctatctagcccgaataagagctctatcagtgaaacccttagcggcactgatacatttagcagttccaacaaccatgagaagataagcagtcctaaggtgggacggatcacaagaacgtccaatagacgaaaccagttagtatctgtggtggaggagtcagtgtgtaacctattgaatactgaagtgcaaccttgcaaggaaaagaagattaaccgacgcaagtcacaggaaaccaaatgcacgaagagggcactgcccaaaaagtctcaggtcttaaagtcctgcaggaagaagaaaggtaagggcaaaaagagcgttcagaagtcactctatggggagcgagacattgctagtaaaaagcccctgctctccccaatccctgagctgcccgaggtacccgaaatgacaccatccataccttccatccgacggctcggctcagggtatttcagcagtaatggtaagctggaggaggttaagacgcctaaaaaccccgtgaaaaggaaagatctcctgcgccatgatcccgatcttcatatgcaccagggatatgataaatatgacgtgtctgaattttgcagttatatcaagtcatcttcctccttgggcaacgctacttccgacgaggacccaaatactaacatcatgaatatcaatgagaataagaacatccccaaagctaagaataagtcagagtcagaaaatgagcccaaagcagggaccgactcccccgtctcttgcgcgtcagttaccgaggagagggtggcctcagactccccaaaaccagcgctcaccctgcagcaaggtcaagaattctccgccggaggccaaaatgctgagaatctttgccagttcttcaagatatcccccgatctcaatattaaatgcgagcggaaggatgattttctcggggccgcagaaggaaagcttcagtgcaatcgactgatgccaaactctcaaaaagattgccactgcttgggcgatgttttgattgagaatactaaggagtccaagtctcagagtgaagatctgggcaggaagccaatggaaagttctagtgtggtgtcatgcagggatcggaaagataggcgccgctccatgtgttattcagatgggagaagtctccatctggagaaaaatggaaaccatacccccagttcatcggtgggaagcagcgtggagatttctctggagaacagtgaactttttaaggacctttcagatgccattgagcagaccttccagcggcgcaacagcgagacaaaggtgaggaggtctaccaggctgcaaaaagacctggagaatgagggactggtgtggataagtttaccccttccctctacaagccagaaggcaaagagaagaactatctgtacatttgacagtagcggcttcgagtccatgtcgcctatcaaggagacagtttctagccggcagaaaccccaaatggccccacccgtcagcgaccccgagaatagccagggtccagcagccggttcctcagacgagcccgggaagagacggaagtccttctgtatctctactctggctaacacaaaggcgacaagccaatttaaagggtatcggcgacgctcaagcctgaacggaaagggggagtcgtctctgacagccctcgagcggatagagcacaatggggaaagaaaacagtag

SEQ ID NO: 14570 - DNA, 963 bp, synthetic construct
  source 1..963: mol_type = other DNA; note = Synthetic coding sequence
atgagtaaatctgagagccctaaggaacccgaacaactgaggaaattgtttatagggggactctcttttgaaacaaccgacgagtcactgcgatcccacttcgaacaatgggggacactgaccgattgcgtggttatgagggatcccaacactaagcgaagcagaggcttcggttttgtgacttacgcaaccgtggaagaagtggatgccgccatgaatgcgagacctcataaggtcgacggtcgcgttgtcgaacctaagcgggccgtctcaagggaagacagccagcggccaggagcgcatctgactgtgaaaaaaatatttgtgggcgggataaaagaggataccgaggaacaccatttgagggactacttcgagcagtacggcaagattgaggtgatagaaattatgactgatcgtggcagtggaaaaaagcgcggcttcgcatttgttacattcgacgaccacgatagtgtcgacaaaatcgtcatccagaaatatcacaccgtgaacgggcataattgtgaagtgaggaaagccctgagcaaacaagaaatggccagcgctagttcttcccagagaggccgttccggatctgggaacttcgggggaggccgtggaggcgggtttgggggcaatgataactttggcagggggggcaatttctctggcaggggggggtttggcggcagtcgggggggcggcgggtacggtgggtcgggggatggttacaatggatttggcaacgatggtaacaactttggaggcggcgggtcttacaacgacttcggcaactacaacaaccagtcaagtaatttcggtcccatgaaaggcggaaatttcggcgggcgctcttctgggccgtacgggggcggaggacagtacttcgccaaaccgaggaaccagggcgggtacgggggttccagttcctcttcaagttacgggagcgggaggcgattttag

SEQ ID NO: 14571 - DNA, 141 bp, synthetic construct
  source 1..141: mol_type = other DNA; note = Synthetic coding sequence
atgtgctctcttgccagtggggccaccggctactctcatctcttaaagaaacactttcacacagtgtctctgtctatctccctcatcctgactgcctggttcattaatatggatttgaatttcatggacacactctcctag

SEQ ID NO: 14572 - DNA, 198 bp, synthetic construct
  source 1..198: mol_type = other DNA; note = Synthetic coding sequence
atgtgttactatagcaactattatggcggcttacgatatggatacggggtgttgggcgggggttacggctgtggctgtggttacggtcacggctacggtgggctggggtgcggatacggccggggctatggcggatacggatacggctgctgtaggccctcatgttatggcaggtactggagttgtggtttttactag

SEQ ID NO: 14573 - DNA, 7059 bp, synthetic construct
  source 1..7059: mol_type = other DNA; note = Synthetic coding sequence
atggagaaggccaccgtacccgtcgctgcggccacagccgctgaaggggaaggatctccgcccgccgttgccgctgtggccgggccccccgccgccgcagaagtgggggggggcgtgggaggatcttcaagggcacggtccgcaagctcacctcgaggcatggtgagagtgtgtgatctgctcctgaaaaaaaagcccccacagcagcagcatcataaggcaaagagaaatcgcacctgtcgcccaccttcatcttcggaaagctcatccgactcggacaattcagggggaggaggtggcggggggggcggcggaggggggggcggtggtacctcttcaaataactccgaagaggaagaggatgatgacgacgaagaagaagaagtgagcgaggttgagtcatttatcttggaccaagacgatctagagaacccaatgctcgaaacagcaagcaagttgctgcttagcggaaccgctgatggggcggacctgcggaccgtggaccctgaaacgcaggcaaggctggaagcgcttctcgaggcagcaggaatcgggaaactctccacggccgatggcaaagctttcgccgatcccgaagttttgcggcgtttgacttcaagcgtaagctgcgctctggatgaagccgccgcagccctcacccgtatgcgagccgagtccacagccaacgccggtcagtcagacaatcgctctctagccgaggcatgcagtgagggcgacgtcaacgctgttcggaagcttcttattgaaggcagaagcgtgaacgagcacaccgaggaaggcgagagcctgttatgcctagcgtgctcagcgggctactacgagttggctcaggtcctattggccatgcacgctaacgtcgaagatcgtggcatcaaaggagacataactcctctcatggctgcggccaacgggggacacgtcaagatcgtgaagctgttgttggcgcataaggccgatgtcaacgctcagtcatccacggggaataccgctttgacttatgcttgtgctggaggctacgttgacgtggtgaaagttttactggagtctggggcatctatcgaggatcataacgagaacggtcacacccctctgatggaggccggcagtgccggtcacgttgaagtagcccggctcttgctggagaatggcgctggaatcaacacacactcaaatgaattcaaggagtctgccctcacgcttgcctgttataaagggcatctagagatggtgagatttcttcttgaggccggtgctgatcaggaacacaaaactgacgagatgcatacagccctgatggaggcatgtatggatggccatgtagaagtggctcggctgttgctggattccggtgcacaggtgaatatgcctgctgactccttcgaatccccgctgactctcgcagcatgcggcggccacgttgagctggctgccctgttgattgaacgcggggcctccctggaagaggtgaatgatgagggctatacccctcttatggaagcagctcgggagggccacgaggagatggtagccctgcttttgggacagggcgctaacatcaatgcacagactgaagagacgcaggagactgcccttaccctggcatgttgcggcggttttctcgaagtagccgactttttgatcaaggccggggctgatatagagttagggtgttccacacccttgatggaggccgcgcaggaagggcacttagagcttgtgaagtatctgttggccgccggggctaacgtgcacgccaccacagcaactggcgatacggctcttacttacgcttgtgagaatggacacaccgacgtagccgacgtcctactgcaggccggcgcagacttagaacatgagtccgaggggggccgcacacccctcatgaaggctgcccgggccggccatgtctgcacagtgcaatttcttatcagcaagggcgccaacgtgaaccggaccaccgcaaataacgatcatactgtactaagtctcgcctgtgctggggggcacctagccgtcgtcgaactgctgctggcacatggcgctgatcctacacatcgactaaaagacggttctaccatgctgattgaggcagccaaaggcggccacacttctgtggtgtgctatctcttagactacccaaataatctactcagcgcacccccccccgatgttactcaactcacacccccctcccacgacctgaatagggctccccgagttcctgttcaggcgctgcctatggtggtccccccacaggaacctgataagccccctgctaacgtagctactacgctgcccatcagaaataaagccgtgtctggccgcgcaagcgcgatgtctaacaccccgacacactcgattgctgccagtatcagccaacctcagacaccaaccccaagtcccataatcagccccagtgccatgctgcccatctatccagccattgatattgatgctcaaactgagtctaaccatgacaccgcattgaccttagcgtgtgctggcggacatgaggagttggtccagactttgctggagaggggagcctcaattgagcatcgggacaagaagggttttacacccctaattctcgcagccactgccggacacgttggcgtagtagaaatactactggacaatggagccgacattgaggcccagtctgagcgcaccaaggatacccctctttcactggcctgttcaggagggcgacaggaggtggtcgagttattactggctaggggggccaacaaggaacaccgtaatgttagtgattacacaccactgtctttggccgcctctggcggttatgtaaacattatcaaaatactgctgaacgccggcgctgaaattaatagtagaactgggagcaagttggggatatcacctttgatgttggcagctatgaacggtcacaccgccgccgtcaagctgctcttggacatgggtagtgacataaatgcacagatcgaaactaatagaaacaccgctctgacactggcttgctttcaggggagaactgaggttgtgtccctgctgcttgatagaaaggctaatgtcgagcacagagctaaaacaggtctaactccgttgatggaagccgcttcaggcggctacgccgaggtcggaagagtgctattggacaagggcgcagatgtgaacgctcctcctgtaccttctagccgggatactgcactgacgatagcggcggacaaaggacactacaaattttgcgagctgctgatcgggcggggggcccatattgacgtgcgcaacaaaaaaggaaacacacccttatggttagccgcgaatggaggccacctggatgtcgtgcagctattggtccaagctggagcagacgtggatgccgctgataaccggaaaatcacaccccttatggccgcattcagaaaggggcacgttaaagtggtgcggtacctggtcaaggaggtgaatcagttcccaagcgattcggagtgcatgcgttacatcgctacaatcaccgacaaggagatgctgaagaaatgccacctgtgtatggaatccatagttcaggccaaagatcggcaggcagccgaagcgaacaagaacgcatccatcctactggaagagcttgatctggaaaagcttcgcgaagaatcccgaaggttggcccttgctgcaaaacgcgaaaagcggaaggagaagagacggaaaaagaaggaagagcagcggcgcaaactggaagaaattgaggccaaaaacaaggaaaatttcgagctgcaggctgcgcaggagaaagagaagttgaaagtggaggacgaacctgaggtgctcactgaaccgccttccgccaccactacaacaacaattggaatctccgcaacatggactaccctggcaggatcacacggcaagaggaataataccattaccaccacaagttctaaaaggaagaatcgcaaaaacaagatcacacccgagaacgtgcaaatcatttttgatgatccactgcccatctcctactctcaaccagagaaagtgaatggcgaatctaaatcctctagcacgtccgaatcaggggactccgataacatgaggatttccagttgcagcgacgagagttcgaatagtaactcgtcgcgcaaatcagacaatcatagccccgcagtagttacgaccaccgtgtccagtaagaagcagccctccgtcttggtgactttccccaaagaggagcgaaagagcgtctccggaaaagcatctattaaactatcggaaactataagtgaaggaacctcgaatagcctctctacttgcacaaagagcgggccctccccactctctagccctaacggcaagcttaccgtggcatcacctaagaggggccagaagcgtgaggaggggtggaaggaggtcgttagaaggagcaagaaagtttcagttcccagtacagtaataagtagagtgatagggcgtggaggttgcaatatcaatgctattcgggagttcacaggagctcacattgacattgacaagcagaaggacaagaccggcgaccggattatcactatccggggaggcacggagtcaactcgacaggccactcaacttattaacgccctcattaaagaccctgataaagaaatcgatgaacttatcccgaaaaatcgactgaaatcttctagtgctaattctaaaataggatcatctgcaccaactactacagctgccaatacgtcactgatgggtataaagatgacaaccgtcgctctctcctcaacctctcagactgctaccgcgcttacggtccccgcaattagctcagcctcaacccataagacaataaagaaccctgtcaataatgtaagacctggcttcccagtgtccctgcctctggcctacccgcctcctcagtttgctcacgccttactcgctgctcaaaccttccagcagatccgaccccctcggctgcctatgactcactttggcggaacctttcccccagctcaaagtacgtgggggccgttcccagttcgacccctctctccagcgcgcgcgacgaatagccctaaaccacacatggtgccacgccacagcaatcagaattctagcggatcacaggtgaactctgccggatccttgacatccagtcccaccactactacatcaagtagcgccagcacggtaccagggaccagcacgaatggttcaccttctagtccttccgttagaaggcagctcttcgtcactgtcgtgaaaacatctaatgctaccacaacgacggtgaccactactgcgtccaacaataacaccgctcccacaaacgccacctatcctatgccaacagctaaggaacactaccctgtgagctcaccttcttctcctagtcccccagcccagcccggaggggtgagccgcaattctccactggattgcgggtctgcctcccccaataaagtggcgagcagctcagagcaggaggccggctcgcccccagtagtagagaccaccaatacccgccccccaaattcaagctcctcctccggctcctcatccgcccattcgaatcagcagcaacccccgggttcagtttctcaagagccacgccctcctctgcagcagagccaggtgccacccccagaggttcgaatgacagtcccaccacttgctaccagcagtgctcccgttgccgtgccaagcacagcaccagtgacgtatccaatgccgcaaacccccatgggctgcccacagcccactccgaagatggagacgcctgctatcaggccccccccccacggcacaacagcgccccacaagaacagtgcctctgtgcaaaactctagtgttgcagtgctatctgtcaatcatattaagcgaccccactctgtgccctcttcagtccaattaccgtcaactctgtccacccagagcgcctgtcagaatagcgttcatcccgcgaacaagccaattgctccaaacttttccgcgccactgccatttggacctttcagcacactgttcgagaatagtcctacgtctgcccacgcattctggggcggtagtgtagtcagcagtcagtcgaccccagaaagtatgctgtctggcaagtctagttatctccccaattcagatccactccatcagtccgacacgtcgaaggctcccgggttccgtccacctctgcagaggccagcaccctcacctagtggaatcgtaaatatggattccccttatggtagtgtcactccctcctcaactcacctcggtaatttcgcatcaaacatttcaggaggacagatgtatgggcctggagctccattgggcggtgcacctgcagcagctaactttaatcgacaacatttttcccctctgtccctcctgacaccctgctctagcgccagcaatgattcctctgcacagtcagtatcctcaggggtgcgggccccatcccccgccccaagctctgttcccctgggttccgaaaagccttctaacgtgtcacaggaccgtaaggtccctgtgcccatcggaacagagaggagtgccagaatccgccaaacagggaccagcgcaccctccgtgatcgggtccaacttatctaccagtgtcgggcactctggcatttggtccttcgaaggaataggggggaatcaggataaagtggattggtgtaacccgggcatggggaaccccatgatacacagacctatgagtgaccccggcgtctttagccaacaccaagcaatggagagggactcaactgggatcgttacacccagtgggacgttccaccaacacgttcccgccggctacatggattttccaaaggtcggagggatgcccttcagcgtctacggtaatgccatgatcccacccgtggcgcccattccagatggcgccggtgggcctatctttaacggccctcatgcagctgacccctcgtggaacagcctgataaagatggtcagcagctctaccgagaacaatggcccacaaaccgtgtggacgggcccttgggcgccacacatgaattctgtccacatgaaccagcttggatag

SEQ ID NO: 14574 - DNA, 1374 bp, synthetic construct
  source 1..1374: mol_type = other DNA; note = Synthetic coding sequence
atgagcggaactagagccagcaacgacaggccacccggggcaggtggagtgaagcgcggacgtctgcagcaggaggccgctgccacgggctcacgggttacagtggtcctcggagcccagtggggagacgaaggcaaaggcaaagtcgtcgaccttctggcaaccgatgctgatatcatcagccgctgccaagggggaaacaacgccgggcacacggtagttgtcgacggcaaggagtacgatttccacctgttacccagcgggatcatcaatactaaggcagtgagcttcatcggaaatggggtggtcattcacctcccaggccttttcgaagaagcggagaagaacgaaaagaagggcctgaaggactgggagaaaaggcttatcatctcagatagggctcacttggtgtttgactttcatcaggcagttgatggcctgcaggaagttcagaggcaggcccaggagggcaaaaatataggcactacaaagaagggaatcggacccacctattcttccaaagcggccaggaccggcctcaggatttgtgatctgctgtctgactttgacgaattttcatctagatttaaaaacctcgcacatcagcatcagagcatgtttcccaccctggaaatcgacatcgaggggcagctgaagagactgaaggggttcgcagagcgtatccgcccaatggtgcgggacggcgtgtacttcatgtatgaggctctgcatggccctcccaaaaaaatcctggttgaaggcgccaacgctgcattactggatattgatttcggcacctacccattcgttacgtcctccaactgtactgtgggcggagtgtgtaccggcctcggtataccaccccagaacattggcgacgtctatggggttgtaaaagcatatacgaccagggtgggtatcggtgcctttccaactgagcagatcaatgaaataggcggcctgctgcagactcgggggcacgagtggggggttaccactggacgtaaaagacggtgcggctggctagatctgatgattctgcggtacgcacatatggtaaatggttttacagcccttgctctgacgaagctagacatcctggacgttctaggcgaggtgaaggtgggagttagctacaagctgaatggaaagcgaataccatacttcccagcaaatcaggaaatgttgcaaaaggtggaagtcgaatatgaaaccctacctgggtggaaggctgacactacaggagcgcgcaggtgggaagacctgccacctcaggctcagaactacattcgatttgtggagaatcacgtaggggtggccgtcaagtgggtgggagttggaaagtcgcgagaatctatgattcagcttttctag

SEQ ID NO: 14575 - DNA, 1596 bp, synthetic construct
  source 1..1596: mol_type = other DNA; note = Synthetic coding sequence
atgtgctccctggcctcgggagcaacgggcggtcggggggccgtggaaaacgaggaggaccttccggaattaagcgacagcggtgacgaggcggcctgggaggatgaagatgacgcagatctgcctcacggaaagcaacagacgccttgtcttttctgtaataggttgtttactagtgcggaagagaccttcagccattgtaagagcgagcaccaattcaatatcgacagtatggtgcacaagcatgggttagagttttacggttatataaaactcattaactttattaggctcaaaaacccaactgttgagtatatgaatagtatatacaatccagtgccatgggagaaggaggaatacttaaaacccgtcttagaggatgatctgctgctgcagttcgacgtggaagatctttatgagcccgtcagcgtgcccttctcttacccaaacggcttgtcagaaaatacctctgtggttgaaaagttgaagcacatggaggcaagggcattgagtgctgaggcagccctggcccgcgctagggaagacctgcagaagatgaagcagttcgcccaggatttcgtgatgcacaccgatgttcgcacttgctcaagtagcacctcagttatcgcagacctgcaggaggatgaagatggtgtgtacttttcctcctatgggcactacgggatccacgaggagatgctcaaagacaagattagaacagaaagttaccgagactttatctatcaaaacccacacatctttaaagacaaggtggtgcttgacgtggggtgcggaaccggaatcctctcgatgttcgcagcaaaggccggcgccaagaaggtgttgggagttgatcaatccgaaatcctgtaccaggccatggatatcattagactgaataaactggaagatacgatcacgctgataaagggaaagatcgaagaggtccacctgccagttgagaaggtagacgtgatcatttccgaatggatggggtacttcctgcttttcgagtcaatgctggacagtgttctgtacgcaaaaaacaagtaccttgcgaaggggggaagcgtctatcccgacatttgtactatttccttagtagctgtgagcgatgtgaataaacacgccgacagaattgcattctgggacgacgtttatggcttcaaaatgtcctgcatgaaaaaggccgtgatccctgaggctgttgtcgaagtgctagacccaaaaaccttgatcagcgagccatgcggaatcaagcacatcgactgtcacactacctccattagcgatctggagttctcatccgacttcactctgaaaatcacacgtacttccatgtgcaccgccatagcagggtacttcgacatctattttgaaaaaaactgccacaaccgggttgttttttctactgggcctcaatcaaccaaaacacactggaagcaaactgtatttctcctggagaagcccttctccgtcaaggccggagaagccctcaaaggaaaggtaaccgtgcacaagtcaaaaaaggatccgcgttctcttaccgtgacactgaccctgaataacagtactcagacgtacggactccagtag

SEQ ID NO: 14576 - DNA, 1659 bp, synthetic construct
  source 1..1659: mol_type = other DNA; note = Synthetic coding sequence
atgtccgtactaagtccgggggatctcaagcctaaacggggttctccacataggggatccctagacagaactgatgcatccacagatctcgccatgcgcagctggccttccgagctcggatcacgcacctgttcaacatctgcgactactaccgctccctctaactcaactcctatcgctagacaccccggccgcaccaagggatataatagcgacgataacctgtgcgagccatccctggagtttgaggtacctaatcacaggcagtacgtctctaggccctcctccctggaaagctcgaggaacacctcctccaattcatcaccactgaacttgaagggcagtagtgagcagctccacggccggagtgaaagctttagctccgaagacctaatcccctcacgcgatctggccacgctgccaagggaggcatctacgccaggccggaatgctctcggacggcacgaataccccctgcctaggaacggcccgctgccccaggaaggggcccagaaacgcgggaccgcaccaccatacgtgggcgtgaggccctgctcagcaagtccgagctcagaaatggtgacgctggaggagttcttggaggagtcaaacagaagctctcctactcatgacacccccagctgccgggacgacctcttgagtgactacttcaggaaggcatcagacccccccgccataggcggccagcctgggcccccagctaaaaaggaaggagctaaaatgcccaccaacttcgttgcccccacagttaaaatggctgccccaaccagcgaaggtcgcccgctcaaacccggtcagtacgtgaagccaaattttaggcttactgaggcagaggctcctccgtccgtcgccccacggcaggcacagcccccgcagagcctatccctgggcaggccacgacaggctcccgtcccaccagcatcccacgctcccgcatctcgctccgctagcctcagtagggccttttctctagcctccgctgatctgcttcgggccagtgggcccgaagcatgtaaacaggagagtccacagaaacttggcgcaccggaggccctgggtggacgggaaactgggtcacatacacttcagtctccagccccgccgagctcccactcgctcgcccgggagcgcaccccgcttgtagggaaggccgggtcaagctgtcaggggccaggaccccgctcacgaccactagacacccgtagattctccctcgcgccacccaaggaagagaggcttgctcccctgcatcagtcggctactgccccggccattgcgaccgctggcgctggggccgccgcggctggttccggatccaattctcaacttctgcatttctccccagctgctgcgccagcagccagaaccaaaccaaaagctccgcccaggtctggtgaagtcgctaccataactccagtccgcgccggactatccctgtcagagggggatggggtccccggtcagggttgttccgagggcctgcccgctaagtcacctggacgttctccagatctagcccctcaccttggccgggcccttgaagattgctctagagggtcagtatccaaatcgagtccagcttcgccagaaccgggaggagacccccagactgtttggtacgaatatggttgcgtgtag

SEQ ID NO: 14577 - DNA, 774 bp, synthetic construct
  source 1..774: mol_type = other DNA; note = Synthetic coding sequence
atggccgataagatggacatgagcctcgatgacattatcaagcttaataggtcgcaaaggggaggcagaggaggtggccggggtagaggtagagcaggcagccagggtggccggggcggtggagcacaggccgccgctagggtgaataggggaggaggaccaatacggaacaggccagctattgccaggggagccgcaggtggggggggaaggaacaggcccgccccctacagtaggccaaaacaactgcccgacaagtggcagcatgacctgttcgacagtggcttcggggggggagcaggcgttgagacgggcggaaagcttttggtgagcaatctggattttggagtgtctgacgccgacatccaggaactcttcgccgagtttggcactttgaagaaggctgccgtgcactatgaccggtctggccggagcctgggaactgcggacgtacacttcgaaagaaaggctgacgctttgaaagcaatgaagcagtacaacggtgtgcccctggacgggcggccaatgaacattcagctggtgaccagtcagattgacgcccagagaagacctgcacaatcagtaaatcgaggagggatgactagaaacagaggtgcaggaggctttggcggaggaggcgggaccaggcggggcacacgcggaggcgctcgcggtcggggacggggcgctgggcgcaactcaaagcagcagcttagcgcggaggagctggatgctcaactcgacgcatacaacgcccgaatggacacaagctag

SEQ ID NO: 14578 - DNA, 876 bp, synthetic construct
  source 1..876: mol_type = other DNA; note = Synthetic coding sequence
atgggggtggccgcacgtcctccagctctgaggcattggttcagccattccatcccactggccattttcgctctgcttctgctgtacctgtcagtgcggtccttgggtgcacgcagcggctgtggacccagagcacagccgtgtgtccctggtgagaccgccccatttcaggttcgccaggaaagcgggacattggaggccccggaacggaagcagccaccctgtctaggcccccgggggatgttgggacggatgatgcgacgctttcacgcctccttaaaacctgaaggggatgtcggtctctccccatatctggccggatggagggccttagtcgaatttctgactcccctggggtccgtgttcgccttcgccacacgggaggcttttacaaaggtgactgatttggaggcgagggtccacggtcccgacgccgaacattattggtctctggtggcaatggccgcctgggagagacgcgctggactcctagagcaaccaggagccgccccacgcgatcctacaaggagctctggatcacggactctgctgctgctgcaccgcgctctgcggtggtctcagctctgccttcaccgggtagctacaggggccttgggcggacccgacgcaggggtccagtgctccgacgcttacagggcggccctgggcccccaccatccatggctggtgaggcaaaccgcccgactggctttcctggcatttccgggccggcgtagactgctggaactggcttgccctggcgcgacagaagcagaggcccgagctgcgctggtgcgcgccgccggcacactggaggatgtttataaccggactcaatccctgcttgccgagcgcgggctgctacagctggcatag

SEQ ID NO: 14579 - DNA, 3303 bp, synthetic construct
  source 1..3303: mol_type = other DNA; note = Synthetic coding sequence
atgggcaacgctgcgggcagtgctgaacaacctgccggaccggccgccccaccaccaaagcagccagccccccctaagcaacccatgcccgccgctggagagctggaggagaggttcaatcgtgccttaaactgtatgaatctaccgcctgataaggtgcaactcctgtcacagtatgacaacgagaagaaatgggagctgatttgtgaccaggaacggtttcaggtcaagaatcccccagcggcttatatccagaaacttaaaagttacgtggacacgggaggggtttcgagaaaggtagccgccgattggatgtctaatttaggatttaaaagaagggtccaggagtctacccaggtcctgagagagttggaaacaagtctcaggacaaatcatattggctgggttcaggaattcctgaatgaagaaaacagaggtttagatgtcctactagagtacctagctttcgctcagtgttccgtgacttacgacatggagtctactgacaacggagccagtaacagcgagaagaacaagcctctggaacagtccgtggaggatttgagcaaaggacctccgagcagcgtgcctaagagccgtcacctgaccatcaaacttactcctgcccacagccgcaaggccctaagaaacagccggatcgtgagccagaaagacgacgtgcatgtgtgcataatgtgtttgcgagccatcatgaactaccagtccgggttttcactggtgatgaaccatcccgcatgtgtcaatgagattgcactcagcctgaacaacaagaatccaaggaccaaggccctggtgctcgaacttcttgctgccgtctgtctcgtgagaggaggccacgacattatcctggcagcttttgacaactttaaggaggtttgcggagaacaacatagattcgagaagctcatggagtatttccggaatgaggacagcaacatcgacttcatggttgcatgtatgcagttcatcaacattgtggtgcatagtgtcgagaacatgaacttcagggtgtttcttcagtatgaatttactcacctggggcttgacctttacctggaaagacttagactgactgagagtgataaactgcaggttcagattcaagcttatctggacaacatattcgacgtcggggcgttgctcgaggacacggagacaaaaaatgcggttctggaacacatggaggaacttcaagaacaagtggccctcttgaccgagagactgagggatgctgaaaacgaatccatggccaaaatcgctgagctggagaagcagctgagccaggccaggaaggagctggagaccttaagagagcgttttagcgaatccacggccatgggcccatcacgcagacctccagaacccgaaaaagcgcccccagcagcgccaaccagacctagtgccctcgagctgaaggttgaggaactggaagaaaagggtctcatacgcatactgcgaggccccggtgatgccgtttcaatcgagatcctccctgtcgccgtggccacgccatccggtggtgacgcccctactcctggagtgccaactggttctccatcacctgacctagctcctgcagcagagccggcccctggtgcagcaccccccccacctcctccactccctggccttcctagcccccaggaggccccacctagtgccccccctcaggctccgcctcttcctggtagccccgaacctcctcctgcgccccccctccctggggacctgcctccacctccacctcctcctcctcctcccccaggcaccgacggcccagtgccaccgccccccccgccgccccctcccccaccaggcgggcctccagacgccctcggccggagggactctgaattgggcccaggggttaaggccaagaagccaattcaaacaaaatttcgcatgcccctgttgaactgggtcgcactgaaaccatcacagattaccggaactgtgttcaccgagttaaatgacgagaaagtgctgcaggagctggacatgtccgacttcgaggaacagtttaagaccaagtctcagggtccatcgctggatctcagtgctctcaagagcaaggcagcgcagaaggctccctcaaaagccactctaatcgaggccaatcgcgcgaagaacctcgctatcactctgagaaaagggaatttgggtgccgaaagaatatgccaggcaattgaagcctatgatctacaggcacttggccttgattttctcgagctgttgatgcgttttctgcccacagaatacgagagaagcctgattactaggtttgagcgagaacagcggccaatggaagagctgtctgaggaggatagattcatgctctgtttctcgcgaattccccgtttgcccgaacgaatgacgacgttgactttcctcggcaattttcctgacaccgcccaactattgatgccccagctcaacgcaatcattgctgctagcatgtctattaaaagttctgataagctccggcaaatcctggagattgtgttagccttcggcaattacatgaatagttcaaaacgtggggccgcttatgggtttaggctgcagtcgttggatgctctcctagagatgaaaagcactgaccggaagcagaccctgttgcactacctcgtgaaggtgattgccgaaaagtaccctcagctgaccgggttccactcagatttgcactttctcgataaggctggatcggtttccctggactcagtgttggccgatgttagaagcctccagcgtgggctcgaactcacccagcgggagtttgtacgtcaggacgactgcatggtcttgaaagagtttttacgggccaatagtccaaccatggacaaacttcttgccgattccaagacagctcaggaagcattcgagtccgtggtcgagtacttcggggaaaaccccaaaacaaccagcccagggttgtttttctctcttttcagccgcttcataaaggcctataaaaaggcagaacaggaggtggaacaatggaagaaggaggcagccgcgcaggaagccggagcagatacccccggtaaaggcgaaccacccgcccctaagtccccaccaaaagcaaggagaccccagatggatctgatttctgagctgaagcgacgtcagcagaaagagccccttatctatgagtccgatagggacggcgcaattgaagacataatcacagtcatcaaaacagtgccctttactgcaagaaccgggaagcgaacctcacgtttgctgtgcgaagcctcactaggcgaagaaatgccattgtag

SEQ ID NO: 14580 - DNA, 1839 bp, synthetic construct
  source 1..1839: mol_type = other DNA; note = Synthetic coding sequence
atggaaaaccagctagccaagagcacagaggaaaggacattccagtaccaagattcactgccatctttgcctgtgcctagcttggaagaatcgctgaagaagtatctagagtccgttaagccctttgccaatcaagaggaatataaaaagaccgaggaaatcgtacagaagtttcagagcggaatcggcgaaaagctccaccagaagctgctcgagcgtgcaaaggggaaacgaaattggctcgaggagtggtggctcaacgtggcatatttggatgttcggattccaagccaactgaacgtcaatttcgccggaccggcagcacattttgagcactattggcctcccaaggaggggacgcaactggaaagaggctccatcaccctgtggcataaccttaactattggcagctactgagaaaggagaaggtgcccgttcataaggtgggaaatacacccctggatatgaaccaatttaggatgctgttttcaacatgcaaagtccccgggatcacaagggactctatcatgaactacttccgtacggagagcgaagggcgttcgcctaatcacatcgtggttctctgtaggggacgagccttcgtattcgacgtgatccatgagggatgccttgtcacccccccagagttgctccggcagctgacttacatccataaaaaatgtcacagtgaacccgatggccctggcatcgcagctctgactagtgaggaacgtacccgatgggctaaggcccgggagtatctgataggactggaccccgagaacctagctctgctggagaaaatccagtcctcacttctggtctactcaatggaggattcttccccccacgttacaccagaggactattccgagataatcgctgctattctgattggcgatcctactgtgcggtggggagataagtcatataatcttatctccttctccaatggagtgtttggctgcaactgcgatcacgcaccctttgatgctatgatcatggtcaatattagttattatgtggacgagaaaatcttccaaaatgaggggagatggaagggctccgagaaggtccgcgatatccctctgcccgaagagctgatttttatcgtcgacgagaaggtcctcaacgacatcaaccaggctaaagcccagtacctgcgggaagcctcggatctgcagatcgccgcatatgctttcactagtttcggcaaaaaactcactaagaataaaatgttacaccctgacacatttatccagctggctctgcagctggcgtactaccgattgcacggccaccctgggtgctgttatgaaacagctatgaccagacacttctaccatgggcggacagagactatgagaagctgcaccgtggaggccgttagatggtgccagtccatgcaagaccccagcgtgaatctgagggagcgccaacagaagatgctgcaagctttcgctaagcataacaagatgatgaaggattgctctgccggcaagggcttcgaccgccatctgttgggactcctactgatcgccaaggaagaggggctcccagtcccagagctctttaccgaccctctgttttcaaagagcggtggaggcggcaacttcgtgctgtcaacctccctagtgggttatcttagagttcagggggtggttgtgcccatggtgcacaacggatatggcttcttttaccatatccgggatgacagattcgtcgttgcttgttccgcgtggaaatcgtgtccggagaccgatgccgagaagcttgtgcagctgactttctgtgcgttccatgatatgattcagttaatgaattccactcacttatag

SEQ ID NO: 14581 - DNA, 1773 bp, synthetic construct
  source 1..1773: mol_type = other DNA; note = Synthetic coding sequence
atgagtgattcccctgcaggaagtaacccaaggacacctgagagctcaggcagtggcagcggaggaggaggtaagcgccccgccgtgccagcggctgtgtccctgttaccacccgcagaccctctgagacaagcaaaccggttaccgatccgtgtcttgaaaatgctgtctgctcacaccgggcatttattgcacccagaatatcttcagcccttatcgtctactcccgttagccctattgagctggatgccaaaaaatctcccctggctcttctggcccagacttgttctcagatcgggaagcctgacccaccaccatcgagcaagctgaactccgtggccgcagctgcgaacggcctgggcgcagagaaagatcctggtcgctcagctccaggcgccgctagcgctgccgccgctttgaaacaacttggagatagccctgccgaggataagtcctcttttaaaccttacagcaagggctccgggggcggcgactcgcgaaaggactctgggtcatccagtgtgagttctaccagctcctcttcctcgagtagccccggggacaaggcaggtttccgggtaccgagtgccgcctgcccccccttcccgccccacggagcccccgtgagcgccagctctagttcatcctctcccggagggtcacgaggcggctcgccacatcactccgactgcaagaatggcgggggcgtggggggcggcgagctggataagaaggatcaagaacctaaaccatcaccagagccggcggcagtaagcagaggcggcggcggagagccaggggctcatggaggggccgaaagcggcgcaagcgggcggaagtctgaaccgccctccgctctcgtcggcgctggccatgttgccccagttagtccttataagcctggtcactccgtgttccctctcccccctagctcaattgggtatcatggatccatcgttggggcctatgccggctatccatctcaatttgttccaggtctggatccatcgaagtctggacttgtgggtggccagctttcgggcggactcgggctcccacctgggaaaccgccatctagcagtccgctcactggcgcttctccaccatcatttctccaggggctgtgtagagacccctactgcctgggcggatatcacggagcgagccacctgggcggctccagctgtagcacctgcagtgcgcacgaccccgctgggccatccctaaaagctggaggttacccccttgtctatcccggacatccccttcaacccgccgccttgtcaagcagcgctgcacaggcagctctgccaggacaccctctctacacgtatggcttcatgctgcagaatgaacccctgcctcatagctgtaactgggtggctgccagcgggccatgtgataaacggttcgctaccagtgaggagctgctctcccatttgaggacccacaccgctctgcctggagcagagaaactccttgctgcatatcctggagcaagcggtctgggatccgcagcagcggcagctgctgctgcggccagttgccacctacaccttccgccccccgcagctccaggtagcccaggttccctgtctctaaggaaccctcacactctgggcttatctaggtaccatccgtacgggaagtcccatctaagtaccgccggtggattagccgtccccagcttgccgaccgccggaccctattactctccttatgcactgtacggtcagcgcttggcatctgcgtccgccctaggatatcaatag

SEQ ID NO: 14582 - DNA, 1020 bp, synthetic construct
  source 1..1020: mol_type = other DNA; note = Synthetic coding sequence
atgtggaccgcaaggggaccctttagacgcgatcgctggtcttccgaggatgaagaggccgcaggcccgagccaggcactctccccgctgctcagcgatacccgaaagattgtaagcgaaggagaacttgatcagcttgcccagattcgaccacttatctttaacttccatgaacagaccgccatcaaggattgcttgaagatcctcgaggagaagacagcagcctatgacatcatgcaagagttcatggctttagagttgaagaacctgccgggagaatttaattcagggaatcagccctctaatcgggaaaagaaccggtaccgcgatatacttccatatgattctacccgggtacccctgggtaagtccaaagattacatcaatgcctcgtacattaggattgtgaactgtggagaagagtacttttatatagccacccaggggccactgttgtctactatagacgacttctggcagatggtgcttgagaataattctaacgtgatcgcgatgattaccagggagatagaaggcggcataatcaagtgttatcattattggcctatctccctgaagaaaccccttgaattaaagcatttccgggtgtttcttgaaaactatcagatacttcaatactttattattaggatgtttcaggttgtggagaagtccaccggaacatctcatagcgttaagcagctccaattcacgaaatggccagaccacggtacccccgcctccgctgactcgtttatcaagtatatccgctatgctcggaaatctcatctaactggccccatggttgtgcactgcagcgcaggcatcggccgcacaggagtgttcctctgtgtggatgtcgttttctgcgcgatcgtgaagaattgctcatttaatattatggacatcgttgcccagatgcgcgagcagaggtcaggcatggtgcagactaaggaacagtaccatttctgctatgacatcgtcctcgaggtactgagaaagttgttgaccctggattag

SEQ ID NO: 14583 - DNA, 1917 bp, synthetic construct
  source 1..1917: mol_type = other DNA; note = Synthetic coding sequence
atgagtgcattggcaggggaggacgtatggagatgtcccggttgtggagatcacatcgcaccaagccagatctggtacaggacggtcaacgagacttggcacggatcctgcttcagatgctccgaatgccaggatagcctgaccaattggtactatgagaaagatgggaaactctactgccccaaggactactggggaaaatttggcgaattttgccacgggtgctcccttctaatgaccgggcccttcatggtagctggagaatttaagtatcaccccgagtgtttcgcctgtatgtcgtgcaaggttattatagaagatggagatgcttacgccttggtgcaacacgcaactctctactgtgggaaatgccataacgaggtggtactagctccaatgttcgagcgcctgagcaccgagtccgtccaagagcagttaccctactccgtgaccctgatctctatgccagcaacaacagaagggcgtcgaggtttctccgtctctgtagagtcagcttgcagtaactacgccaccacggtccaggtcaaagaggttaaccggatgcatatctcccccaataacagaaatgccattcacccaggagatcgtattcttgaaattaatggcacgcctgtacggaccttacgtgtggaagaagtagaggatgccataagccagacttcacagaccctgcagctgctcattgagcatgacccggtcagccaacgcctcgaccaacttagactggaggcacgacttgcccctcacatgcagaatgccggccaccctcacgcactttccaccctcgatactaaggagaacctggagggaaccttgcgtcggcggagtctgagacggagtaactccatttccaagagtcctggccccagcagtcccaaagagccgctcctgttctcccgggatatttccagatcggaaagtctgagatgcagttcatcttatagtcagcagatcttcagaccatgcgatttaatccatggtgaagtactcggaaagggctttttcgggcaggccattaaggtcacccataaagcgaccgggaaggtgatggtaatgaaggaactgattcggtgcgacgaggagactcagaagacgtttctcactgaagtcaaagtgatgaggtccctcgatcatccaaacgttctgaaattcatcggcgtcctttacaaggataaaaagctgaacttgttgactgagtatattgaaggagggactctgaaggactttcttcgtagcatggaccccttcccatggcagcagaaggttagatttgcaaaagggattgcctctggaatggcatacctccattcaatgtgtattattcatcgggatctgaatagccacaactgtttgatcaagctggacaaaactgtagttgtggccgactttggcctatcacgtctgatagtggaggaacgaaaaagggcacctatggaaaaggccaccacaaaaaaacgcacactgcgcaagaatgacaggaagaagagatacactgtcgtggggaatccatattggatggctcctgagatgttgaacggtaaaagttatgatgaaactgtcgacatctttagcttcgggatcgtcttatgcgaaataatcgggcaagtgtatgcagatcccgactgtctgcctaggacactcgatttcggacttaatgttaagcttttctgggagaaatttgtgccaacagactgtccacctgccttctttcccttggccgccatctgctgcaggctggagccagagtcccgccccgctttttccaaactcgaggattcattcgaagcacttagcctgtaccttggcgaactgggaatccctctgcctgccgagctggaggaacttgaccacactgtgtctatgcaatatggtctgactcgggactccccaccctag

SEQ ID NO: 14584 - DNA, 606 bp, synthetic construct
  source 1..606: mol_type = other DNA; note = Synthetic coding sequence
atggctgccgccaaagacactcacgaagatcacgacacttcaacagaaaataccgatgaaagtaaccacgacccacaatttgaaccaatcgtgagccttcctgaacaggaaatcaagacattagaagaggacgaggaagagctatttaagatgagagccaagctgttcagattcgcctctgaaaatgatctccccgaatggaaagaacgcggaacaggagatgtgaagctgctcaaacataaagagaaaggcgcaatccgccttctgatgagaagagacaaaacactcaagatctgtgctaaccactatattactcccatgatggaattaaaacctaacgccggcagcgatcgggcttgggtgtggaacacccatgcggatttcgctgacgaatgtcccaagcccgagttgctcgcaattcgctttctaaacgctgagaacgcgcagaaatttaagacaaaattcgaggaatgtcgcaaagaaatcgaagagcgcgagaagaaggctgggagcggaaagaacgaccacgccgagaaagttgccgagaaactagaggcactttcagtgaaagaagaaactaaagaggatgccgaagagaaacagtag

SEQ ID NO: 14585 - DNA, 2154 bp, synthetic construct
  source 1..2154: mol_type = other DNA; note = Synthetic coding sequence
atggcagctgataagcccgccgaccagggggcagagaaacatgaagggactggacaaagctcgggaatcaccgaccaggagaaagaactctccaccaacgctttccaggcgtttacaagcggcaactacgacgcttgccttcagcacctggcctgcctccaggacattaacaaagacgactataagatcattctgaacacagccgtggcagagttttttaagtcaaatcaaactaccaccgacaatttacgccaaaccctgaatcagctcaaaaaccaggtgcacagcgccgttgaagaaatggacggccttgatgacgtcgagaattccatgctgtactataatcaggcagttattctgtatcaccttaggcaatatacagaagctatctccgtcggcgagaagctttaccagtttatagaacctttcgaggagaaattcgctcaggctgtgtgttttcttctcgtggacctgtatatccttacatatcaggcagagaaggcactccacttactcgcagttttagaaaagatgatttctcaggggaataataataagaacgggaaaaacgagaccggcaacaacaataacaaggacggctcaaatcataaggctgaatcaggcgccttaatcgaagccgcaaaatcgaaaatccatcaatataaagtgcgcgcttacatacagatgaaaagcctcaaggcctgcaagagagagatcaagagcgtgatgaacactgcggggaatagcgccccaagcctgtttttaaagtcgaatttcgagtacttgagaggcaactaccgcaaagcagttaaactgctgaactcttccaatattgccgaacatcctggcttcatgaagactggggagtgcctgagatgtatgttttggaacaatctcggctgtattcatttcgctatgtcaaagcacaaccttgggatcttttacttcaagaaggcgctgcaggagaatgataatgtttgcgcacaacttagtgcgggctccaccgacccggggaagaagtttagtggaaggcctatgtgcaccctattgaccaataaaaggtacgaacttctgtacaactgcggaatccagctgctccacatcggtagaccccttgcagcatttgaatgcctgatcgaggctgtgcaggtgtatcacgccaaccctcgcctgtggctccgcctcgcagaatgctgtatcgctgccaataagggaacgagcgaacaggagaccaagggcttgccttccaagaagggaatcgtgcagtcgatcgtgggtcagggataccatagaaagattgtactagcctctcaaagtattcaaaatacagtctataacgacggtcagtcttccgccatccccgtggctagtatggagttcgcagccatctgtctccgcaacgcactactcctgctccccgaagaacagcaggatccaaagcaggagaacggcgcgaagaacagcaaccagttggggggcaatacggagtcaagcgagagtagtgaaacctgccggtgttccattctggcatgctccgcctatgtggcactcgccttgggcgataacctgatggctcttaaccatgccgacaagctgctccaacagccaaagttatcaggcagcctgaagttcctggggcacctttacgcagctgaggccctgatcagcctggatcgaatttcagacgccatcacccacttgaatcccgaaaacgtgacggatgtgtccctcgggatctcatccaacgagcaggaccaggggagcgacaaaggggagaatgaggcaatggagagcagcgggaagcgagcaccccagtgctacccatcttcggtgaactcagctaggacagttatgctgttcaaccttgggtcagcatattgcctgagatccgaatatgataaggcgcggaaatgcctgcaccaggctgcctccatgatccaccccaaggaggtgccccccgaggctatcctcctggcagtctacctagaactccagaatggtaatactcagctggccctccagattatcaagaggaatcaactactgcccgcagtcaagacccactctgaagtacgcaagaaacctgtgttccagcctgtccaccccatccagcctatacagatgcctgcttttacgaccgtgcagcggaagtag

SEQ ID NO: 14586 - DNA, 1488 bp, synthetic construct
  source 1..1488: mol_type = other DNA; note = Synthetic coding sequence
atggaggcccttttggagggtatccaaaaccggggacacggcggaggttttcttacatcctgcgaggctgaattgcaggagcttatgaagcagattgacatcatggttgctcacaaaaaaagtgaatgggaaggccggacacacgctcttgagacctgtctgaagattcgggagcaggagctgaaatctctcaggagtcagctcgatgtgacccataaagaggtggggatgctccaccagcaggtggaggaacacgaaaagatcaaacaggagatgaccatggaatataagcaagagctcaaaaaactacacgaggaactttgcatcttaaagcgttcctacgagaagcttcagaaaaagcagatgcgtgagtttagaggcaatacaaagaaccacagagaagatcggtccgagattgaaagactgacggctaaaatcgaggaatttagacagaagtcactggactgggagaagcaaaggctcatctaccagcagcaggtctccagtctcgaagcccagcggaaagcactagcagagcagtccgagatcattcaggcacagctggtcaacagaaagcaaaagctcgagagcgtcgagttgagcagtcaaagcgagattcaacacttgagctccaagcttgaaagggccaacgatacgatctgtgccaacgaactcgagatcgaaagacttactatgagagtcaacgacctggtgggtacctctatgaccgtgctccaggagcagcaacagaaggaggagaaattgcgcgaatcagagaagctcctagaggccctacaggaggagaagcgcgagctcaaggctgctctacagagccaggaaaatctgatccacgaggcacgaattcagaaggaaaaactgcaggaaaaggtgaaagctaccaatactcagcatgccgtagaggcaatcagcctggagtcagtctctgccacgtgcaaacagctgtcccaagagttgatggaaaagtatgaagagctgaaacgaatggaggcccacaataacgaatacaaagccgagatcaagaaacttaaggaacagattctccaaggcgagcagtcttactcttccgcgctagaggggatgaagatggagatatcacaccttacccaggaactgcatcagcgcgacatcaccatcgcgagcactaagggtagctctagtgacatggagaagcgcctccgggccgagatgcagaaggcggaggacaaagcagtcgaacataaggaaatacttgaccaattagagagcctgaagttggaaaaccgccatctttctgaaatggtcatgaagcttgaacttggcctccacgagtgtagcttgccagtctcacccctaggcagcatcgctacacgatttcttgaagaggaggaattacgaagtcaccatattttagagcgtttagacgcacacatcgaagaactcaaacgagaatccgaaaaaaccgttcgccagttcaccgccctcaaatag

SEQ ID NO: 14587 - DNA, 1962 bp, synthetic construct
  source 1..1962: mol_type = other DNA; note = Synthetic coding sequence
atgattccacctcaggaggcaagtgcccggaggagagaaattgaagataaattgaagcaggaagaggaaacactgtcttttattagagattctttggagaaatccgaccagctgaccaagaacatggtgtctatcctgtcgagcttcgaaagccgccttatgaagttggaaaactctatcatcccagtccacaaacagacagaaaacctgcaaaggttgcaggagaacgtggagaaaaccctgtcttgtctggaccacgtaatctcatactaccacgtggcctctgatacagagaaaataatcagggagggacccaccgggcgcctcgaggaatacctgggcagtatggcaaagatacagaaggccgtagagtattttcaggataattccccggactccccagagctcaacaaagtcaaactcttgtttgaacgggggaaagaagcgctagagtccgagttcagaagcctgatgacgagacattccaaagttgtatcaccagtgttgatactggacctaatctctggagatgacgatctcgaggcacaggaggacgtgaccttggaacacctccctgagtcagtcctgcaagacgtgattagaatcagccgatggctcgtcgagtatggacgcaatcaagacttcatgaatgtctattatcaaattcgcagctcacagctagataggtcgatcaagggcctaaaagaacactttcacaagtcgagctcctctagcggcgtaccctactctccagctattccaaataaacggaaagacacccctactaagaaaccggtaaaacggccaggaagggatgacatgctggatgttgagacggatgcatacattcattgcgtcagcgcctttgtgaagttagctcagtcagaataccagctcttggccgacatcatccccgagcaccaccagaaaaagacttttgattctctcattcaagacgctttagatggtttgatgctggagggcgagaatatagtctcagcggcacgcaaagcaattgtccggcatgacttcagcaccgtgttgaccgtttttcctatcctacgtcacttgaaacagactaagccagaatttgatcaagtgttgcagggaacagccgcatctaccaagaataaactgcctgggttaatcactagcatggagacaataggtgcaaaagccttagaggactttgcagataacattaagaatgatcccgataaggagtataatatgccaaaagatggcacagttcacgagctgacttccaatgctatcctctttctgcagcaactcttggactttcaggagacagcaggtgcaatgctagcctctcaggagacgtctagctccgccacctcatattcttctgaattctccaaacgactcctctcaacgtacatttgtaaagtcctgggcaaccttcaactgaacctactatcgaagagtaaggtgtacgaggacccggccttatctgcaattttccttcataataactacaattatatcttgaagtcgcttgaaaaatctgaacttattcagttggtcgccgtcacccagaaaacagccgagcgcagttatcgagagcatatagagcaacagatccagacgtaccagcgcagctggttaaaagtcacagattatatcgcagaaaaaaatctgccggtgttccaacccggagtgaaattgagagataaagagaggcaaatcatcaaggagagatttaagggtttcaacgacggactcgaggaactatgtaaaatccagaaagcttgggccatcccagacaccgagcagcgggaccgcatccggcaagctcagaagaccatcgtcaaggagacatatggagccttcctccagaaattcgggagcgttccgtttacgaagaatcctgagaagtatattaaatatggggttgaacaggtgggcgacatgatcgatcggctgtttgacacaagcgcctag

SEQ ID NO: 14588 - DNA, 735 bp, synthetic construct
  source 1..735: mol_type = other DNA; note = Synthetic coding sequence
atggaacttactatcttcatcctcagattggctatttacattctgacattccctttatacctgctgaatttccttgggttgtggtcatggatatgcaagaagtggtttccgtactttctggtgcggttcaccgttatttacaacgagcaaatggcatcaaaaaagagagaactgttttctaacctccaggagtttgccgggccctccggtaaactttcactcctggaggtggggtgtggaacgggtgctaattttaagttttaccccccagggtgccgggtgacttgtatcgacccaaacccaaatttcgaaaagttcctgattaagtcgatagctgagaacaggcatttgcagtttgagcgatttgtggtggccgctggagagaatatgcatcaggttgctgacggttccgttgatgtcgtggtgtgcaccttggtactttgttctgttaaaaaccaggaacggatcctgcgggaagtgtgcagagtgctccgcccaggtggggcgttctacttcatggaacatgtagctgcagaatgctctacatggaactatttctggcagcaggttctcgatccagcatggcacctgctttttgacgggtgcaacttgacaagggaatcctggaaagccctggaaagagcatctttcagcaaactgaagctgcagcatatacaggcacctctctcttgggaattggtacgcccccacatatacggctacgctgttaagtag

SEQ ID NO: 14589 - DNA, 3522 bp, synthetic construct
  source 1..3522: mol_type = other DNA; note = Synthetic coding sequence
atggcggtggagactctcagcccagactgggaatttgacagggttgacgatgggagccaaaaaatccacgcggaggtacagctgaaaaattacggaaaatttttggaggaatatacctctcagctcagacgcatcgaagatgctcttgacgactctattggagatgtttgggattttaatcttgaccccatcgctctgaagcttctgccatatgagcaatcgagtctcttggagctaattaagacagagaacaaggtgttgaataaggtcataacagtgtacgcggcgctctgctgtgaaatcaaaaaactcaagtacgaggccgagactaaattctacaatggtctgctgttttacggcgaaggagctacggacgcttccatggttgagggagattgccagattcagatgggcagattcattagcttcctacaggaactttcatgcttcgtcacacggtgctacgaagtcgtgatgaacgtcgtccaccagctggctgccctttatatttcaaataaaatagccccaaaaatcatcgagactacaggcgtccacttccagacaatgtacgaacacctgggagaactgctcacagtgttactgactctagacgagatcatcgataatcatataactctcaaagatcattggactatgtataagcggctcctcaaatcagtgcatcacaatccatctaagtttggaatacaggaagagaaactcaagccctttgagaagtttcttctcaagttggaagggcagctgcttgacggtatgattttccaagcttgtatcgagcagcagttcgatagcctaaacggaggagtgagcgtcagcaaaaattctacattcgccgaagaatttgctcactccatccggagcatatttgcaaatgtggaagccaagttaggcgaaccttctgagattgaccaacgagacaagtacgtcggcatttgcggactctttgtcctgcacttccagatttttaggactatcgacaaaaagttctataagtcactcctggacatctgtaaaaaagtcccggcaattactcttactgcaaatatcatctggttcccagataactttctgattcagaagatcccagcagctgccaagctgctagatcgtaagagtctgcaggccatcaaaatccaccgggacacatttctgcagcagaaagcccagagtctcaccaaggatgtccaaagctattacgtctttgtgtcctcctggatgatgaaaatggagagtatcctatcaaaggaacagcggatggataaatttgcagaggacctcacgaatcggtgtaacgtgtttattcagggattcctatatgcttacagtatcagcacaatcatcaagacaacaatgaacctgtatatgtctatgcagaagcctatgaccaaaacaagcgtaaaggctctctgcaggctggtggagctcctgaaggccattgaacacatgttctatagaagaagtatggtcgtggccgacagcgtgtcacacatcacacagcacctgcagcatcaggccctgcattcgatctccgtagcaaaaaagagggtgatctccgataaaaaatattctgaacaaaggctggacgttctgagcgcgctggttctggcagagaataccctgaacgggccatccactaaacagagacgcctgattgtgtcacttgctctatcagtgggtacccagatgaagacgttcaaggacgaggaattattcccacttcaggtagtcatgaaaaagctcgatctgatttctgaactgcgcgaacgagttcaaacacaatgtgactgctgctttctgtattggcacagagccgtgttccccatctatctcgatgacgtttacgagaacgccgttgacgccgcgcggttgcattacatgtttagcgccctccgcgactgtgtacctgcgatgatgcatgctcggcacctagagtcctacgaaatcttgttagactgctatgataaagaaattatggaaatcctgaacgaacatctgcttgacaagctctgcaaagagatcgaaaaggacttgcgtttgtccgttcatacacatcttaagctggatgatcggaacccctttaaggttggcatgaaagacttggctttattcttctcactgaatcctatccgattcttcaacagattcatcgatatccgcgcgtatgtgacccattacctcgataaaaccttctataacttgactactgtcgcactgcacgattgggccacttactcagagatgagaaatttggcgacccagaggtacggattggtcatgactgaagctcacttgccgtcccaaactctcgagcaagggctggacgtgctggaaataatgcgcaatattcacatcttcgtgtccaggtatctctacaacctcaataatcagatttttattgagcggacttcgaacaacaaacatttgaatacaatcaacattcggcacattgccaacagcattcggacccacggcactgggatcatgaataccaccgtaaattttacataccagttcctgaaaaagaaattttatatctttagtcagttcatgtatgacgaacatatcaaatctaggctcatcaaggacattagattctttagagagatcaaagatcagaacgaccataagtacccattcgacagagccgagaagttcaatcgggggataagaaagctcggcgtgaccccggaaggtcagagctatctagatcaatttagacagcttattagccagatcggcaacgcaatgggatacgtgaggatgatccgttcaggagggctgcattgttcctctaatgctattagattcgttccagacctcgaagacattgtgaactttgaagaactggtgaaagaagagggtctagccgaagaaacgctgaaagctgcccgtcacctcgacagtgtcctgagcgatcacaccagaaatagcgctgaagggaccgagtactttaagatgctagtggacgtgtttgcccccgagtttcgtcggccaaaaaatatccacctgaggaacttctatattatagtcccgcctcttacactgaactttgtggagcacagtattagttgtaaggagaaactgaataagaagaacaagattggcgctgcttttacagacgatggcttcgccatgggggtggcctacatcctaaaactccttgaccagtatcgggaattcgatagcttacactggttccagtccgtgcgtgagaagtacttgaaggaaatacgtgccgtggcaaagcaacagaacgtgcaatcagcgtcgcaagatgaaaagttgctgcaaacgatgaatctgacccagaaacgcctcgacgtctacctgcaggaattcgaactgctatattttagcctttctagcgctaggatcttttttcgcgccgacaaaacggccgcggaggaaaaccaggagaaaaaggaaaaagaggaggaaacgaaaaccagtaacggtgacctgtcagactctacagtgagcgctgatccagtcgtcaaatag

SEQ ID NO: 14590 - DNA, 972 bp, synthetic construct
  source 1..972: mol_type = other DNA; note = Synthetic coding sequence
atgttgcggtggacggtccatctcgaagggggtcctagacgagtaaatcatgctgccgttgcagtgggccaccgggtttacagcttcggaggttactgcagcggggaagactatgagaccctacgccaaatcgatgtgcacatcttcaacgctgacacacacaaatggttcaccccccgggttagtgggaccgtacccggtgccagagacggccactcagcctgtgtcctcggaaagatcatgtacatctttgggggatatgaacagcaggcggattgcttttctaatgacatacataagttggataccagcacgatgacctggaccttgatctgcactaagggatctcccgcccggtggcgtgatttccacagcgccacaatgctgggctcccacatgtatgttttcggaggtcgcgcggatcgttttggcccatttcactctaacaacgaaatatactgtaatcgaatccgggtctttgacacgcgcacagaggcatggctcgactgtccgccgacccctgtcctgccggaagggaggcggagccactccgcttttggatacaacggtgaactatacattttcggcggatataacgctagactcaacaggcacttccatgacctatggaagttcaatccggtatctttcacctggaaaaaaatcgagccaaagggcaagggcccatgccctcgaaggcgccaatgttgttgtatcgttggcgacaagatcgttctgtttggaggaacaagtcctagtcctgaggaagggctcggagacgagtttgacctgattgaccactccgacctgcatattcttgacttctccccatcgctcaaaaccctctgcaaactggccgtcatccaatataatctcgatcaaagttgcttgccccatgatatcagatgggaattgaacgcaatgacaacaaattccaacatctctagacccattgtgtccagtcatggctag

SEQ ID NO: 14591 - DNA, 2517 bp, synthetic construct
  source 1..2517: mol_type = other DNA; note = Synthetic coding sequence
atgaccggcgccgaaatagagccttcagcccaggccaaacccgagaagaaagcaggtgaggaagtcatcgccggtcctgaaagagagaacgacgtccccctggtcgtgaggccgaaggtccggacgcaggcgaccactggcgcacggcctaagacagagactaagtcagtaccagctgcccgccctaaaaccgaggcccaggctatgtctggggctcgccctaagaccgaggtgcaggtgatgggcggagcacggccaaagactgaggcccaaggtatcaccggagcgcgacccaaaacggacgcccgtgcggtcggcggggcacgcagcaagactgacgccaaggcgatccctggagctaggcccaaggacgaggcccaagcttgggctcagagcgaatttggcaccgaggcggtctcacaggcagaaggggtaagccagacgaacgcggtggcctggccactcgcaactgctgagtcaggctcagttaccaagtcaaaggggctctccatggaccgcgaactcgtgaatgtcgacgcagaaacttttccagggacccaggggcagaaaggcatacagccctggttcgggccgggtgaagaaactaatatggggtcatggtgttacagcagacctcgagccagggaagaggcttccaacgagagcggattttggagcgccgacgaaacttctacagcttccagtttctggaccggggaggaaacgtcggtgcgcagttggccgagagaggagtctaatacccgcagtcgccaccgagccaaacatcagacaaatcctagaagcagacccaggtcaaagcaggaagcatacgtggacagctggtcaggctctgaggacgaagcgtcaaatcctttttctttctgggtcggagagaataccaacaacctgttccgccctagggtaagggaagaagccaatatccggtcaaagctgcggaccaatagagaagactgcttcgagtcggaatccgaggatgagttctataaacaatcgtgggtgctgcccggggaggaagccaattccagattccggcatagagataaagaggatcctaacaccgccctgaagctgcgcgcccagaaggatgttgactccgatagagtgaagcaggaaccacggtttgaggaggaagtgattatcgggtcctggttttgggcagaaaaagaagcctctctcgaggggggggcctcggcaatttgtgaatccgaacctggcaccgaggaaggggctattggcggctctgcctattgggcagaagaaaaatcttccctgggggctgtggctcgggaggaagctaagcctgagtccgaagaggaggccatcttcggatcctggttctgggatcgcgacgaggcctgttttgacctcaacccttgcccagtgtacaaagtctccgaccgtttccgggacgctgctgaggagctcaatgcttcatcacgcccgcagacttgggatgaggttacggtggagtttaaacctggcctctttcacggtgtgggcttccgctcgacctcaccatttggaatccctgaagaggcttcggagatgctggaggcgaagcccaaaaatctcgagctgagccctgaaggtgaagagcaggagtccctgctccagccggatcagccaagtcctgagttcacattccagtacgaccccagctatagatcggttcgtgaaatcagggagcacctcagagctcgagagagcgccgaaagtgaatcctggtcttgcagttgcattcagtgcgagttaaaaattggatcagaagagttcgaagaatttctgctcctgatggacaagattagagatcccttcattcacgagatctcaaaaatcgcaatgggtatgagatcagcctcgcagtttacacgcgattttattagagatagcggcgtggtgtccttaatcgagactctattgaattaccctagctcacgcgtgagaacgagttttcttgagaacatgatccacatggcacccccctatcccaatctgaacatgatagagacctttatctgccaggtgtgcgaggagactctggctcactcggtggactcactagagcagctgacggggatccgtatgttgcgacacctgacaatgacaatagattatcacacgctgatagcaaattacatgagtgggtttctctctctgctgacaaccgctaatgctagaaccaaattccatgtcttaaagatgctgctgaacctgtccgaaaaccctgctgtggcaaaaaagcttttcagtgccaaggccctctctatattcgtaggacttttcaacatcgaggaaaccaacgacaacattcagattgtaatcaagatgtttcagaacatctctaacatcatcaagagcggtaagatgagcctgatcgatgatgatttttctttggagcctctcatctctgccttcagggaattcgaggagttagctaagcaattgcaagctcagatcgacaaccagaacgatcctgaggtgggtcaacagtcttag

SEQ ID NO: 14592 - DNA, 2649 bp, synthetic construct
  source 1..2649: mol_type = other DNA; note = Synthetic coding sequence
atgccaggacgggctcgcactcgcgcaagaggtcgagctcggcggcgggaaagctatcagcaggaagcaccagggggccctcgcgcacctggcagtgcgaccacccaggagcctccacagcttcagtctacaccaagacctctccaggaagaagtccccgtggttcgccctctgcagccacgagctgctagggggggggctggcggtggagcccaatcccagggagtgaaggagccaggtcccgaggccgggctgcacacagcacccctgcaggagcgacgcatcggtggggtgttccaagacctggtggtgaatacacggcaggacatgaagcacgtcaaggacagcaagactgggagcgagggtacagtggtacagcttcttgcgaaccacttccgggtaatcagtagacctcagtgggtggcatataagtacaatgtcgattataaacccgatatcgaggacggtaatctccgcaccatcctgctggatcaacaccgtcgaaaattcggagagagacacatatttgacggaaattcacttctgctgtctcgccctctgaaggagcgcagggtcgaatggctcagcacaacaaaggataaaaacatcgtgaagataacggttgagttctcaaaggagctcacccccacttctcctgactgcttaagatactataacattttgtttaggcgcacatttaagctgctagatttcgagcaggtgggcaggaactactacacaaagaaaaaggccattcagctgtaccgacacgggacatccttggaaatttggctgggctacgtgactagtgtgctgcaatatgagaattctattacactgtgcgctgatgtcagtcataaactcctaaggatagaaacggcctatgactttattaaacgcacaagcgcacaggcccagaccgggaacatacgcgaagaggttaccaataagctgatcggcagcatcgtgctgacaaaatacaacaacaaaacttaccgggtagatgacatcgattggaaacagaaccccgaggatactttcaacaagtcggacggatcaaagatcacgtatatcgactactaccgccagcaacataaggagatagtaacagttaaaaaacagcccctcctggttagtcaggggcggtggaagaaaggcctcacagggacacagagagagccaatcctgctaattccccagctatgccacatgactggactcactgacgaaatctgcaaggactattctattgtaaaggaacttgccaagcacacaaggctgtctccgcgcaggcgccatcatacgcttaaggagttcatcaatacccttcaagataataagaaggttcgggagttgcttcagctgtgggacttgaaatttgataccaacttcctgagcgtgcctgggagagtgcttaagaatgccaatatcgtgcagggtaggcgcatggtgaaggccaactcccagggagactggtctagagagattagggaattgccattactcaatgctatgcccctccattcctggcttattctgtactcccggtccagccatcgcgaagcaatgtccctcaagggacacttgcagtcggtgacagcccccatgggtatcacaatgaagcccgctgagatgattgaagttgacggcgatgcgaactcatacatagacacactgagaaagtataccaggccaactctccaaatgggcatgtcttgcttgttagtgtttaaagtgatctgcatcctcccaaacgacgacaaaagacgttatgactccatcaagcggtacctttgtactaaatgccccattccctcccagtgtgtagtcaaaaaaactttggaaaaagtccaagctaggacgatcgtgaccaaaatcgcccagcaaatgaattgtaagatggggggagccctatggaaggtagagacagatgtgcagcggacgatgttcgttggaatcgattgcttccacgacattgtgaatcgccaaaagtccattgccgggtttgtggcgtctactaatgcggaactcactaaatggtacagtcaatgcgtcatacagaagaccggcgaggaattggtaaaggaactcgaaatctgcttaaaggcggctttggacgtgtggtgcaaaaatgaaagttctatgccccactcagttattgtatatagagacggcgtgggggatggacagcttcaggctctgctggatcatgaagcaaaaaaaatgtctacctacttaaagaccatttctcctaacaacttcacactggcttttattgtggtcaagaagcggattaacactcgtttttttcttaagcatggctccaattttcagaacccccccccaggcactgtgattgatgtcgagctgacccgaaacgagtggtacgattttttcatcgtgtcccagtccgtacaggacggaaccgtgactccgacacactacaacgtcatttacgatacaattggcctctctccagacaccgtacagaggcttacatactgcctctgtcatatgtactataacctgccaggaattatccgagtgccggccccttgccactatgcacacaaattggcctatctggtgggccagtccatacaccaagagcctaaccgcagcctctcaacgagacttttttatctgtag

SEQ ID NO: 14593 - DNA, 1917 bp, synthetic construct
  source 1..1917: mol_type = other DNA; note = Synthetic coding sequence
atgaatcggcaagtctgtaaaaagtcctttagcggcagatcccagggcttttccgggcgaagcgctgtcgtttccgggtccagcaggatgtcctgcgtggccagatccggtggcgcaggaggaggagcatgcggcttcagaagtggcgcgggaagctttggctcgcgatctctgtataatctgggctctaataagtcgatcagtatttccgtggccgctggcagcagtagagccggaggatttggaggaggtcggagttcctgcggcttcgctggcgggtatggcggcggcttcggcgggagttacgggggaggattcggcggtggtagaggtgtggggtctggctttgggggcgctgggggtttcgggggcgccggcgggtttggaggacccggggttttcggtggacctggctcttttggtgggccgggagggtttggtccaggtggctttcccgggggaatccaggaagtgattgtcaatcaaagcctgctccagcccctgaacgttgagattgacccacaaatcggccaagtgaaggctcaggagagagagcagataaaaacactgaataacaagttcgcttccttcatagacaaggttcgtttcctcgaacaacagaataaggtgcttgagactaagtgggaactcctgcaacaacagactactggctctggaccatccagtctggagccgtgcttcgaatcatatattagctttttatgtaaacagcttgattccctgctaggcgaacgcggcaatctggagggcgagctgaagtcgatgcaagatttggtggaagattttaaaaagaaatatgaggacgagatcaacaagagaaccgccgcggagaacgagtttgtcgggttgaagaaagatgtggatgccgctttcatgaacaaggtggaattgcaggccaaagttgattctctcacagacgaagtctcctttctaagaacgttatatgagatggagctgtcgcagatgcagagccatgcctctgacaccagtgtggtattaagcatggataataaccgatgcctggacttggggtcaataatcgctgaggttcgagctcaatatgaagagattgcgcagcggagtaaaagcgaagctgaggccctataccagacaaagttgggcgagctccagacaactgcgggaaggcatggggatgatttaagaaacactaagagcgaaattatggaactgaatcgaatgattcaacgactccgagcagaaatcgaaaacgtaaagaaacagaacgctaacctccagaccgcgattgctgaagccgagcagaggggtgagatggccctaaaagatgcgaacgcaaagctgcaggaccttcaaaccgccctgcagaaagcaaaggacgacctggcgagactgttgcgagactaccaggagttgatgaacgtgaagctggctctcgatgtggaaatcgcaacgtaccgcaagctgttggaaggcgaggagtgcaggatgagcggcgaatgtcagagtgcagtgtgtatatccgtggtgtcaaatgttacttcaacctctggatcgagcggtagctcgaggggcgtgttcggtggagtgagcggcagcggaagcggaggatataaggggggcagctcttcttcatcctcaagcgggtatggggtatcaggtggcagcggaagtgggtacggtggagtgtcttcaggcagcacgggaggacgggggtcctcaggctcttatcaatcctccagttctgggtcccgcctgggcggggccggttcaatttcggtctctcactctggcatgggcagttctagcggcagcatccaaactagtggcgggtcaggctacaagtccggcggcggcggttccacatcaataagattctctcagacgacttccagcagccagcactcctccacaaaatag

SEQ ID NO: 14594 - DNA, 1080 bp, synthetic construct
  source 1..1080: mol_type = other DNA; note = Synthetic coding sequence
atggctgaacctttcctgtcagagtatcaacatcaacctcagacatccaattgcaccggggccgccgctgtgcaggaagagcttaaccctgagcgtccgcccggcgcagaagaaagagtccctgaagaagactcaaggtggcagtcccgcgcgttcccgcagcttgggggcagacccggccccgagggcgagggctctctggagagtcaacccccgccactgcagacccaggcctgtccagagagtagctgtctgagggagggcgaaaaggggcagaacggcgacgactcatcagccgggggcgacttccctccccctgctgaggtcgagcctactccagaagcagagctgttagcccaaccttgccatgattctgaagcaagcaaacttggggcgcccgccgccggaggggaggaggagtgggggcagcaacagagacagctcggaaaaaagaagcacagacgcaggccgagtaagaagaagcggcattggaagccttactacaaattgacatgggaggagaaaaagaagttcgatgagaaacaaagtctgagggcctcaagaattcgggctgagatgttcgcgaaaggacaacccgtagctccatacaataccacgcagttcctgatggatgaccacgaccaggaagagcccgacctgaaaacagggctgtattccaaacgggccgccgccaagtccgacgacacatcagacgacgacttcatggaagaagggggcgaagaagacgggggctctgatggaatgggaggagatgggagcgagttcctgcaacgtgacttctccgaaacctatgagagataccataccgaatccctgcaaaacatgtccaagcaggagcttattaaggaatacctcgaacttgaaaagtgcctgagtcgtatggaagatgagaataacaggctacgtcttgagtctaaacgactggggggcgatgatgcccgcgttcgagagcttgaactcgaactcgacaggctccgtgccgagaacctgcaactcttaaccgagaacgaactccaccggcagcaagaaagggcacccctgtctaagttcggcgattag

SEQ ID NO: 14595 - DNA, 2889 bp, synthetic construct
  source 1..2889: mol_type = other DNA; note = Synthetic coding sequence
atggatgaacaggcattgttaggacttaatcccaatgcggacagcgacttccgtcagagggctctggcttacttcgagcagctgaagatatctcctgacgcttggcaagtctgtgccgaggctctggcccagagaacctacagtgatgaccacgtcaagttcttttgctttcaggttcttgagcaccaggtgaagtacaaatattctgaattaactacagtgcagcaacaactgattagagagacactgatctcatggcttcaggctcagatgttaaatccacagcctgaaaagacttttatcagaaacaaagccgcacaagtatttgcactgctttttgtgaccgaatatctgacaaaatggcccaaattcttctttgacattttgagtgtagtcgatctgaacccgcgcggagtggatctgtatctgaggatcttgatggcgatcgattccgagctggtggatcgggacgtggtgcatactagcgaggaagccagacgcaacacattaatcaaggatactatgagagaacagtgtatccctaatcttgtggagtcatggtatcagatcttgcagaattaccagttcaccaattcagaagtaacgtgtcagtgtttggaagtggtgggcgcatacgtttcgtggattgatctctctctgatcgcaaatgatcggtttattaatatgctattgggccatatgagcatcgaagtcctgcgagaagaagcttgcgattgtttgttcgaagtggtgaataagggaatggatccagtggacaagatgaagctggtggaatccctttgtcaagtccttcagagcgctggattcttcagcatcgatcaggaagaggatgttgattttctcgcccggttctcgaagctagttaacggcatgggtcaatcactcattgtgagctggtctaagctgatcaaaaacggcgatattaaaaatgcacaggaagccctgcaagctatagagacaaaagtagccctgatgctccaactgctgatccatgaagatgatgacatttcatccaacatcatcggattctgctacgattatctgcacatactaaaacagctcactgtcctgtccgaccagcagaaggccaacgtagaggctataatgcttgctgtcatgaagaagttgacctacgacgaggagtataactttgaaaacgagggcgaggatgaggccatgtttgtggagtacaggaagcagcttaagctgctgctggacagactagcacaggtgtcgcctgaactgcttctggcatccgttcgacgggtgttctccagtaccctacaaaactggcaaaccacaagattcatggaggtcgaggtcgcgatccgcctactttacatgctggctgaagccctgcccgttagccacggggcccatttctcaggcgacgtgagtaaagcttctgcgctgcaggatatgatgagaaccctcgtaacttctggtgtgtcgtcataccagcacacgagtgtaacgctggagtttttcgagacagttgtccggtatgaaaagttcttcacagtggagccccagcacattccttgcgtgctgatggccttcctggatcaccgtggactgcggcacagctctgccaaagtccgtagtcgcacagcgtatctcttttcccgctttgtgaagtccttgaacaaacagatgaatccgtttatcgaagacatcctgaatagaatacaggatctcctggagttgtcaccccccgagaatggccaccagtctctgctctcatccgacgaccagctgttcatttacgaaacagctggagtgcttattgttaattcggagtatcccgcagaaagaaaacaggcccttatgaggaatctgctgacccccctgatggagaagttcaaaatactcctggaaaagttgatgcttgcgcaggacgaggagcggcaggcctccctggctgattgcctgaaccacgcggtgggctttgccagtaggacctctaaagctttctccaacaagcagactgtgaaacagtgcggttgcagcgaggtgtatttagactgtcttcagacttttctccccgctctttcctgtccactgcagaaagatatactaaggagcggggttcggacattcctccaccgcatgattatatgtctcgaggaagaggttctaccattcatcccttccgctagcgagcatatgctgaaggactgcgaagcaaaagacctgcaagaattcattcctttgatcaaccagatcacagccaagtttaagattcaggtcagtccattcctgcagcagatgtttatgcctctcctgcatgcaattttcgaggtccttctgcggccagccgaggagaacgatcaatccgcagccctcgagaaacagatgctcagacgctcctattttgccttcctgcagacagttacaggttcagggatgtccgaagtgattgcaaatcagggagcagagaacgttgagcgagttttggtcacagttattcagggggctgtcgaataccctgatcctattgcccagaaaacttgttttataatcctatccaagctggttgaactgtggggtggcaaagatggtcccgtgggctttgccgacttcgtgtataagcacattgtaccagcatgcttccttgcccccctgaagcagacattcgatttggccgatgcccagactgtgctggctcttagcgagtgtgcagtcactctgaagacaatacaccttaagagaggcccggaatgcgtccagtatctccagcaggagtacttgccctcactgcaggtggcccccgaaattatccaggagttttgtcaagcattgcagcagccagatgccaaggtctttaagaactatttaaaagtattttttcagagagccaagccctag

SEQ ID NO: 14596 - DNA, 2976 bp, synthetic construct
  source 1..2976: mol_type = other DNA; note = Synthetic coding sequence
atggccgagtctttcttctcagatttcggcttgctttggtacctgaaggagttacggaaagaagagttctggaagtttaaagagttattaaaacaacccctcgagaagttcgaactgaagcctatcccatgggcagagttgaagaaggcctctaaggaagatgtagcgaaattactcgacaagcactaccctgggaagcaggcttgggaggtgaccctgaatctcttcctgcaaatcaaccgaaaggatctgtggaccaaagctcaggaagagatgaggaataagctgaatccttaccgaaagcatatgaaggaaacatttcagctcatctgggaaaaagagacctgcctccacgtgccggagcatttttacaaggagacgatgaaaaacgagtacaaggaactgaatgatgcctacaccgctgccgcgagacgacacacagttgttttagagggacctgatgggatcgggaagacaactctccttcgcaaggtcatgctggactgggctgagggcaatttgtggaaagataggttcacattcgtcttcttcctcaatgtgtgcgaaatgaacggcatcgccgagacctcccttctcgagctgctttccagggattggccagaatcaagtgaaaagatcgaggatatcttctcccaaccagagcggatcctgtttatcatggacgggttcgaacagctgaaatttaatctgcagctgaaggccgatctgtctgatgactggcgccagagacaaccaatgcctatcattctctcctcccttctgcagaagaagatgctgcctgagtcctccctgctgatcgcactaggtaaactcgcaatgcagaagcactactttatgcttagacatccgaagttgattaagctgttgggattttctgaatccgaaaagaagtcctacttttcttatttcttcggggagaagtccaaagcattaaaagtgttcaattttgtgagggataatggcccgctgtttatcctgtgtcataacccttttacgtgttggctggtatgtacatgcgtgaagcaacgattagagaggggcgaggacctggaaatcaacagtcaaaatacaacctatttgtacgcgagctttctcactacggtatttaaggcaggatcacagagctttccaccaaaggtgaacagagctcggttaaaatcactctgtgctctggctgctgaaggtatctggacctataccttcgtattcagtcatggtgatcttcgacgcaacggcctgtccgagtccgaaggagtgatgtgggttggaatgcggctgttgcagcgccgtggcgactgctttgcttttatgcacctttgtattcaggagttttgtgcagccatgttttatctattgaaaagacctaaagacgatcctaaccccgcaatcggttctatcactcaacttgtgagagcttctgttgtgcagccccagaccctcctcacacaggtagggatatttatgttcgggatctccacagaggaaattgtatccatgctggagacctccttcggcttccctctgtcaaaagacctcaagcaggaaattacgcagtgtctcgaaagtttatctcagtgtgaggccgatcgcgaagcaatcgccttccaggagctgtttatcggcctgtttgaaacccaagaaaaagaattcgttacgaaggtcatgaatttcttcgaggaggtatttatttacatcggcaacatcgagcatcttgtgattgcctcattctgcctgaaacactgccagcatctgaccactctccgtatgtgtgtggaaaatatcttccccgacgacagtgggtgcattagtgattacaacgaaaagttagtgtactggagagagctgtgctccatgttcataaccaataaaaatttccagatcttggacatggagaacactagtttagacgatccctccctggccattctgtgcaaggcactggctcagcctgtctgcaagctgaggaagcttatcttcacctccgtgtattttggccacgattctgagctctttaaggctgtgctgcataaccctcacttaaagttgttgagtctctacggcactagccttagtcaaagtgacatccgccacttgtgcgaaactttgaaacacccaatgtgtaagatcgaagagctgattctgggcaaatgcgatataagcagcgaagtgtgtgaagacatcgcgagcgtgttggcttgtaattcaaaacttaaacatttatctcttgtcgaaaacccccttagagacgagggtatgacactgttgtgtgaggccctcaaacattctcattgtgcactggaacggttaatgctgatgtattgttgcctaacatccgtctcctgcgacagtatttcagaggtcctgctgtgcagtaagtccctctccctgctggatttaggcagcaacgctctggaagacaacggcgttgcctcactgtgcgcggctctgaaacacccgggctgttctattcgcgagctttggctcatgggatgcttcctcacttccgattcttgtaaagatatcgcggccgtgctgatctgtaacgggaaacttaaaacactcaagctgggtcacaatgaaattggtgacaccggggtgagacagctttgtgcagcactgcagcatccgcactgcaaactcgaatgtcttggcctccagacttgtccaatcacacgggcgtgttgtgacgatatagccgccgcgctcattgcctgtaagaccctgcgttcactgaatcttgactggatagcgctagatgccgacgcggttgtggtactgtgtgaggccctgtctcaccctgattgtgcgctacagatgctcgggcttcacaagagcggcttcgatgaagagacacagaaaatccttatgtcagtcgaggagaaaattccccaccttaccatatctcacgggccatggatcgatgaggaatataagatacggggagtgctgctttag

SEQ ID NO: 14597 - DNA, 534 bp, synthetic construct
  source 1..534: mol_type = other DNA; note = Synthetic coding sequence
atggcagcggtgaaggcctctacctctaaggccactaggccttggtacagccacccggtatatgcgaggtactggcagcactatcatcaggctatggcctggatgcagagccaccataacgcctaccgcaaagccgtagagtcctgcttcaaccttccttggtatttgcctagtgccctgttgccacaatctagttacgacaatgaggctgcctacccacagtccttttatgaccaccatgtagcctggcaagattacccatgctctagttctcacttccgaagaagcggacaacacccacgctatagctcacggatccaggcttcaacaaaagaagaccaggctctgtccaaagaagaggaaatggagaccgagtctgacgcagaggtggagtgcgaccttagcaacatggaaattacagaggagctgcgacagtactttgccgaaacagagaggcacagagaagagcgaagaaggcagcagcagttagatgctgagagacttgacagttatgtgaacgcagatcacgactag

SEQ ID NO: 14598 - DNA, 1503 bp, synthetic construct
  source 1..1503: mol_type = other DNA; note = Synthetic coding sequence
atggtgggtcggtcatgcggggtggccactcagcggcaggggggcggacagaggcccactaacctggcgctgactctgagcagcagtccggcacatagcacagccttgccttggctgcccccccgcagcttgcagctcctaagtggccactctgtgccagcccaacccacacctcaccttccctctgcatgcggcggcccaactagggtgacgctgggagaagagagagcatggcgctctcatggctcgaacgctggcggtcatacttgccttccacgcagaacagctggagccggatctcttacacccggtggggagcgtggaggtaacaatgccggccacactgtcgtggttgacggcaaggagtacgactttcacttactcccgtccggaatcattaacaccaaggccgtcagtttcatcggcaatggtgttgtgatccacctgccagggctgtttgaggaggctgagaagaacgagaagaaaggccttaaggactgggagaaaagacttatcatcagcgaccgcgctcacctagtcttcgactttcatcaggcggtagatggtttgcaggaggtccagagacaggctcaggaagggaaaaacattggtaccaccaaaaagggcataggccctacttactcttccaaggccgcccgcactggtttgagaatatgcgatctgctttctgattttgacgagttctccagtaggttcaagaacctcgctcatcagcaccagtccatgttcccgactctcgagatcgacattgaggggcagctgaagcggctaaaaggattcgccgagagaatcagacctatggttagggatggcgtgtatttcatgtatgaagcgctccatggcccaccaaaaaagattctggtggagggtgcgaatgcggccttgttagatatcgacttcggcacctaccctttcgtgacctcttctaactgtaccgttggtggagtatgtacaggcttgggaatccctcctcagaacatcggagacgtgtatggagtcgtcaaagcttatacaacaagggtcggcatcggggcattcccaacagaacagatcaacgagattggcggcctcctgcagacgcgaggccatgagtggggtgtaacaaccgggcgaaagcggaggtgcggctggctggatcttatgatcttacgctacgcgcacatggtcaatggcttcacggccctcgcacttacgaagctagatatccttgatgtgttaggtgaggtgaaggtcggagtttcttacaaactcaacgggaaacggatcccttatttcccagcgaatcaggaaatgctgcaaaaagtcgaagtggagtatgagacactgccgggctggaaagcggacaccacgggtgctcggaggtgggaggatttacctccccaagcacagaactatatcagatttgtcgaaaaccatgtcggtgttgccgtcaagtgggtaggagtcggaaagtcaagggagtccatgatacagctcttttag

SEQ ID NO: 14599 - DNA, 468 bp, synthetic construct
  source 1..468: mol_type = other DNA; note = Synthetic coding sequence
atggtcaatagttgctgcggttccgtatgcagtgaccagggctgcggacaggacctgtgccaggaaacttgctgttgtccatcatgctgccagacaacctgctgccgaacaacgtgttatcgaccaagctactcagtgtcatgctgttgccgaccccagtgctgccagagtgtttgctgtcagccgacctgctgccgtccgagctgctgcgttcccacttgctgccatccatcttgctgtattagtagctgctgccgtccctcctgctgcgtgtccagttgttgtaagcctcagtgctgccagtccgtgtgttgccagcctaactgctgccgcccttcctgttgccggccctgctgctgcctgcgcccagtttgtggaagggttagctgccataccacatgctaccgcccggcttgtgtaatttcaacctgcccacgaccagtgtgttgtgccagcagctgctgttag

SEQ ID NO: 14600 - DNA, 2124 bp, synthetic construct
  source 1..2124: mol_type = other DNA; note = Synthetic coding sequence
atggctgccgaagccctcgcagccgaggctgtggcctcaagactggaacggcaggaagaggatatcaggtggctgtggagtgaggtggagcgtctaagggacgaacagcttaacgccccgtattcctgtcaggctgaaggtccctgcttgacacgggaagtggcgcagctcagagcggaaaattgcgacctccgccaccggctgtgtagtttgcggttatgcctggccgaggaacggtccagacaagctacgctcgagtcagccgaactggaggccgcccaggaggcaggagcccagccccctccatctcaatcacaggataaggatatgaagaagaagaagatgaaagagagcgaggctgatagcgaggttaaacatcaacccatatttattaaggaacgcctcaaactcttcgaaatcctgaagaaagatcatcagctgctccttgcaatctatggcaaaaagggagatacctcaaatattattactgtgagggtggccgacggacaaactgtacagggtgaagtgtggaaaaccaccccttaccaggtggcggcggagatctcacaagagctagccgaaagcacagtcatcgcaaaggtgaacggcgaactctgggatttggacagacctctggagggggacagttccctggagctgttgacctttgataacgagaaggtcaacacagccaccactactgtgtacagatgcggaccactcatagatctttgcaagggccctcatgtcaggcatacaggtaaaatcaaaactatcaaaatattcaagaattcctcaacttattgggaggggaacccagaaatggaaactcttcagcggatctatggtatttcattcccggataacaaaatgatgcgtgactgggagaagttccaagaggaagctaaaaatcgagaccacagaaaaatcggtaaagagcaggagctattcttttttcatgaccttagcccaggttcctgcttcttcctccctagaggcgctttcatctacaacaccctaacagatttcatcagagaggaatatcacaagcgcgacttcacagaagtgctgagcccgaatatgtataattctaagctgtgggaggccagtggacactggcagcactatagtgagaacatgttcacctttgaaatcgagaaggataccttcgccctcaagcctatgaattgccctggccattgcctaatgttcgcacacaggcccagaagctggagagaaatgcccatccgcttcgctgattttggagttctccatcggaacgagctgtccggcactttgtccggactgacgagagtgcggcgcttccagcaggacgacgcacacattttttgcactgtcgagcagatcgaggaggagattaaaggctgtttgcagtttctgcaatctgtgtattccacgtttggattcagttttcaattgaacctctccacccgcccagagaattttctgggagagattgaaatgtggaacgaggcagaaaagcagcttcaaaatagcctgatggatttcggcgaaccatggaaaatgaatccaggtgatggcgcattttatggtccgaaaatcgatataaaaatcaaagacgccatcggtaggtatcaccagtgtgccaccattcagcttgacttccaactgcccatccggttcaacctcacttacgtgagtaaggatggcgacgataagaaacggcccgttattatacatcgagctatcctcggctcagtggagcgcatgatagctatcctgagcgagaactacggagggaaatggcctttttggctgagcccccgccaggtgatggtgatccctgtgggccctacatgcgaaaagtacgccctgcaagtgagtagcgagttctttgaagaggggttcatggccgacgttgacttagaccactcgtgcaccctaaacaagaaaatcaggaacgcccagctggctcagtataacttcattctcgtggtgggcgaaaaggaaaagattgacaatgccgtgaacgtgaggacgagagacaacaagatacacggggagatcctcgttacctccgcaattgacaagctgaagaatctgagaaaaaccaggacattaaacgctgaggaggccttttag

SEQ ID NO: 14601 - DNA, 816 bp, synthetic construct
  source 1..816: mol_type = other DNA; note = Synthetic coding sequence
atggcaggcctggaggtgctgtttgcctcagctgcacccgccatcacatgcaggcaggacgccctggtgtgttttttacattgggaggttgttacccacgggtattttggactcggagtgggggaccagccaggtcccaatgacaagaagtcggagctactgccggccggttggaataataacaaagacctgtacgtcctcaggtacgagtacaaggatggaagtagaaagctgctggttaaagccataacggtggagagttcgatgattctaaacgtcctggaatacggcagccagcaggtagctgaccttacccttaatctggacgactacatcgacgccgagcacctgggtgattttcaccgcacttacaagaattccgaggagttaaggtcacggattgtgtcaggaattatcacacctatccacgagcagtgggagaaggccaatgtgtcatccccccatagggagtttccacccgcaacggcacgggaggttgatcccctgcgaataccgccgcatcatccccatactagccgacaacccccatggtgtgatccccttggaccgttcgtagtgggaggagaagacctcgacccatttggaccccgacggggaggcatgatcgtcgatcccctccggtcaggctttccaagggccctgattgacccaagttctgggctgcccaacaggttgccacccggggcagtcccgccgggtgcccgttttgacccgtttggccccatcggaacttcccctccgggccccaacccagaccacctaccgcccccgggatacgatgatatgtacctctag

SEQ ID NO: 14602 - DNA, 474 bp, synthetic construct
  source 1..474: mol_type = other DNA; note = Synthetic coding sequence
atggccaccccacccaaacggcgcgcggtggaggcgacgggcgagaaggtccttaggtacgaaaccttcattagcgacgtcctccaaagagatctccggaaagtgctcgaccatcgtgacaaagtctacgagcagttggcaaagtacttgcagttgagaaatgtcatcgagaggctgcaggaagccaagcatagtgagctctacatgcaggtggatctcggatgcaacttttttgtggacaccgtagtaccagatacgtctagaatttacgtggctctaggctacggattcttcttggagctcaccctcgccgaggcactgaagtttattgaccggaaaagcagcctgctgacagagctcagtaactcactcacaaaagactcaatgaacattaaggcccacatccacatgcttctggagggcctgagagagctgcagggactccagaacttccccgagaagccgcaccattag

SEQ ID NO: 14603 - DNA, 543 bp, synthetic construct
  source 1..543: mol_type = other DNA; note = Synthetic coding sequence
atgcaggcagaggggagaggcacaggaggatctactggcgacgccgacggcccgggtggccccggcatccctgatggaccaggcgggaatgctggaggccccggagaagctggagctacgggcggcagagggccgcgcggcgctggagccgcgcgggcctccggacccggaggcggtgctccaaggggaccccatggcggggccgcgagcggcctgaacggttgttgtcggtgcggcgcaaggggtcccgaaagccggctgctcgagttctatctggcaatgccttttgccacacccatggaagctgagctcgcgagaagatccctggctcaggacgcacctcctctcccagttccaggtgttctgctcaaagaatttactgttagtgggaacattcttactatccgcctgactgccgccgaccacagacagctgcagttgtctatatcgagttgtctccagcagctgtccctcttaatgtggattacacagtgctttttacctgtatttttggcccagccaccttctggtcagcgacgctag

SEQ ID NO: 14604 - DNA, 621 bp, synthetic construct
  source 1..621: mol_type = other DNA; note = Synthetic coding sequence
atgactgctagcgtactgcgatccatatctctggcactgcggccgacaagcggcctgcttgggacctggcaaacccagctccgggaaacacaccagcgggcctcactgttgtcgttttgggagctaattccaatgcgctcagaacccttgcgaaaaaagaaaaaagtcgatcctaagaaagaccaggaggcgaaagagagactgaaacgaaaaatccggaagctggagaaggcaacccaagaattaatacccatcgaagactttatcaccccattgaagtttctggataaagctagggagaggccccaggtggagttgacgtttgaggagaccgagagacgcgcgttgctactgaagaaatggtcactctacaagcagcaggagaggaagatggaaagggacaccatccgcgcaatgctcgaggcacagcaggaagctctggaggagctacagcttgagtcccctaaactacatgctgaggcaattaagagagatcccaatctttttccatttgaaaaggagggaccccactatacgccccccatcccaaactaccagcctcccgagggtagatacaatgatatcacaaaggtgtacacccaggtcgagttcaagaggtag

SEQ ID NO: 14605 - DNA, 6963 bp, synthetic construct
  source 1..6963: mol_type = other DNA; note = Synthetic coding sequence
atggcagagccatcaagtgccaggcgacccgtgccactaatcgagtcagaactttatttcctcatcgcacgctatctcagcgcaggcccatgcaggagagccgctcaggtactggtgcaggaattagagcagtatcagctgctgccaaagaggctcgactgggaaggcaacgagcataaccgcagttatgaggaactcgtcctcagtaacaaacacgtcgcaccggatcatctgctccagatatgtcagcgcatcggccctatgttagacaaggagattcctccaagcataagcagggtcacatcactcctgggcgcggggcggcagtcccttttacggacagccaaagattgccgccataccgtctggaagggcagcgctttcgctgccctgcacagagggcgaccacccgaaatgcctgtgaactatgggagcccaccaaatctggtcgaaatccatcggggaaagcagctaaccggctgttcaacattcagcacggctttccccggcacaatgtaccagcatatcaaaatgcaccgaaggatccttggccacctttccgctgtgtactgcgtcgcctttgatcggactggacacaggatcttcacagggtccgatgactgtctcgttaagatctggtccacacacaacggacgcctgttaagtacccttaggggccactctgccgagatttccgatatggccgtgaattacgagaataccatgatcgccgccggatcctgtgataagattatcagagtctggtgcctaagaacttgcgcccccgtggctgttctgcagggccatactggaagtattacgagcctacagttcagtccaatggccaaaggaagccagagatacatggtgtccacaggggcggatggaacagtctgtttctggcagtgggatctggagagcctgaaattttcccctagaccactaaagttcacagaaaaaccacgccctggtgtgcagatgctgtgtagctccttcagcgtgggagggatgtttttggcgactggttcaaccgaccatgtgatccggatgtatttcttgggatttgaggctccagagaagatcgccgaactagaatctcataccgacaaggttgacagcatccagttctgtaacaacggggatcggtttctgagtggttcccgcgacggcaccgccagaatctggcggtttgagcaactcgaatggcggagcatccttcttgacatggccacccggatctctggggatctctccagcgaggaagagcgcttcatgaagcccaaggtgaccatgattgcgtggaatcaaaatgattccatcgtcgtcactgccgtaaacgaccacgttctcaaggtatggaactcttataccggtcagctccttcacaatctgatgggccacgctgatgaagtgttcgtcttggagacacaccctttcgactccagaattatgctgtccgcgggacacgatggttctatttttatctgggacatcaccaaaggtacaaaaatgaagcactacttcaatatgatagaaggacagggtcatggggccgtttttgattgtaaatttagtcaggatgggcagcatttcgcctgcactgattctcacggccatttgcttatattcggtttcgggtgttcaaagccatacgaaaaaatacccgatcagatgtttttccacactgattaccggcccctgattagggattcaaacaactacgttctggacgagcaaacacagcaagcccctcacctcatgccgcccccctttttagtggatgttgacggaaaccctcatcctacaaagtaccaaagactcgtgcccggtcgcgagaatagcgccgacgaacacttgattccccagctcggatacgttgccactagcgacggagaggttatcgagcagattatttcccttcagacaaacgataacgatgagagaagtcccgaatcgtccatacttgatgggatgatcaggcaactgcagcaacaacaggaccagcgtatgggagccgaccaggatactatacctcggggtttaagcaatggtgaagaaacccctcgtcgcggattccgtaggctgtctctggacattcagagtccgcctaacatagggctgagaaggtctggtcaggtcgaaggagtgagacagatgcaccagaacgcccccagatcccagatcgccactgaaagggatctacaggcctggaaacggcgtgtggtggttcctgaggtccccctcggcattttcagaaaactggaggattttaggctcgaaaaaggggaagaggagcggaacctctacattataggccgtaaaaggaaaaccctgcagctgtctcacaagagtgactccgtcgttctggtgtctcagtccagacagaggacctgcagaagaaaataccctaattacggccgcagaaatcgtagctggagagaactgtcctcagggaatgaatcttctagctccgtccgacatgaaacttcttgcgatcagtctgaagggagtggctcatccgaagaagacgaatggaggagcgatagaaaatccgaatcttatagcgaaagttcctccgactcttcatcgcgttacagcgactggaccgctgacgccggtataaatctgcagccgccactgagaacaagttgccgtagacggataacccggttttgctcttctagcgaggatgagattagcacagagaacttgtcaccacctaagagacgcaggaagcgcaagaaagagaacaaacctaaaaaagagaatctgagacgaatgacacctgccgagctggcaaatatggagcatctgtatgagtttcaccctccagtgtggattacagatactacactgaggaagagccctttcgtaccacagatgggggatgaagtcatttattttagacagggccacgaagcttacatcgaagctgtacggcgcaacaatatttatgagctcaaccccaataaggagccctggaggaagatggacctgagggatcaggaattagtcaagattgtgggaatccgttatgaggtgggaccccccactctgtgctgcctgaagctggccttcatcgatcccgccacaggaaaactgatggacaagagcttctccatacgctatcatgacatgcctgatgtaattgatttccttgtcttgcgccagttttatgacgaggcccggcaaagaaactggcagtcgtgcgatcggttcaggtccatcattgacgatgcttggtggttcggaaccgttctctcacaggagccataccaaccccagtaccctgacagccatttccagtgctacattgtcaggtgggataatacagaaatagaaaaattgtctccatgggatatggaacctatccccgataacgtcgaccccccggaggagctgggcgcctcaataagcgtgacaactgatgagctcgaaaagctactctataagccccaggccggcgagtggggccagaagtcccgggatgaagagtgtgatcgcattatatctgggatagatcaactgctgaacctcgacattgcagcagcatttgcaggtccagtggacctgtgtacatatcctaaatattgtacagtggtggcctatcctactgacttgtacacgattcgcatgcggctcgtgaaccgtttctataggcgcttgtctgccctggtgtgggaagtgaggtacattgagcataatgcacgcacatttaatgagccagagagcgtgatcgcccggtcagctaagaaaattaccgatcagctgttaaaatttatcaagaaccaacactgtaccaatatcagtgagctgagcaatacaagtgaaaatgatgaacagaacgccgaggacctggacgatagtgatcttcccaaaacgtccagtggccgaagacgggttcacgacggcaagaaatcaattagagcaacaaactacgttgaaagtaactggaaaaaacaatgcaaggagctggttaacctgatttttcagtgcgaagacagcgagccatttcgtcagcccgtcgatctggtcgagtacccagattatcgtgatataattgatactcccatggactttgggaccgttcgcgaaactttggacgccggcaattatgacagtcccctagaattctgcaaggatataaggcttatcttcagtaacgccaaagcttacactccaaacaagcggtctaaaatctatagcatgacgttgcgtctgtctgccctgtttgaagaaaagatgaaaaaaatcagctccgattttaaaattgggcagaagttcaatgagaagctccgcagatcgcagcggtttaaacagcgccagaattgcaagggtgacagccaacccaataagtcgatccgtaatctgaaaccaaaacgacttaagagccagacaaaaatcatacccgaactcgttggcagccccacccagtcgacttctagtcggactgcctacttagggacacataaaaccagcgcaggcatatcgtctggtgtgaccagcggcgactcatccgatagtgcagaatcatctgaacgaaggaagcgcaaccggccaatcacaaatggcagcaccttgagcgagtccgaggtggaggactcacttgcgacctcattaagttcctccgcatcctccagttcggaagagtcaaaggagtcctccagagcccgggaaagttccagccggtctggtctgtctcggtccagtaatcttagggtaacccggacccgagccgcccagcgaaaaaccggtcctgtttcactggcaaatggctgcggccggaaggctaccagaaagagagtctacctgtcggactccgacaataactcactggagaccggtgaaatcctgaaggcccgggctggcaacaatcggaaggtgttgcggaagtgcgctgccgtggcagccaacaaaattaagcttatgagcgatgtagaggaaaactcgagttcagagagcgtgtgcagtggccgaaagctgcctcatcggaacgctagcgcagtggcgaggaagaagcttttgcataattctgaggatgagcagtccctgaagtcagagatcgaggaagaggaactgaaagatgagaaccagctgctgccggtgagttcttctcacacagctcaatccaatgtcgatgagtccgaaaatagagattcagaatctgagtccgatctgagggttgctcgtaaaaactggcacgccaatggctataaatcacacacccctgccccaagcaaaacgaagtttctaaagatcgagagtagtgaagaggactcaaagtcgcatgacagtgatcatgcttgtaaccggacagcaggcccctcaacaagcgtccagaaattaaaagctgagtctatctcagaggaggccgatagcgagccagggcgatccgggggaagaaagtacaacactttccacaaaaacgccagttttttcaaaaagactaaaatccttagcgattcagaggacagtgaatctgaagagcaggatcgcgaggacggaaagtgtcacaagatggagatgaatcccatttcaggaaacctgaactgtgacccaattgccatgtctcaatgcagctcagaccatggctgtgagaccgacctcgactccgacgacgataaaatcgagaagccaaacaacttcatgaaagattctgcgtctcaggataacgggctgtcgaggaagattagtcgaaagagagtatgtagcagtgacagtgattcttccttgcaggtcgtgaagaagtcctcgaaggctaggactggactgctgaggatcactcgccgatgtgcagctaccgccgctaacaagatcaagctcatgagtgacgtggaagacgtcagccttgaaaatgtacacacccgttccaagaatgggcgaaaaaaacccctgcacctcgcctgtacaacagccaagaaaaagctatctgactgcgagggctccgttcattgtgaagtcccatctgagcaatatgcttgcgaaggtaaacccccagaccccgattccgaggggtcgacaaaagttctgtcccaagccctgaacggggactccgacagcgaggacatgctcaatagtgaacacaaacatagacacacaaacatccacaagatagacgctccttcaaagcggaagtccagctcagtcacgtccagcggagaagacagtaaaagccatataccagggtctgaaaccgatcgcacattctcctcagaatctaccctcgctcagaaggcgacagcggaaaacaacttcgaagttgagctgaattatggccttaggcgttggaacgggcgaaggcttcggacttatggtaaggccccctttagcaaaacgaaggtgatccatgactcacaggagacagctgagaaggaggttaaaagaaaacggtcacatccagagctcgagaacgttaaaatctctgagactacaggaaattccaagttcagacctgacacgtcctctaagtcgtccgacctcggaagtgtaaccgaatcagatattgactgtactgataacacaaagaccaagcgcagaaaaacaaagggaaaggccaaggtggtccgtaaggagtttgtcccccgtgaccgcgaaccaaataccaaggtccgcacctgtatgcacaatcaaaaagatgcggtgcaaatgccaagtgagaccctgaaggccaaaatggtccccgaaaaagttccccggaggtgtgcgaccgtcgcggctaataagattaaaatcatgagcaacctcaaagagaccatctccggccccgaaaacgtatggattaggaaatcaagtaggaagctcccccaccgcaacgcatccgcagccgccaagaaaaagctactaaacgtttacaaagaggatgataccactataaattccgagagcgaaaaagagctggaagacattaacaggaaaatgttgttcctcagaggcttcaggtcatggaaagaaaacgcacagtag

SEQ ID NO: 14606 - DNA, 2961 bp, synthetic construct
  source 1..2961: mol_type = other DNA; note = Synthetic coding sequence
atggctgaatcctttttttccgacttcggccttctgtggtacctcaaagaactgcgcaaggaggagttctggaagttcaaggagctgctgaaacagccactagagaagttcgagttgaagccaatcccctgggccgagctgaaaaaagcctcaaaagaggatgtggccaagctgttggacaagcactatcccgggaaacaggcctgggaagtcacccttaacctatttctgcagataaaccggaaggacctgtggacaaaagcacaggaagaaatgcggaacaagctaaacccttacagaaaacacatgaaggagacattccagctgatctgggagaaggagacatgcttacatgttcccgagcatttttacaaagagaccatgaagaacgagtataaagaactgaacgacgcttacacagcggcagcaagaagacacacagtcgtattggaagggcccgatggaataggaaagactaccctgctgaggaaggtcatgctggactgggcagagggcaacttgtggaaagatagattcaccttcgtgttctttcttaacgtctgtgaaatgaatggtattgccgagactagccttttggaactgttgtcccgagattggccagaaagcagcgaaaagatcgaagatattttcagccagcccgaaagaatcctgttcatcatggatggtttcgagcagttaaaattcaaccttcagctgaaggccgacctttcggatgactggcgacaacgccagccaatgccaattattctgagtagtctcctgcaaaaaaaaatgcttcctgagtctagtctgctgatcgctctcggtaagctggccatgcagaagcactactttatgctgcgccacccaaagctaataaagctactgggctttagcgagagcgagaaaaagtcctatttctcatacttttttggggagaagagtaaggctctgaaggttttcaattttgtccgcgataatggtcccctgttcatactgtgccataacccctttacatgttggctcgtttgtacttgcgtcaagcagcgcttggagagaggcgaggatctggaaataaactctcagaacactacatatctttacgccagctttttaaccacggtgttcaaggccggttcacagagcttcccacccaaggtgaatcgcgctcggctcaagtccctgtgcgctctcgctgcagagggtatctggacgtacacctttgtcttctcacacggcgatcttagacgaaatgggctcagcgaaagcgaaggagtcatgtgggtggggatgagacttctacagcggcgcggcgactgtttcgcattcatgcatctctgtatacaggagttctgtgctgccatgttttatcttctgaaacggccgaaggatgatcctaatccagctatcggcagcataactcagctggttcgtgcatccgtagtacagccccagacactgctcactcaagtcggtatcttcatgttcggaatctcaacagaggagattgtgagcatgctggagacaagcttcgggtttcccttgtctaaggatctcaagcaagagataacacagtgtctggaatccctgtctcagtgcgaggcagacagggaggctatcgccttccaggagctttttattgggctgtttgaaacccaggaaaaggagtttgtcactaaagtgatgaactttttcgaggaagttttcatttacatcggtaatatcgaacaccttgttattgcctctttctgcctgaaacattgtcaacatctcaccactctccggatgtgcgtagaaaatatcttcccagacgacagcgggtgcatatccgactataacgagaaactggtgtactggcgcgagctttgctccatgtttatcactaacaagaacttccagatattggacatggaaaacacaagtctggatgacccgtctttggctatcctgtgcaaagccctcgctcagcctgtgtgcaagctgcggaaattgatattcacttcagtgtattttggccacgactcagaactgtttaaagcggtgctgcacaaccctcacctgaaactgttaagtctgtacggcacaagcctgagccagagcgacatcagacacctctgtgagaccttaaagcatcccatgtgcaagatcgaagagctaatcttggggaagtgtgacataagttcagaggtgtgcgaagatatcgcctctgtattggcctgtaactcgaagctgaagcacctgtctctagttgaaaatcctctacgtgacgaggggatgaccctgctctgtgaggctctcaagcatagccattgcgccctagagcgcttgatgctgatgtattgctgtctgacgtcagtttcctgcgattccatttccgaagtactgctgtgctctaagagcctgagcctcttggacttgggttctaacgccctcgaagataacggcgtggcctccctatgtgccgccctgaagcatcccggctgctctatacgcgaattgtggctgatgggttgtttccttacaagcgatagctgtaaagacatcgccgcggtgttgatatgcaacggtaaactgaaaactctgaagttgggtcacaatgaaatcggtgatactggcgtcagacagctttgcgctgcgcttcaacacccacactgcaagctggagtgcctgggcctgcagacttgccctataactcgggcctgttgtgacgatatcgcagcggcgttaattgcctgtaagacactaagatctctcaacttggattggattgctctcgatgccgatgccgtggtagtactatgtgaggctttgagtcaccccgattgcgcattgcagatgttgggtaattgccagaaatctctgggcgataccgtcgccccaggtgagaatcattgctcaataaagcatctgcttcttaccctccctatcaacatgcagcggcaactccggctgcaaaagtag

SEQ ID NO: 14607 - DNA, 3039 bp, synthetic construct
  source 1..3039: mol_type = other DNA; note = Synthetic coding sequence
atggatgcactcgatgctagcaaactgctcgacgaagaactttacagtaggcaattatacgtcctcggctcaccagcaatgcagaggatccaaggcgcgagggtcctggtgtctggcctacagggtctcggtgctgaagtagctaaaaacctggttctcatgggcgtcggtagtctgacgctgcacgatccacatcccacctgttggtctgatttggcagctcagtttctactgtccgagcaggacctggaacggtcaagggcagaagctagtcaagagcttttggcacagcttaacagagccgtgcaagttgttgtccataccggggacataactgaggatctgctgcttgactttcaggtggttgtcctgaccgccgcgaaactcgaagaacagctcaaggtgggaaccctgtgccacaagcatggtgtatgttttcttgcggccgacacacgtggcttggtgggccaactattttgtgactttggagaggactttactgtgcaggaccctacagaagcagagccgttaacagccgcaattcagcacatctcgcagggctctcctggtatcctcaccctcagaaaaggagcgaacacccattatttccgcgacggggacttggtgacgttcagcggcattgaagggatggtcgaactgaacgactgcgaccctaggagtatccacgtcagagaagacggctcgctggagattggggacacaacaacattcagccgctaccttcgcgggggcgccattacagaggtcaaaagacccaagacagtgcgacacaagtcactggacacggctcttctgcagcctcatgtggtggcgcagtcgagccaggaggttcatcatgctcattgtctccaccaggctttttgcgctcttcacaaattccaacacttacacggccgcccacctcagccttgggaccctgtagatgctgaaaccgtggtgggactagctcgggacttggagccactgaaacgcaccgaagaggaacccttagaagagcctctcgatgaggctttagtgagaacggtggcattgagttcagctggagtgttatcccctatggttgccatgctgggagcggtcgccgcccaggaggtgttgaaagcaattagtaggaagtttatgcctcttgaccagtggctgtacttcgacgctctcgactgtctgccggaagacggagagttactaccatcccctgaggattgtgcactgcggggaagtaggtatgatggccagatagccgtattcggggccggatttcaggaaaagttaaggcggcagcactatttgctcgtcggtgctggcgccatcgggtgtgagctactcaaggtcttcgcccttgtgggcctaggtgcaggaaattccggaggattgacagtcgtggatatggaccatatcgaacgtagcaacctttcacgacaattcttattcaggagccaggacgtcggtcgtcccaaagctgaggtcgccgctgcagccgcccggggcttaaatcctgacttgcaggtcatccctttgacttaccctctagaccccaccaccgagcatatctacggcgataactttttttccagagtcgatggcgtggcggcagcactcgatagctttcaggcacggagatacgtcgcagcccggtgtactcattatctgaaacccctattagaagctgggacttccggaacatgggggtccgccaccgtctttatgccgcatgtgacggaggcgtacagagccccagctagcgcagccgctagcgaggacgcaccctacccagtctgtacagtgaggtacttccccagcaccgcggagcataccttacagtgggcccgtcacgagttcgaagaactgtttcggttgtcagcagagaccattaatcatcaccagcaggctcacaccagccttgcggacatggacgaacctcaaaccttgactctgctcaaacctgttctgggcgtactgcgcgtcagaccccagaactggcaggattgcgtcgcctgggccctcgggcactggaaactgtgtttccattatggtatcaagcagctgctgcgccactttccgcctaataaggtgcttgaagacgggacacctttttggtccggccccaaacagtgcccccagcccttggagttcgacaccaaccaagatacccatcttctgtacgttcttgccgcagccaatctctacgctcaaatgcatggactaccaggtagtcaagattggacagcactgcgtgagttactgaaacttctgccccagcccgatcctcagcaaatggctccaatttttgccagcaacctggagctggctagtgcaagtgcagagttcggcccagaacaacagaaggagctgaacaaggcgctcgaggtgtggtctgttggaccacccctgaaacctctaatgttcgagaaggatgacgactctaacttccacgtagacttcgtggtggcggctgcgagccttagatgtcagaattatggcatccctcctgtgaacagagcccaatctaaacggattgtgggccagatcattcctgccatcgcaacaacaacagctgcagttgccggacttctgggtctggaactgtacaaagtcgtgtccggtcccagaccccgttccgcgttcaggcactcatacttgcatctggcagaaaactacctgatcaggtacatgcccttcgcaccggccattcaaacatttcaccacctgaagtggacttcgtgggaccgattgaaggtaccggcagggcagcctgagcggactctcgagagccttctggctcacttacaggagcaacacggcctgagggtgaggatactcctccacggatctgccctgttgtatgcagcaggatggtcccccgaaaaacaggctcagcatttacccctccgggtgacagaattagtccagcagctgaccggccaggctcccgcccctggacagagggtactcgtgctggaactgagctgcgagggcgacgacgaggatacagcctttccacccctacattacgagctttag

SEQ ID NO: 14608 - DNA, 360 bp, synthetic construct
  source 1..360: mol_type = other DNA; note = Synthetic coding sequence
atggtaaggaccaagacttggacgctgaagaagcactttgttggttaccctaccaattcagattttgagttgaagaccgctgagctcccaccccttaagaatggcgaagtgttattggaggcactattcttgacagtcgatccttacatgagagtggttgagtccaagaacgtcgctctgcccaaaggcaccatagtcctggcttctccaggctggactacccactctatcagtgatggtaaagatctcgagaaactgctcactgaatggcccgacacaatcccactcagcttggcacttggcacagttgggatgccagggttgacagcatacttcgggctgttggaaatctgcggctag

SEQ ID NO: 14609 - DNA, 1797 bp, synthetic construct
  source 1..1797: mol_type = other DNA; note = Synthetic coding sequence
atgggaggttgcttctccaagcctaaaccggtcgaactgaagatcgaagtggtgctccccgaaaaggagcgagggaaagaagagttgtctgccagcgggaaggggtctccccgcgcgtaccaaggtaatggcacagctcgccatttccataccgaggagagattatctactccgcatccttatcctagtccacaagattgcgtggaagcagctgtgtgtcatgtcaaagacctggaaaatggccagatgcgggaagttgagctggggtggggaaaagttctgctagttaaggacaacggtgaattccatgctctcggccacaagtgtcctcattatggggctcccttggtcaaaggcgtgttgagtaggggccgggtgcgatgtccttggcacggagcctgtttcaatatttcaacaggagatcttgaagacttcccaggcctggattcgctacacaagttccaggttaagatcgaaaaggagaaggtgtacgttagggcctctaaacaagccctgcagctgcagcgaagaaccaaagtaatggccaagtgtatctcgccctccgccggatatagctctagcaccaacgtgcttatcgtgggtgccggggcggctggcctcgtgtgtgccgagacattgcgccaagagggtttctccgaccggatcgtgctatgcacactggaccgccatctgccatatgaccgtcctaagctgagcaaaagtttagacacccaacctgagcaattagctctcagaccaaaggagttttttcgggcctacggcatcgaggtgctcaccgaggcccaggtggtgacagtggacgtgcggacaaagaaggttgtttttaaagacggcttcaaactggagtacagtaagctgcttttggctcccggctcatcccctaagaccctttcgtgtaaaggcaaagaagtggaaaatgttttcaccattcgcacacctgaggacgctaaccgcgtggtgagactggccagaggtcgcaacgtagtggttgtgggcgccggattcctcggaatggaggtggcagcatacctgaccgagaaagctcacagtgtgtccgtagttgaactggaagaaacccctttcaggagatttctcggtgagagagtgggcagagcgcttatgaaaatgttcgagaacaacagggtgaaattctacatgcagacggaggtgagcgaactgcgagggcaggaaggcaaactaaaggaagtcgttcttaaatcctctaaggttgtgcgggcagacgtgtgtgtggtgggaatcggagccgtgcccgccacgggcttcctacggcagagtgggattggtctcgacagtcgcggttttatccccgtcaataaaatgatgcaaacaaatgtgccgggcgtgttcgctgctggcgatgccgtgacctttccactggcctggcgcaataaccgcaaggttaatataccccattggcagatggctcatgcgcaggggagagttgctgcccagaatatgctggcacaggaagccgaaatgagcaccgtgccatatctgtggaccgcaatgtttggaaagtcactgagatacgccggatacggagaaggattcgacgatgtgattatccaaggcgatctcgaggagcttaagttcgtggctttttacaccaaaggagatgaagtgattgccgtggcttccatgaactatgaccctattgtgtctaaggttgccgaagtccttgcatcagggagggccattcggaagagagaggttgaaactggtgacatgtcttggctcaccggtaagggtagctag

SEQ ID NO: 14610 - DNA, 1854 bp, synthetic construct
  source 1..1854: mol_type = other DNA; note = Synthetic coding sequence
atgggcagttacctgtcagtgccagcctactttacatctcgcgatttgttccgatgctcggagtgccaagattctctaactaactggtattacgagaaggatggtaaactgtactgcccaaaagactactggggcaagttcggggagttctgccatgggtgctcactcctgatgacagggccttttatggtagctggcgaattcaaataccatcccgaatgctttgcgtgcatgtcttgtaaagtgattatcgaagacggggatgcctatgcgctcgtgcaacatgctaccctgtattgtgggaagtgccacaacgaggtggtcctggccccaatgtttgagagactttcaactgagtccgtacaggaacagcttccctactctgtgacacttatatctatgccagccaccacagaagggcgtcgtggtttctcagtgtctgtggagtccgcctgtagcaactacgcaaccaccgtgcaggtaaaagaagtgaatagaatgcacatttccccaaacaacagaaacgctatacaccccggggacagaatacttgagatcaacggaactcctgtcaggacgctgagagtggaggaggtggaggatgccatttctcagaccagtcaaactttacagttgctgatcgagcatgatccagtatcacagaggctggatcagctacgtctggaggcaaggctggctccacatatgcagaatgccggtcacccccatgcactctccacccttgacacaaaagaaaacctggagggcacactgcggcgacgatcactgagaagatccaactccatttcaaagagcccaggcccgtcaagccctaaggaaccattactattctcccgggacatctcccgatccgagagtcttagatgcagctcctcctatagtcagcagattttccgcccctgtgatctcattcacggcgaggtgttggggaaggggtttttcgggcaggctatcaaggtgactcataaagctactggcaaagtgatggtgatgaaagagttgatcaggtgcgacgaagagactcaaaaaacgttcttgaccgaagtcaaggtcatgcggtccctcgaccatcccaacgtgctgaagtttataggtgtgctgtataaagacaagaagctgaacctcctgaccgaatatatcgaaggcggcacccttaaagacttcttacgatccatggacccttttccttggcagcagaaggtgcgtttcgctaaagggatcgcatccggtatggcctatctccacagcatgtgtatcatacaccgggatttgaattctcacaactgcctgattaaattggataagactgtggtggttgcagattttgggctatccaggctcatcgtcgaggagagaaagagggcacctatggaaaaagccaccactaaaaagagaaccttaaggaagaacgatagaaagaagcgatatactgtcgtcgggaacccctactggatggcccccgagatgttaaatggcaagtcctacgatgaaacagtggatatcttttctttcgggatcgtgctatgcgagatcatcgggcaggtttatgccgatcccgattgtttaccaagaacactggattttggccttaacgttaagctgttctgggagaagttcgttcctaccgattgtcctccagcctttttccccctggcagccatttgttgtcgcctggaacccgaatcgcgaccagcattttctaagcttgaggactcgttcgaagcgctcagcctctaccttggtgaactgggcattcctctgcccgcagaactggaagagcttgaccatacagtgagcatgcagtatggcctgaccagagactcacccccctag

SEQ ID NO: 14611 - DNA, 1338 bp, synthetic construct
  source 1..1338: mol_type = other DNA; note = Synthetic coding sequence
atgagggaaatcgtacatattcaggccggacaatgcggaaatcagatcggcgctaaattttgggaagttatctccgatgagcacggcatcgatcccaccggctcttatcatggcgattctgaccttcagctcgaacggattaacgtatattataatgaggcagctggcaataagtatgtgccaagggcaattctggtggatttggaaccgggcacaatggatagtgttagatccggcccatttgggcagatcttcaggcccgataatttcgtcttcggccaatccggcgcaggcaacaactgggcaaaaggccattacacagagggggctgaacttgtagattctgttctcgatgtggtgcgtaaggaatcagagagctgcgattgtctgcaaggatttcagctgacccactctctggggggcggaacaggatccggtatggggacactgcttatctccaagatcagagaggaatatcctgatcggatcatgaacacttttagcgtgatgccgtcacccaaggtttccgacacggtggtcgagccctataacgcaacattatcggttcatcagctcgtggaaaacaccgacgaaacctacagcatcgataacgaagcgctgtacgatatttgtttccggacactgaaattgacaactcctacgtatggagatctgaaccatctggtgtcagctacaatgtcaggcgtgaccacatgtctgcggttccccggacagctcaatgcggacctgcggaagttggccgtcaatatggtgcccttcccccgtcttcactttttcatgccaggctttgctcctctgaccagccgcggcagccagcagtatcgcgccctcaccgttcctgagctgactcagcagatgttcgattcaaagaacatgatggccgcgtgtgacccgagacacggcaggtatctgacagtggcagctattttcaggggccggatgtccatgaaagaagtggacgaacagatgcttaatgtacaaaacaaaaatagctcctatttcgtggaatggattcccaataacgtgaaaactgctgtgtgcgatattcccccacgtgggttgaagatgagcgctactttcattggcaacagcactgccattcaggagctattcaaacgcatctcagagcagttcactgcaatgttccggaggaaagcattccttcactggtataccggagagggaatggacgagatggagtttactgaagctgaatctaacatgaatgatctggtttccgagtaccaacagtatcaggatgccaccgcagacgagcagggagagttcgaagaagaggagggtgaggatgaagcctag

SEQ ID NO: 14612 - DNA, 2028 bp, synthetic construct
  source 1..2028: mol_type = other DNA; note = Synthetic coding sequence
atggccaaacacggggccgacgagccttcctctcgaagtggatccccagaccgagaaggaagggcatctgaagaccgaagtctgctgcaccagcgcctcgctgtgagggagctcatcgacaccgaagtatcttatttgcatatgctgcaattgtgcgccagcgacatccgctctagactgcagcagcttcctcaaggggacctggatgtgctgttctcaaatattgacgacattataaaggtgaacagccgcttcctgcatgacctgcaggagacagcatcaaaggaggaggaacaagtgcagctggtcggaaatatcttcctcgagttccaggaagaactggagcaggtgtacaaagtttactgcgcctcatatgatcaggccctcctgttggtcgacacctacaggaaggagcctgagttgcagagacacatacagggaattgtggaagcggttgtgccgcaggccggaagctccggtttatctttcttgctggtgattccactgcagcggattactcgctaccctttgttgctgcaaaaaatactggaaaacacagtccctgacgccagtgcataccctgtattgcagcgggccgtgtctgcccttcaggatgtcaacaccaacataaatgaatataaaatgcgcaaagaagtcgcctccaaatataccaaggtcgaacaactgactcttagagaacgtcttgcgcgcataaacacccatacattgagtaaaaagaccactaggttgtctcagttgctcaagcaggaagccggcctcattccgcgaacagaagacaaagagttcgacgatctggaggagaggtttcaatgggtatccctttgcgtcactgagctgaagaacaacgtggctgcttatctcgacaacttgcaagctttcttgtattttagacctcatgaatataatctcgacatacctgaaggccccgccgttcagtattgcaatctggctcgggacttacatctggaggccttcctgaaattcaagcagcgactcgaagggctcgtgtggcagcccctgtgtagcctggcaaaagcccttttgggcccacaaaacctgataaagaaaaggctcgacaagttattggattttgagcgtgtcgaggagaaactccttgaggttggaagcgtcacgtaccaggaggaggccgctaggcatacttatcaggcgttgaatagtctcctcgtggccgagcttccacagtttaatcaattagtgatgcagtggctcggccagatcatgtgcactttcgttactctgcagagagatctggctaaacaggtgctgcagcgtgccgagggctcaatggcccagttacctcatcatcatgttccggaaccagcttttaggaagcttgtagaagatgctctgggccgtacgagtaaccagctgcgcagctttcaggagacattcgaaaaagtccaacccccccctaccactcagccactgctccccggaagtgaacgacaggtgcaagctttgctaagcaggtatggcccaggcaagctctaccaagtcacttcaaatatctcaggaacaggcaccctcgacctcactttgccaagaggtcagatcgtggccattctgcagaacaaggatacgaagggaaactcgggccgctggctcgttgatacaggcggccataggggctacgtccccgcaggcaagttgcagctctaccacgtggtcccatccgccgaggaattaaggaggcaagccggcctgaataaagaccctagatgccttacacccgagccatcccccgctctagtgccctctataccgaccatgaaccaggtgatagcggcatacccttttgtggcccgctcatctcacgaggtaagcctgcaggcaggccagccagtcactatcttggaggcccaggataagaagggaaaccccgagtggtcactggtcgaggtgaacggccagcggggctatgttccaagcggttttttagcacgggcacgcagccccgtattgtgggggtggtccctacctagttag

SEQ ID NO: 14613 - DNA, 3399 bp, synthetic construct
  source 1..3399: mol_type = other DNA; note = Synthetic coding sequence
atggcttctgatggcgcctccgccctcccgggtcccgatatgagtatgaaaccctccgcagctccgtcccccagtccagcattgcccttcttacccccaacaagcgatcccccagatcacccaccccgggaaccaccgcctcaacctattatgccgagtgtttttagccctgacaaccctctcatgctttccgcctttcccagtagtctcctggtcaccggcgatgggggaccatgtcttagtggagccggcgctggcaaggtgatcgtgaaggttaaaacagaaggggggtccgcagagcccagccaaacgcagaatttcatcttgacgcagaccgcactaaatagcaccgcccctggaaccccctgcggcggtttggaaggcccggcccctcccttcgtgaccgccagtaatgtgaaaaccatcttgcccagcaaagcagtcggtgtgtcccaagagggcccccctggtcttccacctcagccaccgccgcccgtcgctcaactggtcccaattgtgcccctcgaaaaggcatggcccggaccacatggcaccacgggcgagggcggacctgtggccaccctgtccaaaccttcactgggcgatcgctcgaagatttctaaagatgtgtatgaaaacttccgacaatggcagagatataaggccctggcccggcggcatttgtcgcaatccccagatacagaggctctgtcatgcttcctgattcccgttctgaggagtttggcgcgactgaagcctacaatgaccctggaggaggggttacccctcgcagtgcaggaatgggagcacacttcaaacttcgacagaatgatcttctacgagatggccgagcgttttatggaattcgaggcagaagagatgcagatacagaacacacagttgatgaacggatcacaggggctgagcccagccactcctctgaagcttgacccattaggccctctcgcttccgaggtgtgccaacagccagtgtatatcccgaagaaggcagcatccaaaacccgcgctcccaggaggaggcagcgaaaagctcagagaccgcccgcgcctgaggcgccaaaagaaatccctcccgaggccgtcaaagagtacgtagatattatggaatggctggtgggcactcacctcgctactggagaaagcgacggaaagcaggaggaggaaggccagcagcaggaggaggagggaatgtaccccgaccctgggctgctgtcgtatatcaatgaactatgttcccaaaaagtcttcgtgagcaaagtagaggccgttattcaccctcaattcctggccgatcttctgtcacctgagaaacaaagagatcctctggcgctcatcgaagagctagaacaggaagaaggcctgaccctcgctcagcttgtccagaaaaggctgatggcactggaggaggaggaggacgccgaagctccacctagcttttctggagctcagctggactcttccccaagtgggagcgttgaggatgaagacggtgatgggcggctcaggcccagtcccgggctgcagggagctggcggcgcagcatgcctgggcaaggtgagttctagtggcaaacgggcgcgcgaagtgcatgggggtcaggagcaagctctggattccccacgcggtatgcaccgtgacggaaacacccttccgagcccctcttcctgggacctccagcccgagctcgctgccccacagggcacacctggtccgcttggggtggaaagaagaggctctgggaaagtgataaatcaggtaagcctgcaccaggacgggcatctggggggagctggccctccaggtcactgtctggtcgctgatcggacatccgaggcactgccgctgtgttggcagggaggcttccagcctgagtccacgccgtctcttgatgctggactggctgagttggctcccctacagggccaaggactggagaagcaggtactggggctacagaaagggcagcaaactggcggaagaggagtgttgccccagggcaaggagccactcgctgtaccttgggagggaagttctggggccatgtggggggatgatcgcggcacccctatggcacagagttatgatcagaaccctagcccgcgagcagcaggcgagcgggacgatgtctgcctctccccaggtgtgtggctctcgagtgaaatggacgccgttggcctggaactaccggtccaaatcgaggaagtgattgagtctttccaagtggaaaagtgtgttacggagtaccaagaaggttgccagggactgggcagtcgaggaaacatctctttagggccaggcgagaccctggtgcctggggacacagaatctagtgttatcccctgcgggggcactgtggctgctgccgcattggagaagcgcaactactgttccttaccaggccctttgcgcgctaattctcctccactccgtagcaaggaaaatcaggaacagagttgtgaaaccgtgggtcatccttcagatctctgggccgagggatgctttccgctgctggagtccggcgacagtacccttggcagttcaaaggagaccctccctccaacttgtcagggcaatctcttgatcatgggtactgaggacgcaagctctctgcctgaagcatcccaagaagccggtagccgaggtaacagtttcagccctctccttgagacgattgaaccagtgaacatcctcgacgtgaaagacgactgcggcctgcagttgcgcgtgtccgaggacacatgtcccctcaatgtgcatagttacgaccctcagggggaaggccgggtggaccctgatctgagtaagccaaagaatctggccccactacaagagagccaggaatcttacacaactggtacgcccaaagctacaagcagccatcagggcctcggaagtaccctgccgcgccgcgggactaggaacgccatcgtgcctcgcgagacatctgtttcaaagactcaccgatccgctgatagagcaaaagggaaggaaaagaagaaaaaagaggcagaagaggaggatgaagagctgtcaaattttgcttatcttttagcttctaagttaagcctgtctccaagggagcatcctctgtccccacaccatgcatcagggggacagggcagccaaagagccagccacctcctgcccgcaggagctaagggcccatcaaagctaccataccctgttgccaagagcggaaaacgcgcacttgctggtggccccgccccaaccgagaaaaccccccactccggggctcagctgggagtgccacgggagaaacctctggccttaggggtcgtgcggccatctcagccaaggaagcgcaggtgcgactcatttgtaaccgggagacgcaaaaagcgtcgccggtcccagtag

SEQ ID NO: 14614 - DNA, 522 bp, synthetic construct
  source 1..522: mol_type = other DNA; note = Synthetic coding sequence
atggctgtggctgtgggcgttagagctgccccagtcttgggcttggctcgtgctttagtactgggtctgagaggaagccaggccgcacggtggcgcggctggggtacagccgccccgggttcactgtgggccctgtgcgagtgtcccgctggttgtagggaactatggttccggggacgcgcagcatgggctgcccggtctgagcgattacttcacccagcccaggattccgatggcgagagggaggacagtgcagcagagagagcaagacagcagctggaggcccttctgaacaaaactatgcgaatccgaatgacggatgggcgaaccctagtgggctgctttctatgtactgatagggactgcaacgtgatcctggggtcagcacaggaatttttgaagccatccgactcttttagcgcgggcgaaccacgcgtgctggggttggccatggtgcctggtcaccacatcgtctccattgaggtccagagagaatctttaaccgggccaccctatctctag

SEQ ID NO: 14615 - DNA, 558 bp, synthetic construct
  source 1..558: mol_type = other DNA; note = Synthetic coding sequence
atggtgaactcctgttgcgggtctgtgtgcagcgaccaggggtgcgggcaggatctatgccaggagacatgttgttgtcctagttgctgtcaaaccacttgttgcaggacaacctgctataggccgtcctactcagtctcttgctgttgcagaccccagtgttgtcagtctgtgtgctgccagccaacctgctgccgccccagctgctgcgtgagcagctgctgtaaaccccagtgttgtcagtctgtatgttgccaacccacgtgctgccatccttcttgctgtattagctcctgttgcagaccaagttgttgcgtgagctcttgttgtaagccccaatgttgccagagcgtttgttgccaaccaaactgctgcaggccaagctgttccattagttcatgctgcaggccatcctgctgtgagtcctcctgttgcaggccctgttgctgcctccggcccgtctgtggcagggtctcttgccatacgacatgttacaggcctgcatgcgtgatcagtacctgccctaggcctgtctgttgcgcaagctcctgctgctag

SEQ ID NO: 14616 - DNA, 252 bp, synthetic construct
  source 1..252: mol_type = other DNA; note = Synthetic coding sequence
atgtgctgtaactattatcgcaactgttgcggtggctgtggctacggctcaggctggtcatccggatgcggatatgggtgtggatatggctgcggctatggatccggatgtcggtacgggtctggctacggcacaggatgcggttatgggtgcgggtatggaagtggctgtgggtatggttgtggatactctagtagctgttgtgggtatcggccgctgtgttaccggcggtgttacagctcatgctactag

SEQ ID NO: 14617 - DNA, 993 bp, synthetic construct
  source 1..993: mol_type = other DNA; note = Synthetic coding sequence
atggggagccgtaaaaaagaaatagcactccaagtcaacatctctacccaggagctctgggaagagatgctgtccagcaaggggctaacagtagtcgacgtgtatcaaggctggtgcgggccatgcaaaccggtcgtgtccttatttcaaaagatgcggattgaagtcgggctcgatctcctgcacttcgccttagctgaagctgaccggctggatgtgctcgaaaaataccgaggaaagtgtgagcccaccttcttattctatgcagggggcgaactggtagctgtcgtaagaggagctaatgcccctctgctgcagaaaactatactggaccaactggaagctgagaagaaggtcctcgctgagggcagagaacggaaggtgatcaaggatgaggcactgtctgatgaggacgaatgtgtctcacacggcaagaataacggtgaggatgaagacatggtctcgagcgagaggacatgcactctggccatcataaagcctgatgccgtcgcacatggcaaaacagatgagataattatgaaaattcaagaggccggtttcgagatcttaaccaacgaggaacgcacgatgacagaagcagaggtccgacttttctatcagcataaagcgggagaagaagccttcgaaaagctcgtccatcatatgtgttcgggaccttctcacttgcttatcctgacccgtaccgaaggtttcgaggacgtggtgacaacatggcgcactgtgatggggcctagagacccaaacgtcgctagacgcgagcaacctgaatctctgcgggcgcagtacggaacagagatgccatttaatgccgttcacggtagcagagacagagaagatgccgacagagagctggcgcttctatttccttcactgaaattcagcgataaggacacggaagctcctcaggggggcgaagccgaggctaccgcgggacctacggaagcattgtgtttccctgaagatgtagactag

SEQ ID NO: 14618 - DNA, 606 bp, synthetic construct
  source 1..606: mol_type = other DNA; note = Synthetic coding sequence
atggttagctcctgctgtggcagtgtttgctctgaccagggctgtggccaggacctctgccaggaaacatgctgtcggcctagttgttgtgaaactacttgctgtaggacaacttgctgcagaccaagctgctgcgtgagtagctgctgtaggccgcagtgctgtcagtcagtgtgttgccaacccacttgctctcgtccatcctgttgtcaaacaacgtgctgtagaacaacctgctatcggccatcttgttgtgtgagctcctgctgccggcctcagtgttgccagccagcctgttgccagccgacgtgttgcagacccccccgctgctgtatcagcagctgctgtcgacccagctgttgtgtgtcgtcatgttgtaaaccccagtgctgtcaaagcgtgtgctgtcagcccaattgttgtaggccgtcatgctcgatcagctcctgttgcaggccgtcctgttgcgaatctagctgctgcaggccttgctgctgtgtgcggccggtgtgtggtagagtgtcctgtcacaccacttgctaccgaccaacatgtgtaatctccagttgccctaggccattgtgctgtgccagctcatgttgttag

SEQ ID NO: 14619 - DNA, 792 bp, synthetic construct
  source 1..792: mol_type = other DNA; note = Synthetic coding sequence
atgggggacattcctgccgttgggctgagctcctggaaggcgtctcccgggaaagtgacagaagccgtgaaagaggccattgatgcgggttaccggcattttgactgtgcctatttttatcataatgaaagagaagtgggggctggcatccgatgcaagataaaagagggagcagtgagaagggaagacctttttatcgcgacaaagctgtggtgcacctgccacaagaagtcactggtcgagactgcctgtcgcaagtccttgaaggccttgaaactcaattatttggacctctatctgattcattggcccatggggttcaagcccccacaccctgagtggataatgtcttgctccgagctctccttttgtctgtctcatccaagagtgcaggatctgcccctggatgaaagcaacatggtgatacccagcgatacagattttctggacacttgggaggctatggaggatcttgtcatcacgggactggtgaagaatattggtgtcagtaatttcaaccatgagcagctggagagactattgaataagcccggcctccgatttaaaccgctgactaatcagattttaatcagattccagatccaaaggaatgtgatagtgatccccggctctattacgcctagccacattaaagaaaatatccaggtgtttgattttgaactaacccaacatgacatggacaacatcctatccttgaatcgcaacctgcgcctggcaatgtttcctatcaccaagaaccacaaagattacccatttcatatcgaatactag

SEQ ID NO: 14620 - DNA, 177 bp, synthetic construct
  source 1..177: mol_type = other DNA; note = Synthetic coding sequence
atgcgctattatggtagctattatcgggggcttggctacgggtgcggagggtttggtggcctaggctacgggtgtggttgtggtggttacaggtatggttctggatacggaggctacaggtacggatgttgtaggccctcttgcagagagggatatggttttagtggcttttattag

SEQ ID NO: 14621 - DNA, 159 bp, synthetic construct
  source 1..159: mol_type = other DNA; note = Synthetic coding sequence
atgtgctatggctacgggtgcggatgtggaagcttctgccggttaggatacgggtgcgggtacgagggctgtcggtatgggtgtgggcatagggggtgtggtgatggatgctgctgcccatcatgttaccgacgatatcggtttacaggcttctactag

SEQ ID NO: 14622 - DNA, 255 bp, synthetic construct
  source 1..255: mol_type = other DNA; note = Synthetic coding sequence
atgtcatactatggctcgtactaccgaggattagggtatggatgtggcggattcggcgggctcggatatggctatggttgcgggtgcggatccttcagacgactaggctacggatgtggcttcgggggcaatggatacgggtactgccggccctcttgctacggcggatacggtttttccatcctgcttaaatcttatcccgaagatactatatctgaagtcattcgaagatccttcaatctgaccaaatactag

SEQ ID NO: 14623 - DNA, 246 bp, synthetic construct
  source 1..246: mol_type = other DNA; note = Synthetic coding sequence
atgagctactacggcagctactatgggggtctcgggtatggatgtggcggcttcggcgggctgggatatggttacgggtgcggatgcggatcttttcgtcgcttaggtagtgggtgcggttatggggggtacgggtatggttcgggcttcggtgggtatggctacggatccggtttcggcgggtacggctacgggtgttatcgcccaagctattatggaggatatggatttagcgggttctactag

SEQ ID NO: 14624 - DNA, 414 bp, synthetic construct
  source 1..414: mol_type = other DNA; note = Synthetic coding sequence
atgagctacaactgtagctctggcaatttctctagctgctgctttgggagctatctccggtaccccgtgtcaacttataacctcttttacccctccaatgcgatttatagtcctaacacctgccagctgggatcttcactctataatggttgtcaggagacctattgtgagcctacctcctgccagactagctgcaccctagcgaggtcatatcaaaccagctgttattgcccaaagaacagtattttttgcagcccaagacagaccaattatattaggagtctgggttgcggaaacacaggacttggaagtctggggtgcggtagcacaggcttccaatccctggattgcggcagtagtttctatcaccccacaacgttttcaagcagaaactttcaggcgacatgctactag

SEQ ID NO: 14625 - DNA, 483 bp, synthetic construct
  source 1..483: mol_type = other DNA; note = Synthetic coding sequence
atgtcatacaactgttgctcgcggaatttctcctcacggagtttcgggggatacctatactaccccggcagctacccaagctcactcgtctatagcaccgccctctgctcgccaagcacctgtcagctaaggagttcgctgtaccgcgattgccagaaaacatgctgggaacccgcctcctgccagaaaagctgttaccgtcccaggactagcatcttatgttgtccctgtcagacaacatgttcagggtccctgggctttcgcagctcctcctgcaggtctcagggatatggatctaggtgttgctacagcctcgggaacggtagtagcgggttccgttttttaaaatatggtgggtgcggatttcccagcctgtcctatggttcccggttctgctatccaaattacctggcttctggagcctggcagtccagctgctacaggcctatttgtgggtcccgattttatcagtttacatgttag

SEQ ID NO: 14626 - DNA, 684 bp, synthetic construct
  source 1..684: mol_type = other DNA; note = Synthetic coding sequence
atgttgaatcctgatggcgtataccttggcaactatagatgttcactcatgggcttcgacctgaatcgtcattggctggaccctagtccgtgggtacacccaaccctgcacggcgtgaagcagctgatcgtgcagatgtacaatgaccctaagacgtcactggagttttatattgacatccatgcccactctacaatgatgaatggctttatgtatgggaatatctttgaagatgaagaaagatttcagcgccaagccatcttccctaaactgctttgccagaacgccgaagatttttcctacagtagcacgtctttcaaccgcgacgccgtcaaagccgggaccgggagaaggttccttggcgggctcctggaccatacaagctattgctacacactagaggtgtcattttattcatatattatcagtggcactaccgctgccgtcccttacactgaggaagcctatatgaaacttggcaggaacgtcgctagaacattcttagattattatcgccttaaccccgtggttgaaaaagtcgctattcccatgcctaggctgcggaaagagaagagccccccttacaagcaccccctcctaagaggcccggcttccaactaccctaatagcaaaggcgacaaaaagtcatccgtcaatcataaggacccttctacaccgttttag

SEQ ID NO: 14627 - DNA, 465 bp, synthetic construct
  source 1..465: mol_type = other DNA; note = Synthetic coding sequence
atgacccattgctgttccccctgctgtcagccaacttgttgtcggactacttgttgtagaactacatgttggaagcccacgactgtgacaacttgctccagcactccgtgttgccagcctagctgttgcgtctccagctgctgccaaccgtgctgcaggcctacatgttgtcagaatacctgttgtcagcccacctgcgtcacgagctgctgccaaccatcgtgttgctcgaccccctgctgtcagcccacgtgctgtggctcgagttgtgatcagagctcatcttgcgcccctgtctactgccggcgcacttgttactaccctacaactgtttgccttcccggctgtctgaatcagagctgcggcagcaattgttgtcaaccctgctgtagacctgcctgctgcgaaacaacctgtttccaacctacctgcgtctccagttgctgtcaaccattttgttgttag

SEQ ID NO: 14628 - DNA, 7062 bp, synthetic construct
  source 1..7062: mol_type = other DNA; note = Synthetic coding sequence
atgaaacagagaaaaggacagggtagcggcggttcacgcggtagaaagaagagagggttatcagatatttcgccaagcacatctttacctcccctggtggaaggccaattaaggtgttttctcaaactcaccgtcaacagggtgatctggaaaatcgctaaacctccgacctgcgtccttgtccgcgtgagatggtggggagagaccagcgacggcactttgttttgcccgcgcgatgctctgcagaccgagcccaaagcagtaagaaccaccacacggtacgccatccgctgtggcccaaaacaattcacttcttacttgaccgacatggcggtactggtgctcgaggttatcacaaaactggatggcctccccatcggtagagtgcagatcaacggattagcgcagctgtctccaactcaccagataaacggtttcttcaccattgtatcttccacaagtaaaaagctgggcgaactgcaggtatctctggcacttgagcccctgagcgaaacctacgactcttaccacccgttgccaaccactgacatgaccgagaatgtactgttgtctaagcagggttttcgcgagaatacagagcccagtagcacccagtttcaagtaccctccagacctagggacattcacactatcaagatcgatgggaaggagttagccgctaactcttctaggtccaccacgccccgtggaaaagatcacgtgtgtttcgccgagaaccctgacaccattaaagactccagctttgggcttcagcattccctcaactccggacagagcttggaatctgtaactctcaaaggaagggcgccccgcaaacaaatgtcactcctaaatagttctgaattccaaccgcagatacgcaccgtggccaaatcacactcagacagttgcatattgagctcaaataacctaccaactaaggacctactgagcgccttgctggagcagggaaacaaactaaggaacgcaatggtgatctcagccatgaagtctagccccgagacctccatgctgctggaccaggtgcacccacccattaacgaggactcactacgcgcgtccacccaaatcagagccttcagtcggaaccgcttcaaagatcacatcgaagaccatctgctaccctcaaccgaaaacactttttggcggcacgacactaaggcggatacccgcgcaatccagctactgctggggagtgctgagctctctcagggtaacttttgggacggccttggttcacctccagactctccgtctcctggatccgatgtatactgcatctcagagctgaacgatccacagtacgatcagtcattattggagaacttgttttatactgcaccaaagagtgacaccagcatctctgacttcttgtccgaggaagatgatatcgtccccagtaaaaaaatttcacagtctaccgccctagctaggagctccaaagttctcgagagctccgatcacaagcttaagaaacggtcggccggaaagagaaatagaaatttggtcgaacagcagatgctgtcggagacacctgaagacgcacaaaccatgacactgagtgtggaccgcctggcactcctgggaagaactcatagtgttcgcatcatcatcgagacaatgggcgtgcctcccgattctcctcagatgacgccagggaagaagtcctatgcggggcccccacctaaggtcacaactgcaaaaaaaaggacattctttgttgagtatcatttcccggtgggatttagcgaatctgggctcgggaagacagcgctcataacggaggtggttcggctggcctcctcaaagattactgatggaaaagtaaaatttcagcagcgattcgtgtttcctgtgcaatttggtgggccgatgatcgagcactggtggaacagtaacctgaccttccaaatctatgtgaagaaaacaccgcaaaagaaacccgaggtgattggctctgtgagtctctctttgcgtgcagttattcaaagcgaactgctttctttcagtgatcagctacctgtccagcaggagaatggacagtccccttttggcccactaaaagtcacaatggaattgatcacggataataaagactttacaggcattaacaccaagctcagcggaaatacacactatacccctctctgcgccccaacatctcctaataaagctctgccagagttgaatcaggacatgacttgcactaagaatccccaaaaccttaatcaaatccacgaggagaccgcaaagaaggcccagaatctggttttacctaatagaaaaagcccaagccccgtcgctccacacccatccacattcgtggctactccggcaagccataatctggtcaatcaaaccaacggaaccacaaaggaatcggctttactgttgcacgtacttctcatggtcccagatggtaaagactttattagcggcgagagcgaaaagcaatctccatgcaatgtatatttgaactgtaaactgttttctaccgaggaagtaaccagaagcgttattgcctggggaaccacacaaccagtgttcaacttctcgcaagtgatccctgtttctttatctagcaaatacctggagcggctcaaaaacaacgtaatggtcattgaaacttggaacaaggtacgatctcccggacaggacaagctgttaggccttgtcaaactgcctttgcaccagttttacatgagcttcaaagacgcaaagatctctcgcctgctgctggatgctcagtatcccgtggtggccgtcgactcatacatgccagttattgacgtcttcagtggccatcagaacggcagcttaagggttttcctggcaatgggcagttccaatcagattatggcactgcaaagactaaaaaatgaagaagggaccctgccaccttttagcccaagaccagctcatttcctcgatcagccaaccgctgcaagcgtggccatggctgaagatagaggcaacgggttaatggagcactgcttcgagattcacattgagatggtgaagggtctggcgcctctccaggctaccgtgtggggagaggccgattgttacgtgcagtactattttcccgtgcagcacagccagtcctcggtgctgaaaggccctgagttcctcgagaatggaatcacattgaaacctttccgcacggcaacaacattatgcgtgccagatccaatatttaattctgagcatcaccactccttgctgttgcccgcagaagtgcctgttcagagacttctactgtcagcgtttagcgctcagggactggtgcctggcggtggtgtccagttcgagatctggtgcaggtactattatcctaatgtcagggatcagaaagtggcaaaaggcacactccccctctcccgcatttgtgcgatggtcacaactcaacatagggaggatgtgggtattcagacctttaacctacctctaaccccaaggattgagaatagaaaagagcttagaaaccaatcaagcggcctgttggatgtgggactgcgatacaggcggagcccgcgcacagctgagggagttctcgccgcccggaccgttagcatcagtgtccaaattattcgcgcatgcggactgcaggccgccgctaaggcattagccgagagggaacctgcccttcagttctctgccacagtgggggtcaacgcatcggtgacaacacacctgtcttttttgcctcaaggggaacagcggcggacccatccagtggcatgctctttctgcccagagttttcacaccatgttgagttcacctgtaatctcgttacgcagcattgctccggggaagcctgctttctggctgagctgttggaatttgcggaggtaatcttcgcagtttatcatgaaaatacgaagagtgcctccgacatcattagtatcgagtcctgtaaggaatatctgctgggggtcgttaaagtgccaacgaaggagttgctcatcaagaggagtggcataaccggctggtacccgattattctgcccgaagacggcggcctgcctcatggactggagttgatgcagaaaatcgtgggggggttagagctgagcatctccttcacacacaggggtgatcgggaacgggtattggaagctgccgaacacctcggatggagctttgagaacagtctcaaagactttgttcgaatggatgagggcgagcctgcaaccgtgaccatctctacaccccgtttgtggttacccatccattgtgtcctgcttgccgggcataatcacattcacaagaatacttattgttatctgcggtataagttctatgaccacgaggccttttggacaccactgaagaagcccaaagagagcgtcaacaaaaagcagattatggtgacattcaaagcatcaaaaagggcggaagtgactagaggcccgtcacttctttggtactttcgggaggagcgactcgagatccaagtgtggcgggcgtacggtaacgattccgtggagaggcctcatcagacagatagttggatcggcagtgcttatgtagatttggcccggctgggagagcgatctgctcggactcttactgtgtctggtgtgtaccctctgtttggaaggaatgctagcaacttatcaggcgctgcactgagagtacatgtagtacttagctccctgtcctcacatcttgagccaacgcacgagctagactccatggattgcagtagccactccgaatcagagcaactccccagaagaaacgacgaggtgcagttatctccgcctgaagtgatcagttgtcaccagaagtctcctgcctctactcaagtcccctgtagcagcaccaccgctgaagtgaggcttacccaggaaggccccgccgatctggatggaactttcgcggtaagcattctcgtggaaagagctatgcacctgtcccttaagggtagtcccctcaccgagagaaaggtctccataccatcctgctgtgtctcattcgcaacggctgacgagagctccccagtttacacacaggtggtagaaaacactgactccccaatttggaactttcagcagcagtccaggctgagtaaagaattactgctggatccccagcagaccttggtcttcaaagtctggcacaagggggatgaggagagggtcatcgggttcgcatccgtggacctctccccactgctcagtggatttcagtttgtatgtgggtggtataatatcactgatttctcaggcgagtgccagggccaaattaaagttgccgtcagcccgctggaatctctcatccactttaaggaggaacgccaggccagacgcggcgttgagacttcaaaatctctgattcctatctactccccattctccttcccagctagcgatacctatgccgcgttttcaagtcacatggcccgccagaccctcgatcagctggctcacgcgtcttcaaaggaactcgatttctcctcaccaggaaggtctgacactactcgttcacaggcctctcgacatgaggagcatgttcagaatatcaggaggtttcacgagtccttacatctacagggcgaagctcccctcccttgtgacgacaagttaacgacttctcccctcagttcccagaccagcatcctgacctccttgagaaagaatttgagcgaacttgaccaaattcagcggtatttcagacaaaagttgacaaaaccattcctgcccctctccccacagactcaaactgcaatctcacaacaccaggaatcatgcagggatcatctgggtcctggtgcgtctagtctggacccgggaagccagtgtatcctagaaaaaagctccaatctcgtgcttcaggtttccagtctgatcacggatctgcagaccatcactcgcgacagtcaggctgcactaagtagtcacagagccagatctcggagcaacaaagcaaccaccctgcctgacgctcaggataccgaagcactccaggagcgttgcactatgcccgacgagcctcttgtgcgggctcctgataagggcacagactccccctctccgccaccactggaggagacttcgaatgggggaagaatgttgcacgagagtctgcgacacgcagtcccaattacgcggatgcagagcagcgaggacacagaagcgggccccgcatattctgatgaggactatgaggaggatatcattgaaccccggaccctgaacgagatcaccaccgtcaccgataaaactagcccatggtcctccgttatttcagacacctccgaagtcattagccctcaacctgatgaggttcagagggagggaccctcatgcccctcccccggacctttttgccgagaggagctcatggtgaagtcctcattccttagtagcccagagagagcagttaatccacacctgcctaggcagggcagcccctcccagtccctggtagcatgcgagtgcgaagcttccaaggcacgggtaggaggcgagtccgcctctgcgaatcctcagccgattccttgtcctactctcagcggggcccaacaatcaagcacatttgtcgggtggagctcgcctcagacagaccaaaacaaggaacccaaatcagaagcacccgcggaaaacgaggccgcaaccagcgagctgggcgactcggctgacagctttaagaagctgccactgaatctggcaagccagtcaagacgggaaaatcacaaaggtcctcctattgatagctcagatatccgacagcggcaagtgacaactggctccgagacttctacaaagcagtcccttctgttaccaggccccatcgtggtgccaaacttctttctcccccctcagcagctggaagcctcactgaggatgctcagtctcagtgccaccctgccaccagctgcaacaactgaccaagacaaatcagaagccactaggggcgcactgagccagagaccgtgtagacctcgccctaacagcctgcctctgaacctgcccgaggaggagacactgcgaattgctcgtattttttcatctcagtacagtcagaaagactag

SEQ ID NO: 14629 - DNA, 219 bp, synthetic construct
  source 1..219: mol_type = other DNA; note = Synthetic coding sequence
atgaattattatgggaattattacggcggcttgggttatggatacggaggttttgacgacctaggctacggatacgggtgcgggtgtggttccttcaggcgcctaggttatggcgggggatatggcggctacggttatggaagcgggttcgggggatacggttatcgttcctgtagacctagctgctacggaggctacggattttccggtttttactag

SEQ ID NO: 14630 - DNA, 198 bp, synthetic construct
  source 1..198: mol_type = other DNA; note = Synthetic coding sequence
atgagttacaactgttgttgtggcaatttcagtagtcattcctgcgagggatatctgtgctactcaggctattctcggggaggcagctcttatccttccaatttagtgtacagtacagaaccactcatcagccagcatcttccagctgggtttcttagcctgcaaggcttgagtggagacctgctcgggaatccctag

SEQ ID NO: 14631 - DNA, 384 bp, synthetic construct
  source 1..384: mol_type = other DNA; note = Synthetic coding sequence
atggtgaatagctgctgtggatcagtatgttccgatcagggctgcgatcagggactctgccaagagacatgctgtcggccatcatgctgccagaccacttgctgctgtccaagttgcgtggtttcgtcatgttgccggccctcgtgctctcaaactacatgttgtcagaccacatgctgtcgtccatcctgttgtcacccggtatgttgccagacaacttgtcgaccttcttgcggggtgtccagttgctgccgcccgctatgctgtcagaccacctgccgcccatcgtgtggggtgtcctcatgctgcagaccactgtgttgccaaaccacatgttgtcgagctacgtgctgcagaccctcttgctgcgggagctcctgttag

SEQ ID NO: 14632 - DNA, 318 bp, synthetic construct
  source 1..318: mol_type = other DNA; note = Synthetic coding sequence
atgggctgctgccccggagattgctttacatgttgcactcaggagcagaactgctgcgaggagtgttgctgtcagcctggatgctgtgggtgctgcgggagttgttgcggatgtggaggatctgggtgtggcggctccgggtgcggcggatcgtgctgcggatcctcctgctgcggatcagggtgcggagggtgtgggggctgcggagggtgtggcggcggatgttgcggcagtagctgttgcgggtcctcctgttgtggctctgggtgttgtgggcccgtgtgttgccagccgacgcctatctgtgataccaagtag

SEQ ID NO: 14633 - DNA, 3915 bp, synthetic construct
  source 1..3915: mol_type = other DNA; note = Synthetic coding sequence
atggaggagatacctgttaaggtagcagtgcgcatcagacccctgctgtgcaaggaagcccttcacaaccatcaggtctgcgtgcgcgtgatccccaactcccagcaggtcattattggccgcgacagggtgtttacgtttgactttgtattcgggaagaattctacacaggacgaggtttacaacacttgcattaaacctctagtgctgtcactgattgaaggctataatgcaactgtttttgcatatggccaaactggcagtggcaagacttatacaattggtggcggtcatattgctagtgtggtggaggggcagaaaggcattatccctcgggccatccaggaaattttccagtctatttctgaacacccaagtatcgactttaatgttaaagtgagttacatcgaggtatacaaggaggaccttcgtgatcttctggaactagaaacatccatgaaagatctgcatatcagggaggacgaaaagggcaatactgtgatagtaggtgctaaggaatgtcatgttgagtctgctggggaagtgatgtccttactagaaatgggtaatgctgctaggcacacagggaccacacagatgaacgagcatagttctcggagtcacgcaatctttactattagcatttgtcaagtgcacaaaaatatggaggctgccgaagatggcagctggtacagcccgcggcacattgtctcgaagttccattttgtcgatctcgctggatcagagcgggtgacgaagactggaaacaccggggaaaggtttaaagagtccatacaaatcaattcaggcctcctggcactcggaaacgttatatccgccctcggggacccccgacgcaaaagttctcacattccctacagagacgccaagataacccgtctgctcaaagacagcctgggtggcagcgctaagactgttatgattacctgcgtgagcccctcctccagtaactttgacgagtcactcaattcactgaaatacgccaatcgtgctagaaacatcagaaacaaaccgacggtgaacttcagcccagaatcagatagaatagatgaaatggagtttgagatcaagctgttacgggaagccctgcagtcacaacaagccggcgtatcccagacaactcagataaacagagaggggagccccgacaccaatcgcatccatagccttgaagaacaggtagctcagttacagggtgaatgtctaggctaccaatgctgcgtggaggaggccttcacatttctggtcgacttaaaggacactgtccgcctgaatgagaagcagcagcacaagctccaggagtggttcaatatgattcaggaagtgagaaaagcagtgctaaccagctttaggggcattggcggtacggcttcgctggaggaaggtccgcaacacgtgaccgtgttgcagcttaagcgggagctgaagaaatgccagtgcgtgctggctgctgacgaggtggtgtttaaccagaaggaactcgaggtcaaagaactgaaaaatcaagtgcagatgatggtacaggaaaacaaggggcacgccgtgtcacttaaggaggcacagaaggtcaacaggttgcagaacgagaagatcattgagcaacagcttctcgtagaccagctgagtgaagagctcaccaaactcaacctgtcagtgaccagttcagccaaagagaactgcggcgatggtccagatgctaggattccggagagaagaccatataccgtcccttttgatacccacctggggcactacatctatattccatccaggcaggatagccggaaggtgcatacttctccacccatgtatagtctagaccgcatttttgcaggctttaggacaaggtcacagatgctcttgggacacatcgaggagcaggataaggttcttcactgccagttctccgataattctgacgatgaagaatctgaggggcaggagaaatctggtacgcggtgccggtccaggtcttggattcaaaagcctgacagcgtctgtagcctggtggaactgtcggacacacaggacgaaacgcaaaaatctgatctggaaaatgaagatctaaagattgattgtctccaggaatctcaggagcttaacctgcagaaattgaagaattcggaacgtatcttgactgaagcgaagcagaaaatgagagagctgacaattaatatcaagatgaaggaagatctcatcaaggaactgatcaagactggtaatgacgcaaagtccgtctccaaacagtacagcttgaaggtgaccaaactggagcacgatgccgaacaggccaaagtggagctgatagaaacgcagaagcaattgcaggagttggagaacaaggacttgtccgacgtagcgatgaaagtgaaactccagaaggaatttcgaaaaaagatggatgccgccaaactgcgtgtgcaggttttgcagaagaaacagcaggattccaagaaattggcaagcctgtcaatccagaatgagaaacgagcgaacgaactggagcagtccgtcgaccacatgaagtaccaaaaaatccaactgcaacgcaagctgcgcgaggaaaatgagaagcggaaacagctggatgccgtgataaagcgggaccagcagaagattaaggctctgaacacagatagtctaaagatcagcacgagacttaatctgctagagcaagaattgagcgagaaaaacgtccaactgcaaacctcgactgcagaggagaaaactaaaatctccgagcaggtggaagtgctacagaaggagaaggaccaattgcagaagcggcgacacaatgtggacgagaaattgaaaaacggcagagtcctgtccccggaagaagaacacgtgttattccaattggaggagggaattgaggccttggaagctgcgatcgagtataggaatgagtctatccaaaaccgccaaaaaagcttgcgagcctcattccataacctcagtaggggcgaggctaacgttctggaaaagctagcctgcctgagtccagttgagatccggaccattctctttcggtacttcaacaaggttgtgaacctccgtgaagcggagagaaaacagcagttatataatgaggagatgaagatgaaggtcctggagagggacaacatggtgagagaattggaaagtgctctggatcatctaaaactgcagtgcgatagacgactgaccctgcagcagaaagaacacgaacaaaaaatgcagctgctgctacaccacttcaaagaacaagatggggaaggtataatggaaacctttaaaacctatgaggataaaattcaacagctcgagaaggatctctatttctataagaagacatctcgagaccacaagaaaaagttgaaggaactggttggcgaggccatcaggaggcaactggcaccttccgaataccaggaggccggggacggggttctgaagcccgaaggggggggaatgctttcagaggaattgaagtgggccagccggccagaatctatgaagctctcggggagagagcgggagatggatagtagtgcctcctccctgcgaacgcagcccaacccccaaaagctgtgggaagatattccagaactgcctccaattcacagttcgttggcccccccctctgggcacatgctcggcaacgagaataagacagaaaccgatgataaccagtttacaaagtctcactcccggcttagctctcagatccaagtggtgggcaacgttggtcgccttcacggagtgacacctgttaagctctgcagaaaggagctgcgccagattagcgcattggagctgtctctgaggcgatcatcgctgggtgtcggtattggatccatggctgcagactctatcgaggtgtctagaaagccgcgggacctgaaaacgtag

SEQ ID NO: 14634 - DNA, 903 bp, synthetic construct
  source 1..903: mol_type = other DNA; note = Synthetic coding sequence
atggaagaggaagctagctcaccagggttgggctgtagtaagccccaccttgagaagctgacgctagggatcacccgcatcctcgagagttcgccgggggtcaccgaggtgactatcattgagaagccacctgccgagcggcatatgatcagttcatgggaacaaaaaaacaattgtgtgatgccggaggatgtgaaaaacttttacctcatgaccaatggctttcacatgacctggtctgttaagttagacgaacacatcattcccctcggctctatggctatcaatagtatatctaagcttacgcagctgactcagagctcaatgtactccctccctaatgcaccaaccctcgccgacctcgaagacgacacccacgaggcgtctgatgaccagcccgagaaaccgcatttcgatagccggagcgtcattttcgaacttgattcttgcaacggcagcggtaaggtatgccttgtgtacaagtcaggtaagcccgcattggcagaggatacggagatttggttcttagatcgggcgctctactggcatttcctgacagatacgttcacagcctactataggctgcttatcactcacctgggtctgccccagtggcagtatgcctttaccagctatggcatatcccctcaggctaagcagtggttttcaatgtacaagccaataacatataataccaacctcctaaccgaggaaaccgacagcttcgtgaacaagttagatccatctaaggtcttcaaaagtaaaaataaaattgtgattcccaagaaaaagggcccagtccagcctgccggtggacaaaaagggcctagtgggccatcaggccccagtacatcctccactagcaagtcatccagtgggtcagggaaccccacccggaagtag

SEQ ID NO: 14635 - DNA, 390 bp, synthetic construct
  source 1..390: mol_type = other DNA; note = Synthetic coding sequence
atgatgactgatctgaagcagtcccattccgtgcgtctgaacgatggaccattcatgcccgtattgggttttggtacatacgcacccgaccatactcctaagtctcaggccgccgaggccactaaggttgcgatcgatgtgggattccgccacatagactctgcgtacctttatcagaatgaagaagaagtcggtcaggctatttgggagaaaattgccgacggcaccgtcaagcgggaggaaattttctacacaataaaactctgggcaaccttttttagagctgagcttgtacatccagcactagaacgaagcctgaaaaaattgggaccagactatgtcgatctgttcatcatccacgtaccctttgcaatgaaaggaagctcctag

SEQ ID NO: 14636 - DNA, 1257 bp, synthetic construct
  source 1..1257: mol_type = other DNA; note = Synthetic coding sequence
atgcatcctgaacctagcgagccagcaactggtggtgccgccgagcttgattgcgcccaagagcctggcgtggaggaaagtgccggtgaccacggttcagcaggacgcggagggtgtaaagaggaaatcaatgaccccaaggagatatgcgtcggaagctcagatacaagttaccacagccagcagaaacagtctggcgataatggaagtggagggcatttcgcccatccgagagaggatagggaagatcgcggccccaggatgactaagtcctcactacagaagctctgcaaacagcataaactatacattacacctgccttgaacgacacactgtacttacactttaaaggcttcgacaggatcgagaatttggaggagtataccggactgcgctgtctctggctgcagtctaatggcatccagaagatcgagaatctcgaagcacaaactgaactgagatgcctgttcctccagatgaaccttctacgcaaaatagagaacctggaacctctgcagaaacttgatgctttgaatctgtctaataattatattaagactatcgagaacttatcctgtttgcccgttcttaatactttgcaaatggcacataaccacctggaaacggtggaagacatccagcacctccaagaatgtctgcggctctgcgtgctcgatctttctcataacaagctcagcgaccccgagatccttagcattctggaatcaatgccagacctccgcgtccttaacctgatgggaaatcccgtgattcggcagatccccaactataggcgtacagtgacagtgaggctgaagcacctgacctatcttgacgatcgccccgtgttcccgaaggaccgggcatgcgccgaagcatgggccagaggaggatacgctgctgagaaagaggagagacagcagtgggaatctcgtgaaagaaaaaaaataacagattcgattgaggcactggcgatgatcaaacagagggctgaggagcggaaaagacaacgcgaatcccaagaacgcggtgaaatgacctcaagcgatgatggcgagaatgtgccagctagcgccgagggtaaagaagagcccccaggtgacagagagactagacagaagatggagctgttcgttaaagaatcatttgaggctaaagacgagctttgccccgagaaaccttccggtgaggagcctccagtagaggccaagcgcgaggatggagatcccgctactgtgactgcctgcgagggctag

SEQ ID NO: 14637 - DNA, 2472 bp, synthetic construct
  source 1..2472: mol_type = other DNA; note = Synthetic coding sequence
atgggcaagaaacgaactaaaggcaaaacagttcctattgatgattcatctgaaactcttgaacccgtctgcaggcatattaggaaggggcttgagcaagggaatctaaagaaagcgctggtcaacgtggaatggaacatttgtcaggactgtaaaaccgacaacaaggttaaagacaaggccgaggaggagacagaagaaaaaccatccgtttggctttgcttgaaatgtggccaccagggatgcggccgcaatagtcaggagcagcatgctctgaaacactatcttactccacgatcagagccgcattgtctggtgttgtcgctagataactggtcagtgtggtgttatgtatgtgacaacgaggtgcagtattgctcttctaatcaactgggccaagtggtggactatgttaggaagcaggcctctatcactacacccaaaccagctgagaaggataacggaaacattgagctcgaaaacaagaaactggagaaggagagcaaaaacgagcaagagcgcgaaaagaaggaaaacatggcgaaggaaaaccccccgatgaattccccttgtcagataacagtgaaggggctcagtaatcttgggaacacctgcttcttcaacgcagtgatgcagaacctttcccagacaccagttctgagagaactgttgaaggaggtgaaaatgagcggaactatcgtcaagatcgaacctcccgacctggcccttactgaacccctcgagattaacttggaaccaccgggtcctcttaccctagccatgagccagttcctgaacgaaatgcaagagacaaagaagggcgtcgtcacacctaaggagttgttttcgcaggtatgtaaaaaagcagttcgctttaagggctatcagcagcaggactcccaagaactactgcgttacctactggatggtatgcgtgctgaagaacaccaacgggtgagcaagggaatcctgaaagcatttggcaatagtactgagaagctcgatgaggaactcaagaataaagtcaaagactacgagaaaaagaagtcaatgccctcatttgtggaccgtatattcggaggggaacttactagtatgattatgtgtgatcaatgtcgcaccgtgagtcttgttcatgaaagcttcctggatctctcccttcccgtcttggatgaccagtccgggaagaaatccgttaatgataagaaccttaagaagactgttgaggatgaggatcaggacagtgaggaagagaaggataacgatagttacatcaaagaaagatcggacatcccatccggcacttccaaacacttgcagaagaaggccaagaagcaggcgaagaaacaggcaaaaaaccagcggcggcagcagaagattcaggggaaggtgttacatctcaatgatatctgcactattgaccaccccgaggactctgagtatgaagccgaaatgtccctgcagggagaagtgaatatcaagtctaatcatatctcacaggaaggcgtcatgcacaaagagtactgcgtcaatcagaaggacctgaatgggcaggccaagatgatcgaatcggtgacagataaccaaaaaagcacggaagaggtggacatgaaaaacataaatatggacaacgatttggaggtactgacctcatctcccactcgaaatttgaatggagcctacctgaccgaaggcagcaatggcgaggtggatatttctaacggcttcaaaaatctgaatcttaatgccgctctccaccctgacgaaatcaacattgagatcctcaacgattcccacacacctggaactaaggtatacgaggtcgtgaatgaggacccagaaactgccttctgtaccctggccaatcgtgaagtatttaataccgatgaatgttcgattcagcattgcctctaccaatttacaagaaacgaaaaactgcgggacgccaacaagttgttgtgtgaagtgtgcacaagacggcagtgcaatggcccaaaagccaatataaaaggcgagcggaagcacgtgtacaccaacgccaaaaagcaaatgcttatttccctggccccccctgtcctgactctacatcttaaaaggtttcagcaagctgggtttaacctgcgtaaagttaacaaacacattaagtttccagagatcttagatctcgccccgttctgcacgcttaagtgcaagaacgtggcagaagagaacacacgcgtcctgtattccctgtacggggtggtcgagcactctggcactatgaggagcggacactatacggcctatgccaaagctagaaccgcgaattcccacttaagcaatttggttcttcatggcgacatccctcaggacttcgaaatggagtccaagggccagtggtttcacatttcagacacccatgttcaagccgtccctacgaccaaagtactcaactctcaagcttatttgcttttttacgagcgaattctgtag

SEQ ID NO: 14638 - DNA, 3204 bp, synthetic construct
  source 1..3204: mol_type = other DNA; note = Synthetic coding sequence
atgaatagtatggacagacacatccagcagacaaacgacaggctccagtgtataaaacagcacttacagaaccccgcgaattttcacaatgcagctaccgagctattggattggtgcggggaccccagggcattccaacgccccttcgagcagtctctgatggggtgccttacagtggtcagcagggtggcggcccagcagggttttgatctggaccttgggtatcggttactggcggtatgtgctgccaacagagataagtttaccccgaagtccgcagcactgctcagttcctggtgtgaggaacttgggcgattgctcctgttgcgccatcaaaagagtcggcagagcgatccacccggaaagcttcctatgcagcctccactgtcttccatgtctagcatgaaaccaaccctgtctcactccgacgggtctttcccttatgactccgtaccatggcagcagaatactaaccagcctccggggtccctgagtgtggtgacaacggtgtggggggtcactaatacatcccaaagccaggtacttggcaaccccatggccaacgcgaataaccccatgaacccaggggggaaccccatggcctccgggatgaccactagtaatcctgggctgaatagtccacagttcgcaggtcagcagcagcagttctccgccaaagctggacccgcccaaccatatatccagcagtctatgtacggcagacccaattaccccggttccggcggttttggagctagttatcccggcggaccgaacgcccccgccggcatgggaattccacctcacacaagacctccggctgattttacacagcccgctgctgccgctgccgcagccgctgtggccgctgctgctgcaacggcaaccgcaactgccacggccacagtggccgccctacaggagactcagaacaaggatataaatcagtatgggcccatgggtcccacccaggcctataactctcagttcatgaatcagccaggacctagaggtccagcctccatgggtggctccatgaaccccgcgtctatggccgctgggatgacgcctagcggaatgagtgggcctccaatgggaatgaatcagccccgcccacccggcatatccccgtttggaacgcacgggcagcgtatgccacagcagacctaccctgggcctaggccacagtctctccctatccaaaatattaagcggccctatccaggggagcctaattacggcaaccaacagtacggcccgaacagtcagtttcctactcaaccaggtcagtacccagctcctaatcccccgcgaccacttactagccctaactatccaggccagcgcatgccaagtcagccctctagcggccagtatcctccccctaccgtgaacatgggacagtactacaaacccgagcaattcaatggccaaaataataccttctccggctcctcatatagtaactattctcaaggcaatgtcaatagaccaccaagacctgtgccggttgccaattatcctcactctccagtcccaggcaatccaactcctcctatgacgcccggaagctcaatcccgccgtacctttctccatctcaagacgtgaaaccccctttcccacccgatattaaaccgaatatgagtgcgcttcctccaccccctgccaatcacaacgacgagctgcggctcactttccctgtgcgtgatggcgtagtgcttgaacccttcaggttggaacacaatctggcagtgtctaaccacgtattccatcttaggcctactgttcaccagacccttatgtggcgctcggatctcgaactccaatttaagtgctaccatcacgaggaccgacagatgaacacaaactggcctgccagcgtgcaagtgtctgtcaatgccacccccttaaccatcgagaggggagacaacaaaacttcccataaaccactgcatttaaagcacgtttgccaacctgggagaaacaccattcagatcaccgttactgcatgctgctgttcccacctattcgtactacagctggttcacagaccttccgtgcggtccgttcttcagggcctgctgaagaaaagactccttcctgccgagcactgtatcaccaagatcaagcgaaacttttcatcagtggctgcttcatccggaaacacgacactgaatggcgaagatggcgtggagcagacggctataaaagtctctctgaaatgccccattaccttccgtcggatacagctgcccgcaaggggccacgactgtaagcatgtccagtgttttgacctagaatcatatctccaacttaattgcgagcgtggaacttggagatgcccagtttgcaataaaacagccctcttagaaggtctagaagtggaccaatacatgtggggtatcctcaatgctattcagcacagtgagttcgaagaggttacaattgacccgacctgcagttggaggccagtgcccatcaaaagcgaccttcatatcaaagatgatcccgacggtattccgtcaaagaggttcaagaccatgtccccatctcagatgataatgcctaacgtgatggagatgatcgctgctcttggccccggtccaagcccttaccctctgccccccccaccgggaggaactaacagtaacgattattcttcacaagggaacaactaccaggggcatggaaatttcgatttcccccacggcaaccccgggggtaccagcatgaatgacttcatgcacggaccaccacaactgtctcacccccctgatatgcccaacaatatggctgccttagagaagcctctttcacaccctatgcaggaaacaatgccgcacgcaggatccagtgatcagccacaccccagcattcagcaaggtctgcatgtaccccacccctcttcacaatccggaccaccccttcatcactcaggagctccgccaccacccccctcccaacctccacgccagccccctcaggctgctccttcgtcgcatccacacagtgacctgacatttaacccaagctcagccttagagggtcaagctggagcacagggagcatccgacatgccagagccttccttggatcttctgccagaattaacaaaccccgacgagctgttgtcttatctggacccgcctgacctgccatccaacagcaacgacgacctgctgagcttattcgagaataactag

SEQ ID NO: 14639 - DNA, 1038 bp, synthetic construct
  source 1..1038: mol_type = other DNA; note = Synthetic coding sequence
atggatggtgaagatatacccgatttttcgagcctgaaggaggaaacagcctattggaaagaactgtctctgaagtacaaacaatcctttcaggaggccagagacgagctcgttgaattccaggagggatctcgggaactagaagcagagctggaagcccaactagttcaggccgaacagcggaacagagacctgcaggctgataaccagagactcaaatatgaagtggaggccctgaaggagaaactggagcatcagtacgcccaatcttataagcaggtctccgtgctcgaggatgacctgtcccagaccagggctataaaggagcaactccataagtacgttcgagagctggagcaagcgaatgatgacctcgagagagccaagcgcgccacgattgtaagcctggaagactttgagcagcggctcaatcaagccatagagcgtaacgcttttctggagtccgagctggacgagaaagaatccctcctggtctccgtgcagcggttaaaggatgaagcccgtgatctgagacaggagcttgcagtccgggagcgacaacaggaggtaacccgcaaaagtgccccctcaagccccaccctggattgcgagaagatggacagcgctgtgcaggctagtcttagcttgcctgctacccccgtcggcaagggcactgagaacacatttccctctccgaaggcaatccctaatggatttggcacaagtccccttaccccctcagctaggatttccgccctgaatatcgtgggagacctcctgagaaaagttggggctcttgaatctaagctggcggcttgccgtaacttcgctaaggatcaagcgtcgcggaaatcatacatttccgggaatgttaattgtggcgttttgaatggcaatggaacaaagttctctcggagcggtcataccagcttttttgacaaaggagctgtcaatggctttgacccggcccccccgcctccaggattggggtcgtctagaccctcctctgcaccagggatgctgccactcagtgtgtag

SEQ ID NO: 14640 - DNA, 588 bp, synthetic construct
  source 1..588: mol_type = other DNA; note = Synthetic coding sequence
atgggctctagggcgagtaccttgctgagagatgaggagctcgaggaaataaaaaaagagactgggttctctcattcacagatcaccagactgtactctagatttacgtccctagataagggggagaacgggaccttgtctcgggaggattttcagcggatccccgaattggccattaaccccctgggggatcgtatcattaacgctttcttcccagaaggggaggatcaggtgaatttcagaggcttcatgcgtacactggcccatttccggcctatcgaagacaatgaaaagagcaaggacgttaacgggccagaacctctgaattcaagaagtaataaattacatttcgccttccgcctgtatgacctggacaaggatgaaaagatctctagggatgaactcctgcaggtcctgagaatgatggttggggtcaatatctcggatgagcagcttgggtctatcgccgatagaaccattcaggaagcagaccaggacggagactccgcgatttcgttcactgagtttgtgaaggtgttggaaaaggtggacgtagagcagaagatgagtatccgcttcctgcactag

SEQ ID NO: 14641 - DNA, 780 bp, synthetic construct
  source 1..780: mol_type = other DNA; note = Synthetic coding sequence
atggcagacgcctgctgtactcgaacatatgtgatcgcggcctccactatgtcagtctgttctagcgatgtgggccacgtgagtagggttagctcaccgtctacctgcacgggctcatcatggcaggtggataactgtcaggagtcatgttgtgagcccaggagctgtgcatcatcttgttgtaccccatcctgctgcgctccagcaccttgcctggctctcgtttgcgccccggtgagttgcgagccttctccatgtcagtccggatgcaccgatagctgcaccccctcctgctgccaacagtctagctgtcagccagcatgctgtacctcctcaccttgccaacaagcgtgctgcgtcccggtgtgttgtaagagcaactgttgcaagccagtgtgctgcgtgtctatctgctccggggcgagtagtccctgctgtcagcaatctagctgtcaatctgcctgttgtaccttttccccctgccagcaggcttgctgcgtcccaatttgctgtaaacccatctgctgcgttcccgtttgcagcggcgcctcgagtctgtgttgtcaaaaaagctcgtgtcagccggcctgttgcaccaccagttgctgtaggccttcttcctcagtatcacttctgtgcagacctgtatgccgccccgcctgctgcgttccggtgccctcttgttgtgttccagcgtctagctgccagcccagctgctgccaccctgcatcatgcctctctttcttatgccgacctgcttgtagcagacttgcatgttag

SEQ ID NO: 14642 - DNA, 171 bp, synthetic construct
  source 1..171: mol_type = other DNA; note = Synthetic coding sequence
atgatatactatagcaactattatggaggttatggctacggaggcctaggatgcggttacgggtgcggatacagagggtatggatgtggttacggcggctatggaggatacggtaacgggtattactgtccttcctgttacgggcggtactggagttatggtttttattag

SEQ ID NO: 14643 - DNA, 897 bp, synthetic construct
  source 1..897: mol_type = other DNA; note = Synthetic coding sequence
atggccgcctcgaccatgagtgtgtgcagttctgcatactctgacagctggcaagtcgatgattgccctgagtcgtgctgcgaacctccttgttctgccccttcttgttgcgcgcccgcccccagcctgagcttagtgtgtacccctgtcagttgcgtgagtagtccgtgctgccaagccgcttgtgaaccttccgcttgccaatccggctgtacatcttcatgtacgccttcatgctgtcagcagagttcgtgtcagcccgcctgctgtacaagcagcccatgtcaacaggcctgctgtgttcccgtgtgctgcaagacagtttgctgcaaacccgtgtgctgtgtgcctgtgtgctgtggcgccgcatcatcgtgctgccggcagtcttcgtgtcagccggcttgctgtgccagctcctcttgccagccggcgtgctgcgtgcctgtgtgctgcaaacccgtgtgctgtgtgtcaacatgttcggaagattccagtagctgctgccaacaatcctcctgccagcctgcctgttgcacaagctcctcttatcagcaggcatgttgcgtgcccgtttgttgtaaaaccgtttattgcaaaccaatttgctgtgtgcccgtgtgttcgcgtgcctccagcagccggtgccagcaacctagctgccagcccgcctgctgcacgacatcatgttgccgaccaagttcttccgtgagcttgctgtgtcatcccgtgtgtaggagcacttgctgtgtgccagttagctcatgttgcgccccgacctcaagttgccagtctagctgttgtcgcccggcctcgtgtgtgagcttattatgccggccagcgagctccaggctggcatgttactccctctgttccggcaagaagtccagttgttag

SEQ ID NO: 14644 - DNA, 567 bp, synthetic construct
  source 1..567: mol_type = other DNA; note = Synthetic coding sequence
atgactgccccctcgtgtgcattccctgtccagtttaggcagccgtccgtatccgggttgtcgcaaatcacgaaatcactgtacatcagtaacggcgtagcagctaacaacaagctgatgctgagttctaaccaaataactatggtcattaatgtatcagtagaggtcgtgaacactttgtacgaggatatccagtatatgcaggtcccagtcgcagacagccctaactctagactttgtgatttttttgatcctattgccgatcacattcactccgtggagatgaaacaggggcgcactcttctgcactgtgcagcgggggtctctaggtcggccgcgctgtgtctggcatatctgatgaaataccacgctatgtccttattggacgcacatacgtggacgaagtcttgcaggcccattattcgccccaattcaggcttttgggagcaactgattcactacgagtttcaactttttggtaagaatacagtccacatggtctcctcaccggtgggaatgatccccgatatttacgaaaaagaagtccggcttatgatcccgctgtag

SEQ ID NO: 14645 - DNA, 147 bp, synthetic construct
  source 1..147: mol_type = other DNA; note = Synthetic coding sequence
atgtctttcgacaacaactatcacgggggtcagggctacgcgaagggggggctcgggtgttcttacgggtgtggcctgtcaggctacgggtacgcctgctactgcccatggtgctatgagcggtcctggttctcaggctgtttttag

SEQ ID NO: 14646 - DNA, 192 bp, synthetic construct
  source 1..192: mol_type = other DNA; note = Synthetic coding sequence
atgagttacagcggtagttattacggtgggctgggatatggctgtggtggtttcggcggactgggttatggctacagttgcggatgcggctcatttagacgcctgggatacggctgcggatatggaggataccgatacagctgttgtcacccatcttgctacgggggttattggtcatccgggttttactag

SEQ ID NO: 14647 - DNA, 189 bp, synthetic construct
  source 1..189: mol_type = other DNA; note = Synthetic coding sequence
atgtgtggcagttattacgggaactactatggtgatcatggctatggttgctgcggatatgagggtttgggctacggttacggcagccttcggtgtggatatagttcctgttgcggctacgggcacggatacgggtcacggttcttttgcggttgtggctacggctgtggaagtgggtactactactag

SEQ ID NO: 14648 - DNA, 4227 bp, synthetic construct
  source 1..4227: mol_type = other DNA; note = Synthetic coding sequence
atgtggtcactgactgcctctgagggcgaaagcactaccgctcattttttcctcggggccggggatgagggactcgggacccggggcatcgggatgaggcctgaggagagcgattccgagctgcttgaagacgaggaggatgaggtgccccccgagcctcagataattgtgggcatttgtgctatgacaaaaaagagcaagtcaaaacctatgacccagattctggagcgcctctgcagattcgattacctgaccgtggttatactaggagaggatgtcattctgaatgagcccgtggagaattggccaagttgtcactgcctgatttcttttcactcaaagggcttccctctggataaggctgtggcttattctaaactcagaaacccgtttttgattaacgatctcgcaatgcaatactacatacaagaccggagggaagtgtatagaatcctgcaggaggaggggatcgaccttccacggtacgccgtgctcaaccgagatccagcccgccctgaagagtgcaacctgattgagggcgaggatcaggttgaggttaatggcgccgttttcccaaaacctttcgtcgagaaaccagtttctgctgaagaccataacgtgtacatctactatcccagcagtgccggcggcggttcacagagactgttccggaagatcggttcgcggtctagcgtgtacagtccagaaagttccgttcgcaagacgggtagctatatttacgaggagtttatgcccaccgacggcacggacgttaaggtctataccgtggggcccgattatgcccatgctgaagccaggaagtctccagctcttgacggcaaagtggagagggactccgagggtaaggagatcaggtatccagtaatgttgacagctatggaaaagctggttgcccgaaaggtgtgtgttgccttcaaacaaacagtttgcggtttcgacctcttgcgggcgaatggccactctttcgtgtgcgacgtgaatggctttagttttgtcaaaaacagtatgaagtattacgacgactgcgccaaaattctggggaacaccatcatgcgagagctagccccccagttccagattccgtggtccatccccaccgaggcagaggacatccctattgtcccaacgacttccggcaccatgatggagctccgatgcgtgattgccatcatccggcatggggacaggacgccaaagcagaaaatgaagatggaggtgaagcatccacggtttttcgccctcttcgagaagcacggcgggtacaagacgggaaaactgaaactgaagcgccctgaacagttgcaggaagttctcgacattacaaggctacttctggccgaacttgaaaaagaaccagggggtgagattgaagagaagaccggcaaactggaacagcttaagtcggttcttgagatgtatgggcacttcagcggaatcaatagaaaggttcaactgacttactaccctcatggagtcaaagctagcaatgaggggcaagaccctcagcgcgagacactcgctcctagtctgctccttgtacttaagtggggcggagagttgacgcccgctggccgcgtgcaggcagaagaattgggcagagcatttcgttgtatgtatcccggaggacaaggagattatgctggcttccctggatgcggactgctccgcctgcattcaactttccgacatgatcttaagatttacgcctctgatgaaggaagagtccagatgactgccgccgcattcgcaaaaggtttgttagctctggagggcgaactgaccccgatactcgtgcagatggtcaaaagcgcaaacatgaatggcttacttgactctgatggtgattctctgtcatcatgccagcatagggtaaaggccaggctccatcacatcctgcagcaggacgccccctttgggcctgaagattacgatcaattggcgcccacccgttcaacctctctgctcaattctatgactattatccaaaaccccgtaaaagtgtgtgaccaggtctttgcccttatagaaaatctgacccaccaaattcgtgagcgcatgcaggacccgcgtagcgtcgacttacaattgtaccactccgagaccctcgagttgatgctccagaggtggtctaagctcgaacgggacttcagacagaaatcagggcggtatgacatttcaaagatcccagacatatatgactgcgtcaaatacgatgtgcagcacaatggttccttggggctgcaaggtaccgcagaattacttcgcctctctaaggccctggccgacgtggttatccctcaggagtatggaatatcccgggaagagaaactggagatagccgtaggcttctgtcttcccctgctgcggaaaatactactagatttgcagaggactcacgaggacgagagtgtcaacaaactccatcccctttactctcggggcgtactgtctcccggtagacacgtgagaacacgtctgtactttacgagtgaatctcacgttcactctctgctctcagttttcagatatgggggtctgctcgacgagacgcaggacgctcagtggcagagggcgctggactatttgtctgccatatccgaactaaattatatgacccagatcgtgattatgctctacgaggacaacacccaagacccattgtcagaggaacggttccatgtggaactccacttctcgcctggcgtcaaaggcgtcgaggaggaaggcagtgcaccagcggggtgcgggttccgcccggcctcaagcgaaaatgaagagatgaaaactaatcaggggtccatggagaatttgtgtccaggtaaggcctccgatgagcctgatcgcgccctccaaacttccccacaacctcctgaaggccccgggctgcctaggagatcaccacttattcgcaaccgaaaggccggctctatggaggtcctttctgaaacatcttctagtagacccggcggctacagattgttttcatcttctcggccgcccaccgagatgaagcagagtggcctaggctcacagtgtacaggactgtttagcaccaccgtgctcggaggaagctcctccgccccgaatctgcaggactacgcccgaagccacggcaaaaagctccctcccgccagtctaaaacacagggatggatttgaagggtgctcaatggtccccaccatctatccacttgagaccttacacaacgcgctttccttacgacaggtctctgagtttctgtcaagagtatgtcagcgacacaccgacgcccaggcccaagccagtgccgccttattcgattcgatgcactcttcacaggcgagtgacaaccctttctcaccacctcgtactctccatagcccacccctacagttgcagcagaggtccgaaaagcccccctggtattctagtggcccaagctccacagttagctctgccggtccgagctcaccaaccaccgtggatgggaattcccaattcggattctctgatcaaccgtcattaaactcacatgtcgctgaggagcatcaaggcctaggtctgttgcaggaaaccccaggatctggtgcccaggagctctctatagagggcgagcaggagctgtttgaacctaatcagagccctcaggtaccgccgatggaaacgagccaaccctatgaagaggtgtcccagccgtgccaggaggtccccgacatctcccagccttgtcaggatatctctgaggctctgtctcaaccttgtcagaaggttcctgacattagccagcagtgccaagagaaccacgacaacggaaaccacacatgccaggaggttccccacatctcacagccatgccagaagagctcgcagctttgccagaaagtcagcgaagaggtctgccaactgtgcctagagaactcagaggaagtgtctcagccgtgtcagggggttagcgtcgaggtcggcaaactggtgcataagttccacgtgggagtagggtcactggtgcaagaaactctagttgaagtcggctcccccgccgaagagatccccgaggaggtgatacagccctatcaagaattttctgtggaggttggccgtttggcacaggagacctctgccattaacctactgtctcaaggcattcccgaaatcgacaagccctcgcaggagtttcccgaagagatcgatctgcaggcccaggaggtaccggaggaaataaactag

SEQ ID NO: 14649 - DNA, 705 bp, synthetic construct
  source 1..705: mol_type = other DNA; note = Synthetic coding sequence
atggaaggcgcctctagaaatttggcttccactccgcgggtccacgccaaagttatgatgtacagaaaggaacagtacctggacgtcctgcatgctctcaaggtagttcgcttcgtgagcgacgctacgccacaggcagaggtgtatctgcggatgtatcagttagagagcggtaaactgcctagaagcccatctttcccactggagcccgacgatgaggtgtttctggccatcgctaaagcaatggaggagatggtggaagattctgtcgattgctactggatcacaagacgctttgtcaatcaactgaacactaaataccgtgatagcttgccacagctgccgaaggcgttcgaacagtacctgaatctcgaggacggtcgcctcctgacgcatctgaggatgtgcagcgcagctcctaagttgccctacgacctttggttcaagagatgtttcgcaggttgtcttccggagtcatcactgcagcgcgtgtgggataaggtcgtctcgggtagctgcaagatcctggtgtttgtcgcggtcgagatattgctcaccttcaaaataaaggtaatggctcttaactctgctgagaagatcacaaagttccttgaaaacatcccccaagattcatcagacgccattgtatcaaaggcaattgacctgtggcacaaacactgcgggacgccagtgcacagcagctag

SEQ ID NO: 14650 - DNA, 537 bp, synthetic construct
  source 1..537: mol_type = other DNA; note = Synthetic coding sequence
atgaccacgctcagggcattcacatgtgacgatttgtttcgattcaacaatattaatctggatccactgactgagacctacggcatccccttctacctgcagtacttagcccattggccggagtactttatcgtggctgaggcccctggcggcgaattgatggggtatatcatggggaaggctgaaggatctgtggcaagggaggagtggcacggacatgtgactgcattgagtgtagcaccggaattcagacgtctcggcctggccgctaaactgatggagctcctggaggagatctccgagcgcaagggtggctttttcgtggaccttttcgtgcgggtatccaaccaagttgccgtcaatatgtacaagcaactgggctacagtgtgtatcgtacagtgatagagtactattccgcatccaacggcgaaccagacgaagacgcttacgacatgcggaaggcactctccagggacacagaaaagaaatccattatcccactgcctcaccccgtgcggcccgaagacatcgaatag

SEQ ID NO: 14651 - DNA, 2373 bp, synthetic construct
  source 1..2373: mol_type = other DNA; note = Synthetic coding sequence
atgggtaccagaaagaaggtgcacgcttttgtgcgcgtcaaacccacagacgattttgcacacgaaatgatccgctatggagacgataagagatcgatcgacattcatcttaaaaaagacattagaaggggcgtagtcaataatcagcagaccgattggagcttcaagctagatggagtccttcatgacgctagccaggacctggtctacgaaacagttgcaaaggatgtggtctctcaggcgcttgacggctacaatggcacaatcatgtgctatgggcagactggcgctggtaagacgtatacgatgatgggcgcaaccgagaattacaaacatcgaggaatactacccagggcactccagcaggttttcaggatgatcgaggaacgtcccacccacgcgattacagtgcgcgtgagctatctggaaatttacaacgaatccttgttcgatctactgagcaccctgccctatgtagggcctagcgtgacgccgatgaccatcgtggaaaatccccagggcgttttcatcaaaggtttaagtgtgcatctcacttcacaggaagaggacgcattcagcttacttttcgagggcgaaaccaatcggattattgctagccacactatgaataagaatagttcaaggagtcattgtatttttactatttacttagaagctcatagccggaccctgtccgaagagaagtacattacctcaaagatcaacctggtcgatctggccggcagcgaaaggcttgggaaatctgggtcagaaggacaggtgctgaaggaagccacctacataaataaaagtctatcctttttggaacaggctatcatcgcactgggtgaccagaagcgtgaccacataccgtttagacagtgtaagctcacccacgctctgaaagattccctagggggtaactgcaatatggtgctggtgaccaatatttacggggaagcagcccagctcgaggaaacactgtcatccttgaggttcgcgagtcggatgaagctagtcacaacagagccagccattaacgagaagtatgacgctgaacgcatggtaaaaaatttagagaaggagttggctcttctgaaacaggagttagcgattcacgacagcctgacaaacaggacatttgtgacctatgatcctatggacgagatccaaatcgcagagattaattctcaggtgaggaggtatctggaaggcacacttgatgagattgacatcatcagcctccggcagatcaaggaagtgttcaaccagtttcgtgtggtactctcgcagcaggaacaggaagtcgagtccacccttagaagaaagtataccctcatcgacaggaatgatttcgctgccattagtgccatccagaaggccgggttggttgacgtcgacgggcatcttgtgggggaaccggagggacaaaactttggcctgggcgtcgccccattctccactaaaccaggtaagaaggcaaaaagtaagaagacgtttaaggaaccccttagcagtttggcccggaaggagggtgcaagctcaccagtcaacgggaaggatttggattacgtgtctacttccaaaactcagctggtgcccagcagcaaagatggagatgtgaaagatatgctgtcaagagacagggagacttcatcaattgaacctctgccgagtgatagccccaaagaggaattgcggcctatcaggcccgatacccccccatcaaagcctgtagcctttgaggagttcaagaatgaacagggaagtgaaatcaataggatctttaaggagaataaatctatactcaatgagcgtcgtaagcgcgcttcagaaacaacacaacatattaatgcgatcaagcgggaaatcgacgtgaccaaggaggccctgaacttccagaaaagccttcgagaaaagcaaggcaagtacgagaacaaaggtctgatgattatcgacgaagaggagttcctgcttatcctcaagctgaaagatctgaagaagcagtaccgcagcgagtaccaggacctccgcgacctgcgcgccgagattcagtactgccaacatctcgttgaccagtgccgtcaccggctgctgatggaattcgatatatggtataatgagagtttcgtgattcccgaagacatgcaaatggcactcaaacccgggggatcaattaggcctgggatggtccccgtgaaccgcatcgtgtcactgggagaggacgatcaagacaagttttcacaattacaacagcgggtgctacctgaagggccagatagtatttcgttttacaacgccaaggtcaaaatcgaacaaaaacataactacctcaagacaatgatgggcttgcagcaagctcacagaaagtag

SEQ ID NO: 14652 - DNA, 3588 bp, synthetic construct
  source 1..3588: mol_type = other DNA; note = Synthetic coding sequence
atgtggagcctgaccgcctccgagggagagtcaacaaccgcacatttctttctcggcgcaggcgacgaggggcttggtactcgaggcatcggtatgcgccccgaggagagtgacagcgaactcctcgaggacgaagaagatgaagtgccccccgaaccgcagattatcgtgggaatttgtgctatgacgaaaaaaagtaagtcaaagccgatgacccagattctcgaaagactgtgtcggttcgactacttaacagtcgtcattttaggagaagacgtgatcctcaatgagcccgtggagaactggcccagctgccactgcctcatttcctttcatagcaagggcttcccacttgataaggctgtggcctattcaaagctccgaaacccctttttgatcaatgatctggccatgcaatactatatccagggagaccgacgggaggtctacagaatcttacaggaagagggcattgacctcccaaggtacgccgttctgaatcgagaccctgcacggcctgaagagtgcaacctgattgaaggggaggatcaggtagaggtaaatggggcagtatttcctaaacctttcgtggaaaagcctgtctctgccgaagatcataatgtctacatctactacccctcatctgcaggcgggggaagccagaggctgtttcgaaaaatcggtagcaggagttctgtttattcaccggaaagttctgttcgcaagactggctcctatatttatgaggagtttatgcctacagacggtacagatgtcaaggtgtatactgtagggccggattacgcccacgccgaggcccggaagagccctgcactggatgggaaggtggagcgcgactccgagggtaaagagatccggtaccccgttatgctcactgcaatggagaagctggttgcaaggaaggtttgcgtggcgttcaagcagacagtgtgtggttttgacctgcttcgcgcaaatggccactcctttgtttgcgatgtgaatggattctcgttcgtcaagaacagtatgaaatactatgacgattgtgcaaagatcctgggtaatactataatgcgggagctggctcctcaattccagattccgtggtcgatcccgacggaagctgaggacattcctatcgttccgaccactagcggaacaatgatggagctgagatgtgtgatagctattatacggcacggcgaccgcactccaaaacagaagatgaagatggaggtcaagcacccacggttctttgccttattcgagaagcacggtggatacaagactggtaagcttaagctaaagcgccccgaacagctacaggaagtcttagacatcacacgcttgcttctggctgaactggaaaaagaacctggcggcgaaattgaggaaaagacaggaaagctggagcaactgaagagcgtcctggagatgtatggccactttagcggcattaatcgcaaggtccaactcacttactatccgcacggagtgaaggcatctaacgaaggtcaggatcctcagcgtgagaccctcgctccatcgttgcttctggtgcttaaatggggtggggaattgacccctgcggggcgagtgcaggcagaggaactgggccgcgcttttcgctgcatgtatccagggggacagggcgattatgctgggttccccggttgtggtctgctgcgcttgcattctaccttccgacatgacttgaagatctatgcctcggacgagggtcgcgtccaaatgaccgctgccgcattcgccaaaggactgttggctctggaaggggagttgactcccattcttgtccagatggttaagtccgctaacatgaacgggctgctggattcagatggtgactccctgagctcttgtcagcaccgcgtgaaagctagacttcaccacattttacagcaggacgctccgttcggcccagaagactatgatcagcttgctcctacgcggtctacgagtctgctcaactccatgaccatcatacagaacccggtaaaagtgtgcgaccaggtgttcgcactaattgagaacctgacccaccagatacgtgagcgcatgcaggaccctcgctcggtcgatttgcagctgtaccattcagagactctggagctgatgctccaacggtggagcaagctcgagagggattttcggcagaagagcggtcgatacgacatttcaaaaatcccggatatttacgactgtgtgaagtacgatgtgcagcataacggctctctgggcttacagggaacggcggagctgttaaggctgtctaaagctctagcagacgtagtgattccccaagagtatggaataagcagggaggagaagctggagattgccgtgggtttttgtctccccttactcaggaaaatcttgctcgatctgcagcggacccatgaggacgaatacagcaggggtgtgctgtcaccaggcaggcatgtcagaacaagattgtacttcactagcgagagtcacgtgcattcactgctcagtgtgtttaggtatgggggccttctggatgagactcaggatgccgacagagcactgcagacatcccctcagccccctgagggcccgggtctgcccaggagatccccccttatcaggaatagaaaagccgggtccatggaagtcctctctgaaactagctccagtcgtccagggggctatcgtctcttttcgagtagccggccacccacggagatgaaacagtctggcttagggtctcaatgtaccgggctattctctacgaccgtcttaggagggtcgtcctctgcgcctaatttgcaggactacgccagaagtcacggcaaaaaactgccccccgcgtcccttaaacatagagatgagttgttatttgtccctgcggtgaaacggttttctgttagcttcgcgaagcaccccactaacggattcgaggggtgttctatggtgccaaccatctatcccttggagactctccacaatgcgctctccctgcgccaggtaccccctatggagacttcacagccttacgaggaggtaagccaaccctgtcaggaggtcccagacatcagccagccgtgccaggatatttcggaggctctgtcccaaccgtgtcagaaggtgccggacatctcccagcagtgtcaggagaatcacgataatggtaaccacacctgccaagaggttccgcatatttcccagccctgtcagaagtcctcgcagctctgtcagaaggtctccgaggaggtttgtcaactctgcctggaaaattccgaggaagtgtcacagccttgtcagggagtgagtgtcgaggtaggtaaactggtgcataaattccacgtgggagtcgggagtttggttcaggaaaccctcgtggaagtcggcagccccgctgaagaaattcctgaggaagtgatccaaccttatcaagaattctctgttgaggtcggcagattggcccaagagacctctgcgattaacttgttgtctcaaggcattcccgaaatcgataaaccgtctcaggaattcccagaagagatagacctgcaggctcaggaggttcccgaagagatcaactag

SEQ ID NO: 14653 - DNA, 240 bp, synthetic construct
  source 1..240: mol_type = other DNA; note = Synthetic coding sequence
atgtgctgtaactactatggaaatagctgtggttacggatccggctgtggctgtggctatggatccggcagtggctgtggttgtggatatggaaccggttacggatgcggctatgggtgcggatttggctcccattacggatgtggctacggcacagggtacggttgcgggtatggatccggttccggatactgcggatatcgccctttctgttttcgacggtgttactcttcctgctag

SEQ ID NO: 14654 - DNA, 1767 bp, synthetic construct
  source 1..1767: mol_type = other DNA; note = Synthetic coding sequence
atgaagctggagttcacagaaaaaaattacaattctttcgtgctgcagaacctgaacagacaacgtaaacggaaagaatactgggacatggcattaagcgtggacaaccacgttttcttcgctcataggaatgtcttagccgcggtgtctccactggtacgcagtctgatttctagcaacgacatgaaaacagctgatgagttgttcatcactattgatacttcttacctttcacctgtcacagtggaccaactgctggactacttctatagcgggaaagtggttatcagtgagcagaatgtggaggaactgctgcggggagctcagtatttcaatacaccacgcctgagagtgcattgtaatgattttctgatcaaaagcatatgtcgggctaattgtcttcgatacctgtttctggctgagctgttcgagctgaaagaggtgagcgatgttgcctattcaggaatcagggataacttccactattgggcctctccggaaggatcgatgcatttcatgaggtgtccacccgtgatctttggacgcctgttacgggacgaaaaccttcatgtgttgaacgaagaccaagccctctcagctctgattaactgggtatacttcagaaaagaggatagagagaagtacttcaagaaattcttcaactacatcaacttgaatgcagtctccaataaaacactagtttttgctagcaacaaactggtgggcatggagaacacctcttcacatactacgctcatcgagtccgtcctaatggatcgcaagcaggagaggccctgctcactcctggtgtatcagcggaaaggagctcttcttgattccgtggtgatcctcggtggccaaaaggcccatgggcaattcaacgacggagttttcgcctatattatccaggagaatctatggatgaaactttcagacatgccataccgggcagccgccctgtctgctacctccgcaggcaggtatatctacatttcaggagggaccacagagcagatcagtggcctgaaaactgcctggcggtatgatatggacgacaatagctggaccaaactgccggacctgcctattggactcgtgtttcatactatggttacctgtgggggcaccgtgtactctgttggcggctccatcgcaccaagaagatatgtgtcaaatatctatagatacgacgaacggaaggaagtatggtgtctggcaggcaaaatgagtattccgatggatgggacggcagtcatcaccaagggagatagacacctgtatattgtgacaggacgttgcctggtgaaagggtatatctctagggtgggggtcgtggattgcttcgacacaagcactggcgatgtggtgcagtgcattacatttcctattgagttcaatcatcgccctcttttgagcttccaacaggacaatattctgtgcgtgcattcccacagacaaagcgtggagatcaacttgcagaaagtgaaggcctcaaagaccaccactagtgtgcccgtgctgcctaattcctgtccgctcgacgtctcgcatgccatatgtagcataggggactctaaggtgtttgtatgtggcggggtcacgactgcatccgatgtgcagaccaaggattacactatcaatcccaatgcatttctgctggaccagaaaacggggaaatggaagacactcgcacccccccccgaggccttagattgccccgcttgttgcctggccaagctcccatgtaagatcctgcagcggatatag

SEQ ID NO: 14655 - DNA, 2208 bp, synthetic construct
  source 1..2208: mol_type = other DNA; note = Synthetic coding sequence
atgatccccccacaggaggcgagcgctagaagaagggagatcgaagacaaacttaagcaggaggaggagacactgtccttcatccgcgactcactggagaagagtgaccagctgaccaagaatatggtatctattctttcgagtttcgaaagcagacttatgaaacttgagaactcgattatcccagtgcacaagcagactgagaacttgcagaggttgcaagagaacgtcgagaaaacgttgtcctgtttggaccatgttatctcttactatcacgtagcttccgacaccgagaaaatcattcgggaaggaccaacgggacgtctggaggaatatctgggttcaatggctaaaatacagaaggccgtagagtatttccaggataattcccctgacagccccgagttgaataaggtgaaacttctgttcgaaaggggtaaagaggctctcgaaagtgagttccgatcattgatgacacgccatagtaaagtggtgtcacctgtccttatccttgatctcattagtggcgacgacgacttagaagctcaggaagatgtgaccctggaacatctgccggagtctgtcctccaagatgtgatccgcataagcagatggttggtcgaatacggacggaaccaggatttcatgaatgtgtattaccagataaggtcttctcagctggaccgatcaatcaaggggctgaaagaacactttcataagagctcatcgagttccggtgttccctattcgccggccataccaaataagcgcaaggacaccccaacaaagaagcctgtgaagcgccccgggactattcgcaaggctcagaatctgctgaaacaatactcccagcacggacttgacgggaaaaaaggcggctcaaacctgatacctctggagggactgctgccctgtacaccacggggggggttgcccggaccgtggataaacgcagcgtgtgtgtgtgctgccgatatttccccgggccatgaacatgacttccgggttaagcatttgtctgaggccttgaacgacaagcacggccccctggcaggtagagacgacatgctcgacgtggagaccgatgcatatatccattgtgtgtccgctttcgtcaaactggcacaaagtgagtatcagctgcttgctgacatcattcctgagcaccatcagaagaaaacattcgacagtctgatccaggacgctctcgatgggctgatgcttgagggagaaaatatagtgagtgccgcgcgaaaagccatcgtcaggcatgatttttccacagtgctcaccgttttccctatactgaggcatttgaagcagaccaagccggaattcgaccaagtgctgcagggcacagccgctagcaccaagaataagttgccaggccttatcacttcaatggaaacaatcggcgccaaagcgctagaggacttcgccgacaacatcaagaacgacccggataaagagtataacatgcctaaggacgggactgtgcacgaactgacttccaatgccattcttttcctgcagcagctgctagattttcaggagactgcgggtgcgatgctggctagccaggaaacgtcctcctctgcaacctcctattcttcggagttcagcaagcggctgctgagcacctacatttgtaaggtgttaggcaatcttcagctcaacttgctttccaaatccaaagtgtatgaggatcccgccctttccgcaatttttctgcacaataattataactacatactgaagtcgcttgagaagtctgaactaatccaactcgtagcagtgacacagaagactgccgaacgcagctatcgggagcacatagaacaacagatacagacctatcagcgttcatggttgaaagtaaccgactatattgccgaaaaaaacctccctgtgttccagccaggcgtgaagctgcgtgataaggaaagacagatcattaaggaacgatttaagggcttcaacgatgggctggaagaactgtgcaaaatccagaaggcgtgggctattcccgacactgaacaaagagaccgtataagacaggcacagaagaccatagtgaaagagacctacggtgctttcctgcagaagttcggatccgtgcctttcacgaagaacccagaaaagtatatcaagtacggtgtggagcaggtaggtgacatgatagaccggctatttgacacttccgcctag

SEQ ID NO: 14656 - DNA, 378 bp, synthetic construct
  source 1..378: mol_type = other DNA; note = Synthetic coding sequence
atggcgggggccggccctacgatgcttctccgagaagagaacggttgttgcagtcggagacaaagtagtagcagtgccggggacagcgatggagagcgtgaggatagtgccgctgagagggcacgccagcaactggaagcactgctcaacaaaacgatgcgaattagaatgacagacggacgtactcttgttggatgctttctgtgcacggaccgagattgcaatgtcattctcggatctgctcaagagttccttaagccttctgatagctttagcgccggtgagccgagggtgttgggtcttgctatggtgcccggtcaccatatcgtatccatcgaggttcaacgagaatctctcaccggtcctccttacttgtag

SEQ ID NO: 14657 - DNA, 477 bp, synthetic construct
  source 1..477: mol_type = other DNA; note = Synthetic coding sequence
atgctcttgctggactgcaacccagaagtagacggcttgaagcatttattagaaacgggggcctcggtgaatgcaccgccggatccatgtaaacagtctcccgtccatctagcggccggctcaggcctggcatgcttcctgctatggcagttacagaccggagccgacttgaaccaacaagatgtattgggggaggcaccgctgcacaaagccgctaaagtcggtagcctggaatgcttaagtctgctagtggcaagcgatgctcaaatagatctatgcaacaaaaatggacagacagccgaggacttggcgtggagctgtggctttcccgattgcgcaaagttcctgacaaccatcaaatgtatgcagaccatcaaggctagtgagcatccagaccggaatgattgtgtggcagttctgaggcaaaagaggagcctcggctctgtagaaaacactagtgggaagcgcaagtgttag

SEQ ID NO: 14658 - DNA, 8712 bp, synthetic construct
  source 1..8712: mol_type = other DNA; note = Synthetic coding sequence
atgcggggacgcaggggccgtccccccaagcagcctgccgccccagccgccgaaaggtgcgcgcccgccccccctcctcctcctccacctcctacatcgggccctattggtggactgcggagcagacatagagggtcttcacgcggaagatgggccgcggctcaggcagaagtggcccctaagacccggttgtccagcccaagaggtgggtcctcgtccagaagaaagcctcccccaccacctcctgctcctccttccacctcggctccggggcgtggcgggcgaggcggaggcggtggaaggacgggaggaggcggaggtggggggcacctcgctcgaacgacggctgctcgtcgcgccgtgaataaagtcgtgtatgacgatcacgagtctgaggaggaggaggaagaggaggacatggtctccgaggaagaagaagaggaggatggtgatgctgaggagacacaggatagtgaagatgacgaggaagacgagatggaggaagatgacgacgattctgattaccctgaggaaatggaagacgatgatgacgatgcctcctattgcaccgagtcaagctttcgctcacattcgacttattcttccactccaggcaggaggaagccacgagtgcacagacccaggtctccgattctggaagaaaaggacattccccctcttgagttcccaaagagcagcgaagacctgatggtgcctaacgagcatattatgaatgtaatagccatctacgaggtgttacgaaattttggcactgtgttgaggctgtcaccattccgttttgaggatttttgcgcggccctggtctcccaagaacagtgcactctgatggcagaaatgcacgtggtgctgttaaaggcggtccttagggaagaggacactagcaatactacctttggccccgcagatctgaaggattccgtgaatagcacactctacttcatcgatggcatgacctggcctgaggtgctcagagtatattgtgagagcgataaggaataccatcacgtgctcccgtaccaggaagcagaagattacccgtatgggcctgtcgagaataagataaaggtgttgcaattccttgttgaccagttcctgacgaccaacattgcaagagaagagctgatgtcagagggcgtcattcagtatgacgatcattgtagagtctgccataagctcggagacctgctgtgttgcgagacctgttcagcggtgtaccatttggagtgcgttaaacccccgctcgaggaagtgcctgaggacgagtggcagtgcgaagtctgtgtcgctcacaaagtgcccggagtcacagattgcgtcgctgagatccagaaaaacaagccatatatcagacatgagccaatcggttatgaccgcagtagacgcaagtattggtttctgaaccggaggctgatcatcgaggaggatacagagaatgagaacgaaaagaagatatggtactactcgacaaaggttcagctggccgagctcatcgattgtctagataaggactattgggaggctgagttgtgtaaaatacttgaagagatgcgtgaggagatccatcgccatatggatataacagaggacctcactaataaggccaggggctcaaataagagctttcttgccgccgcgaatgaggaaatcctggaatccatacgcgcaaagaagggagatattgataacgtgaagtcacctgaggaaaccgagaaggacaagaatgagacagaaaatgacagcaaggacgctgagaagaacagggaagagttcgaggatcagagtctagagaaagactctgatgataagacccctgatgacgacccagaacaagggaaaagcgaggagcccacagaagtgggggacaaaggaaattctgtcagtgccaacctgggagacaacactactaacgcaacaagcgaggagacgtcgccgtcagaggggagaagtcccgtcggttgtctgtctgagacgccagacagcagcaacatggctgagaagaaggttgcttccgagctgccacaagatgtgcccgaggaacccaacaagacctgcgagagctccaacacatcagctactaccacgagcattcaacctaacttggaaaatagcaatagttcctctgaattaaactcaagccagagtgaaagcgcaaaggccgccgatgaccccgaaaatggcgaaagggaatcgcacactccagtaagtattcaggaggagatcgtgggagacttcaagtctgagaaatcaaacggagaacttagtgaatctccgggagcgggtaaaggggccagcgggagcacacggatcatcacaagattgcgcaaccctgactcgaaactttctcagttgaagtcccagcaggttgcagcagcggctcatgaggctaataaattattcaaagaaggcaaggaggtgctggtagttaattcccagggcgagataagcaggctttctacgaaaaaagaagtcatcatgaaggggaacatcaataactacttcaaactcgggcaggaggggaagtaccgcgtgtatcacaatcagtattccaccaatagtttcgctctgaataaacatcaacatagggaagaccacgacaagcggcggcacctggctcacaagttttgcctgactcccgccggagagtttaagtggaacggttctgtccacggcagcaaagttcttacaattagtacacttcgtttgacaatcacgcagctcgaaaacaatatacctagctcttttctgcatccgaattgggcttctcatagagctaactggattaaggcggtacaaatgtgtagcaaaccgcgtgaatttgccctggcactcgccatactcgaatgcgctgtcaaacccgttgtgatgcttcccatctggagggaaagcctcggacacacacgactccaccggatgacaagtatcgagagagaggagaaggagaaggtgaagaagaaggagaaaaagcaagaggaggaggagactatgcaacaagccacctgggtaaagtacacatttcctgtaaagcatcaagtgtggaagcagaagggcgaagaatatagggtcaccggctatggcggctggtcctggattagcaaaacacacgtctatcggtttgttccaaagctcccgggtaacactaatgtcaattaccggaaaagcctggaaggcaccaagaacaatatggacgagaatatggatgagtccgataaacgcaagtgcagtcgtagtcccaaaaagatcaagatagagccagatagtgaaaaggacgaagttaagggaagtgacgctgccaagggagcagatcagaacgaaatggatatctccaaaatcacagagaagaaagaccaagacgtgaaagagctgcttgactcagactcggacaaaccttgcaaggaggaaccaatggaagttgacgacgacatgaagactgaatcccatgttaactgtcaggagtccagccaggtcgacgtggttaatgtctctgaagggttccatttgcgaaccagttataagaaaaagacgaaaagttccaaactggatggactccttgaaagacgaattaaacaatttaccctcgaggaaaaacagagactcgagaagataaagcttgagggtggcattaaaggcataggaaagacgagtacgaattccagcaagaatttaagcgaatccccagttattacgaaagctaaagaaggttgtcagtcggacagcatgcgccaggaacagtcgccgaatgccaacaacgatcagccggaagatctgatccagggatgtagcgaatctgactccagcgtcctgcgcatgagcgacccgtcccacaccactaataaactctaccccaaggatcgagtcctcgatgatgtgtctattaggagtcccgagaccaagtgccccaagcagaactccatcgaaaatgatatcgaggagaaggtctcagatctagcaagcaggggccaggagccctcaaaaagcaagactaagggaaacgacttttttatcgacgatagcaagttagcctcggctgatgatatcggcactcttatctgcaaaaataagaaaccgctgatccaggaggagagcgataccattgtctcctcctctaagtctgctctgcatagtagtgtgccaaagtctaccaacgacagagacgctactcctctgtcccgcgccatggactttgaagggaaactggggtgtgacagcgagagcaactccacactggaaaactcttcggacacagtgagtatccaagactcctcggaggaagacatgattgttcaaaattcgaatgagtctatttcggaacagttccgcacccgagagcaggatgtggaggtcctcgagccattgaaatgcgagttggtgtcaggggagtccactggtaattgcgaggaccggctgcctgtcaagggaactgaggccaacggaaaaaagcccagccagcagaagaagctggaggagcgtcctgtcaataaatgttcggatcagattaaactcaagaacacaacagataagaagaataatgaaaaccgggagagtgagaaaaagggccagcggacatctaccttccagattaatggcaaagacaataaacccaaaatctatctgaagggggagtgtctcaaagagatttccgagtcaagggtggtgtcggggaacgtggagcctaaagttaacaacattaataaaattatcccagaaaacgatatcaaatccctgactgtcaaggagtctgcaattcgccccttcatcaatggcgacgttattatggaagacttcaacgaacggaacagcagtgagacaaaatctcatctgctcagctcaagtgatgccgaaggaaactatcgagactctttggagacactgcctagtactaaagagagtgattccacccaaaccacaactccgagcgctagctgccctgaaagcaacagcgttaaccaggtggaagacatggagatcgagacgagtgaggttaagaaagtgactagctctcccataacatcagaagaggagtcaaacttgtcaaacgactttatcgacgagaatggattgcccataaataagaatgagaacgtcaatggtgaatccaagcggaagacagtcattactgaggtgacaacaatgacctcaactgtcgctactgagtcgaagacagttattaaggtggaaaaaggagacaagcaaacagttgtgtcctcaacagagaattgcgccaagtctactgtgactaccacgaccacaactgttacaaaactcagtactccaagcactgggggatccgtcgacatcatatcggttaaagaacagtcaaaaaccgtagtgacaactaccgtgacagactcgctcaccaccacaggaggcaccttagtaacaagtatgactgtaagtaaggagtacagcacccgggacaaagtgaagcttatgaagttctccagacccaagaaaactcggagcggcacagcactgccttcatatagaaaattcgtaacgaagagttctaaaaaatcgattttcgttctgcccaatgatgatctgaagaagttggcccggaagggcggaattcgagaggtaccctatttcaactataacgcgaagcccgcacttgatatatggccatacccaagtcctaggcctacattcggaattacgtggaggtatcgcttacagaccgtaaagagcttggcaggggtttccctgatgttacgtctgttgtgggcgagcctgagatgggacgatatggcagcgaaagctcctcccggaggcggcactacccggacagaaaccagcgagactgaaattaccactaccgaaatcatcaagagacgggacgtcggtccatacggaattagatccgaatactgcatacgcaagatcatctgccccatcggcgtccccgaaaccccaaaagagacacccacgcctcagagaaagggacttcgcagctctgccctgcggcctaagaggcccgagacacccaaacaaaccgggcccgtgatcattgagacttgggtcgcagaagaagaactggaattgtgggagatacgcgcatttgccgagagggtggagaaggagaaagctcaggccgtcgaacagcaggccaagaagagattagagcaacagaagccgaccgtcatcgctacatctaccacatctcctacatccagcaccacatctacgatatccccagcgcagaaagtgatggttgcaccgatctccgggtcagtcactaccggcaccaaaatggttctgacaacgaaggtgggatctccggccaccgtgacctttcagcaaaacaaaaactttcatcagacctttgctacttgggtgaagcaggggcaaagtaattccggcgtagtccaggtgcagcagaaagtgctgggcatcatacccagcagtactgggacttcccagcagacatttacatcatttcaaccgcgtaccgctactgttaccatacggcctaatactagcggctccggcggcacgaccagcaactcacaagttatcactggtccgcagattagacctgggatgaccgtgatccggacacctctccagcagagcaccctgggtaaggcaatcataagaactcccgtgatggtgcagcctggggccccccagcaagtgatgactcaaataattcggggccagccagtttccacggccgtgtccgcccctaataccgtttcctccacacccggtcaaaagtccctgaccagcgcgactagtacctctaatatccagtcctcagcatcgcagccaccaagaccgcaacagggtcaagtaaagttgacaatggcccagctgacccaactgacgcagggacatgggggaaatcagggtctgacggtggtgatacaaggccaggggcagactaccggccaactacagctgatcccacagggagtcacggtgctcccaggccccggtcaacagctgatgcaggccgcaatgccaaacgggaccgtgcagcgattcttgttcacccccctcgcaacgaccgcaaccaccgcgagcaccacgaccacaaccgtcagtactaccgctgctggaaccggagagcagcgccagtcaaaattgagcccacagatgcaggtccaccaggacaagaccttaccacccgcccagagtagcagcgtcgggccagcagaggcccaaccacaaacagcccagccaagcgctcagccgcagccccaaacacagcctcaatcccccgctcagcctgaggtgcaaactcaaccggaagttcagactcaaaccactgtctctagccatgtgccgtctgaggcccagccaacacatgcgcagtcatccaagcctcaggttgccgcccagtcgcagccccaatccaacgttcaaggccagtcgcccgttcgcgtccagagcccatctcaaacgcgcatacggcccagcactccaagtcagctttctcctgggcagcagtcacaggtacagaccacaacttcccagcccatccctattcagccccacactagcctacagatcccgtcgcaggggcagccccagtctcagccgcaggtcgtaatgaagcataatgctgtgattgaacatctgaaacagaaaaagtccatgactcctgcggagcgcgaagagaaccagcgtatgattgtttgtaaccaagtcatgaagtacattctcgataagattgataaagaggagaaacaggctgccaagaagcggaagagggaggagtcagtcgagcagaaaagatccaaacaaaacgccacaaaactgagtgcattgctgtttaagcacaaagagcagctcagagccgagatattaaagaaaagggccctcctggataaggacctgcagatagaagtacaggaggaactgaagcgcgacttaaaaattaagaaagaaaaagacctaatgcagcttgctcaggctaccgcagtcgcagcaccatgtccacccgtcacgcctgcaccccccgccccaccagcaccacccccatctcctccaccacctccggccgtgcagcacacaggcctgttgtcaacacctacactgccagcagcctcccagaaaaggaaacgggaagaggagaaggattcctcatctaagagtaaaaagaagaaaatgatttcaacaacttctaaggagactaaaaaagatacaaaattgtattgcatctgcaaaaccccctatgacgagtctaagttctacattggctgtgatagatgtcagaattggtatcatgggaggtgcgttggcatcttgcaaagcgaagccgagttgattgacgagtatgtgtgcccacagtgtcagtccaccgaggacgccatgaccgttctgactccactcactgaaaaggactacgaggggctgaagcgggtgctgcggtctttacaggcccataagatggcatggccatttctcgagcccgtggaccctaatgacgcacccgactattatggcgtaataaaagaaccaatggacctcgctaccatggaggagcgggtgcagagaaggtactacgaaaagctgaccgaattcgttgcggacatgactaagatcttcgataactgtcgctactacaatccatctgattccccattctatcaatgcgctgaggtgttggaatcttttttcgtgcagaagcttaaaggatttaaggcgtctcggtcccataataataagctacagtcgactgcttcctag

SEQ ID NO: 14659 - DNA, 2628 bp, synthetic construct
  source 1..2628: mol_type = other DNA; note = Synthetic coding sequence
atgaacttccaggccgggggaggacagtctccacagcagcaacagcagcttgcggggggccccccgcaacagtttgcgttgagtaactccgccgcaatcagagcagaaattcagcggttcgaatcagtgcaccctaatatttacgcaatttacgatctaattgagcgaattgaggaccttgcactgcagaatcagatcagagaacacgtgatcagcatcgaggacagctttgtgaacagccaagagtggaccttgtcacgctcagtgcctgagctgaaggtgggaatcgttggaaacttgagttctggaaagtcagccctagtgcatcgctatttgacagggacctatgtgcaggaggaaagccccgagggtgggcgattcaaaaaggagatcgtggtggacggtcagtcctacctgcttctcattcgtgatgagggtggcccaccagagctgcagtttgcagcatgggtagatgccgtggtctttgtgtttagtcttgaggacgagatctccttccaaactgtctacaattactttttaagattgtgctcattcagaaatgcctctgaagtgccaatggttctagtggggacccaagatgccatttcagcagctaacccccgggtaatcgacgacagtagggctcgaaagctaagtacagatctcaaacgctgcacttactacgaaacctgcgccacctacggactgaacgtggaacgtgtcttccaggacgttgcgcaaaaggtggtcgccctaagaaaaaagcagcagctcgcaattggcccctgcaaaagcctgcctaactctccttctcactccgctgtatccgcagcctcgatccccgcagtgcatatcaaccaggcaaccaacggtggcggctcagcattttccgattacagctcatccgttcccagtaccccatcaatctcacagcgagaactccgcatcgagacgatcgcagcctctagcactcccacccccatcaggaagcaaagtaaacggcggagcaacatcttcacatctagaaagggggctgacttggatcgagaaaaaaaagccgccgagtgcaaagtcgattctattgggtccggccgcgctattcccatcaagcagggaatcctcctgaagaggtccggcaagtccctaaacaaagaatggaagaagaaatacgtgaccctgtgtgacaacggactgctgacctaccaccccagcctccatgattacatgcagaatattcacggaaaagaaatcgacctacttagaacaaccgttaaggtgccaggaaaaaggcttccacgcgcaacgccagcaacagcgcctggcacgtccccacgcgcaaacggactttctgtggaacgatccaatacccagttggggggcgggacaggcgcgcctcacagtgctagttccgcctccctgcacagcgaaaggcccctttccagtagcgcttgggctggcccaaggcctgaggggttacaccaaagaagctgttccgtgtcaagcgcagatcagtggagcgaagccactacgagcctgcctccggggatgcaacatccggcaagcggcccagcagaggtcctgtcttccagtcctaagctggaccccccaccatcaccccatagtaacaggaagaaacatagaagaaaaaagagcacaggcacccccagacccgatggcccgagctccgcaacagaggaagccgaagaaagctttgaattcgtggtggtaagcctgactggacaaacctggcacttcgaggctagcaccgctgaggagcgggagctttgggttcagagtgttcaggctcagatcttggccagcctgcagggctgtcgctcagctaaggacaaaacccgcctgggcaatcagaatgccgctctggcagttcaagctgtgcgtacagttagaggaaactctttttgcatcgactgcgatgcgcctaacccagattgggcttccctcaatttaggcgcgttgatgtgcatcgagtgcagcggtattcaccgtcatctgggtgcacacctctcccgggtccgcagtttagacctggatgactggcctcctgagctcctggcagtaatgaccgccatggggaacgccctcgccaactcagtctgggaaggagcgctgggggggtatagtaagccaggcccagacgcatgtagggaggagaaggagcgctggattcgtgcaaagtacgagcagaagctattccttgcccccctcccatcatctgatgtgcctctgggacagcagctgttgagagctgtcgtcgaggacgatcttaggctgcttgttatgctgcttgcacacggaagcaaggaggaagttaatgaaacgtacggggatggagacggacgcactgccttgcacctgtcttctgccatggctaacgtggtctttacccagctgttgatttggtacggcgtggatgtccgtagtcgcgatgcacgcggcctaactccactggcctacgcccggcgggcaggctctcaggagtgtgctgacatcctcattcagcacggctgtcctggtgagggctgcggactcgcacccacgcccaacagggaacccgctaatggcacaaatcccagtgctgagttgcatcgcagtccctccctcctgtag

SEQ ID NO: 14660 - DNA, 1761 bp, synthetic construct
  source 1..1761: mol_type = other DNA; note = Synthetic coding sequence
atgggtggcgcactcggcctccggcagttacctatctgtgctccagcatgtcgtccaagctcagggcacagtccctgggcggcggcatcaccgaacccaaaccaatggtctagcagaagtcggtggtgttgtctgcggagaagcgaggcaaggagatcttgtcgtcccgttggccgagcagctccaggtccaactagagcaatggcaagacccgccacgtccacacgcagaagcgcctgccccccactgacacctactcctgctctccgcatcgcttggagactgctatcagccaccagcagaacctcacgcatggcctcagtgctctcacgtggtagggttcgatgcccttggcacggtgcatgcttcaacatctccactggcgaccttgaggacttcccaggcttggattccttacataagttccaggtaaagattgaaaaagagaaggtgtacgtgcgtgctagcaagcaggctctgcagctgcagcggaggacgaaagtgatggcaaaatgtatctccccgtcagcgggatatagcagcagcacaaacgtgctgattgtcggggcaggcgcagctggactagtctgcgccgaaactctgcggcaggaagggttctcggaccgaattgtcctgtgcactcttgaccgtcacctgccttatgatcggccaaaactgtctaagtccctggacacccagcccgagcagttggccctcaggcccaaagaatttttcagggcatacggtatcgaagtcctgaccgaggcccaggtggtcacagtcgacgttcggactaagaaggtagtctttaaggatggcttcaagttggagtattccaagctcttgcttgcaccaggctctagccctaagacactcagctgcaagggtaaggaggtggaaaatgtatttacaatccggacaccagaagatgcgaatagggtagtaaggctggctcgcgggcggaatgtggttgtggttggcgccggcttcctcggcatggaggtcgcagcttatctgactgaaaaggctcatagtgtgagtgtcgtggagctggaagagacaccattccgcaggttcttgggggagcgcgtaggcagagccctcatgaagatgttcgaaaacaatagagtgaaattctatatgcaaaccgaagtctctgagcttcggggccaagagggcaaactgaaagaggtagtactcaagagcagtaaggtagtccgggcagacgtttgcgtggtaggaatcggggccgtccccgcaacaggcttcctgagacagagtgggatcggccttgattctcgcggtttcattccagtgaataagatgatgcaaaccaacgtgcccggtgtgtttgccgcaggtgatgctgtcacattcccacttgcttggcgcaacaatagaaaggtgaacattcctcactggcagatggctcacgcacaggggcgagtggcagcccaaaatatgcttgcccaggaagccgagatgagcaccgtaccatacctgtggaccgccatgttcggaaagtcacttcggtacgccggttacggtgaagggtttgacgacgtgataattcagggtgacctggaagagctgaaatttgtggccttttacactaagggagatgaggttatcgccgtcgcctctatgaactatgatcctattgtctctaaagtagccgaggttttggcctcaggacgagcgatccgcaagcgggaagtcgaaactggggatatgagctggctaactggtaaaggaagttag

SEQ ID NO: 14661 - DNA, 1521 bp, synthetic construct
  source 1..1521: mol_type = other DNA; note = Synthetic coding sequence
atgcctgtacaggcagctcagtggaccgagtttctgtcatgtcctatctgttataacgaattcgatgagaatgttcacaagcctataagtcttggctgtagtcacaccgtttgcaaaacatgtctcaataaattacaccgcaaggcttgtccgtttgatcagactgccatcaacaccgacattgacgtgttgcccgtgaactttgcactgttgcaactggttggggcgcaagtcccagaccatcagtcaattaagctgtccaacctcggcgagaacaaacactacgaggtggccaaaaagtgtgtggaagacctggctctctatttgaagcctctaagtggcggcaaaggtgtggcgagcctgaaccagagcgcgctgagtagacccatgcagcgcaagctagtcacactcgttaattgccagctagtagaggaggagggccgggtgagggccatgagagccgcccgctcattgggtgagagaaccgtcaccgagctcatcctgcagcaccaaaatccacaacaactttctgccaacttgtgggcagcggttagagctcgtggctgccagttcctgggccctgccatgcaggaagaagccttgaaacttgttctgctagcactggaggatggatccgctttatcccggaaagtattagtcctgtttgtcgtacagcgtctcgagccacgattcccgcaggcctcaaagacctctatcggccacgtggtccagttgttgtatcgggcctcctgcttcaaggtaacaaaaagagacgaagactcctcgctcatgcagctcaaggaagagttcagatcctatgaagcgctgcgcagagaacacgacgctcagatcgtacatattgctatggaagccgggctgcgcattagcccggagcagtggagttctctactctacggggacctcgcccataagtctcacatgcagagtattattgacaaactgcagtctcccgaaagcttcgccaagagcgtccaagagctgactatagtcttacagaggaccggggatccagcaaaccttaatcgcttgaggccacatctggaactacttgccaatattgatccaaatccagatgcggtatctccaacctgggagcagctcgagaacgccatggtggctgtcaaaacagtggtccacggactggtcgactttatccagaattactcgcgcaaaggacacgaaacgcctcagccccagcctaactcaaagtacaagacatcaatgtgccgagatttaaggcagcagggtggatgtcccaggggcactaattgtactttcgctcattcacaggaagaactggagaagtgtaatccaaggggcctgtacctgcactgctgcctgctcagttcagtggccagtctggggaccgttcataatgagctatacaagcagcagcactgcgaccgcgagaaaattagcgtgtgcgcggtgaagagagcagagacctgcttctctagccaattcttctctccgctcgaagtcccccgagaggaagactag

SEQ ID NO: 14662 - DNA, 783 bp, synthetic construct
  source 1..783: mol_type = other DNA; note = Synthetic coding sequence
atgccacgcgcccggtcaggtcgtaggtcccggggggccgggggaagggaagaaacattcctgagagttcgcgcgaaccggcagaccaggctgaatgctaggatcggcaagatgaagagacgcaaacaagacgagggacaagtgtgccccctctgtaaccgccccttagctggctccgaacaagaaatgtccagacatgtggagcattgcttgtctaaacgggagggctcgtgcatggcagaggatgatgcggttgatatcgaacatgaaaacaataaccgcttcgaagagtatgaatggtgtggccagaagaggattagagcgactactttgcttgaaggagggttccggggcagtggctttataatgtgtagtggtaaagaaaatccagattctgacgctgacctcgatgttgacggcgatgacacgcttgagtacggaaagcctcagtacactgaggccgacgtgattccttgcaccggggaagaacccggggaagcaaaggaaagagaagcccttcggggtgcagtgttgaatggcggcccaccatcgacaagaatcacccccgagttctccaagtgggcaagcgacgagatgccgtcaacaagtaatggagagagttctaagcaggaagcaatgcaaaagacctgcaaaaatagtgatattgaaaaaatcaccgaggattcggcagtcacgaccttcgaggcgctaaaagcaagagtgagggagctggaacgacagttgagtcgcggcgacaggtataaatgtctcatctgcatgtag

SEQ ID NO: 14663 - DNA, 1461 bp, synthetic construct
  source 1..1461: mol_type = other DNA; note = Synthetic coding sequence
atggctgccgtgaaaaccctgaacccgaaagccgaggtcgctcgcgcccaagcagcgctggcagtcaacataagcgcagcgagaggcttacaggatgtcctccgcacgaacctcggcccaaagggcaccatgaaaatgttggtgagtggggcaggggacattaagttgaccaaagatggcaacgtgttgcttcatgaaatgggactccatccccgcattattaccgagggcttcgaggcagccaaagagaaagccctgcaatttctcgaagaagtgaaagtgtcaagagaaatggatcgggaaacgctgatcgacgtggcgcggacatctcttagaactaaagtgcatgccgagctcgccgacgtccttacagaggccgtggtagacagcatcctggccatcaagaagcaggatgaaccaatcgatctcttcatgatcgagatcatggagatgaagcataaaagcgagactgacaccagtctcataaggggtctagtgctggaccatggagccagacatcctgatatgaagaaacgcgtcgaggatgcctacatactgacatgtaatgtatctctggagtatgagaaaaccgaggttaacagtggctttttctataagtctgccgaggaaagggagaaattagtgaaggcggagagaaagttcatcgaggaccgcgtgaagaaaatcatcgaactgaaacgtaaggtatgcggggacagcgataaaggcttcgttgtgatcaatcaaaagggcatcgatccgttttcattggacgcattgtccaaggaaggcattgtggcccttagaagggcaaagcggagaaatatggaaagactcacactcgcctgtgggggtgtcgcgctgaattcatttgatgatctgtcgcccgactgcttagggcacgctggattggtatatgagtacactctcggcgaggagaagttcacgtttatagagaaatgtaacaacccgagatccgttactctgctgattaagggacccaataaacatactctaacacagatcaaggacgctgtgcgagatggacttagagccgtgaagaatgctattgatgacggatgcgtggtgccaggagccggagctgtcgaagtggctatggctgaggcactcatcaaacataagcctagcgtgaagggacgcgcccagttgggagtgcaggcctttgcggacgcgcttctcatcatccccaaagttcttgcgcaaaactctggcttcgacctgcaggagacactcgtgaagatccaggcagagcattctgaaagcggtcagctcgtgggggtagatctaaacaccggcgaaccaatggtagccgcggaagtgggcgtctgggacaattattgtgtgaagaagcagctgctgcactcttgtaccgtgatcgcgactaacatactgctggttgatgaaattatgcgggcaggtatgagcagcctcaagggttag

SEQ ID NO: 14664 - DNA, 1407 bp, synthetic construct
  source 1..1407: mol_type = other DNA; note = Synthetic coding sequence
atgagcttcaggctgagtggcgggagtagaagaatctgtagtaggacaggatctggtagactgtccggaggtggcacaggattcgtagctggcaatgtatgtgtaggatccggggctcgatcctccttcagctgcaccctcgaaggcatctcttcagggggaagcttttgtaactccggaggagggctgggcagtggagcttgcgcaggattcctcgggaacgagcatagcctcttatcaggtaacgaaaaggtcaccatgcagaaccttaacgaccggctggcctcctacctggatcatgtccacgccctcgaagaggcgaacgccgacctagagcaaaaaattaagggctggtacgagaagtgtgagcccgggtcttccagagaacatgaccatgattactccaggtacttttccgtcattgaggatctgaaacgacagataattagcgccacaatttgcaatgcaagcatcgtgctacagaacgacaacgccaggctcaccgccgacgactttcggttgaagtatgaaaacgaacttgccttacaccactctgtggaagcagatacctccgggttgcgccgagtgctggacgagctgaccctttgtacaacagacctggagattcagtgcgagacacttagcgaggagctgacttacctcaaaaaaagccacgaggaagagatggaggtgctgcagtacactgcaggtgggaacgtgaacgttgagatgaatgcaacacccggcgtggacctcactgtgttactcaacaatatgcgtgctgagtatgaagacctggcagagcagaaccgaaaggatgccgaggcgtggttcaatgaaaggtccgccactctacaacaacagatctcagatcacgaaggcgctgccactgctgcacgcaacgagctgaccgaacttaaacgcaatctgcagaccttggaaattgagcttcaatccctgatggccgtgaaacactcatacgagtgttccctcgcagaaactgagggcaattattgcaatcagctgcagcagatacaagatcagatcggagtgatggaggagcaattgcaacagattagaactgaaactgagggacagaagcttgagtacgagcagctgttagatgtgaagatctttttggagaaggaaatcgatatttactgcaacttactggacggagaggaaaggaaaagcaaatcaacttgctataaaagcaaggggtaccgacccgtgaattctggcaatcaggctaaggacagtactgaggagactattgtcaagactgtggtggaggaactagaccagatcgggaacctgctttccttgcgagttcattcagtcgaggagaagtcttcaaagatcagtaacatcactgtggaacagcgggtgcctagtaaggcaccatag

SEQ ID NO: 14665 - DNA, 816 bp, synthetic construct
  source 1..816: mol_type = other DNA; note = Synthetic coding sequence
atggcgggactggaggttctctttgcttcggctgccccagcgatcacatgcaggcaggacgccttagtgtgtttcctgcactgggaggtggtcacgcacggctatttcggcctgggggtcggcgaccagcccggtccaaacgataaaaaaagcgaactcctccctgcaggctggaataataataaagatctgtatgtacttaggtacgagtacaaggacggcagccggaagctactggttaaagctattaccgtggaatctagcatgattctgaacgtacttgagtacgggagtcagcaggtggccgacctgaccctaaaccttgacgattacatagatgctgagcatcttggggactttcaccggacgtacaagaatagcgaggagcttagatctagaatcgttagtggcatcatcacccccatccatgagcagtgggagaaagcgaatgtgagctctccacacagggaattcccccctgccaccgcgcgtgaggtggatcctctcagaatccctccacaccatcctcacacctctcgacaacccccatggtgcgatcccttgggacccttcgtggtagggggtgaggatctggacccttttgggcctcgtcgaggggggatgattgtggacccactccgcagtgggtttccaagagccctgatcgatccctcttccggtctcccgaataggctgccccctggggctgtgccacctggcgcgagattcgatccttttggtcctataggtacttcccctcccgggccgaatcccgaccaccttccccctcctggttacgacgatatgtatctgtag

SEQ ID NO: 14666 - DNA, 753 bp, synthetic construct
  source 1..753: mol_type = other DNA; note = Synthetic coding sequence
atgtccgagaacgctgcacccgatttctactatgtcgccatggattttgggggccatgggctctcttctcactacagtcccggggtgccttattacctccagacgttcgtctccgagattagaagggtggtcgccggcggggtggtgggcggaatgtttttttgcacatttccagagatggtcgacaaactaatcctgttagacactcctttgttcctcctggagtcagacgagatggaaaatctcctgacctataaaaggcgcgccattgagcatgtccttcaagtcgaggcctcacaggaacctagtcacgtcttttctttaaagcagctgctacagcggcttctcaaatctaatagccaccttagtgaagagtgtggagagcttcttcttcaacgtgggacgaccaaggttgctacaggactggtgctgaatcgcgaccagagactggcctgggcagagaatagcattgactttattagtcgggagttgtgtgcccactcaattcgcaagcttcaggcccatgtgctcctgatcaaagccgtgcacggttattttgactcacgacagaattactcggagaaggaatcactctcctttatgattgatactatgaagtctacactgaaggagcagttccaattcgtggaggtacccggcaaccattgtgtacatatgtctgaaccccagcacgtagcttccattatatccagctttttgcaatgcacccacatgctcccagcccaattgtag

SEQ ID NO: 14667 - DNA, 510 bp, synthetic construct
  source 1..510: mol_type = other DNA; note = Synthetic coding sequence
atggtgttccccctgcctacacctcaggaacccattatggctaccccaccaaagaggagggccgtggaagccaccggagagaaggtgttgaggtatgaaacattcatctcggatgtgctgcaacgagatctccgtaaagtcctggaccaccgggataaagtttacgagcaactcgccaaatacctgcagttgaggaatgtgattgagagactgcaggaggccaaacatagtgaattatacatgcaggtggatctggggtgtaacttctttgtcgatactgtagtgcctgacacttctcggatctatgtcgccctaggatatggcttcttcctcgaactgactttagcagaagcgttaaagttcatagaccgtaaaagtagtctcctcacagaacttagtaacagtcttaccaaggattccatgaacatcaaagctcacatccacatgttgctcgagggtctgagagaactgcaggggctgcaaaacttccctgaaaagcctcatcactag

SEQ ID NO: 14668 - DNA, 3177 bp, synthetic construct
  source 1..3177: mol_type = other DNA; note = Synthetic coding sequence
atgactactgtggtcgtgcacgtcgactcaaaggccgagttgactacactgctggaacaatgggagaaggagcacgggagtgggcaggacatggtgcccatcctcacacgtatgagtcaactgatagagaaggaaaccgaagagtaccgtaagggagacccagatccatttgacgaccggcacccgggtagggccgaccctgaatgtatgctgggacacctacttcgcatcctttttaagaacgacgacttcatgaatgcactcgtgaacgcctacgtgatgacctcccgcgagcctccattaaacacagccgcctgtcgtctgctgttagatattatgcctggtttggagactgccgttgtattccaggagaaagaagggatagtggaaaatctgttcaagtgggcaagagaagccgatcagccgcttaggacttatagtaccggcctccttgggggggcgatggagaatcaggacatcgccgcaaactaccgagatgaaaactcccaattggtagccattgtgctgcgccgattaagagagttgcaactccaggaagttgccctccgacaagagaataagcgcccctctccgcgcaagctaagtagtgagccacttttgcctctggacgaagaggctgtggatatggactacggcgacatggccgtggacgacgccgaaattcagaaaagtgccctgcagattatcattaattgcgtgtgcggacccgataatcggatatcaagcataggaaaattcatttccggaacaccgagaagaaaactcccacagaatccaaagtcaagcgaacacacattagcaaaaatgtggaacgtagtacagtccaacaacgggatcaaagtattgcttagtctgctttctataaaaatgcccattactgatgcggaccaaatacgagccctggcgtgcaaggccctggtcgggctgagtcgttcctccaccgtgcgtcagattatttcaaagctccctctctttagctcttgtcagattcagcaactgatgaaagaacctgttttgcaggacaaacggtccgaccacgtgaagttctgcaagtatgcagcagagttgattgagcgtgtgtctggtaagccccttttgatcggaactgatgtgagcctggcccggctccagaaggcagacgtcgtggctcagagccgtattagttttcccgagaaggagcttctgctactgattcgcaaccacctcatttctaagggcctaggggaaaccgcaaccgtcctgacaaaggaggcagatctcccaatgaccgccgcctcccacagtagcgccttcacacccgtgaccgctgcagcctcacccgtcagcctgcccaggacccctcgcattgccaatgggatcgccacgcgtctcggatcacacgcagccgtgggcgcatcagctccctccgcaccaactgcccaccctcagccgagacccccacaggggcccctggcccttccaggacccagctacgcggggaactcaccattgatcggtagaattagttttattcgggagagaccgtccccctgcaacggccgtaagattcgagtgctgcgacagaaatccgaccacggggcttatagccagagccccgccatcaagaagcagctggatcgccatttgccatccccaccaaccctggatagtataatcactgaatatcttcgagagcaacatgctagatgtaaaaacccggttgccacctgcccacccttctcgctctttactccacaccagtgccctgaacccaagcagcggagacaggcgccaattaatttcactagtcgcctaaatagaagagcgagctttccaaagtacgggggggtggacggcggctgcttcgaccgtcacttaatcttttctcggttccgccctattagtgtgttcagggaggccaatgaagatgagtcagggtttacatgctgtgcattctcagctagggaaagatttctgatgctaggcacttgtaccggccagctgaagctatataacgtattcagcggccaggaggaggcttcttataattgccataatagcgctattacccacttggagccaagtagagacggatcattgctgctgaccagcgccacgtggtcacagccccttagcgccctgtggggcatgaaatctgtgttcgacatgaaacactcatttactgaagaccactatgtggaattctcaaagcactcacaggaccgggtgatcgggaccaagggcgacattgcccatatctacgatattcagacaggtaataaactgctcaccttgttcaacccagatttagcaaacaactacaagaggaactgcgctacctttaatcccactgatgacctggtacttaacgacggggttttgtgggacgtgaggagcgctcaggctatccataagttcgacaaatttaacatgaatatctctggcgtttttcaccccaacggcctggaggtaataattaataccgaaatttgggatctgcgcacctttcacctacttcatactgtccccgcgctggatcagtgtcgagtggtgtttaaccatactggaaccgttatgtatggagccatgctacaggcggatgatgaagatgatcttatggaggagaggatgaaaagccctttcggatccagcttccggacctttaatgccacggactacaaaccaatcgctacaattgatgtgaagagaaatatctttgatctctgtactgacacaaaggattgctacctcgccgtcatcgagaaccaggggtcaatggatgctctcaacatggacacagtgtgcaggctctatgaagtgggtcggcagcgtctggcagaggacgaagatgaggaggaagaccaggaagaagaagaacaggaagaagaagatgacgatgaagacgatgacgataccgacgacctggatgagctggataccgatcagctcctggaagctgagcttgaagaggacgacaataatgaaaacgccggtgaggacggagacaatgacttctccccttcggacgaggaattggctaacctgttggaggaaggagaagatggggaagacgaggactcagacgctgatgaggaagttgaactgatactgggggatacagattcgagcgacaatagcgacctggaagacgacataattttaagcctgaatgaatag

SEQ ID NO: 14669 - DNA, 2409 bp, synthetic construct
  source 1..2409: mol_type = other DNA; note = Synthetic coding sequence
atggcggcggaggccttagcggcggaggcagtagctagccgtctggagcggcaggaggaagacattcgttggctgtggagcgaggtggagagattgcgggatgaacagttgaacgcaccctatagctgtcaggcggaaggtccctgcctcacccgggaggtggctcaactgagagccgagaattgcgatctgcgacacaggctttgtagtctgaggctgtgcctagctgaggaaaggtccaggcaggcaacccttgagagcgcagagctggaagccgcccaggaggctggcgcacagccaccaccatcccagagccaggataaggacatgaagaaaaaaaagatgaaagagtccgaagccgactccgaagtcaagcaccagccaatttttataaaggagcgactgaagttgtttgagattctgaaaaaagatcatcagctccttctggccatctatggtaagaagggggacacatcaaatattatcaccgtaagggtggcagacggtcagacggtgcagggtgaggtgtggaagacaaccccgtatcaggtggccgcggagatttctcaggagctagcggagagtaccgtcattgcaaaggtcaacggagaattgtgggacctggacaggccgctggaaggcgatagtagtctggagttgcttacctttgataacgaagaggcacaggccgtgtactggcactcctcggctcacatcttaggagaggctatggagctctattacggcgggcacctgtgttatggtccgcctattgaaaacggattttattacgacatgtttattgaagatcgagcggtgtcatcgactgaactgagcgcgctggagaacatctgcaaggcaatcatcaaggagaagcagcccttcgaacgcctggaggtgagcaaggagattctgttggaaatgtttaagtataataagttcaaatgcaggatcctgaacgagaaggttaacaccgcaacgactactgtgtaccgctgcggtccccttattgacctctgcaaaggcccacacgttcggcacaccgggaagataaaaaccatcaagatattcaagaatagctccacctactgggaaggaaatcccgaaatggaaactctgcagcggatatacggtatcagttttcctgataacaaaatgatgagggactgggaaaagttccaagaggaggcaaagaatagggatcatcgtaagattgggaaagaacaggagctcttttttttccacgacctctcacctggaagctgcttctttctcccgcggggagccttcatttataacactttgaccgatttcatcagggaggaatatcacaagagggactttaccgaggttcttagcccaaacatgtataattcaaagctgtgggaagcctctggtcactggcagcattatagtgagaacatgtttacgttcgaaatcgagaaggacacctttgcattgaaaccaatgaactgcccgggccactgtctgatgtttgcccatcgcccacgctcgtggcgcgagatgcccatcagatttgccgactttggagtccttcatagaaatgaactgtctgggaccttgtcgggattaaccagagtccggaggtttcagcaggatgacgcccatatattctgcacggtggaacaaattgaagaagaaattaaaggatgcttgcagtttctccagagcgtgtactccacattcggattctcctttcagctgaatctgagcacccgtccagaaaatttcctcggagaaattgaaatgtggaacgaggcggaaaaacagctgcagaactccctgatggactttggagaaccctggaaaatgaatccaggggatggtgctttctacgggccgaaaattgacatcaagataaaggatgccatcgggagataccatcagtgtgctacaatccagctcgatttccagctgcccattcgattcaatcttacatacgtgagtaaggatggggacgataagaagcggcccgtgatcattcatcgagcaatcctgggtagcgttgagaggatgattgccattctgagcgaaaactatggaggaaaatggcccttctggctctcaccccgacaggttatggttattcccgtcggtcctacgtgtgagaagtatgcactgcaggtaagctctgaattcttcgaggagggatttatggccgatgtcgacctggaccattcctgcacactgaacaagaaaatcagaaacgcccagctggcccagtataacttcattcttgtcgtgggggaaaaagaaaagatcgataacgccgttaatgtgcgaaccagagacaataagatccacggagagatcctggtaactagcgcaattgataagttaaaaaacctgcggaagactcggactttgaacgctgaggaggcgttctag

SEQ ID NO: 14670 - DNA, 1149 bp, synthetic construct
  source 1..1149: mol_type = other DNA; note = Synthetic coding sequence
atgtttaagatccaacttgagcctcttaagctgagagcatggaccctgaacggatttgtgaagttccgcaacaaagagacttctgctgggccggttgctgttatgggcaaagattactacaagattttgggaatcccatctggggccaatgaggacgaaatcaaaaaagcataccgcaagatggccctcaagtaccatccagataaaaacaaggagcctaatgcagaggaaaagtttaaggaaatagccgaagcctacgacgtcctttcggatcctaagaaacggggcctttacgatcagtatggagaggagggtctgaagacagggggcggcacgagtggagggagctccgggtcattccattacacttttcacggggacccgcacgctaccttcgcgagcttcttcggtggcagcaacccctttgacattttttttgcaagttcacgtagcacccggccgttttcgggttttgaccccgacgatatggatgtcgatgaggacgaagaccccttcggcgcgttcggtaggtttggttttaacgggctttccaggggaccgcgacgagcccctgagccactctacccgagacgtaaggtgcaggatccccctgtggtacacgaacttcgcgtatcattagaggaaatctatcatgggtcaacaaagagaatgaagattacccgtagacgtcttaaccccgacggtaggaccgtgcgcacagaagataagatactgcacattgtaataaagcgcggatggaaggaggggactaagatcacctttccgaaagaaggagacgccacaccagataatattcccgctgacatcgtctttgttctgaaggataagccccacgctcatttccgacgagatgggactaacgtgctgtactctgcgctgatatccctcaaagaagctctgtgtggttgcaccgtgaacatacctaccatcgacggacgcgtgattcctctgccatgtaacgacgtcattaagcccggtactgtgaagcggctgcgcggggaagggctgccctttcccaaggtgccaacccagcggggcgacctgatcgtggaattcaaggtcaggtttccggatcggctcaccccacagaccagacaaattctgaaacagcatctgccgtgcagctag

SEQ ID NO: 14671 - DNA, 1356 bp, synthetic construct
  source 1..1356: mol_type = other DNA; note = Synthetic coding sequence
atgcgcgaatgtataagcatccacgtcgggcaggctggtgtgcaaattggaaacgcctgctgggagctttattgtcttgagcatgggatacagcctgatggccagatgccttccgacaaaaccattgggggaggagatgatagtttcaacaccttctttagcgaaaccggagcaggcaagcacgtgccacgggccgtctttgtggacctagaaccgacagtcatcgatgaggtgagaacgggcacctaccggcagttatttcaccccgagcagctgattacgggaaaggaggacgcagcaaacaattacgcccgcggacactacactatcgggaaggaaattattgatcttgtgttagatcggatccggaaactggctgaccaatgcaccggcctgcagggctttctagttttccattcgttcgggggtggcacagggtcagggttcactagcttactcatggagcggcttagcgtagattacggcaaaaagagcaaacttgagttcagcatttatcccgctcctcaagtaagcacagcagtggtggaaccttataattctatcttaaccacccacacgacacttgagcacagcgattgcgcatttatggttgacaatgaagctatctatgacatctgtcgcagaaacttggatattgagaggcctacttacaccaatctaaacaggctgatctctcagatcgtgagctccattactgctagcctgaggtttgatggcgcccttaatgtcgacttgaccgaattccaaacaaacctggttccttacccaaggatccatttcccccttgccacatacgcccctgtcatctcggcggaaaaggcctatcatgaacaactgtccgtcgccgagatcacaaatgcctgttttgagcctgccaatcagatggtcaagtgcgatcccaggcatggaaaatatatggcctgttgtttactgtataggggtgacgtggttcctaaagatgtgaacgccgctattgctactattaaaacgaagcgctccatccagtttgtcgactggtgtcccactggtttcaaagtgggcatcaattaccagcctccaactgtcgtcccgggcggcgacttggccaaggtgcaaagagctgtgtgtatgttgagcaacaccacagcgatcgcagaggcctgggcccgcctcgatcacaaatttgacttgatgtacgctaagagggcttttgttcattggtacgtcggcgaaggaatggaggaaggagaatttagtgaagctcgcgaagacatggctgccctcgagaaagattacgaagaagtaggggtggactctgtggagggcgagggtgaagaggagggagaagaatactag

SEQ ID NO: 14672 - DNA, 444 bp, synthetic construct
  source 1..444: mol_type = other DNA; note = Synthetic coding sequence
tagaccgccagaggaccagagcccgaacagatggggctcgcgccatgctgcactcaggccctgtgtggtctcgcactgaggcatcactctcatctccagcagatcaggctggagtttcatagactgtctgaggagaacacccttttgaaaaacgatctgggacgtgtcaggcaggagttggaggctgcggaatccactcatgacgcacaacgtaaggagatcgaagtcttaaagaaggataaagaaaaagcctgttcagagatggaggtgctcaatcggcagaatcaaaattacaaagatcagctaagtcagctcaacgttcgggtgctgcaactcggccaggaggcatctacacaccaagctcaaaacgaggagcaccgcgtaacaattcagatgctcacgcagtcattggaagaggtggtgcgaagtggacaacaacagtag

SEQ ID NO: 14673 - DNA, 771 bp, synthetic construct
  source 1..771: mol_type = other DNA; note = Synthetic coding sequence
atggcaacccagcggaaacacctcgtgaaagacttcaacccatatatcacatgctatatatgcaagggctatcttatcaagccaacaaccgtgaccgagtgcctacacacgttctgtaaaacatgtattgttcagcacttcgaagacagcaacgactgcccgcgttgtggtaaccaagtgcacgagacgaacccgctcgaaatgctccggctggacaacacattggaggagatcatctttaaactagtaccaggcctgagagagcaagaactggaacgcgagtccgagttttggaaaaaaaacaaaccacaggaaaacggtcaggacgacacaagtaaagccgacaaacccaaggtagacgaagagggtgacgagaacgaagacgacaaagactaccatagatccgatccccagattgccatctgtctcgactgcctcaggaacaacggccagagcggggataatgttgtgaaggggttgatgaagaagtttatcagatgttcaactcgagttactgtgggtaccatcaagaaattcctctctttgaagctgaagctgccctcctcctacgaattggatgtgctctgtaacggagaaatcatggggaaggaccacacaatggaattcatttacatgacaaggtggaggctgcggggggaaaacttccggtgcttgaactgctccgcatctcaagtttgtagccaggacgggcctctgtaccagtcctacccaatggttttacaatacagacccaggatcgatttcggttag

SEQ ID NO: 14674 - DNA, 6672 bp, synthetic construct
  source 1..6672: mol_type = other DNA; note = Synthetic coding sequence
atggctccgaaaaaggagaaaggcggcacagtgaacacaagttcgaaaatttgggaaccaagcctcatcgctgctcaatttaatcagaacgactggcaggcgagcatcgcctttgttgtggggaaccagatagaggatgacctgctgatccaggctctcactgtggccgtgcaggtccctcagcggaaacttttttcaatggtgtcctggcaggacatcctccagcagataaatgagattaacaccctggtggggagtgccagctcaaaaaaggctaaaaagccagtaggcgggaacgctcctctttactatgaggtgctaaccgctgctaaggctattatggactccggcgaaaagctgacactccctctgatcggaaagctgttgaaatttcagctcttacagatcaagttcaaggaccagcaacggagagagaacgaaaagaaagtcattgaagataaacctaagttagagaaagataagggcaaagctaagagcccaaaggaaaaaaaagccccttcggcaaaaccagcaaaggggaagggaaaggaccagcctgaagccaatgcacccgtcaaaaagaccacacagcttaaacgtaggggggaggacgaccatacaaaccgatatatcgatgacgaacctgatgacggggcacagcactacatcatcgtggtgggttttaacaatccacagctgctcgcgataatggccgagctgggaatcccaatcacttccgtgatcaagatttcttcagagaattacgaacctcttcagacccatttggccgccgtgaaccaacagcaggaagtattactgcagagcgaagacctagaggctgaaaaacttaaaaaagagaatgcaattaaggagctgaaaactttctggaagtatttggagcccgtcctgaacaacgagaaacccgagaccaatctcttcgatgtggcacgattggagtacatggttaaagcggccgactttcccagcgactggtctgatggcgagatgatgctcaaactgggcacggacatcttcgaaaacatcgcatgcctgatgtacgacattctagattggaagagacagcatcagcattatttggagagtatgcagctgatcaacgtgccccaggtagtcaacgagaaacctgtgttggaggctatgcccacctcagaggccccacagccagccgtgccggcccccgggaaaaaaaaggcacaatatgaggagccccaggcccccccgccagtgacctccgtgataactacggaggtggacatgagatactataactacctattgaaccctatccgggaggagttcatctctgtgcccctcatcctccactgtatgctggagcaagtggtggccaccgaagaggacctcgtgccacccagcttgcgcgaaccatcgcctagagccgatggcctggaccatcgaattgcggcccatattgtgagcttgctgccatccttgtgtctcagtgagcgggaaaaaaagaatctccacgacatattcctgtcagaagaggaaaacgaatcgaaggcggtccccaaaggaccccttctgttaaattatcatgatgcacatgcgcataaaaaatacgcacttcaagatcagaagaatttcgatcccgtacagatcgagcaggaaatgcagtcaaaactgcccttgtgggagttcctgcagtttcctctcccccccccatggaacaacactaaaaggctggctacaatccatgagctcatgcacttctgtacctcagatgtgctgtcctggaatgaagtggagagggcctttaaagtgttcacatttgagtccctcaagctgtctgaggtggatgagaaggggaagcttaaaccgtccgggatgatgtgcggttctgactcagagatgtttaacattccatgggacaaccccgcccgcttcgctaaacagataaggcagcaatatgtcatgaagatgaacactcaggaagctaagcaaaaggcggacattaagatcaaagaccgaaccttgtttgttgatcagaatctgtctatgagcgtgcaggacaacgagtcgaatagagaaccttctgacccctcacagtgtgacgcaaataatatgaaacacagtgacctgaacaatttgaaacttagcgtccccgacaatcgccagcttttggaacaggaaagcatcatgaaggcccagcctcagcatgagtctctcgagcagactactaacaacgagatcaaggacgatgccgtcacaaaagccgatagtcatgagaagaagcccaagaagatgatggtagaggccgatctggaggatatcaaaaaaacccaacagagatctttgatggattggagctttaccgaacacttcaagcccaaagtgttgctgcaggtcctgcaggaggcccataagcagtacagatgcgtggatagttattaccacacacaggataattcgctattattggtatttcataaccccatgaacaggcagcggttacattgtgaatactggaacattgccctacactccaatgtggggtttcgcaattacctggagctggttgccaagagcatccaggattggatcaccaaagaagaggcaatctaccaagaaagtaagatgaacgagaaaatcatcagaaccagagcagaactggagctgaagagctcggcaaacgcgaagttgactagcgcatctaaaatcttcagcataaaggagagtaagtctaacaaggggatctctaagaccgagataagcgaccaggagaaggagaaagagaaggaaaaaatcccgttcatcctggagggcagcctgaaggcctggaaagaggagcagcatagactagcagaagaagagaggcttcgcgaagaaaaaaaggctgaaaaaaaaggtaaggaagctggtaaaaagaagggcaaagacaacgcagaaaaagaagatagccgttcgctcaagaagaagtcaccctacaaggagaagtctaaggaagagcaggtcaaaattcaggaagtgactgaagagtcacctcaccagcccgaacccaaaataacctatccgtttcacgggtataacatggggaacattcctacccaaatctccgggtccaactattacctctatccatctgacggaggacaaatcgaggtggaaaagacaatgtttgaaaaaggaccgaccttcataaaagtccgcgtcgtgaaagacaaccataacttcatgatccatctaaacgatcccaaggaaattgtcaaaaaagaggaaaagggcgattactacctggaagaggaagaggagggcgacgaggagcagtcactcgaaaccgaggtgtccgatgcgaagaacaaggccttttcaaagtttggtagcttttccgccactctggagaatggtatttgcttgtccatctcctactatgggtcaaacggaatggctcctgaagataaggatcctgatctggaaacgatccttaatatcccttcagcgctgaccccaacagtcgtgcctgtcattgtgacggtccctcaaagcaaagccaagggtaagatcaaggggaaggaaaagccgaaagagtctcttaaggaggaagaacaccctaaggaggaggagaagaaagaggaggaggtcgagcctgaacccgtcctgcaggagaccctggatgtcccaaccttccagtccctaaacgtatcctgtcccagcggactgcttctcacatttatagggcaggaaagcaccggacagtacgttatagacgaagagcctacttgggacatcatggttaggcagtcatacccacaaagggttaagcactacgagttttacaaaactgtcatgcctccagccgagcaggaggcatccagggtcatcacgtcacaagggactgtcgtgaagtacatgctcgacggcagcacgcagatcttgttcgctgacggggctgtctctcggtcacctaatagtggcctgatctgtcctcccagtgaaatgcctgcgacccctcatagcggcgatttaatggacagcataagtcagcagaagagcgaaactatcccatccgagataaccaacacaaaaaagggcaagtctcacaagtcccagtccagcatggcacataaaggggaaattcacgaccctcctcccgaggctgtgcagactgtgacccccgttgaagtccatattgggacttggtttacaaccacacctgagggaaataggattgggacgaaaggcttggaaagaattgccgacctgactccgcttctgtcgttccaagccacagaccctgtgaacggtaccgtcatgacaacccgtgaagacaaagtcgtaattgtagagcgcaaggacggaacgagaatagtggaccatgccgatgggacaaggatcactacattctatcaggtgtacgaggatcaaatcattctcccagatgaccaagagactacggagggccccaggactgtcacccgccaggtgaagtgcatgcgggtcgaatcctctcgatacgccacagttatcgcgaattgcgaggattcatcgtgctgcgctaccttcggagacgggacaacgattattgccaaaccccagggcacataccaggtgctgcctcccaatacaggctccttgtacatcgacaaggattgctctgctgtttattgccacgagagctcaagcaacatttactatccgttccaaaagagagagcagcttcgggcggggcggtacattatgcggcatacctccgaggtaatttgcgaggtgttggaccccgagggcaatacgtttcaggttatggcagacggttcaatctctacaattcttccggagaaaaagctggaggatgacctgaatgaaaaaaccgaagggtacgattccctctcgagcatgcatctggaaaagaaccatcagcagatctacggggagcacgtgccacgctttttcgtgatgtatgctgacggcagtgggatggaactgctcagggattcagatatcgaggaatacctgtccctcgcctacaaagaatcgaacaccgtggttcttcaagaacccgtgcaggagcagccgggcacactcaccatcaccgtgctgaggccttttcacgaagcaagcccttggcaggtgaaaaaggaagacacgattgtcccaccaaacctaagatctcggtcctgggagacctttccttccgtcgagaagaagactcccgggcctcctttcggaacacaaatctggaaagggctgtgtatcgaatctaaacagcttgtttcagcgccaggtgccattctcaagtccccttctgtactccaaatgagacaattcatccagcacgaggtgatcaagaacgaagtcaaactgagattgcaagtttcactgaaagactacatcaattacatcctgaagaaggaagacgaactgcaggaaatgatggtgaaggattcacgaactgaagaagagaggggaaatgcagctgacctccttaaactcgtcatgagctttccaaaaatggaagaaactaccaaatcccacgtcactgaggtcgcggcccacttaaccgacctgttcaaacagtctctggccacaccaccaaagtgtccaccggacacattcggcaaagacttttttgagaagacctggcgtcacactgcatctagtaagagatggaaggaaaagattgacaagacccgcaaggaaatagaaacaacacaaaactatctaatggacataaaaaatcgcattattcccccgttttttaaatccgaactcaatcagctgtaccagtctcaatacaaccatctcgattcgctttccaagaaactgccatcttttacaaaaaagaacgaggatgccaacgagactgccgtccaggacacctcggacttgaatctggacttcaagccccataaggtctcagagcagaagtcctccagcgtgcctagtctaccaaaaccagaaattagcgcagataaaaaggattttactgcacaaaaccagaccgagaatttgactaaatctcccgaagaggccgagtcgtatgaacctgtcaaaatcccaactcagagtctgctccaggacgtggctgggcagacccggaaggaaaaagtgaaacttccacactacctgctctcttctaagcccaaatctcaaccactggccaaggtgcaggactcggtgggcgggaaagtgaacactagcagcgtggcaagcgctgctatcaacaatgccaagagtagcctatttgggttccatctcctgccttccagcgtcaaattcggagtgctaaaagagggacatacctatgctactgtggtcaagctcaagaacgtcggcgttgatttctgccgctttaaggtgaaacagcctcctccaagtacaggcctcaaggtgacttacaaacctggacccgtggccgcggggatgcaaaccgagctaaacatcgagctgttcgccaccgccgttggcgaggatggcgccaagggttcggcgcatatttcacacaacatcgagataatgaccgagcatgaggtgttgttcctccccgtggaggcaaccgtgttaaccagctctaactacgataaacggccaaaagattttcctcaagggaaggaaaacccgatggtgcagagaactagtaccatatattcttcaaccttgggggttttcatgtcacgtaaggttagcccccactag

SEQ ID NO: 14675 - DNA, 2337 bp, synthetic construct
  source 1..2337: mol_type = other DNA; note = Synthetic coding sequence
atgcctgcctttctggggctgaaatgcctcggaaagctatgtagctcagaaaaatcaaaggtgacgtcgagcgagagaacgagcgccaggggcagcaatcggaaacgcttgatcgtcgaggaccgccgggtttccggtacatcattcaccgctcacagaagagcgactatcacacacctgctctacctctgtccaaaagattactgccctcgggggcgggtgtgcaacagcgtggacccatttgttgcacatccccaggacccccatcatccatctgaaaaaccagtgatacattgtcacaaatgcggggagccatgtaagggggaggtccttcgcgtgcagaccaagcactttcacattaaatgtttcacgtgcaaagtctgcggctgtgacctagcccaaggcggattttttataaagaatggcgaatatctgtgtacattggactatcagagaatgtatggaacacgctgccatggctgtggagagtttgttgaaggcgaggttgtgacagccctgggaaaaacctatcatcctaactgttttgcttgtaccatatgcaagaggcctttccctccgggggacagagtaacattcaacggccgcgattgtctgtgtcaactctgcgctcaacctatgtcttctagtccgaaggagaccactttctctagtaactgcgctggttgcggtcgtgatattaagaatgggcaggcacttctcgccctagataaacagtggcatttaggctgttttaaatgcaagtcttgtggcaaagtactcactggagaatatatttctaaggacggcgcaccgtattgcgaaaaggactaccaaggcttgttcggggtaaagtgcgaagcttgtcatcaattcataactgggaaggtgttagaggccggcgataaacactatcacccttcttgtgccagatgttctagatgcaatcagatgtttaccgagggcgaagagatgtaccttcagggatcaacagtatggcacccagattgcaagcagtcaaccaagactgaagaaaaattgcgccctactaggacaagctcagagtctatctacagtaggccgggcagctcgatccccggttcccctggccatactatatatgctaaggtggataacgaaattttggactacaaggacctcgctgccatcccaaaagtgaaggctatttacgatattgaaagaccagacctaatcacctacgagcccttttacacttcaggatacgacgataagcaggagcggcagtcgttgggggagtcaccccgcactttatcacccacaccctcagcagaaggctatcaagacgtgagagatcgcatgatccatagatctacatcgcaaggctccatcaacagtcccgtgtattcacgacacagctatactccaacaacatccagaagtccgcaacacttccatcgccctggcaacgagccatcttcagggcggaactcccccctgccttaccggccagactcgcgaccgctaacgccaacctacgcccaggcacccaaacatttccacgtgcccgaccaggggattaatatctaccggaagcctccgatctacaagcagcatgccgcactcgcagcacagtcaaagtcctccgaagatattatcaaattcagcaaatttcctgccgcccaggcccccgacccctcggagacaccaaaaatcgagacggaccattggcctgggccaccaagttttgccgtggtcggcccagacatgaaacgtaggtcaagcgggcgcgaggaagatgacgaggaactgcttcgtagaagacaactgcaggaagagcagctgatgaagctgaatagcggattggggcagctcattctcaaggaagaaatggagaaagaatctagggagagatccagccttctcgcctcacgctacgactctccaattaattcggcgtctcatatcccatcatccaaaacagcgagccttcccggttatggccgcaatggtcttcacagacccgtctccaccgacttcgctcagtacaatagttatggggacgtctctggaggcgtgcgagactaccagactctgccggacgggcacatgcctgcgatgcgcatggatagaggggtaagcatgccaaatatgttagaaccaaagatatttccctatgaaatgctcatggttactaatcgcgggaggaacaagattctccgcgaggtcgataggactcgactcgagcggcacctggcgccagaggtcttcagggagatttttggaatgtctatccaggaattcgataggcttccactctggcgacgcaatgacatgaagaaaaaagcaaaactcttttag

SEQ ID NO: 14676 - DNA, 1689 bp, synthetic construct
  source 1..1689: mol_type = other DNA; note = Synthetic coding sequence
atgaaccctctgttcggtccaaacctgtttttgctccagcaagaacagcagggattggccggtcctcttggcgattccctgggtggagatcacttcgctggcgggggcgacctgccacccgcacctctgtctccagccggtccggccgcgtacagccctcccggccctgggcccgccccaccggccgcaatggcacttcggaacgaccttggaagcaacataaacgtcctcaagacattgaatttgaggtttcgatgtttcctcgccaaggttcacgaacttgaaagacggaaccgacttttagagaagcaactgcaacaagcattagaggaggggaaacagggtaggagaggactcggccggcgagatcaggctgtgcaaacaggttttgtaagccccatacgtccgctcgggctgcaactgggagcccgacccgccgccgtgtgcagcccttccgcacgagtcctgggcagccctgctagatccccagctggtcctctggcaccttctgccgcatccttgagctctagttcaacgtccacatctactacgtattcgtcgagcgcgagattcatgcctggcacgatttggagtttttcccatgctcgacggctggggcccggcctcgagcccacgctagtgcaaggcccaggactttcttgggtccacccagatggagttggtgtccagattgacactataacacccgagatacgagctctgtacaatgtgctggccaaagtgaagagggagagggacgagtacaagcggcgatgggaagaggaatacaccgtgcgaatccaactacaagacagggttaacgaactgcaggaggaggctcaggaggccgacgcttgccaggaggaactggccctgaaagtggagcagcttaaagccgaactggtagtgttcaaaggactcatgagcaataatctctctgagttggatactaagattcaggaaaaagccatgaaggtcgacatggacatctgcagacgaatagacattacggccaaactgtgcgacgtggcgcaacagcgcaactgtgaggacatgattcagatgttccaaaagaagctggtgcccagcatgggcggtcggaaacgtgagagaaaagctgctgtagaagaggatacatctctgagcgagagcgagggacccagacagccggacggggatgaggaagaatctactgctctctccatcaatgaggagatgcagcggatgctcaatcagctgagagagtacgattttgaagatgattgcgacagcctaacttgggaggaaacagaggagaccctgctgctgtgggaggacttctcaggatacgctatggcagccgctgaggcgcagggagagcaggaggattctttggaaaaggtaataaaggacactgagtctctgttcaaaaccagagaaaaggagtaccaggagacaatcgatcaaatagaactggaactcgccaccgccaagaatgatatgaacagacatctgcacgaatatatggaaatgtgctccatgaaaagaggccttgatgtgcagatggagacgtgtcggcgtttgatcactcagagtggagacaggaaaagtccagcattcactgccgttccccttagcgatccccctcctccccccagcgaggctgaggattccgatagggacgtctcttcggatagttcgatgcggtag

SEQ ID NO: 14677 - DNA, 2415 bp, synthetic construct
  source 1..2415: mol_type = other DNA; note = Synthetic coding sequence
atgaactaccagcagcaactcgccaactcagcagcgattagggccgagatacaacgttttgagagtgttcaccctaatatctatagcatttatgagctcctggagagagttgaagagcctgtgctgcagaatcagattcgggagcacgtgatcgccattgaagacgccttcgtgaatagccaggagtggaccctgtcccgttccgttcctgaactgaaggtcggcatagtgggcaacctagcttctgggaagtccgccctagtgcatcgctatctgacgggtacttacgtacaggaggaaagtcccgaaggaggccggtttaagaaagagatcgtggtcgacgggcagtcctacctgctcctaatacgggatgaaggaggccccccagaggctcagtttgcgatgtgggtagacgcagtcatcttcgtgttctcgcttgaggacgaaatctcatttcaaaccgtatatcattattatagtcgcatggccaattatcggaataccagtgagatcccactcgtgcttgtcggcacccaggatgcaatctcaagtgcaaatccaagagtgatcgacgatgccagagccagaaaacttagcaacgacctcaaaaggtgtacatactatgagacttgtgctacatatggactgaatgtggagcgtgtgtttcaggacgtcgcacagaaaatagtcgctacacgtaagaaacagcagctgagcattgggccatgtaagtccctgcccaattctccctcgcatagctccgtctgttcagcacaggtctcagccgtacacatctcccagacatccaatggaggtggcagtctcagcgattatagttcatctgttccctctacaccttccacctcccaaaaggagttacgtatcgatgtgccgcctacagcaaatacccctactccagtgcggaaacagtctaagcgcaggagcaatctgttcacatccaggaaaggctctgaccccgataaggaaaagaagggcctcgagtccagagccgattccatcggctctgggcgtgccatccctatcaaacaggggatgctactgaagagatcaggcaagagtctgaataaagagtggaaaaagaagtacgtcactctctgcgacaatggtgtgctgacataccatccctccttgcatgactacatgcagaatgtgcacggtaaggagatagacctgctccgcacgactgtgaaggtgcccggaaagagaccccccagagccaccagcgcctgtgctcctatcagcagtccgaaaaccaatgggctctctaaggacatgtcctccctacatatcagccctaatagtgatacgggattgggggatagtgtctgctcttctccttcaatctctagcaccacctccccaaagctagacccaccaccatctccgcacgcgaataggaaaaagcatcgccggaagaagtcgacatccaacttcaaagctgacggactgtctggcaccgccgaggagcaggaggagaacttcgagttcattatagtgtctttaaccggccagacgtggcacttcgaggctactacctacgaagaacgggatgcatgggtgcaggctatcgagagtcaaattctggcttcactccagagttgcgagtccagcaaaaataagtcccggctgaccagtcagagtgaggcaatggctcttcaatcaattcgcaacatgagagggaatagtcactgcgtggactgtgagacgcagaatcccaactgggcaagcctcaatctcggggctctcatgtgtatcgagtgctcgggcatccaccggaatctggggactcacctttctcgcgtgcggagtctggacctcgacgattggccagtggaattgattaaggtgatgagttccatcggcaatgagttagccaattctgtctgggaagagagttcacaaggacgaactaagcccagcgtggattcaacgcgagaggagaaggagcgctggatacgagccaagtacgagcaaaagctgttccttgcccctctcccttgtactgagctaagtttgggtcagcacctgcttcgcgctaccgcggacgaagacctccgcaccgcaatcctgctgctcgcccacggcagtcgcgacgaagtgaatgaaacatgtggggagggtgatggacggacagcactgcacctggcttgtcgaaaaggaaacgttgtgctggctcagttgttgatttggtacggggttgacgtcacagcccgcgacgctcacgggaacacggctctggcatatgccaggcaagcaagctctcaggaatgcatagacgtgctcctccaatacgggtgtccagatgagcgctttgtgttaatggccactcctaacctgtcccggaggaataacaatcgtaataactcctcgggccgtgttcctacgataatttag

SEQ ID NO: 14678 - DNA, 2712 bp, synthetic construct
  source 1..2712: mol_type = other DNA; note = Synthetic coding sequence
atgcccgaacagtttagcgtggccgaatttctcgcggtgaccgccgaggacctttccagccccgccggggccgccgcctttgcagccaagatgcctcggtacaggggggccgctctagccagagaggagatcctggagggggatcaggccattctgcagaggatcaagaaagctgtgagagccatacacagctcaggccttggacacgttgagaatgaggagcaataccgcgaggccgtagaatccttagggaattcgcatctcagtcagaactcccacgaactgtctacaggcttcctgaatctcgctgtgttcacaagagaagtcgcggccctgttcaagaaccttattcagaacctgaataacattgtctcatttccactggacagcctgatgaaaggccagctccgcgacggccggcaggactctaagaaacagcttgaaaaggcatggaaggactacgaggcgaagatggcaaagttggagaaggagcgcgatcgcgcgcgggttacagggggcatccccggggaggttgctcaggacatgcagagagagcggaggatctttcagctgcatatgtgcgagtatctgcttaaggccggtgagagccagatgaaacaaggacccgattttctgcagagcctcataaagttttttcacgcccagcataactttttccaggacgggtggaaggccgctcagagtttgttcccctttatcgaaaagctggcggcaagcgttcacgctctacaccaggcacaggaggacgagctacagaaactaacacagttaagggacagcctccggggaacgctgcagctggaaagcagggaggaacatctttccaggaagaattctggttgcggatattcgatacaccagcaccaggggaataaacagttcgggactgaaaaagttggtttcttgtacaagaaaagtgatgggatcaggcgcgtgtggcagaagcggaagtgtggcgtcaaatacggctgtctgacaatctcgcattcaactattaatcgaccgcccgttaagcttaccctactgacctgccaggtgcgaccaaacccagaggaaaaaaaatgtttcgatttagtcactcacaacaggacctatcactttcaggcagaagacgaacacgagtgtgaggcctgggtctccgtgctgcagaacagcaaagatgaggctctgtctagcgccttcttgggtgagcctagcgctggtcctggatcgtggggttcagctgggcacgatggagagccccacgatctcacaaaactcctgattgcagaagtgaagtcccggccaggaaacagccaatgttgcgattgtggcgccgcagaccctacatggctcagcacaaaccttggcgtgctgacatgcattcagtgctctggagtgcatcgcgaactcggagtgcgcttcagtagaatgcaatcgctgaccctggatctgctcggcccaagcgagttgctcctggcattgaatatgggtaacacaagcttcaatgaagtgatggaggctcaactgccaagccacggcgggccaaaaccttccgccgaatccgacatgggcaccagaagagactacattatggccaagtacgtcgagcacagattcgccagaagatgtactcctgagccacagcgcctctggaccgccatttgcaaccgggatctgctctcagttctcgaggccttcgcgaatggccaggattttggacagcccctccccggcccagatgcgcaggccccggaggagctcgtccttcaccttgccgtaaaggtggcgaatcaggctagcctgcccctcgtggattttattatccagaacggaggacacctcgacgcgaaggccgccgacggcaacacggccctgcactacgccgctctgtataatcagcccgactgcctgaaactgttgctcaaaggccgcgccctcgtgggtactgtgaacgaggccggagaaacggcccttgacattgctagaaagaagcaccacaaggaatgcgaggagctcctggagcaggctcaggctggcacatttgctttccccctgcacgtggattacagctgggttatttctacagagccgggatctgattcagaggaggatgaggaagaaaagagatgcctgctgaaactccctgctcaagcccattgggcctccggtcgcttagatatcagcaataagacctacgaaacagtcgcttctctgggcgctgctacccctcagggcgaatctgaggattgccctccacccttgcctgtgaagaactcctcgcgaacgcttgtacagggctgcgcccggcatgcatcaggagatcggtctgaagtcagcagcttgtcttccgaagccccggagacccccgagtcactgggcagccccgctagcagtagctcgctgatgagccccctcgaaccaggagacccatcgcaagctccaccgaacagcgaagaaggactgcgagaaccgcctggaacttcacgaccatctttgactagcggcaccacacctagcgaaatgtatctgcctgtcaggttttcctcagagtccacccggtcctatcgccgaggtgcccgaagcccagaagacggcccctccgcccgtcagcctctccccaggcgcaatgtgcccgttggaattaccgagggtgatggcagtaggacagggtctctccctgcctccagtgttcagttgctgcaggactag

SEQ ID NO: 14679 - DNA, 1359 bp, synthetic construct
  source 1..1359: mol_type = other DNA; note = Synthetic coding sequence
atgatgaaaaggcaactacaccggatgagacagctcgctcagacaggatccctgggacggacccctgagactgcggaattcctgggggaggatctgctacaagtggaacaacggctggagcctgcgaagcgggccgctcataatatccacaagagactgcaggcttgcctacagggacaatctggtgcggatatggacaaacgagtaaagaagttgcctttgatggccctgtcaacgacaatggccgagtctttcaaggagcttgacccagacagttctatgggcaaggctctcgaaatgtcctgcgctatccagaaccagctagcacgcatcttagcagaattcgagatgactctggagagggatgtgttgcaaccattgtcaagactgtctgaggaggaattgcctgccattcttaaacataagaagtctttacaaaagctggtctccgactggaatacactcaaatcgaggctctctcaggctacaaagaacagcggttcatctcaggggctcggtgggagccctggctcacacagccacactactatggctaacaaagtcgagaccctcaaggaggaggaggaagaattgaaacgaaaagttgaacagtgccgcgacgagtacttggccgatttgtatcacttcgttaccaaagaggattcatacgcaaattacttcattcgcctgctcgagatacaggcagattaccatagacggagcctttctagcctagatactgcccttgcagaacttcgggagaaccacggtcaggcggaccattctcctagcatgactgcaactcacttcccacgtgtgtatggagtttccctcgccacccatctgcaggagctgggcagagaaattgccctccccatcgaggcctgcgtcatgatgctattatccgaagggatgaaagaggaaggtttgttcaggttagcagcaggcgcgtctgttttaaaacgcctcaagcagaccatggcttccgatccccactcccttgaggaattctgctccgacccacatgcagtagctggcgctttgaagtcctacttacgcgaactacccgaacccttgatgacctttgacctgtacgacgactggatgagagcggcctccctgaaagaacctggcgcaagacttcaggctctgcaagaggtctgcagtagactgccccccgagaacctgtccaacttgcggtatctgatgaaatttttagcgcggctggctgaggaacaagaggtgaataagatgactccttctaacatagctatagtactgggcccaaatttactttggcccccagagaaggaaggtactgagccagcaagggaacttggaagccagaccctgtgttag

SEQ ID NO: 14680 - DNA, 1137 bp, synthetic construct
  source 1..1137: mol_type = other DNA; note = Synthetic coding sequence
atgaataacagcggtgcggacgagataggcaaactctttgtgggtggactggattggagtaccactcaggagacactgagatcttacttttcccagtacggggaggtggtggactgcgtcattatgaaagacaagaccacaaaccagtctagaggcttcggattcgtgaaattcaaagaccccaattgcgttggtaccgtcctcgcatcccgcccccacaccttggacggcagaaatatcgaccccaaaccgtgcacccctcgcgggatgcagcccgaacgcacacgacctaaagaaggatggcagaaaggaccacggagcgataatagtaaatcgaataagatcttcgtaggaggaatcccacataactgcggtgaaaccgaacttcgggagtatttcaagaagttcggtgtggtgacggaagtagtcatgatttatgacgcagagaagcagcgaccccgtggtttcgggttcataacctttgaagatgaacaaagcgtggatcaggcggtcaatatgcattttcacgatattatgggcaaaaaggtggaggtgaaacgtgcagagcccagagattccaagtcgcaggcgcctggccaacccggtgcatctcagtggggctcacgggtagtgccgaacgccgccaatggatgggccggccagccgccacctacttggcagcagggctatgggccacagggaatgtgggtccccgccggacaggcaataggcggatacggacccccccccgccggccggggcgcccccccccctccccccccattcacaagctacatagtttccacccctcctggaggatttccgcctcctcagggcttcccacagggttacggtgcgccgcctcaatttagtttcggatatgggccacccccacctcctccagaccaatttgctccgcccggcgtaccacccccacctgcaacgccaggtgctgcacccttggcattccccccaccccctagtcaggccgccccagacatgtctaaaccacctactgcccaacccgacttcccctacggtcagtacgggctggggtcttactcaccagctccccctggatgcggaccccatttcgtctactccctcatggtgcggctgtcctccgatgtcgcatag

SEQ ID NO: 14681 - DNA, 2430 bp, synthetic construct
  source 1..2430: mol_type = other DNA; note = Synthetic coding sequence
atggaggtcttgagggagaaagtcgaggaagaagaagaagccgaacgggaggaggctgccgaatgggcagaatgggctcgaatggaaaaaatgatgcgccctgtggaagtacgcaaagaggagattactctcaagcaagaaactctgagagatctggaaaaaaaattatccgaaattcagattacggtgtccgccgagctgcccgcattcaccaaggatactatcgacatttctaaattacctatcagctacaagaccaatactcctaaggaagagcatctactccaggtggcagacaacttttctcgccagtatagccacctgtgcccggaccgggtgccactttttctgcatccactgaacgagtgtgaagtgccaaaatttgtgtccactaccctccgccctactctgatgccgtacccagaactgtataactgggactcatgcgcacagtttgtgagcgacttcctgaccatggtccccctgcccgatccactgaaacctacaattaaaaaggaagaaaaagtcttgcctaagaagtatactatcaagccacccagagacctgtgctcgcgctttgaacaggagcaggaggtcaaaaaacagcaggagattcgagcccaagagaagaaaagactccgcgaagaagaggaaagattaatggaagccgagaaagcaaagccagacgcactgcacgggttaagggttcattcctgggtgttggtactgtctgggaaacgggaggtgcctgaaaatttttttatcgacccattcacaggccactcctatagcacccaggacgagcatttcttgggcattgagtccctttggaaccacaagaattactggatcaacatgcaagactgttggaactgctgcaaagatctgattttcgacctgggcgacccagtgaggtgggaatacatgctcttgggcaccgataagagccagctttctctcactgaggaagacgacagtgggattaatgatgaagacgacgtggaaaatttgggcaaggaagacgaagataaatcttttgacatgccccatagttgggtcgagcagattgagatctccccagaagcatttgagactcgatgccctaacggcaaaaaagtgatccagtacaaaagggctaagctcgagaaatgggcaccctatctgaacagtaatggcttagtgagcagactgacaacgtacgaggacctccagtgtaccaatatcctggagatcaaagagtggtatcaaaaccgcgaggatatgctggagctgaagcacatcaacaagacgaccgatctgaagactgactattttaagccagggcacccccaggcgctgcgagttcacagttacaagagcatgcaacctgaaatggatagggtcatcgagttctacgaaacagccagagtagacggcttgatgaaaagagaggaaacaccacggaccatgactgaatactaccaggggcgacctgattttctgtcatacaggcatgcgtcatttggccccagagtcaagaaactgacattaagtagtgctgaatccaatcctcgtccaatcgtcaaaataaccgaacgtttcttccgaaatcctgccaaacctgctgaggaggatgtggccgagcgcgtgtttctggtcgctgaggagcgtattcagttgcggtaccactgtagagaagaccatattacggcgtcaaagcgtgaattcctccggcgcaccgaggtcgacagcaagggtaataagatcattatgacaccggatatgtgtatttcattcgaggtggaacctatggagcacactaagaaactcctgtaccagtatgaagcaatgatgcacctgaagcgggaggaaaaactttcacgacatcaagtctgggaaagcgagcttgaagtcttggagattctgaaactgagagaagaggaggaagcagcccatacattgactatttccatctacgatacaaaacgcaacgagaagtctaaagaataccgggaagcaatggagcgaatgatgcacgaggaacatctgcggcaagtcgaaacacagctggattacctggcgccttttctcgctcagctgcctccgggggaaaaattgacctgctggcaagcagtacgcttgaaggacgagtgtttaagcgactttaagcagcggctgattaataaggccaacttgatccaagctcggttcgaaaaagaaacacaggaacttcagaagaagcagcagtggtaccaggaaaaccaggtgacgctcactcccgaggacgaggatctgtatttatcctactgctcccaggcgatgtttaggattagaatcttggaacagcgtctcaaccgtcataaggagctggccccactgaagtatttagctctcgaagaaaagttatataaagaccccaggttgggggaactgcagaagatctttgcttag

SEQ ID NO: 14682 - DNA, 828 bp, synthetic construct
  source 1..828: mol_type = other DNA; note = Synthetic coding sequence
atgtggccattaaccgctctcctgttgctggtacctagctccggacaggcagccacactggagaagccaatactgagcctccaccccccttggactactatctttaaaggtgagagggtgaccttgaaatgcgatggctatcatccgctgcttttagagcttcagcctatcagcacactttggtatttaggccacctgctcctgccaagccataaaaagtcgatcgaggttcagactccaggagtttaccgctgtcagacccgcggagcgcccgtgtctgatcctatccaccttagcgtgtccaatgattggcttatcctacaagtgccctacgccccagtcttcgaaggagaaccactggttctacggtgccggggatggtatgataaagtcgtttacaagctgcactattatcacgatggacaggcagttaggtattttcactcatccgcaaattacacagtactccaggctagagcctccgattcagggaggtaccagtgttctggcacaatgcgcattcctgtagaatccgcgcctatgtttagcgcgaaggttgcagtaacagttcaggaggccagacacgcagccgccgtgcgagtccttcaagtccaacctagaggggcacctctccggctggggcggcgcgttcacagccccggtgcaagaggtcgtggggctcgtatcgtactggtgcgcggcggctaccggcacccgcagtgccccgagacgcaatccgtggccgccgcccccggcgccggattttctcctggaccagggcttcaccaccggccttcatcaatgggaaggtccttgggaagttggtag

SEQ ID NO: 14683 - DNA, 657 bp, synthetic construct
  source 1..657: mol_type = other DNA; note = Synthetic coding sequence
atgaactgtcgaagtgaagtgctagaagttagcgttgaaggccggcaggtagaagaggctatgctggcagttttacacaccgttctcctgcaccgctctaccggcaagtttcattataagaaagaggggacatattccataggcactgtgggcactcaagatgttgattgcgacttcatagatttcacgtatgtgcgggtgtcatccgaggagctggatagggccttgcgaaaggtcgtcggggaattcaaggacgctctaaggaattcgggtggagatggcttggggcaaatgtcgctcgaattttaccagaaaaagaagtcacgctggcccttctctgacgaatgtattccttgggaagtttggactgtaaaggttcacgtggttgccttggcgactgagcaggagcgccaaatctgtcgagagaaggtcggagagaaactctgcgaaaaaattataaacatcgtcgaggtgatgaataggcatgagtatcttccaaaaatgcccacccagtctgaggttgataacgtctttgataccggactgcgggacgttcagccctacctgtacaaaatctcattccagatcacagatgcccttgggacctctgtcacaacaacaatgcgtcggctcattaaagacaccttagcattatag

SEQ ID NO: 14684 - DNA, 552 bp, synthetic construct
  source 1..552: mol_type = other DNA; note = Synthetic coding sequence
atgatgcaaatctgtgacacatacaatcagaaacactcactgttcaatgccatgaaccggtttattggggccgtaaataacatggaccagaccgtcatggttccatcattactccgcgatgttcctctcgccgacccagggctcgacaacgatgtcggagtcgaggtgggtggaagcggcggctgtctcgaggaaagaacgcccccggtcccagacagtggctccgctaatggatcgttcttcgcacctagccgagatatgtatagtcactacgttctcctgaagtctatccggaatgacatcgagtggggggttctccatcagcctccgcctcccgctggttcggaagaaggctcggcctggaagtcgaaagacatcctggtggacctcggccacctcgagggcgccgatgcaggtgaggaagatctggagcagcagttccattaccacctaaggggccttcatacggtgctatcaaaactgacccgaaaagcaaatatattgacgaataggtataagcaggagatcgggttcggaaattgggggcattag

SEQ ID NO: 14685 - DNA, 369 bp, synthetic construct
  source 1..369: mol_type = other DNA; note = Synthetic coding sequence
atgcttttcgcgccttgctgtcaccaatgcggtgagtttatcatcggacgcgttatcaaagccatgaacaactcctggcacccggaatgctttcgttgcgacctgtgccaggaggtgctggctgacattggtttcgtcaagaacgccggcagacacctttgtcggccctgtcacaaccgggagaaagctagaggcctgggtaaatatatttgtcagaaatgtcatgctatcatcgacgagcaacccttaatctttaagaatgacccatatcaccctgatcactttaactgcgccaactgcggacaagagggctccgactgtcgatgcaccggagccgaacgcggggccattctccctgccatgccgtag

SEQ ID NO: 14686 - DNA, 1083 bp, synthetic construct
  source 1..1083: mol_type = other DNA; note = Synthetic coding sequence
atggacagcgagttgatgcactctatcgtgggtagttatcataagccccctgagcgggtttttgtgcccagctttactcagaacgagccaagccagaattgccatcccgccaatctggaggtgaccagcccgaaaatcctgcactctcccaactcacaggagaaacagctggaatatacaaaacgcatggtgcttaatgtcgagcgtgagaagaacatgattctggagcagcaagcccagctccagagggaaaaagagcaggatcagatgaagttatatgctaagctggagaagctggacgtgctagaaaaggaatgttttagattaactaccacccaaaagactgctgaggataagatcaagcatctggaagaaaaacttaaagaggaagaacatcagcgcaagcttttccaggacaaggccagcgagctgcagaccggcctggaaattagcaagattattatgagctctgtgtccaatctaaaacacagcaaagagaagaaaaaatccagcaagaagactaagtgcatcaaacgcagacctccatggcagatctgcagtaaatttggcgcattaccgttcgtggcagaaaagccctcgcggacaacctcctggtgcaaagccataccacctgactctgagaagagcatttccatttgcgacaacctgtctgagttgctaatggccatgcaggatgagcttgaccaaatgagcatggaacatcaggagcttttgaagcagatgaaggaaacagaatcacactcagtttgtgacgatattgagtgtgaactcgagtgcctgctgaagaagatggagatcaagggagagcagatatccaagctcaagaaacaccaggattccgtgtgcaaactgcagcagaaggtgcagaattctaagatgtccgaagctagcggcatacagcaagaagatagttacccaaagggtagcaaaaatattaaaaatagcccccggaaatgtttgaccgacactaatcttttccagaaaaacagcagctttcatcctattagggtgcataacttgcaaatgaagctcaggagagacgatattatgtgggagcaatag

SEQ ID NO: 14687 - DNA, 1758 bp, synthetic construct
  source 1..1758: mol_type = other DNA; note = Synthetic coding sequence
atgtcagggtccactccattccagatgcgcttggtgcacttagacctgaagggcgcacctccgaaggtctcctacttgagtgagatctttcctctgtttcgggctcttggcgcgaacgggcttttgattgaatacgaagatatgtttccttacgagggtccgctgagacttttgcgggctaagtacgcctacagtccttctgagattaaagaaattctacatctcgcaggcctgaatgaactggaagtcatacctctcgtgcaaaccttcggacacatggaattcgtgctgaagcatacagctttcgcgcatcttcgggaagttggatcctttccgtgcacgcttaacccgcatgaggcagagtcccttgcattagtgggcgctatgatcgaccaggtgctggaactgcatccaggggcccagcggctccatattgggtgtgacgaggtctactatctgggagagggggaggcctcacgacggtggctgcaacaggagcagaattctacaggaaagttatgcctatcccatatgcgggcagtagctagtggagtgaaggcccgtcgcccatctgtgacaccgttagtgtgggacgacatgctccgggacctgccggaagatcagctggccgcctccggggtgcctcagctcgtggaacccgtactttgggactacaccgcggacctggatgtgcatgggaaagtgctcctcatgcagaaatacaggaggtgtgggtttccccagctgtgggccgctagtgccttcaaaggagccacagggcctagtcaggcagtgccgccagttgagcatcacctgaggaatcatgtgcagtggcttcaggtggctgggagtggaccgactgactcgctacagggaataatcctgaccggctggcagcgatacgatcattatagcgtgttgtgcgaattacttcctgccggggtacctagcctcgctgcctgtttacaactgctactaagaggtgggtttgacgaagacgtgaaagctaaagttgagaacctgctcgggatctctagcttagagaagaccgatcccgtgaggcaagccccctgttcaccaccatgtcccctgctgcctctgccattccccaggccttggcgacagcttttcagcgccggcctatccgcaggacgcggtcccgcacctagccttgcagctaccagccttccgctttcccacaaaagcgcatcgatatgcgccgccctgtggatgcgttgctggcgcgctaccggcatgagcctggccgggagcgcgcccactaccgcttctgggtcgtccagcactcgatcctggttttccacatcatcgccacaacgcagtgcctcctggcacagtggagccccgagttgcagatcctggcggctgccatgttcatggctgtccacccgcatgccatggcgctcaggttggaggaaaacctgtactccagcctgcagcggctgcaaactgtgttgtagaacgtctgcccggtgcctgcccccaaggtgccaccctcctgcgctggcagggacattactgagaacaccagagggccgagcccacgccaggggcctacttctagaggcaggtggagctctgcattgtcagatggcctgggccattcgagcccacgttggagtggtgcccagcggacctgccgtcagctgtccccacagcgtgccagaagggcccggacagccactcggggaacgtctggagaatacagagggtagttctacgggccgccctgcactgtag

SEQ ID NO: 14688 - DNA, 2112 bp, synthetic construct
  source 1..2112: mol_type = other DNA; note = Synthetic coding sequence
atggaggcactgctggagggcatccagaacagaggccacggggggggcttcctcacctcctgtgaagccgaactgcaggaacttatgaagcagattgacatcatggttgcccacaagaaatccgaatgggaaggcagaactcacgctctcgagacctgcctcaaaatcagagaacaggagctcaaatccctccgaagccagctggatgtcacgcacaaagaggtgggtatgttgcatcagcaagtggaagagcatgaaaaaatcaagcaagagatgaccatggaatataagcaggagctcaaaaagctccatgaagaactgtgtattctcaagaggtcctatgagaaattacagaagaagcagatgagggagtttcgcggcaataccaagaaccatcgtgaagacaggtcagaaatcgagcggctaacagccaaaattgaagaattccggcagaaatcactggattgggaaaagcagaggctcatctatcagcagcaggttagcagtctggaggcacagagaaaagcactcgcagaacaatcagagattattcaggcccaattggtgaatcgcaaacagaagctagaaagtgtggagttatcatcccagtccgaaattcagcacctttctagcaaactcgaaagagccaacgataccatatgcgccaatgaactggagatcgaacgccttacaatgagggtcaacgatttggtgggtacatctatgactgtgctccaggaacagcagcagaaagaggaaaagctgagggagtccgaaaagcttctggaagccttacaggaggagaaacgcgaactgaaggcggccctccaatcacaggagaacctgatccacgaggccagaatccaaaaggagaagctgcaggagaaagttaaagctaccaacacacagcacgccgtcgaagcgattagaccacgcgaagaatccttagcagagaagaagtacacgagccagggtcagggggatttagatagtgtcctctcccaactcaatttcacgcacacctcagaagacctgttacaagcagaggtgacatgtctcgaaggaagtctggaatctgtttccgccacatgtaaacagctcagccaagaactcatggaaaaatacgaggagttaaaaagaatggaagctcacaacaacgagtataaggcagagataaagaagctaaaggagcagatactgcagggtgagcagtcttatagcagtgccctggaagggatgaagatggagatatcccacctgactcaagagttgcaccagagggatattacaattgcttccacaaaaggctcctcatccgacatggagaaacgattgcgcgcagaaatgcaaaaagcggaggacaaagccgttgagcacaaagagatcctggaccaattggagtctttgaagttggagaacaggcacttgtccgagatggttatgaagctggaattgggtctgcatgaggccaaagaaataagcctagcggatctgcaggagaactacatcgaggctcttaacaaacttgtcagtgagaaccagcagcttcagaaagacctaatgaacacaaaatcacagctggagattagcacccagatgtgcaaaaaacagaatgataggatctttaaacctacacattctcgcactactgagttcaaaaatactgaatttaaacctactcacggccaacatcgccatgacggtatcaaaaccgaacactataaaacagatctgcactctccacgggggcaagccagcgactctatcaaccccatgagtcgggtcctttccccactctctcctcagatttccccctgttcctcaacaagatccctgacctcctactcactttgcaagacacacagtctgccctcagccttggatactaacgaggcgaacttctctgacaccatgagcgaaagcatgaacgatcaggaagagttcatttctagctgttctctgcctgtctctccccttggctcgatcgccaccaggtttctggaggaggaagagctcaggagtcatcacatcctggaacggctggacgcccacatcgaggaactgaagagagagagcgaaaaaaccgtgcgccagtttaccgcactaaaatag

SEQ ID NO: 14689 - DNA, 1626 bp, synthetic construct
  source 1..1626: mol_type = other DNA; note = Synthetic coding sequence
atgagctcttgcgttagttcgcagcccagctctaatcgggcggcccctcaggacgagctgggcggtagagggtcctcatcaagtgaaagtcagaagccatgcgaggcgctgagaggcctgtctagccttagcatccacctgggcatggagtcatttattgtagttaccgaatgtgagcctggatgtgcagttgacctgggcttggctagagacaggccactcgaggcggatgggcaggaggtgcccctcgacacgtccggatcccaggctagacctcacctcagtgggcgcaaactctcgctgcaggagagatcgcagggcggcctcgccgccggtggcagcctagacatgaatgggcgatgcatctgcccttctcttccttacagccccgtttcatcaccccagagctcacccaggctccccagaagacccacagttgagtcacaccatgtcagcattactggcatgcaggactgtgtgcaattgaatcaatatacgctgaaggatgaaattggaaagggatcttatggcgttgttaagctggcctacaatgagaacgacaatacttactacgctatgaaagtcctgagtaagaaaaagttgatcaggcaggctggatttccacgacgcccgcccccaagaggcacacgaccagccccaggcggctgcatacagccaaggggtcctattgagcaagtgtaccaggagatagccatcttgaaaaagctggaccacccgaacgttgtcaagctcgtggaagtgctggatgacccaaatgaggatcacctctacatggtgttcgagcttgtcaaccagggacccgtaatggaggtgcccacactcaagcccttgagtgaagaccaggctagattctactttcaggatctcattaaaggcattgaataccttcactatcaaaaaattattcatcgggacatcaagccctccaaccttctggtgggcgaagatggccatattaagatcgctgacttcggcgtgagcaatgaattcaaaggctcagacgcccttttgagtaatacagtgggcactccagctttcatggcacctgaaagcttatctgagaccagaaagattttctcgggtaaagccctagatgtttgggcaatgggtgtgactttatactgttttgtatttggccagtgtccttttatggacgaacggatcatgtgcctacattcaaaaatcaagagccaagctttggaatttccagatcaacctgacattgctgaggacctgaaggatctcatcacccgaatgctcgacaaaaaccctgagagtcgcatcgttgtccctgagatcaagctgcatccatgggtgaccagacacggagccgagccccttccctccgaggatgaaaactgcaccttggtcgaggtcaccgaggaagaggttgaaaactcagtcaagcacataccttccttggccacggttatcctggtcaagacaatgatcagaaagagaagcttcggaaacccatttgagggttccagacgggaggaaaggtcactctccgccccaggcaatctcctgactaagcaggggagcgaggacaatctccaaggtactgatcccccacctgtgggcgaagaggaagtgctcttgtag

SEQ ID NO: 14690 - DNA, 2463 bp, synthetic construct
  source 1..2463: mol_type = other DNA; note = Synthetic coding sequence
atgaccgataccagacgcagagtgaaggtctataccctgaacgaggacagacaatgggacgatcgcgggactggccacgtgtcttctgggtatgtcgagcggcttaagggtatgtcactgttggtgcgggctgaatcggacggcagcctcctactagaatctaagataaatccgaacactgcctaccaaaagcaacaggatactctgattgtatggtctgaggctgagaactatgatcttgctttgagttttcaggaaaaagccggctgtgatgagatctgggagaaaatttgtcaagtccagggaaaggatccatcggtagacataactcaagaccttgtggatgagagcgaggaggagcgtttcgacgacatgagcagccctggtctggaactaccctcttgtgagctgtcccgactggaagaaattgcggagttggtcgcaagttctttaccatctcctctgcgccgggagaagctcgccctggcactcgagaatgaaggctacataaaaaagctcctggagctgttccacgtgtgtgaggatctagagaacattgagggcctccatcacctctacgaaattattaaggggatctttctcctcaaccgtactgctctattcgaagtgatgtttagtgaggaatgtatcatggatgtgatcggttgtctggagtacgatcctgctctgagccagcccaggaagcatagggaatttctgaccaaaaccgcaaagtttaaagaagtgatccctataagcgaccctgaactgaagcaaaagattcaccagacctaccgcgtccagtacattcaggacatggtcctgcctaccccatctgttttcgaagagaatatgctcagtacccttcatagcttcatcttttttaacaaggtggagatcgtcggaatgctccaggaggacgaaaagtttctcactgacctcttcgctcagctcactgacgaggcaacagacgaggaaaaacgacaggaactggtcaatttccttaaagagttctgcgctttttcacagaccctgcagccccagaaccgcgacgcattcttcaagaccttaagcaatatggggatccttcccgctcttgaggtcattctgggaatggacgacacgcaggtccgcagcgccgcaaccgacatcttttcctatctagtggagtataatccttcaatggtacgggaattcgtgatgcaggaggcgcaacagaatgacgacgatattctcctcatcaacttgattattgagcacatgatctgcgataccgatcctgaattgggtggagctgtgcagctaatgggacttctaaggaccctcgtagacccagaaaatatgctggcaactgcgaacaagactgagaagacagagttcctcgggtttttttataagcactgcatgcacgtgctcacagctcctctgctggccaacacaacggaagataagccctctaaggatgactttcaaacagcccaactgctggcacttgttctagaactactgacattttgtgtggagcaccacacatatcatataaaaaactacattatcaataaagatattttgaggcgggtattggtgcttatggcctcaaagcacgcctttttggccctgtgcgcactgaggttcaaaagaaagataataggactaaaagatgagttttataaccggtacattatgaaaagcttcttgttcgagccagtggtgaaggcatttcttaacaatggctctcgttacaacctgatgaactctgctatcatcgaaatgttcgagttcatccgcgtagaggatatcaaatcacttactgcacatgtgatcgaaaactattggaaggccttggaagatgtcgactatgttcagaccttcaaaggccttaaacttcgattcgaacagcagcgcgagcgccaggacaatcccaaactggactctatgcggtctatcttacggaaccacaggtacagaagggatgctagaactctcgaagatgaagaggagatgtggtttaacactgatgaagatgatatggaggacggagaggccgtggtttccccttctgacaaaaccaagaatgacgacgacattatggaccccattagcaaatttatggagagaaagaaactaaaagaatccgaagagaaagaggttctgctgaaaacaaatctcagcgggagacagagcccatccttcaagttaagcctttctagtggtaccaagaccaatctcacaagccagtcctcaacaacaaaccttcccggaagtcccggttctcccgggagccctgggagccccggatcgccagggtctgtgcctaaaaatacgagtcagaccgctgccatcaccacaaaaggcggacttgtggggctcgtagactatccagacgacgacgaggacgatgacgaagatgaggacaaggaggatacgctgcccctgtctaaaaaggcgaaatttgatagctag

SEQ ID NO: 14691 - DNA, 2382 bp, synthetic construct
  source 1..2382: mol_type = other DNA; note = Synthetic coding sequence
atgagtgagcagggggacctcaatcaggctatcgctgaggagggcggcaccgaacaagagacagcaacccccgaaaacggtatcgtcaagtccgagtccttggacgaagaagagaaactcgagctgcaacgtcggctcgaggcccagaaccaggaacggagaaagtcaaagtccggtgccgggaaggggaagttaaccagatcactggctgtgtgtgaggagagcagcgcaagaccggggggagaaagcctgcaggaccaggagagcatacacctgcagctcagctccttctcaagtcttcaggaagaagacaaaagcagaaaagatgactccgagcgtgagaaagagaaggacaagaataaagacaagacaagcgagaagcccaagattcgtatgctatcaaaggactgcagccaggaatataccgactccactggaatcgaccttcatgaattccttatcaacacactcaaaaacaactcaagagatcgtatgattctactcaaaatggaacaggagatcatagatttcattgctgacaataacaaccactataagaaatttccacagatgtcaagttaccagagaatgctggtgcaccgcgttgccgcctactttgggctcgaccacaatgttgaccaaacgggaaagtccgttatcattaacaaaacatcgagtaccagaatccccgagcaacgcttctgcgagcacctgaaagatgagaagggcgaggagagccagaagaggtttattcttaagagggataacagctccatagataaggaggacaaccagtctgtctgttctcaagaatccctttttgtcgagaaccgaggtaaccgtgacggcagcggaagaacatccgggtcaaggcagtcttcatctgagaacgagctgaaatggtcggatcaccaacgtgcttggtcatctaccgattctgacagtagtaatcgtaatctgaaaccagccatgacgaagacagcttcttttggggggatcactgttctgacccgtggagactcaacctcttccactcggtctaccggaaaactcagcaaagcaggtagtgagtctagcagttctgccggtagtagcggaagcctctcccggacacatcccccactccagagcactcctctggtttcaggcgtggccgctggctcccctgggtgtgtgccttaccctgagaatggaattgggggtcaggtcgccccttcctccacaagctatattctgctgcccctggaagccgcaaccggaatccctccgggaagcatactcctaaatcctcacaccggtcagcccttcgtaaaccccgacggaactcccgcaatctacaatcctcctacctcccagcaacccctcagatcagcgatggtgggacagtcgcagcagcaacctccacagcaacagccttcacctcagccccaacagcaagtgcagcccccgcagccacagatggctgggccactagttacccagagtgtccagggcctccaggctagctctcagtccgtgcaatatcctgccgtaagctttcccccacagcatcttttgcctgtctcccctacgcagcatttccccatgcgcgatgacgtggcgacccagtttggccaaatgaccctgagccgccagtctagcggtgagaccccagagcctccctccggacccgtttacccatcatccctgatgccacagccagcccagcagccctcctacgttatcgcgtccactggtcagcaattgcctacgggcggattcagcgggtcgggcccccccatttcccaacaagtcctccaaccaccaccttcccctcagggtttcgttcaacagcctcctcctgcacaaatgccagtctactactatccatccgggcagtacccaactagcacgactcagcagtacagacctatggcacctgtgcagtataacgcccagcggagccagcagatgccacaggccgctcagcaggcaggataccagccagttctgtccggacaacagggctttcagggactgataggtgtgcagcagcccccccagtcgcagaacgtgattaataatcagcaaggcacccccgtccagagtgtgatggtgagttaccctactatgtctagttatcaggtgccaatgacccaagggtcacagggattaccccagcaatcttatcagcagcccatcatgctgcccaatcaggctggccagggatccctccccgccacaggcatgcctgtctactgcaatgtgaccccacccactcctcagaacaatctgcgccttattggccctcattgtccctcctctactgtgcctgttatgtctgcttcctgccggactaattgcgcaagtatgagcaacgcagggtggcaagtcaagttctag

SEQ ID NO: 14692 - DNA, 1467 bp, synthetic construct
  source 1..1467: mol_type = other DNA; note = Synthetic coding sequence
atgagatttcattggctgccaactttgtctgaacctttcgacagaaaccaagagttagagacctgtattcgccctctttggaccccctcggggtctgcctgtgagactgagcataataagtccatggacatgggcaaccagcatccttctatcagtcggttgcaggagatccagaaggaagtgaaaagcgtcgagcagcaggtgataggcttttctggtctttccgacgataaaaactataaaaagctggagaggatccttacaaagcagctgtttgaaatcgattcagtagatacagaaggcaaaggcgatatccagcaggctaggaagagagccgcacaggagacggagagactcctgaaggaactcgagcagaacgcaaaccatcctcatagaattgaaattcagaacatctttgaagaagcacagtccttagtaagggagaaaatagtccctttctataacgggggcaattgtgtgaccgatgaatttgaggagggaatacaggacatcatcctaagattaactcacgtcaaaaccggtggaaaaatctcactgaggaaggcacgctatcacactctaacaaaaatttgcgcagtgcaggaaattatcgaggattgcatgaaaaagcagccttccctccccttgagcgaggatgctcacccgtctgttgccaaaatcaatttcgtgatgtgtgaggtcaataaagcgcggggcgtcctcattgctctgctgatgggggtgaataataacgagacgtgtcggcatctgtcctgcgttctctccggattaattgccgacctggatgccctagatgtctgtgggcggacagagatcagaaattatagacgggaggtggtcgaagatataaacaagctcttgaagtacctcgatctcgaggaggaagcagacacgaccaaggccttcgatctgaggcaaaatcacagcatcctgaaaatagaaaaagttctcaagcggatgcgggagattaagaatgaactcctgcaggcccagaacccctctgaattatacctctcctcaaaaactgagctccaagggctaatcggccagctcgatgaggtatccttagagaaaaatccctgcattagagaagcccggaggagagcagttatcgaggtgcagaccctaattacatacatcgatctaaaagaggctctcgaaaaacggaaattgttcgcttgtgaagagcaccctagccacaaagcagtgtggaatgttctgggcaacctgtccgaaattcagggtgaagttctgagctttgatgggaacagaacggacaagaactatattagactcgaggagctgctgacaaaacaacttcttgctttggacgcagtagacccgcagggagaagagaaatgcaaagctgccagaaagcaggcggtgcgactcgctcaaaacatattgagctacctggatctgaaatccgatgagtgggaatactag

SEQ ID NO: 14693 - DNA, 978 bp, synthetic construct
  source 1..978: mol_type = other DNA; note = Synthetic coding sequence
atggggaagatggtgtccgtgatcaacactgtggataccagtcatgaggacatgattcacgatgcccaaatggattattacggtacacggttagccacctgttccagcgaccggagcgttaaaatttttgatgtaagaaacgggggacaaatcctgatcgctgatttacgcggtcacgagggtcccgtgtggcaggtggcctgggcccacccaatgtacggaaacatcctcgcctcctgctcatacgatcggaaagtgattatctggcgcgaagagaacgggacatgggagaagagccacgagcatgctgggcatgacagttctgtaaacagcgtctgctgggcaccccacgattatggtttgattctcgcctgtggcagctctgatggggccatcagcctactaacttatactggtgaagggcagtgggaagtgaagaaaatcaacaacgcccacaccattggttgcaacgccgttagttgggccccggcggtcgtgccagggtctctcatcgaccatcccagtggtcaaaaacccaattacattaagcggtttgcttctgggggttgtgacaacttgatcaagctatggaaagaagaggaggacggtcaatggaaggaagaacagaagctggaggcccactccgattgggtgcgcgacgtggcttgggcgccaagcattggtctgccgaccagcacaattgcaagctgctcacaggacggccgcgtgttcatttggacctgtgacgatgcctctagtaacacctggtctccgaagctgctccataaatttaacgacgtcgtgtggcacgtatcatggagcatcaccgcaaacatactcgccgtgagcggaggtgacaacaaagtcacgctgtggaaggagtccgtggacggccagtgggtatgcatatccgacgttaacaaggggcagggtagcgtatccgctagcgtcacagagggacaacagaatgagcagtag

SEQ ID NO: 14694 - DNA, 846 bp, synthetic construct
  source 1..846: mol_type = other DNA; note = Synthetic coding sequence
atgctgtttatctttccccttagcctgccatggcgcccatcatgctggaaggagtcttgctctacagggcagcgtcaggctggtaggtcacgagaggactcagtgaccccacctccaagctccccatggcccacccccccagccggtgcaatgagcacaaaacaggaggcacgcagagatgaaggtgaggcccggaccagaggacaggaagcccaattacgggacagagcgcacctgtcgcagcagcgccggttgaagcaagccacacagtttctgcacaaagatagcgccgacctgcttcccctggacagcctgaaacgtctggggacctccaaggatctgcagccccgatcggttatccaacggcgacttgtggagggcaacccaaattggctgcagggagagccaccaaggatgcaggacctcatccacggacaggagtccagaagaaaaacctctagaaccgagataccagcgctcctggtcaattgcaagtgtcaagaccagttgctgagggtagccgtggataccgggactcagtacaaccgtatctctgccggctgcctctctaggctgggcctcgaaaagagagtcttgaaggcgtccgcaggggatctggctcctgggcccccgacacaggtggaacagttggaacttcagctgggccaggaaacagtggtttgctctgcccaggttgttgacgctgagtcccctgagttctgcctggggcttcagacgctcctgtccttaaaatgctgcatcgacttggagcatggagtgctcagactcaaagccccattctccgaactgccctttttgcccctgtaccaggaacctggccagtag

SEQ ID NO: 14695 - DNA, 1533 bp, synthetic construct
  source 1..1533: mol_type = other DNA; note = Synthetic coding sequence
acaggcgggggagtcgcccccgcggggcaagtgcgcacagctacctgggcaagacgagcccgaccctataggaagatggctgcacgaactggcacagaacttgcctctgctgcttccacaacagctcccgggtcttccaagcgaaggaaaaggcacccgtggcacactgtgtcgcggagacccggtcggactcccaaatggcgtttgcctaggatctccgccagagccccttatcggctgcggcgcctgcgccgccacacgtactggcccccgcggcgaccagtggccgcctccaggtgctggcctgttggagcgactcctctaggtagcgtggggggccggaccggaaaaatggacgcagctactttgacatatgatactctgagattcgcagagttcgaggatttccctgagacgtccgagcctgtgtggatcctcgggcggaagtactccattttcactgagaaagatgagattttaagtgatgtggcttcgcgactgtggttcacataccggaagaacttccccgctattgggggaacaggcccaacaagcgatacagggtggggctgcatgctccggtgcggccagatgatcttcgctcaggctctggtctgccgccacctcgggagagactggagatggacccaacgcaagagacagcccgattcatatttctcagtcttgaatgctttcattgaccgtaaggactcatactattctatccatcagattgcgcagatgggagtcggggaagggaaaagcattggccagtggtacggacctaacactgtggcacaagttttgaagaagctcgcagtgttcgatacatggagctctctcgctgttcacatcgccatggataacacagtggtgatggaggagatcaggaggctttgcaggacaagtgtgccgtgcgctggcgcgaccgctttccctgctgattcagatcggcactgcaacgggttccctgctggagcagaggtcacgaaccgccctagtccttggaggccactcgtgctactgatccctttacggttaggactcacagatatcaatgaagcctatgtggagactttaaagcactgcttcatgatgcctcagagcttgggggtgatcggaggcaaacccaacagcgcccattacttcatcgggtatgttggtgaggaattgatctatctggaccctcacaccacgcagcccgctgtggagcccacagacgggtgtttcattcctgacgaaagtttccactgccaacaccccccgtgccggatgagtatcgccgagctcgacccatcaattgcagtaggctttttttgcaagactgaggacgactttaatgattggtgtcaacaggtaaaaaagctctctctgctggggggcgcgttgcccatgttcgagttggtagagctacagcctagtcacctggcatgtcccgatgtgctcaatcttagtctggattcctccgacgtggagcggcttgagcgctttttcgattctgaggacgaagatttcgagatcctgtccttatag

SEQ ID NO: 14696 - DNA, 552 bp, synthetic construct
  source 1..552: mol_type = other DNA; note = Synthetic coding sequence
atggcaagcaataaaaccacgctgcagaagatgggcaaaaagcagaacggcaaatccaagaaggtagaggaggcagagcccgaggaatttgtggtggaaaaggtactggatcgccgggtcgtgaatgggaaggttgagtattttttgaagtggaaaggttttacagatgccgacaacacatgggagccagaggagaatctggactgcccagagctcattgaagcatttttaaactctcagaaggctgggaaggaaaaagacggaactaaacgaaagagcttgtccgatagtgaaagcgatgattcaaaatctaaaaagaaacgagacgccgccgacaagccccgcggatttgcgagagggctcgatccggagagaatcatcggggcaaccgactcctccggcgagctcatgttcctgatgaaatggaaggatagtgatgaagccgacctggttctggccaaagaggctaacatgaagtgcccacagatcgtgatcgctttctatgaagagcgtctgacctggcattcctgtccggaagatgaggcccagtag

SEQ ID NO: 14697 - DNA, 1464 bp, synthetic construct
  source 1..1464: mol_type = other DNA; note = Synthetic coding sequence
atggagagaagtgggcagcgcgtgactacctgggactgcgaccaagggaaacacagcgacagtgattaccgtgaagacggcatggatctaggctctgatgccggcagctcctcatcttcaagtagagcctctagccagagcaactctactaaagtcaccccatgctccgagtgcaagtcgagctcctcacctggggggagcctggacctggtgtctgcgctggaagattacgaagaaccgtttcctgtgtaccagaagaaggtcatcgatgaatgggcccctgaggaagatggcgaggaggaagaagaggaggacgagagagaccaaaggggctatcgggacgaccggagccctgcccgcgagcccggcgacgtgagcgccagaacacggtcaggtggaggaggaggccggagcgccacaaccgcaatgcctcccccagtgccaaacggcaatctgcatcagcacgatccacaggacctccggcataacggcaatgtcgtcgtggccggacggcccagctgctccagaggcccccgccgcgcaatccagaagccccagcctgccgggggtcggcggagcggaaggggccctgccgccgggggattgtgtctgcagccaccggacgggggtacttgtgtgcccgaagagccccctgtgcctccaatggactgggaagccttggagaagcacctggcggggctacagttcagggagcaggaggtgagaaatcagggccaggctcggacaaatagtacaagcgcgcaaaaaaatgaaagggagtctatccggcaaaagttggcacttgggagttttttcgatgatggaccggggatttatacaagttgttccaagagtggaaaaccatcactcagcagtaggctccagagcgggatgaatctccagatttgtttcgtcaatgactccggatcagataaggatagcgacgcggacgactctaaaacagagacctccctggacacccccctctcccccatgtcaaagcagtcatcaagctactcagaccgggacaccacagaggaggaatccgagtccctggatgacatggatttcctgactagacaaaagaaactccaggccgaagccaaaatggcccttgctatggctaaaccaatggctaaaatgcaggtggaagtcgagaagcagaatcggaagaaatctcctgtggctgatctgctgcctcacatgcctcatatctccgagtgtctgatgaaaagatctctgaagccgacagacctccgggatatgactatcgggcagctccaggtgattgtgaatgatctccattctcagattgagtcactcaatgaggaactggttcagctgctcctgataagggacgaattacatactgagcaggacgccatgctggtggatattgaggacctgacaaggcacgcagagagccagcagaagcacatggctgaaaaaatgcccgccaagtag

SEQ ID NO: 14698 - DNA, 927 bp, synthetic construct
  source 1..927: mol_type = other DNA; note = Synthetic coding sequence
atgaagagagcccatccggaatattcctcttctgactccgaactagacgagactatcgaggtggagaaggaaagcgccgacgagaatgggaatctcagcagcgctctcggaagcatgtcacccaccactagtagtcagatcctcgcacggaaaagaaggagaggtattatcgaaaagagacgtagagacagaatcaataacagcttgagcgagttaaggagactggttccctcagcgtttgaaaaacaggtgatggagcagggctcagctaaactcgaaaaagcagagatcctgcaaatgactgtggaccacctaaagatgctgcacaccgcaggcgggaaaggctattttgatgctcacgccctggctatggattatcgctctttggggttcagggaatgcctggcagaggtcgcacgatatctgtcaattatcgagggcttggacgcctctgatcctctccgcgtccggctggtgagccacttgaataactatgcaagccagcgcgaagcagcttccggcgcacatgcaggcctcggacacataccctggggaaccgtcttcggtcaccacccccacatcgcccatcccctgctgttaccacagaatggccatgggaatgcagggacaaccgcttctcccacagaaccccaccatcagggcaggctggggtcagcacatccggaagcacccgccttgagagcccctccaagcggctccttggggccggtgctgcctgtggtcaccagcgcttctaagctgtctccacccctcttatcaagtgtggcctccctgtctgcattccctttttcttttggctcatttcacctgctgagcccaaatgccctctctcctagtgctcctacccaggcagccaatctgggaaagccctatcgcccatggggaacagaaatcggcgccttctag

SEQ ID NO: 14699 - DNA, 1338 bp, synthetic construct
  source 1..1338: mol_type = other DNA; note = Synthetic coding sequence
atgtccgtgacatatgatgattccgtgggggtggaggtcagctcagacagtttttgggaggttgggaactacaagaggaccgtcaaacgcatagatgacggccatcggctgtgcagtgatttgatgaattgtctccacgaacgcgcacgtatagaaaaggcgtacgctcagcagctgaccgagtgggcccgccggtggcggcagctggtggaaaagggcccccaatacggaaccgtggagaaagcctggatggcctttatgtccgaagccgagagggtgagcgagctgcacctggaggtgaaagcaagcctgatgaacgatgattttgaaaaaattaaaaactggcagaaagaagctttccacaaacaaatgatgggtggcttcaaggagaccaaagaagccgaggacggattccggaaggcacagaagccttgggcaaaaaagttgaaggaagtggaggctgccaaaaaggcccaccatgcagcttgcaaagaggaaaagctcgccatatccagagaagctaactccaaggccgacccctctctgaaccccgagcagttgaagaagttgcaggacaagatcgaaaaatgcaagcaggatgtgctgaagaccaaagaaaagtatgaaaaatctcttaaggagctggatcagggaaccccccagtatatggagaacatggagcaagtctttgaacagtgccagcagtttgaagagaaacggctcaggttttttcgtgaagtcctgctggaggtacagaagcatctcgacctgtcaaacgtggcaggatacaaagctatttaccatgacctagagcagagtattcgtgccgctgacgccgtggaggatttgcgttggttcagggccaatcatggccccggaatggccatgaactggcctcagttcgaggaatggtccgcggacttgaatagaaccctgagccgccgggaaaaaaagaaggctaccgacggtgttaccctaactggcatcaatcagactggcgatcagagcctgccttctaaaccttcaagtgttagcagctatgaaaaaacccagagttatcctacagattggagcgatgatgaaagcaataacccattctcatcaactgacgccaatggcgattcaaatccgttcgatgatgatgctacgtccgggaccgaggtccgggttcgagctctttacgattacgagggtcaggagcatgacgaattgagtttcaaagctggggatgaactgacaaagatggaagatgaagacgagcagggctggtgtaaaggaagactggacaatggccaggtgggcctttaccccgccaattatgtcgaagcaatccaatag

SEQ ID NO: 14700 - DNA, 1248 bp, synthetic construct
  source 1..1248: mol_type = other DNA; note = Synthetic coding sequence
atgatgttgggaccagaaggcggtgagggattcgttgtcaagctcagaggcttgccctggtcttgcagcgttgaagatgttcagaactttctgtcggactgcactatccatgacggcgcagctggagtacactttatttatacacgcgagggccgtcagtccggagaggcatttgtggagctggggtccgaggacgatgtgaaaatggcgttgaaaaaagatcgcgagtccatggggcataggtacattgaggttttcaaatctcatcgtactgagatggactgggtcttgaagcacagtgggccaaatagcgctgacagcgctaacgatgggtttgtgaggctgcgtggactccctttcggatgcaccaaggaagagattgtccaattcttcagtggactagaaatagtgccaaacggtattaccttacctgtggaccctgagggcaagatcactggagaggctttcgttcagtttgcctctcaggagctcgctgagaaagccctcggcaaacataaggagcgcattgggcatcggtacattgaggtcttcaaaagcagccaagaggaggtgcgctcatactccgaccctccacttaagttcatgtcagtgcaacgcccaggaccttacgaccgtcctggcactgcccgccggtacatagggatcgtgaaacaggccggtctagagaggatgcggccgggcgcctactctaccgggtatggggggtacgaagagtatagtggccttagcgatggttatggtttcactactgacctattcggccgtgatctttcttactgcttatctgggatgtacgaccacaggtatggagacagcgaattcacagtgcagagtactacagggcattgcgtacatatgagaggcttgccatataaagctaccgagaatgacatctacaattttttttcaccattgaatcccgtccgcgtgcatatagaaatcggtccagatgggagagtgacaggggaggcagacgtggaattcgccacacacgaggaagccgtggccgccatgtcgaaggatagagccaacatgcagcaccgatatatcgaactattcctcaatagcaccactggtgcaagtaacggagcatattcatcgcaggtcatgcagggtatgggagtgagtgctgcacaggcgacatactcaggattagaatctcagtccgtgagcggttgctatggtgctgggtatagcgggcagaacagtatgggcgggtacgactag

SEQ ID NO: 14701 - DNA, 1770 bp, synthetic construct
  source 1..1770: mol_type = other DNA; note = Synthetic coding sequence
atgtcagtgtctgttcatgaaaccagaaagtcaaggtcgtctacaggctcaatgaatgttaccttgtttcataaggcttcccaccccgactgcgtgctcgcccatctgaatacactgaggaaacactgcatgtttactgatgtgaccctttgggcaggcgaccgggctttcccctgccacagggctgtgctggcagcttcctcccggtactttgaggccatgtttagccacggactgagggagtccagagatgacacggtgaactttcaggacaacctgcaccccgaggttctggagctcttgctggacttcgcatacagctccaggatcgccatcaatgaggagaacgccgagtccctgctggaagcaggggatatgctgcagttccacgacgtgcgtgacgccgctgctgaattcctagagaaaaacctcttcccctccaactgtctgggtatgatgctcttgtctgacgcccatcagtgccgcagactctatgagttctcctggcgaatgtgtctggttcacttcgagaccgttcgacagtccgaggattttaactccctcagtaaagacactcttctcgatctcatctcaagtgacgagttagagactgaagatgagcgtgttgttttcgaagccatcttacagtgggtcaagcacgacctcgagccgagaaaggtgcatcttcccgagctgctcaggtccgtgaggttagccctgctgccttccgactgcttacaagaagcggtgtcatctgaggcactcctaatggctgacgagagaacaaagttgatcatggacgaggccctgcgatgtaaaacaaggatcctgcagaatgacggagtggttacctccccttgcgcccggcctcgcaaggctggacatacactcctgattttgggcggacagacttttatgtgtgacaagatttatcaggtcgaccataaagctaaggagattattcctaaggccgatctgccctccccccgaaaggaattctccgcaagcgctattggatgtaaagtgtacgttacaggtggacgcggatccgaaaatggggtgagcaaggatgtttgggtctacgataccgttcatgaggaatggtccaaagctgcacctatgctcattgccagatttgggcatggatctgctgaacttgagaactgcctgtacgtggttggcggacatacatctctggctggtgtgtttcctgcatccccctccgtgtctctcaagcaggtggaaaagtacgatcccggagctaataagtggatgatggttgccccgctgcgcgacggggtgtcaaatgccgcagtggtgtcagctaagctgaagttgttcgtatttggggggacaagcatacacagagatatggtgagcaaagtgcagtgctatgatccttctgagaatcgctggactatcaaggcggaatgcccacaaccctggagatatacagccgccgctgttctgggatctcaaatcttcattatggggggtgatacggaattcaccgctgcgtcggcatacaggtttgattgtgaaaccaatcagtggactcgcataggcgatatgaccgctaagcgcatgagttgtcatgccctggcgtcagggaataagttgtatgtggttggaggatactttggcacacagcgctgtaaaacacttgattgttatgaccctacatcagacacatggaattgtattactactgtgccctattctctcatccccacggctttcgtgtccacttggaaacatctgcctgcttag

SEQ ID NO: 14702 - DNA, 1311 bp, synthetic construct
  source 1..1311: mol_type = other DNA; note = Synthetic coding sequence
atgatgggcgaggcagctgtggctgccgggccttgccctcttcgggaagattccttcacacgtttttcaagccagagcaacgtttacgggctggccggcggggcagggggccgtggagaactgttggccgcaacactcaagggcaaagtgctggggtttcgataccaagacctcaggcaaaagattaggccggtggcgaaagagctccagtttaactatatccctgtagatgccgaaattgtcagcatcgacacgtttaacaaaagtcccccaaagcgcggcctggtggtgggaatcacattcattaaggactccggcgacaagggctcaccgttcttgaatatctattgtgattacgagccaggatctgaatataatttggactcgatcgcacagtcctgtctcaacttggagttgcagtttactccttttcagctttgtcacgccgaagtccaggtgggcgaccagctcgagactgtctttttgctctcaggcaacgatccggctattcacctgtacaaagaaaacgaaggcctgcatcaatttgaggaacagccagtggagaatctttttcctgaattgacgaacctgacctcctccgtgttatggctagacgtgcacaactttcctggcacttcacggcgacttagtgctcttggctgccagtcgggatacgtgcgtgtggctcatgtcgatcaaagatcaagggaagttctgcagatgtggtctgttctgcaggacggccccattagccgagttatcgtgttcagcctcagtgccgctaaagaaactaaagatcgcccactccaagacgagtattctgtgttggtagcctccatgctagaacccgctgtggtgtacagagatctgttaaaccggggcctagaagatcagttgctgttaccaggcagtgaccagtttgacagcgtgctgtgtagcctcgtaacagatgttgatctcgacggccgtccagaggtgctggtcgccacttacggccaggaactcctttgttacaaataccggggcccagaatctggactacccgaagcacaacacggtttccacctgctgtggcagaggtccttctcctcccccttgctggccatggcccatgttgatctaaccggagacggtctgcaggagcttgcggtcgtaagccttaagggtgtacatattctgcagcattccctgattcaggcctccgaactcgtcctgacaaggctgcgacaccaggtcgaacagagaaggcgaaggctgcagggactggaggatggagccggcgctgggcccgcagagaacgccgccagctag

SEQ ID NO: 14703 - DNA, 642 bp, synthetic construct
  source 1..642: mol_type = other DNA; note = Synthetic coding sequence
atgcttctgcctttcattaggactctgcccctgctctgctataaccatctgcttgtgtcccctgatagcgccaccctgagcccaccctacagtcttgagaagatgacagacctggttgcggtctgggacgttgccctgtcggatggtgtgcataagattgagttcgagcacggcacaacatccggcaaaagagttgtctacgttgacggtaaggaggaaattcgaaaggaatggatgttcaagctcgtaggaaaggaaactttttacgtaggtgctgctaaaacgaaggccaccattaacatcgatgcaatctctggctttgcctacgaatacactctcgagatcaatggcaagagcctaaaaaaatacatggaagacagaagcaagacaaccaacacatgggttcttcatatggacggagagaactttaggattgtacttgagaaagacgctatggatgtgtggtgcaacggcaaaaagctggagactgccggtgagttcgtcgacgacggtactgaaacccacttctcaatcggcaaccacgattgttacatcaaggcagtctcttccggaaagcgcaaggagggcattatccataccctgatcgtcgataaccgtgagatcccagagatcgctagctag

SEQ ID NO: 14704 - DNA, 663 bp, synthetic construct
  source 1..663: mol_type = other DNA; note = Synthetic coding sequence
atgacttcaggtgaggttaagacctccctgaaaaacgcctatagttcagccaaacggttgtcacccaagatggaagaggagggcgaagaggaggactattgtacccccggcgcatttgagttagagcgacttttttggaagggcagccctcaatacacacacgtcaacgaggtttggcccaaactctacataggggacgaggctacggcccttgatcgatataggctgcagaaggcggggttcacccacgtgctgaatgcggctcacggccgttggaacgtagacactggacctgattattatcgcgatatggatatccaataccacggcgtggaggcagatgaccttcccaccttcgacctcagtgtgttcttttaccccgctgccgcgttcatagaccgggcacttagcgacgaccatagtaagatcttggtgcactgtgttatggggagaagcagatctgccaccctggttttggcgtatctcatgattcataaagatatgactctagtggacgctattcaacaggtggctaaaaacagatgcgttctgcccaaccgaggctttcttaaacagctacgcgagctggacaaacagctggtacagcagagaagaagaagccagagacaggacggcgaagaggaagacggccgggagttgtag

SEQ ID NO: 14705 - DNA, 1845 bp, synthetic construct
  source 1..1845: mol_type = other DNA; note = Synthetic coding sequence
atgtcaccagccgacaggtgccgatccgccaacaccatcgaaccagcgaccacgtcctccttggcattgttcctgctcttacagcgtgatcagagcagtcgtacacggggcctgcctgaggagaaggaagaggtcacaatggatacgagcgaaaaccgcccagagaacgacgtgcctgagcctccaatgcctatcgcagaccaggttagcaacgacgaccgccccgaggggtccgttgaggatgaagaaaaaaaagaaagctccctccccaaatcttttaaacgaaagattagcgttgtcagcgctacaaagggagtgccagccggaaactctgacacggaaggcgggcagccaggccgcaagaggaggtggggtgcgtcgactgccacaacccagaagaaaccatcaataagcatcactaccgagtcccttaagagtctgataccagacattaagccactggccggacaggaggcagttgtcgacctgcacgcagacgattctagaattagcgaggatgaaaccgaaaggaacggcgacgacggtacacacgataaggggctgaagatatgtaggaccgttacccaggtggtgcctgcagaaggacaggagaacggccagagagaagaggaggaggaggagaaagaaccagaggcagaaccccctgtgccaccacaggtgtccgtcgaagtggctctgcccccccccgcggagcacgaagttaaaaaagtgaccctgggggacactcttactaggaggtctattagccaacaaaaaagtggcgtgtctatcacgatagacgatcccgttcggactgcccaggttccgtcccctccccggggcaaaatttcaaatatagtacatattagcaacctggtacgcccttttacgttgggacagctgaaggagctgttgggaagaaccggcactctcgtcgaggaagccttctggatcgacaagattaagtcccattgttttgtgacatactccaccgtggaagaagcagttgccacgagaacagccttacacggcgtcaaatggccgcaatctaatccaaagtttctctgcgccgactacgctgaacaggatgagctggattaccatcgcggcttgctcgtagaccggccctcagaaacgaagacagaagagcaaggcatccctcgaccgcttcacccaccccccccacctcccgttcaacctccacagcacccccgtgccgaacaacgggaacaagaaagggcagtgcgtgaacaatgggccgaacgcgagagggagatggaacgccgtgagaggacccggtcagagagggaatgggacagggataaggtgcgcgaagggcctaggtctcgatctcggagcagagacaggcggaggaaggagagggccaagagcaaagagaagaaatccgaaaagaaagaaaaggctcaagaagaacctcctgcgaaattgctcgacgatctgtttcggaagacaaaggccgctccttgcatctattggctgccattgacagattcacagatagtgcagaaggaagctgaacgggcggagagagctaaagagagggaaaaacgcaggaaagagcaggaggaagaagaacagaaggagagggagaaggaggctgagcgggagaggaaccggcagctggagcgagagaagcggcgcgaacactctcgggagagagacagagagcgggagagagagcgggagcgagaccgtggagaccgagaccgagacagggagagagatcgagaacgaggacgggaacgggaccggcgcgacactaagcgacacagtcgttccaggtcacgctcaaccccagtccgcgaccgggggggacgacgttag

SEQ ID NO: 14706 - DNA, 1203 bp, synthetic construct
  source 1..1203: mol_type = other DNA; note = Synthetic coding sequence
atgaaaaacgagccactaacacccggctaccatgggtttcctgcacgggattctcagggcaaccaggaacctaccaccacccctgatgccatggttcaaccttttactaccatcccttttccccctcccccacagaatggtatccctaccgaatatggtgtcccacacacacaggactatgcgggacagactggcgaacacaacctgacgttatacggctcaacccaggctcacggcgagcaaagttctaactccccaagtacacagaatggatcgttaacgacagagggcggcgcacaaacagatgggcagcaaagtcaaacacagtccagcgagaactcggaatctaagtccactcctaagaggctgcacgtcagcaacatcccctttcgctttcgagacccagacctccgccaaatgttcgggcagtttgggaagattctggacgttgaaatcatcttcaatgaaaggggtagtaagggctttggattcgtcacttttgagaacagtgccgacgctgatcgcgcgcgggaaaagctgcacggcacggtcgtcgaaggccgcaagattgaagtgaataacgctactgcacgcgtcatgacaaataaaaagatggttaccccctatgcaaacggatggaagctgtcaccggtggttggtgccgtgtatggacctgagctgtacgcagcttccagctttcaggctgacgtgagcctggggaacgatgccgccgttcctctgtccgggcgtggtggcattaatacctacatcccccttatcattccaggctttccctatccaacggctgccaccaccgccgccgcgtttcgaggagcacatttgcgcggccgcgggcggaccgtctacggcgcagtgagggcagtacctcctacagccatacctgcttatccaggcgtggtgtatcaggatggattctacggcgccgacctctatatagaaagcgctaattgtttccgttcaaacagggtggacatgcaacctacagatatgcactctctgctgctccagccccagcccccacttttacaacccctgcaacctctgaccgtgacagtaatggctggatgcacacagcctaccccaacaatgccgctccctctgcccctggctatggagctggcactgtggcgggtttacactgaagttgccactgctgatctgccaccgaccgaggtgacctag

SEQ ID NO: 14707 - DNA, 1545 bp, synthetic construct
  source 1..1545: mol_type = other DNA; note = Synthetic coding sequence
atggacgaaggcatggaaatctcatctgaggggaacagtctgattaaagctgtgcaccagagtcgtctacgcttgacaagactcctgctcgagggtggagcctacatcaacgagtcaaatgataggggcgagactcctcttatgatagcttgcaagacaaagcatgttgaccaccagtcagtctctaaagccaagatggtcaaatacctactggaaaataacgccgatcctaatattcaggataagagtggaaaaacggccctgatgcacgcttgccttgagaaggcagggcctgaagtcgtgagtctactgttgaagtccggcgcagacttgagcctccaggatcacagcagctactctgccttagtctacgcgatcaacagcgaggataccgagactcttaaagtgctattgtcagcttgcaaggctaaggggaaggaagtgatcataattaccacggccaaattgccgtgtggaaaacataccaccaaacagtatttgaatatgcctcctgtggatatcgatggctgccacagccccgcaacttgcacaacaccgagcgagatcgacattaagacagcctcgagcccgctttctcatagttccgagacagaactgacactatttggctttaaagatttagaactggccggttcaaacgacgatacatgggacccaggaagcccggtacggaaaccagctttagcacccaagggtcctaagcttcctcatgccccgccttgggtgaaatctccccccctgctcatgcaccagaaccgagtagccagccttcaggaggagcttcaagacataacaccagaagaggagttatcatacaaaaccaacggactggccctgtctaagcgttttatcacccggcaccaatccatagacgtaaaggatactgcgcacctcctgcgagcattcgaccaggcgtccagcagaaaaatgtcctacgacgaaatcaactgccaaagttacttgtcagagggtaaccagcagtgtatcgaagtcccagtggatcaggaccccgactcaaaccagactatttttgctagtacactccgctcaatcgtgcagaagagaaatcttggagctaatcactacagttcggacagccaactttcggctggactgaccccaccgaccagcgaagacgggaaggccctcatcggcaagaagaaaattctttcaccatcaccgtcccagctatctgagagcaaagagctgctcgagaatattcccccaggacctctctctagaagaaaccacgccgtccttgaaagaagaggaagcggggcctttcccctggaccatagtgttactcagactagacaagggttcctgccacccctgaacgtcaactctcatcctcctatcagtgatattaatgtgaataataaaatctgtagcctgctgtcatgtgggcagaaagtgctgatgcccaccgttccaatttttcccaaagagtttaagagtaaaaagatgttactgcgtcggcaaagtttgcagacagagcagataaagcagttggtgaacttctag

SEQ ID NO: 14708 - DNA, 1674 bp, synthetic construct
  source 1..1674: mol_type = other DNA; note = Synthetic coding sequence
atggaccagagcagagttcttctgtgggttaaagctgaaccattcattgtcggagccctgcaggttccccccccctcaaaatttagcctgcactacctgcgcaaaattagcacatacgtccagattcgcgctactgagggtgcataccctagactctactggtcaacatggaggcacatcgcctgcgggaagctgcagctcgccaaagaccttgcctggttgtattttgagatcttcgattcactgtccatgaaaactcccgaagaacgccttgagtggagtgaagtgctatccaattgcatgagcgaggaggaagtcgagaagcagcgcaatcaactgagcgtggacactctgcagttcctgttattcctgtacattcaacaactcaacaaggtctctctcagaacaagcctgattggggaggaatggcccagcccaaggaataaaagccagtcgcctgaccttacagagaagagcaactgccataacaaaaactggaacgactactcccaccaggcgttcgtctacgaccacctctctgatctgctagaactgctgttagatcccaaacagcttacagccagttttcacagcacccatagctctctggtttcacgcgaggcagtagtcgccctgagctttctaatcgaggggaccatcagccgggcaaggaagatataccctctgcacgagctggcactctggcagcccctgcatgcggacagcggctttagcaagatcagtaaaaccttctcgttttacaaactagagacttggctgagaagctgcttgacgggtaacccctttgggacctctgcgtgcctgaagtccgggaagaaactcgcttgggcccaccaggttgagggcaccacaaaacgcgcaaagatcgcttgcaacactcatgtcgcacccaggatgcaccggttagttgttatgtcacaggtgtacaagcagactctggcaaagtcttcagacacgttggccggggcccacgtgaagatccacagatgtaatgagtccttcatctatctgctgagtccgctgcgatctgttactattgaaaagtgtcggaacagcatctttgtgctgggccccgtgggcactacattgcacctgcactcatgtgacaacgtgaaagtcattgcagtgtgccacaggctatcaatcagttccaccactggctgcatcttccacgtgttgaccccaacgcgtcctctaatactctctggcaatcagactgtaactttcgcgccctttcatacccactaccccatgcttgaagatcacatggcccggaccgggctcgccacagtgcccaactattgggataatccgatggtagtttgcagagagaacagtgacacaagagtgttccagctcctgcctccctgtgagttctatgtcttcatcatccctttcgaaatggagggggacactacagaaatccctggaggactgccgtccgtgtatcagaaggccctcggtcagagggaacaaaagattcagatctggcagaagacagttaaagaagctcaccttaccaaagaccagcgcaagcaatttcaggtcctagttgaaaacaagttttatgagtggctgatcaacactggacatcggcagcagcttgacagcttggtgccccccgccgcaggctcaaagcaggcagcaggttag

SEQ ID NO: 14709 - DNA, 648 bp, synthetic construct
  source 1..648: mol_type = other DNA; note = Synthetic coding sequence
atggtcttcagaaggtttgtggaggtgggcagggttgcctacgtgtccttcggtccccacgctggtaagctggtggctatcgtggacgtgattgatcagaaccgcgcactcgtcgacgggccttgcacccaggttaggcggcaggctatgccatttaaatgcatgcagttaacagatttcatccttaagttcccccacagcgcccaccaaaaatacgtcaggcaagcctggcagaaagccgatattaacacaaaatgggcggccacccgctgggccaagaagattgaggctagggaaaggaaagctaaaatgacagatttcgatcggtttaaagttatgaaagctaagaagatgagaaatcgcatcatcaagaacgaggtgaagaagcttcaaaaggccgccctgctgaaggcgtcccccaagaaggcaccaggaaccaaaggaaccgccgccgcagccgctgccgcggctgctgctaaagtcccagccaagaagattacagcagctagcaagaaggcacctgcccaaaaggtgccagctcagaaggccacgggacagaaggccgctccagctccgaaggctcagaaaggtcagaaggctccagctcaaaaagcacctgcaccgaaagcctccggaaagaaagcttag

SEQ ID NO: 14710 - DNA, 888 bp, synthetic construct
  source 1..888: mol_type = other DNA; note = Synthetic coding sequence
atggagctgatccaggataccagccgtcccccgctggagtacgtcaaaggcgttcctctcattaagtacttcgctgaagccctgggacctcttcagtccttccaggctcggccagatgacctgctgattaatacgtaccctaagtcagggaccacatgggtgagtcagatccttgacatgatttatcagggcggtgacctggaaaagtgcaatagggctccaatctatgtgcgggtcccattcctcgaagtgaacgaccccggtgagccctccggcctggagacattaaaggatacaccccctccacgactgatcaaaagtcacttgccactcgccttgctgccgcagactctcttagatcagaaggtcaaagtggtctacgtagcgaggaaccccaaagatgtggctgtttcttactaccacttccatcggatggagaaggcccacccggaacctggcacatgggattcttttttagaaaagtttatggcaggcgaggtgtcatacggcagttggtaccagcacgtccaggagtggtgggagctaagtagaacccaccccgtactgtatctgttttatgaagatatgaaagagaaccctaagcgtgagatccagaaaatcctagagtttgtaggaaggagccttccagaggaaaccatggatttcatggtacagcacacttcttttaaggagatgaaaaaaaacccgatgactaattacacgacggtccctcaggagctgatggatcacagcatcagcccttttatgcggaagggaatggcaggagattggaaaacaacttttacggttgcacagaatgaaaggttcgatgcggactacgcagagaaaatggccgggtgcagcctctcctttcgctccgagctgtag

SEQ ID NO: 14711 - DNA, 1368 bp, synthetic construct
  source 1..1368: mol_type = other DNA; note = Synthetic coding sequence
atgagctccctgggcgccagcttcgtccagatcaagtttgacgaccttcagtttttcgaaaactgcggcggaggatccttcggcagtgtatacagggcaaaatggatttcacaggacaaggaagttgctgtgaagaagctgctcaaaatcgaaaaagaggcagaaattcttagtgtgcttagccaccgaaatattatccagttttacggggtgattttggagcctccaaactatggcatagtgaccgaatatgcaagcctcggatcactgtacgactatattaatagcaacagatcagaggagatggatatggaccacatcatgacctgggcaacagacgtggctaagggtatgcattacctgcacatggaggcaccggtgaaggtcattcaccgggatctgaagtccaggaatgttgtgatagccgccgatggtgttctaaaaatttgtgatttcggagcctccagattccacaaccacacaacacacatgagtctcgtggggacttttccgtggatggctcccgaagttatacagagcctcccagtttcagaaacatgcgacacatattcttatggcgtggtgctctgggagatgctgactcgggaggtaccctttaagggtctggaagggcttcaggtggcttggcttgtagtggaaaaaaatgagcgcttaactatcccaagctcttgccctagaagcttcgccgagctgcttcatcagtgttgggaagctgatgctaaaaaacggccgagcttcaagcaaattattagtatcctcgagtcaatgtccaacgatacatctctgcctgataagtgcaattcgttcctgcacaacaaagcagagtggcgctgtgagatcgaagcgactttagagcgcttgaaaaaacttgagcgcgacctttctttcaaggagcaggaactgaaggaaagggaacggcgcttgaaaatgtgggaacagaaactaaccgagcagtcaaatacgccccttttactgccgttggccgctcgcatgagtgaagagtcctactttgagagcaagactgaggagagcaactccgccgagatgagctgtcagatcacagccaccagtaatggggaaggccatggaatgaatccatccctgcaggcgatgatgcttatgggttttggggatattttcagcatgaacaaggccggggcagtcatgcactccgggatgcagattaacatgcaagctaaacaaaactctagcaaaactacttcaaaacggcgcgggaagaaggtcaacatggcactcggattttctgattttgatctgtcagagggggatgatgacgacgatgacgatggggaggaggaggataatgacatggacaacagcgaatag

SEQ ID NO: 14712 - DNA, 423 bp, synthetic construct
  source 1..423: mol_type = other DNA; note = Synthetic coding sequence
atgagattccggttctgcggagatcttgactgccccgactgggtgttggccgagatctcaaccctggcaaagatgagcagtgttaagctgcgtctcctttgtagccaagtgcttaaggaacttctcgggcagggtatcgattatgagaagatacttaagctgaccgccgacgctaagttcgaatcaggcgacgtgaaagctactgttgctgtgctgagttttatcctctcttccgccgccaagcactccgtcgacggagagagcttgtcttcggaactacagcaactgggcttgcctaaggaacatgcagcctctctgtgcagatgctatgaagagaagcagagtccattgcagaagcatctgcgagtttgtagcctcagaaagcttaagcaagcgcagaccctgatgagttcactcggatag

SEQ ID NO: 14713 - DNA, 573 bp, synthetic construct
  source 1..573: mol_type = other DNA; note = Synthetic coding sequence
atgaccgcctccgccagcagcttctcttccagtcagggcgtgcagcaaccgtccatctactccttttcacaaataactagatctctgttcctgtccaacggcgtagccgcgaacgataaactcctgctctcatctaatcgaattacagccattgtcaatgcaagtgtggaggtagtcaacgtcttcttcgagggtatccagtacattaaagttccagtgaccgacgctagagatagccgattgtatgacttctttgaccccattgcggacctgattcataccatagacatgaggcagggacggactctccttcactgcatggccggtgtcagcagaagcgcaagcctgtgcttagcctatttgatgaagtatcactcaatgtctttgctggacgctcatacttggactaaaagcaggaggcctatcattaggccgaataacggattctgggaacagctgatcaattatgagttcaagctctttaataataataccgtcaggatgattaacagtcccgtcggcaatataccagatatatatgaaaaggacctgcgcatgatgatatcaatgtag

SEQ ID NO: 14714 - DNA, 3576 bp, synthetic construct
  source 1..3576: mol_type = other DNA; note = Synthetic coding sequence
atgcttagaaagctgacaatcgagcagatcaacgattggttcaccatcggtaagactgtgaccaacgtcgagctgctgggagcaccaccagctttcccggccggcgctgcccgggaggaggtacagcgtcaggacgtagctccaggggccggaccagcagctcaagcacctgccctggcacaagcaccagctagacctgcggccgcctttgagagaagcctttcacagcgaagctctgaagtggagtacattaataagtatcggcagttggaagctcaagagctggatgtttgccgctccgttcagcctacctccggtcctggtcctagaccgagtcttgccaagttgtcctccgtgacttgcattcctggcacaacctataagtaccctgatttgcctatcagtcgctacaaagaggaggtggtgtctttgattgagagcaacagtgtggtcatcatacacggggctaccggcagtggtaaaagcacacagcttcctcagtacatcctggatcactacgtgcaacgcagtgcgtactgttctatcgtagtaacacagccacggaagattggcgcatcctccatagctagatggatctctaaggagagagcttggacactcgggggggttgtgggataccaggtggggcttgagaagatcgctaccgaggacacccgcttgatttacatgaccactggcgttttattgcaaaaaatagtgtccgccaagagtctcatggagtttactcacatcataatcgatgaagtgcatgaaaggactgaagaaatggattttttgttactagtagtcagaaagctgctgcgtactaatagccgctttgtgaaagtcgtcttgatgtccgctaccatttcctgtaaggaattcgctgactatttcgccgtgccagtgcagaacaaaatgaaccctgcatatatctttgaagttgaaggaaagccgcattcggtcgaagagtattatctgaatgacctggaacatatccaccactccaagctctccccgcacctcctcgaggagcctgtcatcactaaggatatctacgaggtggctgttagcctcatacagatgttcgacgacctggacatgaaggagagcggaaataaggcctggagcggggcccagttcgtactggaacggtcatctgtgttggtgttcctgcctggactgggagaaattaattatatgcacgagctccttacatctcttgttcacaagaggttacaggtctaccccctgcacagctccgtggctttggaggaacaaaataacgtgtttctctcacctgttcccggatacaggaagattatcctttcaacaaatatagccgagtcttcagttacagtgcctgacgttaagtacgtcatcgatttttgcttaaccagaacattagtgtgcgacgaggacacaaattaccagagtctcaggctgtcatgggcctcaaagacatcttgcaaccagaggaaggggagggctgggagagtgagcagaggatactgttatcgactggtgcataaggatttttgggataattcaatcccggaccacgtggtgccagagatgctccgatgtccactgggctctaccatactgaaagtcaagctgctagatatgggtgagccccgcgctctcctcgccacagctctgagccctccgggtctgtccgatattgaacgcacaattctgttgctgaaggaagtgggcgcgctggctgtgtctggtcagcgcgaggacgaaaatccgcacgacggggagctgacattcttgggtcgtgtgttggcccaattgcccgtgaatcagcagctggggaagctcatcgttcttggacacgtcttcggctgcctggatgagtgtctcattattgcagctgccctcagccttaagaatttctttgctatgcctttccggcaacacctggacggctaccgcaacaaagtgaacttctcaggttcatctaaatctgactgcatcgcccttgttgaggcgtttaagacatggaaggcttgtcgccagaccggtgaactccggtacccaaaggatgaattgaattggggacgactgaactatatccaaattaaacgcatccgagaagtggccgagttatacgaggagctcaagacccgtatttctcagttcaatatgcatgtggattcgcgccgaccggtgatggatcaggagtacatatataagcagaggttcatcttacaggtggtgttggcaggtgccttttacccgaattattttacctttgggcaaccggatgaggagatggcagtccgtgaactggcgggcaaggaccccaaaacaacagtggtacttaaacacatccccccctatggctttctgtactacaaacagttgcagtccctgtttaggcaatgcggtcaggtaaagtccattgtgttcgacggcgccaaggcgttcgttgagttctccaggaatccgacagaacgatttaagaccctacccgccgtgtacatggccatcaagatgtctcagttaaaggtttctttggagttgagtgtccacagcgccgaggagatcgaaggaaaagttcaggggatgaatgtgagtaaattgcggaacactagggtgaacgtggattttcagaagcagactgtcgaccctatgcaggtctcttttaacacttccgacaggtcccagaccgtgacggatctgctgttgactattgatgtcacagaagtcgtggaagtgggccatttctggggttaccgcatcgatgaaaacaacagcgagattcttaaaaagctgacagccgagatcaaccaactaacattagtacccctgcccacacatcctcatccagacttagtctgcctagctccattcgccgactttgacaagcagcgctacttccgcgcgcaagtgctgtacgtgtccggcaattctgccgaggtattctttgttgactatgggaataaatctcatgtggatttacacctcctgatggaaataccatgccagttcctggagctgccctttcaggcactggaatttaaaatttgcaaaatgcgacccagcgccaagtccttggtgtgtggaaaacactggagcgacggcgcctcacagtggttcgcttccctggtgtcaggctgtacactgcttgtcaaggtctttagtgtggtacacagcgtcctacatgtggatgtgtatcaatactccggtgtgcaggacgccatcaacattagagacgtgctaatccagcagggatatgccgaattaaccgaagagtcctacgaatctaaagttaacattctcagagctgctatcaacaaactcgtttgtgatggaccgaatggctgtaaatgtctgggacctgagagagtggcccagttacaggacatcgcccggcagaagctgttaggacttttctgtcaatcaaagcctagagaaaagatagtccctaaatggcatgagaagccctatgagtggaaccaggtagatccaaagctggttatggaacaggcagacagggagtcatcccgtggaaaaaacactttcctttaccagttgcataaactggtagtcctgggcacctag

SEQ ID NO: 14715 - DNA, 906 bp, synthetic construct
  source 1..906: mol_type = other DNA; note = Synthetic coding sequence
atgaccagacacggaaaaaattgtacagccggagcggtgtacacataccacgaaaaaaaaaaagacaccgctgccagtggctacggcacccaaaacatcagactctcacgggatgctgttaaagactttgattgctgctgcttaagcctccagccctgtcatgaccccgttgtgacccccgacgggtatctctatgagagagaagccatacttgagtatatcttgcatcagaagaaagagatcgcaagacagatgaaagcctatgagaaacagaggggcacccgtcgcgaggaacagaaggaactccagcgggctgcctctcaggaccacgttcggggtttcctggaaaaggaaagtgctatcgtttctcgccccctcaacccgttcacagctaaagccctttcaggaacttccccagatgacgtgcagcccgggccctccgtcggccctccttccaaagacaaggacaaagtgctgcccagcttctggattcctagtctgactcccgaggcaaaagcaacaaaactggaaaagccctccaggacagttacgtgccctatgtcggggaagccattgcgcatgagcgacctcacgcccgtgcactttacccctctggacagctctgtggacagagtcggtctgataacacgatcagaacggtatgtgtgtgcagtgacacgcgactctctgtccaacgcgacaccgtgcgccgttctgcgtcctagtggggcggtcgtgaccctcgagtgcgtggaaaaactgattaggaaggatatggtcgaccccgttactggcgacaagctgacggaccgcgacatcatcgttcttcagaggggtggaactggcttcgctggaagtggggtgaagctccaggccgagaaaagtaggccagtgatgcaggcctag

SEQ ID NO: 14716 - DNA, 1509 bp, synthetic construct
  source 1..1509: mol_type = other DNA; note = Synthetic coding sequence
atgcagtcatgtgaatcgtccggcgattccgctgacgatcccttatcacgcggattacggcggcgaggtcaaccaagagtagtcgttatcggcgctgggctagctggcttagcagctgccaaagcgctcctcgaacaaggctttacagacgtgaccgttctcgaggccagctctcacatcggaggcagagtgcaatcggtcaagctcggccacgcgaccttcgagctcggtgccacatggatccatgggagtcacggcaatcccatttatcacctggcggaggcaaatgggctgctggaggagactaccgatggcgagcgttccgtcggccgtataagcctctactctaaaaatggtgtggcctgttacttgactaaccatggccgtcggataccaaaagatgtggtggaggagttttctgatttgtataacgaggtatataacctgacacaggagttcttcaggcatgataagcccgtcaacgccgagtcacagaactctgttggcgtgtttacgcgagaagaggtgaggaatcgcataagaaatgaccccgatgatcctgaagccaccaagcgcctgaagctcgccatgattcagcagtacttgaaagtggagtcttgtgagtccagtagccactctatggacgaggtgtctctgtccgcttttggggaatggaccgaaatccctggtgctcatcacatcatccccagcggattcatgagggttgtggagcttctggccgaggggatacccgcacacgtgatacagctggggaaaccagtcagatgtatccactgggatcaggcatccgcccgccccagggggcccgagattgagcctaggggagtgttaaaaagacagtacacctccttcttccggccaggcttacctacggagaaggtcgccgcgattcatcgcttgggcattgggactaccgataagatcttcctggaattcgaggagccattctggggcccagaatgtaactcattgcaattcgtctgggaagatgaagctgaatcacacactctgacctacccaccagagctgtggtataggaaaatatgtggctttgatgtcctttatccccctgagcggtacggtcacgtcctgtccggttggatatgtggcgaggaggctctggtcatggaaaaatgtgacgatgaggctgttgcagaaatatgcacagagatgttgagacagttcaccggaaaccccaacatccctaaaccccggcgaattttgaggtcggcatggggctctaatccttacttccgtggaagctatagctacacccaggtgggaagcagtggtgctgatgtggagaagttagctaaacctctgccttatacagagagttcaaagactgcgcctatgcaggtactgtttagcggcgaagctactcacagaaaatactatagcacaacccatggagccctccttagcggtcagcgagaggccgccagactgatagaaatgtatcgtgacctcttccagcaaggaacgtag

SEQ ID NO: 14717 - DNA, 579 bp, synthetic construct
  source 1..579: mol_type = other DNA; note = Synthetic coding sequence
atggggactttcgatctttggactgattacctcggtctggcgcacttggtgagagctctcagtggcaaagaggggcccgagacgaggttgtctccacagccagagcctgagcccatgctggagcctgtgagcgccctcgagcctatgccggcgcctgagtcagtgcccgtgccaggacccaaagatcaaaagaggagcctggaatcaagtcccgctcctgagaggttgtgtagcttctgtaaacataacggagaatctagggccatatatcagagtcacgtcctgaaagacgaggcgggaagagtactctgccctatactcagagattacgtctgtcctcagtgtggggcgacgcgggaacgggcacacacgagaagattttgtcctttgacaggccaggggtacacttcagtgtactcccatactaccagaaatagcgcgggcaaaaaattagtacgacctgacaaggctaagacccaggacaccgggcaccgtcgcgggggcggcggcggggcaggcttccggggggcaggaaaaagcgaacctagtccaagctgcagcccctctatgtccacctag

SEQ ID NO: 14718 - DNA, 2568 bp, synthetic construct
  source 1..2568: mol_type = other DNA; note = Synthetic coding sequence
atggccgttgaagacagtaccttgcaggtagtcgtccgagtccggccacctacacctagggaactagatagtcagcggcggccagtggtccaggttgtggatgagcgagtgctggtgtttaatccagaagagccagacggaggtttcccgggactgaagtggggggggacccacgacggtcccaagaaaaagggaaaagaccttacattcgttttcgatcgagtcttcggagaagcagcaactcagcaggacgttttccagcatacgacacatagcgttctggactcctttctccaagggtataactgtagtgtcttcgcctatggagccaccggagcggggaaaacacataccatgcttgggagagagggggacccagggattatgtacctgactaccgttgagctctacaggcgcctggaagcccggcagcaggagaagcacttcgaggtgttaatctcataccaggaggtgtacaatgagcaaattcatgatctccttgagcccaagggacctctggctattagagaggatccagacaagggggtagtggtacaaggcctttcttttcaccaaccggctagcgccgagcagctgctagaaattctcacccgcggcaaccggaacaggactcagcatcctacagacgctaacgctacatctagcagaagccatgcaatcttccagatttttgtgaaacaacaagatcgagtgcctggcttgacccaggctgtccaagtggccaaaatgagcctcatagacttggccggctccgagcgcgccagttcgacccatgcaaaaggtgagcggctcagagagggcgctaacattaatcgaagcctactcgcgctgatcaatgttctgaacgcactcgctgacgctaaaggccgcaaaacccatgttccatatagggactccaaactgacccgcctgcttaaagattctctaggcggaaattgccggaccgtcatgatcgccgccattagcccctcctctcttacctacgaggacacatacaatacgctaaaatacgccgaccgcgccaaagagatcagactcagtttaaagagtaatgtcaccagcctggactgccacatttcccagtacgctacaatctgtcaacaactccaagctgaagtggccgcactgagaaagaagctgcaggtttatgaaggcggggggcagccacctcctcaagatcttcccggtagcccaaagtctggtccacctccagaacatctgcccagtagcccactacccccccaccccccaagccagccttgcacaccagagttaccagcaggaccacgagctttgcaagaagagtcactgggtatggaagctcaggtggagagagctatggagggtaattcgtccgaccaggagcagagccccgaagacgaggatgagggccccgctgaggaggtgcctacacagatgcccgagcagaacccaacccatgccctgcctgaatcacctaggctcactctccagccgaagcccgtagtggggcattttagtgctcgggaactggacggggacagaagtaagcagctggcgcttaaagtactttgtgttgcccaaagacagtacagccttctgcaggcagccaatctcctcacacccgacatgattactgagtttgaaactttgcagcaactggtgcaggaggaaaagatcgagccaggggccgaggcacttaggaccagtggtctggcgaggggggctcctctcgcacaggaactatgttcagaatccaagccccccggatatacagggccagtgacgcggaccatggctaggcgactctctgggcccctgcacacgctcggcattccacccggacccaactgtaccccagcacagggcagtcgctggcctatggagaagaagcgaaggagaccttctgcattagaggccgacagtcccatggcgccaaagcggggtacaaagcgtcagcgccagagctttctgccctgtctacgaaggggttccctgcccgatacgcagccctcccaggggccctcaacaccgaagggagagcgggccagcagcccctgccacagcccccgggtgtgccctgctactgtgatcaagagcagagtccctctgggcccgagcgccatgcaaaactgttctaccccattggctctccccactagagacctcaacgctacgttcgatttgtccgaggaacccccatccaagccgagcttccacgaatgtatcggctgggacaagattccccaggagctgtctcgcctggatcagccattcatccctagagctcccgttcctctgttcacgatgaagggccccaagccaacctcctctcttccaggtacatcagcatgcaaaaaaaaacgcgtcgcctcctcatccgtttcacacggcaggtcccggatcgccaggctgccgagcagcactttaaagagaccggctggcccgcttgtcctgcccgaattacccctaagccccctctgccccagcaaccgacggaatggcaaagatctgatccgcgtggggcgcgctctgagtgcaggaaatggagtaactaaggttagctag

SEQ ID NO: 14719 - DNA, 444 bp, synthetic construct
  source 1..444: mol_type = other DNA; note = Synthetic coding sequence
atgtggaaatttccaggggggctgagcgagcctgaagaagacattggcgataccgccgtccgagaggtgttcgaggaaaccgggatcaagtctgagtttcgcagtgtgctatcaattcgccagcagcataccaacccaggtgcatttggaaagtctgatatgtatatcatctgtcgactgaagccatattcgttcacaattaacttctgccaggaggagtgcttgcggtgtgaatggatggacctcaatgacttggccaaaacagaaaacacaacacctattacctccagagtagcgcgtctgctgctctacggttacagggaagggttcgataaaatcgatctgaccgtggaggagctccccgctgtgtatacggggcttttttataagctttaccataaggaattgcccgagaattacaaaacaatgaaaggcattgactag

SEQ ID NO: 14720 - DNA, 3327 bp, synthetic construct
  source 1..3327: mol_type = other DNA; note = Synthetic coding sequence
atggctcttagacccggagcagggtccggtggcggtggtgcagcaggtgcaggcgctgggagcgcagggggaggtggatttatgtttccggtcgcaggcggtattcgccctccccaagccgggctgatgcccatgcagcagcaaggtttcccaatggtgagcgtcatgcagcctaatatgcagggcataatggggatgaactactccagccagatgtcacagggaccaattgctatgcaagcaggaattcctatgggtcccatgccggccgccgggatgccctaccttggacaggcccctttcctgggaatgagaccacctggaccccaatacactccagatatgcagaagcagtttgccgaggagcagcagaaaaggtttgaacagcaacagaaattgctcgaagaggaacggaaacgacgccagtttgaggagcagaagcagaagctgcgcctgctaagcagcgtcaagcctaaaaccggagaaaagagcagggatgacgccctcgaggccatcaagggaaacctggacggattttcaagagacgcaaagatgcatcctaccccagctagccaccccaaaaaaccaggtgtcggtgttttcccatcacaagatccagctcagcccaggatgccgccttggatttacaacgaatcacttgtgccagacgcctataaaaaaatcctcgaaacaaccatgactccaaccgggattgataccgctaagctctaccctattctgatgtcgagtggtttacccagggagactttgggacagatatgggctctggcaaatagaactacccctggaaaactgaccaaggaggagctgtacacagttttagctatgatagctgtcacacaggtggttaagcccgaggaagacgatttccaagacttccaggacgcatccaaatcaggttccttggacgacagcttttcagatttccaggaattgccagcctcgagcaagacgagcaactcacagcacggcaattccgctccatcccttctaatgccactcccaggtacaaaagctctgcctagtatggataagtacgccgtgttcaaaggcattgccgcagacaagagcagcgagaataccgttccccctggagatccaggtgacaaatattcagcatttcgagaactcgaacagactgcagagaataagccactgggtgagagttttgcagagttcagaagcgcagggacagacgatggattcacagacttcaagacagccgactccgtttctcctttggagcctccaaccaaggacaaaactttccctccaagtttcccgtccggcaccatccaacagaaacagcagacacaggtcaagaacccgctcaacctggccgacttagatatgttcagctcggtcaactgttcaagtgagaagccgttatcattctcagccgttttctcaacaagtaaatcagtttcaacaccacagtcgacgggatccgccgctacgatgactgcattagctgccacaaagactagcagcctggccgacgacttcggcgagttttctctctttggagagtactccgggctggctcccgtgggcgagcaagacgacttcgcggactttatggccttctccaattcatcaatcagtagcgagcagaagcccgacgataaatacgatgccctcaaggaggaggccagtcctgtccctctgacatcgaacgttggaagcacagtcaaggggggtcagaattccacagcggcaagcactaagtacgacgtttttcgccaactaagcttggaagggtctgggctgggagtggaggatctgaaggataataccccatctggtaaaagcgatgacgactttgctgactttcacagcagcaaattttcctcaattaactccgataagtctttgggagagaaggcggtggccttccgtcacaccaaagaggactccgcttccgttaaaagtctcgatctccctagcattgggggaagctccgtcggtaaagaggatagcgaagacgcgctcagtgtgcagtttgatatgaagctggctgacgtcggcggcgacctcaagcatgttatgtcagacagtagtctcgacctcccaaccgtcagtgggcagcatccaccagcagctgccggctctggatctccctccgccacctcaattttacagaaaaaggagacatcctttgggtcaagtgagaatatcactatgacaagtctcagcaaagtcacgacattcgtatccgaggatgctttgcctgagacaacgtttcctgcactcgcgagcttcaaagatacaattccgcagacgtctgagcagaaggagtacgaaaacagggactataaggatttcaccaaacaagaccttccaacggccgagagatcccaagaggcaacgtgtccaagccctgccagttcaggggctagtcaggaaactcctaatgaatgctctgacgactttggcgaattccagtccgagaaaccaaaaatcagtaaattcgactttctggttgccactagccagagcaaaatgaagagtagcgaggagatgataaaaagcgagctggccactttcgaccttagtgtccagggcagccataaacgcagtttaagcctgggggacaaggagatttctaggtccagtccctctcctgctctcgagcagccctttcgggatcggtccaatacactcaacgaaaagcccgcattgccagtcatccgagataagtacaaagacctgaccggagaggtcgaggagaatgaacggtacgcttatgaatggcaacggtgcttagggagtgccctcaacgtcattaagaaagcaaatgatactttaaacggaatttcgtcctccagcgtatgtacggaagtcatccagagtgcccagggaatggagtacctgctgggagtcgtcgaagtttaccgcgtcacaaagagggtcgaacttgggattaaggccactgccgtttgctctgaaaagttgcagcagctgttgaaagatattgacaaggtgtggaataacttgatcgggtttatgagcctggccacgcttactcctgatgagaatagccttgatttttcttcttgtatgttgcgcccagggataaagaacgcccaggagcttgcttgcggcgtctgtctgttgaacgtcgactctcgcagccgcaaagaggagaagcccgccgaagagcatcccaagaaggcattcaattccgagacggattcatttaagctggcatatgggggtcaccagtatcatgctagttgtgccaatttttggatcaactgtgtggagcctaaacctccaggcctcgtgcttcccgatctactgtag

SEQ ID NO: 14721 - DNA, 1257 bp, synthetic construct
  source 1..1257: mol_type = other DNA; note = Synthetic coding sequence
atggaaactcacatcagttgcctattccctgaacttctcgccatgatcttcggctacttagacgtgcgtgataaagggcgcgccgcacaagtttgtaccgcttggcgggacgcagcttaccataagtccgtgtggcgcggcgttgaggcaaaactccatctgcgcagagccaatccaagcttatttccttctctgcaagcccgcggaattagacgtgttcagatcctgagcctccgcagatccctcagctatgtgattcagggaatggctaacatcgagtctttaaatctgagtggttgctataacctaacggataatggcctgggtcatgcatttgtgcaagagataggcagtctccgggcccttaacctgagtctgtgcaaacagattaccgatagttctctaggacgaatcgcgcagtatctcaaagggctcgaggtgcttgagctcggtggctgctccaacataacaaacaccgggctcctgctaatcgcttggggcctccagcggctcaaatccctcaaccttagatcttgtcgacacctatcggacgtggggatcggccatctggccggcatgacaaggtcagccgcagagggttgcctggggctagagcagctgactctccaagactgtcagaaactgactgatctttccctgaagcatatcagccgaggcctcactggtctgcggcttttgaacctgtctttttgtgggggaataagcgatgccgggctgctccacttgagccatatgggatctcttagatcactcaaccttcggagctgtgataacatctcagatacaggaataatgcacttagctatgggctcattgcgcttgtccggtctcgatgtttctttttgcgataaagttggcgatcagtcgttggcatatatagcccaagggctggatggcctcaaatcactatctctttgctcctgtcacatatcagacgatggaattaataggatggtacgtcagatgcatggtttgaggacgcttaatatcgggcaatgtgttagaataacagacaagggactggagcttatcgctgaacacctatcccaattgactggcatagatctctacggttgcacccgtatcaccaaacgcggcttggaacgaattactcaattaccttgcttgaaggtgctcaacctgggattgtggcagatgactgattctgagaaggaagctcgtggagatttcagtcctctttttaccgtgagaactagaggatctagccgcaggtag

SEQ ID NO: 14722 - DNA, 1371 bp, synthetic construct
  source 1..1371: mol_type = other DNA; note = Synthetic coding sequence
atggccgcagcccttaagtgtctgcttactctcgggcgctggtgtccagggctgggggttgccccccaagctagagctctggcggctctggtgccgggggtgacacaggtggacaacaaatctggattcctgcagaaacgacctcacagacagcaccccgggatcctcaaattgcctcacgtgcgtctgcctcaagcactggccaatggcgcccaactgttgctgcttggctccgccgggcctaccatggaaaaccaggtgcagacacttacttcatacttgtggtcacggcatctgccggtggagcccgaggaacttcagaggcgagcgcgtcatctcgaaaagaagtttctggaaaaccctgacctgagtcaaaccgaggagaagttacgtggtgcagtcctgcatgcgctcagaaagactacataccattggcaagagctttcctatacagagggcctgtccctcgtttatatggccgcacgcctcgatgggggatttgcagctgtaagtcgcgcgtttcacgaaatacgggcacggaatcctgccttccaaccgcaaactctcatggacttcggatctggcaccggctcagtcacctgggcagctcactccatttgggggcagtccctgagggaatacatgtgtgttgatagatccgccgctatgctcgtgctggccgagaaactacttaaaggtggcagcgaatccggggagccctatatacctggggtcttttttaggcagttcctcccggtaagcccaaaggttcagtttgatgtcgtggtgtcagcgttcagcctctccgaactgccctctaaggccgatcggactgaagtggttcagacactctggcggaaaacaggacatttcctggtgcttgtggagaacgggactaaagctggtcatagtctcctgatggacgcgagggacctcgttctgaaagggaaagaaaaatcgcctctcgacccaaggcctggcttcgtgtttgctccttgtcctcacgagctgccatgcccacagctgactaacttggcatgctctttcagccaggcttaccatcctatcccatttagctggaataaaaagccgaaggaagaaaagttttctatggtcattctggccagagggagcccagaggaagcacatcgatggcctcggattactcagccggtcctaaaaaggccccggcacgtgcattgtcacttgtgttgcccagatggtcatatgcagcatgctgttttaaccgccagaagacacggacgggacttgtacagatgcgctagggtgtcctcctggggcgacctgctgcctgtccttacacctagcgctttccctccatcaactgcacaagatcccagcgagagttag

SEQ ID NO: 14723 - DNA, 756 bp, synthetic construct
  source 1..756: mol_type = other DNA; note = Synthetic coding sequence
atggacatgaagcggcgtattcatcttgaactgcgtaaccggacgcccgctgctgtgcgcgagctagtgctcgacaattgtaaatctaacgacggaaagattgagggactcacagctgaatttgtcaatctcgaattcctttcactcattaatgtgggccttatttctgtgtctaatttacccaagctgcccaaattgaagaagctcgagctgtcagaaaaccgcatcttcggcgggctcgacatgctggcagaaaaattgcctaatttgactcatctcaacttgtccggcaacaagctcaaggacatctctacacttgaacccttgaagaagctggaatgcttgaaatccctggaccttttcaattgcgaagtgactaatctgaatgattaccgggaatccgtctttaaattactcccccagctcacctatttagatggttacgacagggaagaccaggaagcacccgatagtgacgcagaggttgacggtgtggatgaagaggaagaagatgaggaaggagaagatgaagaggacgaggacgatgaggatggcgaggaagaagaattcgatgaggaggatgatgaggacgaggacgtagaaggcgatgaggacgacgatgaggtgagtgaggaagaggaagagtttggtcttgatgaggaggacgaagatgaggatgaggatgaggaggaagaagaaggcggcaagggcgagaaacgcaaaagagaaacggacgacgaaggcgaggacgattag

SEQ ID NO: 14724 - DNA, 510 bp, synthetic construct
  source 1..510: mol_type = other DNA; note = Synthetic coding sequence
atgtctgcaccccctgcgctgcagattcgagaagctaacgcgcaccttgccgccgtgcacagacgagcggcagaattggaggccaggctggacgcggcagaaaggacagtgcatgcccaagccgaaaggctggctctacatgatcagcagctgcgcgccgctctggacgagcttggcagggccaaagacagagagattgccaccctacaggagcagttgatgacaagcgaggcaactgtgcactcactgcaggccaccgtgcaccagcgagatgaactcattcgccagttgcagccccgggctgaacttttgcaggacatctgtcggcgccgaccgccacttgccggtctactcgacgccctcgcagaggccgaacgcttgggaccgctcccagcatcagatccagggcaccctccacccggcggtccgggccccccgctcgacaactcaacaggggaggaggcagaccgtgaccacctccagccagccgtattcggcacgaccgtgtag

SEQ ID NO: 14725 - DNA, 2079 bp, synthetic construct
  source 1..2079: mol_type = other DNA; note = Synthetic coding sequence
atgaaaatcttctgctcacgcgccaatccaacaactggatccgtagaatggctggaggaggatgaacactacgattaccatcaagagatcgcccgtagctcctatgctgacatgttgcacgataaagacaggaacgtgaagtattatcagggtataagggctgcagtgtctagggtcaaggaccgcgggcagaaggccttggtgctcgacatcggcactggcactggcctgctgagtatgatggccgtaactgcaggcgccgacttctgttatgccattgaggttttcaaacctatggcagatgccgctgtcaaaatcgtcgaaaaaaatggattctcggataaaataaaggtgataaacaaacacagcaccgaggttactgtcggcccggagggtgacatgccctgccgcgctaatattttggtcaccgagttattcgacaccgagttgatcggcgaaggggctctgccgtcttacgaacacgcacacaggcatctcgtggaagaaaattgcgaggcagttcctcaccgggcgacagtatacgcccagctggtagaatctggtcgcatgtggtcttggaacaaactgtttcctatacatgtgcagacaagccttggagagcaggtcattgttcctcccgtagacgtcgaatcctgccctggcgctcccagtgtctgtgacattcagcttaatcaggtcagccccgctgacttcaccgtgctcagcgacgtgctcccaatgttttcaatcgattttagcaaacaggttagttcaagtgcagcatgtcattctaggagattcgaacccttaacaagcggacgcgcccaggtggtgctctcgtggtgggacatagagatggatcctgaaggaaaaatcaaatgtactatggcgcctttctgggcccattccgatcccgaagaaatgcagtggcgggaccactggatgcagtgtgtgtatttcctgccccaggaagagcctgtggtgcaaggctctgccctgtatttggtagctcaccacgacgattactgtgtgtggtatagcctgcagcgaacctcccccgagaagaatgagcgagtgaggcagatgcgccccgtgtgtgattgtcaggcacatctgctttggaaccgaccacggtttggcgagatcaatgaccaggatcgtactgatcgatacgttcaggcactgcgcacagtcttaaaacccgacagtgtgtgcctttgtgtaagtgacggctctttattatccgtcctagctcaccatctaggcgttgagcaggtattcactgttgagagctccgccgccagccataagctccttcgaaagattttcaaagccaatcacctggaggataagattaatataattgagaagcgcccagaattactcaccaacgaagacctccagggacgcaaagtcagcttactacttggggagccatttttcaccaccagcctccttccgtggcacaatctgtatttttggtacgtaaggacagcagttgaccagcaccttggtcccggcgccatggtgatgccccaggccgcttcattacacgctgtagttgttgagttccgcgatctgtggcgcattagatcaccttgcggcgattgcgaaggatttgatgttcacataatggacgacatgattaaaagagcgctagacttcagagaatcacgcgaagccgagcctcacccactttgggaatatccttgccgctctctgtccgagccatggcagattttgacatttgacttccagcagcctgtgccgttgcaaccactgtgtgcagaaggaacagtagagctaaggcgaccaggccagtctcacgccgccgttttatggatggaataccatctgactcctgaatgcaccctttcaactggattgttagaacctgcagatccggaggggggatgctgctggaatccacattgcaagcaggccgtttatttttttagccctgctcccgacccccgcgcactgctgggtggtcctagaaccgtgagctacgcagtggagttccacccagacactggcgatattatcatggagttccgacatgctgacacccccgactag

SEQ ID NO: 14726 - DNA, 468 bp, synthetic construct
  source 1..468: mol_type = other DNA; note = Synthetic coding sequence
atgaccgtcgaagggccgccccctaaagacacagggattgcccgcgtccctcttgctggagctgctggcggcccaggcattggcagggcagccggcaggggcattccagccggcgtgcccatgccacaagcccccgcaggactcgcaggacccgttcggggcgtggggggcccctcccaacaagtgatgacaccccagggtagaggcaccgttgcagctgcagcggccgcggccactgcatcaattgcaggcgctcccactcaatatccaccagggagagggggtcctccgccacctatgggccgcggagcacccccacctggcatgatggggcctcctcctggaatgaggcccccaatgggacccccgatgggtattccgccaggaagggggacccccatgggcatgccgccacccgggatgagaccaccaccgcccgggatgcgtggaaaatgcctgcaatggtag

SEQ ID NO: 14727 - DNA, 402 bp, synthetic construct
  source 1..402: mol_type = other DNA; note = Synthetic coding sequence
atgacaagaggaaatcagcgcgagctggccagacagaagaacatgaaaaaacagtcagatagtgtgaagggcaagcgtagagacgatggcctgtctgcagctgcccggaaacagtcagctccaagctcgcttccccctgggaccagacgcagctgttcaagaagcagaaagcgtcagactcgaaggcgccggaatccctcgagcttcgtggcaagctgcccgaccttgttaccatttgcttgtgtgccaggagcttcaccaacaacactcgctttcccacccgtagtcctgactgggccgagcactgatggtattccctttgccctttctctacagcgcgtgccattcgtcctaccatcacctcaggtggctagcctacctctgggacactcacgcgggtag

SEQ ID NO: 14728 - DNA, 1809 bp, synthetic construct
  source 1..1809: mol_type = other DNA; note = Synthetic coding sequence
atggccgagttccgtgtgagggtcagtacaggcgaggccttcggagctggtacctgggataaagtgtcagtgagcatcgtcggtactaggggagaaagcccgcctctcccgttagataatctggggaaggagtttactgcgggtgcggaagaagacttccaggtcaccctccctgaagacgtcgggagagtattgctgctgagggtgcacaaggcgcccccggtgctgcccctgcttggaccccttgctcctgatgcctggttctgcaggtggttccaactcaccccgccgagaggcggccatctgcttttcccctgttatcagtggctggaaggagccggtacactggtgttacaagagggcaccgctaaggtgtcctgggctgatcaccacccagtgctgcagcagcagaggcaggaagagttgcaggcccggcaagagatgtaccagtggaaagcctacaatcctggttggccacactgtctggacgagaagactgttgaggatcttgagctgaatatcaagtattcgacggctaagaacgcaaacttctatttgcaggccggcagcgccttcgctgaaatgaagatcaaggggctgctggatagaaagggactgtggcgatctcttaacgaaatgaaaaggatattcaactttcggcgtacccctgcggccgagcacgcgttcgaacattggcaggaggatgccttctttgccagccagttcctgaacgggctcaacccagttcttattaggcgttgtcactatctgccaaagaattttccggtaaccgacgccatggtggccagcgtgttgggtccaggtacctcgttgcaggcagaactggaaaaggggtctctcttcttagtcgaccatgggatcctaagcggtattcagaccaacgtgatcaatggaaaaccccagttctctgccgcccccatgacactgttgtaccagtccccgggatgcggacctctgctgcccctcgcaatccagctttcacagacgcccggccctaactcccctatcttccttccaaccgacgacaaatgggactggctactcgcaaagacctgggtgcgcaatgccgagttttcttttcacgaagcactgactcacctgttgcatagccacctgctccccgaagtcttcactttggctactcttcgccagctgcctcactgccaccctctgtttaagtctactggcatcggaatcgaaggattctctgaacttatccagcggaatatgaaacagcttaattacagtctgctgtgtctaccggaagacattcgcacgcggggcgtggaggatatacccggctactactatcgagacgatggaatgcaaatctggggtatcccctccagtctagagacccgcgaggctctcgtgcagtacgtgacaatggtgattttcacatgttccgcgaagcatgctgctgtgtctgcaggccaattcgactcctgtgcgtggatgcctaacctgccgccgtctatgcaattaccaccccccaccagtaaaggcctcgccacatgcgaggggttcattgccactctcccgcccgtgaacgctacatgcgacgtcatccttgctctgtggctgctgtcaaaggaaccgggggaccagcggcccctgggtacttacccagatgagcacttcactgaagaagcccctcgcagaagcattgcgactttccaatccagacttgcccagatatcacggggaatccaggagcgcaaccaaggtctcgtgctcccatacacatacctggacccccctctgatcgagaattcagtgtctatatag

SEQ ID NO: 14729 - DNA, 3123 bp, synthetic construct
  source 1..3123: mol_type = other DNA; note = Synthetic coding sequence
atggtctctagcgcgcaaatgggattcaacctccaggctctgctcgagcagctgagccaagatgaactgtccaagttcaaatatctcatcacgacattttctttggctcatgaactgcaaaaaattccccataaggaagtggacaaggcagatggtaagcaacttgtagaaattttaaccacccactgcgacagttactgggtagaaatggcctccctgcaggttttcgaaaaaatgcaccgcatggatctgtctgagagggcaaaggatgaggtgcgagaagctgctttaaaatctttcaacaagcgaaaaccactaagcctcggaatcacccgcaaagaaagaccgcccttagatgtagatgaaatgctggaacgttttaaaaccgaggctcaggacaaagacaataggtgcagatacatcctcaaaacgaaatttcgtgaaatgtggaaatcgtggcctggagattcgaaagaggtccaggtgatggccgagagatacaagatgctgatacctttctccaacccgagggtgctgcccggtcctttcagctataccgttgtgttgtacggacccgctggcctggggaaaactaccctggcccagaagttgatgcttgactgggctgaagataacctgattcataagttcaagtatgccttctatttgtcctgtagagaactgtcccgtctcgggccctgcagtttcgccgaattagtcttcagagattggccagaactgcaggacgatattccacacattctcgctcaggcccgtaagattttattcgtaattgacgggttcgacgagctcggtgctgcccctggagccctcatcgaggacatctgcggcgactgggagaagaagaaaccagttcctgtactgctgggctccctgctgaaccgggtgatgctccctaaggcagctctgctagttaccacccggccaagggctttgcgcgacctgcggatccttgccgaagaacctatttacatccgggtcgagggttttttagaggaggacagaagggcctactttctccggcacttcggcgacgaagatcaagctatgcgagctttcgagctgatgaggtcaaatgctgcacttttccagctgggctcagcccccgctgtgtgttggatcgtatgcacaaccctgaaactccaaatggagaaaggcgaggaccccgtacctacatgtctaactaggaccggattgttcctgcgatttctatgttccagattcccacagggcgcccaattgcgaggcgccctgcgtacactgtcgctgttagcggcccaaggactttgggcccagaccagcgtgctgcatagggaagatctcgaaagactgggagtgcaggaatctgacttgaggctgttcttggatggagatattctaagacaggatcgtgtctcgaagggctgctatagtttcatccatctgtcttttcagcagtttttgacagcactcttctacacccttgagaaagaggaggaggaagatcgcgacgggcacacttgggatatcggggatgtgcagaagctactcagtggcgttgagcgccttcggaaccctgatttgatccaggcaggatattatagcttcggtctggccaacgaaaagagggctaaggagctggaagccacatttggatgtaggatgagtcctgatatcaaacaggaactgctgaggtgtgacatatcctgtaagggcggccactcaacggtcaccgacttacaagagctgttggggtgtctatatgagagccaggaggaggagctagtaaaggaagtgatggcccaatttaaagaaatctcactccacttgaatgcagtagatgtggtgccaagttccttctgcgtgaagcactgcagaaaccttcagaagatgagccttcaggttatcaaagagaacctgcctgagaacgttaccgccagtgagagcgatgctgaagtagagcgcagccaggacgatcagcatatgctgcccttttggaccgatctgtgctcaatctttggatctaataaggacctgatgggactcgccatcaatgatagcttcctttcagcaagtctggtgcgcatactctgcgaacaaatagccagcgacacttgtcacctccagcgtgttgtgttcaagaatatttccccagctgacgcccaccgaaatctgtgtttagctctgcggggccacaaaactgtgacctatctgactctgcaaggaaatgatcaagacgacatgtttccagctctgtgtgaggtcttgagacatcccgaatgtaacctgcggtacttgggtctcgttagctgttcagccacaacacagcagtgggcggatctctccctcgccttggaggtcaatcagtcactgacttgcgtcaatctgtcagataacgaactgcttgatgaaggggccaaactgctttacaccaccctgcgacacccaaagtgttttctgcaacggctttcattagagaactgtcatttgaccgaggccaactgtaaagatcttgcagccgttctcgtggttagccgggaactgacccatctgtgtctagcaaaaaaccccatcgggaatactggggtcaaattcctgtgcgaaggcttaaggtaccctgagtgcaagctgcagaccttggtgctttggaattgcgacatcacgagtgatggctgttgcgacctcaccaagcttcttcaggaaaagtcttctctgttatgcctggatctcggcctaaaccatataggcgtgaagggcatgaaatttttgtgcgaggcactgcggaagccactctgcaacctgaggtgcctgtggttatggggctgctccattccccctttctcttgcgaagacctgtgttctgcgttgagttgcaaccagtcactggtgactctcgacctaggccagaatcccctggggtctagcggtgtgaagatgctctttgagacactgacttgctctagtggtaccctgcgtactttgaggctgaagatcgacgacttcaacgacgaactgaacaaactattagaagaaattgaggaaaagaacccccagctgattattgataccgaaaagcaccacccctgggctgaacgtccatcctctcacgacttcatgatctag

SEQ ID NO: 14730 - DNA, 3864 bp, synthetic construct
  source 1..3864: mol_type = other DNA; note = Synthetic coding sequence
atggttcccggcgaggaaaaccagctggttccaaaggaagcacctttagaccatacaagcgataagtctcttctggatgccaacttcgagcccgggaaaaaaaattttctgcacctcacagataaagacggagagcagccgcagatcctcttagaagattcatctgcaggagaggactccgtgcacgaccgcttcattggccccttacctagagagggcagcgggggatcgacatccgactatgtctcccaatcttatagctattccagcattcttaacaaaagtgagacggggtacgtggggctggtgaaccaggccatgacttgctatctaaactctctgctgcagactcttttcatgactcccgagttcaggaatgctttatacaaatgggaattcgaggaatccgaagaagatcctgtcacttctatcccctatcaactccagcggctcttcgtgcttctgcagacctcgaagaaaagggccatcgagacaactgacgtgactagaagcttcggatgggattcaagcgaagcctggcagcagcacgacgtccaagagctgtgcagggtgatgttcgatgctcttgaacagaaatggaagcagaccgaacaagcagatcttattaacgagctgtaccagggcaaactcaaagactatgtgaggtgcctcgaatgcggctacgaaggatggcggatcgacacttatcttgatattccactggtaatccgaccctacgggtcttcccaggcttttgcaagtgtggaggaggccctgcatgcttttatccagcccgagatcttggacgggccaaatcaatacttctgtgaacggtgtaagaaaaagtgcgacgcgcggaaaggactgcgttttcttcatttcccttatctattaactttacagctcaaacggttcgactttgattacacgacaatgcacagaatcaaactgaacgaccgcatgactttccccgaggagctcgacatgagcacatttatagatgtagaagacgaaaagagccctcagaccgagagctgtacagacagcggagctgaaaacgagggatcatgccattcggaccagatgtcaaacgactttagcaatgacgatggggtcgatgaaggaatctgtctcgaaacaaattctggcactgaaaaaatatctaagagtggactcgaaaagaactcacttatttacgaattatttagcgtgatggtacattctggatcagcagccggaggacactactacgcctgcattaagagtttctccgacgaacagtggtactcattcaatgaccagcacgtgtcccggattactcaggaggacattaaaaagacacacggtggctcaagtggctcccggggatactattcctctgctttcgcctcttccacgaatgcctatatgctaatttaccgacttaaggaccccgccagaaacgcaaaattcctcgaagttgatgagtaccccgagcatatcaaaaacctggttcagaaggagagggagttagaggagcaggaaaagagacagcgcgagatcgagcgcaatacctgcaaaatcaagctattctgcctccaccctaccaagcaagtcatgatggagaataagcttgaggtgcacaaagacaagacccttaaagaggcagtggagatggcgtataaaatgatggacctagaggaagtcattcctctcgactgctgtaggcttgttaaatatgatgagttccatgattaccttgagaggtcttatgagggggaagaggatacaccaatggggctgctgcttggaggtgttaaaagcacgtatatgttcgacctgttattagagacaagaaagccagaccaggtgtttcagtcatacaaacctggggaggtaatggtgaaagtgcatgtggttgaccttaaagcagagtctgttgctgctccaatcaccgtgagagcttacctcaatcagactgtaaccgagttcaaacagctaattagtaaggctatacacttgcctgctgagacgatgaggattgttctcgaacgctgctacaacgacctgcggcttctgtctgtgtcctcaaagacactcaaagcagagggtttctttaggtcgaacaaggtgtttgtcgaatccagcgaaacacttgactatcaaatggcctttgccgactcccacctgtggaagctgctggacaggcacgccaacaccataagactgtttgtgctgttgcctgaacagtcccccgtcagctatagcaaacgcactgcttaccaaaaagccgggggtgactcgggaaacgttgacgacgattgcgagcgagtgaagggccctgtcggctcgctcaagagcgtcgaggctattctcgaagaatctacggagaagctgaaatcgttaagcctgcagcagcagcaggatggagacaatggcgattctagtaaatccactgaaacatcagattttgagaatatcgaatcacctctgaatgagagagattcatccgctagtgtggataatcgcgagttggaacaacacattcagacatcagatccggagaatttccagtctgaagagagatcggactctgacgtgaataacgacagaagtactagctcagtagatagcgatattcttagcagttctcacagcagtgacaccctgtgcaacgcagacaacgcccagatcccccttgccaatggtttagactcacactctatcacctccagtagaagaactaaggccaatgagggaaaaaaggaaacctgggacactgccgaggaagacagtggcacggattcagagtacgacgaaagcgggaagtctcgcggcgaaatgcagtacatgtatttcaaagccgagccatacgccgccgacgaagggagcggagagggacataagtggctgatggttcacgtggacaagcggattacgcttgctgcatttaagcaacacctggagcccttcgttggggtgctgagctcacacttcaaggtcttccgggtttacgctagtaatcaggaatttgagagtgtccgtctaaacgagaccctgagttcattctccgacgataataagattactatccgcctaggccgcgcgctcaagaaaggtgaataccgcgtaaaagtgtaccagctgctggttaacgaacaggaaccttgtaaattcttattggatgccgtttttgcaaaggggatgaccgtacgtcagtctaaggaagaactcattccacagctacgagagcagtgtggtctcgaactgtctattgaccgattccgactgcgtaagaaaacttggaaaaacccaggaacagtgtttctcgactaccacatctacgaggaggatatcaacattagtagcaactgggaagtcttcctagaggttctcgatggtgtcgagaaaatgaagagtatgagccagctcgctgtgctatcgcgacggtggaagccatctgaaatgaagcttgatccttttcaggaggtggtgctggaatcatccagcgtggatgagttaagggagaagctcagtgagatctctggaatccctctggacgacatcgagttcgcaaaggggcgtgggacattcccttgtgacatcagtgttctggacatacaccaggaccttgattggaatcccaaagtgtcgaccttgaacgtctggccactgtacatttgcgacgatggggcagtcatcttttatcgcgacaaaaccgaggagctgatggaactgaccgatgaacaacgcaatgagctgatgaaaaaggagtctagccggctgcagaagactgggcaccgagtaacatatagccctaggaaggaaaaggcactcaagatttacctggacggcgcacccaataaggatctcacacaggattag

SEQ ID NO: 14731 - DNA, 420 bp, synthetic construct
  source 1..420: mol_type = other DNA; note = Synthetic coding sequence
atgccctggagagcagggaacggagtgggattggaggcgcaggccggcactcaagaggccggcccagaagaatactgccaagaggaacttggcgccgaagaggaaatggcagctcgggccgcatggcccgtgctccgatctgtcaacagccgcgaactgtcccgaattataatatgcaaccactccccccgcatcgtcctgcctgtctggttgaactattatggcaagctacttccataccttacattacttcctggacgagactttaggatccataactttcgctctcacccctggctgttcagagacgcgaggacccatgataagctgctagtgaaccagaccgagctgttcgttccgtccagcaacgtcaacggtcaaccagtgttcgccaacattacactgcagtgtatcccctag

SEQ ID NO: 14732 - DNA, 582 bp, synthetic construct
  source 1..582: mol_type = other DNA; note = Synthetic coding sequence
atggaaggctgtgtttctaatttaatggtgtgtaatctcgcttactcaggcaagctcgaggagttaaaggagtccatactggcagacaaaagccttgctaccaggaccgaccaagctggctggagcccactgcacattgccgctagtgccggccgcgatgagattgtcaaggctctgctgggaaagggggcccaggttaacgcggtgaatcagaacggatgcacccctcttcattacgctgcatctaaaaaccggcacgaaattgccgtgatgctgcttgaaggaggagctaatccagatgctaaagaccactacgaagcgacagcgatgcaccgggccgccgcgaaaggtaatctcaagatgattcatattctactctattataaagccagcaccaatatccaggacacagaggggaacacgcctttacatcttgcctgtgatgaagagagggtcgaggaagcgaagttgctcgttagccagggtgctagtatatatatcgaaaataaggaggaaaagacccccttgcaggtcgctaaaggtggtttaggactgattcttaagcgaatggtggaaggttag

SEQ ID NO: 14733 - DNA, 612 bp, synthetic construct
  source 1..612: mol_type = other DNA; note = Synthetic coding sequence
atgagcgaaaatgctgctcccggactgatcagcgaactgaagctggccgttccctggggccatatagcggccaaggcttggggatcactgcaggggcctcctgtgctttgtctacacggatggttggacaatgccagttctttcgatcgcttgatccccttattgccccaagatttttattacgtggcgatggacttcggcggtcatggtctgagtagccactattctcccggggtcccctactacttgcagacgtttgtgtctgaaatccgccgagtggtcgcggccctgaaatggaaccgatttagcattctcgggcactccttcggaggagtggtgggagggatgtttttctgcacttttcccgagatggtggataagctgatattactggatactcccctcttcctcctcgaatctgatgagatggagaacctcctcacctacaagcgcagagcaattgaacacgtcctccaagtcgaagccagccaggagccttctcatgtgttcagcttaaagcagctgctgcagaggcagcgcacggctcttacctcatccgctggttcatgcgtccggattccatccggctcttgtcggccgatgtcgtgttag

SEQ ID NO: 14734 - DNA, 765 bp, synthetic construct
  source 1..765: mol_type = other DNA; note = Synthetic coding sequence
atgccggcgggatcaatgagcaccacagggtaccctggagtgtgttcgactacttcctataggactcattgctacatccccgtgacctctagcgtgaccctttcgtctagcgacttgagccccacttttggccactgtctgccttcctcttatcagggaaacctgtggctgcttgattactgccaggagagctatggggaagccccgacatgtaagtcaccaagctgtgagccaaagacttgttccaccaccggatgcgacccatcaaattcctctgttccttgtaattcaccaagcgccggccaggtgttctcggtgtgtgaaactaccaatgtctcgccatcccccagttgctccccatccacccagaccaacggatacgtctgcaattgtcatattccgaccaggaacgcatccaaagcttgccagaccctccgcaatggctccaattgtttcggccagcttaattgtctatccaaatcatttcagaccctgaatcactgtagactcagcactttgggctacaagtcctaccagaatccatgtttcataccctcctacgtgtcccccttatgttatatttccaactcttgccagccacaatcttacctggtccgcaattatcattactcctcgtatcggcctacgtcttgcagacccctgtcttatctgagccgcagcttccggagcctaagctacatcccatctaccttccctcctctcaggtatttgtgctccggctccaggcctctgaaatgttactag

SEQ ID NO: 14735 - DNA, 1338 bp, synthetic construct
  source 1..1338: mol_type = other DNA; note = Synthetic coding sequence
atgcgcgagattgtgcaccttcaagcaggacaatgcggtaatcaaatcggagctaaattctgggaggtcatctccgacgagcatgggatcgaccccacaggcacatatcatggagacagcgatcttcagttggaacgaattaacgtgtactacaacgaagctaccgggggaaagtatgtgccaagggctgtcttagtggatctagaaccgggcaccatggactccgtgcgaagcgggccttttgggcaaatttttcggcccgataatttcgtattcggccagtccggggcagggaataactgggctaagggtcattacacagagggcgccgaactcgtcgactccgtgctggacgtggtgcgtaaagaagccgaatcttgtgattgcctacaggggttccagcttacacattccctggggggtggaaccggttccggcatgggtacactgcttatctccaaaatcagggaggagtaccccgataggatcatgaacacctttagcgttgtcccttctccaaaggtctccgacaccgtcgtggagccctacaacgccacactcagtgtccaccaattagtggaaaacaccgacgagacgtattgtatcgacaacgaggcgttgtatgatatctgctttcgcaccctgaagctaactacccctacctacggggacttgaatcacctggtcagcgctacaatgagcggcgtgaccacttgtctcaggtttcctggtcaactgaatgccgacctgcgcaagttggcggttaacatggtgccatttccgcggctgcatttttttatgcctggcttcgctccgttgacgtcacgcggctctcaacagtatcgtgctctaacggtgccagaactgacacagcagatgttcgatgcaaaaaacatgatggctgcttgcgatccaagacatgggcggtacctgaccgtggccgctgtattcagagggcgtatgagcatgaaagaggtcgatgagcagatgctaaatgtgcagaacaaaaacagttcatacttcgtggagtggatcccaaacaacgtgaaaaccgccgtgtgcgacatcccccctcgaggactaaagatgtccgcaacattcatcgggaattctacagcgattcaggagttattcaagaggatttccgaacagtttaccgccatgttccgtagaaaggcattcctccattggtatactggggaaggaatggatgagatggagtttaccgaagctgaaagcaatatgaacgatctcgtgtctgagtatcagcagtatcaggatgccacagccgaagaggaaggggagtttgaggaagaagctgaggaggaggtggcttag

SEQ ID NO: 14736 - DNA, 750 bp, synthetic construct
  source 1..750: mol_type = other DNA; note = Synthetic coding sequence
atggccgagaggggtgagctcgatctcacgggcgctaagcagaatacaggggtttggctggttaaggtcccaaagtatttgagccagcagtgggctaaagcttccggccggggtgaagtagggaagctaagaatcgccaaaacccagggcaggacggaagtctccttcactcttaacgaagatctggctaacatccacgatatcggaggcaaaccagcctcagtgtccgccccccgcgagcaccctttcgtcctccagagtgtcggcggacaaactctgacagtctttacagaatcctcatcagataaattgtccctggaaggcatagtggtccagagagctgaatgtcgtcccgctgcttccgaaaactacatgaggctgaagaggctacagatagaagaaagcagcaaacctgtacgcctttctcaacagctcgataaggtggtaacaacaaactacaaaccggtggcaaaccaccagtacaatattgagtatgagcgtaaaaaaaaggaggatgggaaacgcgcaagagccgacaaacagcacgtgctggatatgctcttttctgcgtttgagaagcatcaatattacaatctcaaggacctagtcgatatcactaaacagcctgtggtgtacctaaaagagatcctcaaggaaattggggtgcaaaacgttaaagggatacacaagaatacttgggagctcaagccagaatatcggcattatcagggtgaggagaaaagtgattag

SEQ ID NO: 14737 - DNA, 2511 bp, synthetic construct
  source 1..2511: mol_type = other DNA; note = Synthetic coding sequence
atgtggtccctgggttgtgtgatagctgagctttttctggggtggcctctgtaccctggcgcatcagagtatgatcagataagatacatctctcagactcagggactccccgccgaatacttgctctcggcaggtacaaagacgaccagatttttcaatcgcgaccccaacctaggctaccctctctggcgactgaaaacccctgaagagcacgagcttgagactgggattaagtctaaggaggcgagaaagtatatatttaattgtctggacgatatggcccaggtgaacatgtcgaccgatttagaggggactgacatgctcgccgagaaagcagacagacgggaatacattgatctcctgaagaagatgctgacgatagacgcagataagagaattacaccgctcaagacacttaaccaccagttcgtcactatgacgcaccttctcgatttcccacactcaaatcacgtcaagtcttgttttcagaatatggaaatctgtaagcgcagggtccacatgtacgacactgtgtcccagatcaaatctccatttacaactcatgttgcccccaacacctcaaccaacctaactatgtcatttagcaatcagcttaacacagtgcacaatcaggcttctgtgctggcgagttcttcaaccgctgcagccgccacgctcagtctggctaacagcgatgtgtccctgctcaattatcagtcagccctgtacccttccagtgctgcccctgtgccaggcgtcgcacagcagggggtatccttgcagcccggcaccacccagatttgtactcagactgacccattccagcagacgttcatagtgtgcccaccagcctttcagacaggtctccaggcgacaactaagcatagcggatttccggttcggatggataatgcggtgcccatcgtgccacaggcccctgctgcacagcctctgcagattcaatctggggtccttacgcagggatcatgtaccccgctgatggtggccacattgcacccccaggtagccaccataactccacagtatgcagtgccattcacactgtcatgtgctgccgggaggcctgctcttgtcgagcagaccgccgctgtacttcaggcatggccaggtggtacacagcaaatactattgccctctacctggcaacagctgccaggggtcgcgctacacaacagcgttcagcccactgcaatgatcccagaagcaatgggctcaggtcagcagctggctgattggagaaatgcacattctcatgggaaccagtactccacgataatgcagcaaccgagcctgctgacgaatcacgttactctcgctacagcccagcccttgaatgtgggcgtcgctcatgttgtgcggcagcagcagtctagcagcttaccgagtaaaaaaaataagcaatctgctccggtcagctcaaaatcttcactggatgtgttacccagtcaggtctactccctggtcggctcttccccattgcggaccactagctcctacaatagtctggtgccagttcaggatcagcatcagcccattatcatccccgatacaccatcgccacctgtgagcgtcatcactattaggtcggataccgacgaggaagaggataataagtataaacctagcagctccggacttaagccgaggagcaatgtcatttcgtatgtgaccgtcaacgattctcccgacagcgactcgtccctgtctagcccatacagtaccgataccctatccgccctgcgtgggaactccgggtcggtcttggaggggccaggtagagtggtggccgacgggacaggcaccaggacgatcatcgtcccacccctgaagacacagcttggcgattgcacagtcgccactcaagctagcggcctgcttagcaataaaactaagccagtcgcatccgtttctggccagtctagtgggtgctgcatcaccccaactgggtacagagcccagaggggaggtaccagtgcagctcagcctctcaacctctctcagaaccaacagagcagtgctgcgcctactagccaggagaggagttctaaccctgcgccgcgccgccaacaagctttcgtggctcccctctcccaagccccttacacgttccagcacggaagccctctgcatagcactggacacccccacttggcaccggctccggcacacctgcctagccaggcacacctgtacacatatgcagctcctacctccgcagctgccctcggatcaacatcctccattgcccacctgttcagcccacagggctccagcagacacgccgccgcgtatacgactcaccctagcactctggttcatcaggtgccagttagcgtgggaccttccctgctgactagtgccagcgttgctcccgctcagtatcagcaccagttcgctacgcagagttatattggatcaagcagagggagcacgatctacacagggtatccactgtctccaacaaagataagccagtacagttacttatag

SEQ ID NO: 14738 - DNA, 2352 bp, synthetic construct
  source 1..2352: mol_type = other DNA; note = Synthetic coding sequence
atgtcccaggtgaaaagcagctactcatacgatgcaccctccgattttatcaacttttcatctcttgacgacgaaggcgacactcagaacatagatagctggtttgaagaaaaggccaacctcgaaaataagctcctgggcaagaatggaaccggaggattatttcaaggcaaaacccctctcaggaaggccaatttacagcaggccatcgtgacccccctgaagcctgtggacaacacctactacaaagaggccgagaaagaaaatctggtggagcaaagcattccttcaaacgcatgttcaagccttgaggtggaagcagcgatctcacggaagaccccagcccagccacagcgccgctcacttcgacttagtgcccaaaaagatctggagcagaaagaaaagcatcacgtgaaaatgaaggctaagcgctgcgccacaccagtgatcatagacgagatccttccatctaagaaaatgaaggtgagcaataacaaaaagaagcctgaagaagaaggatcagcccaccaggacactgcagagaaaaatgcatcctctccagagaaggctaagggccgccacactgtcccgtgcatgccaccagctaagcaaaaattcctgaagtcaaccgaggaacaggaactggaaaaaagcatgaagatgcagcaggaagtggtggagatgcggaaaaaaaacgaggaattcaaaaagctcgccttggccggtattggccagcctgtgaaaaaaagcgtatcccaggtcactaaatccgttgacttccatttccgaaccgatgagagaatcaaacagcacccaaagaatcaggaagagtataaggaagtgaactttacctctgagctgaggaaacatccatcttctcccgccagggttacaaaaggatgtactatcgtgaaacccttcaacttgtcacaggggaagaagaggacattcgacgagacagtgtctacttatgtacctctagcccagcaggtcgaagatttccacaagcggacccccaataggtatcatctgaggtccaagaaggacgatatcaaaacagggtcttgctctgtgactcaggcaggcgtgcaatggagggatcatgggagcctacagtgcccgacccctggactgaaacagtccagttgtctatcactgccaaatcttctgccctccaagtcttccgtgactaaaatctgccgagacccgcagacacccgtactgcagacaaaacatcgggcacgggccgttacttgtaaatctacagcagagctggaagcggaggaactggagaagctacagcagtacaaatttaaagctcgggaactggaccctaggattcttgagggaggaccaatactgcccaaaaagccgccggttaagcctccgacggagccaatcggtttcgatctcgagatcgaaaaacgtattcaggaacgcgaatccaaaaaaaaaacagaggacgaacacttcgaatttcattctaggccctgcccaacaaaaattctggaggatgtggtgggggtgccagagaaaaaagttctaccgattacagtgcccaaatcccctgcttttgccttgaagaacagaattcgcatgcctactaaggaagacgaggaggaagatgaacccgttgtgattaaggcacagccagtgccacactatggggttcccttcaaacctcaaattcccgaagcgcgcactgtggaaatctgtcccttttcttttgacagtagagacaaagagagacaactgcagaaggaaaagaagatcaaggaattgcaaaaaggcgaggtgcccaagttcaaggctctgccactaccccactttgatactattaaccttcccgaaaagaaggtgaagaatgtgacccagatagagcctttctgcttagaaaccgacagaagaggagcgttaaaagcccaaacctggaagcatcagctggaggaggagctacggcagcagaaagaggctgcctgcttcaaggctcggcccaataccgttattagtcaggagccttttgtgcctaagaaggaaaagaagagcgtcgcagaaggcctttcagggtccctggtgcaagagcctttccagctggcgaccgagaagcgcgcaaaggagcgccaggaactagaaaagaggatggcagaggtcgaggcccaaaaggcccaacagttggaggaggcacggctccaggaggaagaacagaagaaggaagaactggctaggctgcggcgtgagctggtacacaaagctaatcctattaggaagtaccagggcctagagatcaagagctccgatcagcctctgaccgttccagtctcaccaaagttttctaccagattccactgttag

SEQ ID NO: 14739 - DNA, 2061 bp, synthetic construct
  source 1..2061: mol_type = other DNA; note = Synthetic coding sequence
atgggcagttaccttagcgtgccagcctacttcactagtagggacctgttccggtgctctgaatgccaggactctttgaccaactggtactatgagaaagatggaaaactctattgtccaaaggattattgggggaaattcggggagttctgtcatggctgcagcctcctcatgacaggacctttcatggttgcaggcgagttcaagtatcatccagaatgctttgcctgcatgagctgtaaggtgattattgaagatggcgatgcatatgctctggtgcaacacgctacgctgtattgtggtaagtgtcacaatgaagtggtgctagcacctatgtttgaaaggctgtccacggagtcagtgcaggaacaactgccgtattctgtgaccctaattagcatgccggctaccaccgagggtcgtagggggttctcggtgtcagtggagtcagcatgttctaactatgccaccactgttcaagtgaaggaggtgaacagaatgcatatcagtccaaacaaccgcaatgcgatacaccctggagataggattttggagatcaatggcactccggttagaaccctgagggtggaggaggtggaggacgcaatctctcaaacctcgcaaacgctgcaactgctgatcgaacacgaccccgtttctcaaaggctcgatcaactgagacttgaggcccgtcttgcaccgcacatgcaaaatgcagggcacccccacgccctctctactctggacacaaaggagaatctggagggcaccctgcggcgtcgcagcctgcgccggtccaacagtatctccaagtctcctgggcccagctctcccaaggagcccttgctgttttctagagatatttcgcgatccgaatcactacgctgctccagttcatactcacagcagatatttaggccttgtgatctcatacacggggaggtacttgggaaaggcttctttggtcaggccatcaaggttacacataaggctaccggtaaggttatggtgatgaaagagctaataagatgcgatgaagagacccagaagacatttctcaccgaggtgaaggtgatgaggagtctcgaccatccgaatgtgttaaagtttataggggttctctacaaggataagaagctgaatctcctcaccgaatatattgagggtggtacattgaaagacttcctcaggagcatggatcccttcccttggcagcaaaaagttcgctttgccaagggaatcgcctctggaatggcctatctgcacagcatgtgtatcatacaccgtgatttgaacagtcacaactgcctgattaaattggacaagacagtggtcgtggcagacttcggcctgagtcgactgatcgtggaggagagaaagcgcgcccccatggagaaggcaacgacaaagaaacgcaccctccgtaaaaatgatagaaaaaagagatatacagtcgttgggaacccctattggatggctcccgagatgttaaacgggaaatcttatgatgaaaccgttgatatctttagcttcggaattgtgctctgcgagattatcggtcaggtgtatgccgacccagactgtctgccacgaacacttgattttggcctgaatgtgaaactcttttgggaaaagtttgtgcctacggattgcccccccgccttcttcccgctagccgccatctgctgtaggctggaacctgagagtcgggcccccccaggagccgcaggggaagggcccggatgcgcggatgacgagggtcccgtccgccggcagggcaaagtgactataaagtacgaccctaaggaacttaggaaacacctgaacctcgaggaatggatactggagcagcttacccgactgtacgactgccaggaagaggaaatcagcgaactggaaattgacgtcgatgagctcctggatatggaatccgacgacgcttgggcatcaagggtcaaagaattgctggtggactgttacaaacctacggaggccttcatttccggcctgctagacaaaatacgggccatgcagaagcttagcaccccacaaaaaaaatag

SEQ ID NO: 14740 - DNA, 840 bp, synthetic construct
  source 1..840: mol_type = other DNA; note = Synthetic coding sequence
atgagagctctcacagttcagcgagtcaagtttgccatggatcttcccctcctgaaaagggctgggcaggacctggccgagaagactaagaactttgtaagtcgatctctggtcataggcgaggttctatccatggccgatatggccactggagtgaaatgcgggataatttactggctctttggaggggctatacgcaacctcggctctcccgagcatgtgacaaaatggtttcagcccttgcaggagcaaaagtatacaggcatgttcgcaatgactgagagagggcatgggtccaacgcccgaggcatacagacagaagccacattcgacctctctgcacaggagtttgtgatcgacaccccctgcgagaatgctgagaagatgtatataggaaatgccatgtacggcaattacgccgcagtttttgcgcagctgatcatcgatggacgcagtcaaggacctcattgcttcatcgtgccagtgagagacgaaaatggtagtctttatcctggggttaccgcgatcgatatgatgtataaagaaggcttacatggagtggataatggaatactcatcttcgacaaagtgagaatccccagagagaatttactagataaattcggctcagtggcccctgatggccagtatcactcccctatacgtaacaaatctgctagattcaatgcaatgttggctgcgctaactccctcaaggcttgcagttgcatttcaggcaatgggggccatgaagttgggtctgactatcgcgatccgctatagccatcggagcagaatcatcagccagaattgctgctctgctcctgccggactctactag

SEQ ID NO: 14741 - DNA, 597 bp, synthetic construct
  source 1..597: mol_type = other DNA; note = Synthetic coding sequence
atgactctacgatgtctggagcccagcggaaatgggggcgagggcacacgctcccagtggggcactgctggaagcgcggaggaaccttccccccaggcggccagacttgccaaagccctccgggagctcggacagaccggctggtattggggaagtatgaccgtcaatgaggcaaaggagaaactgaaggaggctcctgaaggcactttcctgatccgggattctagccattccgattatctgctgacaatctccgtgaagaccagtgccggcccaaccaatttacgtatcgaataccaagacggcaaatttcgtctcgactcaatcatctgtgtcaagagcaagctcaaacagtttgactctgttgttcacttaatcgactattacgtacagatgtgcaaagataaacggacaggaccggaggcccctcgaaacgggaccgtgcatctatacttaacaaaacctctgtacacctctgcccctagtctccaacacctgtgtagactgacgataaacaaatgtacgggggccatttggggactcccactgcccacccgtctcaaagattacctcgaagagtataagttccaggtctag

SEQ ID NO: 14742 - DNA, 570 bp, synthetic construct
  source 1..570: mol_type = other DNA; note = Synthetic coding sequence
atggaggctgatggggatggcgaggaactggcccgcctgaggtcagtgttcgcagcgtgtgacgcaaatagaagcggcagactggaaagagaggaattcagagcactgtgcaccgagctcagagttcggccagccgacgccgaggccgtgttccagcggttggatgcagatagagacggcgctatcaccttccaggagttcgcccgagggttcctcggtagtcttcggggtggtcgcagacgcgattggggacctctggatcctgctccagccgtcagcgaagccggcccagaaacgcatgattccgaggaggatgagggcgacgaggacgccgccgcggccctggctactagctgcggaccggctagtccaggccgcgcctggcaggatttccaggcccgattaggagatgaggcaaagtttataccaaggttcggatatacaatctccaaaccagcctttgtgttcgtgcggcatctcatcaccttgtgcgccctcagctgggcaaagaaagagggcagagagacattgtggacgatagaggagggaggcgccaagatggcagagtag

SEQ ID NO: 14743 - DNA, 300 bp, synthetic construct
  source 1..300: mol_type = other DNA; note = Synthetic coding sequence
gccctcgacgtggcagtgaagaccttccctccagaacgtcacgtggccgtgaagtgctttgggaaaaagaaagagaaaaagaataacgctaacagtcccgcatcagtttcaaatcccactgtaaccaagcatgccttcggaatggaagaagaactgcagcgcgagggcagtatcgagacattgagcaattcaagcggttctactagcggatccattcccaggaactttgatggatatagaagtcctttacctacgaacgagtcccagccgttgtccctgttcccgacgggattcccgtag

SEQ ID NO: 14744 - DNA, 1170 bp, synthetic construct
  source 1..1170: mol_type = other DNA; note = Synthetic coding sequence
atggagcggaaagatttcgaaacatggctggacaatataagtgtgaccttcttgagccttactgatctccagaagaatgaaaccctggatcaccttataagcctgtctggagccgtccagctgaggcacttgtcaaataatctggaaacactactgaagcgagactttctgaagttattgcccctggaactttccttttatctgttaaaatggctcgatccacagactctcctgacctgctgcttagtgtcaaagcaatggaacaaggtgatctcagcatgtaccgaagtgtggcagaccgcttgtaagaacctcggttggcagatcgatgatagcgtgcaggatgccctccactggaaaaaagtgtacctcaaggcaattctgcgtatgaaacagctcgaggaccacgaggcattcgagaccagctcccttatcggccacagtgccagggtatacgccctttactacaaggacggactcctgtgcactgtcttttccgtggactacaacgacgaattagacatcctcgtttctggctctgcagacttcactgttaaggtctgggccctgagtgctggcacctgtcttaatacactgaccggccacactgagtgggtgacgaaggttgtgctgcagaagtgcaaagtgaaatccctgctgcactctccgggagactatatcctgttgtccgcagacaaatacgagataaaaatctggccaattgggcgagagataaactgcaaatgcctgaaaactttgtctgtgagcgaggatcggtcaatctgcctgcagccccgtctccatttcgacggcaagtatatcgtgtgttcatccgccctgggcctctaccaatgggattttgccagctatgacatcctcagggttatcaagactcccgagatcgctaatctcgcattgttaggcttcggtgatatattcgcccttctgtttgataacaggtatctctatataatggatctaaggaccgaaagtctaatttcacgatggcccctccccgaatatagaaagtccaagcgaggttcatcattccttgccggcgaagcatcttggctcaacggcctggacggccataatgacacaggacttgtgttcgctacgagtatgccagaccacagcatccatctagtgttgtggaaggaacacgggtag

SEQ ID NO: 14745 - DNA, 2439 bp, synthetic construct
  source 1..2439: mol_type = other DNA; note = Synthetic coding sequence
atgaagaaacaatttaatcgcatgcggcagctggccaatcagactgtgggcagagctgaaaaaacagaagttctcagcgaggatttgctgcaggtggagaagaggctggagctagtaaaacaagtctcacatagcacgcacaaaaagttgactgcctgtttacagggccagcagggggccgaagccgacaagagaagcaagaaacttccccttacaaccctcgcccaatgcctcatggaagggagtgctatactaggggatgatacgttgctggggaagatgttgaaactgtgcggcgagactgaagacaaattagcccaggagctgatccactttgagcttcaggttgaacgcgacgtgatcgaacccctgttcctcctcgcggaggttgagattcccaatatccagaaacagcggaagcacctggccaagctggtactggacatggactcctcccgaacgagatggcagcaaacaagtaaatctagtggcctgtcctcttcactgcagccggctggggccaaagccgacgcccttagggaagagatggaggaggcagccaacagggtggaaatatgcagagaccagctatctgctgacatgtactcttttgtggcaaaggaaatcgactatgctaactacttccaaacactcatcgaggtgcaagcagaataccacagaaaatccctgacacttctgcaagctgtgctgcctcagatcaaggctcaacaggaggcttgggtcgaaaagcccagcttcggcaaacctctcgaagaacacttgaccatcagtggtagggagattgcgttcccaatcgaagcatgcgtgaccatgctcctggaatgtggcatgcaggaggagggtctgtttcgagtggctcctagcgcgtctaagctgaagaaattaaaagctgccttagattgttgtgtggttgatgtacaggaatattctgcagacccccacgccattgcgggggcactgaagtcctatcttagggagctgcccgaaccactgatgacgtttgagctgtacgacgaatggatccaggcaagcaatgtgcaggaacaggacaagaagctgcaggccctgtggaacgcgtgcgaaaagcttcctaaggcaaaccacaacaacatccgatacctgatcaaatttctttctaaactgtccgaatatcaggacgttaacaaaatgacaccctctaacatggccatcgtgttgggtccaaaccttctgtggcctcaagccgaagggaatattaccgaaatgatgactactgtgagcctacagattgttgggattatcgagcccatcatccagcacgcagattggttcttccctggcgagattgagttcaacatcacgggtaattacggatcccctgtccatgtaaatcataatgccaactattcatcgatgccatcaccggacatggatccggccgaccggaggcagcctgagcaagctcggcgcccactatcggtagccaccgacaacatgatgctggagttttacaagaaagacggcatgggagtgagggtgatggacacaaactgggtcgcccgacgcggcagctctgcaggacgcaaggtgtcatgtgcccctccatctatgcagcccccagctccccccgctgaactggccgcacccctgccgtcaccactgccggaacagccccttgattcccccgccgcgcctgcactgtctccgtccggcctgggactccagcccgggcccgaaagaacaagcacaacaaagagcaaagagctgagtccaggctctgcccagaaagggagtcctggatcctctcagggcacggcctgcgccggtacacagcccggcgctcagccaggagcacagccgggagcctctccatccccctcacaaccgccggcggaccaatcccctcatacactccgcaaggttagcaaaaagctggcgcccattcccccaaaggtgcctttcgggcagcccggcgccatggcagatcagtccgccggccaaccctctccagtgtctctcagtcccacaccacccagcactcccagcccctacgggctctcctacccccagggttactcccttgcctcggggcagctgtcaccagcagccgccccccctcttgctagtccctccgtttttacaagtacactgtccaaaagccgcccaactccaaaaccaagacagagacccactttgcctccgccacagccgcccaccgtaaacctctccgcttcatcaccccaatcaacagaagctccaatgttggacggtatgtcccctggggagagcatgagcaccgatttggtgcactttgacatcccttccattcacattgaacttgggtcaacccttcggttgtctccccttgaacatatgcgaaggcacagtgtaaccgataagagagactccgaggaagaatcagaatcaactgctctctag

SEQ ID NO: 14746 - DNA, 1119 bp, synthetic construct
  source 1..1119: mol_type = other DNA; note = Synthetic coding sequence
atgtcgaagtctgagtcacccaaggagcccgagcaacttcgaaaactgtttatcggaggtttatctttcgagaccaccgatgagtctctcaggtcacactttgagcagtggggtacgctcacagactgcgtcgtaatgcgggatcccaacaccaagcgttctcggggtttcggttttgtcacatacgctaccgtggaggaagttgatgctgccatgaacgccaggcctcacaaggtggacggcagagtggtggaacctaagcgggccgttagcagagaagactctcagcggccaggcgcccacttaacagttaaaaaaatattcgttgggggtattaaagaggatactgaagagcaccacctcagggactactttgagcagtatgggaagatcgaagttatagaaatcatgaccgatcgaggatccggaaagaagcggggattcgccttcgtcacctttgatgatcatgatagcgttgataaaatcgtgatccaaaagtatcacaccgtgaacggccacaattgtgaagttagaaaggccctgtccaagcaggaaatggctagcgcctcaagttctcagcggggccgtagcggcagcggcaactttggcggcggccgaggaggcgggttcgggggaaacgacaattttggacgcggcgggaattttagtggcagggggggatttggagggtcccgcggtggcgggggatatggtggaagcggcgacggctacaacgggtttggcaacgacggagggtatggcggagggggacccggctatagcggtgggtctcgggggtacggttcaggcgggcagggatacggaaatcagggcagcgggtacggagggtcaggaagctatgattcttacaacaacggtggcggcggcggctttgggggggggagtggatctaacttcgggggggggggatcctataacgactttggtaattacaacaaccaatcttcaaactttggtcccatgaagggcgggaacttcggtggcagatcctcaggcccttacgggggtggaggccaatactttgctaaaccacgaaaccagggcggttatggcgggtcctcctcgtcatcttcttatggttccgggcggcgcttttag

SEQ ID NO: 14747 - DNA, 1491 bp, synthetic construct
  source 1..1491: mol_type = other DNA; note = Synthetic coding sequence
atgaagctgggcaagaagccaatgtacaagccagtagacccctactccagaatgcagagcacatataattataacatgagagggggagcatacccaccacgatatttctaccccttccccgtgccccctttgctctaccaggtcgaattaagtgttgggggtcagcaattcaacggcaaagggaagacacggcaagccgcaaaacacgacgccgcagccaaagcactgcgaatcctccagaatgagccactcccagagcgcctggaggtaaacgggcgtgaaagtgaagaggagaatctgaataaatccgaaatttcccaggttttcgagatcgctctaaagcggaaccttcccgtgaacttcgaagtggcccgggaatcaggtccgccacatatgaagaactttgtgactaaggtgtcagtgggtgagtttgttggggagggcgagggtaagtctaagaagataagcaagaaaaatgccgcaatagctgttctggaagagctcaagaagttgcccccacttccggccgtggagagagtgaagccgcggataaaaaaaaagaccaagcctatagtcaagccccaaacaagccctgaatatggccagggcattaaccctatctctagactggcacagatacaacaggctaagaaggagaaggagcccgaatatactctgctgaccgaacgcggactcccccggagaagagaatttgtgatgcaagtcaaggtcggaaaccataccgccgaaggaaccggaacgaacaaaaaagtggccaagagaaacgccgccgagaacatgctggagattctggggttcaaggttccccaagcacagcctaccaaacccgccttgaaaagcgaagagaagacccctatcaagaagcctggagacggtcgcaaggttaccttttttgagccaggcagcggagatgaaaatggaacttcaaataaagaggacgaattcaggatgccatacttatctcaccagcagctcccggccggcatcttgcctatggtacctgaagtggcccaggctgtcggggtgtctcagggacaccacacaaaggatttcacacgggctgcccctaatcctgccaaggcaactgtcactgccatgattgccagggaactcctttacggaggcactagcccaaccgccgagacaatcctgaagaacaatatcagttctggacacgtgcctcacggacccctgacgcgaccctccgaacaattggattacttgagtagggtgcaaggattccaggtggagtacaaggacttccctaaaaataacaagaacgaatttgtgtcattgattaattgcagttcccaaccaccgctgatttcacacggaattgggaaggacgtcgagtcatgccacgatatggcggcgctgaacattcttaagttgttgtcagagctcgaccagcaaagcacagagatgcctcgcacaggaaatggcccgatgtctgtctgcggccggtgctag

SEQ ID NO: 14748 - DNA, 5835 bp, synthetic construct
  source 1..5835: mol_type = other DNA; note = Synthetic coding sequence
atgtcaaacttctacgaggaacgtacaacgatgattgcggctcgtgatctgcaggagtttgttccctttgggcgcgaccactgtaagcaccacccaaacgctctgaatctacaattacggcagttacagccagcctctgagctctggagcagcgacggcgctgcaggattagtcggctccctccaggaagtgaccatccacgaaaagcagaaggaaagctggcagctgcgcaagggggtaagtgaaattggcgaagatgtcgattacgatgaggagttgtacgttgcaggcaatatggtgatttggagcaaagggagtaagagccaggctttagctgtctacaaagcctttacagtagattcccctgtgcagcaagctctgtggtgtgattttattatatctcaggataagtccgaaaaggcctattcgtctaacgaggtggaaaaatgcatttgtattttgcagtcctcttgcatcaatatgcactctatcgagggaaaagactacattgcctcacttccctttcaggtcgcaaatgtatggcccaccaaatatggcctgctgttcgaaagatccgcaagttcacacgaggtgccaccggggtcccctagagagccgttgcccactatgttcagcatgcttcatcctctcgacgaaattacccccctcgtatgtaagagcgggtccctcttcggcagctcccgcgtgcagtacgtggtcgaccatgctatgaagattgtgtttctgaataccgacccaagcattgtcatgacctacgatgctgtgcagaatgtgcactccgtgtggacattgcggcgcgttaagtctgaagaagagaatgttgtccttaagtttagcgaacaggggggcacacctcagaacgtggctacgagctcctcgttgaccgcccacctgagatctctcagcaaaggggattctcccgtaactagtccattccagaattattccagcatccactctcagagtagatcaacatcgtcccccagtctgcacagtcgatcacctagcatcagcaatatggcagctctgtcccgcgctcattcgccggcattaggcgtccattccttctccggagttcaacggtttaacatctcaagccacaaccagagccctaaacgacacagcatttctcatagtcctaactccaattcaaacggaagcttcctggcgccggagacggaacctattgtccctgagttgtgtatagaccacttatggaccgagacaatcaccaatatcagagaaaaaaactctcaggccagcaaagtcttcattacgtccgacttgtgtggacaaaagttcttgtgcttccttgtcgagagtcagttacaattgagatgcgttaagttccaggaaagcaacgataagactcagcttatatttggcagtgttaccaacataccagctaaagacgctgcacccgtcgagaagatcgatacaatgctggtgctggaggggtccggcaatttagtgctgtacacaggtgtggtgcgagtcggtaaggtgtttatcccgggactgccagcaccctccttgaccatgagcaatacaatgccacgcccaagcacccccctggacggagttagtacgcccaaaccactttccaagctgctgggctccctggatgaggtggtcctgctcagccccgtgccagaactacgcgatagttctaaattacatgacagcctctacaacgaggattgcaccttccaacagctgggaacctatatccattcaatcagagatcctgtacataatcgggtgacgctggagcttagtaatggcagcatggtaaggatcactatccccgagattgccactagcgagttagtccagacttgtttacaggcgatcaagtttatcctccccaaggaaatcgccgtgcagatgctggtcaagtggtataatgttcatagcgcaccaggcggcccctcataccactcagagtggaatttatttgttacatgcctcatgaacatgatgggatataatactgaccgactcgcttggacccggaatttcgacttcgaaggcagcctgtccccagttatcgcccccaaaaaggcgcggccttccgagacaggatccgatgacgactgggagtatcttctgaactctgactatcatcagaatgttgagtcccacctgttgaacaggtcattgtgtctgtccccgagcgaggcctcccagatgaaggatgaggacttcagtcagaacctgagcctggactcctccactttactgttcacccacatcccggcaatcttctttgtgctgcatttagtgtacgaggagttaaagctgaacaccttgatgggtgaggggatatgttctcttgtggaactgttagtgcagctggcgcgggacctcaagctgggaccctacgtggaccattactaccgggactatcccaccttagtccgcacaaccggccaggtgtgtaccattgaccctggtcaaacaggattcatgcaccacccgagcttctttacctctgaacctccttcaatctatcagtgggtcagttcatgtcttaaaggcgaaggcatgcctccctacccgtatctgccgggcatttgcgaacggtcacggttagtggtgctgtctattgccttgtacattctcggagatgagtcgctggtctctgatgagagctctcagtatctgacgcgcattacaatcgcgccgcagaaactacaggtggagcaagaggagaataggttttcctttcggcatagcacatcagtttcctccctggctgaaaggctcgtggtgtggatgactaacgtgggctttacactgcgcgatctcgagacattacccttcggtatagcattgcccatcagagacgccatttaccattgtcgcgaacagcctgcctcggactggccagaagcagtttgcctgttaatcggcagacaggatttgtcaaagcaggcctgcgagggcaacttgcccaaagggaagagcgttttatcgtctgacgtgccttcggggactgagaccgaggaggaggacgatgggatgaacgacatgaaccatgaggtgatgtctctaatttggagcgaggacctaagggtgcaggatgttcggcgcctgctccaatctgcacaccctgtgagggtcaacgtagtacagtaccctgagctgtcagaccacgaatttatagaggaaaaagagaatcgcttgttgcaactgtgtcaacgaacgatggcactacctgtaggaagaggtatgtttactcttttctcgtatcatcccgtgcctactgagcccctgccaataccaaagctgaacctcaccggtagagctcctccaagaaatactactgtcgacctcaactccggaaacatcgatgtgcctcctaatatgacaagctgggcatcattccacaacggggtagcagccggcctgaagattgcgccagcatcccagattgacagtgcctggatcgtctataataaacccaaacacgctgaactggccaacgaatatgcaggtttccttatggcgcttggcctgaacgggcatctgacgaagttggcaacccttaatatccacgattatctgaccaaagggcacgagatgacgagcattgggttactgctgggtgttagcgcggcgaaactggggacgatggatatgtccattactcgtttgctgtcaattcatattccggcattgctgcctcccacctccacagagttggacgtcccccataacgtccaggtggccgctgtcgtcggtataggtctcgtttatcagggcactgctcatcgtcataccgctgaggttctgctcgccgaaattgggcgcccacccgggccagagatggagtattgcaccgaccgggagtcctacagtctggctgccggacttgctctcggaatggtgtgtctgggccatgggagcaatctgatcggaatgagcgatctgaacgttcccgaacaactataccaatacatggtcggaggccacaggaggttccagaccggcatgcacagagagaaacacaaaagtcccagctaccagatcaaggagggagacactatcaatgtcgatgtaacttgccctggtgccactcttgcactagccatgatctatctaaaaacaaacaatagaagcatcgccgactggctgcgggcccctgacaccatgtatctcttggactttgtgaagccagaatttctcttattgcgaactctcgcgcgatgcttaatcctctgggatgatatccttcccaactcaaagtgggtcgacagcaacgtgccgcagattattcgggagaatagcattagcctgagcgaaatcgagctcccctgtagcgaggatctgaacttggagacattgtcacaagcccatgtgtatattattgccggtgcttgtttgtccctaggcttccggttcgccggtagtgagaacctcagtgcattcaattgcctgcataagtttgctaaggatttcatgacctacttaagcgcacctaacgcgtcggttactgggccacacaatctggagacctgtttgagcgtcgtcctgctatctttagctatggtgatggctggtagcgggaacctgaaggttctacagctgtgccgattcctgcacatgaagaccgggggggaaatgaactacggattccacttagcccatcacatggcattgggtttgctgtttttgggcggcggcagatatagtctgtcaacatcgaactcgtctattgcagctctgctgtgcgccttatatccacatttccccgcccactcgaccgacaacaggtaccacctccaggccctgaggcacctctacgttctggccgccgaacctcgtttactggtgccagtggatgtcgacactaacactccatgctatgcactcctcgaggttacctacaaaggaacccagtggtatgagcaaacgaaagaagaactaatggctcccaccctcttgcccgaactgcacctgctcaaacagattaaggttaaaggacccaggtattgggaactccttatcgatttgagcaaagggacacagcaccttaagagtatcttgagtaaggatggtgtcttgtacgtcaagctgagggccgggcagttatcatataaggaagacccgatgggatggcaatctttactggctcaaacagtagccaatcgtaatagtgaggcgagggcttttaagccagaaacgattagcgcgttcactagcgatcccgccctgctgtcattcgccgagtacttttgtaagcccactgttaacatgggacaaaaacaggagattctagatctcttttctagtgtgctgtatgagtgcgtgactcaggagactcctgagatgctcccagcatacatcgccatggatcaggccataagacgactgggcaggcgcgagatgtccgaaacaagtgaactctggcaaataaagctggtgctggaattcttctcgtccagatcgcaccaggaaagactgcagaatcatccgaaaagaggactctttatgaacagtgaatttctgcccgtagtcaaatgcactatcgataacaccctggatcaatggctgcaagtaggaggggatatgtgtgtgcacgcatacctgagcggccagccactggaggaaagtcaactgtcaatgctggcctgtttcctggtgtatcacagcgtgccagccccccagcatctgcccccgataggacttgagggctcaacaagtttcgctgagctgctgttcaagttcaagcagctgaagatgccagtcagagcattgttgagactggctccactgttgttggggaacccccaaccaatggtcatgtag

SEQ ID NO: 14749 - DNA, 1263 bp, synthetic construct
  source 1..1263: mol_type = other DNA; note = Synthetic coding sequence
atgctcaaggccgtcatcttgattggaggaccccagaagggcacacggttccggcccctgtctttcgaggtgcccaagccactcttcccagtggccggcgtgcccatgatccaacaccatatcgaggcctgtgcacaggttcccgggatgcaggagatcctgttgattggcttctaccagcccgatgaacctctaacccagtttctggaagccgcccagcaggaattcaacctgccagtgagatacttacaggagtttgcccctttaggaaccgggggtggtctataccactttcgagatcagatactcgcaggctcaccggaggcattcttcgtgctcaatgcagacgtatgttcagattttcccctgtctgcgatgctggaggcccaccggcggcagcggcatccatttctcctcctcgggacaacggcaaaccggacgcaatcactcaactacggctgcattgtggaaaacccccagacgcacgaggttctgcactacgtcgaaaaaccatccacattcatcagcgatataattaactgcggcatttatcttttctccccggaggcgttgaagcctctgcgtgacgtgtttcagcggaaccaacaagacgggcagctggaagactcacctggactatggcctggggccgggactatccgtctagaacaggacgttttttcagccttagcaggtcagggccaaatctatgtgcacctaaccgatggaatctggtctcagattaagagcgcaggatccgctctgtacgcctctcgactatatttatccagataccaggatacccaccctgagagactcgctaagcatacacccggaggaccatggattcgagggaacgtgtacatccaccctactgcaaaggtggcccccagtgccgtgctcggcccaaatgtgtccataggaaaaggagttaccgttggcgaaggagtgcggcttcgggagtcaatcgtcctacatggcgccaccctgcaggagcatacctgcgtcctccactctattgtcggctggggctccaccgtgggccgctgggccagggtggagggcaccccttccgatcccaatccgaatgacccccgcgcacggatggattcggagagcctctttaaagatgggaagctattacccgccataacgatcctgggctgtagggtcaggatcccagcggaggttttgattctgaactccattgtgctgccacataaagagctgtcgcggtcttttaccaaccagatcattctgtag

SEQ ID NO: 14750 - DNA, 1257 bp, synthetic construct
  source 1..1257: mol_type = other DNA; note = Synthetic coding sequence
atgagggaatgcatcagtatacacgtcggccaggctggagtacagattggcaatgcttgctgggagttgtactgcctggagcatggaatccagccagacggacagatgccgtcagacaagacaattggcggcggcgatgactcatttaacacctttttcagtgagacaggcgccggcaaacatgtccccagggccgtttttgtggatctcgagcctactgtggtggatgaggtcaggacaggtacctatcggcagctgtttcacccagagcagttgatcaccggcaaagaagatgctgcgaacaattatgcacgtggccactacactattgggaaggagattgtggacctagtcttagatcgcattcgaaaacttgcggatctttgcactggactgcagggattcttgattttccacagttttggcggcggcaccggcagcggatttgcttccctcctgatggagcgactgtccgtggattacggaaaaaaatctaagttggagttcgccatttaccccgccccccaggtctccaccgccgtggtcgaaccatataactctatccttacaactcacacaactctggagcacagtgactgcgcctttatggtcgataatgaagccatttatgacatatgccgtagaaatctagatatcgagcggcctacttacaccaacctgaatcgtctgattggccagattgtgtcctcgatcactgcctccctcagatttgacggagcccttaatgtcgacctgactgagtttcaaaccaacctggtaccctacccaaggatccattttcctttggcaacttacgcgcccgtcatttcagctgagaaagcctatcatgagcagctaagtgtggccgagattaccaatgcgtgttttgagccagcgaatcagatggtgaaatgcgaccctcggcacgggaaatacatggcgtgctgtatgctttacaggggcgacgtcgttcctaaggatgttaacgcggccatagccacaattaagacaaaacggacaattcaattcgtagattggtgccccactgggttcaaggtcgggattaattatcaaccgcccaccgtagtgcctggcggagacctggctaaggtgcaacgcgcggtgtgcatgctgtccaatactaccgcgatagcagaagcgtgggctaggttagacttagcagcgttagagaaagactatgaggaggtgggagtagattcagtggaggccgaggccgaggaaggtgaggaatactag

SEQ ID NO: 14751 - DNA, 417 bp, synthetic construct
  source 1..417: mol_type = other DNA; note = Synthetic coding sequence
atgcagcttcccccatttgacatgtggaaagactattttaatcttagccaggtggtgtgggcccttattgcatcccgcgggcagcggctagaaacacaagaaatcgaggagcccagcccaggaccacctcttggacaagaccaaggtctgggggcacctggagccaatggcgggctgggtaccctttgcaatttttgtaaacataatggtgagtcacgacacgtatattcttctcaccaactgaaaacaccagatggcgtcgtggtgtgccccattctgaggcattacgtttgccccgtgtgtggggcaaccggcgaccaggctcacactcttaagtactgccccctgaacggtgggcagcagtccctctatagacgtagcggacggaactccgcgggccgccgcgttaaaagatag

SEQ ID NO: 14752 - DNA, 375 bp, synthetic construct
  source 1..375: mol_type = other DNA; note = Synthetic coding sequence
atgagggccagtccatgtatctcccagccggctgcctcgtggcacccgcgacccagcgctttgaggcccacggctggttccggacccgatactcggacacctggcacagtcgaggatggtagcgcaccttgcccggcctttcggtctcctgctgtgagcccatgtggcgaagagccatgttgctttcagataagccccgcagaagaaaccctggagctgggcaggttggtgtcccccggtaattgcgacactctctcacccagagccgcaggattttatgcttgtcacgtgaggtccctcatcccctgtcgctcaaccaaagggcgctggccgttgaccgcttcagctgctggtcttagcagttttagcggatag

SEQ ID NO: 14753 - DNA, 363 bp, synthetic construct
  source 1..363: mol_type = other DNA; note = Synthetic coding sequence
atggctgagccctcctcagcccgacgcccagtgcccttgatcgagtctgaattgtacttcctgatagctcgatacctgtcagccggcccatgcagacgcgcggcacaggtactggtccaggagctggagcagtatcaattactcccaaagcggctggactgggagggcaacgaacataatcggagttacgaagagctagtactgagtaataaacatgttgcccctgaccatctcctacagatttgtcaaagaattggtccaatgctcgataaggagatccctccatctatcagcagggtgacgagtctgcttggcgcaggccgacagagccttctcagaactgcaaaaggcacactaatttag

SEQ ID NO: 14754 - DNA, 2607 bp, synthetic construct
  source 1..2607: mol_type = other DNA; note = Synthetic coding sequence
atgatcccgaaaagccttgtacaggctgctgagacacaacggggactttgtgagccaggcgggaaggggagagaaggacggtcagggggcaagggagaaacacggcccagaggggtgggcacccaggaaggcaagggcaccatacccggctcaccccgagaaaagcgcggggagaggggcgaaggggacccagcactgctgccggctgaggacctgtggagactgcctggttctaaagacaggctgaggtcatccctgctcccacccccgggcccaccctcatcagattccgggcccggccccccatcctctcactctggaaagaccgcacagggtccaagaacgctgaactgggcccgtaagcagtccgcacgaacctcaagcaatctttgcgcctggtccctggcaatggccaccaagatggctgagattccatccagtccttacgagcctgggcagcgcggaatgaaggacactcaacgtggagatgcacctcaaagaggaagcccagagcccagaattttgcagctggctcgggttggaaatgtgtatctgaaggaagagtcgtcccgatcaggccgtttggaggcgaaaaaatggatccccacaaaatttctagaaaatctgagcgttcctcacgttgatctgggaggcaatcaattgtggtcgggcggcatggaagcactgacgacacagctggggcccggccgagaggggagctcttctcccaattccaaacaggaactgcagccctactcaggaagcagcgcccttaaacccaaccaggtcggagaaaccagcctctatggagtgcctatcgtgtctctggttattgacggacaggagcgcctgtgcctggcacagattagcaacacgttgctgaagaactacagctacaacgaaattcataaccgcagagtcgctctgggcattacctgtgtgcagtgcacacctgtccagttagagatccttaggcgcgccggtgctatgcccattagttcacgacgctgcggcatgatcaccaagcgggaggcagaacgactttgtaagtcatttctcggagagcacaagccgccgaagctgccggagaatttcgccttcgacgtggtgcacgagtgcgcttggggatcgcgaggctcctttatccccgcgagatacaactccagccgcgccaagtgcatcaaatgtggatactgctccatgtacttcagccctaataagttcatcttccacagccatcgaactccggacgcaaagtacactcagccagacgccgccaacttcaattcatggcggcggcatttgaaactgtccgacaagtcggccaccgacgaactgagccacgcatgggaggatagaggccttggtctggccacgggggcatcagggcctgctggacccggcggcccagggggaggcgctggggtgcgaagttacccagttatcccggtaccttccaagggctttggactgttacaaaagctgcctcctccattgttcccgcatccatacgggttcccaacagccttcggcctgtgcccaaaaaaagatgatccggtcctgggagccggcgaaccaaagggtggatcatatgtgagcgcgttcaggccagtggtgaaagacaccgagagtatagctaaattgtacgggagcgctagagaggcatacggcgccgggccagctcggggccccggccccggagcgggtagcggcgggtacgtcagtcccgatttcctaagtgaaggttcctcttcttacaactctgcttcacccgatgtcgacactgctgacgagccagaagttgacgtagaatccaatcggttcccagatgatgaagacgcccaggaggaaactgaaccatccgcaccttcggctggcggtggcccagatgcaggtaggccagccttcggtgatcttgcggctgaggatctggtgcgccgtccagaaaggagccctccttcaggcggtggcggatacgagctgagggagccctgtggtcctcttggtggaccggcccccgccaaggtcttcgcaccggagcgggacgaacacgtgaaatccgccgctgtggccttggggccggccgcctcctacgtgtgtacacctgaggcccatgaacccgacaaagaggacaaccactctccagctgacgacttggaaacccgcaagagctatcccgatcagaggtcaatctcacagccaagccccgctaacacagaccgcggcgaggatggactgacattggatgtgaccggcactcacttagtagagaaagacattgaaaacctggcgagggaagagctgcagaaactgcttctggagcagatggagcttcggaaaaagttagagcgcgagtttcagtctctcaaggacaattttcaagaccagatgaaaagggaacttgcatatcgcgaagaaatggtgcaacagttacaaatcgtgagagataccctctgcaacgagcttgatcaggagaggaaggccagatacgccatccagcagaagttgaaggaagcccatgacgccctccaccacttttcctgcaagatgctcaccccgagacactgtacaggaaactgctcgttcaagccaccacttctaccatag

SEQ ID NO: 14755 - DNA, 3585 bp, synthetic construct
  source 1..3585: mol_type = other DNA; note = Synthetic coding sequence
atgcatgacctgccaccagactctggggcccgacgtggcgggcgaggactggccgatcattcatttcctgctggagctcgggcccctggccagcctccaagtagaggagctgcatacaggagagcctgcccacgagatggcgaacgtggaggcggaggtaggcctcgtcagcaggtgtcgccaccacgcagcccccagcgcgaaccccgtggcggccagctgcgcacacctcgcatgaggcccagttgtagccgaagcctcgagagcctgagagtgggtgctaagcccccccccttccagcgctggccaagtgactcgtggattcgctgcggtgcccaccgtgattgggacgaacctcctcctaggggcggccgcatggatggttggtccggcgacagagcccgagcagcagctcctacagggctacaaccacccggatgcaaggatcacgggtgctcaagtgggtctcctttccgggaccctgccggcagctccgtcatccggagcggcaagggcgacaggcaggagggaccatcttttctgaggcctccggccgtgacagtaaagaagcttcaaaaatggatgtataaggggaggttattgagtctcgggatgaaggggcgagcccgggggaccgcccccaaggtgacgggcactcaagccgcatccccgaacgtcggcgccctcaaggtacgcgagaatagggtgttgtctgttccacctgatcagagaattaccctgacggacttgtttgagaacgcctatggcagttctatgaaaggaagggagctcgaggaactaaaagataatattgagtttcgcggccacaagcccctcaacagcatcactgtttccaaaaagaggaactggctgtatcagtcaacacttcgcccactgaacttagaagaagagaacaagaaatgccaggatcggtcccacctcagcatctcccccgtgtccctgccaaaacaccagctgagccagagctttctgaagagctccaaggagtactgtacatacgtagtgtgtaacgccacaaacagttccctctcaaaaaattgtgccttggacttcaatgaggagaacgacgcagacgacgagggcgagatctggtacaatcccattcccgaggacgacgacctgggaatctccagtgccctgtcctttggtgaggcagatagtgccgttctcaaactcccagcagtgaacctttccatgctgtccggttctgatctgatgaaagcagaaagacacacagaggacagtctctgctcttccgagcacgcaggcgatatccagactactagatctaacggtatgaaccccatacaccctgcccatagtactgagtttgtgcagcaatacaagcaaaaactgggccataagacccaggaggggatcatggtcgaggacagccccatgctgaagagcccttttgccgggtcaggcatcctggcggcaactaactcgacagagctgggaatcatggagccctcgtccccaaacccttcgcctgtgaaaaagggttcctccattaattggagcttgccagacaaaatcaagtctccaaggacagtgagaaagctcagtatgaagatgaagaaactgcctgagttttctcgaaaacttagtgtgaaaggcaccttgaattacatcaatagtcccgacaatacaccatctctgtccaagtataactgccgggaagtccaccacactgacatcctgccctccggtaacacgaccacagccgccaagcggaatgttattagtcgctaccacctggacactagcgtatcctctcagcaatcgtatcagaagaagaattcaatgagctctaagtactcatgcaagggcgggtacctgtccgacggagatagcccagagcttaccaccaaagccagtaaacatggtagtgagaataaattcggcaagggcaaggaaatcatctcaaactcttgctcaaagaatgaaattgacattgacgcttttcgccactactcgtttagtgatcaaccgaaatgttcccagtacattagcggacttatgtcagtccacttctacggggctgaggatctcaaaccgccacgcatcgacagcaaggatgtcttctgtgccattcaggtcgacagtgtgaataaagcacgaaccgcactgctgacttgtcgcaccaccttcctcgacatggatcacacattcaatatagagattgagaatgcccagcatctaaagttggtggttttcagctgggaacccaccccacgcaaaaatcgggtttgctgccacgggactgtggtcctcccaacattatttagagtgaccaaaactcatcagctggccgtaaaactggagccccgtggcctcatttatgtcaaagtgaccctcatggagcaatgggagaacagcctgcacggcctggatatcaaccaggagcctataatttttggagtggacatccaaaaagtcgtcgaaaaggagaacattggtctgatggtccccctactcattcagaaatgcatcatggaaatcgagaaaagaggatgtcaggtcgttggactgtacaggttgtgcggatccgcagcagtaaagaaggagttaagggaagcgttcgaacgagacagtaaggccgtggggctctgcgagaaccagtaccccgacatcaatgtgataaccggagtgcttaaagattacctgagagagctgccctcacccctcatcaccaagcagctttacgaggccgtgctggatgccatggccaagtcgccgctcaaaatgtcttcaaacgggtgtgagaatgacccaggcgatagcaaatacacagtggatctgctggattgcttaccggaaatcgagaaagcaacgctcaaaatgctgcttgaccatctcaagttggtggctagctaccacgaggtgaacaaaatgacctgccagaatctcgccgtgtgtttcggcccagtcctcttgtcccagcgacaggagccttccacccacaacaacagggtatttacagactcagaagagctggcgtccgcactggactttaaaaaacacatcgaagtattgcactacttgttgcagttgtggcccgtccagagactaaccgtcaagaagagcacagacaacctgttccccgagcagaagtcctcactgaactatcttcggcagaaaaaggagcgcccacacatgttaaacctatctggtactgattcatctggcgtgctgaggccccgacagaacagactcgactcgcccttatccaaccgctatgctggggactggagctcctgcggcgaaaattatttccttaacaccaaagagaatttaaatgacgtcgactacgacgacgtgccaagcgaggaccggaagattggcgaaaattattccaagatggatggacccgaagttatgatcgaacagccaataccaatgagtaaggagtgtactttccagacatacttaactatgcagactgtggagagtactgtggatcgaaaaaataacttgaaagacctacaggagtccatcgacacgttaatcggcaatttagaaagggagcttaataagaataaactaaacatgtccttttag

SEQ ID NO: 14756 - DNA, 1353 bp, synthetic construct
  source 1..1353: mol_type = other DNA; note = Synthetic coding sequence
atggaccccggaaatgagaattctgcaaccgaggctgccgctattattgatctagatccggatttcgagcctcagtcccggccacgaagttgcacgtggcccctgcccagacctgagattgcaaaccagcctagtgagccacctgaggtggagcctgacctgggtgaaaaagctattgagtcagccccagagaagcgactaacattggcccaaatctacgaatggatggttagaacagttccatatttcaaggacaagggagactccaattctagcgcaggatggaaaaacagcataagacataacctgagcctgcactccaagttcattaaggtccacaacgaggcaacgggcaaaagtagttggtggatgctcaatcctgagggcggtaagtctggaaaagcccccaggaggcgagcagcctctatggactcttctagcaagctgttaaggggacgctcgaaggcacccaaaaaaaagccctcagtacttccagctcccccagaaggtgccacccccacctcacccgtgggacatttcgccaaatggtctgggagcccctgcagcaggaatagagaggaagccgatatgtggacaacatttcggccccggtcctcctctaatgcttcctccgtgtctacccggttgtcccccctgcggccggagagcgaagtcttagccgaggagattccagcctccgtttctagctacgcaggaggggtcccccctaccctgaacgaggggctcgagctgctcgacggattaaacttgacatcaagtcactctctcttgagcagatctggcttatcaggattcagcctgcaacaccctggtgtcactggacccctacatacctacagctcgtccctgttttcccctgcggagggccccttgtcagccggtgaggggtgtttcagttcctctcaagcgctggaagctcttctgaccagcgacacacctccaccccctgccgatgtgttgatgacccaggtcgatcctatcttgtcacaggccccaacgcttttacttctgggcggtctgccatcctcgagtaaactggccacgggcgttggcttgtgcccgaagcccctcgaagccccaggcccatccagcctggtcccaacactttctatgatcgcaccaccgcccgtgatggcgtctgccccaattccgaaagctctcgggactcccgtgctgacaccacccaccgaggctgcgtcacaagaccggatgccccaggacttggatcttgatatgtacatggaaaatttggagtgtgacatggataacattatttccgaccttatggacgagggagaaggcctcgatttcaatttcgaacccgacccttag

SEQ ID NO: 14757 - DNA, 1125 bp, synthetic construct
  source 1..1125: mol_type = other DNA; note = Synthetic coding sequence
atggccgggtacctttcggagtccgacttcgttatggtagaagagggtttttccactcgggacttgctgaaagagctgacattaggagcatcccaggcgacgacagacgaggtcgcggccttctttgttgcagacttgggggccattgtgcgtaagcatttctgcttcctcaagtgcctaccacgggtgagaccattctacgccgtcaaatgcaattctagccctggggtcttgaaggtgctggctcaactcggccttggcttctcctgtgccaataaagcggagatggagctcgtgcagcatattgggattcccgcttctaaaattatttgtgctaacccgtgcaaacagattgcccaaattaagtacgccgccaagcatggaatccagctgctgtcattcgacaatgaaatggagctggctaaggtggtcaagagccacccctcagctaaatttgtgcagcagcggggaactgcctgtctgattaggatggtgctgtgtatagccaccgatgactcccattccctcagttgcctgtcactgaaattcggtgtgagcctgaaatcctgtcgtcaccttctggaaaacgccaaaaaacaccatgtggaggtggtcggcgtgagtttccacatcggatccgggtgtcccgaccctcaagcatacgcccaatctatagcggatgcccgactggtctttgaaatgggaacagaactgggtcataaaatgcacgtcctggacttaggcggcgggttccccggtactgagggtgccaaggttagatttgaggaaatcgcttctgtaatcaactctgctctcgacctctattttcccgaagggtgtggagtggatatctttgctgagctgggccgctattatgtgacatctgctttcaccgtggccgtatcaatcattgcaaaaaaggaggtgttgctcgaccagcctggaagggaggaggaaaatgggagcaccagtaaaaccatcgtgtatcatctggatgaaggagtgtacgggatcttcaattccgtgttgttcgataacatttgcccaacccccatcctccagaagagcaagaaccattccccctgttatatgtcattggagtctatccattttattgcagtgtag

SEQ ID NO: 14758 - DNA, 1629 bp, synthetic construct
  source 1..1629: mol_type = other DNA; note = Synthetic coding sequence
atggatcgtagcaagcgcaattctatcgccgggttccctcctcgtgtagaacggctagaagagttcgaaggaggcggtggaggggagggaaacgtaagtcaggtcggtcgagtgtggcctagcagttaccgcgccttgatcagcgcttttagtaggcttactcgtttggatgactttacctgtgaaaagatcggctccggattttttagcgaagtgtttaaggtcagacatagagcaagtggccaagtcatggcactgaagatgaacactctctcctccaatagggctaacatgctgaaagaggtgcaactcatgaacaggctctcgcatcctaacatcttgagattcatgggcgtctgtgtacatcagggccaacttcatgctcttacggagtacattaacagcgggaatctagagcagcttcttgattccaacctgcatctcccatggacggtcagggtgaagttggcctacgacatcgccgtggggctgtcatatctccattttaaaggaatattccacagagatcttacctccaagaattgtctgattaaacgagatgagaatggttacagtgcggtggtggccgatttcggattagccgagaaaattcctgatgttagcatgggctccgaaaagttggcagtcgtgggcagtcctttttggatggcacccgaggtcttacgggatgaaccctacaatgaaaaagccgacgtcttctcttacgggattatcctgtgcgaaatcattgcccggatacaggcagaccccgactatctgccacggaccgagatggatccaaagttgcgtccatcttttgttgagatcggcaagaccctcgaagaaattctatcccggttgcaggaagaagagcaggagagagacaggaagctgcagccaaccgccagggggctcctggagaaagccccaggcgtgaagcggctctccagcttagatgacaaaatcccccataagtctccttgccccaggaggacaatttggctgagtcggtcccagtcggatatcttttcccggaagcctcctagaaccgtgtctgtgctagacccctactacaggcctcgcgacggagccgctcgcacaccaaaggtgaacccctttagtgctcgacaggatctgatgggcggcaagatcaaattctttgatttaccctccaagtccgtgatttctctggtctttgatttagatgcccctggaccggggactatgcctcttgccgactggcaggaaccgttggctccccctatcagacgatggaggtccctaccaggctcccccgagttcctgcaccaggaggcttgtcctttcgtggggcgggaggaatccttgtccgatggccctccaccacgcctgagttcgctcaagtaccgcgtcaaagaaattcctccctttcgggcctccgcattgccagccgcacaagctcatgaggctatggattgctcaattctccaggaggaaaatggctttgggagccgaccacagggcaccagcccatgccctgcaggggcttccgaagagatggaggtggaggaacgccctgctggcagcacaccagccactttcagtacatcagggatcgggctccagacccagggtaaacaggacggttag

SEQ ID NO: 14759 - DNA, 786 bp, synthetic construct
  source 1..786: mol_type = other DNA; note = Synthetic coding sequence
atgggtagcagaaagaaggagatcgctctacaagtaaatatctcaactcaggagctttgggaagagatgttatcaagcaaaggcctcactgtggttgacgtctaccagggctggtgcggcccctgtaagcctgtcgtctctctgtttcaaaagatgcggatcgaagtgggactggaccttctgcatttcgccttgatcaaagatgaggccttgtcagatgaggacgaatgtgtgtcccacggtaaaaataatggggaagacgaggatatggtgtcatctgagcgcacttgtactttggcaatcatcaaacccgatgccgttgctcatggtaagacggacgagatcattatgaaaatccaggaagccggcttcgaaatcctgactaacgaagagcgcacaatgaccgaggctgaggtgcgacttttctaccagcacaaagctggagaggaggcgttcgaaaaactagtgcatcacatgtgtagtgggcctagccacctcctgattttgaccagaacagagggttttgaagatgttgtgaccacatggaggacagtcatgggtccccgtgatcctaacgtggcaaggcgtgagcagcccgaatcccttagagcccagtacgggacagaaatgcccttcaatgctgttcacggctccagggatcgcgaggatgccgaccgagaactcgccctgttgttcccaagcctcaagtttagtgataaggacaccgaagcaccccagggggagtctagtacacagcctcgcttgaagatcaccgatctcgactag

SEQ ID NO: 14760 - DNA, 1767 bp, synthetic construct
  source 1..1767: mol_type = other DNA; note = Synthetic coding sequence
atggaggccgcggatgcttcgcgttctaatggtagcagcccagaagctagagacgcgagatctccgtccggccccagcgggtccctcgaaaatggaactaaagccgacgggaaggatgccaagaccacgaacggccacggaggcgaggctgctgaaggtaagtcattaggctcagctctgaagcctggagaaggaagaagcgctctcttcgccggcaacgagtggcgtagacctattattcagtttgttgagagtggtgacgataagaattcgaattacttttcaatggacagtatggaagggaaacggtcaccttatgctggcctccagctaggcgctgccaagaagcccccggttacattcgctgaaaagggggagctccggaaaagtattttttccgagtcacgcaagccaactgtatctataatggaacccggagagactcggagaaacagctatcccagagcagatacaggcctcttcagccgatccaaaagcggaagtgaagaggtgttgtgtgatagttgcataggaaacaagcagaaagcggtgaaaagttgcctggtgtgccaagcttctttctgtgagttacacctgaaaccccacctggagggcgccgcgttccgagaccatcagctcctggaacctatccgggacttcgaggcacgcaaatgccccgtgcatggaaagaccatggagctattctgccagaccgatcagacttgtatatgctacctgtgcatgttccaggaacataagaaccattctactgtaacagtggaagaagccaaggcagaaaaggaaactgaactgtccctccagaaagagcagcttcagctgaagatcatagagatcgaggacgaggcagagaagtggcagaaggagaaggatagaatcaagtcttttaccactaatgaaaaggccatccttgaacagaattttagagatctggttcgcgacctagagaaacagaaagaagaagtcagagcagccctggaacaaagagagcaggatgccgtggaccaggtgaaggtgattatggatgctctcgacgagagagcaaaggtgctgcacgaagataaacaaacacgagagcagctgcatagcatcagcgatagcgtcctgttcctccaggagttcggagcactgatgagtaactatagtctgccgcctcccttaccaacgtaccatgtgctactcgagggagaaggcttaggccagtccctgggcaacttcaaagacgatctcttgaatgtctgtatgcgtcacgttgaaaagatgtgcaaagccgatctgtctcgcaatttcatcgagagaaatcatatggagaatggcggagaccacaggtatgtgaacaactatacaaacagttttgggggtgaatggtccgcgcctgacacgatgaagcgctatagcatgtatctgacccctaaaggcggagtgcggacaagctatcaacccagtagcccagggaggtttaccaaagaaactacccagaagaattttaataatctgtacgggacgaaaggaaactacacttcgcgcgtctgggaatactcctcatctatccagaacagcgataatgatctgcccgtggttcagggctccagctcttttagcttgaagggttaccctagtctgatgagatctcagtctcccaaggcgcagcctcagacgtggaagtctggaaaacagacgatgctgagccactaccgaccattttatgtgaacaaaggaaacggcatcggcagcaatgaagcaccctag

SEQ ID NO: 14761 - DNA, 3567 bp, synthetic construct
  source 1..3567: mol_type = other DNA; note = Synthetic coding sequence
atgaaaaaaaaacaaactgtgcagggtacattcagcaagctctttgggaagaagcacacgacgacgccctccacctccctttacgcaaccaaccccccctggatatttactcaggaggcacctgaagaaggaaccggcggatttgatggcatttattatggcgacaatcggtttaataccgtctccgagtctggtaccgccacgcttaaggctcggccccgggtgaggcctttattaacattcctgcctcttaatgcacaagaaaatcacgggctcgcagtgccaactccctcggtgcctgacgatttcgccgataaggaggtcacaggcacctcgtccctggtcaatgggaacctccgactttatagtagcgtcggggatttgcggcctggtcagtatggacaggacctgctgataccaccaccgcctccgggaccggcaccaggaccgcctcaagacatctccgagcccccaggcggttcaccactgccttcccccccttcaaccgcaccccctccccctccactcttgctcgagccaccaccgccaccctcaatggccccacctcctccgcccgtcttggaggccctttctccgccccacacactctcctccccgagtatccccactccaccagacttcatccctccggctccaccccttgcgtttcttgcgcctcctccgccgcccgtgcctgcccctgcgcctcccgctcctgcttcgccccataccgttggtaccagactttttccacctgggggagttacgaaatggaagagcgacgtggccctgaacggtaggcaggcggaggccacacgggcctccccacccaggagccccgcagagcccaagggttccgcactgggccctaaccccgaaccacatctcacttttcctcggagctttaaagtccccccaccaaccccagtgcgaacatctagcattcccgtacaagaagcacaagaagcaccaaggaaagaagaaggagccacaaagaaggccccttcaaggctgccacttccaccatctttccacatacgcccggcctcccaggtctaccctgacagagcccccgagcctgactgtcctggcgagctgaaagcaactgcacccgctagtccaagattggggcaatcccaatctcaagcagatgagagagccggaaccccaccaccagctccaccactgccacccccagccccaccattgccaccccctgctcctcctctccctccagcagcaccgcctcttccatgtgcccaaaaggctgctcacccgccagctggatttaccaagactccaaagagctcgtctcccgctctcaagccaaaacccaatcccccatcccccgaaaacactgcaagtagtgccccagttgactggcgcgacccaagtcaaatggagaaattaagaaatgagcttgccgcctacctgtgtgggagccgccgggaagataggttcctttcacatagaccagggccaaccgtcgcccctcaatccaaagagggaaaaaaagggcctaggctgccagaaaaggagacactacttagtctcccagccaaagacacacctccgggagtgccagagaagagccttggcgggtctagtttaaccgaaacagaggctgctccatccctgacattgccatccgttgattatattccacaggattctcccactccctccgtccgccagatacgcaacgaactggaagcacgcctgtccagcgcagccgagaaagaagccaaaccaagcatcggctctcttcctcctaagcctaggctcgaaggagggcgaatatgtgagaacggcgctgacgatgataagttgtccaaacctgtggccaagaatttgcctccccaatctaccactcttctgcctaccacatctctgcagcctaaggccatgctcggtccagcaatccctcctaaggcgactccggagccagccattccaccaaaagctaccctgtggcctgctactccaccaaaagcaacactgggaccggcaacaccactcaaagccacctccggtccgacaacccccttaaaagccacttcagggccagcaatagcttccaccgccacaacgctcccaactaccacttctcagctgatggccgagaaggacagcggcccagcgggacaaccagagaaacctgcgtcgcaggaggtgtctaccccgagccaggcacgcggagagggctctcccagtgaagccacaagactccctacccaaggcgccagaagcagcgctgcatttcctcctaaaacctccccaggggggggagaggtaccttgcctttacaagccacattgtcaccagtcaagcctgtcccgggaagtcgccgtggtgatgcccactttagcacgagggggagccgctggccccggcgagcccgtggaggtgaaggaacctcctggacttcccgccaaaccacctgccagcgcgcagcccactgacgagctgcttaggcatccggttacaggtgaggtggttgaacggggtagccctatggccttactattagcagcacggcaacgggctcaaaaaggccgatcagtgggggctgccctcgggaggtcaagtctgcccggcagcttacgtgatcactctcatcaagcagaggcatcaagtgattctatcttccacagtcaggggaccccgaattctttcacggttgtcccgaagctgccaaaagaggccgagaaggattcgcccctcacaactgaaatccctaacaagtgggggccgaggctggggcgcgatgctgaaggcacagaactttctcggcgccataattggaccaaaccggagccccaggctccggtggcatgggagcgcgttgcgccttccaaccttcctcaaggtcatcccctccctaagtccttttccagcccaccaagccccagtaataaacgagaagaagaggaggaagagttcaacttcgaggtgattccaccgccccccgaattctcaaatgaccctgagcctccagcccccgcactgcagtatctaggtagacaaagctctcctccaaggaacaattatagcgacttgcgccagctgcctaatgctggcccaggagctcctcctgctctgggcttttccagatttcctgccggagctcgctacgcaggcgctggcggccttgagcgcttttcgggaggtgggcggagcctaataaagaagcggctctacgtcggagaaccgcatcgtggacccggtctgccccacggcgggaccggccggtctctatcaagtccgaactgtttcggtccccaacccgggggccccgaaatgcggagagtgaactctgcggggagagcgcccccagggggcctgcacgcccctaggctcagtctggagggggcggccaggggtgcggccgaagcgaaacacaaagctccaggctctgcagattatgggtttgcacccgccgctggccgatctccatatactaccaccagatatgggtcacccataaacacgttcactgtacggcccggaacacgacaccccattagctatgtctgcagcggtgcccacaggaaggcaacatcatag

SEQ ID NO: 14762 - DNA, 2598 bp, synthetic construct
  source 1..2598: mol_type = other DNA; note = Synthetic coding sequence
atggccgtggcccgagtggatgcagccttgcctcctggagaagggagcgtggtcaactggagcggccagggcctgcaaaagctggggccaaacctcccgtgtgaggcagatattcacacactgattttagataagaaccagattatcaagcttgaaaatttagagaaatgcaaacgcctcatccagcttagtgtggctaataaccgattagtgaggatgatgggagtggcaaagctgaccctgcttcgcgtgcttaatcttccacacaatagtatcgggtgtgtagagggccttaaagaattggtccacctggaatggctcaatctggccggtaataatctgaaggcgatggagcagataaattcatgcaccgccctccagcacctcgacttgtccgataataatattagccagattggcgatctatccaagctggtctccctaaagactttacttctgcacggcaacatcattacatccctccgtatggctccggcctatctgcctcgttcactcgctatcctgagtttggcagagaatgagatcagggacctgaatgagatcagcttcctggccagcctaactgaactggagcagctgtctataatgaacaacccctgcgtgatggcaacaccctctataccgggctttgattacaggccttacatagtctcatggtgtcttaacctgcgagtgctggacgggtatgtgatcagtcagaaagaatccttgaaagctgaatggctgtacagtcagggaaaaggacgggcataccgccccggccagcacattcagctggtgcaataccttgccacagtgtgtcccctcacgagtacactgggcttgcaaacagccgaggacgcgaagctggagaaaatactatcgaaacagcggttccaccagcggcagctgatgaaccagagtcagaacgaggagctgtcaccactggtgcccgtggagacaagagcctctcttattcctgagcattcatcacctgtccaggattgccagatctcccaggagagcgaaccggtgattcaggtgaatagctgggtaggaatcaactcaaacgacgaccagttgttcgcagtgaagaataatttcccagcctctgtgcatacaacaaggtactctcggaacgacctgcacctagaggacatccagaccgatgaggataaactgaactgctctctgttaagctctgagagtacctttatgcctgttgcttccgggttgtctccactgtctcctacagtggaactgcgcctgcagggtattaacctgggtctggaagatgatggagtggcggacgagagcgtcaagggactggagtctcaagtgctggacaaagaagaggagcagccactgtgggctgcaaacgagaacagcgtgcagatgatgagatcagaaattaacaccgaggtcaatgagaaggcgggactcctcccgtgcccagagcctactataatcagcgctatcctgaaggacgataaccactcattgacctttttcccagaaagcacggaacagaagcagtctgatatcaagaagcctgagaatacacagcctgagaataaggaaaccatttcacaagctacctctgaaaagctgcccatgatattaacacagcggtccgtcgcactgggccaagacaaagtagcgctgcagaagctgaatgacgcagccactaagctgcaggcctgctggcgcggcttctacgcccgcaattataacccacaggccaaagacgtaagatatgagataaggctgaggaggatgcaggagcatattgtttgcttaacggatgagattcgcagacttcgcaaagagcgtgacgaggagcgtatcaagaaatttgtgcaggaggaggcctttcggttcctgtggaatcaagttcggtccctgcaggtgtggcagcaaaccgttgaccagcgtctgagttcctggcatacggatgtcccccctatcagcagtacacttgtgccgtcaaagcacccgctcttcacacagtcccaggagtcctcctgtgatcagaatgccgattggttcatagcatccgatgtggccccccaggagaagagcctacccgaattccctgacagcgggttccattccagtttgacagaacaagttcactctctgcagcactctctcgatttcgagaaatccagcactgagggcagcgagagcagtattatgggtaacagcatcgacaccgtgcggtacggcaaagagtctgacctgggcgatgtttctgaggagcacggagagtggaataaggagagctccaacaacgagcaggacaactctcttctggagcaatatttaacttcagtgcagcagttagaagacgccgacgaacgcaccaactttgataccgagacacgcgacagtaaactgcatatcgcttgcttccctgtacaacttgacaccctgagcgatggagcgagcgttgacgagtcccacggaatttcaccaccattgcagggagagatatcccaaacacaggagaattctaaattaaatgcagaggtgcagggacagcagccagagtgtgacagcaccttccagctgctgcacgtgggcgtgactgtctag

SEQ ID NO: 14763 - DNA, 1275 bp, synthetic construct
  source 1..1275: mol_type = other DNA; note = Synthetic coding sequence
atgagcgttgggtgtcctgagcccgaacccccacgatctctgacttgctgtggccccggtacagccccaggccctggagcaggcgttccactgctcacggaagatatgcaggcccttactttgaggacacttgccgcaagcgatgtgaccaaacattacgagctcgtaagagagctcggcaagggtacatacggaaaagtcgatctggtcgtgtataaaggtaccggcacgaagatggcactgaagtttgtaaataagtcgaaaactaagctcaagaacttcctaagagaggtctccatcactaactccctgtcatcgtctccatttatcattaaagtcttcgacgttgttttcgaaaccgaggattgctatgtcttcgcccaggaatacgcgcccgcaggagatttgtttgacataatcccgccccaggtgggtctccccgaggacacggttaaaaggtgtgtccaacaactgggtcttgccttggactttatgcacggccgccaactggttcatagggatattaagcccgagaatgttctgctttttgatcgagagtgtagaagagtaaagctggcagactttgggatgacaagaagagtgggatgtcgggtcaagcgcgtctcgggaacaatcccatacacggcacccgaagtgtgtcaggccggccgtgcagatggcctggcagtagatactggggtcgacgtctgggccttcggggttcttatattctgtgtactcactgggaatttcccttgggaggccgcaagcggggcggatgcctttttcgaggaatttgtccgctggcagagaggcaggttacccggcctgccaagccagtggcgtcggtttacggaaccggccttgaggatgttccaacggctgctggcactcgaacccgaacgtagaggtcccgctaaggaagtgtttagattcctgaagcatgaactgacatccgaactacgacggcggcctagccaccgcgcccgcaaaccacccggtgacaggccgcccgccgcaggacctctcagactcgaggcacccggccctctgaaacgcaccgtcttaacagaaagcggatcagggtcccggcctgcaccccccgcagtaggtagtgtgcctctgcccgtgcctgttccggtcccagtgccagtgcctgtgccggttccagaacccgggttggcccctcaaggtccacctgggagaacggacgggcgggcagacaaatctaaaggacaggtcgtactcgctacagctatcgagatttgcgtgtag

SEQ ID NO: 14764 - DNA, 1632 bp, synthetic construct
  source 1..1632: mol_type = other DNA; note = Synthetic coding sequence
atggccactaggcgactgggggtgggcgagactctgggcgcactcaatgccgctctgggaccaggcggacctgtgtggataaaggagacgaggacgcgccaccttcgctctcgcgacttcctggcaccccaccgagccttgcaagcaaggttcgatgacggccaggttcctgagcacctcctccacgcactagcatgcctgcaaggaccgggtgttgcgcccgtcctgcgctgtgctcccacgcctgcgggcctatccctacagctgcagcgaagtgctgtgtttgaaagagttttgtctgccgtggctgcttacgccacaccggccagcccagcttccctggggcagagagtactgctccattgtcccgcacttcgatcctctccctgtgccctaagactttcacagctgcgaaccgtgctggtggctgaccatctggcacgggcgctccgggcgcatggtgtctgtgttagactggtgcccgcggttcgtgacccccacatgctgacattcctccagcaacttcgcgtggactggccagccgccagcgaaagagcatcctcacacactctcagatcacatgcattggaagaactaacaagcgccaacgatggacggacactcagccctggcattctcggacgactgtgcctcaaggaactggtggaagagcagggccggacagcaggatacgatccgaatcttgacaactgccttgtcaccgaggatttgttgtctgttcttgcggaacttcaggaagccctatggcactggcctgaagatagccatccaggtctcgccggagctagcgacaccggaactggcggctgtctggttgtgcacgttgtcagctgcgaagaagagtttcagcagcagaagttggatttgctgtggcagaaactggtggacaaagccccccttagacagaagcacttaatttgtggaccagtgaaagtggcgggcgccccgggtacacttatgacagccccagaatactatgagtttcgccatactcaggtgtgtaaggcctctgccctgaaacatggaggcgatctggcccaagaccctgcgtggacagagatcttcggtgtcttatcggtcgccactattaagtttgaaatgctttctactgccccacagtctcagctgtttctcgctctcgccgatagcagtattagcacaaaaggaaccaagagtggtacttttgtgatgtataattgcgcccgcctcgctactctgttcgaaagctacaagtgttccatggaacagggactctaccctactttccctccagtctcaagtctcgattttagtctcctgcacgacgaaggcgaatggctcctgctgttcaattccatcctcccgttcccggacctactcagccgcaccgccgtgttggattgtacagctccgggcctgcacatcgccgtgagaacggaaatgatatgcaagttccttgtgcagctgtcgatggacttcagctcttactataacagagttcacatcctcggtgaacctcggccacatctgtttgggcagatgttcgtgagactgcagttattgcgagcagtgcgtgaagtcctgcacacaggtctggccatgctgggattgcccccattaagccacatctag

SEQ ID NO: 14765 - DNA, 1353 bp, synthetic construct
  source 1..1353: mol_type = other DNA; note = Synthetic coding sequence
atgggaaagagttttgccaactttatgtgcaaaaaagacttccaccctgcgtcaaagtccaacatcaagaaagtctggatggccgaacagaaaatatcctatgacaagaagaagcaggaggagcttatgcagcagtacctaaaggagcaggagtcctatgacaatagactgttgatgggagacgaaagggtaaagaatggcctgaattttatgtacgaggctccacccggcgccaaaaaagaaaacaaggagaaagaggaaacagaaggtgagacagagtacaaattcgagtggcaaaaaggtgcgccccgggagaaatatgcaaaggacgacatgaacatcagggatcagccgttcggcatccaggtccgtaacgtacggtgcattaagtgtcataaatggggtcacgttaataccgatcgagagtgccccctttttggattgtccggtattaacgcctccagtgtcccaacggacggcagtggacccagcatgcacccctccgaactgatcgccgaaatgaggaactctggattcgccctgaagcggaacgtgctcggaaggaacctcacggccaatgatccctcacaggagtacgtagccagtgagggggaagaagaccctgaagtcgagttcctcaaaagcctgacaacaaagcagaagcaaaaattactgaggaagctggatcgcctggaaaagaaaaagaaaaagaaggatcggaaaaagaagaaattccaaaagtctcgtagcaagcataagaaacataagtcatcctcctcaagcagctcaagcagctctagctcatccagcaccgaaacctcagaatcctcctcagaatccgaatctaataacaaagagaagaagattcagcggaagaaaaggaagaaaaacaagtgttccggtcacaacaactcagactccgaagagaaggacaagagtaagaagagaaaattgcacgaggaactgagtagctctcaccacaaccgggagaaagccaaggaaaagccccgtttcttgaaacacgagtcttcacgagaagacagtaaatggagccattcggactcagacaaaaaaagtagaactcataaacactcacccgagaagagggggtctgagaggaaggagggctcttcccggtctcacggccgggaggagagaagtaggcgcagtagaagccgctctccgggcagttacaagcagagagaaacacgaaagcgcgcccaacgcaacccaggggaagagcagagtaggaggaatgattctaggagtcacggaaccgatctgtatcgcggagaaaagatgtacagggagcacccggggggaacccacacaaaggtcacgcagcgcgaatag

SEQ ID NO: 14766 - DNA, 1152 bp, synthetic construct
  source 1..1152: mol_type = other DNA; note = Synthetic coding sequence
atgagtcccgaagtagcccttaatcgcatcagccccatgctttctcccttcatctcttccgtggtccgcaacggaaaggtggggctcgacgccacaaactgcctaaggataactgaccttaagtcaggttgcaccagcctgacccctggacccaattgtgaccgcttcaaacttcatatcccttacgcaggcgaaacgctcaaatgggatattatctttaatgcacaatatcccgaactcccgccggacttcatctttggggaagatgctgagttcctgccagacccttctgccttgcagaatttggccagctggaacccatctaaccccgaatgcttgctgctggtggtgaaggaactggtgcaacagtaccaccagtttcagtgctcacggctccgagaatcttctcggcttatgttcgagtaccagaccctgttggaagaaccccaatacggagaaaacatggagatctacgcaggaaagaagaacaactggaccggagagtttagtgccaggtttctgctgaagctgccggttgacttctcgaatattccgacatatctgctgaaggacgtaaatgaggatccgggggaggacgtagccttacttagcgtatcctttgaggacactgaggcgactcaggtttaccccaagctttacctttcccccagaattgagcacgctctgggggggagctctgcactacatatcccagcttttcctgggggcggctgcctcatcgactacgtaccccaggtgtgccacctcctgaccaacaaggtgcaatatgtgatccagggatatcacaaacgaagagaatacatcgcggccttcctgtcccattttggcacaggggttgtggagtacgatgccgaggggttcacgaaactgaccctgctcttaatgtggaaggacttttgtttcctcgtgcatattgacctccctctgtttttccctagggatcagccgactcttacttttcaatccgtgtaccacttcaccaattctgggcaactgtattctcaggctcaaaagaactacccctactccccccgctgggatggcaatgagatggctaagcgtgccaaggcttactttaagaccttcgtcccacagttccaggaagcagcatttgctaatgggaaactctag

SEQ ID NO: 14767 - DNA, 675 bp, synthetic construct
  source 1..675: mol_type = other DNA; note = Synthetic coding sequence
atgcccaacagatgcggcatcatacacgtacgtggccccatgccccctaataggatctctcacggtgaagtccttgaatggcagaagacattcgaagagaagctcacacctctgttatctgtgcgggagtctttaagcgaagaagaggctcaaaaaatgggccgcaaggatcccgagcaggaagtcgagaagtttgtcacctccaacacccaagagctcggtaaggacaaatggctctgccccctctcaggtaagaaatttaagggaccagaatttgtgcgaaagcacatctttaataagcatgctgagaaaattgaagaagtcaagaaggaagttgcgttctttaataacttcctgacggatgctaaacggcctgctttgccagagattaagcccgctcagcctcccggacccgcgcagattttgccgcctgggctgacacctggcctcccttatccacaccaaacaccacaaggattgatgccatacgggcaaccacgcccacctatagggttatggtcttggtgttgccccccctgttccccccaggaggcactgcatacacctatgccccggatggtgctggtggagggcacgatgatgccatccgaggccagagaagtgatcctggggaacctcgctacaggctggttcgtcgaaacccagggcccctag

SEQ ID NO: 14768 - DNA, 4806 bp, synthetic construct
  source 1..4806: mol_type = other DNA; note = Synthetic coding sequence
atggaggccgggagcgttgttcgggctatttttgatttttgtcctagcgtcagcgaggaacttccgcttttcgtcggggacataatcgaggtgttagctgttgtagatgagttctggcttctgggcaaaaaggaagacgtcacaggtcagtttccttctagctttgttgaaattgtaaccattccgagtctgaaggaaggcgaaagactctttgtttgtatctgcgagttcacaagccaggagctcgataatttgcccctgcataggggggaccttgtaattctggatggcatcccgaccgccggttggctccagggaagatcttgctggggagcgcgcgggttcttcccttcctcgtgcgtcagagagctatgtttgtccagccagagcaggcagtggcactcacagtccgctctgtttcagattcccgagtattccatggggcaggcaagagccctgatgggcctttccgcccaactcgatgaggagctcgactttcgggaaggcgatgtcatcacaattattggggtgcccgagcccggctggttcgaaggggagctggagggccggagaggaatttttccagaaggttttgtggagctcctgggccccttgcgtactgtagacgaatccgtctcctcaggcaatcaggatgattgcatcgtgaacggtgaggtggacaccccagtgggagaggaggaaattgggcccgacgaagatgaagaagagcctggtacatacggtgtggccctgtatcgatttcaggcgctggagcccaacgagctggatttcgaggtcggtgacaagatccggatcctcgcgacactggaggacgggtggttggaagggtccctgaaaggcagaacgggcatctttccttaccgcttcgtgaaactttgtcccgacaccagagtggaggagacaatggctcttccgcaggagggctccctggcgcggatcccagaaacaagtctggattgtctcgagaataccctgggagtcgaggaacagcgccacgaaacttccgatcacgaagccgaagagcctgactgtatcatttctgaggcacctacaagccccctcggccacctcaccagcgagtacgacaccgatcgcaacagctaccaggacgaagacactgcgggtggaccaccaagatctcctggcgtggagtgggaaatgcctctggccaccgactctccgacaagtgacccaaccgaagtggttaacgggattagcagccagccgcaggttccctttcatcccaatcttcagaaatctcagtattattcaaccgttggcggttcgcacccacacagcgagcaatatccggacctacttccgcttgaagcacgaacaagagactatgcaagcctccctcctaaaagaatgtatagccaacttaaaaccctacagaagccagtgctcccactctatagaggctcatccgtctcagcttcacgggtggttaagccccgccagagcagcccccagctgcataacctcgcctcatataccaaaaagcaccatacgagctcagtttatagcatatcggagcggctcgaaatgaagcccggtccacaggctcagggactagtcatggaggctgccacgcattcccaaggggacggcagcacagacctggatagcaagttaactcaacagctcatcgaatttgagaaatccctggccggtcctggaacggagccagataaaatattgcgacacttcagcataatggactttaattccgagaaggatatcgtgcgcggctcatctaagctaatcacagagcaagaattgcccgagcgacgcaaagcgctgcggccgccacctcccaggccgtgcacaccggtatctacctcaccacacctccttgtcgaccagaacctgaaaccggcccccccactggtagtgagaccctcgaggccagctccacttccgcccagcgcccagcagcgcacaaacgctgtgtcccctaaactgctttctcgccatagacccacatgtgagacacttgagaaggagggaccgggacacatgggtcgaagcctggaccaaactagtccctgccctcttgtgctggtgaggattgaggagatggaaagggacctcgacatgtacagccgggctcaggaggaactgaatctgatgttagaagagaagcaagatgaatcgtcaagggccgagacactggaggacctgaaattctgcgagtccaatattgagtctctgaacatggagcttcagcagctgcgggagatgaccctgctcagttcccagtcaagctcccttgtcgcccccagcgggagtgtgtccgccgagaaccccgagcagcgaatgcttgagaaacgggcaaaggtgattgaggagctattgcagacggaacgggactatatccgcgatcttgaaatgtgcatcgagcgcatcatggtacctatgcagcaggctcaggtgccaaacatagacttcgaagggctgtttggcaatatgcagatggtgatcaaggtgtccaagcaacttttagccgcccttgagatcagcgatgctgtgggtccagtctttctcggtcacagggatgagctggaaggcacctacaaaatctactgtcagaatcatgacgaggcaatcgcgctcctggagatttacgagaaggatgagaagattcagaaacaccttcaggactcgctcgcagaccttaaatccctgtacaacgagtggggttgcacaaactacattaatctgggaagcttcctcatcaaacccgtgcagagagtgatgagataccccctgcttctcatggagctactgaacagtacccccgagtcacaccccgacaaggtccccttgactaatgcggtgttagcagtgaaggaaattaacgtcaatattaacgagtacaagcggcggaaagaccttgggaaaaattcgattatcgcggagaaggagtatgcccatgcagaggagtcagccttcctgacttactcgttagtcctaaaatatcgcaaaggtgatgaggatagcctgatggagaagatatctaagctgaatatacactccattattaaaaaatcgaatagagtcagctcccacttgaaacacctgacgggcttcgcgcctcaaattaaggacgaagtatttgaggagaccgaaaagaactttagaatgcaggagaggctaataaagtcatttatccgggacctgtcactgtacctgcagcacatcagggagtcagcatgcgtgaaagtagtggccgccgtgtctatgtgggatgtgtgcatggaaagaggacacagagacctggagcaattcgagcgggtccaccggtatatttccgaccagctgttcaccaatttcaaagaacggaccgagcgtttggtcattagtccgctgaaccagcttctttctatgtttacgggcccgcataaactggtgcagaaacgctttgataaactcctcgacttctacaactgcacggaaagagcagaaaaactgaaggacaaaaagacactggaagaactccagtcagcccggaacaactacgaggcattgaatgcacagctgcttgatgagctgcctaagttccaccagtacgctcaaggtctgttcactaattgcgtgcatggctatgccgaagctcattgtgactttgttcaccaggctctggagcagttgaagcccttgctcagtttgttaaaagtagcggggcgggagggcaacctaattgctatttttcatgaagaacattccagggtcttgcaacagctacaggtattcacattcttccctgagagcctgcccgcaactaagaagcctttcgaaagaaagacaattgatcgacaatctgctagaaaacctctgcttggactgccttcatatatgttgcagtccgaggaacttagagcctcactgctcgctagataccccccggagaagctttttcaggccgaacgtaactttaatgccgcacaggacttagacgtgtcattgctggaaggcgacctggtaggcgtgatcaagaagaaagaccccatgggctcgcagaatcgctggctcatagacaacggggtaaccaaagggttcgtatactccagctttctaaaaccctataaccccagacggagtcacagcgatgccagcgtcggaagccactccagtacagagagcgaacatggttctagctcccctcggtttccccggcaaaattccgggagcactcttacctttaatcccagttcaatggcggtgtcatttacttccggatcctgtcagaaacagcctcaggacgcgagtccaccaccaaaggagtgcgatcaaggcactctgtcagcctcattaaacccttccaactcagagagtagtccttcacgctgtcccagcgacccagatagcacatcccagccaaggtccggagattccgccgatgttgcgagggacgttaaacagccaacagccactccgcgctcatataggaactttagacaccccgaaattgtgggctattctgtgcccgggcgcaatgggcagagccaggatctggtcaagggctgcgcccgcaccgcacaggccccagaagatcgcagcaccgagccagacgggtcagaagcagaggggaaccaggtttactttgccgtctatactttcaaggctaggaaccccaatgagttgtctgtctccgccaatcagaaactcaagatcctggaattcaaggatgttacaggtaacaccgagtggtggctcgctgaagtaaatggtaaaaaagggtacgtacccagcaattacattcgaaaaaccgagtacacctag

SEQ ID NO: 14769 - DNA, 1596 bp, synthetic construct
  source 1..1596: mol_type = other DNA; note = Synthetic coding sequence
atgaagtgccattatgaagcgctgggggtgaggagagatgccagtgaagaagaactaaagaaagcctatcgtaaattagcactgaaatggcacccagacaaaaatttagacaatgctgccgaggctgccgagcagtttaagctcatccaagccgcctatgatgtcctgtccgacccacaggagcgtgcatggtatgataaccaccgggaggccctgttgaaaggggggtttgacggtgaataccaagatgatagcctggatctactacgctatttcactgttacttgttacagcggctatggcgacgatgagaagggcttctatactgtgtacaggaatgtgtttgagatgatcgccaaggaggaattggaatctgtattggaggaagaggtggatgacttccctactttcggcgatagccagagtgactatgacacagtcgtacacccattctatgcatattggcagtcgttctgcacacaaaaaaatttcgcttggaaagaagaatacgatactcgtcaggccagtaatcgctgggagaaaagagctatggaaaaggagaacaaaaaaattcgcgataaagctcgcaaagagaaaaatgaactcgttagacaactggtggctttcattcgcaaacgcgataagcgtgtccaggcccacagaaaactagtggaagaacaaaatgccgaaaaggcaaggaaggctgaagaaatgaggaggcagcaaaaactgaagcaggccaaattggtggagcagtaccgggagcagtcatggatgacaatggcgaatctggaaaaggagctccaggagatggaagctagatacgagaaggagtttggggacggtagtgatgaaaatgagatggaagagcacgagctgaaggacgaagaggatggaaaggattctgacgaagctgaagacgctgaactgtatgatgatctatactgtcctgcgtgtgataagtccttcaaaaccgaaaaagcaatgaagaatcacgaaaagtctaaaaagcatagagaaatggtggcactactgaagcaacagttggaggaggaagaggaaaatttcagcagaccccagatagatgaaaaccctctcgacgacaattccgaagaggaaatggaggacgccccaaaacagaagctcagcaagaagcagaaaaaaaaaaagcagaaacctgctcagaattacgatgacaactttaatgtgaatggacccggggaaggggtcaaggtggaccccgaggatacaaacctcaaccaggattcagccaaagaactcgaagacagcccacaggagaacgtgagcgtaacagagataatcaagccctgcgatgatcctaagtcagaggccaagtcagtgcccaaaccaaagggaaagaagacaaaagacatgaagaagcccgtccgggtgccagccgagccccagacgatgtcagtacttatttcttgcacgacttgccacagtgagtttccttcgagaaacaaactgtttgaccacctaaaagccaccggacacgcacgggcgccttcctcctcatcgctcaacagcgccacaagctctcagagcaaaaaagaaaaacgcaaaaatcgatag

SEQ ID NO: 14770 - DNA, 1353 bp, synthetic construct
  source 1..1353: mol_type = other DNA; note = Synthetic coding sequence
atggtagtccaggccgctgtggcaccaaatcggagccaaagacttctgttaaaaatcccttacggcagtcttcgccgacgtagcgtggaacgtatgacggagggacgaaggtgtcaggtccacctgttggatgatcgtaagctcgagttgttggtacagcccaagttgctcgctaaggagctgttggatttggtcgcaagccattttaacttaaaggaaaaagagtatttcggcattgcattcactgatgaaaccggacacctgaattggttacaactggaccgccgggtgcttgaacatgatttcccaaaaaagagcgggccagtggtcctgtacttttgtgttaggttttacattgagtcaatcagttacctgaaagacaatgcaaccatcgagctcttttttctcaacgccaagagctgtatatacaaagaactgatcgacgttgactctgaggtggtgttcgagctggctagctacattctccaggaggcaaaaggcgatttctcttccaacgaggtcgtgcggagtgacttaaaaaagctgcccgccctgcctacccaagctcttaaagaacacccatccctggcatattgcgaggatcgggttattgagcactataagaaattgaatggccaaacaagagggcaggcaatcgtcaactacatgtccatcgtggagtccctgcccacttacggtgtccattattacgcagtgaaggacaagcagggcattccatggtggctcggactctcatataaaggtatctttcaatatgactaccacgacaaggttaagccacgcaagatctttcaatggcgccagttggagaacctgtactttcgggaaaaaaagttctctgttgaagtacatgatcccaggcgtgctagcgtgactaggcgcacatttggtcattcaggaatcgctgttcatacgtggtatgcctgcccggctctgatcaagtccatctgggctatggcaatatcgcaacatcagttctacctggaccggaagcagagcaaatctaagatacatgctgcacgatctctgtcagagatcgcaatagatctgaccgaaacagggacgctgaaaactagtaagctagccaatatgggctccaagggaaaaattattagtggatccagcggcagcctcctgtcttccggacggcagcggcccgcagggggcaccccccctgagcacggttgggacccaaggggggatcccggcagatggggggagttgcaactggggcggctgcagggaaagttgctacagtcctggctctgcttccctgatcaggggtgggatcccaacgctaatcttaggaagctcctgccaggcatcaaatag

SEQ ID NO: 14771 - DNA, 1020 bp, synthetic construct
  source 1..1020: mol_type = other DNA; note = Synthetic coding sequence
atggagggcgagcctcctcctgttgaagagcgccgtcgcctgcaggaggaactgaatgagtttgtggaaagcggatgcagaacgctggaggaagtaacagcttcccttggatgggatctggatagtctggaccccggggaggaagaggcagccgaggatgaggttgttatctgtccgtacgatagtaatcatcatatgcctaagagcagcctcgccaagcatatggcctcctgcaggttgcgcaagatggggtacaccaaagaagaagaggacgaaatgtataacccagagtttttctacgagaacgtgaagattccatccatcacgctcaacaaagacagtcagttccagatcattaagcaggcgaggacagctgtcggcaaggattcagattgttacaaccagcgcatttactccagtttaccggtggaagtccctctgaaccacaaacggtttgtttgcgacttaacccaagctgaccggctcgctctgtacgacttcgtggtcgaggaaactaaaaaaaagcggagcgactcacagataatcgagaacgatagtgatctcttcgtggatctggccgccaagatcaaccaagataacagtcgtaaatcgccaaaaagttacctggagatcctagccgaagtgcgcgattataaacggcggcggcagtcataccgcgctaagaatgtgcacattacaaagaaaagttataccgaggtgattagggatgtgattaatgtgcatatggaggaactgtctaaccactggcaggaagagcaggagaaagccgaggacgacgcggagaaaaatgaggaacgtcgaagcgcctcagttgatagcagacaatccggcggatcttacttggacgcagaatgctccaggcatagaagagacaggtctaggtctccccacaagagaaaacggaacaaagacaaggataagaactgtgagtcccggcgccggaaggagcgggacggggagcgccaccatagtcacaagcgcaggaagcagaagatttag

SEQ ID NO: 14772 - DNA, 6810 bp, synthetic construct
  source 1..6810: mol_type = other DNA; note = Synthetic coding sequence
atggctgagcctagcagcgctagacgccctgtccccttgatagaaagtgagctgtattttctgattgcccgatatctgtcggccgggccctgtcgacgggcagctcaagtgttggtacaagagctcgaacagtaccagctgctgccaaagcgtctcgattgggaggggaacgagcacaaccggtcctacgaggaactcgtcctatctaataagcatgtggcccctgatcacctgctgcagatctgtcagaggattggacctatgttagataaggagatccctcccagtatctctagggtcacgtctttactcggcgcaggcaggcagtccctgttacgaacagctaaggactgtcgacacactgtgtggaaagggtcagctttcgccgctcttcacagaggccgccctcctgagatgcctgttaattatggatcacctccgaatctggtggaaatacacaggggaaagcaactcactggatgttcgacgttctctaccgctttccctggcactatgtatcagcatattaaaatgcacaggcgcatcctcggtcatctatctgctgtatattgcgttgcgttcgaccggactggccatcggatttttactggaagcgatgactgcctggttaaaatatggtccacacataacggccggcttctttccacgctgcggggccatagtgccgagatctccgatatggccgtaaattatgagaacactatgatcgccgcaggttcctgcgacaaaattatcagggtgtggtgtctcagaacatgtgcacctgtggctgttctgcagggtcacacgggcagcatcacttccctgcagtttagtccaatggctaaaggtagtcagaggtatatggtttccaccggcgctgacgggacggtgtgtttttggcaatgggatctggagtccctgaagtttagtcctcgaccactcaaatttaccgagaaacctagacctggggtgcagatgttgtgtagctccttttccgtcggaggaatgtttctagcaaccggatcaactgaccacgtgataaggatgtatttcctagggtttgaggctccagaaaagatcgccgaactggagagccacactgacaaagtggactcaatccagttttgcaacaatggcgaccggttcctgtctggctcccgggatgggaccgccaggatatggcgctttgagcagctggaatggaggagtattttgcttgatatggctacacggatttctggagacctgtcaagtgaagaggagcggttcatgaagcctaaagtgactatgattgcgtggaaccagaacgactcgattgttgtgactgcagtcaatgatcatgtgcttaaggtgtggaactcttacactggccagctgttgcacaatttaatggggcacgccgatgaagtatttgttttggagacccatccctttgattcacgcatcatgttgagcgcaggtcacgacggttctatatttatctgggacattacaaagggcaccaagatgaaacattactttaatatgatcgaaggccaaggccatggcgcggtgtttgactgtaaattttcccaagacggacaacacttcgcttgtactgattcccacggtcacctcctcatcttcgggttcggctgctcaaagccatatgagaaaattcctgaccaaatgttttttcataccgactatcgaccgttaatccgagattctaacaactacgtactggatgagcagacccagcaggctcctcacctgatgccccctccctttctggtagatgttgatgggaacccccaccccacaaaatatcagagactggtgccaggaagggagaacagcgccgatgagcacctcattccccagctgggctatgtggccacatcagacggtgaagtgatagaacaaattatcagtttgcaaacgaatgataacgatgagcggagcccagagtcttctattcttgacggcatgattaggcaattgcaacaacagcaagatcagcggatgggtgccgaccaggatactattccccgaggactcagcaatggcgaagaaactccaagaagggggtttcgccggctttcactggacattcagtccccacccaacatcggacttcgccggtctggtcaggtcgaaggcgtaaggcagatgcaccagaacgctccacgtagccaaatagccacagaacgggatttacaagcatggaagcgccgggtggtagtgcctgaagtgcctcttggtatttttcgtaaactcgaggactttagactcgagaaaggtgaggaggagagaaacctttatatcatcgggagaaaacgcaagacacttcaactttcccacaagagcgatagcgtggtcctcgtttctcaatccagacaaaggacttgtcggaggaaataccccaactatgggcgacgaaatcggtcttggagagagttgtcatccggaaacgagtcctcctccagcgtgagacatgaaacctcatgtgaccaaagtgaagggagcggctcaagcgaagaggatgaatggcgcagcgaccgaaaaagcgagagttacagtgagtcgtccagcgatagctcctcccgatatagtgattggacggcagacgcaggcattaatttgcagccgcctctaagaacctcatgccggcgacggattacacgcttttgcagttcatcggaggatgagatctctacagagaacctgtcaccccccaagagaagacggaaacggaaaaaagaaaacaaacccaagaaagagaatctgcgaaggatgacccccgctgagctcgcgaacatggaacacctttatgagtttcacccaccagtttggattacagatactaccctcagaaagtcacccttcgtgccacagatgggtgatgaggtcatttattttagacaggggcatgaagcctacatcgaggcggtgcgccggaacaacatctatgaactgaaccctaacaaagaaccctggagaaaaatggacctcagagaccaggaactcgtgaagatcgtcggaatcagatatgaagtgggcccacctaccctgtgctgtctgaaactggcgttcattgatccagccactggtaagctgatggacaaaagtttttctatcagataccacgatatgccagatgtcatcgattttctggtgctgcggcaattctacgacgaggcccgccagcgaaattggcagagttgcgatcgcttccgtagtatcatagacgacgcctggtggttcggcaccgtgctgtcccaggagccatatcagccccagtaccctgattcccatttccagtgctatattgtcagatgggacaacacagaaatcgagaaacttagcccatgggacatggaaccgattcctgataatgtggatccgccggaagaattgggcgcaagtatctccgttacgaccgacgagctggaaaagctcctgtacaaaccacaggccggcgaatggggacagaagtctagagacgaagagtgtgaccgtataatttctgggattgatcagctgctgaatcttgacatcgctgccgccttcgcgggtcccgtggacttgtgcacttacccaaagtattgtaccgtggtcgcctatccaacggacctgtacacgatcagaatgagactcgtaaatagattctacaggcgactgtctgcacttgtatgggaggttaggtacattgaacataacgcccgaactttcaacgaacccgagtctgtcattgcccgaagcgctaagaagatcaccgatcagctattaaagtttattaaaaatcagcactgtacgaatattagtgagctcagtaacacaagtgaaaacgacgagcagaatgcagaggatctggacgactctgacctaccaaagacaagcagcggtcgtaggcgagttcacgatggcaaaaaaagtatccgcgctacaaattatgttgagagcaattggaaaaaacagtgtaaagagttggtgaacttgatcttccagtgcgaggattccgagccattccgccagcccgttgacctggttgagtatcccgactacagagatattattgacactccaatggactttggaactgtgcgagagaccttggatgcagggaattacgattcccccttagagttttgtaaggacatccgacttatatttagcaatgctaaagcgtataccccaaacaaacgatcaaaaatctacagcatgactctacgcctttctgccctgtttgaggagaagatgaagaagatttcttccgatttcaagataggccagaagttcaacgaaaagttgcgtcgtagccaaagattcaagcagagacagaactgcaaaggagacagtcagcctaataagtctatcagaaacctgaagcctaagcgcttgaagtctcagactaaaattatcccagagctggtcgggagccccacgcagtcgacctcttccagaactgcctacctcggcacacataagacatccgctggaatctcttccggtgtgaccagcggcgatagttctgattcagctgagtctagtgaacgtagaaaacggaatagacctatcactaacggaagcactctaagcgaatctgaagtggaggacagccttgctacttcactgagttctagtgcatcctctagtagtgaggaaagcaaggaaagttccagggctagagagagctcatctcgctcaggtctgtcgcggtcaagcaatctgagggtcaccaggacccgcgccgcgcagcggaagaccgggcccgtctctttagcaaatggatgcggccgaaaggcaaccagaaagcgtgtttatctatctgacagcgataataatagtctagagaccggcgagattctaaaagcgagagccgggaacaacagaaaagtccttagaaaatgtgccgccgtggcagccaacaaaattaaactaatgtcagatgtggaggagaacagcagcagtgagagtgtgtgttccggccgcaaattgccacatcggaatgcgtcagccgtggctcgaaagaaactgctccataattctgaggacgagcagtcgctcaagagtgaaatcgaggaagaggaattgaaagacgagaaccagctgctgcccgtgtcttcatcccatactgcacagagcaacgtggatgaatcggagaatagggattccgaaagcgagtcggatttgagggtggcccgcaaaaactggcacgccaacggttacaaaagtcatacgcctgcccccagtaagacaaagtttctcaaaatcgaatcctccgaggaggattccaagagccacgatagcgatcatgcctgcaatagaacagcaggcccttctacgtccgttcagaaactcaaggcagaatccataagcgaggaggccgactccgagcctggtcgatcaggcggccgcaagtataatacctttcacaaaaatgccagcttcttcaagaaaacaaagattctcagtgatagtgaggattctgaaagcgaggaacaggatcgcgaggatggcaagtgtcataagatggagatgaatcctataagcggcaatctgaactgtgaccccattgctatgagccagtgctcatcagaccacggatgtgaaacggaccttgactccgacgatgataaaatcgaaaaacccaataacttcatgaaagattctgcttctcaagacaacggattgtcacggaagatttcccgtaaacgagtgtgcagctccgatagcgactccagtctgcaggtggttaagaaaagttctaaggctcgcacagggcttctgcggattactagaagatgcgccgccaccgccgcgaacaagattaaactgatgagcgacgtcgaagacgtcagcctggagaatgtacacaccagaagcaagaacggtcgcaaaaaaccccttcacctcgcatgcactacagccaagaaaaagctaagtgactgcgaagggagtgtccactgtgaagtcccttctgagcagtacgcatgcgagggcaaacctcctgatccagattctgagggctcaacaaaggtgcttagtcaggcactgaacggggatagtgatagtgaagacatgctgaacagtgaacataaacatcgacacactaacattcacaagattgatgcacccagcaaacggaagtcctcttccgtgacgagctcaggggaggactccaagagccatatccccggctccgagacagaccgcactttcagtagcgagagcaccctagctcagaaagccactgctgaaaataacttcgaggtggaattgaattacggcttacgaagatggaacggtagacgcctgcgcacttacggtaaggccccttttagcaaaacaaaggttatccatgattcccaggagacggcagagaaggaagtcaagagaaaaaggagtcacccagaactggaaaacgtcaagatcagtgagaccacagggaatagtaagttcagaccagacactagctccaagagcagcgacctgggatctgtgacggagagcgacatcgactgtacagacaataccaagacgaagagaaggaaaacaaaaggtaaagccaaagtcgtaagaaaaggaaagacgtttacggcgaacatcagcaagaccgtgcgccggcagaggcagtctaaacggccccgtctgagtgtcgatgataatgactgggaggatctcgactatgctaagagtaaaagggtgctgagacggtctaaaatcaagacgcgtaaccaaggcaggaggactgtaaggtatcatgatggagacgatgaccgctcgcttgagaacgtgctggacttcaatggttgcacgctttag

SEQ ID NO: 14773 - DNA, 492 bp, synthetic construct
  source 1..492: mol_type = other DNA; note = Synthetic coding sequence
atgacagctccttcttgcgctttcccggtccagtttcgacagccctcagtgtccggactgagccaaatcacaaaatcactgtatatcagcaacggtgtggcagccaacaataaacttatgctgtcttcaaaccagatcactatggtgatcaatgtgtctgtggaagtggtaaacactttatatgaggatatccaatacatgcaggtgcctgtggctgatagcccaaatagccgtctgtgcgacttctttgacccaatcgccgatcacattcactctgttgagatgaaacaaggtcgcaccctgttgcactgtgcagcgggggtgtccaggagcgccgcgctgtgcttagcgtacctcatgaaatatcatgctatgtcccttctcgacgcccatacctggactaagagctgtcggcctattattagacccaatagtggcttttgggaacagttgatacactatgaattccagctttttgggaaaaatacttag

SEQ ID NO: 14774 - DNA, 756 bp, synthetic construct
  source 1..756: mol_type = other DNA; note = Synthetic coding sequence
atgatctccaccacttctaaagagaccaagaaagacacaaagctatactgtatctgtaaaaccccgtatgatgaaagcaaattttatatcggctgcgacctgtgcaccaattggtatcatggtgaatgcgtcgggatcactgaaaaggaagccaaaaaaatggacgtttacatatgcaacgattgcaaacgagcacaggaagggtcgagtgaagagttgtattgtatctgcaggactccctacgatgagagtcagttctatattggctgtgatagatgtcagaactggtatcacggccgctgcgtgggcatccttcaatccgaagctgaactgatcgatgaatatgtctgtcctcaatgccaaagcacagaggatgccatgaccgtgctgacgccactaaccgaaaaagattatgagggactgaagagagtgttgcgatcgctgcaggcacacaagatggcgtggccatttttggagcccgtggatcctaatgatgcccccgattactacggagtgatcaaggaacccatggacctggcgaccatggaggagagagtccagcgaaggtactatgagaagctaacggagttcgtcgcggacatgactaaaatcttcgataactgccggtattacaaccctagtgattcccccttttaccagtgcgcagaggtcctcgaaagcttcttcgtacaaaagttgaagggtttcaaagcctcccgttctcacaataacaaactgcagagtactgcctcctag

SEQ ID NO: 14775 - DNA, 501 bp, synthetic construct
  source 1..501: mol_type = other DNA; note = Synthetic coding sequence
atgtattcattgaaccaggaaatcaaagcattttctagaaacaacctgaggaagcagtgtacccgcgtgactacactaaccggaaaaaaaattatcgaaacatggaaggatgcaaggattcacgtcgtcgaagaggtggaaccttcctctggggggggatgcggctacgtgcaggacttgagctccgatctccaggtaggcgtgatcaagccctggcttctcctaggatctcaggatgctgcacacgatctggacaccctgaaaaagaataaggatggggtagtgctcgtacattgtaacgctggggtttcaagagccgccgccatcgttatcggtttcctgatgaactccgaacagacatcttttacaagcgctttttccctggttaagaacgcaaggccctccatctgtcctaactcggggtttatggagcagctgcggacttatcaggaggggaaggagtcaaataagtgcgaccgcatccaggagaattcctcttag

SEQ ID NO: 14776 - DNA, 963 bp, synthetic construct
  source 1..963: mol_type = other DNA; note = Synthetic coding sequence
atgtctaagtccgcctcccctaaggaaccagaacagctgagaaaactgttcattggtggacttagtttcgagaccaccgacgaatctctccggagccatttcgagcagtgggggactctgactgattgtgtcgttatgagagaccctaacacaaagcgcagcagaggtttcggctttgtcacatatgcgactgtagaggaggtagatgcagcaatgaatacgaccccacataaggtagacggccgggtggttgagcccaagcgcgcagttagccgggaagacagtcaaaggcctggcgcacatctcacagtgaagaagatattcgtaggcggcattaaggaggatacagaagagcaccacttgagagattacttcgagcaatacggtaaaattgaggtgatcgagatcatgactgaccgcggatcaggtaagaaaagaggtttcgcgttcgtcacattcgacgaccacgatagtgttgataaaattgtgatccagaagtaccatacagtgaaaggacataactgcgaggtccgcaaggcgctaccaaagcaagagatggcttctgccagcagctctcagagagggaggagaggaagtggcaattttggcggaggacgcggcgatggctttggtgggaatgataacttcgggagaggagggaattttagtggtcgcggaggcttcggaggaagttgcggcggggggggctatgggggaagtggcgacggttacaatggctttggcaacgacggatcaaacttcggcggcggcgggagctataacgattttggtaactataataatcagagcagcaacttcggacctatgaaggggggtaactttggcggacgctctagcggcccgtacggtgggggtggccagtactttgcaaagcctcagaaccaagggggctatggtgtgagcagtagttcctcttcgtatgggagtggccgccgcttttag

SEQ ID NO: 14777 - DNA, 357 bp, synthetic construct
  source 1..357: mol_type = other DNA; note = Synthetic coding sequence
atgtcgttactgaacaagccaaaatcagagatgacacccgaagaactccaaaagagagaggaagaagagttcaacacgggccctctgtccgtgctgacgcagtccgttaagaacaacacccaggtacttatcaactgccggaacaacaaaaaactcttggggcgagtaaaggccttcgatcgccattgtaacatggtgttggagaacgtgaaagagatgtggacggaggttccaaaaagcgggaaaggtaaaaagaagagcaaaccagttaataaggatcgctacatcagcaagatgttcctacggggggacagcgtgattgtggtgctaagaaatcccctgatcgccgggaagtag

SEQ ID NO: 14778 - DNA, 1179 bp, synthetic construct
  source 1..1179: mol_type = other DNA; note = Synthetic coding sequence
atgaaggacaccctagggcaggcccagcagcgtgtagcagaactggagcctttgaaggaacaactgcgcggagctcaggaacttgctgcatcatctcagcagaaggctacactgctgggggaggagctagcctccgcagcggcagctcgcgatagaacaattgctgagctgcaccggagcagactggaggtggcagaagtaaatggtcggctcgcagagttagggctgcacctgaaagaagagaagtgccagtggagcaaggagcgagccggcttgttgcaatccgtggaagccgagaaggacaagattcttaagctgagtgccgaaattctcaggctcgaaaaagcagtccaggaagagaggacacagaatcaagtgttcaaaacagagttggcacgagagaaggattcatctttagtgcagttaagcgagagtaaaagggagttgacagaactgcgctccgcactgagggtgctacaaaaggagaaagagcagcttcaggaggaaaagcaggaactgctcgaatatatgaggaagctggaggcacgcctggaaaaagtggccgacgagaaatggaatgaggacgcaaccaccgaggatgaagaggctgcagtgggcctctcctgtcccgcagccttaaccgacagcgaggacgaatcacccgaagacatgaggttacctccatacggcctctgcgaacgtggcgacccaggttcctccccagcagggccacgtgaggccagccccttagtggtgatttcacagcctgctcctatttctccacacctgagcggccctgctgaagattcttcatctgatagcgaggccgaggacgaaaagtccgtattaatggccgccgtccagtctggaggtgaggaggcgaatctactgttgccggagcttggatccgccttctatgacatggctagtactatattctgccgggcccaaattgctctgctacccctttcccccgccagcacaccatcccccacgacatctgggttcacagtgggcaccctgagcgagaccagcaccggcggtcccgccacccccacttggaaagaatgtcctatatgcaaagaacgtttccctgccgaatctgataaggacgctttagaagaccacatggacggccacttcttttttagcactcaggatcctttcacatttgagtag

SEQ ID NO: 14779 - DNA, 600 bp, synthetic construct
  source 1..600: mol_type = other DNA; note = Synthetic coding sequence
atgacaccgctggctccctgggacccaaagtatgaggctaaagccggacctcggccggtgtggggcgccaattgctcctccggtgctagcttcagtggcagaacactgtgccacccctcgttttggcctctctatgaggccgctagcggcaggggcctgaggcccgttgcacctgctactggtcattggaacggccaacaggctccacccgacgccggctttcccgtggtgtgctgtgaagacgtgtttctcagcgatcctttgctgccacgcgggcagcgggtccctctttatttaagcaaggccccacagcagatgatgggatccctcaaattgttgcctcctcccccaattatgagtgctcgcgtgctgccaagaccatcaccctcgagaggtccttccacggcctggttatctggaccagaactgatcgccctgactgggctcttgcagatgagtcagggagagccacggcctagctcaagtgccgtgggtccccctgatcacacatccgatccaccttccccatgcggttctcccagctcttcgcagggggccgacctgtctcttcctcagactcccgacacacactgcccttag

SEQ ID NO: 14780 - DNA, 1155 bp, synthetic construct
  source 1..1155: mol_type = other DNA; note = Synthetic coding sequence
atggaaggactggggcgcagctgtctgtggctacggcgtgaactgtcgcccccccgcccacgcttactgctgctggattgcagatctcgggaactatacgagtcagctcggatcggtggagcgctgtctgtggccctgcccgcgctcctgcttcggcggctcaggagagggtctctatcggtccgagcccttctgccaggacctcctctccagcctccgcccccagcccctgtccttctttacgatcagggaggaggccgccgcagacgcggagaggcagaggctgaggccgaggagtgggaggctgagtctgtgcttgggactctacttcagaaactccgggaagagggctatctagcttactatctgcaaggcggattttccaggttccaggcggaatgccctcatctctgcgaaacaagcctggcaggacgggcggggtcttcgatggcccctgttcccgggcctgttccggtcgtcggcctaggatccctctgcctcggctcggactgcagcgacgccgagtctgaggcagatcgcgactccatgagctgtgggttggactctgagggagcgaccccaccaccagtgggcctaagagcatcctttccagttcagatcctgcccaatctctatttgggcagcgcccgggattcagctaatctcgagtccctggccaaactcggtattaggtacatcctcaatgtgactccaaatcttcctaacttctttgagaaaaacggtgacttccattacaaacagatccctatcagcgaccactggtcacagaacctctcaaggttctttcctgaggcaatcgaatttattgatgaggcattgagtcagaactgcggagtgctagttcactgccttgctggggtgagtcgctccgtgacagttacagtggcttatctgatgcagaagttgcacctctccctgaatgacgcttatgatcttgtgaaacgtaagaagagcaatatctccccgaacttcaattttatgggccagctgttagattttgaacgctcactgagattggaagaacggcattctcaagagcagggatccggcggacaggcttcagccgctagcaatcctccctcgttcttcaccacccccactagtgacggagccttcgagctggcacctacctag

SEQ ID NO: 14781 - DNA, 2208 bp, synthetic construct
  source 1..2208: mol_type = other DNA; note = Synthetic coding sequence
atggcggagcccctgctgcggaaaacatttagccggctacggggcagggagaagctgccacggaagaagtccgacgcaaaggagcgcggacacccagcacagagacctgaaccatctccgcctgaaccggaaccccaggcacctgagggctcccaggcgggggctgagggcccctcatcccctgaagccagccgatcgcccgctagaggagcatatctccagagccttgaaccctctagccggagatgggttctgggtggggccaagcccgctgaggatacatcactcggacccggcgtgcctggaactggagaacccgcaggagagatctggtataaccctatacccgaagaagacccgcgaccacctgctccagaaccccccggaccccagcctggatcagcggagtctgaagggttagccccccagggggccgcacccgcctctcccccgaccaaggcttcccggacaaaatcgcctggtcccgcgcgtcgtctgtcgatcaagatgaaaaaactcccagagttgagaagacgtctcagcctgcgaggtccacgcgccggccgggagcgcgagagggcggctccggctggttccgttatcagtcgttaccatctagatagctccgtgggaggcccgggtccggccgccggacccgggggtaccagatcgcctagagcaggctacttgtctgatggagactcgccagaaagacctgccggaccaccttcccccacaagtttccgtccttacgaagtcggtccagccgctagggccccacccgcggctctgtggggccgtctgagccttcacctgtacggccttggcgggttgcggccagcgccaggagccacccctcgtgacctgtgttgcctgctgcaggtggacggggaagctcgggcaagaacaggaccgctccgcggagggcctgacttccttagattggaccatacctttcacctcgaactggaggccgcacgtcttttaagagcgctggtgctcgcatgggacccaggggtcagacgccacaggccttgcgctcaaggaaccgtgctgcttcctaccgtctttaggggctgtcaggctcaacagctggctgtgcggctggagccacagggactcctgtacgccaagttgaccctctcagagcaacaggaggccccagccaccgcagagccaagagtcttcggcttacctctgcctctgcttgtggaaagggagcgacctcccggacaagtgcctcttatcatacagaaatgtgtgggtcagatagaacgccgaggcttgagagtcgtgggattgtacagactgtgcggatcggccgcagtgaagaaggaattgcgcgacgcgttcgagagggacagcgcagccgtctgtctctccgaggacttgtatcccgacatcaatgtgataaccggaatcttgaaggactatctgagagagcttccaactcccctcataacccagcccctctataaggtggtgctggaggccatggccagggatcccccaaatcgggtgcctcctacgactgagggaactagaggcctgctgagttgtctacctgacgtagagcgcgccacgcttactctcctgctggaccatctaagacttgtgtctagttttcacgcatacaaccgtatgacgccccagaatttggcagtatgttttggacctgtcctactgcccgccaggcaggccccaacccggcccagagccaggagcagcggccccggattagcttccgcagtggatttcaaacatcatatagaagttctacactatctgctccagagctggccggatcctaggttgcctcgtcagtctccggatgtcgcaccctatctgaggccgaagaggcagccccctctgcatctgccgctggctgatcccgaggtggtgacccggccaagggggaggggtggtccagaatcgccaccttccaatcgatatgccggcgactggtctgtgtgcgggagagacttcctgccatgtggtcgagacttcctgagtggcccagattacgatcatgtcactggatcggatagcgaggatgaggacgaagaagtgggggagccaagggtgacaggggattttgaggatgatttcgacgcgcctttcaaccctcacctgaacctgaaggactttgatgccctgattctagacctggagagagaattgagtaaacagataaatgtttgcctgtag

SEQ ID NO: 14782 - DNA, 660 bp, synthetic construct
  source 1..660: mol_type = other DNA; note = Synthetic coding sequence
atgccgcgcggcaggaaatccaggaggcgcaggaacgcccgggcagcagaggagaacagaaacaacagaaagatccaggcctctgaagcgagcgagaccccaatggcagcctcagttgtggctagcacccccgaggacgatctgtctggacccgaggaagacccttcaacccccgaagaggcgagcaccacacccgaggaggcaagcagtaccgcgcaggcccagaaacccagtgttcctcgttcgaattttcaggggaccaaaaaaagcctcctgatgagcatccttgcccttatcttcattatgggcaactccgctaaggaggcgctcgtctggaaagtgctcgggaagctggggatgcaacctgggcggcagcactccatatttggagatccaaagaagattgtcaccgaggagttcgtgcgccgcggttatctgatctataagccggtgcctcggagctctcctgtcgaatatgagttcttctggggaccgcgggcccatgtcgaaagctctaaactgaaagtgatgcacttcgtggctagggtacggaacagatgtagcaaagattggccttgtaactacgactgggatagcgatgatgatgcagaagtggaagcaatcctgaattctggagcaagaggttactccgctccctag

SEQ ID NO: 14783 - DNA, 702 bp, synthetic construct
  source 1..702: mol_type = other DNA; note = Synthetic coding sequence
atgaatttaaatttcacttcacctctgcaccccgcttcctctcagcgccctacaagcttcttcatcgaagatatcctgttacacaagccaaagcccttgcgggaggtcgctccagatcatttcgcctcctccctcgcatccagggtgcccttacttgattacggatatcctttgatgcccacccccacacttttggctcctcatgcccatcaccctctccataaaggagaccatcaccacccttattttttgactacgagcggaatgccagtgcctgctctgtttccccatcctcagcacgccgagttgcctggcaagcactgtaggcgtcgaaaagctaggactgtgttctccgactcacagctaagtgggctggagaagcggtttgagatccaaagatacctgtctactcctgagagagtcgagctggctactgcactgtccctgagcgagacacaggtgaaaacgtggttccagaataggcgcatgaaacataagaagcaactccgtaagtcccaggatgaacccaaggcaccagatggccccgagagtcccgaaggcagtcctaggggctcagaagccgccactgccgctgaggcaagactgtccctaccagcgggtccctttgttttgacagagcctgaagatgaggtggacatcggagacgagggggagctgggatccggtccacatgttttatag

SEQ ID NO: 14784 - DNA, 873 bp, synthetic construct
  source 1..873: mol_type = other DNA; note = Synthetic coding sequence
atggaactccctgcagtaggtgagcatgtttttgctgtcgaaagtatcgagaaaaagaggatcagaaagggaagagtagaatacctggtcaagtggcggggctggtcaccaaagtataacacatgggaacctgaagaaaacatactggatccaaggcttttaattgccttccagaacagggagaggcaggagcagctcatgggctatagaaagcggggcccgaagccaaagcccctggtcgttcaggttcccaccttcgctaggcggagcaatgtcctgacgggtctgcaggatagcagcacggataatcgtgccaagttggacctgggcgcgcaggggaaaggccaagggcaccaatatgaactgaattcgaaaaaacatcaccatcacgccgttggcttgaatctgagccacgttcggaagagatgcctctccgaaacccacggcgagagagagccatgtaaaaagcggctcaccgcaaggtcaatttctactcctacatgcctcggcggctcacccgcagccgagcggccagcggacctgcccccagctgccgcactgcctcaacccgaggttatcttgctcgatagtgacctggacgaaccaatcgatctcaggtgtgtgaaaactcggtcagaggctggcgagccgccaagcagtctccaagtcaaacccgagactcctgcgtcagccgctgtcgccgtggccgcggccgccgctccaacgaccaccgccgaaaagccacctgccgaggcacaagatgaacctgccgagagcctgagcgaatttaagccatttttcggaaatatcattataaccgatgtcacagcaaactgcttgaccgtgacattcaaagaatatgtgactgtctag

SEQ ID NO: 14785 - DNA, 744 bp, synthetic construct
  source 1..744: mol_type = other DNA; note = Synthetic coding sequence
atgacagaggatagtcaacggaacttccgaagcgtgtattatgaaaaggtagggttcaggggtgtggaggagaagaagtcccttgaaatattgttaaaggatgatcgtcttgataccgaaaaactatgtactttcagtcagaggtttcctctcccatccatgtacagggccctggtgtggaaggtgctattaggcatccttcctccacaccacgagtcccatgccaaggtaatgatgtaccggaaagaacagtatttggatgtattgcatgctcttaaggtcgttaggtttgtgagcgacgccacaccccaggcggaggtctacctgcgtatgtaccaactcgaatctggcaaattaccccgttcgcctagttttccgttgccaaaggctttcgaacagtacctgaatttggaggacgggcgcctcttgactcatctccgcatgtgtagcgctgcacccaagttgccttacgatctttggttcaaaaggtgttttgcgggatgtctgccagagagttcactgcagcgagtctgggataaagtggtgtctgggtcttgcaagatcctcgtgttcgttgctgtcgagatcttactgacattcaagattaaggtgatggccttgaattccgccgagaagattacgaagtttctggagaatattcctcaagacagctcagatgcgatcgtcagcaaagctatcgatctgtggcacaagcactgcgggacccctgtgcacagctcttag

SEQ ID NO: 14786 - DNA, 546 bp, synthetic construct
  source 1..546: mol_type = other DNA; note = Synthetic coding sequence
atggtatcctcgtgctgcggcagcgtctcatcagagcagtcttgtgggttagagaactgttgccggccatcttgctgccagacaacttgctgtcgcacaacatgttgccgcccaagttgctgtaaaccccagtgttgccagagcgtgtgttatcagccaacatgttgtcatccgtcttgctgtattagtagctgttgcagaccatattgttgtgaatctagctgttgtcgaccttgttgttgtcagacgacatgctgcagaacgacatgctgtcggacaacctgctgttgcccttcgtgttgtgtgagttcttgttgccggcctcagtgttgtcaatcggtctgctgtcagcccacatgctgtaggccatcatgctgcatttcttcctgctgccacccctcttgctgcgagtctagttgctgtaggccttgctgttgcgtgcgaccagtgtgtggacgtgtctcctgccacacaacatgttacaggccaacatgcgtcataagcacatgccccagacctctgtgctgtgcaagctcttgctgttag

SEQ ID NO: 14787 - DNA, 1086 bp, synthetic construct
  source 1..1086: mol_type = other DNA; note = Synthetic coding sequence
atggcattgaacgtcgcgccagtacgcgacactaagtggctgacactggaggtctgtagacagttccagagagggacatgctctaggtcagacgaagaatgtaagttcgcacaccccccaaaaagctgtcaagtagagaatgggagggtaattgcgtgtttcgactccctgaagggccgttgttcaagggagaactgtaaatatttacaccctcccacacacttaaaaactcagttggagatcaacggccggaataacctgattcaacaaaagacggccgctgccatgttggcccagcaaatgcaattcatgtttcccggcactcccctccatccagtacccacctttcccgtgggccccgcaattggaaccaatacagcaatcagttttgcaccttatctggcacccgtaacaccgggcgtgggcctcgtccctaccgagatcctgcccacaactcctgtgatagtgccaggtagccctcccgtcaccgtgccaggaagtaccgccacccagaagctcctgaggaccgacaaattagaagtgtgtagggagttccagcggggtaattgtgctcggggcgagaccgactgcagatttgcccatcctgctgatagcactatgattgacactagtgataacactgtgaccgtgtgcatggactacatcaaaggaaggtgtatgagggaaaagtgcaagtacttccatcccccagcccatctgcaggcaaagattaaggcagcacagcatcaggcaaaccaggccgctgtggccgctcaggccgctgccgccgcagccacggtcatggcctttccacccggcgcccttcaccccctgccaaaacggcaggctctcgagaagagcaacggaactagtgccgtgtttaatcccagcgtgctgcattaccagcaggcgctgacctctgctcaactgcagcagcacgcagccttcattccaacggataattctgagatcatatcccgcaacggcatggagtgccaagaatctgcgctccgcatcacaaaacattgttactgcacatactatcctgtttcctcctctatcgaactcccccaaactgcatgttag

SEQ ID NO: 14788 - DNA, 1017 bp, synthetic construct
  source 1..1017: mol_type = other DNA; note = Synthetic coding sequence
atgttgaaaaacaagggacacagtagcaagaaagataacttggcagtcaatgcagtggctctgcaggaccacatcttgcatgaccttcagttgaggaacctttctgtagcagatcactcaaagacacaagtccaaaaaaaggaaaacaaaagcctgaaacgggataccaaggctattatagacactggcctgaaaaaaacaacccagtgcccaaaactcgaggacagtgagaaggaatacgttctagatcctaagcctccgcctctcacattagcacagaagcttggccttatcggtccgcctccaccgcccctgagcagcgatgagtgggagaaggtgaagcagcgctcgttgctgcagggggatagtgtgcagccatgtccaatatgcaaagaggagttcgaactaaggcctcaagttttctctatccggggtaaaaaccaataccagactcgcgttatccatgacggggcacgcctatttcgaattaagtgtgtaactcgcatccaggcatactggcgcgggtgtgtagttaggaagtggtacaggaacctcaggaagacagttcctccaaccgacgctaagctgcgaaaaaagttctttgagaaaaagttcacagagatatctcacagaattctatgcagttataacactaacatcgaggagctattcgcagaaattgatcaatgtctggccattaacaggtcggtcctgcagcagctggaggagaaatgtggccatgagatcacagaggaggagtgggaaaagattcaggttcaagccctgcgccgggagacccacgagtgttccatatgccttgcaccacttagtgctgctggtgggcagagagtgggcgccggccgccgatcaagagagatggccttacttagttgcagtcatgtgttccaccacgcttgccttctggcactggaagaattcagcgttggcgatcgcccgcccttccatgcatgtcccctatgtaggtcctgttaccaaaagaaaatcttggagtgctag

SEQ ID NO: 14789 - DNA, 1098 bp, synthetic construct
  source 1..1098: mol_type = other DNA; note = Synthetic coding sequence
atggcagcagccgcagcgggcactgcgacttcacagcgattcttccagtctttttccgacgccttaattgacgaggacccccaggctgccttagaggagctcacgaaggctctggaacagaaaccggatgatgcacagtactattgtcagcgtgcttattgtcacattctgctgggtaactactgcgtagccgtcgcagacgctaaaaaaagcctggagctcaaccctaacaattctaccgcaatgctccgcaagggaatctgtgagtatcacgagaaaaactatgctgctgctctggaaaccttcacagaaggacagaagctcgacatagagacagggttccacagggtcggacaagcagggctgcagcttttaaccagcagtgacccgcccgcccttgactcccaatcagctggcatcactggtgcagacgctaacttctcagtgtggataaagcgatgccaggaagcacaaaacggtagtgagagcgaggtctggacccaccagtcgaagattaagtacgactggtaccaaactgaatcacaggtcgtgataaccctgatgatcaagaatgtgcagaaaaatgacgtgaatgtggagttttccgaaaaggagttgtcagcgctggtgaaacttccgagtggagaagattacaacctgaagttggagctgctccacccgattatccctgagcaaagcacttttaaagtgctcagcacgaagattgagattaaactaaaaaagcctgaggccgtgcgttgggagaaactagagggccaaggcgatgtgccaacacctaagcagttcgtcgctgatgtcaaaaatctttacccttcatcttctccttatactcgtaattgggataaacttgtgggtgaaatcaaggaggaggaaaaaaatgagaagcttgagggagatgccgcccttaatcgtctgttccagcagatttattcagacggttctgacgaagtgaaaagagcgatgaataaaagttttatggagtcaggcggtaccgtgctcagtactaattggtctgatgttggcaagaggaaggtggagatcaaccctcccgacgatatggagtggaaaaagtattag

SEQ ID NO: 14790 - DNA, 1389 bp, synthetic construct
  source 1..1389: mol_type = other DNA; note = Synthetic coding sequence
atggataaggacagtcaaggcctgctggacagtagtctgatggcctcaggaacagccagccgctctgaggacgaggaatctctggctggccagaaacgggcctccagtcaggcactcggtaccatacctaaaaggcgatcttcctcccgctttatcaagcgcaagaaattcgacgacgagctcgtggagagctctctcgcgaaatcttctactcgcgccaagggagcaagtggggttgaacctggcagatgcagcgggtctgaacccagcagtagtgaaaagaaaaaagtgtctaaggcaccgagcactccagtgcctccatcccccgcacctgcccccgggctgacaaagcgtgtgaagaaatcaaaacagcctttgcaggttactaaagacttgggccggtggaaacctgctgacgacttattgctgattaacgccgtgctgcagaccaacgacttaaccagtgtgcacctcggtgtgaaattttcatgcaggtttaccctccgtgaagttcaggaacgctggtatgcattgctttacgacccagtcatctctaaactcgcatgccaagccatgcggcagctgcaccccgaagccatagccgctattcagagcaaagctttattctcaaaggctgaggagcagctgctctctaaggtcggctctacctcccagcctacactggaaaccttccaggatttactccaccgccacccggatgccttctatttggctcggactgcgaaggcgttgcaggcacactggcagctaatgaagcagtactatttgcttgaggaccagactgtccaacctctccccaaaggtgaccaagtgctaaacttctccgatgcggaggacctcattgatgactccaagctgaaggatatgagggacgaagtgttagaacatgagctgatggtcgcggacaggagacaaaaacgagaaattcgtcaactagagcaggagctgcataaatggcaagttctggtagatagtataacggggatgagtagccctgacttcgacaatcagactttggcagttcttcggggccggatggtccgctacctgatgagatcacgcgagatcacactagggcgcgccactaaagacaaccagattgatgtagacctgagtctcgaaggccctgcatggaaaatatcccgcaagcaaggagtgattaagctcaagaataacggtgactttttcatcgctaacgagggccgcaggcctatttatatcgatggcagacctgtcctgtgcgggagtaaatggcggttgtccaataactctgtggtagagatagcctccctcagattcgtcttcttgattaaccaggatctaatcgcactcatcagagctgaggctgctaaaatcaccccccaatag

SEQ ID NO: 14791 - DNA, 963 bp, synthetic construct
  source 1..963: mol_type = other DNA; note = Synthetic coding sequence
atgtccgttggcttcattggcgccggccagctggcatacgctctggccagaggttttaccgcggccgggatcttgtctgcgcataaaattatagcctcatcccctgaaatgaacctccccaccgtctccgctctgcgaaagatgggcgtcaaccttacccgcagcaacaaagaaaccgtgaaacattccgacgttctgtttctggcagtcaagcctcacattatacctttcatcctggacgagatcggcgccgatgtgcaggccagacatatcgtggtgagctgtgcagccggcgtgacgataagcagcgtggagaagaagctcatggcctttcaacctgcccccaaagttatacgttgtatgaccaacacaccagtggtagttcaagagggtgcaaccgtatatgcaacgggcacccatgccctcgttgaagatggccagttgctggaacagctgatgagttcagttggattttgcacggaggtggaagaagacctgatcgatgcggtgacaggactttctggctccggaccagcctacgcctttatggccttggacgcgctggctgatggcggcgtgaagatgggcctacctaggaggcttgctatccaactgggagcccaggctctcctgggggcagctaaaatgttactcgacagcgagcaacacccttgtcagcttaaagataacgtctgttctcccggcggggcaaccatccacgccttgcactttctagagtctggaggttttaggtcattgttgatcaatgcagtggaggcgtcttgcattagaactcgtgagctccagtccatggccgaccaggagaagattagccccgccgccctcaaaaagacactcctggacagagtcaagctggaatctcctaccgtttcaactttaaccccatctagccctggcaaacttctaacaaggtctctcgccctgggagggaagaaggattag

SEQ ID NO: 14792 - DNA, 2370 bp, synthetic construct
  source 1..2370: mol_type = other DNA; note = Synthetic coding sequence
atggaggacggcccgtcaaacaatgcaagttgttttaggagactaaccgagtgttttctgagcccaagcctgaccgacgaaaaggtaaaggcatatctgagcctgcaccctcaagtgctggatgagttcgtatccgaatcagtctctgcagaaactgtggaaaagtggttgaagcgaaagaataataagagcgaggatgagtctgctccaaaggaagtgagtcggtatcaagatacgaacatgcagggggtggtatacgagttgaattcttatatcgagcagcgcctggacaccgggggcgataaccaactcctgctgtatgaattaagttccataattaagattgctacaaaagcagacggcttcgccctctactttctgggagagtgcaacaatagcttgtgtatcttcaccccgccagggattaaggagggaaaacctagactcataccagccggtccaattactcagggtacaacagtttccgcttatgtggcaaagtcccggaagaccctgctggtagaggacatcctgggcgacgagagatttcccaggggcaccgggcttgagagcggaacccggatccagtctgtcctctgcctgcccattgtcaccgcgataggagatcttatcggtatattggaactctatcggcactggggcaaggaggccttttgcctctctcaccaggaggtagccacagccaacctggcctgggcttcagtagccatccaccaggttcaggtctgccgagggttggctaaacagactgaactgaacgacttccttctggatgtgtcaaaaacatactttgacaatatcgttgccatcgactcactgcttgagcacatcatgatttacgctaagaatcttgtgaacgctgacagatgcgctttgtttcaggtagatcataaaaacaaggagctatactccgacttattcgatatcggtgaagaaaaagagggaaaacccgtgttcaaaaaaacaaaagaaatccgtttcagcatcgagaaaggaatagccgggcaagtagccaggaccggcgaggttctcaacattcccgacgcctacgccgacccaagatttaaccgggaggtcgacctctataccggttataccacgcgcaacatcctgtgtatgcctatagtgtcaagaggatccgttattggcgttgtccaaatggttaataagatctctgggtcagccttttccaagaccgatgaaaataacttcaagatgttcgcagtattctgcgctctggctttgcactgcgcaaatatgtaccaccgcatccggcactctgagtgcatttatagggtgacgatggaaaagctctcctaccacagcatctgcacctcagaggaatggcaaggccttatgcagttcacgttgcccgtgaggttatgcaaggaaatcgagctgttccatttcgatatcggcccgtttgaaaacatgtggcctggcatcttcgtctatatggtgcatagatcatgcggcacctcatgctttgaattagaaaagttatgtcgattcatcatgtcggttaagaagaattacagacgggtgccatatcataactggaagcatgctgtcactgtcgcccattgcatgtacgccatcttgcaaaataatcacaccctgttcactgatctcgaacgtaaaggtctgctcatcgcatgtctgtgccacgacttggaccatcggggcttttccaattcatacctgcaaaagtttgaccatcccctggccgccctctattcaacgtcaaccatggaacagcatcacttctctcaaacagtaagcattctacagctggaggggcataatatcttctccacgctctcttcttctgaatacgaacaagtgctcgagattattaggaaggcaatcattgcaaccgaccttgccctgtacttcggtaatcgcaaacagctggaggagatgtaccagactggatcactcaatctgaacaatcagtctcatcgggaccgggtgatcgggctcatgatgactgcctgtgatttgtgctcagtgactaaactctggccagtaacaaagctaacggccaatgacatttacgctgagttttgggccgagggcgacgaaatgaagaagctgggcatccagcccattccgatgatggatagggacaagaaggatgaggtgccacagggccagctcggcttctacaatgctgtggccatcccctgttataccactctcactcagatcctgccgcccacagagcccctcctgaaggcatgcagggacaacctgagccaatgggagaaggtgataaggggagaggagaccgctacatggatttcatcccctagcgtggcacagaaagcagctgcttccgaggattag

SEQ ID NO: 14793 - DNA, 645 bp, synthetic construct
  source 1..645: mol_type = other DNA; note = Synthetic coding sequence
atggacgattccgagaccggctttaatctgaaagtggtgctggtgtcattcaaacagtgtcttgatgagaaggaggaggtgcttcttgatccgtatattgcgagttggaagggacttgttagattcctcaattcgttagggaccattttctccttcatcagcaaggatgtggtaagtaagctccgaattatggaaaggttgagaggcggaccccagtccgaacattatcggtctcttcaggcaatggtcgcacatgaactgagcaaccgcctggttgatcttgaacgcaggtcccatcacccagaatcaggctgccgcaccgtgctgcgcctccatcgggcgctgcattggttgcagttgtttctcgaaggcctaagaacttcccccgaagatgcccggacttctgctctatgcgcagactcttacaacgcctctctcgcggcataccacccatgggtggtccgaagggcagtaacggtggcgttttgtactctgccaacacgagaagtgtttctggaagcaatgaatgtcggaccccctgagcaggccgtacagatgctgggggaggctctgccgttcatccagcgagtgtacaacgtcagtcagaaattgtacgctgaacactctctcctggatctaccatag

SEQ ID NO: 14794 - DNA, 4293 bp, synthetic construct
  source 1..4293: mol_type = other DNA; note = Synthetic coding sequence
atgacgagcgcggctgagatcaagaagccccccgtggctccgaagccgaagttcgtcgtggccaataataaacctgcacctcctccaattgcacctaaaccggatatcgtgattagctctgtcccgcagtctacaaaaaaaatgaaaccagccattgcacctaagcctaaggtcctcaaaacctctccagtgagggagatcggccaatccccgtccagaaaaattatgctgaacctcgaggggcacaaacaggagttagccgaaagcacagataacttcaattgcaagtacgagggtaaccagtctaatgactacatttcgccaatgtgttcttgctcgagcgagtgtattcacaaactcgggcacagggagaacctgtgcgtgaaacagctggttctggaacctttagaaatgaatgaaaatctcgagaattctaagatcgatgagactctgacaatcaaaactcggagtaagtgcgatctctacggcgaaaaagccaagaaccagggtggggtggtgctgaaagcgagcgttctggaggaagaactgaaggacgccctgatccatcagatgcctccgttcatttccgcccagaagcataggcctactgacagccccgagatgaacggcggatgcaattccaacggacaatttcgcattgagttcgcggatctgtccccttccccctctagtttcgagaaggtgcctgatcatcacagctgccatttgcagctcccatctgatgagtgcgaacattttgaaacatgtcaggatgatagcgaaaaaagcaacaactgtttccagagctcagagctagaagccctcgagaacggaaagaggtcaaccctcatttcctctgatggcgtgtccaagaagtccgaggtcaaggatcttggcccgctggagatccaccttgtcccatacacccctaagttcccaactcccaagcctagaaagacaaggacagcaaggttgcttaggcagaaatgcgtggacactccatccgagtctaccgaggagccgggcaactccgatagttccagtagctgccttaccgaaaattcattaaagataaataaaatctcagttttgcatcagaacgtcctctgcaaacaggaacaggtcgataagatgaagctcggtaataagtctgagctcaacatggaatccaattcagacgcacaggatctggtcaactcccagaaagcgatgtgcaacgagacaacttcgttcgaaaagatggcaccctcttttgacaaggactcaaatttgagtagcgattcaactactgtggatggaagctctatgtctctcgcggtcgacgagggtacaggtttcattaggtgcaccgtgtcgatgtccctgccgaagcagttgaagctcacctgcaacgagcacctacaatctggcaggaatctgggggtgtccgcaccacagatgcaaaaggaaagtgtcattaaggaagagaatagcctgagaattgtgcccaagaaaccgcagcgacatagcctgcccgccacaggagttctgaaaaaggccgcttctgaggagcttctggagaaaagcagctacccttcttcggaagagaagtcttcagaaaagtctctggaacgcaatcacctgcaacacctgtgtgcccagaaccgcggcgtgagctctagtttcgatatgcctaagagagcctccgaaaagcctgtctggaagttgccacacccaattctgcctttcagcggtaatccggaatttcttaagagtgttacagtctcaagtaattccgagccatctaccgcactgaccaagccccgggctaagagcctatctgctatggacgtggaaaagtgcaccaaaccatgtaaagactccacaaagaagaatagcttcaagaagttgctcagcatgaagctgtcaatttgttttatgaagtcagacttccagaagttttggtccaagtcaagccagctgggagataccactacaggccacctctccagcggcgaacaaaaaggaatcgagagtgattggcaggggttgttggttggtgaggaaaagagatccaagcccatcaaagcgtatagcactgagaactatagcctggagtcccagaaaaagagaaaaaagagcaggggccagacatccgcagccaatgggctgcgggccgagtctctggatgatcagatgctgtcacgggagagcagcagtcaggcaccctataagtctgttacctccttgtgcgctcccgaatacgaaaacataaggcattatgaagagatcccggagtatgaaaacctgcccttcattatggcgattagaaagacccaggagttagagtggcaaaacagctcttccatggaggatgcagacgcgaatgtgtatgaggttgaagaaccgtatgaggcacctgacggccaattacagctggggcctaggcatcagcacagttccagtggcgccagccaggaagaacagaatgatctgggcctgggtgacctgcccagcgatgaagaagaaattattaatagctccgacgaggatgacgtgtcctccgaaagttccaagggggaacctgacccgcttgaggacaagcaggatgaagacaatggcatgaagtctaaggtccatcatatcgcaaaagaaataatgtcatctgaaaaggtcttcgtagatgtccttaagctactccacattgatttcagggacgcagtggcccacgcctccagacagctaggcaagcccgtgatcgaagataggatcctgaaccagattctctattatttaccccagctttacgaactcaaccgcgatctcttaaaagaattagaggaaagaatgttacactggaccgagcagcagaggattgccgatatattcgtcaagaagggtccctatctgaagatgtacagcacctacatcaaggaattcgataagaacatcgccttgctagatgagcagtgtaagaaaaatccggggttcgctgcagtggtgagagaattcgaaatgtccccaaggtgcgccaacctcgccttaaaacactacttactgaaacccgtgcagagaatcccacagtacaggttactgctgacagactatctgaaaaatctaattgaggacgctggcgactacagagatacgcaagacgcgctcgcagtagtgatcgaagttgctaatcacgccaatgataccatgaaacagggcgataacttccaaaaactcatgcaaatacagtacagtctaaacggacaccacgaaatcgtgcagccaggccgtgtttttcttaaggaaggcattttgatgaagctttcccgcaaggttatgcagcctcggatgttctttctctttaatgacgctctgctgtacaccacacccgtccaaagtggaatgtataagctgaataacatgttgagtctcgctggtatgaaagtgcgcaaacctacacaggaagcttatcagaacgagctgaagatcgaatctgtagagcgctcattcatcttaagtgctagcagcgcaactgagcgcgacgagtggctggaagccatctcccgcgccatcgaagaatacgccaaaaaaagaatcaccttttgcccttcccggagtctggacgaagcggacagtgagaataaggaagaagtatcccccctggggagtaaggcacccatttggatcccggatacacgcgccaccatgtgcatgatttgtacttcagaatttacactcacctggaggagacatcactgccgagcgtgcggtaaaatcgtgtgtcaggcctgcagctctaacaaatatgggttagattatctgaaaaaccagccagctagggtatgcgaacactgctttcaggagctgcagaagctggatcatcagcacagtccacggattggctcacccggtaatcacaagagcccatcttccgcattatccagcgtactgcattccatcccgtcagggagaaagcagaagaaaattcccgcggctcttaaggaggtttcagcaaacactgaggactcttccatgtccgggtatctctataggtccaaagggaacaaaaagccctggaagcacttttggttcgtgattaagaacaaagttctatatacctatgccgctagtgaagacgtggcagcccttgagagccagcctcttcttggcttcacagtcattcaggttaaggatgaaaactctgaatcaaaggtgtttcagctcctgcacaaaaacatgctgttttacgtcttcaaagcagaggatgcccattcggctcagaagtggatcgaggccttccaggaggggacaatactctag

SEQ ID NO: 14795 - DNA, 1641 bp, synthetic construct
  source 1..1641: mol_type = other DNA; note = Synthetic coding sequence
atgggcgcctatttatcacaacctaatactgtgaagtgtagcggggacggcgttggggcgccccgcctccccctcccctacggatttagcgcaatgcagggctggagagtgagtatggaggatgcacacaactgcatacctgagctggatagtgagaccgctatgttttctgtttacgacgggcatggaggtgaagaagttgctctctattgtgcaaagtacctccccgatattatcaaggaccagaaggcttataaagaaggaaagctgcagaaggcactcgaagatgcattcttggccatcgatgcaaagttgacaacggaggaagttattaaggagctagcacagattgccggccggcccactgaggacgaggatgaaaaagaaaaggtggccgatgaagacgatgtggataatgaagaagccgctctgcttcatgaggaggccacaatgacaatcgaagagctactcaccaggtatggccagaactgtcataagggaccaccgcactccaagtctgggggcgggacaggggaggagcccggctcccagggtctgaatggcgaggcaggtcctgaggatagcaccagggagaccccaagtcaggagaacgggcctacagccaaggcctataccgggttttctagcaattcagaaaggggtactgaggctgggcaagtaggtgaacctggaattcctactggggaggccggtccaagctgctcgtcggcctcagacaaactccccagggtagcaaaatctaaattttttgaggacagcgaggacgagtcagacgaggccgaggaggaggaggaggattccgaggaatgcagcgaggaagaggacggatacagttctgaggaagcagagaatgaggaggatgaagatgacactgaagaggctgaggaagatgacgaagaggaagaggaagaaatgatggtgcccggcatggagggcaaagaggaacccgggagtgattctgggacaaccgctgtggtagccctaattagaggtaagcaactgattgttgccaacgctggcgactccagatgcgtagtctcagaggccgggaaagctttggacatgtcttacgaccataaaccagaggatgaagtcgagctggctcgcatcaaaaacgccggaggcaaggtgaccatggacgggagagtgaacggcggcctcaatctctcccgcgctataggggaccatttttataaacgaaataagaatctgccacccgaggaacagatgatcagcgcacttcctgatataaaagtcttgacgctgactgatgaccatgagttcatggtgatcgcctgcgatgggatttggaacgtcatgagctcacaggaggtcgtggacttcatccaaagtaagatttcccagagggatgaaaatggggaactccgcctgcttagttctattgtcgaagaactgctggaccagtgcttggccccagacacttcaggtgacggaaccgggtgtgacaatatgacgtgcataattatctgtttcaagccgaggaacaccgctgagctgcagccagagagcggcaaacgcaaactggaggaagtgctcagcaccgagggggccgaagaaaacggcaattctgataaaaagaaaaaagcgaagagagactag

SEQ ID NO: 14796 - DNA, 273 bp, synthetic construct
  source 1..273: mol_type = other DNA; note = Synthetic coding sequence
atgagcactgctatgaacttcggcaccaaaagctttcagccacgcccacctgacaaggggtcatttccactggatcacctgggggagtgcaagtcattcaaggagaaattcatgaagtgtctacacaacaataatttcgagaacgctctgtgcaggaaagaaagcaaggagtacctcgaatgccgcatggaacggaagctgatgctgcaggagccacttgagaaattgggctttggcgacctcacaagtggtaaatctgaggccaagaaatag

SEQ ID NO: 14797 - DNA, 726 bp, synthetic construct
  source 1..726: mol_type = other DNA; note = Synthetic coding sequence
atgaacagtgggaggcccgagaccatggaaaacctgccggcactctatactattttccagggagaggtggctatggttacagattacggagccttcatcaagatccctggatgccgaaagcagggactggtacaccgtacgcatatgagtagctgtagagtggacaaaccctctgagatcgtggatgtcggcgacaaggtgtgggtaaagctgatcggtagggaaatgaaaaatgaccgcattaaagtgtctttgtccatgaaggtcgtgaatcaaggtaccgggaaggacctcgatccaaataacgtgattatcgagcaggaagaacgtcggcggcgctcatttcaggattacaccggccagaagataaccttagaagcggtgctcaacacgacttgcaaaaagtgtgggtgtaaaggtcacttcgctaaagactgcttcatgcagcccggcggaacgaaatactctttaatcccagatgaggaggaggagaaggaggaggctaagtctgctgaatttgaaaagcctgatccaaccaggaatcctagcagaaaacgtaagaaagaaaaaaagaagaagaaacacagagatcgaaaaagctcagacagcgattctagcgactcggagtccgataccgggaagcgtgccagacacaccagcaaggactctaaggccgctaagaaaaaaaagaagaaaaaaaaacacaaaaagaaacacaaagagtag

SEQ ID NO: 14798 - DNA, 1758 bp, synthetic construct
  source 1..1758: mol_type = other DNA; note = Synthetic coding sequence
atggctgcagctgctgccgcagtgggacccggagccggcggggccggctccgccgtccctggcggcgcaggcccatgcgcgaccgtatcggtgtttcccggtgctcgcctcctcacaataggcgatgccaacggtgagattcagaggcacgccgagcagcaagccctgcggctcgaagttagggccggacctgactcggccggcatagccttgtattctcatgaggatgtctgcgtgttcaagtgctctgttagccgcgagacggagtgctcaagggtggggaaacagtcattcatcataaccctgggctgtaatagcgtcctgattcagtttgccaccccaaatgacttttgctctttttacaacattctgaaaacctgccgcggacatacgctggagcgctctgtcttcagcgaacggaccgaggagtcctctgctgtccagtactttcagttttatggctaccttagccaacagcagaatatgatgcaggattacgtgcgcactggcacttaccaacgcgccatcctccaaaaccatactgatttcaaagataaaattgtgttggacgtgggctgtgggtcaggaatcctcagctttttcgccgcccaggccggcgctcggaagatttacgccgtagaagcatcgactatggcacagcacgctgaggtcctggtgaagtcaaacaacctaactgacagaattgtggtaattcctgggaaggttgaagaagtctcactcccagaacaagttgatatcattattagcgagcctatgggatacatgcttttcaatgaaagaatgctggagtcctatctacacgctaaaaaatatctcaaaccatccgggaacatgtttcccaccatcggggatgtgcatttggccccattcaccgacgagcagctgtacatggagcagttcacgaaagctaacttctggtaccaacctagttttcacggggtggatctgtccgcattaaggggggccgcagtggatgagtactttcgccagcccgttgtggacacctttgacataaggatcttgatggccaagagcgtgaagtataccgtgaacttcctagaggccaaggagggtgacctgcaccgcattgagattccatttaagtttcatatgctgcattccgggctggtgcacggactcgctttttggtttgatgtggcttttatcggatcaataatgacagtttggctgagtacggcccctactgaacctctgactcactggtaccaggttaggtgcctctttcagtcccccctctttgctaaagccggcgacaccctgtctgggacatgtctcctgattgctaataagcgacagtcctacgatatatcaatagtggcacaggtcgaccagaccggctctaaatcttccaacctcctcgacctgaaaaatccgtttttccggtacactggcacaacccccagtcctcctcccggaagccactatacctcacctagcgagaacatgtggaataccgggagcacatataatctgagctcaggcatggccgtagccgggatgcctaccgcctatgatttaagctccgtgatcgctagcggctcctctgtcggccataacaacctgatccccctcgggagctccggtgctcagggctcagggggaggcagtacgtcagcacattacgcagtcaacagtcagttcaccatggggggccccgctatttctatggcctctccgatgtcaatcccaaccaacacgatgcattacgggagctag

SEQ ID NO: 14799 - DNA, 771 bp, synthetic construct
  source 1..771: mol_type = other DNA; note = Synthetic coding sequence
atggcctccggtagacctgaggagttatgggaggctgtggtgggcgccgccgagcgtttccgtgccaggaccggaaccgagctggttctgctgacagctgcccccccccctccacctcgtccaggtccgtgcgcctacgccgctcacgggagaggtgccctggcagaggccgccagacggtgcctccatgatatcgctctcgcgcacagagccgctactgcagcaagacctcccgccccccctccagcccctcagcctccttctccgactccctctccacctcggcctaccctggcgcgggaagacaacgaggaagatgaagacgagcccactgagacagaaacctcaggtgagcagctgggaatcagtgacaatggaggcctgttcgtgatggacgaagacgctacccttcaggacttgccgcccttttgcgagtccgaccctgagtccaccgatgacggatcactttctgaagagacacccgctggaccacccacctgttcagtacccccagcctccgccctcccaacccagcagtacgccaagtcactgccagtgtccgtgccagtgtggggcttcaaagagaaacgcacggaagcaagaagcagtgatgaagagaacggtcctccctcatctcctgatctggaccgcatcgccgcttcaatgagagctctggttttgcgcgaagccgaagacactcaagtgttcggagacctaccacgtccccggctcaacacatctgatttccagaaactaaaaaggaagtactag

SEQ ID NO: 14800 - DNA, 4293 bp, synthetic construct
  source 1..4293: mol_type = other DNA; note = Synthetic coding sequence
atgtgtcttgaatctaatctctctagctgtaagcacctgccatgctgcggtaaactgcatttccagagctgtcatgggaacgtgcataagttgcaccagtttcctagtcttcaagggtgtactagcgctggatatttcccatgttctgacttcaccagcggcgcacctggtcatctggaggagcatattagccagtcagagcttacccctcatctgtgtacgaactcactgcacttaaatgtggtccccccagtatgcctgaaagggtccctttattgcgaggactgcttgaacaagcctgcaagaaattccattattgatgccgccaaggtatggcccaacattccaccaccgaacacacagcccgccccactggccgtgccactatgcaacgggtgcggcactaagggcaccggaaaagagacaaccctgctactcgcaacatcattgggcaaagctgcatcaaaattcggctccccggaggtggctgtggctggccaggtactggagaacctgccaccaattggcgtcttttgggatatcgagaactgtagcgtgccctcagggcgctccgccacagctgttgtacagagaattagagagaaattttttaaaggccatagggaggctgaatttatctgtgtctgcgacatcagcaaggagaacaaagaagtcatccaggaactgaataattgtcaggtcacagtggcccacataaacgcaactgcaaaaaacgctgccgatgacaagctgaggcagtcattacgccgcttcgccaacactcatacagcacctgccactgttgtcttggttagcacagatgtgaacttcgcactggaactaagtgacctgcgccacaggcatggatttcacatcattctggtccataagaaccaggcatccgaggccctgctgcatcatgctaacgaactgattcgtttcgaggagttcatcagcgacctgcctcctagattgcctctgaagatgccccagtgtcatactcttctctacgtctacaacctgcccgcaaataaggacggcaaaagcgtgagtaaccgtttaaggcggttgtctgataactgcgggggcaaggtactgtccattacgggctgctcagccattctacgctttatcaaccaagatagtgcagaaagggcccagaaacggatggaaaatgaggacgtcttcgaaaagaaggataaggaagaaacagtgttccaagtgagttacccttccgcatttagtaaactggtggcctcaagacaggtaagtccccttcttgcctcccagtcctggtctagcagggccagtccactcgccttcaatatagcgaattcctctagcgaagctgactgcccggatccattcgcgaatggtgctgacgtccaagtcagcaacatcgactaccgattgtcacgaaaggagctccagcaattgttacaagaggcatttgccagacatggaaaggtgaagagcgtggaactttcccctcatactgattaccaactcaaggccgtggtgcaaatggagaacctgcaggatgcaatcggcgccgtaaattcactccatcgttacaagattggtagtaagaaaattctcgtgtctctggcaaccggcgccgcatccaaatctttaagtctgcttcgtttcggtcataagcttaatgtgtccgacttgtataaacttactgacactgttgctatacgagagcagggaaacgggagactggtgtgcctgttgccaagttcgcaggcacgtcaatcacctttaggcagcagtcagtcgcatgacggatcctcgaccaactgtagcccaatcatcttcgaagaattggagtaccatgaacccgtatgtcggcagcattgcagcaacaaggacttttcttttccagattgttatattgccgagttcggcgacctggaggttgttcaggagaaccagggcggagttccactggagcacttcattacctgtgttccaggggtgaacatcgccactgctcagaacggaataaaggtagtgaaatggatccataacaaaccaccaccgcccaacaccgacccctggctgttaaggagcaagtccccagtcggtaatccccagctgatccagtttagcagggaggttattgacctactcaagtcacagcccagctgcgtgatcccaatctcacattttataccttcctatcaccatcactttgctaagcagtgccgcgtatcggattatgggtacagcaagctcatagaattgctggaggccgttccccacgtgctacaaatccttgggatgggaagtaagagactgcttacccttacccatcgggcccaggttaaaagattcactcaggacctgcttaaactgctaaagtctcaggcttcaaaacaagtaatagtgagagagtttagtcaggcataccactggtgtttttccaaagactgggatgtcacagagtatggcgtctgtgaactcattgacattgtgagtgaaattcccgatacaaccatctgcctgtcgcaacaggataatgagatggtgatctgcattcccaaacgcgaaagaacgcaggatgagattgagaggaccaaacagtttagcaaggatgtggtcgacttacttcggcaccagcctcacttcaggatgccctttaacaagttcatcccttcctaccatcatcactttggtcgtcaatgtaagctcgcttactatggtttcaccaagctcctggaactcttcgaggcaattcctgacactctgcaagtattagaatgcggggaggagaagatcctcaccttgactgaagtggagaggttcaaggctcttgctgctcagttcgtcaaactcctgagatctcagaaggataactgcctgatgatgaccgatctgctgacagagtacgctaaaacctttgggtacaccttcaggctgcaggattacgacgtatcttccatctcagcactcactcaaaaattgtgccacgtcgttaaggtcgctgacatcgagagcggcaggcaaatccagttgatcaaccgcaaaagcctgaggtcattgacagcacagctcctggtgctacttatgtcatgggaaggcactacccacctgagcgtcgaagaactcaagcgacactatgaatcaacacacaatacaccacttaatccgtgcgagtacggcttcatgaccctaacagagctactgaaatccctgccctatttggttgaaaccgccgccgccttcgacttacaaatcgagctcaagtttgcagggggttactctctacttctggaggagatccttgaatacattcctccacctttcctgagccctctgcccagtttcctgcctcccccaccattctttttttttgtcttttttgtgatcttcatcttcttcattttcgtgtttgtacagttcgtagtttttgtattctttatcgtggtgtttgttttctttatcgtcgtgtttgtgttcaccaacgataagatggaggaatgtgtgaagctgaccagtctctacctcttcgcaaagaatgtgcgtagcctcctgcatacataccattaccagcagatcttccttcacgaattttcgatggcttacactaagtacgtcggagaaacactccagccaaaaacgtatggccactcctccgttgaggaactgcttggagcgatcccccaggtagttgtgcagtttttgcaaaaaaatgggaaggagctaagctgtgaaaactaccttaatctctatgccaaagccggaaggctctctagcctttctttgagtccggccaaccacgaaaaccagcccagcgaaggagagaggatcttagaagtgccagaatctcacaccgccagcgagttaaagctgggagctgacggaagcgggcctagccatacagaacaggaattgctgaggcttaccgatgacagccccgtagacctcctgtgtgctcccgtccctagttgtctcccctcaccacaactaagacctgatcctgtaattctccagagcgctgatctgattcaatttgaagagcgccctcaagaacctagcgaaataatgatccttaaccaggaagaaaaaatggagatcccgatccctggtaagtcaaagacgctaacgtctgatagttcttcgagttgcatctctgctgccgtccccgtcccaccgtgtccatcctccgaaacctccgagtctctcttgtccaaggatccagtcgagtccccggctaagaaacaacctaaaaacagggtgaaactcgcagcaaacttttctctggcccctattacaaaactctag

SEQ ID NO: 14801 - DNA, 2346 bp, synthetic construct
  source 1..2346: mol_type = other DNA; note = Synthetic coding sequence
atgggccagctgagggattggtttccaaatactcaggacctagccggcaacgatcaagaaaacatcagacacgctgatcggaataactcagacgataaccatctcgctagtgaggatacctcagccaaacaatcaggcaaaccggggatctatgaggacagagacccattgcgcgtgtctatcagccgcgaacaaagcttttttgggtccccactcgcacacgatccttttagttgtctgcagttggtgggccaggagaatgtgtgcggcgatgattacgacgaggctgtaaaactaaaggagagcgtggtggaaaaccacgccgtgctgtcttacgctgtggaggaggagcatgcctatctgggaccaacagtgaagccagatgacaaggcgaagacactgtcttacgaaccactgtcttccgcaacggtgagcacagggtctttgctttcttatgaaaacactgatctgagtctcacagatcccgagtctttctcagagcacatggatgactccaaacaggagtccactacctccaaagaggaggaaactaatatcataagctcaatcgtgcccagtacgcaggacatctaccagcgacagaacagttctgacgttcataagtcgctcttgccagctgtggacgagacaacctgtgggcatacacacttccagcagatgatcgataaatacatcaacgaggctaatctaatccccgagaaaaccgatcttcaagaattggaacacatttttcccaatctgcatcaccagctgttcaaaccccttgagccccaccccgacttcgacttatcttcttcctcctcaggtattagtcccgacaatagggatttctaccaaaggagcgattcttctagtgagtcccattgcgccacaggtctgagtaaaagcacagtttattttactgccctaagacggaccagcatgcactcttctctgaatacgagcccgaaccaacagcctgacacaaatttggcccatgttggcgcccatagctttgccacggaaaacatcattggcggcagtgaacaatgctttgaacaactgcaacccgagtattcttcccaggaggaatcccaacatgcggatctgccgtcaattttttcaattgaggcgcgagactccagtcaaggaatgaagaatcagaattatccttctgaagaacacaccgaaattttgcagaacaagaagaaaatagtgcatttccaactgtctattgggaacctatctagtgtgtatagcagcagcgatgaagccaacgttttcgatcagcttaacgtccagcatagcacaccatgtgggtctaatagcagcgaatgctctacaaagcaccagctggagtcccggaaggagagtatgggatttgaggaactttctaagagaggagtcgtgacaatgctacagagtcaaggcctgattgaggataacaagaacgaaacatgtagggtcctggacatcaatccccaggtagaggaaacggattctcgactatgcgtccggactgtggagatgggcacctctattcaggcaccctatagtctcaccactcaaaatgaaaaatatttcgaaaatagcgctgaaacggacataccaaagataactaagaagctgtcacagctgggagagtctgagctgtttgccagttccgggagtttcagcctccagtcaagtataccggtgtgggaaaccgagaccggccatgggattatggaggagccggagctgaccctgatcagcacgaccgatacatccatagctgagatggatttcgccaacctgactctagaggaaaaatccgagaatgaggctaagtgctttttccaggtgtcagagtttctgccccttgtgagtgccaccgaggcctctgattaccccgctgtgtccgagctttccattgagaagcctagaacggcgtctactgaaacgccaaggaggctaacaccagtgcctgggagcctgcaggaggctttcataaaaagaaagaagtcattcatggagaggtcacatcagcgtcagaaggaaattcgcaacaagatccacgtaagtgaaaacagccagatcaagacggtgaaagagaaaccttcaattagcagttcagtgtctagattgaaaggcgtaaacaaagtccgggcgtccttcccagaggaccggaaaaccacacaggcactcagacaccagagaggtttgcggttatacaaccagctggctgaggtgaagcagcagaaagaagaaaagactaaacaagaagcatatgcccagaacagagcgcgggctaaggaatttcacaagaaaacactggagaagctgcgtgcgaagaacacctgctag

SEQ ID NO: 14802 - DNA, 513 bp, synthetic construct
  source 1..513: mol_type = other DNA; note = Synthetic coding sequence
atgggcaagcggtacttctgtgactattgcgaccgctccttccaagacaatttacataaccggaaaaagcacctgaacgggctgcagcatctgaaggccaaaaaggtgtggtatgatatgtttcgagacgctgctgctattctgttggacgagcaaaacaagcgtccttgtagaaaattccttctcaccggccaatgcgacttcggtagtaactgtaggttttcacacatgtcagaacgggatttgcaggagctctccattcaagtggaggaagagagacgggcacgcgaatggctgctcgatgcccctgagcttccagagggtcacttggaggattggctggagaagcgggcaaagcgcctgagttccgcaccaagctcccgcgctgagcctataaggaccacggtttttcaatatccagtggggtggcccccagtccaggagctccctccaagcctgagagcgcctcctccaggaggctggccacttcagcctagggttcaatggggatag

SEQ ID NO: 14803 - DNA, 1542 bp, synthetic construct
  source 1..1542: mol_type = other DNA; note = Synthetic coding sequence
atggcgtctgtcctgtcaaggcgccttggcaaaagatcactgctcggcgcgcgggtgctgggaccgtccgcctccgaggggccctctgctgctccaccctccgaacccttattggaaggtgctgccccccaacctttcacgacttcagatgacactccatgccaggaacagcctaaggaggttctcaaagcaccctctaccagcgggctccagcaggtggccttccaacccggacagaaggtgtatgtgtggtatggcgggcaggaatgcacagggttggtggagcagcacagttggatggagggacaggtgacagtgtggctgttggaacagaagctgcaagtttgttgtcgagtcgaggaagtgtggctcgctgaactccagggaccttgccctcaagcccccccactagaacccggcgcccaagctttggcttacagacctgtatctcggaatattgatgtgccaaagaggaaatcagacgccgtcgaaatggatgaaatgatggccgcaatggtcctgacctccctgtcgtgcagccccgtggtacagagcccgcccggcactgaggcgaacttttctgcttcgcgcgcggcatgcgacccatggaaagagtccggggatatcagcgactctggatcgagcactacatccggccactggagtggctctagcggagtgagtacaccgtcccctcctcacccccaggcctcccccaagtacctaggggacgccttcggctctcctcagacggatcacggtttcgagacagacccggatccatttcttttggacgaacctgccccccggaagagaaaaaatagcgtgaaggtcatgtataagtgcctgtggccaaattgcggtaaggttctgaggtcgatagtgggaattaaacgtcatgtgaaggcgctgcacctgggcgacaccgtggattctgaccagtttaagagggaagaagatttctactataccgaagttcagcttaaagaagaatcagcggcggctgccgctgccgccgcagcaggaacacctgttcccggcaccccaaccagcgaaccagcccctacgccaagtatgaccggtctgccattaagtgctctcccaccacctctccacaaggcacaaagttctggacccgaacatcccggacccgagagctctctgccatccggcgcccttagcaagtctgcacctggctccttttggcacatccaggcagaccatgcttaccaagctctcccgtctttccaaatccccgttagcccccacatctatacaagtgtgagttgggctgctgctcctagtgctgcatgctctctctctccagttaggtcccgctccttaagtttttccgagccccagcagcctgcccctgctatgaagagccacctcatcgtaacgagtcctccacgggcacagtctggcgcccgaaaggcacgaggcgaagctaagaagtgtaggaaggtctatggaatagaacaccgcgatcagtggtgcactgcctgccggtggaaaaaggcctgccagagattcttagattag

SEQ ID NO: 14804 - DNA, 555 bp, synthetic construct
  source 1..555: mol_type = other DNA; note = Synthetic coding sequence
atgggcaacggtatgaacaaaattctgccaggcttgtacattgggaactttaaagacgctagggacgcagagcagcttagcaaaaacaaggtaacccatattctgtcggttcacgacagcgcaaggccaatgctggagggggtgaagtatctgtgcatccctgccgccgactcgccatcacagaaccttactagacattttaaagaatccattaagttcattcacgagtgccggctgcgaggtgaatcttgcctcgtgcactgcctggccggggtgagcagaagtgtcacgctagtgattgcatatattatgacagtcacagatttcggatgggaggatgccttgcacacagtcagggccggccggtcctgcgccaacccaaatgtcgggtttcaaagacagctgcaggagttcgagaaacacgaagtccaccagtaccggcagtggctgaaggaggagtatggggaaagccctctccaggatgcagaggaggccaaaaatattctggctgctcctggaatcctgaagttctgggcttttctgcgacgactgtag

SEQ ID NO: 14805 - DNA, 642 bp, synthetic construct
  source 1..642: mol_type = other DNA; note = Synthetic coding sequence
atgttgcagctccgagactcggtagactcagccgggacatcccctactgctgtgctggcggctggcgaggaggtgggtgccggcggcggacccggtggtggccgaccgggggcaggcacacccctcaggcaaacactgtggcccctgagtattcatgaccccactcggcgggcccgtgtaaaggagtattttgtgtttcgaccaggctcaatcgagcaggccgtggaagaaattagagtcgtggtccggcctgtagaggatggcgaaatccaaggcgtgtggctcctgactgagcgagagggcttcgggattcgcattcagtgggataagcagagtaggcccagctttataaataggtggaacccctggtcaacgaatgtgccctacgctacctttaccgagcaccccatggccggcgccgatgagaaaacagcctcactttgtcagttggaaagctttaaagccttgctcattcaggccgtgaaaaaagctcagaaggagtcacccttgccgggccaggccaacggcgtactcatcctggaacgtcccctgcttatcgagacatatgtggggctcatgtcctttattaacaacgaggccaaattgggctattctatgaccagaggtaagatcggattctag

SEQ ID NO: 14806 - DNA, 888 bp, synthetic construct
  source 1..888: mol_type = other DNA; note = Synthetic coding sequence
atggaactcatacaggacacctccagaccaccacttgaatacgtcaaaggggtgcctctgattaagtacttcgctgaagcccttgggcccctccagtcgttccaggcccgccccgacgatctcctcattaatacttaccctaagtctggaacaacctgggtgagtcaaatcctggatatgatctatcagggcggtgacctcgagaaatgcaatcgggctccaatatatgtacgcgtaccttttctggaagtgaacgatccaggtgagccaagcggccttgagacgctgaaagacactccaccacctagactcatcaagagtcatctaccgctcgctctgctgcctcagactctgttggatcagaaggtaaaagtggtgtacgtggcaaggaacccaaaagatgtcgccgtctcctattatcattttcacaggatggagaaagcacaccctgaaccaggaacatgggatagcttcttggaaaagtttatggccggggaggtgtcttacggcagctggtatcaacacgtgcaagaatggtgggaactgtcccgcacccacccagttctctatctgttttatgaggatatgaaggaaaaccctaaacgggagattcagaagattttggagtttgttggcaggtccctgccagaagaaaccatggacttcatggtgcagcacacatcgttcaaggagatgaagaaaaaccctatgacaaattacacaactgttccacaggaactgatggaccattctatttctcctttcatgaggaagggaatggcgggagattggaagaccacattcaccgtggcccaaaatgagagatttgacgccgactatgctgaaaagatggctgggtgcagtctatccttccggagcgaattgtag

SEQ ID NO: 14807 - DNA, 3867 bp, synthetic construct
  source 1..3867: mol_type = other DNA; note = Synthetic coding sequence
atgcctcgtaaggggacgcagcccagtactgccagacgaagggaagagggcccaccccccccaagtccagatggcgcctcgtccgacgccgaacccgaaccaccttcaggccgtactgagtccccggctacagcggcagaaacagcttcagaggagttggataaccgctccttggaagaaatccttaactccattcctcccccccctcctcctgccatgacaaacgaagccggagcccccagactcatgatcacgcatattgtgaatcagaacttcaaatcctatgcaggggagaagatcctcgggccgtttcacaaacgctttagctgtattattggtccaaacggctcagggaaatcaaatgtaattgatagcatgctctttgtgttcggctaccgcgcccaaaaaatccgatctaaaaaactgtccgtcctgatccataactctgacgagcacaaagacatacagtcctgcacagttgaagtacactttcaaaagattatcgataaggagggagatgactatgaagtgatcccaaactccaatttttacgtctcaaggactgcgtgtcgcgataatacatctgtttaccacatctcgggtaagaaaaagacttttaaagacgtgggaaatctgttgcgctcacacgggatcgacttggaccataacagattcttgattctccagggggaggtagagcaaatcgccatgatgaaaccaaagggccagaccgaacacgatgaaggtatgctggagtatctggaggatattataggctgcggccggttaaacgagccgataaaggtcctgtgcagaagagtcgagattcttaacgaacaccggggcgagaagctgaatcgagttaaaatggtagagaaagagaaggacgccctcgagggtgaaaagaacattgcaatcgagtttctgacgctggagaacgagattttcagaaagaagaaccatgtgtgccagtattatatatatgaactgcagaaacggatcgccgagatggagacccaaaaagaaaagatccacgaagatactaaggaaattaacgagaagagcaatattctgtccaatgagatgaaggccaaaaacaaagacgtaaaggacaccgaaaaaaagctcaacaaaataacgaagttcattgaggagaacaaggaaaaatttactcaactagacctagaagacgtgcaggtccgtgagaagcttaagcacgcaacatccaaagcaaaaaagctggaaaagcaactacagaaggacaaagagaaagtagaagaatttaaatcaattccagccaaaagcaataacatcatcaacgaaaccacgacaagaaacaacgccctggaaaaagagaaagagaaggaagagaaaaagctcaaagaagtaatggatagtcttaagcaggaaacacaaggcctgcagaaggagaaagaatccagggagaaagagttaatgggattttccaaatcggtgaacgaggctcgcagtaagatggatgtggctcagtccgaactcgacatctatctctctcgccacaacacagcagttagccagctgacgaaggcaaaagaggcattgatagctgctagtgagacacttaaggaaagaaaagctgccatcagagatatcgaaggtaagctgcctcagaccgagcaggagctgaaagagaaggaaaaggaacttcaaaaactgacacaggaagagactaacttcaagtctctggtccatgacttgttccagaaggtcgaggaagctaaatcaagcctagcaatgaacaggtcccggggaaaagtgctcgatgcaatcattcaggaaaagaagagtggccgaattcccggcatttacggtcgattaggcgacctcggagccattgatgaaaaatatgacgtggcgatctcctcttgctgtcacgcactggattacattgtcgtggactccatcgacattgcccaagagtgtgtaaactttttgaaaagacagaacattggcgttgccactttcattggcctcgacaaaatggccgtctgggcgaagaaaatgactgaaatacaaacacccgagaacacaccaaggctgttcgatctagtgaaggtcaaggatgagaagatcaggcaggccttctactttgccctccgcgacaccctggtggcggacaatctggaccaggccacccgggtcgcatatcagaaggatcggaggtggcgcgtcgtcacactccaggggcagatcatcgagcagagcggaaccatgacaggggggggatcgaaggtgatgaaaggtaggatggggtcgtcactggtcatagagattagcgaggaggaggtcaataagatggagagccagctgcagaatgactcaaaaaaggcaatgcagatccaagagcagaaggtccaactcgaggaaagggtggttaaactgaggcactccgagcgcgagatgaggaacacgctggagaagtttacggcctctatacagaggcttattgagcaagaagaatacctgaatgtgcaggtcaaggaactggaagcgaatgtattggccaccgcacccgataagaagaagcaaaagctgcttgaggaaaacgtctcagctttcaaaacagaatacgatgccgtggcagagaaggccggaaaggtggaagcggaggtaaagcggctgcacaataccatcgtcgaaataaacaatcataaactgaaagcccagcaggataagttggacaaaatcaacaagcaactggatgagtgcgcaagtgccatcactaaggcccaagtggccatcaagacagcagatcgaaaccttcaaaaggcgcaggatagtgtgctcagaacagagaaggagatcaaagacactgagaaggaggtggacgaccttacagctgagctgaaatccttggaggacaaggctgcggaggtagtaaagaacactaatgcggctgaggagtcacttcccgagattcagaaggaacatagaaacttgctccaggaactgaaagtgattcaggagaacgagcatgctctacagaaggatgcattgtccataaagctgaagctcgagcagattgatggccacattgcagagcataactcaaaaatcaagtactggcacaaggagatcagcaagatctcacttcacccgattgaagataatccaatcgaggagatcagcgtcctgtcccctgaggacttggaagcaatcaagaatccggacagcattaccaaccaaattgcacttctcgaggctcgatgccatgagatgaagcccaacctgggtgcaatcgccgagtacaagaagaaggaggagctctatctccagcgcgtggccgaactggacaaaatcacatacgagagagactccttccgtcaggcctacgaggatctgcgcaagcagagactcaacgagttcatggctggcttctacatcattacaaataagcttaaagaaaactaccagatgctcaccctcggcggagatgccgagttggagctcgtcgactcactggacccgttttctgagggcatcatgttctcagtgaggcccccaaaaaagtcctggaagaaaatcttcaacctcagtgggggagagaagaccctctcttctctagccctcgttttcgctctgcaccactataaaccaacgcctctttacttcatggacgaaattgacgcagccttggacttcaaaaatgtttccatcgtagctttctacatttacgagcagacaaaaaacgctcagttcatcattatttcactgcggaacaacatgttcgagatttccgaccggctgattgggatttacaagacctacaacattactaaatctgttgctgtgaacccaaaggagatcgctagcaagggtctttgttag

SEQ ID NO: 14808 - DNA, 2856 bp, synthetic construct
  source 1..2856: mol_type = other DNA; note = Synthetic coding sequence
atgctgggatccatggctcgtaagaagccgcgaaacacatcgcggctcccactggccctgaaccccctgaagagtaaagatgtgttggccgtactggccgagcgtaatgaggctatcgtccccgttggagcctgggtagaaccggcttctcccgggagcagcgaaatccccgcatacactagtgcatacctgatcgaagaggaattgaaagagcaactccggaagaaacaggaagccttgaagcacttccagaagcaagtgaagtatagggtgaaccagcagatcagactccgtaagaaacagcaactccagaaatcatacgaacgggcccaaaaggaaggaagcatcgcaatgcagtctagtgccacacaccttacctctaagcgcaccagcgtgtttccaaataatttgaacgtggccatcggaagtagtaggttgcctccgtctctcatgccaggagacggtatcgaagatgaggaaaatcagaacgaattatttcaacagcaagcacaggcactaagcgagaccatgaaacaagcacgtcacagactggcctcatttaaaacagtgataaagaaaaaggggtctgtcttccccgacgatggaagaaagagcttccttacgcgcgaggaagtgctgtcccggaagcctgcgtctacgggcattaacacaggcatccggggtgagctccccattaaagtgcatcaaggactccttgcggcggtcccttaccaaaattacatggaaaatcaagaactagactatgaggaacccgattatgaagaatcctcctccctggttactgatgagaagggaaaggaggacctctttggccgggggcaacaagatcagcaggccatccattcagaggataaaaacaaacctttcagtagggttcaaaaagtgaaatttaagaatcccctctttgtgctgatggaggaagaagaacagaagcagttgcacttcgaaggtcttcaggacatactgccagaggcgcaggactacttcctggaggcccaaggagacctgctggaaacccagggggatcttactggaatccagtccgtgaagcccgacacacaagctgtggagatgaaggtgcaggtaacggagccagaggggcaagccatcgagcctgagggacagcctattaagacggaaacacaaggaatcatgctgaaggctcaatcaatcgaacttgaggaaggaagcatcgtcctcaagactcaagactttcttcccaccaatcaggcattattaactaaaaatcaggatgtgttactgaaagaccattgcgtgttaccaaaggatcagagtatcctcctgaaataccaagaccaggacttccttccccgggaccaacacgtattgcacaaggatcaagatatactgcctaaataccaggatcagaatttcctgcctaaggatcaaaatttcctcagtagagaccagcacgtgttgcccaaagatcaagatatcctgccgaagtaccaagatcagaattttctacctaaagatcagaattttctgtctagagatcaacacgtcttgcccaaggatcagaacatcttgcctaagtatcagggacaggacttccttcccaaagatcaggacttcctctcccgcgaccagcatgtgctgcccaaggattggaatatcctgcccaagtgccaggaccaggacttcctgcccagggatcaaggagtgctacccaaggaccagaatatcctgcctatttgtcaggatcaggactttttgcctagggatcaggggtatctcccaaaagaccagaatatcctacctatctgccaggacagagactttctgccaagggacttacatgtcttaagcaacgaccagaacatcttgcccaagtgccaggaccaggactttctaccaaagtaccagaaggtgcattttaaagaaccttatagcgacatgaccgacgagaaagggagagaagatttttctttggccgactaccagtgccttccccccaaaagtcaggaccaggacgatataaagaaccagcaacctgcttcctttatgcgcgaagaaagagtgagggaagaacttcccctcgattaccaccaatacgttgtgccaaagatccaggatcaagactccccacgagagcagaacaagcatattaagctgccctctagtttcgagaaatgggaaatagctcgggggaacaccccaggagtaccgttagcatatgatcgttaccagtcggggttgagtaccgagtttcaggcccccttagcgttccagagcgatgtggataaagaggaagataagaaggaaagacagaagcagtacctgcgacaccggcggctatttatggacatagagagagagcaggtcaaagagcagcaacggcagaaagagcagaaaaaaaagattgagaaaattaaaaagaagcgggaacaggaatgctacgctgcagagcaaaggatactgcgaatgaacttccatgaagacccctattctggggaaaagttgagcgagatcttggcccagctccagctgcaggaaattaaagggacccgcgaaaaacagcagcgagagaaagagtatttacgatacgtggaagccctgcgcgcccagatccaggaaaagatgcagttgtacaatatcaccctgcctcctttgtgttgctgcggccccgatttctgggatgcacatccggacacatgtgccaacaactgcattttttataagaatcaccgtgcctacactcgtgccttgcattccttcatcaactcctgtgatgtcccggggggcaatagcactctgagagtggccatacataatttcgcgtccgcccaccggagaacactgaaaaatttgtag

SEQ ID NO: 14809 - DNA, 1248 bp, synthetic construct
  source 1..1248: mol_type = other DNA; note = Synthetic coding sequence
atgtctccggaggtggctctaaacagaatcagtcccatgttgagcccattcatcagctcggtggtgcgtaatgggaaagtaggtttagacgcgaccaactgtctaagaatcacagacctgaaatctggatgcacatcactgactcctggccctaattgcgatcggtttaaactacatataccctacgcaggcgaaactttgaagtgggatatcatcttcaatgctcaatatccagagctgcctccagatttcatcttcggcgaagacgccgaatttctgccagatccctccgcgctgcaaaacctggcaagttggaacccatcaaatcccgagtgtctcctgctcgtggtcaaagagctggtgcagcagtatcatcaattccagtgttcgagattacgtgagagcagtcggctcatgttcgagtaccagaccctgctcgaagagccccagtacggcgagaacatggagatctatgccggcaagaaaaataattggactggagaattttctgccaggtttcttttaaaactgccagtggactttagtaacatcccaacctaccttttgaaagatgtgaacgaggaccctggagaggacgtcgcattactaagcgtgtcgtttgaagacaccgaagctacacaggtgtacccaaaactttatctgtctccacgtatcgagcacgcattgggaggttcgtccgccctgcacattccagcatttcctgggggtgggtgcctgatcgactacgtgccccaagtgtgccatcttttaacaaataaggtgcagtacgtcatccaggggtaccacaagcggcgcgaatacattgcagccttcctcagccatttcgggaccggggtggttgagtatgacgctgaggggttcacgaagctgaccctcctgctcatgtggaaagatttttgcttcctggtgcatattgatctgcccttgttcttcccccgggaccaaccaactttgacattccaatccgtgtaccatttcacaaatagtggccagctgtacagtcaagcgcagaagaattacccatatagccctaggtgggatgggaacgagatggccaagagggccaaagggtgtcagggttctcgtgacgcgtgttctccctgggaacaggtgttagcctttgccgtcgccaagaccggatgtaaattactccagccccagcggaactggccaagcagtcggggtccaccatggcgtgcatctgaaggcgagagaacagcgcaatag

SEQ ID NO: 14810 - DNA, 903 bp, synthetic construct
  source 1..903: mol_type = other DNA; note = Synthetic coding sequence
atgctgagcgctgtagctcggggctatcagggatggtttcacccctgtgcaaggttatccgtgaggatgtcttcaaccggaatcgatcgcaagggcgtactagctaatagagtggcagtggtcacaggcagcaccagcgggattgggttcgccatcgcaaggaggttggctagggacggggcccacgtggtgatcagctccaggaaacagcagaacgtggacagggccatggccaagctgcagggcgaggggcttagcgtcgcgggcattgtgtgccatgtaggcaaagcagaagacagggaacagttagtggccaaggctctggaacattgtggcggggtagatttcttggtttgttcggccggcgtgaaccctcttgtcggctccacattggggactagcgaacagatttgggataagattctaagtgtgaacgtaaaatcccccgcgctgctgttgagtcagcttctgccctacatggagaatcgacgcggtgccgttattctggtatcttcaatcgctgcctataatccggtggtagcgcttggtgtgtacaatgtgtctaaaacagccctgctgggtctgacacgcaccctggcactggagttagcccctaaagacatacgggtgaactgtgttgtgcccggaatcatcaagaccgacttttctaaggttgttcgaatcgggtttatgggcatgagcctttctggtcgcacatccagaaatataatatcctgcagagggctcggttcccagaggacagtgcaggaatcgtgcccctcctgcgcattacagatgcccgccacctcaacaggacgtaccctgcggtggcaggcaaccccactgggatccgaaagatcggggggcggctgcgttgccgtcgttccaggccccggagcttag

SEQ ID NO: 14811 - DNA, 1014 bp, synthetic construct
  source 1..1014: mol_type = other DNA; note = Synthetic coding sequence
atgagatttgataccctgtgggagaacaagctgatgcagagtcgcgccgtggacgggttccacagcgaggagcaacagttgctgctacaggtgcagcaacagcatcagccacagcagcagcaacaccatcatcatcatcatcaccagcaggctcagcctcaacagacagtgcctcagcaggctcagacccagcaggtgctgatcccagcatcacaacaggcgaccgcgcctcaggttattgtgcctgattctaagctgatccaacacatgaatgcttcgaatatgagcgccgccgccacagcggctactcttgctctgcctgctggggtcacacccgtgcagcagattctgacaaattcagggcagctcctgcaggtcgtgcgcgccgccaatggcgcgcagtacatatttcagccccagcaatcagtggtcctacagcagcaggtgataccccagatgcaacctggcggagtgcaggcgcctgttatccagcaggtattggcccccctgccaggcggtatctcaccgcagacaggcgtgattattcagccacagcagatcctctttaccgggaataagacacaggtgattccaaccacagtcgcagctccgacccctgcgcaagctcagatcacggcgactggccagcaacagccgcaggcacagccggcgcagacgcaggcacctcttgtactccaggttgacggcacgggagatacgtctagtgaggaagacgaggacgaagaagaagattatgacgatgatgaggaagaggataaggaaaaggatggagcagaagacggccaggtagaagaggaacctctcaacagtgaagacgacgtgagtgatgaagaagggcaagaactttttgacaccgaaaatgtggtcgtctgccagtatgataagatccataggtccaaaaacaaatggaagtttcacctgaaggatggaatcatgaacctgaatggacgggattacatttttagtaaggctataggagacgctgagtggtag

SEQ ID NO: 14812 - DNA, 282 bp, synthetic construct
  source 1..282: mol_type = other DNA; note = Synthetic coding sequence
atggcccaatccggtggagaagccaggcccggccctaagacagccgtccagattagagttgccatccaagaggcggaggacgtagatgaactggaagatgaagaagaaggcgccgaaacgagaggcgctggcgatccagcacggtatctgtcacccggatggggctccgcaagtgaagaggagccttcacgcggccatcgaaacaggagcagcgtcaatagcagaacgatgctggcgtcttttatcgtcagcagcgcaccatcaaccgccccatccacgtag

SEQ ID NO: 14813 - DNA, 255 bp, synthetic construct
  source 1..255: mol_type = other DNA; note = Synthetic coding sequence
atgaaagtaaaaattaaatgttggaatggcgtggcaacgtggttatgggttgccaacgacgagaactgtggtatatgcagaatggcgtttaatggatgttgccctgattgtaaagttcctggcgacgactgcccgctcgtgtggggccagtgcagccactgctttcacatgcattgcattctgaaatggctgcatgcccagcaagttcaacaacactgccccatgtgtagacaagaatggaagttcaaggaatag

SEQ ID NO: 14814 - DNA, 612 bp, synthetic construct
  source 1..612: mol_type = other DNA; note = Synthetic coding sequence
atggctcacgtgtccagtgaaacccaggatgtgtcaccaaaggatgagctgaccgcttctgaggcctcaacacgctctcccctctgtgagcacaccttccccggcgatagtgatctgaggtccatgatcgaggagcatgccttccaggtgctttcccagggctctctccttgagtctccttcctacacagtctgcgttagcgaacccgataaagatgatgattttctgtctctaaatttcccgaggaagctctggaagatagtggagagcgatcagttcaaatctatatcttgggatgaaaacggaacttgtatcgtcatcaacgaggagctgtttaaaaaagagatattagaaactaaggccccttatagaatctttcaaacagatgcgataaaatcatttgtgcgccagttaaacctctacggcttttccaaaatccagcagaacttccagcggtccgccttcctagccactttcttgtcagaggagaaggaaagctcagtgctgagtaagattcgatttaccaaaatgaaactttccaggtcaagtacctacgaaaacagatatctgtgctgtaacctccatttgaaggacgagagcaattatagctag

SEQ ID NO: 14815 - DNA, 1794 bp, synthetic construct
  source 1..1794: mol_type = other DNA; note = Synthetic coding sequence
atgcccagcccacagcttcttgtgttgttcggatcacaaacaggaacagcgcaggatgtgtccgagaggctgggcagagaggccaggagacgccgcttgggctgtcgggtgcaagccctagactcatatccggttgttaacttgatcaatgaacccctggtcattttcgtatgtgctaccactggacaaggcgacccaccagacaatatgaagaacttttggcgctttatcttcaggaaaaatctgccgtccactgctctttgccagatggatttcgctgtgctgggcctgggggatagttcttacgccaaattcaactttgtagcaaagaagcttcatcgccgcctattacagctggggggaagtgcccttctgccggtgtgtctgggggacgatcagcacgaactgggacctgacgctgccgtggacccatggctgagggacttgtgggaccgcgtcctggggctgtaccctcctcctcctggcctcaccgagattcctcccggcgtccctctgccttccaagttcaccctgctcttcctccaagaggctccttcaacagggtctgaaggtcagcgagtggcccatcctggaagtcaagagccccccagcgagtctaagccctttctggctccaatgatatcgaaccagcgggtgactgggccctcccactttcaggacgtcaggctgattgaattcgatattcttggcagtggaatcagcttcgccgccggcgacgtagtccttatccagccaagcaattctgcagcacacgtgcagaggttctgtcaggtgcttggactggatcctgaccaactgtttatgctgcagccaagagaaccagacgtgtcatcgcctacccgactccctcaaccatgctctatgaggcacctggtgagccactacctggatatcgcttccgtgcctcggcgatccttctttgagctcctcgcttgcctcagtcttcacgagttggaaagagaaaagctgctagaatttagttccgctcaagggcaggaggaattgtttgagtactgtaaccgtccaagacgtactatcctggaggtcttgtgtgatttccctcataccgccgccgccattccacccgactatttgttggatctgattccagttattagacctcgggcctttagcatcgcctcttccctactcacccacccctcacgtctgcagattctagttgccgtcgttcagttccagaccagactgaaagagccccgacgtggcctctgttccagctggctggctagcctggatcctggccagggtcccgttcgcgtaccactctgggtcagaccgggatccctcgcctttccagagactcccgacaccccagttattatggtgggtcctggaaccggtgtggctcctttcagggcagccatccaagagcgggtcgcccagggacagacaggcaatttcctgttcttcggatgtcgctggcgggatcaggacttctactgggaggccgagtggcaggaactggagaaaagagattgtcttaccttgattccagccttcagccgggagcaggagcagaaagtttatgtccaacacaggttgagggaactcggcagtctggtatgggaacttctggaccggcagggagcttacttctacctggctgggaatgctaaatcaatgcccgccgacgtgagcgaagctttgatgtctatctttcaggaggagggcggactctgttcccctgacgccgccgcctacctggccagactgcaacagacaaggaggttccagacagaaacctgggcatag

SEQ ID NO: 14816 - DNA, 1860 bp, synthetic construct
  source 1..1860: mol_type = other DNA; note = Synthetic coding sequence
atggacgaccagcaggctttgaactccatcatgcaagacctcgccgtgctgcataaagccagcaggcctgctctgtcgctccaagaaacccgcaaggccaagtccagctcgcccaaaaagcagaacgacgtcagggtgaaatttgaacaccgcggcgagaaaaggatactgcagttccccaggcccgtgaaactggaggatctgcgttcgaaggctaaaatagcattcgggcagtcaatggatcttcattacaccaataatgaactggtcataccactgaccacccaggacgacctggataaggctgtggagctcctggaccgatctatccatatgaagagtttgaaaatactgctggttataaacggttcaactcaggccaccaacctcgagcccctcccctctctggaagacctcgacaacaccgtgttcggcgccgaaaggaagaagcgtctgagcattatcgggcccacgtcccgcgacaggtcttcgcctccaccaggctacatcccagatgagctgcaccaggtggccaggaacgggagtttcaccagtatcaacagcgaaggggaattcattcctgagtccatggaccagatgctggatccactgagcttatcttcccctgagaactctgggagcgggtcatgtcccagtctcgattcacccttagatggcgagagctatccaaaaagtaggatgcccagggcccaaagctatcctgacaaccatcaggagttctcagattacgataatcccatatttgagaagtttggaaaaggaggcacttatccaaggaggtaccacgtgagctaccaccaccaggaatacaacgacgggcggaagacttttccccgtgctcgtcgaacccagggcacctccctgagatcacctgtatctttctcgcccacagatcactctctatcaacctctagcggctcttcaatcttcaccccagagtacgatgactcaagaatccgacgtcgaggaagcgatatcgataaccctactctgacagtgatggatatctcacccccaagccggtctcctagagcacccactaattggagactcggcaaactgctgggccagggggctttcggcagagtctatctctgttacgatgtcgacaccggtagagagttggcggtgaagcaggttcagtttgaccccgatagcccggagaccagtaaggaagtgaacgcactcgagtgcgagatccagctgttgaagaacctgctgcacgagcgcattgtgcagtattacgggtgtttacgagacccccaggaaaagactctatcaatatttatggagtacatgcctggtgggagcattaaagaccagcttaaggcttatggggctttgactgaaaacgtgacaaggaagtacacccgccagatcctggaaggggtccattatcttcactctaatatgatcgtgcacagagatatcaagggggcaaacattctccgcgattccaccggtaacgtgaaactgggggacttcggtgctagtaaacggctgcagactatctgtctgtccgggactggtatgaagagtgtcacagggaccccctattggatgtcgcccgaggtcattagtggcgaaggttatgggcgtaaggcggatatctggtccgtcgcgtgtacagttgtagagatgctgacagagaaacctccttgggctgaattcgaagctatggccgcaatcttcaagattgctacacagcccacgaatccaaaactcccaccccacgtgagcgactatactcgtgatttcctgaagagaatttttgtagaagcgaagctgaggccatctgctgatgaattactgaggcacatgtttgtccattaccactag

SEQ ID NO: 14817 - DNA, 828 bp, synthetic construct
  source 1..828: mol_type = other DNA; note = Synthetic coding sequence
atgtcaactatcggctccttcgagggcttccaggcggtgtcattaaagcaggagggggacgaccagccctctgagaccgaccacctcagcatggaggaggaagaccctatgccgcgtcagatttcccgacagtcgtctgtaactgagtctactttataccctaatccttaccatcagccatatatatcccgcaaatattttgcaacccgtcctggcgccatagaaactgccatggaagacctgaagggccacgttgccgagacttccggagaaaccattcagggattttggcttctgactaagatcgatcactggaacaatgagaaagagcgtatcctgctggtgaccgacaagaccctactgatctgtaagtacgattttatcatgctttcctgcgtacaactgcagagaatccccctttcggccgtgtatagaatctgcttgggaaagttcaccttcccgggcatgagcttggacaaacgtcaaggtgaaggccttcggatatattgggggtcgccagaggagcagagtctgttgtcccggtggaacccatggtctactgaggtcccttacgctaccttcacagaacaccctatgaagtatacatcagagaaatttctcgaaatttgtaaactttctggcttcatgtccaagctcgtgccagcgattcagaacgcccacaagaattccaccggcagtggaagaggaaaaaagctcatggtgctgacagagccgatattgattgaaacatacaccggcttgatgtcctttattggaaatcgcaataaattgggctattctctggcccgggggtcgattgggttttag

SEQ ID NO: 14818 - DNA, 1629 bp, synthetic construct
  source 1..1629: mol_type = other DNA; note = Synthetic coding sequence
atggcagccgcggctggagccgctgccgcgcctggcagccgagaacctcaagaccgcccggaatgtggcgccgggcatcctggccctcgttactacaggcaccctgagcggtggctcttacggcccgaagcatttctcggccctctgcgaaccagggcgccttcagctgaagatagccagagagagcgacctgccgccagatccggaccggccatgtcaagaagggtagtgcgccagtcaaagttcaggcatgtgttcggacaggccgctaaggccgatcaggcatatgaggacattcgcgtttccaaagtgacctgggacagctcgttttgcgctgtgaatccgaagttcctcgctattattgtagaggcagggggcggcggagcgttcatagtccttccactcgcaaagaccggccgtgtcgacaagaactacccacttgttacaggccatactgccccagtgctggatatagactggtgtccacataacgacaacgtaattgcatccgcaagcgacgatacaactataatggtatggcagatcccggattacacccccatgagaaacatcacagagcccatcataactctggagggtcattctaagagggtaggcatcctgtcctggcatcctaccgccaggaatgtactgctctcagccggaggggacaatgtaatcattatctggaacgtcggcactggcgaagtgctgctctcccttgacgatatgcatcccgacgtcatccattcagtgtgttggaatagtaatggctcattgctcgcaaccacctgcaaggataagacactgcgaattatagacccaaggaaagggcaggtggtggctgagcggttcgccgcccatgagggaatgcggcccatgcgagctgtgttcacccgacaggggcacattttcaccaccggcttcacacggatgtctcagagagaacttggcctttgggatcccaataactttgaagagcccgtggccctgcaggagatggacacttctaacggcgttttgctccccttctatgacccagactcgtctatcgtctacctttgcggaaaaggagactcatctattcgatatttcgagatcacagacgagcctccctttgtacactacttaaacacattctcaagtaaagaaccgcagcgagggatgggctttatgcccaagcgcgggctggatgttagtaagtgtgaaatcgcacgcttttacaagctccacgagaggaaatgcgagcccatcataatgaccgtgccgcgaaagtccgatcttttccaggacgacttatatcccgacactcccgggcccgagcccgcattggaagcagacgagtggttgagtggccaggacgcagagcctgtcctcatttcactccgcgacgggtacgtgccgcccaaacatagggaactgcgagtaactaaacgcaatatactggatgtgcggccgccatccggacctaggcgatcccagagcgcaagcgatgcccccctgtcgcagcatacgctcgagaccctgctggaggaaatcaaggctctccgcgaacgtgtccaggcccaggaacaacggataacggccctcgagaacatgctctgtgaactcgtagacggaaccgattag

SEQ ID NO: 14819 - DNA, 2550 bp, synthetic construct
  source 1..2550: mol_type = other DNA; note = Synthetic coding sequence
atgtccgacacccgacggcgcgttaaggtttacaccctcaacgaagacagacaatgggatgaccgtggaaccggacatgtgagttctacttacgtggaagagctgaaaggtatgtcattgcttgtaagagcggaaagcgatggctctcttctcctggagtctaagattaacccgaatactgcctaccagaaacaacaggacaccctgatcgtttggtccgaggcagaaaattatgatctcgcactgtctttccaggaaaaagccggctgcgatgagatatgggaaaaaatctgccaggtgcaggggaaggacccctctgtggaagtcacgcaggacctcatcgatgaaagtgaagaggagcgctttgaagaaatgcccgagacaagccacttgattgacttgccaacgtgcgaacttaacaaactggaggaaattgccgatttagtgactagtgtgctgtcttcacccattaggagggagaagctggccctggccctcgaaaacgagggctatataaagaagctgctccagctatttcaggcctgtgaaaacctggagaataccgagggccttcatcacttatacgaaattataaggggcatcctgtttctaaacaaagcaacgctttttgaggtgatgtttagcgacgaatgtattatggacgtggtgggttgcctcgaatacgatcctgctcttgctcagccaaagaggcatcgtgagttccttacaaagaccgccaaatttaaggaagtgatccccatcaccgacagcgaactaaggcaaaagattcaccagacatacagagtgcagtatatccaagatatcatcctccctacaccatcagttttcgaagaaaatttcctgtctacgctcacaagctttatcttttttaataaagtggagatcgttagcatgctacaggaagatgaaaagtttttgtccgaggtgttcgcgcagctcacagatgaagccacagacgatgataaacgtagggagttagtcaatttcttcaaagagttctgcgctttttctcagaccttgcagcctcagaatcgcgatgccttctttaagactttggcaaaacttggtatccttcctgcgctggagatagtaatgggcatggacgacctgcaagtgagaagcgcagccacagatatcttctcatacctggtcgagttttctccctccatggtcagagaattcgtaatgcaggaggcacagcaaagtgacgacgatattttacttatcaatgtcgttatcgagcagatgatttgtgatacagaccccgagttgggaggggctgtccaactcatgggcttactgaggacgttaattgatccagaaaacatgttagccaccacaaataaaacggaaaaaagtgagtttctgaatttcttctacaaccactgtatgcatgtcctgaccgccccgcttctgacgaacacttccgaggataaatgcgagaaggattttttcctgaagcattacagatacagctggagctttatctgtacccctagtcactctcactcacattcgaccccatcctccagcatttctcaggacaatattgtggggagtaacaaaaacaatactatctgtcccgacaactaccaaaccgcccaactgttagctctgatcctcgagctcctgactttctgtgtggagcatcatacgtatcatattaagaactacatcatgaacaaggacctgctgcggagggttctggtccttatgaacagtaaacacacattccttgcgctctgtgctcttcgctttatgagaagaatcatcggccttaaggatgaattttacaatcgctacattacaaagggcaacctttttgaacccgtgatcaacgcattacttgataatggcacccgttacaatctgctcaacagtgcggtcattgaactgtttgaattcatcagagtcgaagacatcaaaagcttgaccgctcatatagtggagaacttttataaagccctcgagagtatcgagtacgtacagaccttcaaggggctgaagaccaagtacgaacaagagaaggataggcagaatcagaagcttaattccgtaccaagcattctgcggtccaatcgatttcggcgagatgcaaaagccctggaagaggatgaagaaatgtggtttaacgaagacgaggaggaggaggggaaagccgtggtggcaccagtggagaagcctaagcctgaggatgacttccctgacaattatgaaaaattcatggaaactaaaaaggctaaagagtctgaggacaaggagaacctacctaagcggacgagccccggaggcttcaaatttacattttcgcattcagcttcagctgccaacgggaccaacagtaaatcagtagtcgcacaaattccccctgccacttcaaatgggtcatcttccaaaacaactaatctaccaacctccgtgaccgcaaccaaaggctccctcgtgggattggtggattacccagatgatgaggaggaagacgaagaagaagaatctagtccccgcaaaaggccacgactcgggtcttag

SEQ ID NO: 14820 - DNA, 669 bp, synthetic construct
  source 1..669: mol_type = other DNA; note = Synthetic coding sequence
atgggagacattcccgctgtgggactgtccagttggaaagcctctcccggtaaggtgacggaggccgtgaaggaggcgatagacgccggatataggcacttcgactgcgcatacttctaccataacgaacgagaggtcggagccggtatacgctgtaaaattaaagaaggtgctgtgcgcagagaagatctgttcatcgccaccaaattatggtgtacatgccacaagaaatctctggtggaaacagcctgtcgcaaatccctcaaggcgctgaagctgaattatttggacctctatctgatccactggcccatggggttcaagcctccccaccctgaatggattatgtcttgcagtgaactgtccttttgtctttcgcaccccagggttcaggacctccctctggatgagagcaacatggtcattcccagcgataccgacttcctggacacctgggaaattctaataagattccagatacagagaaacgtaatagtcatacctggatcgatcactccatctcatatcaaagaaaacattcaggtatttgatttcgagttaacgcaacacgatatggacaatatactttctctcaatcgtaacttgcgcctggcgatgtttccgattactaaaaaccataaagactatccttttcacattgagtattag

SEQ ID NO: 14821 - DNA, 1080 bp, synthetic construct
  source 1..1080: mol_type = other DNA; note = Synthetic coding sequence
atgcccaacccgtcaagtacctccagtccttacccattgccagaagagatccgtaacctgctagcagacgtcgaaaccttcgtagccgatattctaaaaggcgaaaatctgtcaaagaaagcaaaggagaaacgggaaagtttgataaagaaaataaaggacgtcaagtccatctacctgcaggagttccaggacaagggggatgctgaagatggcgaagaatacgatgacccgtttgccggacctcctgacacaattagcctagctagtgagcgctatgataaagacgacgaggctccgagcgatggagcacagttccccccaattgccgcccaggatctgccctttgtcttgaaggccgggtacttagagaagcggcgcaaagatcactcgtttcttggttttgaatggcagaaacgatggtgtgcactgtctaagactgtgttttattactatggctccgataaggataagcagcaaaagggcgagttcgctattgatggctactccgtgcggatgaacaacacactgcgaaaggatggtaaaaaggattgctgcttcgagatcagcgcgcccgacaagcgaatctatcaatttaccgcggcttctcccaaggatgcagaagaatgggtgcaacagctgaagtttgttctgcaagatatggaatcagatataattcccgaggactacgacgaaaggggcgaattgtacgatgatgtcgatcaccccctgcctatctccaatccgctgacctcctcgcagcccatcgatgatgagatctacgaagaactgccggaggaagaggaagacagcgcccctgtgaaggtggaagaacagcggaagatgtcgcaggactcagtccatcacactagcggagataaatctacggactacgccaacttttaccaggggttgtgggactgcaccggggctttttctgatgagcttagtttcaagaggggggacgtcatttacatactaagcaaagaatacaacaggtacggctggtgggtcggcgaaatgaagggcgcgatcgggctagtgcctaaggcgtacattatggagatgtacgatatatag

SEQ ID NO: 14822 - DNA, 1227 bp, synthetic construct
  source 1..1227: mol_type = other DNA; note = Synthetic coding sequence
atgaagtgtgagcattgcacgcgaaaggaatgtagcaagaaaaccaaaaccgatgatcaagaaaacgtgtccgccgacgccccatctccagcacaggagaatggagagaaatgcgatacgtccaagcacaaagtgctcgtcgtgtcagtctgcccacagtctttaccatattttgcggctaaattcaacctcagtgttacagatgcctcccgccgcctctgcggtttcctgaaaagtttaggcgtacattatgtatttgacaccaccatcgcagctgacttcagtattttggaatcccagaaagagttcgtgaggcgataccgtcaacatagcgaggaggagaggactctacccatgttaactagcgcctgtcccggatgggttcggtacgccgaacgcgtcttgggccggcccatcaccgcccatctttgcaccgctaagagccctcaacaggtcatgggctccctggtgaaggactattttgcccgccagcaaaacttgtctcctgagaaaatcttccatgtgatagtagccccttgttatgataaaaagctcgaagcacttcaggaaagcctgccacctgccctacatggctcacggggggctgactgcgtgcttacatcgggcgaaatcgcgcaaattatggagcaaggagatctgtccgtgcgggatgccgccgtagataccctgtttggagatctaaaggaggataaagtgactagacacgacggtgcaagttcagacggacacctcgcccatatcttccgacatgctgctaaggaactgtttaacgaggacgttgaggaggtgacctatcgtgctttgcgcaataaggattttcaggaagtcactcttgagaaaaatggggaggtcgtgctccggtttgccgctgcctacggcttcagaaacatccaaaatatgatcctcaaattgaagaagggaaagttcccattccacttcgttgaggtcctggcatgcgccggcggttgcctcaacggcaggggtcaagcccaaactcctgatggccatgcggataaggcgctgctgagacagatggagggaatttatgcagatatcccagtgcggcggcccgaatccagtgctcatgttcaggaactgtatcaggagtggttggagggtattaattctccgaaggcgagagaagttctccatactacgtaccaaagtcaggaaaggggaactcactcccttgatatcaaatggtag

SEQ ID NO: 14823 - DNA, 1104 bp, synthetic construct
  source 1..1104: mol_type = other DNA; note = Synthetic coding sequence
atggcccttaatgtcgcaccagtacgagacaccaagtggttgactctggaggtgtgtcggcaattccagaggggaacatgtagcaggagtgacgaagaatgcaaatttgcccaccctccaaagagttgtcaggtggagaatggcagggtgatcgcctgttttgactctcttaaaggcagatgcagcagggagaactgcaaatatctgcaccctccaacacacttgaagactcaactggagatcaatgggagaaacaatcttatccagcagaaaactgccgccgcgatgctggcccagcagatgcagttcatgttccctgggacccctctccatcccgtgcccacatttcccgttggaccggctatcggcaccaataccgcaatttccttcgctccctatctggcgccagtcaccccaggtgtgggactggtgcctaccgagatcttaccaacaacacccgtgatcgtgcctggaagtcctccggtgactgtgcctgggtcgacagctacgcagaagctgcttcgcactgataaactggaagtctgcagagagttccagagaggtaattgcgctcgcggcgagaccgactgtagatttgctcaccctgcagattcgactatgattgacacgtcagacaatacagtgaccgtgtgtatggattatatcaaaggtaggtgtatgcgggagaaatgtaagtactttcacccaccagctcatctccaggctaagatcaaagccgctcagcatcaggccaaccaggctgccgttgccgcccaagcagctgccgctgccgcaaccgttatggccttccctcctggcgccctgcacccactgccaaagagacaagcactggagaaaagcaacgggacctctgccgtgtttaacccttccgtgttgcattatcaacaggcacttaccagcgcacaactccaacagcacgccgcattcattcccactggctctgttctgtgtatgactcctgcaacaagcatcgtaccgatgatgcatagtgctacttctgctactgtgagtgccgctaccacaccagcgacttccgtaccgttcgcggccactgcgaccgctaatcaaatcatcctgaagtag

SEQ ID NO: 14824 - DNA, 3909 bp, synthetic construct
  source 1..3909: mol_type = other DNA; note = Synthetic coding sequence
atggcccttaggccaggagctggcagcggcggcggtggagccgccggcgctggagccggcagcgcaggcgggggggggtttatgttccccgtggccggtggcataaggccaccccaggctggactgatgccaatgcagcagcagggcttcccgatggtaagcgtcatgcagccgaatatgcaggggataatggggatgaactacagtagccagatgagccagggtccaattgctatgcaggccggtatccctatggggcccatgccggccgcaggaatgccctatctgggccaggcacctttcctggggatgcgccctcccggcccccaatacacccctgacatgcagaaacagttcgccgaagagcaacagaagcgctttgagcagcagcaaaagctcctcgaggaggaacggaagcgccggcagttcgaggaacaaaagcagaagcttagactgctgtcttcagtcaaacctaagacgggcgagaagagtcgcgatgacgcgctggaggccataaagggaaacctggatggatttagtcgtgacgccaagatgcacccaacacctgcttctcatccgaaaaagcccggccccagccttgaagagaagtttctggtttcttgtgacatctctacctcaggacaggagcagatcaaactcaatacgtcagaagttggccataaagccctgggaccagggagctccaagaaatacccctctctcatggcgtccaatggtgtagccgtggatggctgtgtatctggcacaacaactgctgaggcggaaaacacttctgaccagaatctctccatcgaggagagcggtgtcggtgtgttcccctcccaggatccggcacagccgcgcatgcccccttggatttacaacgaatccctcgttccagatgcttacaagaagatcctggagaccaccatgacgccaactggaatcgacaccgcaaagctctatcctatcctgatgtcctctggcttaccccgggaaacattaggccagatttgggcacttgccaatcggaccacccctgggaagctcacgaaggaggagttgtacactgtcctggccatgatagccgtcacacagagaggggtgccggccatgtcccccgacgcgcttaatcagtttcctgcagctcctattccaacgcttagcggcttctcaatgacgctgcctacacccgtgagccagcctacagtgatcccctccggccccgcaggtagtatgcctctctctctcgggcaacccgtaatgggcatcaaccttgttggcccagtgggtggtgccgcggcacaggcctctagtggctttatccccacataccctgccaaccaggtggttaagcctgaggaggatgatttccaggactttcaggacgcaagtaaaagcggatcattggatgattcttttagcgatttccaggagcttcctgcctcctctaagacatctaactcacagcacggaaattcagccccctcgttactaatgcctcttccaggaactaaagccctgcccagcatggataagtacgccgtgttcaaggggattgctgccgataaatcatcagaaaataccgtcccaccgggtgacccaggcgacaagtactcagcctttcgtgagttagaacagaccgccgagaataagccattgggggaatcgtttgcagagtttaggtccgcaggaaccgacgatggctttactgacttcaagacggcagatagcgtgagcccactcgagccccccacgaaggacaaaacattcccccctagtttcccaagcgggacaatacagcaaaagcagcagacccaagtgaaaaacccgcttaatctggccgatctagacatgttttccagtgtgaattgttccagcgaaaaacccctgagttttagcgcagttttctctacgagcaaatctgtttcaacccctcaatcaacaggaagcgcggcaactatgactgctttagcggcaactaagacatcaagcctagccgatgatttcggggagttctctctgtttggcgaatattcaggcctggcccctgtgggcgaacaagacgattttgccgactttatggccttttctaactcttctatcagctccgagcagaaacccgatgataaatacgatgctctaaaggaagaggcctcacccgtgccactgacgtctaatgtcggctcaactgtgaaaggcggccaaaacagcacggctgcatctaccaaatatgatgtttttaggcagttatccctggagggctctggccttggagttgaggatctaaaagataatacaccttcaggcaagtctgacgacgacttcgccgacttccacagttccaagttctcatcaatcaatagtgataagagcctgggagaaaaggcagtggccttcagacacaccaaggaggatagcgcgtcggttaagtcattagacctgccctccatcggcggctcatccgtaggcaaagaagactcagaagacgccttgtcggttcagttcgacatgaaactggcggacgtcggaggtgatctgaaacatgtaatgtccgatagcagcttggatctgccaactgtttctgggcagcatcctcctgctgcggacatagaggacttgaagtacgccgccttcggttcatactcttcaaactttgccgtgtccaccctgacctcttatgactggtctgaccgagatgatgctacccaagggcggaaactctcgcccttcgtcctgagcgctgggagcggttctcctagtgctacaagtatcctgcagaagaaggagaccagttttggctcatcagagaacatcaccatgacctccctgagcaaggtgacgactttcgtctctgaagatgctctcccagagactacgtttcccgctctggcatcctttaaggacactataccacagacgagcgagcagaaggaatatgaaaaccgcgactacaaagactttaccaagcaggacttgcccactgctgagagaagccaagaagcgacatgcccttctcccgccagcagcggagcgagccaggaaacccccaatgaatgttcagatgattttggagaatttcagagcgaaaagccaaagatctcaaagttcgattttctcgttgctacttcccagagtaagatgaaaagcagcgaggagatgatcaagtccgagctcgctacctttgacctgtctgtccagggaagtcacaagcgttcactcagcttgggcgacaaagagatctcgcggagttcccccagtcccgcactggagcagcctttcagggaccggtccaacacgctaaatgaaaaaccggccctcccagtgatccgggataagtacaaagacctgactggagaagtggaggagaacgaacgatacgcgtacgagtggcagcgatgtctcggatcggcattgaacgttattaagaaggccaacgacacactgaatggcatttccagcagttccgtgtgcactgaagttatccaatccgcacagggaatggaatacctcctgggggtggtagaggtgtaccgcgttaccaagcgtgtggaactaggtatcaaggccacagcagtgtgctctgaaaagctccagcaactgctaaaggacatagacaaggtctggaataatttgattggatttatgtcactcgccacgttgacacctgatgagaacagtctcgacttcagcagttgcatgctgagacccgggataaaaaacgctcaggagctagcttgcggagtctgtctgctcaatgttgatagcagatcaagagcattcaatagtgagacagactcctttaagctggcctacggcggtcaccagtatcacgcctcctgtgcgaacttttggattaactgtgtcgagcccaaacctcccgggctagtccttcccgacttgctctag

SEQ ID NO: 14825 - DNA, 1011 bp, synthetic construct
  source 1..1011: mol_type = other DNA; note = Synthetic coding sequence
atggaaagcgtcctgtctaagtatgaagaccagatcacgattttcactgactacttagaggaataccctgatacggatgagctcgtttggatccttggcaaacaacacctgctgaagaccgagaagagcaagctcctcagtgatatttctgctagactgtggtttacgtacaggaggaagttctcccccattggtgggacaggaccgagttccgatgccgggtggggctgcatgttacgatgcgggcagatgatgttggcccaggccctgatttgcagacatcttgggagagattggagttgggagaagcagaaggaacagcctaaggaataccagcggatccttcaatgctttttggatagaaaggactgctgctactccattcatcaaatggcgcagatgggtgttggagagggcaagtcaatcggtgagtggtttggacctaacaccgtggcccaagtcttgaagaaattggccttgttcgacgagtggaacagcttagccgtgtacgtgtccatggacaatacggtcgtaatcgaagatataaaaaaaatgtgtagagttttgcccctgtcagctgatacagccggagataggccacctgattccctaaccgcatctaaccaaagcgatgaattgatcttcctagacccccacaccacacagactttcgtggacacagaggagaatggaaccgtgaacgatcagacattccactgcctccagtcgccacagcgaatgaatatactcaacctggatccatcagtggccctgggcttcttttgcaaagaagaaaaagactttgataattggtgctctttggttcagaaggagattttaaaagaaaacttgcggatgtttgaactggtgcaaaagcacccctcccactggcctccttttgtgccacctgccaaacctgaagtaaccacaacaggcgctgagtttattgattccactgagcagctggaggaattcgacttggaggaggatttcgaaatcctgtccgtttag

SEQ ID NO: 14826 - DNA, 3018 bp, synthetic construct
  source 1..3018: mol_type = other DNA; note = Synthetic coding sequence
atgcttcgtaccgccggccgcgatgggttgtgccggctgagtacctatctcgaagagttagaggctgtagaactcaaaaagttcaagctttatctggggaccgccaccgaattgggagaaggcaagatcccctgggggagcatggagaaagctggccctcttgagatggcacaactcctcatcactcacttcgggcccgaagaagcatggaggctggctttatctactttcgaacgcatcaataggaaggacctttgggaacggggccagagagaggacctggtccgggacactccccctggcgggccatcctcccttgggaatcaaagcacgtgtctgcttgaagtgtccctagtgacccctcggaaggaccctcaggagacctatcgtgattacgtgagacggaaatttcgtctcatggaggatcgtaatgctcgcctgggggagtgcgtgaatctttcccacagatacaccagattactgctggtcaaggagcactctaacccgatgcaggtccaacagcagctactggatacaggaagaggccatgcgcggacagtggggcatcaggccagtcccatcaagatcgaaactctgtttgagcccgacgaggagcgaccagagcctccaaggacagttgtgatgcagggcgccgctggaatcggaaaaagtatgctagcccataaagtcatgttggactgggctgatggtaaattgttccagggccgcttcgactatttgttctacattaactgccgggaaatgaaccagagcgccactgagtgtagcatgcaggatctcatcttcagctgttggcccgagcccagcgcaccacttcaggaacttatcagggtacctgagagacttctcttcatcatcgacgggtttgacgagctcaagccgagctttcatgatccacaaggcccttggtgcctgtgttgggaggaaaagcggccaaccgagctgctcctcaattctcttattaggaaaaagttactgcctgaactgtcacttttaataaccacccgacccaccgctttggaaaagctgcacaggctactcgaacaccctcggcatgtcgaaattcttggctttagcgaagcagaacggaaagaatacttctataagtacttccacaacgcagagcaggcgggccaggtgtttaattatgttagggacaacgaacctttgtttacaatgtgtttcgtccctttggtctgctgggtggtctgtacatgcctgcagcagcagcttgaagggggaggcctgctgcggcagactagtagaactacaactgccgtgtacatgctgtacctgctgagccttatgcagccgaaacccggggccccgcgtcttcagccacccccaaaccaacgcggactttgcagtctcgctgccgacggtctttggaatcaaaaaattctctttgaagaacaggatctaaggaagcatggccttgacggtgaagatgtctcggccttcctgaacatgaacatattccagaaggacattaactgcgagagatattattcctttatccatttatctttccaggaatttttcgccgccatgtactacatcctggacgaaggcgaggggggagccggacccgaccaggatgtgacccgcctgcttacagagtacgctttttccgaaagatccttcctggccctgacatcacggtttcttttcgggctactgaacgaggagactcggtcccacctggagaagagcctctgttggaaggtctccccccatatcaaaatggatctgctgcagtggattcagagcaaagctcagagtgacggttccacactgcagcaaggctcacttgagttctttagctgcctttacgagatccaggaggaggaattcattcaacaggccctgtcacacttccaggtgatcgtcgtgtcgaacatcgcctctaagatggaacatatggtcagcagtttctgtctcaagcggtgtcgtagtgcgcaggttctacacctttacggagccacctattcagcagacggagaagaccgcgccagatgtagcgcgggcgcccatacgcttctcgtccagctccgccccgagcgaactgtgctcttggacgcctactccgagcacctagcagccgcgctttgtacaaaccccaacctgattgaactctcactatatcgcaacgctcttgggtctcgtggagttaagcttctatgtcaggggctccgccatcccaactgcaaattgcagaacctgcggctaaagcgctgtaggattagctcttccgcctgtgaggatctatcagcagctctcatcgcaaataagaatctgaccaggatggacctcagcggcaatggagtcggatttcctggaatgatgctcctctgtgaaggcctgagacaccctcagtgtaggctgcagatgattcagttgcggaagtgtcagctcgaatccggggcatgtcaagaaatggcatcagtgcttgggaccaatccacacctggttgagctggatctgactgggaatgctctcgaggacctcgggctgaggctactttgccaggggttaaggcatcctgtctgtaggctcaggaccttatggctgaaaatctgccggttaaccgccgcagcctgtgatgagctggcttccacgctgtctgtgaaccagagtctgcgcgaactggatctgagcctcaacgaactgggcgaccttggtgtgctgctgttgtgcgaaggactgaggcaccccacctgtaaactccagaccctcaggctcggcatttgtcgacttgggagcgccgcgtgcgaggggttatccgtggttctccaagccaatcacaatttgcgcgaactggatctgtcatttaacgatctcggagattggggcctttggcttctagccgaaggtcttcaacatcccgcctgcaggctccagaagctgtggctttttggcatggacctaaataaaatgacccactctcgcctggcagctttgcgtgtaactaaaccctacctagacatcggatgctag

SEQ ID NO: 14827 - DNA, 618 bp, synthetic construct
  source 1..618: mol_type = other DNA; note = Synthetic coding sequence
atggtcagttcctgctgcggctccgtgtgcagcgaccaaggatgcgggctggagacctgttgtcggccttcgtgctgccaaacaacctgctgtaggacgacatgttgcaggcccagctgttgtgtctccagctgctgtaggccccagtgctgccagagcgtttgctgtcagcccacctgctgtaggccgtcttgttgtccctcttgctgccagactacttgctgtagaaccacatgttgccggcccagttgttgcgtttcttcctgttgtcgacctcagtgctgccaaagcgtgtgttgtcaacctacatgttgcagacctagttgcagcatctctagctgttgtcgcccatcatgttgtgtttctagatgttgccggagccagtgttgccagagtgtgtgttgccagccgacgtgttgccggccctcctgttgtatctcttcctgctgtaggccatcttgctgcgaaagtagttgctgtagaccctgttgctgtcggccctgttgttgcttgcgacctgtctgtggtagagtcagctgccataccacgtgctacaggccaacatgtgtgatttcgacttgcccacgaccgctgtgttgcgcgtccagctgctgctag

SEQ ID NO: 14828 - DNA, 573 bp, synthetic construct
  source 1..573: mol_type = other DNA; note = Synthetic coding sequence
atgcagagctgcgagtcctcgggcgatagtgccgatgatcctctgtcgaggggcttgagaagaagaggtcagccacgggtcgtggttatcggcgccggcctcgctgggctggcggcagccaaagccctccttgaacagggttttaccgacgtcacagtactcgaagctagctcgcatataggcgggcgcgtgcaatccgtgaagttgggtcacgccacatttgagcttggtgccacctggatacacggctcccatggaaatcccatctaccacttagccgaggctaacggactgctggaggagacgactgacggcgaacgctccgttggacgcatttccctgtattccaaaaacggagtcgcttgttacctcacaaaccacggcagacgcattcctaaggacgtcgtggaggaattctcagacctgtataatgaaccaatgcaggtgctgtttagtggagaggccacacacaggaagtattacagcactactcacggcgctttgctgagcggacaacgtgaggccgcgagactgattgagatgtaccgagatttgttccagcagggcacgtag

SEQ ID NO: 14829 - DNA, 3945 bp, synthetic construct
  source 1..3945: mol_type = other DNA; note = Synthetic coding sequence
atggccttgaggcctggggccggttcgggagggggaggggctgcgggagctggggcaggatctgctggcgggggtggctttatgttccccgtagcaggagggatccgtccaccacaggctggcctgatgcctatgcagcagcaaggcttcccaatggtgtccgtgatgcaaccaaatatgcagggaattatgggcatgaactactcgtcccaaatgagccagggtcccatcgctatgcaggccggtatccctatggggcccatgcccgcggcaggtatgccctacctcggacaggccccatttctcggaatgcgcccaccaggtccacagtatactcccgacatgcagaagcagttcgccgaggaacagcagaagcgcttcgaacaacagcagaagcttttagaagaagaacgcaaaaggcggcagttcgaagaacaaaagcagaagctccgcttgctgtcgagtgtgaagcctaagaccggtgagaaatctcgggacgacgcactcgaagctatcaaaggaaaccttgacgggttctcacgggacgctaagatgcatccaaccccagcctcacacccaaaaaagcccgggccatcactcgaagaaaaattcctcgtgtcttgtgacatatcaacaagcggacaggagcagattaagctcaacaccagcgaggttggacataaggccctcggtcctgggtcttctaaaaagtatccttcccttatggctagtaatggggtagctgttgacggatgcgtttccggtactaccactgccgaggcggagaacactagcgatcagaacttatcaatcgaagaaagtggcgttggagtgttcccgtctcaggaccccgcacagcccaggatgcccccatggatctataacgagagcctcgtaccagatgcctacaagaaaatcctcgaaacgaccatgacccctacgggaattgataccgctaagctgtatccgattctcatgtcctcaggactgcccagagaaaccctcggtcagatctgggccctggctaatcggaccacacctggcaaacttaccaaggaggagttgtacaccgtgctggccatgattgccgtgacccaacggggggttcccgctatgagccccgatgcactcaaccagtttcctgccgccccgattccaactctctcagggttctcgatgaccttgcccacacccgtctctcaacctactgtcatcccgtccggcccggctggcagcatgcctctcagcttggggcagccagtgatgggcatcaatctagtcgggcccgtcggcggtgcagccgcccaggccagtagcggctttattcctacatatcctgctaatcaggttgtgaagccagaggaggacgattttcaggacttccaggacgcttccaaatccggctctctcgacgatagttttagcgacttccaggagctgccggccagcagcaagacttccaacagccagcacggaaattctgccccctccctcttaatgcccctgcccgggacaaaggcgttacccagtatggacaaatacgctgtgtttaaggggattgctgccgataaatcttccgaaaatactgttccccccggcgacccaggggacaagtactcagcctttcgggagcttgagcagactgcagaaaataagcctctcggcgaatctttcgcagagtttaggtccgcaggaacagacgatggcttcacagatttcaagacagctgactccgtgagccctctcgagccgcccaccaaggacaagacatttcctcctagctttccttcaggaaccatccagcagaagcagcagacccaggtcaagaatcctctgaatctcgccgatttggacatgttctcaagcgttaactgcagctcggagaaacccctctccttctccgccgtgttctccactagcaagtctgtgagtacacctcagtccactggctccgccgccaccatgacagccctggctgcaacgaaaactagtagtctagccgatgatttcggtgaattcagcttgtttggcgaatactctggattggctccagtcggtgagcaggacgactttgcagactttatggcattttctaactccagtataagcagtgaacaaaagccagacgacaaatacgatgccttgaaggaagaggctagcccagttcccctgacatccaacgtgggaagtaccgtaaaaggggggcagaattctactgccgcatctaccaagtatgacgtgttccgacagcttagtctggaagggtctggcctcggggtcgaagacctcaaggataacacccccagcgggaagtcagatgatgactttgccgacttccattcctcgaagttctcctcaatcaattcggacaagagtctgggggagaaggccgtcgcattcaggcatactaaagaggactctgcttcagtaaagagcctggatcttcccagtatcggcggctcttccgtgggaaaagaagattcggaagacgccctgagtgtgcagttcgacatgaagctggcagatgtggggggcgatcttaagcacgttatgtctgacagttccctcgatttgccaactgtaagtgggcagcacccacctgcggcagacatagaggatctgaaatacgccgctttcgggagctatagctctaacttcgctgtctccactcttacctcttacgactggagtgatagagatgatgccactcaaggtagaaagctgtctccctttgtgctctccgccggctctgggagtccttccgcaactagtatcctacagaaaaaggaaacctctttcggctcctccgagaatatcacgatgacctctctatccaaagtaacaacctttgtgtcggaggacgctctacccgagaccacctttccagctctggcctcatttaaggataccattcctcagacgagcgagcagaaggagtacgaaaatcgggattacaaggacttcactaagcaggatctgcccacagccgagcgaagtcaagaagcaacgtgtcccagtccagcttcttccggagcatcccaagagaccccaaacgaatgcagtgacgactttggtgagtttcaatcagagaaacccaagatcagtaaattcgattttttagtcgctacctcacagagtaaaatgaaatcatccgaggagatgattaagtccgagctcgccacttttgacctgtccgtgcaaggatcacacaaaagaagcctctcactgggggataaggaaatcagccggtcgagtcctagcccagctcttgagcaaccttttcgtgacagaagcaatactcttaacgagaagcctgcactccccgtgattcgggacaaatacaaggacctaactggagaggttgaagaaaatgagcgctacgcttatgagtggcagaggtgtctgggctctgcgctgaacgtcattaagaaagctaatgataccctgaacgggatttcgtcctctagtgtatgtacagaagttattcagagcgcccaggggatggagtatttgttaggcgtggtcgaggtgtaccgggtcaccaagcgtgtggaactgggtataaaagcaaccgcagtctgctcggagaagctgcagcagcttctcaaagacatcgataaggtgtggaataacctgatcgggtttatgagcttggctacacttacccctgacgaaaatagcctggacttctctagctgcatgctgagaccagggatcaagaatgcccaggaactggcttgtggcgtgtgcctgctgaacgtggactctcgtagccgcaaagaggagaagcccgccgaggagcaccccaagaaggcgtttaattcggaaaccgatagttttaagctggcttacggaggccatcagtatcacgctagttgtgctaacttttggattaactgtgttgaaccaaagccgccaggactggtgctgccggatctgctttag

SEQ ID NO: 14830 - DNA, 531 bp, synthetic construct
  source 1..531: mol_type = other DNA; note = Synthetic coding sequence
atgtccgatgatgacagtcgagcaagtacctcaagcagctcttccagctcctcaaatcagcagaccgagaaagaaacaaatacacccaagaagaaagagagcaaagtgtcaatgagcaaaaactctaaactgctgtccacatccgccaagtcagccgggccaaagggcgataatatatacgagtggcggtccacaatcctgggaccacccggttccgtgtatgaaggaggcgtgttctttttagatatcactttcaccccagagtacccctttaaaccaccaaaggtaacgtttcggacacgaatctatcactgtaacatcaactctcagggagtcatctgcctggatattctgaaggataattggagccctgctctcaccatcagtaaggtgctgttgagtatttgttctctactgacagactgcaacccagccgatcccttagtggggagcatcgctactcagtatatgaccaatcgtgctgaacatgacaggatggcccgccagtggaccaagaggtacgccacctag

SEQ ID NO: 14831 - DNA, 7029 bp, synthetic construct
  source 1..7029: mol_type = other DNA; note = Synthetic coding sequence
atggacggggtgagttctgaggcgaatgaggagaacgacaacatagaaagacctgtcagaaggcgccactccagcattctcaagccacccagaagtccactgcaggacctcagaggaggcaacgaaagggtgcaggaatctaatgcactgagaaataagaaaaactctcggcgtgtgtccttcgctgatacaatcaaagtgtttcagacggagtcacatatgaaaattgtgcggaagtcagaaatggagggttgttcagcaatggtgccatcccaactgcaactgctcccccccggattcaagcgcttctcttgtctctctctaccagaaacagaaacgggcgagaacctgctgctcatccagaacaagaagttggaggacaactactgcgagatcactgggatgaacactcttctgagtgctccaatccacacacagatgcaacagaaggagttttctatcatcgagcatactagagagcggaaacacgccaacgatcagaccgtcatcttctctgacgagaatcaaatggatctgactagttcacacactgtgatgattaccaaaggactcctcgacaacccaataagtgaaaaatctaccaagatcgatactaccagtttcctcgcaaatctaaaactgcacacggaggacagtcggatgaagaaagaggttaactttagcgtcgatcaaaacacttcttctgaaaataaaattgattttaatgactttataaaacgactgaaaaccgggaagtgttctgcatttcctgatgttccagataaagaaaactttgaaattcctatatattccaaggagcccaactccgcctcaagcacacaccagatgcatgtgtcacttaaggaggatgagaacaattccaacatcactcggctgttcagagagaaagatgatggtatgaactttacccagtgccacactgcaaacatccagactctgattcccacctcgtcagagacgaacagcagagagtctaaagggaacgacattaccatctatgggaacgacttcatggatctgacattcaaccacacattgcagatcctcccggccaccggaaatttctctgaaattgagaaccagacacagaatgctatggatgtgaccaccggctatggtactaaggcaagtggaaataagaccgtgtttaagagtaaacagaatacggctttccaggatcttagcatcaacagtgcagataaaattcatattacacgaagccacatcatgggggccgagactcatatcgtatcacaaacatgtaaccaggatgcgagaatcctcgcaatgacccccgaaagcatctattccaacccaagtattcagggttgcaaaactgtattctatagctcctgtaacgatgctatggaaatgacaaagtgtctgagtaacatgagagaagagaagaatcttctgaaacatgattcaaactatgcaaagatgtattgcaatcccgacgcgatgtccagcttaacagagaaaacaatatattccggagaggaaaacatggatataactaagtcacacacggtcgccatcgacaaccagatttttaagcaggatcagtccaatgtccagattgcagccgccccaacacctgaaaaggagatgatgttgcagaatctgatgacaaccagcgaagatggaaagatgaatgtgaattgtaatagcgttccccacgtgagcaaagaacgcattcagcaatcgctgtccaatccccttagcatttcgctgacggacaggaagactgagctgcttagcggggaaaatatggacctcactgagagccacacttcgaatctcggcagtcaggttcctctggcggcctataacctggcgcctgagtctacatccgagtctcactcacaaagtaaaagttcttctgatgagtgcgaggagataacaaagagtcggaatgaacctttccaacgttcagatattattgcgaaaaactcactgaccgacacatggaataaagataaggattgggtcctgaagattctgccttatttggacaaagactctccacagagtgccgattgcaaccaagagatagccactagccacaacatcgtgtattgtggcggcgtgctggacaagcagatcactaataggaacactgtcagctgggagcagtcactgttttcaactacgaaacctttattcagctctggccagttctcaatgaagaatcatgatactgcaatcagctcccacactgtgaaaagcgtacttggacagaattctaagctggccgagcccctccgaaagagtctgagtaacccgacccctgactattgtcatgacaagatgataatctgttccgaggaggagcagaacatggacttgacgaaatctcatacagttgtaattggcttcggaccttccgagctgcaagaactggggaagactaatctagaacacacaaccggtcagctgaccactatgaacagacagatcgccgttaaagttgagaaatgcggaaagtcaccaatagagaagtcgggtgtcctgaagtccaactgcataatggacgtgttagaggacgagtcagtccagaaacccaagttcccaaaggagaagcaaaatgtcaagatctgggggcgcaagtctgtcggggggcccaagatagacaagaccattgttttctcagaagacgacaagaatgacatggatatcacaaagagttacaccatcgaaatcaaccaccgcccactcttggaaaagagggactgccacctagtccctctggccggtacatccgagacaattctttacacttgtaggcaggatgacatggagataacaagatctcatactactgcactagaatgtaagaccgtgtctcccgatgagatcacgacaaggccaatggacaaaactgtcgttttcgtagacaatcacgtggaattagagatgacagagagccacaccgtgtttatcgattatcaggagaaggagcgcactgaccgtccaaactttgagctttctcagcgcaagtccctcgggacacccactgttatttgcacccctaccgaagaatcagttttcttcccaggaaacggggagtccgatagacttgtggctaatgatagtcaattgacacccctggaagaatggtcaaataaccgagggcccgtagaagtggcagataatatggaactgtccaaatcagcaacatgcaagaacattaaggacgtccagtcacctggttttctcaatgagcccctttcttcaaagtcgcagcggagaaagagccttaaacttaagaatgataaaaccatcgtgtttagtgagaaccataaaaatgacatggatatcacacagtcttgcatggtggagattgataacgagtcagcactcgaagataaggaggattttcatctggccggtgcatccaagactatcctctactcatgtggccaggacgatatggaaattacccgatcccacaccactgctctcgaatgcaaaactctactgccaaatgaaattgcaatccggcccatggataagactgtgctgttcacagacaattatagcgatctggaagttaccgacagtcatacagtgtttattgattgtcaagcaaccgagaagattctggaagaaaaccccaagttcgggatcggcaaggggaagaatctgggcgtctctttccctaaggacaatagctgtgtgcaggagatcgcggagaagcaggccctcgcagtgggaaataagattgtattacacacagaacagaaacagcagcttttcgctgctacgaataggaccaccaacgagattatcaaattccactctgccgcgatggacgagaaggtcattggcaaagtggtcgaccaggcgtgcaccttagagaaagctcaggtagagtcctgtcaacttaacaatagagaccgtcggaacgtggacttcacttcttctcacgccaccgcagtctgcggatcaagcgataactacagctgcctaccgaatgtcatttcctgtacagataatttagaggggtctgcaatgctactgtgcgataaggacgaagagaaggctaactactgcccagtccagaacgacctagcttatgcaaatgatttcgcaagcgagtattacctggaatctgagggccagccgctcagtgcgccttgtccactactcgagaaggaggaggtcatacagacttcgactaaggggcagctcgactgcgttatcaccctgcacaaggatcaggacctcatcaaagaccctaggaatctactggctaaccagaccctcgtgtacagccaggacctgggagagatgaccaaactaaacagtaagagagtgagcttcaaactccctaaagaccaaatgaaggtgtatgtggatgatatttacgttatcccccaacctcatttttcaaccgaccaaccaccccttcctaagaaagggcagtctagcatcaataaagaagaagttattctgtctaaggccgggaacaagagtttgaatatcatcgagaattcaagtgcgcctatctgtgagaacaagccaaagatcctgaacagcgaagaatggtttgccgccgcctgtaaaaaggaattgaaagagaacatccagacaactaactataacactgccctggacttccatagcaattcagacgtgaccaaacaggtcattcagacccatgtgaatgctggcgaggcccccgacccagtgatcacgagcaacgttccttgttttcactccattaagcccaatctgaataatttgaatggaaaaacaggcgagtttctggctttccagaccgtgcacctccccccacttcccgaacagctgctggagcttgggaacaaggctcataacgatatgcatatcgtccaggccaccgagatccataacatcaatattattagtagcaatgcgaaagattctagagatgaggagaataagaaaagccacaatggcgcggaaacaaccagcttacccccaaaaacagtgttcaaggataaagtccggagatgttcgcttggaattttcctgcctagactgcccaacaaaaggaactgttccgtaacaggaattgacgatctcgagcagatacccgccgacacaacggatataaaccacttggaaacccagccggtgagctcaaaggattccggtattggttccgtggccggaaagctcaatctatccccctcccagtacatcaatgaggagaatttaccagtgtaccccgacgagatcaactcttctgactctataaacattgagaccgaagagaaggctctgatcgaaacttaccagaaggaaatatcgccctacgaaaacaagatggggaaaacctgtaattcccaaaagcggacctgggtccaagaagaggaagatattcataaagagaagaaaatccgcaaaaacgaaatcaaatttagcgacactacacaagatcgagagattttcgaccaccacacagaagaggacattgacaaatcggcaaattccgtgctaataaaaaatctgtcccgcacgccatctagttgcagtagtagccttgatagtattaaagcggacggcacatccctggatttcagtacctacagaagctcccaaatggaatcacagtttctgagagacactatatgtgaggaaagtctccgggagaagctgcaagacggccgcatcactatccgggagttctttattctcctgcaagtgcacatcctcatacagaaacctcgtcagtctaacctgcccggaaatttcaccgtaaataccccccccacccctgaagatctgatgctgtcccaatacgtctatcgtccaaaaattcagatttatagggaggactgtgaagcccgcaggcaaaagatcgaagaactcaaactctccgcttctaaccaggataagctactggtagatattaataagaatctatgggagaaaatgagacattgttctgataaagaactcaaagccttcgggatttatcttaataaaattaagagttgcttcaccaaaatgacgaaagtgttcacccatcagggaaaagtagccctttacggcaagttggtccagagtgctcagaatgagcgggaaaaactccagattaagatcgatgagatggacaagatccttaaaaaaattgataattgcctgactgaaatggagacagaaacgaagaatcttgaggacgaagaaaagaacaaccctgtcgaggagtgggattctgagatgcgggctgcagaaaaggagttggaacagttaaagacggaagaagaggagctccagaggaacctgctggagctggaggtccagaaagaacagaccctcgctcagatagattttatgcagaaacagcgcaaccgcaccgaggagctgctcgatcagctgtccctgtcggagtgggacgttgttgaatggtccgacgaccaagccgtgttcacttttgtgtacgacaccattcagctgaccattacctttgaggaatctgtggtgggtttcccctttctggacaaacgctaccgcaaaatcgttgatgtcaacttccagagtctgttggatgaagatcaggctcctccatcttctctgctggtgcacaaactgattttccagtacgtggaggagaaagaatcatggaaaaaaacctgtacaacccaacatcagctcccaaagatgctggaggaattcagtctagtggtgcaccattgccgcctcctcggagaggaaatcgagtacctaaagcgttggggtcccaactataacctgatgaatatcgatattaataacaacgagttgagactcctgttctcatcaagtgcagcttttgccaagtttgaaattaccttgttcctgagtgcctactacccaagtgtgccacttccttcaacaattcaaaatcacgtcggcaatacatctcaggatgacattgcgaccattctatctaaagtccccctggagaacaactacctgaagaacgttgtcaagcagatttatcaggatctctttcaggactgccatttctaccactag

SEQ ID NO: 14832 - DNA, 1638 bp, synthetic construct
  source 1..1638: mol_type = other DNA; note = Synthetic coding sequence
atgtcaagctgtgtgagctcacagccttctagtaatagggccgctccacaggacgaactcggaggtcggggcagctcaagctctgagagccagaagccttgcgaagcactgcgcgggctgagtagtctatctatccacttgggcatggagagttttatagttgttaccgagtgtgagccaggttgcgccgtcgacctggggttggctcgggatcgacccctcgaagctgatggccaggaagtacccctggacacaagcggttctcaggctagaccccacctgtcaggcaggaaactgtcattgcaggaacgatctcagggcggacttgctgcgggtgggagcctggatatgaacggaagatgcatttgtccctcacttccctactccccagtaagcagccctcaatcttccccgcgattaccacgaaggcccacagtagagtcccaccacgtcagtattactggaatgcaggattgtgtgcagcttaaccagtacactctgaaggatgagattggcaagggcagctacggggtggtaaaactggcctataatgagaatgataacacctattatgcaatgaaagtgctgagcaagaagaagctgatcaggcaggccggatttcctagacgccctccgcctaggggtacacgtccggctccggggggctgcattcagccacgcggcccaatcgaacaggtctatcaggagatagccatcctgaagaagttagaccatccaaatgtagttaagttggtcgaagtgctggacgaccctaatgaagatcatctctacatggtattcgagttggtgaatcagggacccgttatggaggtgccaaccctgaagcctctgagcgaggaccaggcccggttctactttcaggacttaatcaagggaatagagtatctgcattatcagaagattatccaccgcgatattaagccttccaaccttctggtgggggaggatggacatatcaaaattgccgatttcggggtaagcaacgaatttaaaggctctgacgctctgctgtccaataccgtgggcactccagcctttatggccccagagtctctgtccgagacccggaaaatcttttccgggaaggctcttgatgtttgggccatgggtgttactctatactgttttgtgtttggacagtgtcccttcatggatgaaagaatcatgtgcttgcactcgaagataaagtctcaggccctggaatttccagatcagccggatatcgctgaggatctcaaggatctgatcacccgcatgctggacaagaaccccgagtcccggattgtcgtgccagagataaaaatactggtgaaaacaatgatccgaaagaggagcttcggaaacccttttgagggatcaaggagggaggagcgatcactgtcggcgcctggaaacctgctgacgaaaaaaccaacccgcgagtgtgaatccttgtcggagctcaaggaggcccggcagcggaggcaaccgccaggtcataggccggcaccccgcggcgggggtggtagcgcacttgtaagggggtctccgtgtgtagaatcttgctgggctcccgcacctgggtctcccgcgaggatgcaccctctccgacctgaggaggcaatggagccagaatag

SEQ ID NO: 14833 - DNA, 333 bp, synthetic construct
  source 1..333: mol_type = other DNA; note = Synthetic coding sequence
atgcccaagcggtcctgccctttcgcagatgtggcccctcttcagctcaaggtccgagtgagtcagcgtgagctgtctcgaggagtgtgcgccgagagatacagccaggaggtgttcgatccctctggtgtcgcttctatcgcatgctcttcatgcgtacgggctgtcgacggcaaggccgtgtgtggccaatgcgagagagccctctgtggccagtgcgtcaggacctgttggggctgcggttccgtcgcttgcaccctatgcggtttggtggactgctccgacatgtacgagaaggttctgtgtactagttgtgcgatgttcgagacctag

SEQ ID NO: 14834 - DNA, 2253 bp, synthetic construct
  source 1..2253: mol_type = other DNA; note = Synthetic coding sequence
atggaagacctgttcgagacatttcaagacgagatgggcttttcaaacatggaggacgacggtcctgaggaagaggagcgcgtcgcagaaccacaggctaacttcaatactccccaggctctgaggttcgaggagctgctggccaacctgctaaatgagcagcatcagatcgcgaaagagctgttcgaacagctcaaaatgaagaagccttccgccaagcagcagaaagaggtcgaaaaagtgaaaccgcaatgcaaggaggtgcaccaaaccctgattctggaccctgcccagaggaagcggttacagcagcaaatgcagcagcacgtgcaattgctaactcagatccatctactcgctacatgcaatcccaacctcaatcctgaggcgagcagcactagaatttgtctgaaagaattgggaacttttgcccagagctccatagctctgcatcatcagtataacccaaagttccagacccttttccagccttgcaacctaatgggggccatgcagctgattgaggatttcagcacacacgtctcaattgactgcagtccacataaaaccgtgaagaagactgccaatgagttcccttgtctgccgaagcaagtggcctggatcctggcaacttcaaaggtttttatgtatcctgaactgttaccggtgtgtagtctgaaagctaagaacccgcaggataagatcttgttcaccaaggccgaagacaacttgctggctttggggctcaagcatttcgagggaacagaatttttaaacccactgatctctaagtacctgctgacgtgcaaaacagccagacagctgacagttagaattaagaatctgaacatgaatagggctccagacaacatcattaaattttataagaaaactaagcagctgcccgttctaggcaagtgttgcgaggaaatccagccccaccagtggaaaccacccatcgaacgggaggaacacagacttccattttggctcaaagcttccctgccttctatccaagaggagctgcggcatatggcagatggagcaagggaggtcggaaatatgactgggacaaccgagatcaactcagatcagggactagaaaaggacaactccgaactggggtctgaaacgcgatacccactgctgctcccaaagggggtcgtactgaaattgaaacctgtcgcagaccgcttccccaagaaggcctggcggcagaagcgatcttcagtgctcaagccactcctaattcagcccagcccctcacttcagcccagcttcaatcctggcaaaactcccgcccagtccacacatagcgaagcacccccatcgaagatggtgctgcgcatccctcaccctatccagccagccactgtattgcagactgttcccggcgtaccacctttgggcgtgtcaggcggagaatcattcgagagccccgcagccctcccagctatgccgccagaggcccgcacctcgttcccgctgagtgagtcacaaacactgctgagctcggcccctgttccaaaagttatgatgccctcccccgccagttccatgttccggaaaccttacgtccgcaggcggccgtcaaaacgtaggggcgcaagagcatttagatgtatcaagcccgctcccgtcatacatcccgcttccgtgatcttcactgtgccagctacaacagtgaagatagtgtctcttggcggaggctgtaatatgatccagccagtcaatgcggccgtagcccaatcacctcaaaccatcccgatcgccacactcctggtgaacccaacttcttttccttgtcccctgaatcaacccctggtggccagttctgtcagccccttgattgtcagcggcaatagtgtgaatctgcccatccccagcacccccgaagacaaagcacatatgaacgtcgatattgcttgcgctgtggcggacggcgaaaacgcattccagggtctcgagccaaagcttgaaccacaggagctgtctcctcttagcgccaccgtgttcccaaaagtggaacacagtccaggccccccacctgtcgataagcagtgtcaggaaggtctaagtgaaaactccgcttatcgctggacagttgtgaagaccgaggaagggcggcaggctctggagccccttccccaaggcattcaggagagccttaacaactcgtcgcctggcgatctggaagaggttgtaaagatggaacccgaggacgccactgaggagatctcaggttttctttag

SEQ ID NO: 14835 - DNA, 2604 bp, synthetic construct
  source 1..2604: mol_type = other DNA; note = Synthetic coding sequence
atgcaggccgaagcagcggactggttcagcagtatgccgttccagaagcatgtgtattatccattagcctcagggcccgagggtccggacgttgccgtggctgcggccgccgccggtgctgcctccatggcctgcgctcctccctcagccgctagcggtcccctccctttcttccagttccggcccaggttggagtccgttgattggcgccggttaagtgcaatcgacgtcgataaggtggcaggcgcggtggatgtccttactcttcaagaaaacatcatgaacatcaccttctgcaaactagaggacgaaaaatgccctcattgtcagtcaggcgtggatcctgtgcttttaaaactaatacggcttgcccagtttaccatcgagtatttactgcattcacaggagtttctcacctctcagttacacacactggaggaaagactgaggttatcacactgtgacggagaacaaagcaaaaagctgctcacaaagcaagcaggggagattaagaccctgaaggaggagtgcaagcgaagaaagaagatgattagcactcagcagttaatgatcgaggcgaaagccaattactaccagtgtcacttctgcgataaagcttttatgaaccaggcattcctccaatcacacatccaaagacgtcacaccgaggagaactctcactttgaatatcagaagaacgcacaaatcgagaagcttcgatccgagatcgtcgtgctgaaggaggaattacagctgaccagaagcgaactagaggctgcccatcatgcatcggcagtccggttctccaaagagtatgagatgcaaaagacaaaagaagaagattttctaaaactttttgaccggtggaaagaagaggaaaaggaaaagctggtggacgagatggagaaagtgaaagaaatgtttatgaaggagtttaaagaactgacttcgaaaaactctgctctggaatatcagctttcagaaatccagaagtctaacatgcagattaaatccaacatcggtactctgaaagatgctcacgaatttaaggaagatcgttcaccctacccgcaggatttccacaatgtgatgcagctgttggactcccaggaatcgaaatggacagcgcgcgtgcaggccatccatcaggaacataagaaagaaaaaggtcgcctgctctcccatattgagaagctgagaaccagcatgatagacgacttgaacgcctccaatgtgttctacaagaaacgtattgaggaactcgggcagcgcctgcaggagcaaaacgagttgatcatcacccagcgacagcagattaaagattttacctgcaaccccctcaatagtatctccgaaccgaaggggaatccattggcttggcaggcctttgagtcccaacctgctgctcccgccgtccctatgaacgctcccgcgctccatacactggagactaaatcatccttgccaatggtgcacgagcaggcgttcagttctcacattttggaaccaattgaggagctatctgaagaggaaaaaggccgcgaaaatgaacagaagctcaataacaacaagatgcatcttaggaaagctctgaagtccaattcctctctgaccaagggcctgcgcacgatggtggaacagaatctgatggagaaactcgagacactcgggataaatgctgatatccgcggcatatcaagtgaccaactgcatagggtgctgaagagtgtggagtccgaacggcacaaacaggagagagaaatccctaatttccatcaaatacgcgagttcctagagcaccaggtcagctgcaaaatcgaggagaaagccctcttgagttccgaccaatgttcggtgagccaaatggacactctctcaacgggagaagtcccaaagatgattcaactgccatcaaagaatcgccagctcatccgccagaaggccgtctccactgacagaacatctgtgcccaagataaaaaagaacgtaatggaggatcccttcccaagaaaatcctccaccattaccacacccccctttagctctgaggaagaacaagaggatgatgatcttattagggcatacgcaagccctggcccactgccagtgccacccccacagaataagggaagctttggtaagaacacggtgaagtccgatgccgacggaacagaagggagtgaaattgaggatacagatgactctcctaaacctgccggggtggctgtcaaaactcccactgagaaggtggagaaaatgttcccccatcgtaagaacgtgaacaaaccagttgggggaactaatgtccccgaaatgttcatcaaaaaagaagagcttcaggaactgaagtgcgcagacgtggaagacgaagattgggacatctcttccttagaggaggaaatttctctcggaaagaaatccgggaaggagcagaaggaacctccccccgccaaaaacgaaccccacttcgcccatgtgctgaatgcgtggggagctttcaacccgaaggggcctaagggcgaggggctccaggaaaacgagagcagtaccctgaaatcctcgttggttaccgtgaccgactggtccgacacaagcgacgtttag

SEQ ID NO: 14836 - DNA, 1860 bp, synthetic construct
  source 1..1860: mol_type = other DNA; note = Synthetic coding sequence
atgtcagggctcgtcctaggtcaaagagatgagcctgctggccacaggttgtctcaggaggaaattcttggcagcactagattggtgtcccagggcttggaggctctgaggtctgaacaccaggctgtcctgcagtcgctaagccagactatcgaatgtttacaacagggaggccacgaggagggcctggtgcacgagaaagcaagacagctgaggcgttctatggagaatattgagcttggcctgagcgaggctcaagttatgcttgctctggcgagccacctcagcacagtagagtcagaaaaacagaagcttagagcccaagtgcggcggctttgtcaagaaaatcagtggctgcgagatgaactggcggggacccagcagcgccttcagcggtctgaacaggccgtggcgcagctcgaggaggagaaaaaacatcttgaatttttgggccagttgagacagtacgacgaagatggacacacatccgaggagaaggaaggcgatgcgacgaaggattcattggacgatttattcccaaacgaggaagaggaggacccttcgaatgggctttccagagggcagggcgctaccgcagctcagcagggcggatatgagattccagcaaggctgcgtactctgcataaccttgtgatacaatacgcagcacagggccgatacgaagtagcagtgcccctatgcaagcaggcactggaagaccttgagagaacgtccgggagaggacaccccgacgtagccacaatgctcaacatactcgcacttgtgtatcgtgatcagaacaagtataaggaagccgcacatctgcttaatgacgcgctcagcatacgcgagtctacacttggcccagaccaccccgcagtcgcagcaaccctgaataatctcgctgtgttatatggaaaaagaggcaagtacaaggaggcagagcccctgtgtcaacgcgctttggaaattcgtgagaaagtgttaggaacaaatcaccccgacgtggccaaacagctgaataatcttgcacttctctgccagaatcagggcaagtatgaagccgtggaacgttactatcaaagggctctagcgatctacgaaggccagctgggccccgataatcctaatgtggctcggactaagaacaatttggcgagttgttaccttaaacagggtaagtatgctgaggctgagacgctctacaaggaaatcctcacgcgggcccatgtgcaggagttcggatccgtcgatgatgaccacaagcctatctggatgcacgccgaagagcgcgaggaaatgagcaaaagccgccaccatgaaggcggaaccccttacgcggagtatggcggatggtataaagcctgcaaagtgagcagcccgacagtcaataccactctgagaaacctgggagccctctaccgcagacagggcaagcttgaggcggccgaaacactggaggagtgtgcgctgcggagcaggagacaaggaaccgatccaatttctcagacgaaggtcgctgagctgctgggtgaatctgacggtaggcggacttcccaagaaggtccaggagactccgtcaaatttgagggcggcgaagatgctagtgttgcggtcgagtggtctggcgatggaagtgggacccttcagagaagcggatccctaggcaagatacgagacgtgttgaggcgctcctccgagctgctagtcagaaaattacaggggacggaaccaagaccctcttcaagcaatatgaagcgcgctgcaagcctgaattatctgaatcagccttcagccgctcccctgcaagtgtcaagggggctgtcagccagcactatggacctctcttccagctcttag

SEQ ID NO: 14837 - DNA, 1137 bp, synthetic construct
  source 1..1137: mol_type = other DNA; note = Synthetic coding sequence
atgaaggagcagttacccgacctccactctcatttcagcgatcttaatttggaagctcacatgtacgcatcccagtggttcttaactctgtttactgccaagttccccctttgtatggttttccatatcatcgatctcctgctatgcgagggcttgaacatcatctttcacgtcgcgttggcattactgaaaacatctaaagaagacctgctgcaggccgactttgagggggcgcttaaattttttagagtgcagctccccaaacgctatcgggccgaggagaacgctcgtagactcatggagcaggcctgcaatatcaaggtgcctaccaaaaaactgaagaagtatgagaaggagtaccagactatgagggagagccagttacagcaggaagatcctatggacagatataagcgagaaaaccgccggttacaggaggctagtatgcgactggagcaagagaacgacgacttggcacacgagctagtcacctcaaaaatcgctttaagaaatgacctggaccaggcagaggacaaggcagatgtgcttaacaaggagctgctgctcacgaagcaacggctggtcgagacagaggaggagaagcgcaagcaggaggaggaaacagcccagttaaaagaggtgttcagaaagcagctggagaaggcagagtacgagatcaagaaaacaaccgcgatcatcgctgaatataagcagatttgtagccaactgagtactcgcttggaaaagcagcaggcggcatctaaggaggagctggaagtggtaaagggaaaaatgatggcctgcaagcattgttccgacatattttccaaagagggcgctctaaagcttgccgccactgggcgcgaggaccaagggattgaaaccgacgatgagaaggacagcctaaaaaagcagctcagagagatggaactggagcttgctcagaccaaacttcagctggtcgaagcaaagtgtaagattcaggaactcgaacaccaacgcggtgcgttaatgaacgaaatccaggctgccaagaattcctggttctctaagacactgaacagtatcaagacagctactgggacccagcctctgcaaccagcacccgttactcaacctcctaaggagtctacttag

SEQ ID NO: 14838 - DNA, 2631 bp, synthetic construct
  source 1..2631: mol_type = other DNA; note = Synthetic coding sequence
atgggggattccgatgacgaatacgatcggcgacgccgcgacaagttccgaagggagcggtcggattatgacaggagtcgcgagcgggatgagagaagacggggcgacgattggaacgatcgggagtgggaccgagggagggaaaggcgcagcagaggagaataccgggactacgatagaaatagaagagaacggttctcaccacctcgccacgagctgagtccaccccagaagcgtatgcggcgcgactgggacgagcattcgagcgatccgtaccactcgggctatgagatgccctacgccgggggtggcgggggccccacttacggacccccccagccctgggggcaccctgacgttcatatcatgcagcatcatgtgttgccaatacaggcccgccttgggagcatagccgagatagatctcggggtgccaccgcccgttatgaaaacatttaaggaatttctcctatccctggacgactcagtggatgaaacggaggctgtaaagaggtacaacgattataagctagattttagaaggcaacagatgcaggatttcttcttagctcataaagacgaggagtggtttcgcagcaagtatcaccctgatgaagtgggcaaacggagacaggaggcccgcggggcgctgcagaatagactgagggtgtttctgagtctgatggaaacgggctggttcgataacctgttgttagatatcgacaaagcagatgccattgtaaagatgcttgatgcagccgtaatcaaaatggagggcggaaccgaaaatgacttgcggatccttgagcaggaggaggaagaggagcaggctggcaaaccaggagaaccaagcaaaaaagaagaggggcgcgcaggggcaggcttgggagacggggagagaaaaactaacgataaggacgaaaagaaggaggacggcaagcaagctgagaacgactctagtaatgatgacaaaacaaagaagagcgagggcgacggtgataaagaagagaagaaagaagattccgagaaagaggccaaaaagagcagcaagaaaagaaaccggaagcacagtggagacgattctttcgatgaaggttccgtgagtgaatccgaatctgagtccgagtctggccaggcagaggaagaaaaagaggaggctgaggaggcccttaaagaaaaggagaagccgaaagaagaagagtgggaaaaacccaaggacgcggctggcctggaatgtaagccccgcccattgcataagacctgctccctctttatgcggaacatcgcgccaaatatctccagggctgaaattatctctctgtgtaagagataccccggttttatgagggtggcattgagtgaacctcagccagagagacgcttttttcgtaggggatgggtgacctttgacaggtccgtcaatataaaggagatatgctggaatctccaaaacattcgactccgggaatgcgaactctcaccaggcgtgaatagagacctcactcgaagggtccgcaatatcaacggcattacccagcataagcagatcgtgagaaatgatatcaagctggccgcgaaacttatccacacattggatgaccgcacgcagctgtgggcgagtgaacccggcaccccccctctgcctacgagcctgccaagtcaaaaccctatcctcaaaaacatcaccgactatctgattgaagaggttagcgcggaggaagaggagctgctgggttcttcaggcggcgcaccaccagaggagcctcccaaggaaggtaacccagcagagatcaacgtggaacgcgatgagaaactcattaaagtcctggataagcttctgctgtatctccggattgtgcatagccttgactattacaatacatgcgagtatcccaatgaggatgagatgcctaatcggtgcgggattatacatgttcggggacccatgcccccaaatcggatttcccatggggaggtgctcgaatggcagaagacgtttgaggagaagctgacacccctcctgagcgtacgggagagcttgagtgaggaggaggcccaaaagatgggaaggaaggatcccgagcaagaggtagaaaagtttgttacgtcaaatactcaggagcttgggaaagataaatggttatgcccactgtcaggcaagaaatttaaagggcccgaatttgtacgcaaacacatctttaataagcatgccgaaaagatcgaagaagtcaaaaaagaggtcgccttcttcaataacttcctcactgatgccaaacggccggcactgccagagatcaagcctgcacaaccccccgggcccgctcaaattctccccccaggcctgacacccgggctgccctatcctcaccagaccccccagggcctgatgccctatggacagccccgtccccccatcctaggatatggtgcgggtgccgttagaccggctgtacccaccggtggccctccttacccacacgcaccctatggggcagggcgcggtaattatgatgcctttaggggacagggcgggtatcctgggaaacctaggaacaggatggtgagaggcgaccctcgggccattgtggagtacagggatttagatgcccccgatgacgtggacttcttttag

SEQ ID NO: 14839 - DNA, 1491 bp, synthetic construct
  source 1..1491: mol_type = other DNA; note = Synthetic coding sequence
atgaagctaggcaagaagccgatgtacaagccggtggacccgtactcacgtatgcaatcgacctataactacaacatgcgggggggcgcataccccccacgctacttctacccttttcctgtcccacctctcttgtaccaggtcgaattatccgtgggggggcaacagttcaatggtaaaggcaagacccgccaggctgctaagcatgatgcagctgctaaggcattaaggattctgcagaacgagcccttgcctgaacgccttgaagttaacggccgcgaaagcgaggaggagaacctgaacaagagcgagatctcccaggtcttcgaaatcgctctgaaacgcaacctgccggtcaattttgaagtggccagagagagcggcccgccgcacatgaagaatttcgtcactaaagtctccgtcggcgaattcgtgggagaaggggagggcaaaagcaaaaaaatttcaaagaaaaatgccgccatcgccgttttggaagaactgaagaagctccctcccttgccagctgtggaaagggtcaagccaaggattaaaaagaagacaaaaccaattgttaagcctcaaacctctcctgagtacgggcagggcattaaccctatttcaaggttagctcagatccagcaggctaaaaaggagaaggagcctgagtacacgttactcacagaaaggggtctgccccgcagacgtgaatttgtgatgcaggtaaaggtcggaaaccacacggctgagggaactggcacaaacaaaaaggtggcaaagagaaatgcagctgagaatatgctggagattctgggattcaaggtgcctcaggcccagccaaccaaacctgccctgaaatccgaagagaagactcctatcaaaaagccgggggacggtcggaaagtcactttttttgagccagggtccggcgacgagaacggaacatctaataaagaagacgagttcaggatgccctacctgtctcatcagcagctaccagctggtatactgccaatggtcccagaggttgcccaagctgtaggagtgtcccagggacatcatacgaaggacttcaccagggcagcaccaaacccagctaaagctaccgtcacagcaatgatcgccagggagctgctttacggagggacgtcacctactgctgaaactatacttaagaataatataagctctgggcacgtgccacacggcccgctgacaaggccgtctgagcaactggactacctctcaagggtccagggcttccaagtcgagtataaggatttccccaagaacaacaaaaatgagtttgtatcactgatcaattgctcctcgcagccccccttaattagccacgggattggcaaggacgtggagagttgtcatgacatggctgcactgaacatactgaagttactctcagaactggaccaacagtcgacagaaatgcctaggactggcaatggcccgatgagcgtgtgcgggagatgttag

SEQ ID NO: 14840 - DNA, 318 bp, synthetic construct
  source 1..318: mol_type = other DNA; note = Synthetic coding sequence
atggcgctgaggtatccaatggccgttggcctgaataagggtcacaaagtcaccaagaatgtgtccaaaccccgacatagccggcgtaggggccgcctgactaaacacacgaaattcgtacgcgacatgatcagggaagtctgcggatttgctccctacgagcggcgtgcaatggaacttttaaaagtctccaaggataagagagcactgaaattcattaaaaagcgggtgggcacccacatcagagctaagaggaaacgagaagagttgtcaaatgtgctcgctgcaatgaggaaggcagcggccaaaaaggactag

SEQ ID NO: 14841 - DNA, 3720 bp, synthetic construct
  source 1..3720: mol_type = other DNA; note = Synthetic coding sequence
atggctaacgatagtccggccaagagcctggtcgacatcgacttatcttccctgagggatccagccggcatcttcgaattagtggaagtggtggggaacgggacttatgggcaggtctataagggccggcacgtcaagacgggtcagctggccgccataaaggtgatggacgtgacggaggacgaggaagaagaaatcaaactcgaaatcaacatgttgaagaagtatagccatcacagaaacatcgcaacctattacggcgcgttcatcaagaaatctcctcctggccatgacgaccagctgtggctggtgatggagttctgcggtgccggctctatcacggacctggttaaaaatactaagggtaatactctcaaggaagattggatcgcctatatcagccgcgagattctgcgtgggcttgcccatctgcatatccaccacgttatccacagggacatcaaaggacagaacgtcctcttgaccgaaaatgcagaagtgaagttagtggactttggggtgtctgcacagctcgatcggacagtgggtaggagaaatacattcatcggcaccccatattggatggcaccagaggttatcgcttgcgacgagaacccagacgctacttatgattataggtccgatctttggagctgcgggatcaccgccatcgagatggcagagggtgccccgccactctgcgacatgcaccctatgagggcgctgttcctcattcccagaaatccccccccaaggctgaaatccaaaaagtggagcaagaagttcttctcctttatcgaaggctgtttggtcaagaactacatgcagcgtccatccactgagcaactgctcaagcacccttttattagagatcagccaaacgagaggcaggtccgcatacagctgaaggaccacatcgataggacaaggaagaaacgcggggagaaagatgagacagaatacgagtattcaggctccgaagaggaagaggaagaggtccccgagcaggagggggaaccctcatcaatcgtgaacgtgccaggggaatctacattaagacgggacttcctgagacttcagcaggaaaacaaagaaaggtcagaagcactgagaaggcagcagctgctacaggagcaacaactcagggagcaagaggaatacaagcgtcaactgctggcagagaggcagaagcgtatcgaacagcagaaagagcagagacggaggctcgaggagcagcagcgtagagagcgagaggctcgaaggcagcaggagagggaacagcgtagaagagaacaggaagagaaacggaggttggaggaactggaaagacggcgaaaagaagaggaggagaggaggagagcggaagaggagaaacgcagagttgagcgagagcaggagtacatccggcgacagcttgaagaggagcaaagacacctggaggtccttcagcagcagctgctccaggagcaggccatgctgttggaatgcaggtggagggaaatggaggaacacaggcaggcagagaggttgcagcgccagcttcaacaggaacaagcctatctcctgagcctacagcacgatcacaggcgcccccaccctcagcattcacagcagcctcccccaccccagcaggagagatccaagccctcattccatgccccagaaccgaaggctcactacgagcccgcagaccgagcccgcgaagtcgaagaccggtttcgcaagaccaaccactccagcccagaagctcaaagcaaacagactggaagggtgcttgagcctcccgtcccatcacggagtgaatctttctccaatgggaattccgaaagtgtacatcccgcccttcagagacctgctgagccacaagtgcctgtgaggaccacatcccgctcaccagtcctctctagacgagactctcctctgcaggggagtggtcagcagaacagccaggctggccagagaaattccactagtatagagccgcggttactctgggagagggtggagaaactggttccccgcccgggctccggttcatcatcgggtagctccaactccggttcacaaccgggaagtcatcccggcagtcagtccggctctggcgaaaggtttagagtgagatccagcagtaagagcgaggggtctccaagtcaacggctggaaaacgccgtaaaaaaaccggaagacaaaaaagaagtgttccgtcccctgaaaccggcagatctgacagcattagctaaagagctacgcgccgtcgaggatgtgcggccccctcacaaggtgactgattatagcagttcttcagaagaatccggcaccactgacgaggaggacgatgacgtggagcaggaaggggccgatgagtcaacctccggccccgaggacacccgcgctgcctcaagcctcaatctgtccaatggtgagacagaatccgtgaagaccatgattgttcacgacgatgtggagtcggaacccgccatgaccccttcaaaggaagggactttaatagtcaggcagacacagtcagctagttcaaccctccaaaagcataaatcctcctcgtccttcacaccatttattgacccgaggttgctgcagatctcccctagcagcggcactaccgtgactagtgtagtggggttctcctgcgatggcatgaggccagaagcaataaggcaagatccaaccagaaaaggctcagttgtgaatgtgaatccgaccaacacgaggccccagtcagacacaccggaaatacgtaagtacaagaagagatttaactctgagatactgtgtgctgccctgtggggtgtcaatcttctggtgggaacagagtccggcctaatgctgcttgatcgcagcggccaaggtaaggtttacccactgatcaaccggcgcaggtttcaacaaatggatgttttggaagggctgaacgtgctggtaaccataagtgggaagaaggataaactcagagtctactatttgagttggctcaggaacaagatattgcacaatgatcccgaggtggagaaaaagcaaggctggacgactgtgggggacctggaaggttgcgtccactataaggtggtgaaatatgagcggatcaagtttttggttattgcgctgaagtcgtccgtggaggtatatgcctgggctccaaagccctatcacaagtttatggctttcaaaagcttcggtgaactggtccacaagccactgctggtggatctgacagttgaggaagggcagcgtcttaaagtgatttacgggagttgcgcagggtttcatgcagtggacgtagatagtggttccgtatatgatatatatctgccaacgcatattcagtgttccattaaaccacacgctatcatcattcttccgaatactgacggcatggaattacttgtgtgttacgaagatgagggggtgtacgtgaacacctacggcaggatcaccaaagatgtcgtgcttcagtggggggaaatgcctacatcagtggcctacatccgttccaaccagaccatgggttggggtgagaaggccattgaaatcagatcagttgagactggtcatttggacggcgtgttcatgcacaagcgggctcagaggctgaaatttctgtgcgaacggaatgataaggttttttttgccagtgtgcgttcaggtggcagcagtcaggtatactttatgacattggggcggaccagcctcttgtcctggtag

SEQ ID NO: 14842 - DNA, 2847 bp, synthetic construct
  source 1..2847: mol_type = other DNA; note = Synthetic coding sequence
atgtacggatcagcaaggtcagtgggaaaggtggagccctcatctcagagcccaggtcgatcacctaggctacccagaagccctagactggggcacagaagaactaactccacaggaggatcctccggatcctccgtcggtggtggaagcggaaagacacttagtatggagaacattcagagcttaaatgctgcttacgcaacgagcggccctatgtacctctcagatcatgagaacgtggggagcgaaaccccaaaatctacgatgacactaggccggtcagggggtaggctgccttatggtgttagaatgacagctatgggttcctcacccaacattgcctctagtggggtcgccagcgataccattgcattcggagaacaccacctcccaccagttagcatggcttccacagtcccccacagcctgcggcaggcgagagacaatacgattatggatctgcagacccagctaaaggaggtgttgcgcgaaaatgatctgttgcgcaaggacgtcgaggtgaaggagtcgaagctgagctccagtatgaatagcatcaaaacattctggtctcctgagctgaagaaggaacgagcgttgaggaaagacgaagctagcaaaattactatatggaaggagcagtacagggtcgttcaggaggaaaaccaacacatgcaaatgacaatccaggcgctgcaagatgagctcaggatccaacgggatcttaaccagctgtttcaacaggactctagttccagaactggcgagccgtgtgtggccgagctgactgaggaaaactttcaacgtctacacgccgagcatgagcgacaagcgaaagagctattcctgctccgcaagaccctcgaagaaatggaactccgaattgagacccagaaacagaccctaaatgctagagacgagagtatcaaaaaactgttggagatgctgcagagtaagggtctctctgcgaaggcaactgaggaggatcacgagaggaccaggcgactggctgaagccgagatgcacgtgcaccacctcgaatctctgctggaacaaaaagagaaggagaattcgatgctgcgggaggagatgcatcgacggttcgaaaatgcccccgattccgcaaagactaaagcactgcaaaccgtgattgagatgaaggattcaaaaataagctccatggaacgcggattgcgcgatctggaggaagagatccagatgcttaaatcaaacggagcactcagtacagaagagcgcgaagaggaaatgaagcagatggaagtgtaccgatcacattcaaagttcatgaaaaacaaaatcgggcaggttaagcaggagttgtctaggaaagacacggagctgctagcactgcagaccaagttggagacactcacaaaccagttcagcgactcaaaacagcatattgaagtgctcaaggagtcactgacggccaaggaacagagggctgctatactgcagactgaggtagatgcacttagattgcgcctggaagaaaaagagaccatgctgaataagaagacaaagcaaattcaggatatggcggaagagaagggaacccaagccggggagatccacgacctgaaggacatgctggatgtgaaggaaagaaaagtcaatgtgcttcaaaagaaaatcgagaatcttcaggagcagttacgggacaaggagaagcagatgagctctttgaaggagcgagtgaagagtttacaggctgacactacaaataccgatactgccctgacgactttagaggaggcgctcgccgaaaaagaacggactatcgagaggctgaaggagcaacgcgacagggacgaacgcgaaaaacaagaagaaatcgataattacaagaaggatttgaaagatctcaaggagaaagttagtctgctgcagggcgacctctccgagaaggaagcctcactcctcgacctcaaagagcatgcctcctccttagcctcatcaggattaaaaaaggactccagactcaaaactctggagattgctctggaacagaagaaggaagagtgtctaaaaatggagtcccagttaaagaaagcacacgaggccgcactggaagcaagggcgagtcccgagatgagcgaccgcattcagcacctcgagagggagatcaccaggtacaaagacgagtcttccaaggcccaggccgaggtagatagactcctggaaatattgaaggaggtggagaacgagaagaatgacaaagataaaaaaattgcagaactggagtccttgacttctaggcaggtcaaggatcagaataaaaaggtggctaatctgaagcacaaggaacaagtagaaaaaaagaagagcgcgcagatgctggaagaggcaagacggagggaggacaaccttaacgactcatcacagcagttacaggtggaggaactattaatggcaatggaaaaggtgaagcaagagctggaatcaatgaaggccaagctctcaagcacccagcaatcactcgctgagaaggagacacacctgactaacctccgagcagaaagaagaaaacacttggaggaagtgctcgaaatgaagcaggaagctcttttggccgctatcagcgagaaggatgccaacattgccctcctggagttgagtagctcaaagaaaaagactcaggaagaggttgcagcactcaaacgggagaaagaccgattggttcagcagctgaaacagcagacccagaacagaatgaagctgatggccgacaactatgaagacgatcacttcaaaagttcacatagcaaccagacaaaccacaagccgagccctgaccaggacgaagaggaagggatttgggcttag

SEQ ID NO: 14843 - DNA, 2733 bp, synthetic construct
  source 1..2733: mol_type = other DNA; note = Synthetic coding sequence
atggctgcaactgtcgaggggcctgaactcgaagcggctgctgccgcaggcgacgcttcggaggactctgatgctggatccagagcccttccatttctgggcggcaatcgactgtctctggacctctatcctggcggttgccagcagttgctccacctgtgcgtgcagcagcctcttcagctccttcaggtcgagttcctgcggttgtccacacacgaggatccccaactgctggaggcaacactggcccagctgccacagagcctgtcctgtctccggtccctcgtgcttaaggggggccaacgaagggacactctcggggcctgtctcagaggcgcactcactaacttacccgcaggtttgagtggactagcccacttggcccatctggatctctcttttaactcgcttgagaccctgccagcatgcgtgctccagatgcgaggcttaggggccttgctgttgagccataattgtctatctgaactgcccgaggcccttggcgcccttccagctctgacattcctgacagtcacacacaatcggttgcagaccctccctccagctctgggtgccttgagcacacttcagagactcgaccttagtcagaacttgctcgacaccctccctcccgagataggagggctgggaagtctcttagaattaaacttggcctccaacagattacagtccctgcccgcctctctggccggtttgcgcagcctgcgattgttggtcctacacagtaatctactagcgtctgttccagccgacctcgctaggctgcctctgctcacgaggctggatttgcgcgacaaccagctccgggatcttccccccgaactactcgatgcgccttttgtaaggctgcaggggaatcctctgggtgaagcaagtccagacgccccatcaagtccagtggctgcgttgattccagaaatgcccagactgtttctgaccagcgatctggactcatttccagtgactccacaggggtgctccgttacgctggcttgcggagtgagattgcagtttccagctggagctacggctacacctatcaccataaggtacaggctgctgttgccggagccaggactggtacccttaggaccacacgacgcactgctttctcatgtactcgagttgcagccccatggggtcgcttttcagcaagatgtgggcctgtggctgctgtttacacccccccaggctcggagatgcagagaagtggtggttcgaacacgcaatgataactcttggggtgatctggaaacctaccttgaagaagaggcacctcagcgcttgtgggcccattgccaagtcccccatttctcctggtttttagtggtaagcagacccgtgagtaacgcctgcctggttcctcccgagggcaccttactttgctctagcggccatcccggggtgaaggtcatcttcccccccggggcgacagaagagcccagacgcgtttcaatgcaagtagtgagaatggccggtagggagttacaggccctgcttggagagcctgaggcagccgtctcccccctcctctgccttagccagtcggggccaccctcgttcctgcagccagtcaccgttcagctgcccctcccctctgggattaccggcctgtccttggatcggtcccgcctccacctgctatattgggcccctcccgccgccacttgggatgatatcaccgcccaagtcgtgctcgaattaacacacctgtacgccagattccaggtcactcactttagttggtattggctgtggtatacaacaaagaattgtgtcggtgggctggcaaggaaagcctgggaacgtctgagactccacagggtgaacctaatcgcactgcagaggaggcgagaccccgagcaagtcctgttgcaatgcttgccacgtaacaaggtggacgccacgctgagaaggcttctcgagaggtaccggggacctgagcctagcgacacagtggagatgtttgaaggggaggagttttttgcagcattcgaacgtggcatcgacgtggacgctgatcgccccgactgcgtggaggggcgcatctgcttcgtgttctacagccatttgaagaatgtcaaagaagtctacgttacaaccacactggatagggaagcccaggcggtcagagggcaggtgtccttctacaggggtgcagtgcccgttcgtgttcccgaggaggctgaggccgccagacagcggaagggggctgatgcactgtggatggccactttgccaattaaacttccaagactccgcggcagcgagggcccccggcgaggtgcaggcctgtcactggccccactgaacttaggggatgccgaaaccggctttctcacccagagcaacttgctttccgtagctgggcgcctagggctagattggcctgctgtggccctgcacctcggcgtgtcatacagggaggtgcagcgcattcgacacgagttcagagatgatctagacgagcagataagacatatgctgttttcttgggctgaaagacaggccggacagcctggtgccgtaggactgctggtgcaagctctggaacagtcagacagacaagacgtcgcagaagaggtccgggctgtgcttgaactgggccgacggaagtatcaggacagcatacgaagaatggggctagccccaaaagatccggcgctgccgggctcttctgcgcctcagcccccggaacccgctcaggcctag

SEQ ID NO: 14844 - DNA, 2961 bp, synthetic construct
  source 1..2961: mol_type = other DNA; note = Synthetic coding sequence
atgtcacagtggacgccagaatataacgagctatacacacttaaggtcgacatgaaaagtgagatcccttcagacgcgccaaaaacacaggagtccctgaagggaatcctgctccaccctgagcccattggggccgcaaaatccttcccggcgggagtcgagatgatcaactcaaaggtcggtaacgagttttctcacctatgtgacgatagccaaaagcaggagaaggagatgaatggtaaccagcaagaacaggagaaaagtctcgttgtgcggaagaaacggaaatctcagcaggctggcccatcttatgttcagaactgtgtgaaagaaaaccaaggcattcttggtctgaggcaacacctaggcacccccagcgacgaagataatgacagctcttttagtgactgtctatcctctcccagcagtagcttacattttggggacagcgataccgttacgagcgatgaggacaaggaggttagcgttaggcactcccaaacgatcctgaatgccaagtctagaagccacagcgcccggtctcacaagtggccccgaactgagactgagtctgtgagcggactgctcatgaagcgcccttgcttgcacggcagtagtctaagacggttaccttgtcggaaacgattcgtgaaaaacaattctagccagaggacacagaaacaaaaggagcgcatcttaatgcaacgtaaaaagagagaggtcttggctcggcgcaaatacgccttgcttccatcaagctcctcgtcgtccgagaatgacctgagttccgaatcttccagctccagctccaccgagggagaggaggacctcttcgtaagcgcttctgaaaaccaccagaataaccctgcagttccatcggggtcaatcgatgaggacgtggtggtgattgaggcctctagcacaccgcaggtgaccgccaacgaagaaattaacgtaacatcaacagatagtgaagtcgagatcgtgacagtcggggaatcttacaggagccggagtactctaggccactcacgctcccactggtcccagggttcctcttcacacgcatcacggccccaagagccacggaaccggagcaggatctcgactgttattcagcccctgcgacaaaatgcggctgaggttgtggatctcactgttgatgaagacgagcctacggtggtgccgaccacttccgcacgcatggaaagccaggcaacttctgcctcgattaacaattccaatcccagcacttctgagcaagcctccgacacagccagcgctgtcacttcatcccagcctagcaccgtgagcgagacgtcggccactttgacatctaatagcaccacaggaacatctataggcgatgactctcggagaaccacctcctcagccgttactgaaaccggcccccctgcgatgcccagactgccctcttgctgcccccagcacagtccttgcggggggagcagtcagaaccaccacgcgcttggacaccctcacacaagctgcttccaacagcacgggcaccacttccaacaccatcaccaccaccaccataccccgcatcctgccgtgcccgtgtcacccagcttcagcgaccccgcctgtcccgtcgaacgcccccctcaggttcaggctccttgcggagccaacagttcatcagggacttcctatcatgaacaacaggcactgccggttgatctgagcaatagtggcatccgctcacacggtagcggctccttccacggagcctccgccttcgacccttgttgccctgtgtccagtagtcgtgccgccatattcggacatcaggctgccgcagccgcaccatctcaaccactctcctctattgatggatatggaagttcaatggttgcacagccacagccacagcccccgccacagccaagtctgagcagctgtcgccactacatgcctccaccatatgcatcccttaccaggcctctgcaccatcaggctagtgcatgtccacattcccacggtaatccccctccccagactcaaccgccacctcaggtcgattatgtgatcccacatccagtacatgcattccattcccagatcagctcccatgcaacatctcacccagtggcgcccccaccacctacgcacctggcctccaccgccgcccccatcccacaacatttgccgccaacgcatcaacccatttcacaccacattcctgccacagcccctccagcacaacgcttgcatccacatgaggtcatgcagcgaatggaggtccaaaggcggcggatgatgcaacaccccacaagggcccatgaaaggccgccccctcacccccacaggatgcaccctaactacggccatgggcatcacatccacgtcccgcagaccatgagctcccatcctagacaagctccggaacgctcggcatgggaattagggattgaggcaggagtaacagcggccacgtacactccaggagcgctccacccccacctggctcattatcatgcacccccacggctccatcacctccaacttggcgctctccctctgatggtcccggatatggcgggctacccgcacataaggtacattagcagcgggctggacgggacatcctttcgtggaccgtttagaggtaacttcgaggagctgatccacctcgaagagagactgggcaatgtgaatcgcggtgccagccagggcactattgaacgatgcacctatccccacaagtataaaaagcggaaactacactgtaagcaggacggggaagagggcaccgaagaggacacagaagagaagtgcacaatctgtctatccatcctagaagaaggcgaggatgtgcgccgtctgccctgtatgcacctgttccaccaggtgtgtgttgaccagtggttgatcacaaacaaaaagtgtccaatttgtagggtggatattgaagcccagctgccctcagagagctag

SEQ ID NO: 14845 - DNA, 372 bp, synthetic construct
  source 1..372: mol_type = other DNA; note = Synthetic coding sequence
atggccaaaattaaagcgcgagacctgaggggcaagaagaaagaggaactgcttaagcagctcgacgatcttaaggttgagctcagccagctgcgagtggcgaaggtcactggaggagccgcttcaaagcttagtaagattcgagtggtgagaaagtcaatcgcgagggtcctgacagttatcaaccagacacaaaaggagaatctgcggaagttctacaagggtaagaaatacaagcctctggaccttcgtcctaaaaaaaccagggcaatgcgtcgccgcttaaacaaacacgaggagaatctgaagactaagaaacagcagcgcaaggaacggttatatccacttcgcaagtatgctgtgaaggcctag

SEQ ID NO: 14846 - DNA, 1635 bp, synthetic construct
  source 1..1635: mol_type = other DNA; note = Synthetic coding sequence
atgaaaattttttgctcccgcgctaaccccaccactggttctgtggagtggttggaagaagatgaacactacgattatcaccaggagatcgccaggtcctcctatgcagacatgctgcacgataaggatagaaacgttaagtattaccaggggattagggcagccgtctcacgtgtgaaggacagaggacagaaggcactagtcctcgacatcggaaccggcaccggcctgctttcaatgatggctgtcactgccggcgccgatttttgttacgctatcgaagaaaactgtgaggcagtgccgcatcgagccaccgtgtatgctcaactggtggagtcagggcgcatgtggagctggaacaagctcttccctatacacgtccagacctctttaggcgaacaagtgatcgtacctccagttgacgtggaatcctgccctggagcccctagtgtgtgtgatatccagttaaaccaggtttctcctgccgattttaccgtgctgagcgatgtgctgccgatgttctctatcgacttcagtaaacaggtgtccagtagcgctgcctgccatagcaggcggttcgagcctctgacttcgggaagggcgcaggtcgtactatcttggtgggatatagagatggatcctgagggaaaaataaaatgcactatggcccctttctgggcccattccgatcctgaggaaatgcaatggagggaccactggatgcaatgcgtctacttccttcctcaggaagagccagtggtacagggctccgcattgtatctagtcgctcatcacgacgattactgtgtatggtattcacttcagagaacaagtcccgagaaaaatgagcgagtaagacaaatgagacccgtatgtgattgtcaggcccaccttctctggaacagaccaaggttcggcgagataaatgaccaggacagaacagaccgatacgtacaggctttacggaccgtgtcccttttgcttggcgaaccgttcttcacgacatccttactcccgtggcacaacctgtatttttggtatgtacgcaccgcggtggatcagcatctgggtccgggagccatggtgatgccacaggccgcatcactacatgcggtagtggtggagtttagggatctgtggcgcatccgctctccctgcggcgactgcgaaggcttcgatgtgcacatcatggacgatatgattaaacgggcccttgactttcgggagagcagggaggccgaacctcaccccctctgggagtacccatgcaggtccctgagcgagccttggcaaattttgacattcgatttccagcagccagtgcccctccagccactatgtgcagaggggaccgtggagctgcggagacctggacagtctcatgcagctgtcctgtggatggagtaccacctgacccctgaatgcaccctctctacaggactccttgagcccgcagacccggaggggggatgttgctggaacccccactgtaaacaggccgtatacttcttctcaccagccccggacccacgagctcttctcggcggccctcgaacagtttcttacgctgtagagttccaccccgacacaggcgacatcattatggaattccgtcacgccgacactcctgattag

SEQ ID NO: 14847 - DNA, 1131 bp, synthetic construct
  source 1..1131: mol_type = other DNA; note = Synthetic coding sequence
atgcccctgcaggtcagcgattacagctggcagcagaccaagaccgctgtgtttctgagtctaccccttaaaggcgtctgtgtccgggatacagatgtgttttgcactgagaactacctgaaagtcaacttcccacccttcctgtttgaagccttcctgtatgcacctattgacgacgagagttcaaaagccaagataggaaatgacaccattgtgttcacgttgtataaaaaggaggccgccatgtgggaaaccctctcggtaaccggagtggataaggagatgatgcaacgcatcagggaaaagagcattctgcaggcccaggaaagagccaaagaggccacagaggctaaggctgccgcaaagcgagaggatcagaagtacgccctgagcgtgatgatgaagattgaggaagaggagcggaagaagattgaggacatgaaagagaatgaaaggataaaagcaacaaaagcgctcgaggcttggaaggagtatcaacgtaaggctgaggagcagaaaaagatccagcgagaagagaaactgtgtcagaaagagaagcaaataaaggaagaacgcaagaagatcaaatacaagagcctgacccgcaatctggctagcaggaatctggcaccaaaagggaggaattctgagaacatttttacagaaaaactcaaagaggattcaattcccgctccacgcagcgtcggctcgatcaagattaactttactcctagggtttttccgacagctctccgagaatcccaggtggctgaggaggaagagtggctgcacaagcaggccgaagcgcggcgagcaatgaataccgatattgccgaactttgtgatctcaaggaagaagagaagaatcccgagtggctcaaggacaagggtaacaagctgtttgcaactgaaaactacctggccgccatcaacgcatacaacctggctattaggctcaacaataaaatgccactgctttacctcaaccgggccgcttgccatctgaaactcaagaatctccataaagccattgaggacagttcaaaggcctaccgcatcatgaagaggcatctgcggttaatccaccccaccaagttatataagctgatgcttcgccggtttggaatgtag

SEQ ID NO: 14848 - DNA, 4221 bp, synthetic construct
  source 1..4221: mol_type = other DNA; note = Synthetic coding sequence
atgtggtcactgacggccagtgaaggagaatctacgactgcgcactttttcttgggagccggggacgaaggtctcgggactagaggtatcggcatgcgtcccgaagaatccgatagcgagctgctggaagatgaagaggacgaggtgccacctgagcctcaaatcattgtcggaatctgcgccatgacaaagaagtctaaaagtaagcctatgacccaaatactcgaacgactttgcaggtttgactacctaacagtggtcattctgggcgaagacgttatcctgaatgagcccgttgagaactggccttcgtgccattgcctcatctcatttcacagtaagggctttccattggacaaagccgttgcatattctaagctgcgaaaccccttcctgatcaacgacctggctatgcagtattatatccaggatcggcgggaggtgtataggatcttgcaggaggagggaatcgatctcccccgttatgcggtcttgaatcgcgaccccgctcgacccgaagaatgcaatctgatcgaaggggaagatcaggtagaagtcaatggagccgtgtttccaaagccatttgtcgaaaaaccagttagtgctgaggaccacaatgtgtatatatactatccgtcttccgccggcggcggcagtcagagactctttaggaagatagggtctcgttctagtgtgtattcgccagaatccagtgtgcggaagactgggtcctacatctatgaagagttcatgcccacagatggaacagatgttaaggtgtacacagtggggcctgattacgcacacgcagaggcgagaaagtctccggcccttgatgggaaagtggagagagattctgagggtaaagagatccgatacccagtgatgctgactgcaatggagaagcttgttgcacggaaggtgtgtgtggccttcaagcagaccgtgtgcggattcgacctgttgcgggcgaatggccactcctttgtgtgcgatgtgaacggtttctcttttgtcaagaactctatgaagtactatgatgattgcgcgaagatcctgggcaacaccattatgcgggaactagccccccaattccagattccatggtccatccctactgaggccgaggatattcctattgtccccaccaccagtggcaccatgatggaactgaggtgtgtgatcgcaatcatccgccatggagacagaacaccaaaacagaaaatgaagatggaggtgaaacaccctcgtttcttcgccctgttcgagaagcacggaggctacaagaccggcaagctaaaattaaagagaccagagcagcttcaggaggtgctggacataactcgcctactgctggctgaactcgaaaaagagcctgggggcgagattgaggagaaaacaggcaagcttgagcagctgaaatccgtcctcgagatgtatggacactttagtggcataaaccggaaggttcagttaacctactaccctcatggggtgaaggcctccaacgagggccaggacccacagagggagacacttgcaccctccctactgctggttctgaagtgggggggggagttgacacccgctgggcgcgtgcaggcagaagaactagggagagcttttcgttgtatgtatccaggtgggcagggcgactatgccggattccctggatgtggattactcagactgcatagtacctttcggcacgatcttaagatttatgcttccgatgaaggacgggttcagatgaccgctgcagcttttgcaaagggtctcctagcccttgagggcgaactgacccctattctggtgcagatggtcaaaagtgctaacatgaacggcctcctcgattctgatggggacagtctgtcatcttgtcaacacagagtcaaagcccggctgcatcatatcttacagcaggatgcacctttcgggcctgaagattacgatcaactagcaccaacaaggtcaacaagcctgctgaacagcatgacaattatacagaaccccgtaaaggtgtgtgatcaggtgttcgctctgatagaaaacctgacccatcagatacgcgaaaggatgcaggacccacgctccgtggatctgcagctgtaccattccgagaccctggagctgatgctccagcgatggtcaaagcttgagcgagacttcaggcaaaagtccgggcgctatgacatcagtaagattccggacatctatgactgtgtgaaatatgatgttcagcataatggctccctcggtctgcagggaactgccgagctgttgcgactgagtaaagcacttgcagatgtggttataccacaggaatacggcatctctcgcgaggagaagttggagattgctgtaggcttctgcttacccctgttacgcaaaatactgctagacctccagcgcactcatgaagatgaatcggtgaataaattgcatcctctatatagcaggggagtgctgtcacctgggcggcatgtgaggacccgactctacttcacaagcgaatcgcacgtgcactctcttctgagcgtctttagatatggtggtctcctggatgagacccaggacgctcagtggcagagggccctggactatctgtcagcaatcagtgaacttaattacatgacacagattgtgattatgctgtatgaagacaacacgcaagatccgctgagtgaagaaagattccatgtggagctgcatttttctcccggagtgaaaggggttgaggaggaaggctctgcaccggccggctgcgggtttaggcctgcctccagtgagaacgaagaaatgaaaaccaaccagggcagcatggagaacctgtgccccggaaaggcctccgacgagcctgaccgcgcccttcaaacttccccccaaccgcctgaaggacctggtctcccccgccgcagccccctgatccgaaatcgaaaggccgggagcatggaggtcctttccgagacaagttcctcccgacccgggggttaccgccttttctcctcaagccgcccaccaacggaaatgaagcagagcgggctaggtttcgagggctgctccatggtccctacaatttacccactcgaaaccttgcataatgcgttgagccttcgacaggtgagcgagtttctcagccgcgtctgccagagacatacagacgcacaggctcaggcaagcgcagctctgtttgacagcatgcattcgtcacaggcaagtgataatccattcagcccccccaggaccctccactctccccccctccagctccagcagcgctctgaaaagcctccttggctggaaactagattttgtcacgttggccaggcaggactcgaattactcacctcatccgacttaccagcgtcagcatctcagagcgccggaatcacaggagtgtcacaccggactcagcctgactccagcggcccaagcagtactgtgagttccgccggtcctagttcccctacaaccgtggatggaaattcccagttcgggttttcagatcagccttctttaaacagtcacgtcgccgaggagcaccaaggtctgggcttgttgcaggagacaccaggctctggggcccaggagctgtccattgagggcgaacaagagttgttcgagccaaatcaatcaccacaggtgcctcccatggaaacttcacagccctacgaagaggtgtctcagccatgtcaggaggtgccagatattagccagccatgccaggacatttcagaggcactgtcacagccatgccagaaggtgccagatatctctcaacagtgccaggaaaaccatgacaacggcaatcacacttgtcaggaggtgcctcatatctcgcagccctgccagaagagttcacagctatgccaaaaggtctctgaggaggtttgtcaactctgtctagaaaactcagaggaggtcagccaaccttgccaaggcgtatcagtggaggtcggaaaattggttcacaaatttcatgtgggtgttggttccctagtccaggagaccctggtggaagtgggatctccagcagaagaaattcctgaggaagtgatacagccttaccaagagttttcagtggaagtggggcggcttgcccaggagaccagcgcgatcaatctgctgtctcagggcatccccgagattgacaagcccagccaggagtttccagaagagatcgacttacaagcacaagaagtccctgaagaaattaactag

SEQ ID NO: 14849 - DNA, 1338 bp, synthetic construct
  source 1..1338: mol_type = other DNA; note = Synthetic coding sequence
atggtcctcgaaggtaaccccgaagtcgggtcacctcgtaccagcgacctccagcatcgggggaacaagggcagttgcgtactgagcagtcccggagaggatgcacagcctggagaagagcccatcaaatacggcgagctgatcgtgctggggtataacgggtgcctcgcatcaggagataaaggaaggcgccggagccgcctggcactgagcagaaggtcacacgctaatggcgtcaaaccagatgtgatgcaccatattagtacaccgttagtcagcaaagcattgagcaatcggggtcagcatagcatttcatacaccctttcaagatcacactcggtcattgtggaatatacccatgatagtgatactgatatgttccagataggtcggagcactgagaatatgatcgacttcgtggttactgataccagcccaggagggggcgcagcagaagggccatcagctcaaagcactatctcgaggtatgcttgtcgcattctgtgcgacaggcgcccaccctacactgcccgcatttacgccgcaggattcgacgcctctagcaatatttttctgggggagcgtgctgcaaaatggcgtacccctgatggcctaatggatggactcaccaccaacggagttctggtcatgcatcctgccggcggattcagtgaagactccgcgccaggtgtgtggagggaaatcagcgtgtgcggaaacgtgtacacgctgcgagatagcagaagcgcccaacagagaggcaagttggtggagaatgagtcaaacgtgctgcaagatggctccctgattgatttatgcggggcaaccctcctgtggcggacaccggcgggacttctgagggcacctacgctcaagcagcttgaggctcaacgacaggaggccaacgctgcacgcccgcagtgcccagtaggactgtccactctggcatttccctccccggcacgaggacgaacggctccagacaagcagcagccctgggtctacgtgcgctgcggccacgtgcacggatatcacggatggggctgccgcagggagcgggggccacaggagcgcgagtgcccactgtgtcggttagttgggccttacgttccgctatggttgggccaggaggccggcttatgcctcgaccccggtcccccttcccacgctttcgctccttgtggtcacgtgtgcagcgaaaagactgcccggtattgggctcagacacccttacctcacggcactcatgccttccacgctgcttgtcccttttgcggggcctggcttacaggagagcatggatgcgtgagattgatatttcagggacctttggactag

SEQ ID NO: 14850 - DNA, 1950 bp, synthetic construct
  source 1..1950: mol_type = other DNA; note = Synthetic coding sequence
atgggcacggccctggtgtaccacgaggatatgaccgcaaccaggctcctctgggacgaccctgaatgtgaaatagaaaggcccgagcgcctgacagccgcgctcgatagattaagacagagggggctggagcagcgttgcctgcgtttgagcgccagggaagcctccgaagaggaactgggcctggttcactcacccgagtacgtgtctctggtgcgcgaaacccaagtgttagggaaagaggaactgcaggcactcagtggccagtttgacgccatatacttccatcccagcacattccactgcgccaggctggccgctggagcggggctgcagctcgtggatgccgtgctcacgggtgccgtgcagaacggattagccctagttcggcccccaggacaccacggtcagcgtgctgccgctaatggattctgtgttttcaacaatgtagccatcgctgcagcccatgccaaacaaaagcacggcctgcaccgaatcctcgtggtcgattgggacgtgcatcacggtcagggaatccagtacctgtttgaagatgacccatcagtcctgtacttttcctggcacagatacgaacacggaaggttctggccattccttcgagaaagtgacgccgacgccgtaggtcgtgggcagggattggggtttaccgtgaacctcccctggaaccaggtagggatgggaaacgccgattatgtcgccgcttttctgcacttactgctgccactggcctttgaggggcaaatgcaggcaacgcctgagtgctttgcccacttgacccagctgttgcaggtcctcgccggcggccgtgtgtgtgccgttctggagggaggctaccatctggagtccctcgctgagtccgtgtgtatgacagtgcaaacattacttggagaccccgcccctccgttgtctggccccatggctccctgtcagagtgccctcgagtccattcagtctgcccgtgcagcccaggccccgcactggaaatctcttcagcagcaagatgtgacagctgtgccgatgagcccatcctcgcactcccccgagggtcgcccgccacccctattgcccggagggcccgtgtgtaaagccgccgccagcgccccgtcttccctcctggaccagccttgcctgtgccccgccccatctgtcaggactgccgtagccttaactactcccgatatcacgctcgtgcttcctcccgacgtgattcagcaggaagcaagcgctcttagggaagagacggaagcctgggctagaccccacgagagtctggccagagaagaagcactcacagcccttggaaaactgctgtatttgctcgacggtatgctggacggtcaagtgaacagcggcatcgccgccacccccgctagcgccgcagccgctacccttgacgtcgcagttcgtagagggctgtctcatggggcccagcggctgctttgcgtagcgttgggccagctcgaccggcccccggatctggctcacgacgggcggtccctgtggttgaacatccggggcaaagaagccgctgcattgagcatgtttcacgtcagcaccccacttcccgttatgactggtggttttctcagttgcatcctcggattagtgctgccccttgcctatggcttccagccagatttggttttggtggccctgggtcctggccacggcctgcaaggcccccatgctgccctgctcgctgccatgctgcggggactggccggtggacgcgttcttgccctgctggaagagaacagtaccccgcagcttgccggcattttggctcgcgtcctcaatggagaagcaccccccagtctgggcccaagttccgtggccagtcctgaggatgtccaagccctcatgtatttgagaggtcagctggaaccgcaatggaaaatgctgcagtgccacccacacctggtcgcttag

SEQ ID NO: 14851 - DNA, 795 bp, synthetic construct
  source 1..795: mol_type = other DNA; note = Synthetic coding sequence
atggccggtgagcagaaaccttcttcgaatctcctggagcaattcattctcctcgctaaaggcacctccggatccgctttaaccgcactaatcagtcaggtcctcgaggctcccggggtttatgtcttcggagaactgctcgagctggcgaacgtccaggagctggctgagggcgccaatgctgcttacctccagctcctgaatctgtttgcatatggaacctaccctgattacattgcgaataaggagtcactgcccgagctctctaccgcccagcagaataagctgaagcacctgaccatcgtgtctttagcgagcagaatgaaatgcattccctacagcgtgctgctgaaggacctcgagatgaggaacctgagagaacttgaggatctgatcattgaagcggtatacaccgacatcatccaaggcaagctcgatcagcgtaaccaattgcttgaagttgacttttgcatcggaagagacatccggaagaaggatattaataatattgtaaagaccctacacgaatggtgcgacggatgcgaagccgtattgctgggaatcgagcagcaagtgttaagggctaaccagtataaggagaaccacaataggactcagcaacaggtcgaagccgaggtgacaaacataaagaagactttgaaggccacagcgagtagctccgcacaagaaatggagcagcagttggccgagagagaatgcccaccacacgccgaacagaggcagcccaccaagaagatgagtaaagtcaaggggctggtcagttcccgccactag

SEQ ID NO: 14852 - DNA, 726 bp, synthetic construct
  source 1..726: mol_type = other DNA; note = Synthetic coding sequence
atgtccgcctctctgaactataaaagtttcagcaaagaacagcagaccatggacaacctggagaaacagcttatctgtcctatctgcctcgagatgtttaccaagcccgtggtcatcctcccttgccaacacaacctgtgtaggaagtgtgcatcagacattttccaggcctctaatccttacctccccacgcgtggcggcactacgatggcctcaggggggagatttagatgcccttcctgcagacatgaggtcgtgctggaccgccacggtgtgtatggtctgcagcggaacctgctggtggagaacatcattgatatctacaagcaagaatctacccgtcctgaaaagaagagcgaccagcccatgtgtgaggagcacgaggaagaacgaattaacatttactgcctcaattgcgaagtgccgacctgttcgctttgcaaggtgttcggggctcacaaggactgccaagttgcccctctgacgcacgtgttccagcgccagaagtccgagttgagtgacggcatagctattctcgtcggaagtaatgatagagtgcaaggcgtcatttcacaactggaggatacctgtaaaactatagaaataggatttgaagcacctcctttacagggacaggctgcagccccagcttctgggagtggcgcggatagtgaaccagcgcggcatatttttagcttcagctggctgaacagcctgaatgagtag

SEQ ID NO: 14853 - DNA, 3501 bp, synthetic construct
  source 1..3501: mol_type = other DNA; note = Synthetic coding sequence
atggccaatgactctcctgcaaagtcattggtggacatcgatctgtcgagtctgcgcgatccggccggcatcttcgaactggtggaggtcgttgggaacggaacctatggtcaggtgtacaaaggacgccacgtgaagactgggcagcttgccgccatcaaagtcatggatgtgaccgaggacgaggaagaggaaatcaaactggaaattaacatgttgaagaagtacagtcaccaccgaaatatcgccacctattacggcgcttttatcaagaaaagccctccaggtcacgacgatcaactgtggctcgtcatggaattttgcggcgccggcagtatcaccgatttagtcaagaatacaaaaggtaatacactcaaggaggattggattgcatatattagtagggagatcctgagaggactggctcatctgcacattcaccatgtgattcaccgtgatatcaagggacagaatgtactgcttacggagaatgccgaagtgaagctcgtcgattttggcgtgagcgctcagttggatagaacagtcggacgccggaacactttcattgggacgccatactggatggcccccgaggtgattgcctgtgacgagaaccctgacgctacttacgactaccgttcagacttgtggtcttgtggcatcacggcaatcgaaatggccgagggggcgccaccactgtgcgatatgcaccccatgagggctcttttcctaataccccgcaacccccccccacggctgaaatcaaaaaagtggagcaagaagtttttttcttttatcgagggttgtttggtcaagaactatatgcagcgcccttcaaccgaacaattattgaaacacccttttataagagatcagcccaatgaacgccaggtgcgaattcagctcaaggatcacatcgatcggacacggaagaagaggggtgagaaagacgagacagaatacgaatatagcggctcggaagaggaggaagaggaagtgccagagcaggagggtgaacccagctcaattgtgaatgtgccaggagagtcaactctcaggcgggattttctgcggctccagcaggagaataaggagcgctctgaggctttgcgccggcagcagctcctgcaagagcagcagctccgcgaacaggaagaatacaaacgtcagctgttggccgagcgacagaaacggatcgaacaacagaaggaacagagaagaaggctggaggaacagcaaagacgcgaaagagaggcccgaagacagcaagagcgtgagcaacgtcggagggagcaggaagagaaacgcagactggaagagctggaacggaggagaaaagaagaggaggaacgccgtagggccgaagaggagaaaagaagggtcgagcgagagcaggaatatattcgcagacaactggaagaggagcagcgtcatcttgaagtattgcagcaacagctgctgcaggagcaagccatgctgttacacgaccaccggcggccgcacccccagcactcacagcaacccccacccccccaacaggagagaagtaaaccatctttccacgctccagagccgaaggcgcattatgaacctgctgaccgagcacgcgaagtgcctgttcggacaacctctcgctcccccgtgctgagcaggagggactcccccttgcaggggagtggccagcagaattcgcaggctggccagcggaacagtacaagcagcattgaaccccggctgctctgggaaagagtcgaaaaactggtgcccagaccaggctctggatctagctcagggtcatcaaacagcggcagccagcccggaagccaccccggctctcagtctgggagcggcgagagatttcgggttcgtagcagctccaagagtgagggctccccttcccagcggcttgagaacgcagttaagaagcccgaggacaaaaaggaggtcttccggccactgaaaccggccgtgcgaatcgatcttacagcactcgcaaaagagttgagggcagtggaggacgtacgccctccacataaggttaccgattattccagcagctcagaagagagtggcaccacggacgaagaagacgacgatgttgaacaggagggagccgacgaatccacctctggacccgaggatactagagcagcctcaagtttaaatctgtctaatggcgagaccgaaagtgtgaagacgatgattgttcacgacgacgtggagagcgagcctgccatgacgccaagtaaggagggaaccctgatcgtacgccagacgcagagcgcctcaagcacactgcagaagcataaaagcagctcctctttcaccccattcattgacccaaggcttttgcagatctccccttctagcggcaccactgtgaccagcgtggtcggcttctcctgcgatgggatgagacctgaggccatccgacaagaccctacccggaagggtagcgtcgtcaacgtaaatccgaccaatacacgcccccaaagtgatacccccgagatccgcaagtacaaaaagcgttttaattctgaaattctgtgcgcagctctgtggggtgtgaaccttctggtggggacagagagtggacttatgcttctagacaggagtgggcaaggaaaggtgtaccctctgatcaatagacggcgattccagcagatggacgtgctggaaggactgaatgtcctagtgaccatcagcggaaaaaaagacaaactgcgcgtatactatctgagctggttgcgaaacaaaattctccacaacgatcctgaagtcgagaagaaacagggctggaccacagtgggtgacttagaaggttgtgtgcattataaggtcgttaagtatgaaagaatcaaatttctcgtaattgcactgaagagcagtgttgaagtctatgcctgggcaccaaagccttaccacaagttcatggcattcaagagcttcggagagttggtacacaagcctttattggtggatctcaccgttgaggagggccagaggctcaaagttatatacgggtcctgcgccgggtttcacgccgtcgatgtggattcaggctctgtatacgacatctacctcccaacccacgtgagaaagaacccacattctatgatccagtgcagtataaagccccatgccattattatattacccaacaccgacggtatggagctgctggtttgttatgaagacgagggcgtctacgtcaatacttatggccgcatcacaaaagacgtcgtgctccagtggggtgaaatgccaacctcggtggcctacatccgatcaaatcagactatgggctggggcgagaaagctattgaaatccggtctgtcgaaacgggacacctggatggcgtatttatgcacaagcgggcccaacggctgaagttcttgtgtgagaggaatgataaagttttttttgcatctgtgagaagtggaggtagctcacaggtctatttcatgactttgggtagaacatccctgctcagctggtag

SEQ ID NO: 14854 - DNA, 2466 bp, synthetic construct
  source 1..2466: mol_type = other DNA; note = Synthetic coding sequence
atggttgccccggtgttagagacaagtcatgtcttttgttgcccaaatagagtgcgaggagtcctcaattggtctagcggcccccgcgggctgctggcattcggcacctcttgcagtgtggtgctttacgatcccctcaaaagagtggtcgttactaacctgaatggccacaccgcacgcgtgaactgtattcagtggatttgtaaacaagacgggtctccttccaccgagttggtgtctggcgggtccgacaaccaagttatacattgggaaattgaggataaccagctgttaaaggccgtgcacctacagggacacgagggcccagtttacgctgtgcacgcagtgtatcaacgcagaacctccgatccggcgctgtgtacccttattgtgtcagccgcggcagatagtgctgtcaggttatggtccaagaaagggccagaggtgacctggaagactggtcaggtggaacgcggcagagcatggaaaccgccagcaagtctagctctatgttccagatcatgtgatagtatggtctcatgttacgcgtccatattgtgcaaggccctttggaaggaaaaactgcacactttctggcaccacaaccgcatctccttccttccttctgcatttcgacctataccaattttagcgtgtggtaacgacgactgccgtattcatattttcgctcagcagaatgaccagttccagaaagtcctgagcttgtgtggccacgaggattggatacggggtgttgaatgggcggcattcggcagagatctgtttctggcttcatgtagccaggactgcctgattcggatatggaaactttacattaagagcacctcccttgaaactcaagatgatgacaatatccgcctgaaggaaaacacttttaccatcgaaaatgagtccgtcaagatcgcattcgctgtcacactcgagaccgtgttagcagggcatgaaaactgggtgaacgccgtgcactggcaacccgtgttctataaggatggtgtcttacagcagccagtgaggctgctatccgcctctatggacaagaccatgattctctgggcacctgacgaggaatcaggcgtgtggctggaacagcgcgaatggacccccgagatcgtcattagcggacattttgacggagtgcaagacctcgtctgggaccccgaaggggaattcatcattacagtgggcacggaccaaaccacccgtctgttcgcaccatggaaacggaaggaccagagccaggtcacgtggcacgagattgcgcgaccgcagatccacggatacgacctgaagtgtttggccatgattaatagattccagtttgtgtccggtgccgacgagaaagtcctgcgggtttttagtgccccaagaaatttcgtcgagaatttctgcgccatcactggacagagcctaaatcacgtgctgtgtaatcaggatagtgatctcccagaaggggcaactgtgcccgctctgggcctgagtaataaggctgtcttccagggcgatattgcaagccaaccatccgatgaagaagagttactgacctctactgggttcgaatatcaacaggttgctttccagcctagtatcctgaccgagccacctacagaggaccacctcctgcagaatactctgtggccagaagtgcagaaactctacggtcacggctacgaaatattctgcgtaacctgcaatagttctaagactctattagcttccgcctgcaaggcagctaagaaggagcatgccgcaatcatcctgtggaatacaacatcctggaagcaggtgcaaaatctggtgtttcatagtctgaccgtcactcagatggccttttctccaaatgaaaagttcctgctggccgtgtcccgcgatcgcacatggagcttgtggaagaagcaggacacaatttcacccgagttcgagccagtcttctccctgtttgcctttacaaataagattactagcgtgcattctcggatcatctggagttgcgattggtccccagactctaagtacttctttacgggcagcagggataaaaaggtggtcgtgtggggagaatgtgattcaaccgacgattgtatcgaacataacatcggcccctgctcctccgtgctggacgtcgggggtgccgtgaccgctgtatccgtgtgtccagttctgcacccatcacagcggtatgtggttgccgtcggcctggaatgcggcaagatatgtctgtacacatggaaaaagaccgaccaggtcccagagataaacgactggactcactgcgtggaaacgagccagtcgcagtcacataccctcgccatcaggaagctatgttggaagaactgtagtgggaaaaccgagcaaaaggaagccgagggagccgagtggcttcacttcgcctcgtgcggtgaagaccacacagtgaaaattcaccgcgtgaacaagtgcgccctctag

SEQ ID NO: 14855 - DNA, 969 bp, synthetic construct
  source 1..969: mol_type = other DNA; note = Synthetic coding sequence
atggtgtcagtgattaatactgtggacaccagccacgaggacatgatacacgatgcccagatggattactacggaacacggctggcaacatgctccagcgacaggtctgttaaaatctttgacgtgcggaatggcgggcagatcctgatcgctgacttgcggggtcacgagggacctgtctggcaggtggcgtgggcccacccaatgtatggaaatatactggctagctgctcttacgatagaaaggtcataatttggcgggaggagaacgggacttgggagaagagtcacgagcatgccggtcacgattcttcagtgaactccgtctgttgggcaccacacgattacggactgattctggcctgtgggagcagtgacggggcaatcagcttgctgacatacaccggcgaagggcagtgggaggttaagaaaattaataatgctcataccataggttgtaatgccgtgtcttgggctcctgcggtcgtgccaggatcactgattgaccacccttccgggcagaaacctaattacattaagagattcgcctctggagggtgcgacaacttgatcaaactttggaaagaagaggaggatggacaatggaaagaggaacagaagctggaggctcacagcgactgggtgcgcgatgtggcatgggctccttccatcggccttcctaccagtacgatcgcttcatgttctcaggatggtcgcgtgtttatctggacctgcgacgacgcctcctctaacacatggtctccaaaacttctgcataagtttaacgacgtcgtctggcatgtgagctggagcataaccgctaacatccttgccgtatccggcggagacaacaaggtcaccctgtggaaggagagcgtcgatggccagtgggtttgtatttctgacgtcaataagggccagggttccgtctccgctagtgtgactgaggggcagcaaaacgaacagtag

SEQ ID NO: 14856 - DNA, 1347 bp, synthetic construct
  source 1..1347: mol_type = other DNA; note = Synthetic coding sequence
atgtcctcccgtaagctctcaggccccaagggtaggcggctgtccattcacgtggttacctggaatgtcgcctcagccgcccctccgttggatctatccgacttactgcagctgaacaataggaatctgaatcttgacatctacgttatcggtcttcaggaactaaactccggaataatctccctcctgagcgatgcagccttcaacgattcttggtcttccttcctcatggatgtcctgtctcctctaagcttcatcaaggtgagtcacgtgcgtatgcaaggcattcttctgctggtcttcgcaaagtatcaacatttgccgtatattcaaattctctccaccaaatcaacacctactggcctgttcggatactggggaaacaagggcggtgtcaacatttgtctaaagctgtatgggtattatgtgtctataatcaattgccatctgccccctcatatctctaacaactatcagcgcctggagcactttgatagaatcctggagatgcagaactgtgaaggccgggacatccccaacatcctggaccacgatttaatcatatggttcggggacatgaactttcgtatcgaagatttcggcctgcattttgtgcgggaaagtataaagaatcgctgctatggaggcctgtgggagaaagaccaactctccatagcaaagaagcacgatcccttgcttcgcgagttccaggagggaaggctgttattcccccccacttacaagttcgatagaaattctaacgactatgacactagtgagaaaaaaaggaaacccgcttggacggaccgaatcctatggaggctgaaacgccaaccgtgtgcaggccccgataccccaattccgccagccagtcacttttcgctgtcccttcgggggtactccagtcatatgacatatggaatcagtgaccacaaacccgtgtcagggacctttgatctagagttgaaaccccttgtaagtgcccctttgatcgtactcatgcctgaagacctatggacagtcgaaaatgacatgatggtcagttacagctcgacatcagattttccgagttcaccatgggattggattggtctctacaaagtgggactacgggacgtgaacgactatgtgagctatgcctgggtcggtgactctaaagtgtcctgcagcgacaatctcaaccaggtgtatatagacatcagtaacatccccaccactgaagatgaattcctcttatgctattatagcaattcccttcgctcagtggtgggaattagccgcccctttcagatccccccaggctccttgagggaggacccactgggcgaggctcaaccacaaatatag

SEQ ID NO: 14857 - DNA, 1641 bp, synthetic construct
  source 1..1641: mol_type = other DNA; note = Synthetic coding sequence
atgggggcttacctatcccagcccaacacagtgaaatgttcaggtgatggcgtgggagcacccaggctacccctgccttacggcttttcggccatgcaaggctggagggtttccatggaggacgctcacaattgtatccccgagctcgacagtgagactgccatgttcagtgtgtatgatggtcatggcggcgaggaggtcgcgctctactgcgctaagtacctgccagatatcattaaagatcaaaaggcctataaggaggggaagctgcagaaagctctcgaggatgcatttttggcaattgacgcaaaacttaccacggaagaagtgatcaaggagctggcacaaatcgctggacggcctacggaggacgaggacgagaaggaaaaggtggccgacgaagacgacgttgacaatgaagaagctgctttattacatgaagaggccactatgaccatcgaagaactcctcactcggtacggccaaaactgccacaagggaccccctcacagcaagagcggcgggggcaccggagaagaacctggatcgcaggggctgaacggcgaagccggccccgaggactcaaccagagagacaccctcgcaggagaacgggccaactgccaaggcgtacacggggttctcaagtaactcagaacggggtacagaggcaggtcaagtgggggaacccggtattcccactggcgaagccgggccatcctgctccagcgcctccgacaaactaccccgggtagcaaagtctaaattctttgaagatagcgaggatgagagcgatgaggcagaggaggaagaagaggatagcgaggaatgttcagaagaagaagatggctacagctcagaggaggccgaaaacgaagaggatgaggatgatacagaagaagcggaagaggatgacgaagaggaggaggaagaaatgatggtccccggtatggagggcaaagaagagcccggctccgactcggggactactgcagtggtagctctcattaggggcaaacagcttattgtggccaatgccggcgattcccgatgtgttgtttctgaggcaggtaaagctcttgatatgagctatgatcacaaaccagaggacgaggttgagttagcacggattaagaatgctggcggcaaagtcaccatggatggcagagtcaatggaggacttaacctgtcaagagctataggggatcacttttataagagaaacaagaatcttcctccggaggaacagatgatttcagcactccctgacattaaggtcttgaccctcaccgacgatcacgagttcatggtaattgcgtgcgacggcatctggaacgtgatgagctctcaggaggtggtcgactttattcaaagtaagataagtcagcgcgacgagaatggagagcttagacttttaagttcaatcgtggaggagctcctggaccagtgcctcgcccccgacacatccggggatggcactggctgtgacaacatgacctgtataatcatctgcttcaaacccaggaacacagctgaactgcagccggagagtggaaaacggaagcttgaagaggtcctgtccacagagggcgcagaggagaatggtaactctgataagaagaagaaggccaaacgtgattag

SEQ ID NO: 14858 - DNA, 3840 bp, synthetic construct
  source 1..3840: mol_type = other DNA; note = Synthetic coding sequence
atgctgcaggccctgcagctgagaactgggttcttttgttttcgggtcctggtggccctttccccctgtgccctgcacgattctggaaggctgactacaggctcgtttaacgttgtgcgagatgaagaagaggaaattaaactagaaatcaatatgctaaagaagtactctcaccaccgcaacattgccacctattacggcgcattcatcaaaaaatctccaccaggtcatgacgatcaactgtggttagtgatggagttctgcggagcgggatcgatcactgacctagttaagaacactaagggaaacaccctcaaggaagattggatagcctatatcagcagagagatccttcgcggtctggcgcatctccacatccatcacgtgattcacagagacatcaagggacagaacgttctcctgacggagaatgcggaagtgaagctcgttgactttggcgtgagcgcacagctggatcgcacagttggtagacggaatacttttatcggtacaccgtactggatggctcctgaggtcatagcatgtgacgagaaccctgacgcgacctacgactatcggagtgatctctggagttgtggcatcaccgccatcgaaatggccgaaggtgctccccccctctgtgatatgcaccccatgcgggccctgttccttatccctcgaaaccctccgcccaggctaaaaagtaagaagtggagcaagaaatttttctctttcattgagggctgcctggttaaaaattacatgcagcgccccagtaccgaacagttgttgaagcaccccttcatccgcgatcagccaaatgagcggcaagtacgtattcagcttaaagaccatattgatcgaactaggaagaagaggggcgagaaagacgaaaccgagtacgaatacagcggcagcgaagaggaagaagaggaggtcccagaacaggaaggggagccttcgtccattgtgaatgtacccggagagagcaccctgcgccgggatttcttgagactccagcaggagaataaggagaggtcggaggcattacggcggcagcaactgctccaggaacagcagttgcgggagcaagaggaatacaaaagacagctgctagccgaaagacaaaaacgtattgaacagcaaaaggagcagcggcggagactcgaggaacagcagcgaagggagcgagaagcccgtaggcagcaagaaagggaacaaagacggagagagcaggaagaaaaacggaggcttgaagagcttgaacggagaaggaaggaggaagaggagcggagaagagctgaggaggaaaagcgcagggtagaaagggagcaggagtatatcaggcgtcaactcgaggaagaacagagacatttggaagtgctgcaacagcagctgctgcaagaacaggccatgctacttcacgatcataggaggccacaccctcaacattcccagcagcccccccctccacaacaggagcgctctaaacccagctttcatgctcctgagccaaaggcacactacgaacccgccgatcgcgcaagagaggtacagtggtcacacctggcatccctcaagaacaacgtatccccagtgagccggtcacattccttttcagatcccagtcctaaattcgcccaccatcatctcagaagccaggatccctgtcccccaagcagatccgaggtgctctcacagagctccgactcaaaatcggaagcccctgatcccacccagaaggcatggtctaggtctgattctgacgaggttccgccccgagtccccgtgcgcaccacgagcaggtctcctgtgttgtctcgaagagacagccctcttcagggatccggacaacaaaatagccaagccggacagcgcaacagcacttcttcaatagaaccacgtttactatgggaacgcgtagaaaagctggtgccaagacccggctcaggatcgtcttctgggtcatccaattcaggtagtcagcctggctcccatccaggctcccaatccggcagtggcgagaggttcagagtccgctccagcagcaaatccgaagggagccccagtcaaaggcttgagaacgcagtgaaaaagcccgaggataagaaagaagtcttcaggccactgaagcccgcagtgcgtattgacctgacagctctggctaaggaactgagggccgttgaggatgtgcgcccacctcacaaggttaccgactactccagctcttcagaggagagtggcacgaccgatgaggaggatgacgatgtggagcaagagggcgccgacgagtctactagcggcccggaggatacccgcgcagcatccagcctaaacctgtcaaacggggagaccgagtccgtgaagacaatgattgtacacgacgatgtagagagcgagcccgctatgaccccctcaaaagaaggaactcttatcgtaagacagtccactgttgatcagaagagggcctcccaccacgagagcaatggctttgccgggcggattcacctactgccggatctgctgcagcagtcccattccagcagcacatcatccactagttcatcacccagtagctcccagcccacacctaccatgtccccacagacacctcaggataagctgacagccaatgaaacgcaatcagcttcatctacacttcagaagcacaagagttctagctcctttacccccttcatagatcctcgcttactgcagatctctccctcctcaggaacgacagtgacatcagtagttggattttcatgcgacgggatgagaccagaagcaattcggcaagacccaacacgtaagggttccgtagtgaatgtgaatccaaccaacactagaccccagagtgacacgccagaaatccgcaaatataagaagagatttaactccgaaatattatgtgccgctttgtggggtgtgaacctgctcgtgggcacggagtctgggttgatgttgttagacagaagtggccagggcaaggtgtacccacttatcaataggagacgctttcagcagatggatgtgttggagggtctgaacgtgttagtgacgatctccggcaagaaagataagctgcgagtctattacctgtcttggcttcgcaacaagatcttacacaacgaccctgaagttgagaagaaacaaggatggaccactgtaggtgatcttgagggctgcgttcactataaggtggtgaaatacgagaggattaagttcctggtcattgctttgaaaagcagtgttgaagtttatgcatgggcccccaagccgtatcataaatttatggcgtttaagagcttcggagagctcgtccacaagccacttcttgtagatctgactgtcgaggaagggcagaggctgaaggtgatttatggaagttgtgccgggtttcacgccgtggatgttgactcagggtccgtgtatgacatctacctgcctacccatatccagtgctccatcaaacctcacgccataataattctgccaaacaccgacggaatggaacttctagtctgttatgaggacgagggtgtatatgtgaacacgtacggcagaataaccaaggatgtggtgttgcaatggggggagatgcccaccagcgtggcgtatatccgctctaaccagaccatgggatggggagagaaggcaatcgagattaggagtgtcgagactggtcatttagatggtgtatttatgcacaagagggcacagcgcctgaagtttctgtgcgagaggaacgacaaggtcttcttcgcttctgtgaggagcggtggatcttctcaagtttacttcatgacgcttggtcgtacctccctgttgtcttggtag

SEQ ID NO: 14859 - DNA, 1989 bp, synthetic construct
  source 1..1989: mol_type = other DNA; note = Synthetic coding sequence
atggctagttgtcccgatagcgacaactcatgggtcctggctggcagcgagagtctgcctgtggagaccctgggcccagcttctcggatggaccccgaaagcgaacgcgccctgcaggcaccacactcacccagtaaaaccgacggaaaagaactggccggtaccatggatggagagggcacactgttccagaccgaaagccctcagtccggctccatcctgactgaggagacagaggtgaaagggaccttagagggagatgtctgtggcgtggagccgcccggacctggggatacagttgtgcagggggacttacaagaaaccacagtcgtgacaggactgggtcctgatacccaggacttggagggccagtcgccaccccaaagcctaccatctactcctaaggccgcctggattcgggaggaaggccgttgtagttctagtgacgatgatacggatgtggatatggagggacttcgccgcagaaggggccgtgaagccgggccaccccagcccatggtgccgctggctgtggagaatcaggccggtggcgaaggagcggggggggaattgggtattagcctgaacatgtgcctacttggcgccctggtgttgttaggtttgggggtgcttctgttctcaggcggattgtccgaaagcgagacgggaccgatggaagaggttgaacgccaggtgctgccggatcctgaagtgctggaagccgtgggggaccggcaggacggcctgagggagcagcttcaggcaccagtgccccccgatagcgtgcccagcttgcagaatatgggcctgctgctggataagcttgccaaggaaaatcaggatatacggttgttacaggcacagctgcaggcccagaaggaggaactgcagagcctaatgcatcagcctaagggattagaggaagaaaatgcgcaacttcgaggagccctacagcaaggggaggctttccagagggctctggagtctgagctgcagcagctcagagctaggcttcaaggactcgaggctgattgcgtgaggggaccagatggggtgtgtctttctggtggccgtggcccccagggcgacaaagccatcagagagcagggcccgagagagcaggagccagagctgtcgttcctgaagcagaaagaacagctagaggccgaggcccaggctctcagacaggaattggaacgccagcgacgcctactggggagcgtgcaacaagatctagaacgctcgctccaggatgcatctagaggtgatccagcccatgcaggactggctgagctcggacatcgcctggcgcagaagctacaggggctggaaaattggggacaggacccaggcgtgtcagcaaatgcctccaaggcttggcatcaaaagtcccatttccaaaattcccgagagtggtccggcaaggaaaaatggtgggacggtcaacgggacagaaaggctgaacactggaagcacaagaaggaagagtccggccgcgagcgaaagaagaattgggggggtcaggaagaccgggagccagccggccgctggaaggagggccgaccccgggtggaggagtccggttctaaaaaggaaggtaaaaggcaaggccctaaggaacctccccggaagtcaggttctttccacagctcgggggaaaaacaaaagcagccaaggtggcgcgaggggaccaaggagctgccactgagtccagctttttttggcgaggatggaattttcagacatgaccgtttgcgttttagggatttcgtagacgccctcgaggactctctggaggaggttgccgtccagcaaacgggcgacgatgacgaagtggacgattttgaagactttatcttctctcacttttttggagacaaagccctgaagaagagaagcggaaagaaggataaacacagtcagtccccaagggccgccggcccgcgagaaggccatagtcatagtcaccaccaccatcatcggggctag

SEQ ID NO: 14860 - DNA, 2403 bp, synthetic construct
  source 1..2403: mol_type = other DNA; note = Synthetic coding sequence
atggtagcacctgtgttagagacctctcacgttttctgctgccccaatagagtgcggggggtacttaattggtcctcgggaccccggggactcctcgcctttggaacaagctgctcagtggtcctctacgatccactcaaacgagtggttgttacaaacctcaatgggcatacggcacgcgtcaattgcatccaatggatttgcaagcaggacggtagtccttcgacagagttggtatccggagggtctgataaccaggtgatccactgggaaatcgaggacaaccagcttctcaaagcggtgcacctgcaggggcatgagggccctgtatacgcagtgcacgccgtttaccagcgcaggactagcgatcctgcactttgtaccttaatcgtctctgctgccgcagattccgcggttcgactttggtctaagaaggggcccgaagttccaattctcgcctgtggaaacgacgactgcaggatccacatatttgcccagcagaatgatcagttccagaaagttttgagcctctgcgggcacgaggactggatcaggggcgtagagtgggctgcttttggccgggacctgttcctggcttcatgtagccaggactgcttgatcagaatctggaagctctatatcaaatcaacgtcccttgagacccaggatgatgataatatcagacttaaagagaacaccttcaccattgagaatgagagtgttaagattgcctttgccgttacattggagacagtgctagctgggcacgagaactgggtcaacgcagtgcattggcagcccgttttctacaaggacggcgtgctccagcaacctgtccgactgctgagcgcctcaatggacaagactatgattctgtgggcccccgacgaagaaagcggtgtgtggctggagcaagtgcgagtaggcgaagttggcggtaacacactgggtttctacgactgtcagtttaatgaggacggttcaatgatcatagcccacgcatttcacggcgccctgcatctctggaaacagaacaccgtgaatccaagagagtggacgccagaaatcgtcatcagcggccactttgatggagtgcaggatctcgtatgggacccagaaggcgagtttattataacagtcggaacagatcagaccacgaggttatttgccccctggaaacgaaaagaccagtcacaggtcacatggcacgagattgcccgcccccagatccacggatacgacctgaagtgtctggctatgatcaatcgctttcagtttgtgtctggggcagacgaaaaggttctgcgggtgttcagcgcccccaggaacttcgtggaaaatttctgtgctattactggacagtccctcaatcatgtgttatgtaaccaggattcagatctgcccgagggggctaccgtgccggccctggggctcagtaacaaggcagtgttccagggtgatatcgcatcccagccctccgatgaagaagaattgttgacctcaaccggatttgaatatcagcaggttgcatttcagcccagtattctaaccgaaccccccacagaggaccacctgttacagaacaccttgtggccggaggttcagaaactctacggacacggctatgagatattctgcgttacttgtaactcctccaagaccctcctggcttcagcctgcaaagctgccaaaaaggaacacgccgcaataatcctttggaataccacgagctggaagcaggttcagaatctagtcttccattcccttacggtgactcagatggcctttagccccaatgaaaagtttctcctcgcagtgtcacgggatcggacctggtctctctggaaaaaacaggatactatcagcccagagtttgagcctgtcttttcactgttcgcttttaccaataaaatcacgtctgttcactccagaatcatttggtcatgtgattggtctcccgattccaagtatttcttcacgggctccagggataaaaaggttgtggtttggggggagtgcgactctacagacgactgtattgagcataatattggaccctgcagttccgtgctcgacgttggcggtgccgttacagccgtgagtgtgtgccccgttctgcatccttcccagaggtacgtcgtcgccgtgggtctggagtgcggtaagatatgcttgtacacctggaagaagactgaccaagttccggagataaacgattggactcattgtgttgagacatcacagagtcagtctcacacactcgccatccgtaaactgtgctggaagaattgcagcgggaagactgaacagaaggaggccgaaggcgctgagtggctacattttgcaagttgcggggaagaccataccgttaaaattcaccgagttaataagtgtgccctatag

SEQ ID NO: 14861 - DNA, 561 bp, synthetic construct
  source 1..561: mol_type = other DNA; note = Synthetic coding sequence
atggctggcgaaaattttgcaacgcctttccatggccacgtcggccgtggtgcgttcagcgatgtttacgagccagctgaagacaccttcttattactgaatgctttggaggccgctgccgccgagctcgctggagttgagatctgtctggaagtcgggtccggaagcggcgttgtgagtgccttcctggcgtcaatgatcggtcctcaggccctctatatgtgcactgatatcaatccagaagctgctgcatgtaccctagaaacagcccgctgcaataaggttcacatccaaccagtgattaccgacctcgtggggagccacggaatagaggctgcgtgggctggtggaaaaaacggtagagaggtgatggaccggttttttcctttagttcccgatttactgtcacccaagggtctcttctatttagttactatcaaggagaacaatccagaggagatcctaaagatcatgaagaccaagggcctccagggaacgacagctctcagtcgccaagcgggccaggagactctgtcagtgctcaagtttaccaagtcttag

SEQ ID NO: 14862 - DNA, 2352 bp, synthetic construct
  source 1..2352: mol_type = other DNA; note = Synthetic coding sequence
atggctaaatataacactgggggaaaccccaccgaagatgtctcagtaaatagcaggccatttcgtgtaaccgggcccaatagcagttccgggatacaggctaggaaaaacctcttcaataaccaggggaacgcttctccaccagccggccccagcaacgtgcctaagttcggcagcccaaaaccccccgtggctgttaaaccatcttcagaggagaagcccgacaaagagcctaaacctccctttctgaaaccaaccggcgccggacagcggtttgggactccggcttccctgaccaccagagacccagaggcaaaggtaggatttctgaagcctgtggggcctaaaccaattaatctcccaaaggaagattcaaagcctactttcccttggccccccggcaacaaacccagtctgcactccgtaaaccaggatcacgatctaaagcccctgggcccaaaatccggcccaaccccaccaaccagcgagaacgaacagaagcaggccttccccaagcttacaggagtgaagggcaaattcatgagtgcatcccaggacctggaaccaaaaccacttttccccaagccggcatttggccagaagccccccctgagcacagaaaacagccatgaagatgagtctccaatgaagaacgtgtcctcatctaaggggtctcctgccccactgggcgtgaggtccaaatcaggtccattaaagccagcacgcgaggactccgaaaacaaggaccatgcaggcgagatcagtagtctgccgttcccaggcgtagttttaaagccagccgcctctaggggaggacccggactatcaaagaacggggaggagaagaaagaggacagaaaaattgacgctgccaagaatactttccagtccaaaatcaaccaggaggagctagcctccggtaccccccccgctcgctttccaaaagcaccatccaagctcacagttggtgggccgtggggccagagtcaggaaaaggagaaaggggacaagaattctgcaacccctaagcaaaaacccttgcctccgctgtttacgttgggccccccaccccctaagcccaacagacccccgaacgtggacttaaccaagtttcataagacaagtagcggaaactccacaagcaagggtcagacatcctatagtacaacaagcttaccaccaccacctccatcgcacccagccagccagccacctttgccagcgtcgcacccctcccaacctccagtgccctcgctgccgccccgcaacatcaagccccctttcgatctgaaaagccctgtgaatgaggataaccaggacggcgtcacacactcagacggtgccggcaacctggacgaggagcaagacagtgagggcgaaacttacgaagatatagaagcatcaaaagagcgcgaaaagaagagggagaaggaggagaaaaaaagactggaactggaaaaaaaggagcagaaggaaaaggagaaaaaagagcaggaaattaagaagaagttcaagctgactggacctatccaagttattcatttggcgaaggcctgttgtgacgtgaaaggagggaagaatgaactatcattcaagcaaggtgaacagatcgaaatcatccggattaccgacaatcccgaaggaaagtggcttggccgcactgcccgtggttcatatggctatattaagacaacagcagtggaaattgactacgatagcctcaagctgaagaaagactcccttggagctccatcccgtcctatcgaagacgatcaagaggtttacgacgacgttgccgagcaagatgacatctcatctcacagtcagtctggctctgggggaattttcccccctccacctgacgacgacatctatgacgggattgaggaagaggacgctgatgacgggtttccggctccgccaaagcagcttgatatgggagacgaagtgtacgatgacgtggacacctccgattttcccgtgagctcagccgaaatgagtcagggcacgaatgtggggaaagctaaaacagaggagaaagatttgaaaaagttgaagaaacaggaaaaggaggagaaagatttcagaaagaaattcaagtacgatggggaaatccgagtgctttatagtacaaaggttactacatcaattacttctaaaaaatggggtacacgcgatctgcaggtaaaacctggagagtccctagaagtcattcagacaacagatgataccaaggtgctatgcagaaacgaagaagggaagtacgggtacgtgctaagaagttatctagccgacaatgatggagaaatctatgatgacattgctgatggctgtatctacgataatgactag

SEQ ID NO: 14863 - DNA, 1722 bp, synthetic construct
  source 1..1722: mol_type = other DNA; note = Synthetic coding sequence
atgatccctcctcaggaggcctcagcaaggagacgggagattgaagataagttaaagcaggaagaagagacattgtcctttatccgtgacagtctcgagaaatcagatcagctcacaaaaaatatggtgtccatcttgtcctcattcgagagccgcctcatgaagttagagaattccataatccctgtacacaagcagaccgaaaacctgcaaagattgcaggagaatgtcgaaaagaccttatcttgtctggaccacgtaataagttactatcatgtgatatctggcgatgatgatctagaagcccaagaagatgtgaccctcgagcatctccctgaatctgtgctccaagatgtgattcgcatctcccggtggcttgtcgaatatgggaggaaccaggacttcatgaatgtgtattatcaaatcaggtcgagccaattggatcggagcattaaaggactcaaagagcacttccacaagtctagctcgagcagcggagtgccctactcccctgccataccgaacaagcgcaaggacacccctacaaaaaaacccgtgaagaggccaggccgcgacgatatgctggatgtcgagacagacgcatacattcattgtgtgtcagcctttgtcaagttggctcagtccgaataccagctgctggcggacatcattcctgaacaccaccaaaaaaaaacatttgattctctgattcaagacgccctcgatggactcatgctggaaggtgaaaatatagtctcagctgcccggaaagctattgtgcgtcacgacttttcgacagtgctgactgtttttccgatcctgagacacctgaagcagaccaagccagagtttgaccaggtgctacagggaacggccgccagcacgaaaaataagctaccggggttgatcactagtatggagactatcggtgcaaaggctttggaggattttgctgataatattaagaatgaccccgataaagaatacaacatgcccaaggacgggaccgtccacgagctcacctctaatgcaatattgttcctacagcagctactggactttcaagagactgctggcgccatgctggctagccaggagacaagcagtagcgccacgagttattcttccgagttcagtaaacggctgcttagcacctatatctgcaaggtgttgggaaatttgcaattgaatttactaagcaaaagcaaggtgtatgaggatcctgcactctctgcaatatttctacataataactacaattacatactcaaatccctggaaaagtcagagttgatccagctggtcgcagttactcagaagactgccgaacgcagttacagagagcatatagaacagcagatccagacctatcagagatcatggttaaaggtaacggattatatagccgaaaagaatctccccgtgtttcagcccggagtcaagttaagggataaggagaggcagattatcaaggagagattcaaggggtttaatgatggcctggaggagctttgcaagatccagaaggcatgggccataccagataccgagcagcgagatagaatccggcaggcccagaaaactattgtgaaggagacctatggggcctttctccagaagtttgggtccgtacctttcacaaagaatccagaaaaatatataaaatacggcgtagagcaggttggcgatatgattgaccgattgttcgatacttctgcctag

SEQ ID NO: 14864 - DNA, 2475 bp, synthetic construct
  source 1..2475: mol_type = other DNA; note = Synthetic coding sequence
atgatgcaaaacgtccatctggctccggagaccgatgaagatgatctttatagcgggtataacgactacaatccaatctacgacatagaggaactggaaaatgacgcagctttccagcaggcagttaggacctcccacgggaggcgacctccgataactgccaaaatctcatctacagcagtgacacgcccaatagccactggctatgggtctaaaacctcacttgcatcaagcattggccgccctatgactggtgctatacaggacggggtcacaagacccatgaccgcggtcagggccgccgggtttaccaaggcagcgcttcggggctcagccttcgatcccctctcccagtctcggggccctgcgtccccgctcgaagccaaaaaaaaggactctcccgaggaaaaaatcaaacagttggagaaggaagtgaacgagctagtggaggagagctgcatagccaacagctgtggagatcttaaactggccctggaaaaagctaaggacgcaggcagaaaagagcgcgtgttggttcggcagagagaacaggtgactacccccgagaatattaacttggatctcacctattctgtgctctttaatcttgcttcacagtactcagtgaacgagatgtatgcggaagctctgaatacataccaagtgatcgtgaagaataaaatgtttagcaatgcaggcatcttaaaaatgaacatgggtaacatctatctgaagcagcgaaattactctaaggctattaagttctaccggatggccctggaccaggtgccctcagtgaacaagcagatgcgaatcaagatcatgcagaatattggtgtaactttcatccaagccggtcagtattcggatgctatcaattcctacgagcacatcatgtctatggcccccaacctgaaagccggctacaatctcacaatctgttattttgctatcggagatcgggagaaaatgaaaaaagcctttcaaaaacttatcaccgttcccttagagatcgacgaagataagtatatctccccaagcgatgatcctcacaccaatctagtaactgaagccatcaagaacgaccatctgcggcagatggagcgcgaacgcaaggctatggctgagaaatacataatgacttctgccaaattgatcgctccagtgatagaaacatccttcgctgctgggtatgactggtgcgtggaagtggtcaaggcctcacaatacgttgaactagctaacgatttagaaatcaacaaagcagtcacttacctccgccagaaagattataatcaggccgtggaaatcctgaaggttctggaaaagaaagattcaagggttaagtctgctgcagccactaatctgtcagccctctattacatgggaaaggatttcgcccaagccagctcctacgccgacatagcagtgaacagtgatcggtacaaccctgcagctttgacgaataaagggaatactgtgttcgccaacggcgattatgagaaggctgcagagttctacaaagaggcactgaggaacgactctagttgtaccgaggctttgtacaacattgggctaacatatgaaaaattgaataggctagacgaggctttggattgctttttgaagctgcacgccattcttagaaatagtgccgaggtgctgtatcaaatcgcaaatatttacgaattgatggagaacccaagtcaggccattgaatggctcatgcaggttgtgtccgtcatcccgaccgatccccaggttttgtctaaactgggcgagttgtacgatcgtgaaggggataagagccaggcttttcaatactactacgaaagctacaggtatttcccctgtaatattgaagtgattgagtggttgggagcgtactacatagacacccaattctgggagaaggcaattcaatatttcgagcgggcttcacttatccagcccacccaagtcaagtggcaactgatggtcgcttcttgttttagaaggagtggcaattaccaaaaagccctggatacatacaaagatacacatagaaagtttcctgagaatgtagaatgcttacggtttctcgtccgcctgtgtacagatttaggacttaaggacgcccaggagtatgccagaaaacttaaaagactggagaagatgaaggagatcagagagcagagaattaagtcaggacgcgacggcagcggagggtctagaggaaaaagggaggggtccgcgtcaggtgactctggacagaactacagcgctagctctaagggagaaaggctttctgccaggctcagggctctgccaggtacaaatgaaccgtacgaatcttcctccaataaggagatcgatgccagctatgttgatcctctgggccctcagattgaacgacctaagactgctgccaagaagcgaattgatgaagacgattttgccgacgaagagctgggagacgacctgcttcccgagtag

SEQ ID NO: 14865 - DNA, 2850 bp, synthetic construct
  source 1..2850: mol_type = other DNA; note = Synthetic coding sequence
atgctgcgcactgcaggacgggacggcctctgcaggttgagcacttatttggaggagctggaggcagtcgaactgaaaaagtttaaactgtatctgggaacggctacagagcttggtgaagggaaaatcccgtgggggagcatggaaaaggcaggccccctcgagatggcacagttgctgatcacccatttcggacccgaggaggcatggcggcttgccttatccactttcgagaggataaatcggaaagatttgtgggagagaggccaaagggaggacctggtgcgggacactccaccaggcgggccaagctccttgggcaaccagagcacctgtctcctggaggtttcactggtcacccctaggaaagacccccaggagacgtacagagactatgtgcggcgtaagtttcgtcttatggaggaccggaatgcacgccttggcgagtgtgtcaacttgtcccatcggtacactcggttactgctcgtgaaggaacacagtaatccaatgcaggttcagcagcaactgctcgacacgggacgcggccacgctagaacggtcggccatcaagcatccccaattaagatcgaaaccctgtttgagcccgacgaggaacggcccgagccgccccggacggttgttatgcaaggggcagccggaattggtaagtccatgctcgctcacaaggtcatgctagattgggcagatggtaaattgtttcagggccgctttgattacctcttctatattaactgccgtgaaatgaaccagtccgccacagagtgcagcatgcaagacctaatcttctcctgctggccagaaccaagtgctccactgcaagagctcatacgtgttcctgaaagactgctgtttatcatcgatggcttcgatgagctgaaacccagcttccatgacccgcagggtccttggtgtctgtgttgggaagaaaaacggcccaccgagctgttactgaatagtctcattagaaagaaacttctacccgagctttccctgctaattacaacccgccctacggcgttagagaagctgcaccgcctcctcgaacaccctcgacatgtggagattcttggattttcagaagctgagcggaaggagtacttctacaagtacttccacaatgccgaacaggcaggccaagttttcaactatgtgcgagataatgagcccctcttcacgatgtgcttcgtcccactggtctgttgggttgtgtgtacctgcctacagcagcagctcgaggggggcggattgcttcgacagacgtctagaaccaccactgccgtctatatgctctacctgctgtccctgatgcaaccaaagccaggtgccccccgactccagccaccccccaatcagagggggctgtgtagcttagctgccgatggtctgtggaaccagaagatcttgttcgaagagcaggatctacgtaaacatggactagacggcgaagacgtctcagcctttctcaacatgaatatcttccagaaggatatcaattgtgagcggtattattctttcatccacctgagcttccaggagttctttgccgctatgtattacatcctggatgagggagagggcggggccggccctgatcaggacgtcacaagactgcttacggaatatgccttttctgagagaagcttcctggcccttacaagccgctttttatttggattactcaacgaagaaacacggtcacacctggaaaaatccctgtgttggaaggtctccccacatattaaaatggacttactgcagtggattcaaagcaaggcccagtcggacggcagcaccttgcaacaggggtcactcgagttctttagttgtttatatgagatacaggaagaagaattcatccagcaggccttgtcacacttccaggtaatcgtggtgtctaacattgccagtaaaatggagcacatggtctcttctttctgtctcaaaagatgccgttccgctcaggtcctacacctatatggagccacttattctgcggacggagaagaccgtgcaaggtgttctgccggcgcccacacgctcctagtgcagcttcctgaacggacggtactattagatgcctattccgagcacctggcagcagctctgtgtaccaaccctaaccttatagaactttctttataccgtaatgcgctcggaagcaggggtgtcaaactcctctgccagggtctgcgccacccaaactgcaaactccagaacctgcgcttgaaacgttgcaggataagctccagtgcgtgtgaggacttgagcgccgctctcattgctaacaagaacctaaccaggatggacctgtcaggaaatggggtaggattccctggcatgatgctgttatgcgagggcctaagacacccgcagtgccgcctgcagatgatccagctgcgcaagtgccaacttgagtctggggcctgtcaggagatggcctctgtgctgggcaccaacccccatctggtcgagctcgacctaaccgggaacgcgctggaggatctcggtctgcggctcctgtgccagggtctccgccaccccgtctgtcggctccgaacactgtggctccaactggactcctgcggactgactgccaaggcttgcgagaacctgtactttaccctgggcatcaaccagaccctgactgatctgtacctgacaaacaatgcactgggtgacaccggggtgcggctgctgtgtaagcggctctctcaccctggttgtaagctgcgcgtgctctggctgtttggcatggacctgaacaagatgactcactccaggcttgccgccctgcgggttacaaaaccatacctggacattggctgttag

SEQ ID NO: 14866 - DNA, 5796 bp, synthetic construct
  source 1..5796: mol_type = other DNA; note = Synthetic coding sequence
atggccgcgcgatcagccccgagctgtcacctgcgtctggagtgggtctacggataccgcggccaccaatgccggaacaatttgtactataccgcagccaaagagatagtgtatttcgtcgccggcgtcggcgttgtctattctccccgagagcaccgtcaaaagttctacagaggccactctgatgacattataagcctggcattacatccggagcgagtgcttgtagccaccggccaggtgggcaaggagccatacatctgcatctgggactcttacaccgtccagactatttcagtattgaaggacgtgcacacacacgggatcgcttgcctcgccttcgacctcgacgggcagcgcttggttagtgtcggcctggattctaaaaatgctgtgtgcgtgtgggattggaagcgcggcaaaatgctatcaatggctcccggtcataccgataggattttcgatattagttgggatctttaccagcccaacaagcttgtcagttgcggggtcaaacatattaaattctggagcttgtgtgggaacgccctgacacccaagagaggggtgttcggaaagaccggagatctccagacaattctgtgcctggcatgcgccagggacgagctcacctactccggggccttgaacggggatatttacgtttggaaagggattaacctgatccggacaatccagggtgcgcacgcagctggtattttcagcatgaacgcatgtgaggagggcttcgccaccgggggacgagacgggtgtattagactctgggatctgacatttaagcccataacagtcatcgatctccgggaaaccgatcaaggatacaagggcctgtccgtgcgctccgtttgctggcgaggcgaccacatcctggtgggaacccaggactccgagatcttcgagatcgtcgtgcaggagcgcaataagcccttcttaatcatgcagggtcattgtgagggggagctatgggcactggccgtgcaccccacaaaacctctggctgttacaggttcggacgaccgatccgtaagaatctggagccttgtggaccatgccctcattgcaaggtgcaacatggaggagccaatccggtgcgctgcagtgaacgccgatgggatccatttagctctgggaatgaaggacgggagttttacagtcctacgggtacgagacatgacagaagttgtacacataaaagaccgcaaagaagcaattcacgaattgaaatatagtcccgatggaacttacttggctgttggctgtaacgactcaagcgtggacatttacggggtcgctcaacgatacaagaaagtcggagagtgcctgggttctctgagcttcatcacacatctcgattggtccagcgatagcagatacctacagaccaacgacggcaatggtaagcggcttttctacaggatgcccggtggaaaagaggttacatccaccgaggaaattaagggagtccactgggccagttggacttgcgtgtctggtttagaggtaaacggtatctggcctaaatacagcgacatcaacgatattaattcggtggatgggaattacatcggccaggtgctggtaacggctgacgattatgggatcatcaagctcttcagatatccgtgtttgaggaagggggccaagttccgcaagtacatcgggcactcggctcacgttacaaacgtacgttggtctcacgactaccaatgggtgatatcaatagggggcgcagatcacagtgtttttcagtggaagttcatcccagaacggaagctaaaggatgctgtgcatattgcaccacaggaaagcctggccgatagccacagcgacgaatctgacagcgacttatccgatgtcccagaactggattctgaaatcgaacaggagacgcagctgacttatagacgccaagtctacaaggaagacttgcctcagttgaaagagcagtgtaaagagaaacaaaagagtgctactagcaagcgcagagagcgggcgcctgggaactctatccgcctccacttcgtgcatggctatcgggggtatgattgccgctctaacctgttttatacccaaatcggcgagatcgtttaccatgtggctgccgtcggagttatatataaccgtcaacagaacacacagcgattttacctgggtcacgacgacgacatcctctgtttgacaattcacccattgaaagattacgttgccaccggacaggtggggagggatccatcgattcacatctgggatacggagaccattaaacctctcagtatcctcaagggccatcaccagtacggggtgagcgcagtcgatttcagcgcagacggtaagagactggcaagtgtgggcattgatgattctcacacggtcgtcctgtgggactggaaaaaaggggaaaaactgtctattgccaggggatcaaaggataaaatttttgtggttaagatgaacccctatgtgcctgataagttgataactgctgggatcaagcacatgaaattttggcgcaaggctggggacgtctgcatatggagagacattttcctcgtgaaaactgtgaaagcccatgatgggcccgtgttctcaatgcacgctctggaaaaagggtttgtgacaggaggcaaggatgggatagttgccctttgggatgacagcttcgagcgatgtttgaagacctacgctattaaaagagctgcgctggcccccggctcaaagggcctcctcctcgaagataacccatctatccgcgccatatctctgggccacgggcacatcctcgtgggtacaaaaaacggtgagatcctggaggttgataagtctgggcctattactttgttagtccagggacatatggagggagaagtgtggggcctcgcgacccacccctatttacctatctgtgcaacagtctccgacgacaaaacgctccgcatttgggacttgtccccatctcattgtatgctcgcggtgagaaagctcaagaagggcggcagatgttgttgtttcagtcctgatgggaaggcattagcagtgggcctgaatgacggatccttcctcatggctaatgctgacacactagaagacctagtgagtttccaccatagaaaggacatgatctctgatatccgcttctcacccggtagtggtaaatacctcgccgtggcgtctcatgactcatttattgacatttataatgtgatgagctctaaacgggtagggatctgcaagggggctacttcctatattacccacattgattgggacattcgaggcaaactcctgcaggtgaataccggtgccaaagagcagttgttctttgaggcaccccggggcaaaaaacagaccattccgtcagtcgaagtcgagaagattgcctgggcttcttggacatctgtcctcggcctatgctgcgagggcatttggcctgttattggggaggtgaccgatgtgaccgcctcttgcctaacatccgacaaaatggtactggccaccggcgacgacctcggcttcgtgaaactgtttaggtacccaaccaaaggaaagttcggaaagttcaagcgctacgtggcgcacagcacgcacgtgaccaatgtgaggtggacctatgacgattccatgctggtaaccctgggaggcacagatatgtcactcatggtttggactaacgagatggagggataccgcgagaaaaggccatgtgactccgaggagagtgatatcgattctgaagaagatgggggttacgatagcgacgtgactcgtgaaaatgagatcagctacacaataagagccctcagtacaaacattaggccgatgttgggcattaaaccacacctgcagcagaaagagcccagcatcgatgagagaccccctgtaagccgcgcgcctcctcagccggagaaattacaaacaaacaacgtcggcaagaagaaacgaccgatcgaggacctcgtccttgagctgatattcggctaccgaggccgtgattgcaggaacaacgtgcattatttgaatgacggggacgatatcatttaccatacagcatctgtcggaatcttgcataacgtggcgactgggtcccagagcttctaccaggaacacaatgatgatatcctatgcctcacggtgaaccagcacccaaagtttatcaacatcgtggcaaccggccaggtggtactgagctgcagcctgctgacaacagctccgtccatacacatctgggacgctatgaacaagcagaccttaagcatattgcgctgttaccactccaaaggagtgtgttccgtgtccttcagtgcaacaggcaagctgttgctgagtgtcggtcttgatccagagcatactattacaatctggaggtggcaagaaggggcaaaaatcgcttccagggctggtcacaaccagcgtatattcgtggcggaattccggcccgactcagacacgcagtttgtgtccgtcggagtgaaacatgtgaagttttggacgctcgctggcagggccctcctgtctaaaaaagggttgctgtccacactggaagatgctcgtatgcaaacaatgcttgccatcgcgtttggggccaacaacttaactttcactggaacaatttcaggcgacgtgtgcgtgtggaaggatcacattctctgcagaattgtagcacgcgctcacaacggacctgtcttcgccatgtacaccacccttcgggacggtttgatcgttactggtggcaaggagcgacccagtaaggagggaggtgccgtgaagctatgggatcaagagcttagacgttgccgggctttcaggctcgaaacaggccaggcgacggattgcgttagatctgtgtgtcgggggaaggggaagatactggttggcacaaggaacgccgagattatagaagtcggagagaagaacgcggcgtgcaatatccttgtcaacggtcatgttgacggaccaatatggggtctggccactcatccatccagagacttcttcctgtcagctgctgaggatggtacagtgcggttatgggacatcgcagacaaaaaaatgctaaataaggtgaatctgggacacgcggcccgcaccgtttgctattcgcccgaaggcgacatggtggctattggtatgaagaacggtgaattcattattctgctggtctcaagcctgaaaatctggggaaaaaaaagagatcgcaggtgcgcaattcatgatatccgtttttcccctgatagccgttatctcgccgtgggttcatcagagaatagcgtggacttttacgatctcaccttagggcccaccctgaacagaatcagctattgtaaggatatacccagcttcgtgatacagatggatttcagtgccgattccagttacctgcaggtgtcttccggttgctacaagaggcatgtgtatgaggttccctctggtaaacatctcatggaccacgccgccatcgatcgcatcacctgggctacctggacgagcatcctgggcgatgaggtcctgggcatctggagccggcatgcggaaaaggcagatgtgaactgtgcatgcgttagtcatagtgggatatctctcgtaactggggatgactttggaatggtgaagctgttcgactttccatgcccggaaaaatttgccaaacacaagcggttcctcggccatagtccacatgttactaacatccgctttacatccggggacagacacgttgtaagcgccggaggcgacgattgtagtcttttcgtatggaagtgcgtccatactccccactag

SEQ ID NO: 14867 - DNA, 429 bp, synthetic construct
  source 1..429: mol_type = other DNA; note = Synthetic coding sequence
atgagtatctctagcgacgaagtgaatttcctggtgtatcggtacctgcaagagtcagggttttctcatagcgcatttacgttcgggattgagtcacacataagccaaagtaacatcaacggagcattagtgcctccagccgcccttatctctattattcaaaagggcttacagtacgttgaagcagaggtgtccatcaacgaggatggaacactctttgatggaaggcctatcgagagcttgtccctaatagacgccgtgatgccagatgttgtacaaactcgacaacaggcctatagagataagcttgcccaacagcaggcggccgctgctgcggccgccgcagccgccgcaagccagcaggggagcgctaaaaatggggagaataccgctaatggagaggagaacggggcgcatacgatcgcctag

SEQ ID NO: 14868 - DNA, 1704 bp, synthetic construct
  source 1..1704: mol_type = other DNA; note = Synthetic coding sequence
atggaattcttcacaatgccaccccggacatggttcatgcgccaactgcagcgaatgtggttcctccgtccaagcatggcaatcatggtctttcgcatgatcgaagaaaggccaacccacgcaatcactgtacgggtctcatacttagaaatatataatgaaagcctcttcgatctgctgagtacacttccttatgtgggtcccagtgtaaccccgatgacgatcgttgaaaacccccagggggtgtttattaaaggcctgagtgtccatctgacttctcaggaagaagatgcattttcactcctctttgaaggggagaccaatcgtataattgcttctcataccatgaacaaaaatagctccagatcgcactgcatattcaccatttacctggaagcccactctcggacgctgagtgaggaaaagtacattacctccaagattaacctagtggacttggctggctctgaacgcttaggaaagtctggaagcgagggccaggtcctgaaggaagccacttacatcaacaagagtctgtcttttctggagcaggctataattgctctgggcgaccagaaacgggatcacatcccatttcgtcaatgcaagctgacccacgctctcaaagactccttaggaggaaattgtaacatggtgttagtgacgaacatttatggtgaggcagcgcagctcgaggagactctcagcagtctgagatttgcgtccaggatgaagttggtcactactgaaccagccataaatgagaaatatgacgccgagaggatggttaaaaacctagagaaagagctcgctctacttaagcaggaactggctatccacgactcactaaccaaccggacattcgttacctatgacccaatggatgagatccagattgccgagatcaactcccaggtgcggagatatcttgaggggactctggacgagatcgatataatttcactgaggcaaatcaaggaagtttttaaccagttccgtgtggtcttgagccaacaggagcaggaggtcgaaagtacactgaggagaaagtatacacttatagataggaatgacttcgccgctatttctgccatccagaaggcgggtcttgttgacgtggatgggcacctcgtgggagagcccgagggacaaaatttcgggttgggtgtggcccccttctccacaaaacccggcaaaaaggcgaagtcaaaaaaaacctttaaggagccactccgtcccgacactcctccatcaaagcccgtcgcattcgaagagttcaaaaacgaacaaggaagcgaaataaatagaatctttaaggaaaataagtctatccttaatgaacgtcggaaaagggcctctgaaacaacacagcatattaatgctattaaacgggagatcgatgtgactaaggaggcacttaatttccagaaatctcttcgcgagaaacagggcaaatatgagaataaaggtctgatgattatcgatgaggaggagttcttgcttatcctgaaactgaaggacctgaagaagcaatataggagtgagtaccaggatttgcgagacctccgagccgagattcagtactgccaacacttggtggatcagtgtcggcatcgactcctgatgggagctacagtcggaaagaacctgaccagcggtacaatgtccccactctctagcttgcgtacctgccgctggcactag

SEQ ID NO: 14869 - DNA, 1428 bp, synthetic construct
  source 1..1428: mol_type = other DNA; note = Synthetic coding sequence
atggcagagggcagtgtaatgtttagcgatgtgagtatcgatttctcacaggaagagtgggattgtctggatcccgtccagagggatctctaccgggacgtcatgttggaaaattacggaaaccttgtatccatgggactgtatacaccaaaaccacaggtgatttccctactggagcagggaaaggaaccctggatggtggggagagaattgacacgcggactttgtagcgatctagaatcaatgtgtgagacaaagctccttagcctaaaaaaagaagtttacgagatagagctgtgccagagagaaataatgggattaaccaagcacggacttgaatatagttctttcggggacgtattagaatatagaagccatctagctaagcagttagggtatcctaatggccacttctcccaggagatcttcacccccgagtacatgcccactttcattcagcagaccttcctgaccctgcaccagatcattaacaatgaagacaggccatatgagtgtaaaaagtgcgggaaagcctttagtcagaactctcagtttatacagcaccagaggatccacatcggcgaaaagagttacgaatgtaaagagtgcgggaagttcttttcttgcgggtctcacgtgacaaggcatctgaaaattcatactggcgagaaacctttcgagtgcaaggagtgtggcaaggccttctcttgttcatcgtatcttagtcaacatcagaggatccatacaggtaaaaagccttacgaatgtaaagagtgtggaaaggcgttcagctattgctctaacttaatagatcatcagaggattcacacgggagaaaaaccatatgaatgtaaggtgtgcggcaaagcatttactaagtcatctcaactttttcagcacgctcgaattcatacaggcgagaagccctatgagtgtaaggaatgtgggaaggcttttacacagtccagcaagttggtgcaacaccagcgtatccacaccggagaaaagccctatgaatgtaaggaatgcggaaaggcttttagcagcggatcagcactgacaaaccatcagcgaatccacacaggtgaaaaaccctatgactgcaaagaatgcggtaaggcctttacacaatcatcccaactgaggcagcatcagaggatacacgccggtgaaaagcctttcgagtgtttagaatgcggcaaagctttcacccagaatagtcagctgttccagcaccagagaattcacaccgatgagaagccttacgagtgcaacgagtgcggcaaagcattcaataaatgtagtaatttgacgagacacctgcggatccacaccggggagaagccttacaactgcaaggagtgtggcaaagccttctcaagtggcagcgacttgataagacatcagggcatacatacaaacaagtag

SEQ ID NO: 14870 - DNA, 462 bp, synthetic construct
  source 1..462: mol_type = other DNA; note = Synthetic coding sequence
atggccagaaatacattgtctagtagattccggcgcgttgacatcgatgagttcgatgagaataagtttgtggacgagcaggaggaggctgccgccgccgcagcggagcctggacccgacccatcggaagtggatggcctgctgagacagggagatatgctcagggccttccatgctgcactgcggaattcccccgtgaataccaaaaatcaggccgtcaaagaaagagcccagggagtggtgttgaaagttctaactaatttcaaatcttccgaaatcgagcaagccgtccagtctttagaccgaaacggcgtggacctactcatgaagtatatatataaagggttcgaaaagcccacagagaactcgtctgctgtgttattgcagtggcacgagaaggcactggcggtaggggggctaggcagtattatccgcgttcttactgcacgcaaaaccgtgtag

SEQ ID NO: 14871 - DNA, 2616 bp, synthetic construct
  source 1..2616: mol_type = other DNA; note = Synthetic coding sequence
atgggagagggcggcttgcctcctgccttccagctgctgctcagagcatgcgaccagggcgatacagaaaccgcaaggaggctgctggaacctggggccgctgaacccgccgagcgtggagcagagcccgaagctggcgctgaacctgcaggcgccgaagtcgctggtcccggggctgccgcagcaggcgcagtaggtgcccccgtgcctgtggactgtagcgatgaagccggaaacaccgctcttcaatttgccgccgccggagggcatgaacccctcgtccgattcctgctcagacgcggagcatcagtgaactcgcgaaatcactacgggtggagtgccttgatgcaagctgcccggttcgggcacgtcagtgtcgcccacctgttactggatcatggtgcggacgtcaacgcacagaaccggcttggagctagtgtgctgacggtcgcctctcgaggagggcacctcggcgtagtgaagctgctgctggaggcgggtgctttcgttgaccaccaccatccatctggggaacaactgggcttgggaggctctcgggacgaaccccttgacatcaccgctctcatggctgccatccagcatggccacgaagctgtggtgcgtctgctcatggagtggggggcagatcccaaccatgccgcccggaccgtgggctggtcacccctgatgctggccgcgcttacgggccggcttggggtggcccagcagctcgtggaaaaaggggccaaccctgatcatttgtccgtcctggagaaaactgcctttgaggtggcactggattgtaagcatcgggacctcgtggactacctggatcccctcacaaccgtcaggccaaagactgacgaggagaaaagacgccctgacatttttcacgccctgaaaatggggaattttcagctggttaaagaaattgcagacgaagacccgagtcacgttaacctcgtgaacggggatggcgccaccccattgatgctggccgctgtgactggtcaactcgcactggtccaactgctcgtggagagacacgccgatgtggacaaacaggactccgttcatggatggacagcacttatgcaggctacctatcatgggaataaggagatcgtgaaatacctgctgaatcagggcgccgatgtgacactgagagccaagaatgggtatactgcatttgatcttgttatgctgttaaatgatccagacacagagctggtacgcctccttgcctccgtgtgtatgcaggtgaataaggacaaaggtagacccagtcatcagccgcctctgccacattcaaaagttcgacaaccttggagcatcccagtactccctgatgacaaggggggactgaaatcctggtggaatagaatgagtaatcggttccgcaaattgaaactcatgcaaaccctccctagagggctctcctctaatcagcccttgcctttttcggatgaacctgaaccggcccttgatagcactatgagggcggcaccacaggacaaaacttcccgctctgccctcccagatgctgctcccgtcaccaaagacaatggtcctggcagtacaaggggggagaaagaagacactctccttacgactatgctgagaaacggagcgcccctgacaaggctgccttccgacaagctgaaagccgtgatccctccatttctgccacccagcagctttgaactgtggagctccgaccgttcaaggactcggcataacggtaaagcagatccaatgaaaactgccctgccccagagagcttcacggggtcaccctgttggaggcggtgggacagatacgaccccggtgcggccagtgaaattcccgtccctccccagatcacccgcttcgagcgcaaattcaggcaactttaaccactcacctcactcctcaggcggatcctcaggagtaggcgtatccaggcacggaggggaactcctgaatagaagcggaggcagtattgataacgtgctgtctcagatcgcggctcagaggaaaaaagctgcaggactactagagcagaaaccatcgcaccgctcttcccccgtgggacccgcacctggatctagtccttcagaactgccagcgagtcccgcaggcgggtctgcccccgtaggaaaaaagctggaaacttcgaaacgtccccccagcggcacgtccacaacctccaagagcacctccccaactcttacaccgagtccgtccccaaagggacacaccgctgaatccagtgtcagtagtagcagctctcaccgtcaaagcaagtcatctggaggtagcagctccggcacaattacagacgaagatgagctgactggtattctgaagaaactgtctctcgagaagtaccagccgatcttcgaagaacaggaagtcgacatggaggcctttctcacacttaccgacggtgacctgaaagagctagggatcaaaacagatggctccagacaacagatccttgcagctatttctgagctgaacgctggcaagggtagagaacgtcagatattgcaggaaaccatccataatttccattctagctttgagtccagcgcctcaaacaccagggcaccaggaaacagcccatgtgcttag

SEQ ID NO: 14872 - DNA, 1359 bp, synthetic construct
  source 1..1359: mol_type = other DNA; note = Synthetic coding sequence
atgtccgcaagcctaaattataagagcttctccaaggaacagcaaacaatggataatctggagaaacaactgatttgtcctatatgcttggagatgtttactaagcccgtggttatacttccttgtcagcataatctgtgccgaaaatgtgcttccgacatcttccaggcaagtaatccatacttgcccacacgaggcggaaccaccatggctagcggtgggagattcaggtgtccttcatgtagacatgaagtagtgctcgaccgacacggtgtttatggactgcagagaaacctcctcgtggaaaacatcatcgatatctacaaacaggaatctacccgtcctgaaaagaagagcgatcagccgatgtgcgaggagcacgaggaggagcgtataaatatctattgcctaaattgcgaagtgcccacatgttccctatgcaaagtgtttggcgcccacaaagattgccaagtcgctcctcttactcatgtgttccagagacagaaatctgaactcagcgatggtatcgcaattctggtcggctcgaacgacagggtccagggtgtgattagccagctggaggacacctgcaagactattgaggagtgttgccgtaagcaaaagcaggaactgtgcgaaaagtttgactatctgtatggcattctggaggagaggaagaacgagatgacacaggtgatcacacgaacccaggaagagaagctcgagcatgtccgggccctgatcaaaaagtactctgaccatctggagaatgtgagcaaacttgtagaaagtgggatccaatttatggacgaacccgaaatggcagtgtttcttcagaatgccaaaacgctgttgaaaaagatttctgaagcttctaaagcttttcagatggaaaaaatagagcacggttacgaaaacatgaaccatttcaccgtcaacttgaatcgcgaagagaagattattcgcgagatagacttctatcgtgaggacgaagacgaagaggaagaggagggaggggaaggagagaaggagggtgaaggcgaagtgggcggtgaggccgtggaggtggaagaggttgaaaacgtccagacagaattcccgggcgaagacgaaaatccagagaaggcctccgaattgtcacaggtcgaactgcaggcggctcccggggccctgcccgtctcgagccccgaaccacccccggccctccctccagcagctgacgccccggtgacccaaatcggctttgaggctcccccccttcagggccaagcggccgccccagctagcggaagtggcgccgactcagaacccgctcggcatatttttagcttcagttggctgaattcattgaatgagtag

SEQ ID NO: 14873 - DNA, 492 bp, synthetic construct
  source 1..492: mol_type = other DNA; note = Synthetic coding sequence
atgccgtcaatcaagctccagagttccgacggcgagatattcgaagtggatgtggagatcgccaagcagtcagtcaccattaagactatgttggaggacctgggcatggatgatgagggagatgacgatcccgtgcctttgcctaacgtgaatgctgccattctgaagaaggtgatccagtggtgtacccatcataaagacgaccctccacctcccgaggatgatgagaataaagagaagagaacggatgatatacccgtgtgggaccaggagtttctgaaagtggaccagggaacattattcgagctgatcctggccgctaactacctggacattaaggggctgcttgacgtcacctgcaaaactgttgccaatatgatcaagggtaaaactccggaagagatccgcaaaaccttcaacattaagaatgacttcaccgaggaggaggaggcccaggtccggaaagagaatcaatggtgtgaagagaagtag

SEQ ID NO: 14874 - DNA, 1200 bp, synthetic construct
  source 1..1200: mol_type = other DNA; note = Synthetic coding sequence
atggcagcaccctctccttcaggaggaggaggctcaggaggcggctccggatccggcactcccggcccagtgggctcccctgctcctggccatcctgcagttagttctatgcagggaaaacgaaaggcactgaagctcaattttgctaaccctccattcaagtccaccgcccgattcacacttaacccaaaccctaccggtgtccaaaaccctcatatcgaacggttgaggacacacagtatcgagagctcaggcaaactcaagatctctccagagcagcactgggattttaccgcagaggacttgaaggatctgggcgaaatcggacgcggggcttatgggtccgtcaacaaaatggtgcacaaaccttccggccaaatcatggcagtgaagcgaatcaggtcaaccgtggatgaaaaggagcaaaagcagctgcttatggatctcgatgtagtgatgagatccagcgattgcccatatatcgtacagttttacggcgccctgtttcgcgaaggggattgctggatttgtatggagctaatgagcacctctttcgataaattctataagtatgtgtacagcgttctggacgacgtcatcccagaagagattctcgggaagatcacccttgccacagtgaaagcactcaatcatctgaaagagaatctcaaaatcattcatagggacatcaaaccctccaatattctcctggatcgaagcgggaacattaagctctgtgatttcggcatatcaggccagctggtagactcaatcgcaaagactcgggatgccgggtgcagaccatatatggcgcctgaacgcattgaccccagcgccagtcgtcagggctacgacgtccgctccgatgtctggtctcttgggatcaccctgtatgaactggccacagggaggtttccgtatcccaaatggaattccgtcttcgaccaactgactcaagtggtgaagggcgatccacctcagctctcgaactcagaggagagagagttctcgccctctttcattaactttgtcaacctgtgcctgactaaggacgagagcaaacgcccgaagtataaggaacttctgaaacatccctttatactcatgtacgaagaaagagccgtcgaagtcgcctgttacgtttgtaagatcctggatcagatgcctgccacaccttcatcacccatgtatgtggactag

SEQ ID NO: 14875 - DNA, 1122 bp, synthetic construct
  source 1..1122: mol_type = other DNA; note = Synthetic coding sequence
atggcccaggagagccccaaaaactcagccgctgaaatccccgtgacctccaacggtgaagtggatgattcgcgcgaacacagctttaatagagatctgaagcattcactgccttcgggactgggcttgtctgagactcaaattaccagccatgggtttgacaacaccaaggagggggtgatagaggccggggcctttcagggttcccccgctcctcctctcccatcagtgatgagtccaagccgcgtggctgcctccaggttggcgcagcagggctctgatctgattgtgccagccgggggccagcgcactcaaaccaaatccggtcccgtcatcctggcagatgagataaaaaaccctgccatggagaagctcgagctagtccggaaatggtcactaaatacatacaagtgtactcgccagatcattagcgagaagcttggcagaggcagccggacagttgatctggagctcgaagcgcagatagacatattgcgcgataacaagaagaagtatgagaatatcctcaaattagctcagaccttatctacccagctcttccaaatggtgcatacacagagacagcttggggacgccttcgctgacttgagtcttaagtccttagagctccacgaagaatttggatacaatgccgatactcagaaactgcttgcaaagaacggtgagaccctccttggggctataaatttctttattgcctctgttaacactttggtaaacaaaacaatagaagacacactgatgacagtgaagcagtacgaatcagcccgcattgaatacgatgcctaccgcactgacttggaagagctgaatcttggtcctcgggacgcaaatacactccccaagattgagcaaagccagcatctgttccaggcccacaaagaaaagtacgataaaatgagaaatgatgtgtccgtcaagctgaagtttctcgaagagaacaaggtaaaggttttacacaatcaactggttctgttccataacgcaattgccgcatattttgcaggaaaccagaaacagttagagcagacactgaaacagtttcacattaaactgaaaacacctggagtagacgctccctcctggttggaagaacagtag

SEQ ID NO: 14876 - DNA, 654 bp, synthetic construct
  source 1..654: mol_type = other DNA; note = Synthetic coding sequence
atgtactctctgaaccaggagatcaaggcattcagcaggaacaatctgcgcaaacagtgcacaagggttacaacgttgacgggtaagaagatcattgaaacctggaaggacgcaagaatccatgtggtggaggaggtagagccctctagcggcggaggatgcgggtatgtgcaggatctgtcatcagatctgcaggtgggcgtgataaagccttggcttttgcttgggagccaagacgctgcccacgatttagacacattaaaaaagaataaggtgacgcatatcctgaacgtggcatacggcgttgagaatgctttcctcagcgatttcacctacaagtcaatctcaatcctggatctacctgagacaaacatactctcctactttcccgagtgtttcgagttcatcgaggaggcaaaacgcaaggacggcgttgtgctcgtgcattgcaatgccggagtttcccgtgcagctgcgatcgtcatcggtttcctcatgaactcggagcaaactagctttacctccgcattttcactcgtgaaaaatgcacgaccctcgatttgtccaaacagtgggttcatggagcaactgcgaacataccaagagggaaaggaatccaacaaatgtgaccggatccaagaaaattccagttag

SEQ ID NO: 14877 - DNA, 2679 bp, synthetic construct
  source 1..2679: mol_type = other DNA; note = Synthetic coding sequence
atgctgcgcaccgccggcagggacggtctgtgtaggctgagcacttacctggaggaactggaggcagttgagttgaaaaaatttaaactgtacctcgggaccgccactgagctgggagaaggcaaaatcccttggggaagcatggaaaaggccggccccctggaaatggcccaactgctgatcacccacttcggtcctgaagaggcttggaggcttgcattgagcaccttcgagcgtattaatcgaaaagatctgtgggagagaggtcagcgagaagacctcgttcgcgatacgccccccggcggtccgtcatccttgggcaatcaaagcacctgtcttctcgaagtctccttagtcactccacgcaaagatccccaggaaacgtacagggactacgtgcggagaaagtttcgtttaatggaagatcggaacgccaggttaggcgagtgtgtgaacttgagccacagatacacaaggctcttgctggtaaaggaacacagtaaccctatgcaggtgcaacagcagctgctcgataccggtcgcggccatgccaggaccgtcggccaccaggctagccccatcaaaatcgagaccctgtttgaaccagacgaggagagacctgagcccccaagaaccgtagtgatgcagggagctgccggcatcgggaaatctatgctggcacacaaagtgatgctggattgggccgacgggaagctttttcagggccgcttcgactacctattttacatcaattgccgagagatgaatcagagcgctacagaatgcagtatgcaggatctgattttttcatgttggcctgagcccagcgcccctctgcaggagctcattagagtgccagaacggttacttttcattattgacggattcgatgaactgaagccgtcctttcacgacccacagggaccctggtgtctatgctgggaagaaaaaaggcccaccgagctcctgctgaatagcctgatccgaaaaaaactgctgccagaactgagcctgctcatcacaacaagacctacggcactggaaaagctccaccgattgcttgagcatcctagacacgtagaaattttggggttctcagaagcagagaggaaggagtatttttacaagtatttccacaatgcggagcaggcaggtcaggtgttcaactatgtacgcgataacgagccattattcaccatgtgcttcgtccctttggtgtgctgggtcgtgtgcacctgcttacaacagcagctcgaaggtgggggcctccttcggcaaaccagccgtacaaccaccgcagtgtatatgctctacctgctcagtctgatgcaaccgaaacctggtgctcccagactccagcccccaccgaaccagcgtggtctctgcagccttgcagcagatgggttatggaaccagaagattctgttcgaggaacaagacctgcggaaacatggcctagacggggaagacgtgagtgccttcttaaacatgaacatttttcagaaagacattaactgcgagaggtactacagttttatccacctcagcttccaagagttttttgccgcaatgtattatatactggatgaaggggaggggggcgccggaccagaccaggatgtgacacggcttttgaccgagtacgcattcagcgaaagatcatttctcgcacttacctctaggttcctgttcgggctgctgaatgaagaaacacgctctcacctggaaaagagcctgtgttggaaggtcagccctcacatcaagatggatctgcttcagtggatccagagcaaggcccagtccgatggatcaacgcttcagcagggaagcctcgagttcttctcctgtctatacgagattcaggaagaggaattcatccagcaggcactctctcactttcaggtgatcgtggtcagcaacatcgcaagcaaaatggaacacatggtcagtagcttctgcctgaaacgatgtaggtccgcccaggtgttgcacctatacggagccacctactcagcagacggggaggatagagcacggtgcagcgcaggtgcccataccctgctcgtgcagctgcctgaacgcacagtgctgctggacgcctattcagagcatctggcggccgccctgtgtacgaaccccaatttgatagaactgtctctctacagaaacgcgttgggaagtaggggcgtgaaattgctctgtcaagggttacgccatcccaactgcaaactacagaatctacgattgaagcgttgtaggatttcaagttcagcctgcgaagacctctccgccgcactgatcgccaataagaatcttactcgtatggacctcagtgggaacggcgtgggatttccggggatgatgctgttgtgtgaagggctaagacaccctcagtgtaggctacagatgatccagctgaggaagtgccagttggaaagtggcgcgtgtcaagaaatggcctcagtgctcgggactaatccacatcttgtagagctcgacctcacgggcaacgccttagaagaccttgggttgcggctcctgtgtcaggggctgcgtcatcccgtttgtcggctccgcactctatgctggatgctgtttggcatggatctgaacaagatgacccattcacggctcgccgcactcagggtcacaaagccctacctggatatcggctgctag

SEQ ID NO: 14878 - DNA, 945 bp, synthetic construct
  source 1..945: mol_type = other DNA; note = Synthetic coding sequence
atgcaaacatttctcaaaggcaaacgggtcggatactggctgtccgagaaaaagattaagaaactcaattttcaggccttcgcagagctatgtcgtaaacgcggtatggaggtcgtgcaactgaatctgagtagaccaatcgaggaacagggcccattggacgtcattatccacaagctgaccgatgtgatcctggaggccgatcaaaacgatagtcagtcccttgaactggttcatcggtttcaggagtatatagacgcacaccctgaaactatcgttctggaccccctgcccgccattcgcactctgctggaccgctcaaagtcgtacgagctaattcgtaaaatagaggcctatatggaagacgatcgcatctgtagtccgccttttatggaactgacttccttatgcggagacgatactatgcgactcctggagaaaaatgggctcacttttcccttcatttgtaagactagagtggcccatggcactaactctcatgaaatggctatcgtctttaaccaggagggcctgaatgctatccaaccaccatgtgtggtacagaattttatcaaccacaatgccgtgctttacaaagtgtttgtagttggcgaatcctatacggttgttcagcgcccctcgcttaaaaacttcagcgccggaacctccgacagagaaagcatcttttttaacagtcacaacgtctctaagcctgagtcctccagtgtccttactgagctggacaaaattgagggggtgttcgaaaggcccagtgacgaagttattcgcgagctctctcgggcactccgccaggccctgggagtatcgctctttggtatcgacattatcatcaacaaccaaacggggcagcacgccgtgattgacatcaacgccttccctggtgactgtcaggtgtgctttattgaagggtggaaaactgattag

SEQ ID NO: 14879 - DNA, 630 bp, synthetic construct
  source 1..630: mol_type = other DNA; note = Synthetic coding sequence
atgcctgtcgccgtgatggcggagagcgccttcagctttaagaaactcctggaccagtgtgaaaaccaggagcttgaagcccccggcggcatcgcaaccccaccagtgtatggacagcttctggctctttatcttctgcataatgacatgaataatgcccggtatttgtggaagagaattccgccagccatcaaatctgccaactccgagctcggtgggatctggtcagttgggcaacgcatttggcaaagagactttccaggcatttataccaccataaatgctcaccagtggagtgaaacagtgcagcctattatggaagccctgcgcgacgccacaaggaggcgtgccttcgccctggtttcccaggcctataccagcatcattgcagatgactttgctgcgtttgtggggctcccagtggaagaggctgtgaagggtattctcgagcaaggatggcaggcagactccacgacaagaatggtattgccgaggaaacccgtcgccggcgccctggacgtgagtttcaacaaattcattcccctgtcggagcctgcccccgttccaccgatccccaacgagcagcagctggcccgccttacggactacgtggcttttctcgagaactag

SEQ ID NO: 14880 - DNA, 4935 bp, synthetic construct
  source 1..4935: mol_type = other DNA; note = Synthetic coding sequence
atgttctggtgcggcacatgctttgttacaaacaatatgaaaggcagcgaagtctctctggaaaagaagaagaagatcaagatgcctgtgaaacggctacgcgaagtggtaagccaaaatcacggagatcatttagtgctgcttaaggacgagctgccatgtgtcccacctgcactgtccgctaacaagcgcctccccgtcgggactggaacttccctgaatggtacttctagaggttccagcgatctgacctctgccaggaactgttaccagcctctgttggaaaatccaatggtctctgaatcagacttttccaaagatgtagccgtccaggtgctgcctctcgacaaaattgaagaaaacaacaaacaaaaggctaacgacattttcatctcacagtacacaatgggacagaaggatgcactaagaacagtcctgaaacaaaacgtttccctgtgcctcaccggctggagcgaccactccggtgtgatcacaacccattgtagcctgtacctgctgagacttatgcgatcctcacacttgtctctgccgtcttcctgggattaccgggcccagagcatgcccgtcttcaaagaggtgaaggtccatctccttgaggacgcggggattgagaaggacgcggtgactcaagagacgcggatctctcctagcggcatcgactcagctaccactgtcgccgccgcaaccgccgccgctatcgccactgctgccccccttatcaaggttcagtccgacctcgaagccaaagtaaactctgtgaccgagttactgagcaaacttcaggagacagataagcatctgcagagggtgaccgagcaacagacttcaatccagagaaagcaggagaagctgcactgccacgatcacgagaaacagatgaatgtcttcatggagcagcatatcaggcatctggaaaaactgcagcagcagcaaatcgatatccagactcatttcatcagcgctgctctgaaaacctcgtcattccagccagtaagtatgccatcttctagagcagtcgaaaagtattctgtgaaaccggaacaccctaacctgggatcctgcaatcctagcctgtataacactttcgctagcaaacaggcacctttgaaggaggtggaagacacctccttcgataagcagaagtcgcccctcgagacccctgcacctcgccgattcgctccagtccccgtgtccagggatgatgaactgagcaagcgcgagaacttgcttgaggaaaaggagaatatggaagtttcctgccatcgaggcaacgttcggcttctggaacagatcctgaataataacgactccttaaccagaaaaagcgaatcttctaacactacctctctgacaagaagcaagattggctggacacccgaaaagacgaaccggttcccttcctgcgaggagctggagacgaccaaagtaaccatgcagaagagcgacgatgtgttgcatgatctcggccagaaagaaaaggagaccaactccatggtccagcccaaggagagtctgtcaatgctgaaactgccggatctgccacagaatagtgttaaactgcagaccaccaataccacgcggtctgtgctgaaggatgcagagaagattctgcggggagtgcagaacaataagaaagtcctggaagagaacttggaggctattattcgagcgaaagacggagctgctatgtacagtctgattaatgccctgtctactaaccgagaaatgtccgagaagatacgcattcgcaagacggttgacgaatggataaagaccattagcgccgagatccaggatgaactatcccgcaccgattacgaacagaagcggtttgaccagaaaaatcagcgaactaaaaaggggcagaatatgacaaaggacatccgtaccaatacgcaggacaagaccgtcaataagagcgtcattcccaggaaacatagccagaagcaaattgaagagcattttagaaatctccccatgagaggcatgcccgcttcttcactgcagaaggagaggaaagaaggactgctcaaagccaccacggtcatccaggatgaagattatatgcttcaggtttatggtaagcctgtttatcagggccataggtctacccttaagaaagggccatacttgcgcttcaacagtccctctcccaagagccgcccccagcggcctaaagtcatcgagcgtgttaagggaactaaagtgaaatccattaggacacagacagacttttacgccaccaaacctaaaaaaatggactctaagatgaaacactccgtacctgtgcttcctcatggggatcagcagtacctcttttccccatctagggaaatgcctaccttcagcggtaccctcgagggccatctgattcccatggctattctgcttggccaaacgcaaagtaatagtgacaccatgccgcctgccggcgtgattgtcagcaagcctcaccctgttaccgttactacatctattccaccttcttctcgaaaagtggaaaccggcgtgaaaaaaccaaacatcgcaatcgtggagatgaaaagtgagaagaaggatcccccccagctaaccgtacaggtgttgccctccgtggacattgactcaatcagcaattcttctgccgacgtccttagccctctaagcagcccaaaagaggctagcttaccacccgtgcagacctggatcaagacacctgaaatcatgaaggtggacgaggaagaggtgaagtttccggggactaactttgacgagatcatagatgtaatccaagaggaggagaaatgtgacgagatccccgattcagagcccatcctggaattcaatcgaagcgtgaaagccgattccactaagtataacgggcccccgttccccccagtagctagtacttttcagcccactgccgacattctcgacaaggtgatcgaaagaaaggagacattagaaaacagcctcatacaatgggtggagcaggagattatgagtcgcataatcagcgggctcttccccgtccaacagcagattgcacctagcatctcagtctctgtgtccgagactagcgaacccctcacttctgacatcgtggagggtactagtagtggagctctccaattgttcgtggacgcaggcgtccctgtcaatagcaatgtgatcaaacattttgtgaacgaagctcttgccgaaacgatcgccgtgatgctgggcgaccgggaggccaagaaacaaggcccagtcgccactggcgtctccggcgacgccagtacaaacgagacctacctgcccgcgagggtgtgcacacccttacccaccccacaaccaacaccaccgtgtagtccaagcagtcctgccaaggaatgcgtattggttaagacaccagactcctctccttgtgacagtgaccacgatatggcttttcccgtgaaggaaatatgcgccgagaagggggacgacatgccagccataatgctggtgaacacaccaactgtgacgccaaccactacacccccacctgcagctgcagtgtttacacctactctgtctgatatctcgattgacaagctgaaggtctcatcacccgaattgcctaagccctggggtgacggcgacctcccgcttgaagaggagaaccctaactctccgcaggaggaattgcacccccgggccatcgtgatgagtgtggctaaggatgaagaaccagagtctatggactttcccgcccagcctccacccccagagccggttccctttatgcctttcccagcaggcacaaaggctccgagtccaagccaaatgcctgggtctgacagttcaacactggagtcaacactgtctgtaacggtaacagaaacagagactctggacaaacctatatcagaaggagagatcttgttctcatgcggccagaaactggcgcccaagatccttgaggatatcggcttgtacctgaccaatttaaatgactcgttatcctccacactccacgatgcagtcgaaatggaggatgatcctcctagcgaagggcaggtgatccgaatgtcccacaagaagttccacgccgatgccattttgtcctttgcgaaacagaatcaggagagtgctgtgtcgcagcaagctgtgtaccacagtgaagacttagagaactctgtgggggagctgtcagagggtcagcgcccccagttgaccgctgccgccgaaaatatactgatggggcattcactgtacatgcaacccccggtaactaatactcaatccctggaccagcagtgtgacccaaagccactgagtaggcagttcgataccgtttccggcagcatatacgaagatagctgcgcaagccacggacccatgtctctgggggagctggaactggaacccaatagcaaattggtgctgcctacaacactgttgacagcacaggaaaacgacgtgaatctacccgtcgcagccgaggacttctctcagtatcagctgaaacaaaaccaagacgtgaaacaggttgagcacaagcccagccagagctacctgcgcgtgcgcaacaaatccgacatcgccccatctcaacagcaggtgagccctggcgacatggaccggacccagatcgagctgaatccgtacctgacctgcgtgttttctggattgggcgtgcatgtgaaaaaggtgtcgtgcatcggaaagctcgggctttggcgctttgtgatccagattatatccagcccccggtgggagtcatccgctacccttcgattcacagatgccccctgtcaagatgtctctgatgccgccgtctctgaacccagggggctcctcagcgtgagcgagagccaacacaacgccgggggccacggggtgttcggaggaaggtatttgctcaatgggaaaaggcagccggcccaatgcttatgtcactggttttag

SEQ ID NO: 14881 - DNA, 3138 bp, synthetic construct
  source 1..3138: mol_type = other DNA; note = Synthetic coding sequence
atgctcacggtgcaggtgaaaacgagtagtgcaatcgagttacctgactctttggctttcttatggatcataccaatgtggtactgcgagggaaaggagctggaaaacagccctgacatccacattgtgcaggccggcaacctccacagtttgaccatcgccgaagcctttgaagaagatacaggccgctatagctgtttcgccagtaacatatacggcacagactctacttccgctgaaatctacattgaaggcgtgagctcaagtgactccgagggtgacccaaataaggaagagatgaatagaattcagaaaccaaatgaagtgtcctcaccccccacgacttctgccgtgatccctcccgctgtaccacaggcccaacacctggtggcccagcctagagtggccaccatccagcaatgccagtcccccacaaactatctgcaagggctggacgggaagccaattatcgctgctcccgtgtttaccaaaatgctccagaatctgtccgcctcagagggacagttagtggttttcgaatgtcgtgtcaaaggcgccccaagcccaaaagttgagtggtacagagaaggcaccctgatcgaagacagcccagattttcggatcttgcagaagaaaccgcgatctatggcagagcctgaagaaatttgtactctcgtgatcgccgaagtgttcgccgaggactcaggttgttttacttgtactgcttctaataagtacggtacggtcagctcaattgcacagctgcatgtgagggggaacgaggatcttagcaataacggtagcttgcacagtgccaactcgactaccaacttggcagccattgaaccacagccttctcccccacacagcgagccaccatccgttgaacaaccacccaagcccaaattagaaggggtgttagtgaatcacaatgagccccgctcaagcagtcgcatcggtctgagggtgcacttcaatcttccagaagatgataaaggctccgaagcctcatcagaagcaggtgtcgtgacaacacgccagaccagacctgacagcttccaggaacgatttaacggacaggcgactaaaactccagagccctcaagtcccgtcaaggaacccccccctgtcctagccaaacccaaactcgacagtacccagctccagcagctccacaaccaagttctgctggaacagcaccagctgcagaacccccctccctcctcacctaaggagttccccttcagtatgacagtactcaactcgaacgctccacctgccgtgaccacaagctccaagcaggtgaaggcgccatcttcgcagacgttcagcctagccaggcccaaatatttcttcccatcaacaaacacgactgcagccaccgtcgcccctagctcttcaccagtatttactctgtcttctacccctcagactatccaacggaccgtgtcaaaagaatctctgctggtttcccatccttcagtgcagactaaatcgccaggaggactgagtatacagaatgaacccctgccacctggccctactgaacctactccacctcccttcacattctctattccctctggcaatcagttccagccacgctgcgtcagcccgatcccagtttcacctacctccaggatccagaaccccgtggcgttcctgtcaagcgtactcccttctctgcccgccataccaccaaccaatgccatgggactgccccggtccgctcccagcatgccctcacagggcctggccaaaaagaataccaaatctcctcagccagtgaacgacgataacatcagggagaccaagaacgctgtgataagagatctgggcaaaaagataaccttttccgatgtgcgtcccaaccaacaggagtataagatcagttcttttgagcagcggctcatgaacgagatagagttcaggctggagcgtacgccagtagatgaatctgatgacgaaattcaacacgacgaaatcccaactggcaaatgtattgctcctattttcgacaaacggctcaagcactttcgcgtgacagaagggtcacccgtcacttttacctgtaaaatcgtgggaatccctgttccgaaggtgtactggttcaaagacggcaagcagatctctaaacggaacgaacactgcaaaatgcgacgcgaaggtgatggtacctgttccctacatatcgaaagtaccactagtgatgatgatggcaactacaccatcatggccgctaatccccaggggcggatcagctgcagtgggcacctaatggtgcaatctttgccgattaggagccgcctgacctctgccggccagtcacaccgcggtcgcagtcgcgtccaggaaagagacaaggaaccccttcaggagcggtttttccgaccacacttcttgcaagcgccaggcgacatggtcgctcacgagggtcgactttgcagactcgattgcaaggtttcaggattgcctccgccggagctgacttggttacttaacggacagcctgtactccctgatgcatcacataaaatgctcgtgcgtgagacaggcgtgcatagcctgcttatagacccactgacgcagcgtgacgctgggacgtataagtgtatcgccactaataaaacgggacagaacagcttctcattggagctgtcagttgtcgcaaaggaggtgaagaaagcaccagtcattctggagaagcttcaaaactgcggcgtacctgagggccaccctgtccggcttgaatgtagggtcatcggaatgcctccaccagtattttattggaagaaggacaacgaaacgattccctgcactcgcgagagaatatcaatgcatcaggatactaccgggtacgcatgcctgctgatacagccggccaaaaagtcagatgccggatggtacaccctgagcgctaagaacgaggccggaattgtttcgtgcaccgcccgtctggatatttatgcccagtggcaccatcagatcccccctcctatgtcagtgcggccatcaggctcccggtacggatctctcacttccaaaggtcttgacatattttcagcattctcctcgatggaatccactatggtttactcatgttcatctcgtagcgtagtcgaatctgatgaactgtag

SEQ ID NO: 14882 - DNA, 951 bp, synthetic construct
  source 1..951: mol_type = other DNA; note = Synthetic coding sequence
atgactcccagtgagggcgcccgggccggaacaggcagagagctggaaatgctggatagccttctcgctttgggcgggctggtcttactcagagatagtgtcgaatgggagggcaggtcactgcttaaggcgcttgtaaaaaagtccgccctatgcggggaacaggttcacatcttgggctgcgaggtgagcgaggaggaatttagggaagggttcgacagcgacatcaataacagacttgtctatcatgacttttttagagatccattaaattggagcaaaactgaggaggcgtttcccggtggtccccttggagctctacgggctatgtgcaagaggaccgaccctgtgccagtgaccattgccctggacagcttgtcctggttactcctgaggctgccctgtaccaccctgtgccaggtactacacgctgtttcgcaccaggatagttgtccgggagattcctcctccgtgggaaaagttagcgtgttggggttactgcatgaagaactgcacggtccaggccccgtgggagctttgagttccttggctcagaccgaagttactctgggaggcaccatgggtcaggccagtgcccacatcttgtgcagacggccccgtcaacgccccacagaccagactcagtggttcagcatccttcccgacttctcactcgatcttcaagaaggaccctctgtcgagtcccagccctattccgatccccacattccacccgtggaccctacaacacacctgacgtttaatctgcacctgtctaagaaagagcgggaagcacgcgacagcctgatactcccttttcagttttcctcggagaagcaacaagctttgctgagacccagaccaggccaagctacaagccatatattctatgaaccagacgcatatgatgatctggaccaggaagatcccgacgatgatctggatatctag

SEQ ID NO: 14883 - DNA, 1473 bp, synthetic construct
  source 1..1473: mol_type = other DNA; note = Synthetic coding sequence
atgaatggcgctctcgatcacagcgaccagcccgaccccgacgccatcaagatgttcgtgggacaaataccacgtagctggagcgaaaaagaacttaaggaattgtttgaaccctacggggcagtgtatcagatcaacgtcctccgggataggtcccagaatcccccccagtctaagggctgctgtttcgttactttctacactcgtaaagcagcactggaggcccagaatgccctccataatatcaagaccttgcccggaatgcaccaccccattcagatgaaacccgcagacagcgagaagagcaacgcagtagaagacaggaaactgttcataggtatggtatccaaaaagtgcaacgagaacgacatcagagttatgttcagccccttcgggcagatcgaagagtgcagaattttacgcgggcccgatgggcttagcagaggatgcgcattcgttacatttagcacaagagctatggctcagaatgcaatcaaggccatgcaccagtcccaaaccatggagggatgttcttcacccattgtggttaaatttgccgatacacagaaggataaagaacagcggcgcctgcaacagcaactcgcccagcagatgcagcagctcaatactgcaacctggggtaacttgacagggctgggtggcctgaccccacaatatctcgcgctcctccagcaggcaaccagctcgtcaaatcttggagcattcagcggcatccagcagatggcgggaatgaacgccttgcagctgcagaacctggctacgctggccgcggctgcagcggccgcacagacttcagctacttctaccaacgccaacccactaagtactacatccagcgccctgggcgctctcacctctcccgtggccgcgagtacccctaactcgactgccggggccgctatgaatagtctaaccagcctgggcacacttcagggacttgcaggcgctacagttgggttgaacaatattaacgcactggcagtggctcaaatgttgtcaggcatggccgcactgaacggaggcttgggcgcaacaggtttgacaaatggcactgctggtaccatggatgccttaacgcaggcctatagcggtattcaacagtacgctgcagctgcactgcctaccttatactctcagtccctcctccagcagcaatccgccgccggctcgcaaaaagagggccccgaaggggctaacctcttcatttatcacctgcctcaggagttcggcgaccaagatattttgcagatgtttatgcccttcggtaatgtgatctcggccaaggtgtttatcgacaaacagacaaacctgagcaagtgcttcggctttgttagctacgataacccggtgtccgcccaggctgccatacaggccatgaatggttttcagattgggatgaagcgcctaaaggtccagctcaaaaggtccaaaaacgattctaaaccctactag

SEQ ID NO: 14884 - DNA, 1428 bp, synthetic construct
  source 1..1428: mol_type = other DNA; note = Synthetic coding sequence
atggaagcgcttctggagggaatccagaaccgcgggcacggaggaggtttcctgacatcatgtgaggctgaactgcaggagctgatgaaacaaattgatataatggtggcacataaaaagtcagagtgggaaggtagaacccatgctctcgagacctgtctgaaaatacgcgaacaagagctgaagtctctgcgtagccagctggatgtcactcataaggaagtgggcatgcttcaccaacaggtggaggagcatgagaagatcaagcaggaaatgactatggaatataaacaggaattgaagaaactccacgaggaactctgtatcctgaaaagaagctacgaaaagctgcaaaaaaaacagatgcgcgagttcaggggcaacacaaagaaccacagggaggacagaagtgagattgagcgactgacggccaaaatagaggagtttagacagaagtccctagattgggagaaacagcgcctgatatatcagcaacaggtcagcagtctggaggcccaaaggaaggcgctggctgagcagtccgaaatcatacaagcccagcttgtcaatagaaagcagaaactggagtcggtggaattaagtagccagagcgagatccaacaccttagctcaaaattagagagagcaaatgatactatctgcgcaaacgaacttgagattgaacgattgaccatgagagtgaacgatctggtggggacaagcatgacagtcctccaggaacagcaacaaaaggaagaaaagctccgagagtccgaaaaactgctggaggccttacaggaagagaaacgcgagcttaaagccgctctacaaagccaggagaacctcatacacgaagctagaatccagaaggaaaaactgcaggagaaagtgaaggccacaaacacacagcatgcggtcgaagccatcagtcttgagagcgtgtccgctacttgcaagcagctgtctcaggagctgatggagaaatacgaagaactaaagcggatggaggcacacaataacgagtataaggccgaaattaagaaactgaaagagcagattcttcagggtgaacagtcatattcctcggcacttgagggcatgaaaatggagatttctcacctgacgcaggaattgcaccaaagggatatcactatagccagtaccaaggggagctcaagtgatatggagaaaagactccgtgctgaaatgcagaaagccgaggataaagcagtcgaacataaagaaatcttggatcaactcgagagtctgaagcttgaaaatcgtcacctgtcagagatggtgatgaaattggagctggggctacacgaacggtggggcttcacaatgctcagctccctcgtcctgaactttggaatacaggccattaggcagcctcagagacctaaggtactggaactccaggtctag

SEQ ID NO: 14885 - DNA, 2340 bp, synthetic construct
  source 1..2340: mol_type = other DNA; note = Synthetic coding sequence
atgcgcatcgaggagcgtaagtcacagcacctgaccggcctgacggatgagaaggtaaaggcttacctcagcctccacccacaagtgcttgacgaattcgttagcgagagcgtctccgccgagacagttgaaaaatggctcaaacgaaaaaacaataagtcagaggacgagtctgcccctaaagaggtgagtcgctaccaagacactaacatgcagggagtggtgtacgagctgaattcctacattgagcagagactggatacaggcggggataatcagctcctgctttatgagcttagtagcatcattaagattgccaccaaagctgatggttttgccctgtactttctgggtgagtgtaacaacagtctctgcatttttacccctccaggaataaaggaggggaagcctcggctgatccctgcagggccaataacccagggcaccacagtgtccgcttatgtggcgaaatcaagaaagacattactggtggaagacattctcggcgacgagcgttttcctaggggcaccgggctcgaatccgggacccgaattcagtcggtgctttgccttcccattgtaactgccatcggggatctgatcggtattctcgagttatatcggcactgggggaaagaggctttttgccttagccatcaagaggtggccaccgctaacttagcctgggcaagcgtggcgatccaccaggtgcaggtttgtcgaggtctggctaagcagactgaactcaatgactttttgctcgatgtgtctaagacatattttgacaacatcgtggctattgacagtctgctcgaacacatcatgatttacgctaaaaatctggtgaacgctgatagatgcgccctctttcaggttgatcataaaaacaaggagctgtactccgatcttttcgatattggagaggagaaagagggcaagcccgtctttaagaaaaccaaagagatacgattttccatcgagaaaggcatcgccggacaagttgcacgcacaggcgaggtcctcaacattcccgacgcatatgccgacccccggtttaacagggaggtggatctgtatactggatacaccactaggaatatcctttgcatgcccatcgtgtcgaggggttctgtgattggcgtcgtgcagatggtgaataaaatctctggcagtgccttcagtaagactgatgaaaacaacttcaaaatgttcgcagtcttctgcgccctggctcttcactgtgcaaatatgtatcacagaatccggcactcggagtgcatttacagagttaccatggagaagctaagctaccacagcatctgtacctccgaggagtggcagggtcttatgcagtttactctgcccgtgcggctatgtaaagagattgaactgtttcatttcgacataggaccatttgagaacatgtggcctggtattttcgtgtatatggtgcaccgctcctgcggcacaagttgtttcgaactggaaaagttgtgccgcttcataatgagtgtgaagaagaactaccgacgggtcccctaccacaactggaaacatgcagtgactgttgcccactgcatgtacgcaattctgcagaacaaccatacactgttcactgacctggagcgaaaaggactcctcattgcatgcctctgtcacgacctggaccatcgtggtttctctaactcgtatctgcagaaatttgaccacccactggctgctttatactcgacatccactatggagcagcatcatttctctcagaccgtgagcatccttcagctggaagggcataacatcttctcaacactgagctcttccgagtatgaacaggtgctagaaatcataagaaaggcaatcatagcaaccgacctagctctgtattttgggaaccgcaaacagctggaggaaatgtatcagaccgggtccttgaacctgaataatcagagccatagggaccgggttatcgggttgatgatgactgcctgtgatttgtgtagcgtcactaagctgtggcctgttaccaagctgacggcgaatgatatatatgctgagttttgggcagaaggggacgagatgaagaaactgggaattcagcccattcctatgatggaccgggataagaaagatgaggtcccgcagggccagttagggttctataacgccgtggctatcccatgctataccactttaacacagatcctgccccctactgagccactgctgaaggcttgtagagacaacctgagtcagtgggaaaaggtaattcgaggggaggagacggcaacatggatctcttctccctccgtggcacagaaagccgccgctagtgaggactag

SEQ ID NO: 14886 - DNA, 2112 bp, synthetic construct
  source 1..2112: mol_type = other DNA; note = Synthetic coding sequence
atggccgccgccacgggagatcccggactgtccaagctccagttcgcccccttcagctctgcactggatgttggcttttggcacgaactaacacagaagaagctgaatgagtacaggctggacgaagcgccaaaagatattaagggatactattacaatggtgatagcgccggattacctgcccggctcaccctggaattttctgcatttgatatgagtgcgccaactcccgctcggtgctgtcccgcaatcggcactctctacaatactaataccctcgagtcatttaagacagccgacaaaaagctcctgctggagcaggcagccaatgagatctgggagtctattaagagcggtacggcactagagaatccagtcctgctcaacaaatttctgttactgaccttcgccgacctgaaaaagtaccacttctactactggttctgttatccggcactgtgcttgcctgaatccttgccacttattcagggacctgtgggtttggaccagcggttctctctaaagcaaattgaagccttggagtgcgcatacgataacttgtgtcagacagagggtgtgaccgcgctgccttatttccttattaaatacgacgaaaacatggtcctggtgtcgttactgaaacactatagcgacttctttcaggggcaacgcactaaaataacaattggcgtctacgacccctgcaatctggctcagtaccctggctggcccttaaggaactttctcgtgctagccgcccaccggtggtcctcttctttccagagtgtggaggtcgtgtgtttcagagaccgtaccatgcagggtgcccgcgacgttgcccactctataatttttgaagtgaaattgcccgagatggcatttagcccagattgtcctaaggccgttggttgggaaaagaatcagaagggcggaatggggccacggatggtgaacctgagtgaatgcatggaccccaagcgacttgccgaatctagtgtggatctgaatctcaagttaatgtgctggagacttgtgcccaccctggatcttgacaaggtagtgtcagtgaagtgtctgttactcggtgcaggtaccctgggctgcaatgtagccaggacgcttatgggatggggcgtcagacacatcacatttgtggataacgccaaaatctcttatagcaaccccgtgcgccagcccttatatgagttcgaggattgccttggtggcggaaagcctaaagccttagccgccgcagacagattgcagaagattttccctggagtgaatgccagaggatttaacatgtccatccctatgccaggacaccctgtgaatttttcgtcggtgaccctcgagcaggctagaagggacgttgagcagctggagcagctgatcgagtcccacgatgtcgtgttcttactgatggatactagggaatctcgttggctgcctgccgtcatcgccgccagtaagcgcaagctggtcatcaatgcggcgttaggattcgatacttttgtcgtaatgagacacggcctaaagaagccaaagcaacagggggccggcgacctatgccctaatcatcccgtcgcttccgctgacctattgggtagcagcttgtttgccaacatcccggggtacaaattagggtgttatttttgcaatgatgtggttgcaccaggagactcaactagggatcgtaccctggatcagcagtgcacagttagtagaccaggcctggcggtaatagctggggccctggcagttgagctcatggtgtcagtcctgcagcaccccgaaggaggctacgctatagccagtagttccgacgatcgcatgaatgagcctcccacatctctggggctggtgcctcaccagatccggggtttcctgagcagattcgacaacgtgctgccggtttctctcgcgtttgataaatgcacagcttgcagcagcaaagtcctcgatcagtatgagcgcgaagggttcaactttctggctaaggttttcaattcctcccatagtttcctggaagatctgaccgggcttacactgttgcatcaggaaactcaagctgcggaaatctgggatatgtcagacgacgagacgatctag

SEQ ID NO: 14887 - DNA, 3246 bp, synthetic construct
  source 1..3246: mol_type = other DNA; note = Synthetic coding sequence
atggaaagtgccggactggaacaactcctcagggagctgcttctccctgacacggagcggatccgcagggcgaccgagcagctgcagatcgtgttaagggcaccagcagccctacccgccctgtgcgacctcctggctagcgcggccgacccccagataagacagtttgctgcagtcctgacgcgtagacgcctcaatactaggtggcgcagattagccgccgagcagcgtgagtctctgaaatcattaattctcacagcactccagagagaaaccgagcactgcgtgagcctgtcattagcccagctgtcagccaccatttttaggaaggaggggctcgaggcctggccacagctgttgcagctgttgcaacatagcactcacagcccacattctcccgaaagagagatgggtttgcttctgctctctgtcgttgtcacttctcgccctgaagccttccaaccacaccaccgggagctgctgcgcttactcaacgagacacttggggaagtgggcagcccaggtctccttttctatagcctcaggacacttacaaccatggccccttaccttagcaccgaggatgtcccgctcgccaggatgctggtgcccaagcttatcatggccatgcagactctgatacctattgacgaagccaaggcatgcgaagctctggaggccctggacgagctcctcgaatctgaggtgcccgttatcaccccatacctgtcagaggtgctgactttttgccttgaagttgcccgtaatgtggcactagggaatgcaatcaggattcgtatcctgtgttgccttaccttcttggtcaaagtcaagagcaaggctctactgaagaatcggctccttccccccctgctgcacacactttttcccatcgtagccgccgagccccctcccggacagctggatcccgaagaccaggattcagaggaggaagagctcgagatcgagctcatgggtgagacacctaaacatttcgctgttcaagtggtggatatgcttgcactgcatcttccgccagagaagctgtgcccccagctgatgcctatgcttgaggaggctcttagatcggaaagcccataccaacgaaaggctggccttctggttttggctgtgctctcagatggcgccggcgaccacatccgccagaggctgctgccacctctgctgcaaattgtctgcaagggcctggaggaccccagtcaagtggttagaaatgctgctctgtttgcccttggtcagttttcggagaatctccagcctcacattagtagctatagcagagaagtcatgcccctcctgctggcctacctgaagtcagtgcccctcggacacacgcaccacttagctaaggcatgttacgctctggagaatttcgttgaaaaccttggtccgaaggtgcagccatacttgccggagctcatggaatgtatgctgcagctcctgaggaaccctagttctcccagggctaaagaattggccgttagtgctctcggtgcaattgccaccgccgcacaggcatcactactgccctattttccagcgataatggaacacctgagagagtttctgcttacaggtcgggaagacttgcagccagtacagatccagagccttgagacgctaggggtcctagctagggctgttggtgagcccatgagacctctggcggaggagtgctgccaactcggactgggattatgtgatcaggtcgacgatcccgatctccggcgctgtacctactccctgtttgctgctctttccggactcatgggcgaggggcttgccccacacctagaacagataaccacgttgatgctactgtcacttcgatctacagaggggatcgtgcctcagtatgatggctccagcagtttcttactgttcgacgacgaatcggacggtgaggaggaggaagagcttatggatgaagacgtggaggaggaggacgattccgagatcagcggatatagcgtggaaaacgctttctttgacgaaaaagaagacacatgcgctgctgtcggagaaatctccgtcaatacgtcagtggcattcttgccatatatggaatcggtatttgaggaagtgttcaagttactagagtgccctcaccttaacgtgaggaaagcggcccacgaagccctgggccagttctgttgcgcgcttcacaaggcctgccaatcttgtcctagcgagcctaacacggctgccctgcaggccgcgcttgctagggtggtcccaagctatatgcaggctgtgaaccgggagcgggaacggcaagtggttatggccgtcctggaggctttaacaggtgtgcttagatcgtgcggcaccctgactcttaagcccccgggaagactcgccgagctctgcggcgtcctcaaggcagtgttacagcgaaaaaccgcatgccaggacaccgatgaggaggaagaggaagaggacgacgatcaagcggaatacgacgcaatgctcctggaacacgcaggggaagcaatcccagccctcgctgccgctgccgggggcgactcattcgccccattttttgccgggtttctccctcttctggtttgtaagacaaagcagggatgtacggttgccgagaaaagcttcgccgtgggaactctggcagagaccatccaaggcctgggagctgctagtgcgcagtttgtgtctcgcctcctgcctgtgctgctctctacggcccaggaagcggaccccgaggttaggtctaacgctatctttggtatgggagtgcttgccgaacacggcggccaccccgcccaggaacactttccaaaacttttggggctgctgtttccactgctggcaagagaaaggcacgatcgagtaagggataatatttgtggggctttagccagactgctcatggcatcacccacacggaagcccgagccacaggtactggctgccctgctccacgcactcccactcaaagaggatctggaagagtgggtcactataggacgactgttctcctttctctatcagtcctctccagatcaggtcattgacgtggcccccgagctgctgcggatctgcagcttaattctggcggataataaaattccacctgacactaaagctgctttgcttctgctcttgaccttcttggctaagcagcacaccgactcctttcaggccgcacttggttcacttccagtggacaaggcccaggaactccaagctgtgctgggtctttcctag

SEQ ID NO: 14888 - DNA, 7224 bp, synthetic construct
  source 1..7224: mol_type = other DNA; note = Synthetic coding sequence
atggtgggagaacgtcatgccggcgatctgatggtgccactcgggccacgtctgcaggcttacccggaggagctaattcgccagcggccaggccatgatggacatcctgagtacctgatcagatggagcgtgttgaagtgtggcgaggtcggaaaagtcggtgtcgaagagggcaaggccgaacacattctgatgtggctatcggcacctgaggtgtatgcgaactgcccgggtttgctgggggaaagggctctgtcaaaagggcttcaacacgagcctgctggggtgagtggttcctttccacgggatccaggcggacttgacgaggtcgccatgggtgagatggaggcggatgtgcaggcgcttgtgcgccgggccgcacggcagctcgccgagtcaggcactccttccctcacagctgctgtgctgcatactatccacgttcttagtgcgtacgcctccattggtccactgactggagtgtttagagaaacaggcgctctggatctgctaatgcacatgctgtgcaaccccgagccacaaattaggagatcagcgggaaagatgctccaggccctggctgctcatgatgcaggctctagggcacatgtgctgttgtcactgagccagcaagatggaattgagcagcatatggacttcgactctaggtacaccttgctcgaactatttgccgagaccacaagctcggaggagcactgcatggccttcgagggcatccatctcccccagattccagggaaactgctgttcagtttggtaaaaagatacctgtgcgttacgagcttgcttgatcagttgaactcgtcaccggagctgggagccggggaccagagctccccttgtgcaaccagggagaaaagccgagggcagcgggaactggaattctcaatggcagttggcaacttgatcagcgagttggtgaggagtatgggctgggcaagaaacctgtccgaacagggaatgagccccccgcgtcctactcgcagcatcttccagccttacatatcgggaccttctctgttactacccaccatcgtcactacacctcggaggcaaggatgggtgtttagacagcggtctgaatttagtagcagaagcggatacggtgagtacgttcagcagacacttcaacctggaatgagggtgcgcatgctggacgactacgaagagatctccgccggcgatgagggggaatttcggcagtctaacaacggaatacctcctgtgcagacattaggtgaaaaggcccttggagaaatatcggtctctgtggagatggccgaatccctgctgcaggttctgagctctcggtttgaaggcagtacactgaatgatctactcaactcccagatctatacaaagtacgggctactgtctaatgaacccagctcgtcaagcacctctcgcaatcactcttgtacccccgacccagaagaggagtccaagtcagaggccagttttagcgaggaggagactgagtctcttaaagctaaggccgaggctcctaagactgaggctgagcccacaaagacacggaccgaaactcctatggcccagagcgacagtcaactgttcaatcagcttcttgtcactgaaggaatgacattgccgactgagatgaaggaagctgcttccgagatggcacgagcacttcgcggcccaggaccgcgatcttctctggaccagcacgttgccgctgtggtggcaaccgtgcagatctcaagcttagatacaaacctgcaactctcaggcctgtcagctctcagccaagccgtagaggaggtgaccgagcgtgaccacccactcgtgagaccagataggtcactcagagagaaactcgtaaagatgttagtcgaactgctaactaatcaggtgggtgagaaaatggtggttgtccaagcactccgccttctatatctgcttatgacgaagcacgaatggcgtccactgtttgccagagagggcgggatatacgcagtgctggtgtgtatgcaggagtataaaacgagcgtcctggtccagcaagccggcctggctgccttaaaaatgcttgccgtggccagtagctcagagattcctacctttgttacaggcagagacagcatccacagtctctttgacgctcagatgacgcgcgaaatctttgcttctattgatagtgccactagacccgggtctgaaagcctgctcctcaccgtgccagccgcagttatactgatgctcaacaccgagggttgctcttccgccgcccggaacgggctgcttctgctcaatctattgctgtgtaaccaccatacacttggcgatcagattataactcaggagcttagggacactcttttccggcacagcggaatagcgcctcggacagagcctatgccaaccacaaggactattttgatgatgttgctgaaccggtactcagagccccccgggagccctgaaagagcagcattggaaacccctatcattcagggacaggatggcagtccagagctgctcatacgctctctggtgggcgggccttctgccgagctcctactcgatcttgagagggttctttgccgcgaggggtccccagggggcgccgtgagaccgctgctgaagcgtctgcagcaggagactcagcccttcttattgctcctgagaaccctggatgcgcccggacccaataagaccctcctgctcagcgtgcttcgcgtcatcacgcggttgctggattttcctgaagccatggtcctgccctggcatgaggtgctcgagccctgtctgaactgcctcagcggcccatccagcgactctgaaatcgtccaagagctgacgtgcttcctacaccgcctcgcttctatgcataaagactatgctgttgtgctctgttgcctgggggcaaaagagatcctcagcaaggtgctggacaagcacagtgcccagctgctgctgggatgcgagctgcgggacctggttactgagtgcgagaaatatgcccagctctactccaacctgaccagcagcattctggcaggatgtattcagatggtgctagggcagatcgaggatcaccggcgcacccaccagcctattaacattcccttctttgatgtgttcttaagacatctatgtcagggctcgtccgtggaggtgaaagaggacaagtgctgggagaaagtcgaagtcagcagcaatccacatcgagcgtcaaaattgaccgaccacaacccaaagacctattgggagagcaacggatcaaccggtagccactacatcaccctacacatgcatagaggtgttttggtgagacagctcaccttgttagtagcctccgaggattcatcctacatgccagcccgtgtggtggtttttgggggggattctacctcatgcattgggaccgagctgaacactgtgaacgttatgccatctgcttctcgtgtcatactgttagagaacctcaatcgcttttggcccatcattcaaatcaggataaagagatgtcagcaaggcggcattgatactcgagtgcgcggagtggaggtgctaggtccgaaacctacattctggcccctgtttcgagaacaattgtgccggcgcacatgtttgttctacactattcgggctcaggcttggtccagagacatagctgaggatcatcggcgccttctccagctatgtccacggctgaatcgagtgctgagacatgagcagaattttgctgatcgctttttaccagacgacgaagcagctcaggctcttgggaagacttgttgggaagcactggtatccccactggtacagaacataaccagccccgacgccgagggcgttagcgcattaggatggttattggatcagtatctcgaacaaagagagactagccgcaatccactttctcgagctgcatcctttgcctcccgcgtccgacgattatgtcacctcttggttcacgtggaacctcccccgggaccatctcctgagccaagcaccaggcccttctccaagaattccaagggccgggaccggagccccgcacccagccccgtactgccaagcagcagccttcgtaatatcactcagtgttggttgagtgtcgtccaagagcaggtgagcagattcttggcagccgcatggagggcccctgactttgtcccaaggtactgtaaactgtatgagcatctccagcgtgccgggtccgagcttttcggtcctcgggccgcgtttatgctcgcgctgcgatcaggcttcagtggtgctctgctccagcaatcgtttctgaccgcagcccatatgagcgaacaatttgctcgatatatcgaccagcaaattcaaggaggccttataggtggcgctcctggggttgaaatgctgggccagctgcagcgacacctggaaccaatcatggtgttaagtggcctggagctggctaccacattcgaacatttctaccagcattatatggcagacaggctgctgagcttcgggagctcatggctggagggagccgtgctagagcagatcggtctctgtttccctaacagactgcctcagttgatgctccaatccctttctacctctgaggaattgcagagacaatttcaccttttccagctgcagcgccttgataagctctttctggagcaggaggatgaagaggagaagaggttggaggaagaagaagaggaggaagaagaggaggaggctgagaaagagctgtttatcgaggatccaagtccggccataagtatactcgtcttgagcccgagatgctggcctgtttccccgctttgttacctgtaccatcctaggaaatgcctacctacggaattctgcgatgctctggataggtttagtagcttctactctcagtcccagaatcatcccgttttggacatggggccacatagacgattgcagtggacatggttggggagagccgaactgcaattcggcaaacaaatcctgcacgtgtcaaccgtacagatgtggctcctgctgaaattcaatcagactgaagaagtgagcgtagagacgctgctgaaggactccgatctcagtccagagctgttgctccaagctctggtaccacttacatcagggaatggtccgctgactctgcacgaaggacaggattttccccatggcggcgtgttgaggctacatgaacctgggcctcagcggagtggtgaggctctgtggcttatcccacctcaagcttatctcaacgttgaaaaagacgaaggaagaacactggagcagaaacggaatttgctgagctgcttgctggtccggattctgaaggcccatggggagaaaggcctccatattgaccaactagtctgtttggtcttggaggcttggcaaaaaggtcctaacccccccggaacactcgggcatactgtggcaggaggagtcgcctgcacaagcactgacgtccttagttgcatcctgcacctgttgggccagggatacgttaagcggcgggatgatcgcccacagatcctcatgtacgcggcacctgagccaatgggcccttgtaggggccaggcagacgtgccattctgtggatcacagagcgaaacttcgaagccctcccccgaggccgtcgccactttggctagcctgcagctccctgcaggccgtactatgagccctcaggaagtagaagggcttatgaagcagaccgttaggcaggtgcaggaaaccctgaacctcgaaccagatgttgcgcagcacctgctcgcacatagtcactggggcgcagaacagctgctccaatcttatagtgaagacccggagccactactgctagcagccgggctgtgcgtgcatcaggcccaggctgtacctgtgcgcccagaccactgccccgtgtgcgtgtcgccgctgggctgcgacgacgatctcccatcactttgttgcatgcactactgttgtaaatcatgctggaacgagtacttgactacccgcatagaacaaaacctggtgctcaactgcacatgtcctatagccgattgtccagcccagcccacaggcgcctttatcagggcaatcgtgtcatctccggaggtgatcagtaagtatgagaaagccctacttcgcggttatgttgaatcctgctctaatctgacttggtgtaccaatccccaggggtgcgatcgcatactgtgtaggcaggggctgggctgtggcacaacttgttccaagtgtggctgggcatcctgtttcaactgtagcttccccgaggctcactaccctgccagttgcgggcacatgagccagtgggttgatgacggaggctactacgatgggatgtcagtggaagctcagtctaaacacctagctaagcttatcagcaagcgatgtccttcctgccaggccccaattgaaaaaaatgaaggctgccttcatatgacctgcgctaagtgtaaccacggattctgctggaggtgccttaagagttggaaaccgaatcacaaagactattataattgttcagctatggtgtcaaaggccgcccgccaagagaagcggttccaagattacaatgaacgctgtacctttcaccatcaggctcgcgagttcgcggtgaatctgcggaacagagtgtcggccatccatgaggtcccacccccgagaagttttacttttctgaatgatgcatgccagggcctagaacaggcacggaaagtgctggcctacgcctgcgtgtattccttttacagccaggatgccgagtatatggatgtggtcgagcagcagacggaaaacctcgagctccacacgaacgcgctgcagattttgcttgaggaaaccctgcttcggtgtcgggatctcgcctcatctctacggctcctccgggccgactgtctgtctaccggtatggagctcctcaggagaattcaggaacgattattggccatcctccaacacagtgctcaagattttcgagtcggtcttcagtctccatccgtggaggcttgggaagctaaaggccccaacatgcctggaagtcagccgcaggcctcatcaggccccgaagcagaggaggaggaagaggacgacgaagacgacgtgcccgagtggcaacaagatgagttcgacgaggagctggataatgacagtttctcttatgacgagagcgagaatctcgatcaggagacttttttctttggggacgaagaggaggacgaggacgaggcttacgactag

SEQ ID NO: 14889 - DNA, 672 bp, synthetic construct
  source 1..672: mol_type = other DNA; note = Synthetic coding sequence
atggaggacgtgaaacttgaatttccctcactcccacaatgtaaagaggacgcagaggagtggacctacccaatgaggagagaaatgcaggaaattcttcctggcctcttcctcggtccctactcttctgctatgaaaagcaaattacccgttttgcagaaacacggtattacacatattatttgtattcgacagaatatcgaggccaacttcattaaacctaattttcagcagctgttcaggtacctggtgctcgacatagcagataatcctgtggaaaacataatcaggttctttcccatgacaaaagagtttatcgatgggagcttacagatgggcgggaaggtgctagtgcacgggaatgctggcatttctcggtctgccgcctttgtgatcgcctacatcatggaaacatttggtatgaagtaccgcgacgctttcgcttacgtgcaggaacggcgcttctgtataaatcccaacgcagggtttgtgcaccagttgcaggagtacgaggcgatctaccttgccaagctgacaattcaaatgatgtcacccctccagatcgaacgcagtctgtcggtacattcaggtacgaccggtagccttaagaggactcacgaggaggaagatgacttcggcacaatgcaggttgctaccgctcagaatggatag

SEQ ID NO: 14890 - DNA, 1689 bp, synthetic construct
  source 1..1689: mol_type = other DNA; note = Synthetic coding sequence
atggatgataagggcgatccatcaaacgaagaggcacctaaggcaattaagcctacctccaaggaatttaggaaaacctggggatttcgccgtacaacaatcgctaaacgtgagggcgccggggacgcagaggccgatcctttggaaccacccccgccgcagcaacaactcggcctctcccttcggagaagcggcagacagcctaagcgcacagagagggtggaacaattcctgaccattgcccggaggcgtgggaggaggagcatgcctgtctccctggaggattcaggggagccaactagttgtcccgcaaccgacgcagaaaccgcttctgaagggtctgtcgagtcagctagcgaaacgcgcagtggccctcaatctgcttctaccgctgtgaaggagcgccccgcttcttctgaaaaagtgaagggaggtgatgatcatgacgacacatctgactccgacagcgacggcttgactcttaaggagttgcaaaatcggttgagacggaagcgggagcaggaaccaaccgaacgaccgctgaagggtattcagtccagactgcgcaagaagaggagagaggaggggcccgcagagaccgtcggctcggaggcatccgacaccgtcgagggggtgctcccaagcaagcaggaaccagaaaatgatcagggcgtagtctctcaggcgggaaaggatgaccgagagtcaaagttagaaggcaaggctgctcaagacatcaaagacgaggaacccggggatttggggagacccaagcctgagtgcgaaggttacgacccaaacgcgctctattgcatctgtaggcagcctcataataatagatttatgatctgttgcgataggtgcgaagagtggtttcacggggattgcgtcggcatctctgaggcccgtggccgtctgctggagagaaatggagaggactacatctgtcctaattgcaccatcctacaggtgcaagacgaaacccacagcgaaacggcagatcagcaggaggccaagtggaggcctggcgacgctgacgggacagactgcacctcaataggtaccattgaacaaaaaagctctgaagatcagggaattaaagggcggatagaaaaggccgccaatccttctggtaaaaagaaactgaagatattccagcccgtgattgaagcccctggcgcctctaaatgtattgggccaggctgctgtcatgtggctcagcctgactccgtgtactgtagcaatgattgcattctgaagcatgccgcagccacaatgaaattcttgtcaagcgggaaggagcagaaaccgaagcctaaggagaagatgaaaatgaaaccagagaagccatctctgcccaagtgtggagctcaggcagggattaagatctcaagtgttcataagaggcctgccccagaaaaaaaggagaccacagtgaaaaaggcagtcgtggtcccggcccggagcgaggctctgggtaaggaggcggcttgtgagtccagtaccccatcatgggcaagcgatcacaactataacgctgtgaagcccgagaagacagctgcccccagtccatcacttttatataaatgcatgtatcatctcggcgtcggccttctcgatccctctcgctcattttggattgccataccctgggcctgtcccggtctaggggttgctgcgctgtgttag

SEQ ID NO: 14891 - DNA, 360 bp, synthetic construct
  source 1..360: mol_type = other DNA; note = Synthetic coding sequence
atgatcttgcaacagcccctccaaagaggcccacagggaggagcacagcgcctcccccgggcagctctcggggtgacgtggggactggacgctcgcgagcccttgaggaagcagttcctttccgaagagaatatggcgactcacttctctcagttgtcacttcacaatgaccatccttattgtagtcctcccatgaccttcagcccagcccttccccctctgaggagcccttgctcagaactgttactctggaggtaccccggatctctgatcccagaagcactgcgtctgctccgcctgggggatacccccagccccccatatcctgccacacccgcaggcgacatcatggagctgtag

SEQ ID NO: 14892 - DNA, 1794 bp, synthetic construct
  source 1..1794: mol_type = other DNA; note = Synthetic coding sequence
atggtccccgaagaaagacgcgtgggactcagtagcgatgaaacatcatcagactcactgaagtcttggcacagtatttgtgttctggatagtaaagaacaacccctggcctgccagcagaagcagcgccagtttgtgaaacctgtgacagaaagcgaacaacccaccgtgcttgaactgctgctggctgagttgaggacgttatttagcgccgtcctgcaggactcgtccccagctgcctggagatatctgcatgccgtcttagggctgctgcccccttatcgcgaacttttggttggtcaccttgatcttctcccgttcctcgagcagttatactgctgggccccatgggtacagacacatttgcacctggacttgctgggcgctatcgtgcaggccttcccacctgatagttcacttctcgattctgcctcccatgcagattgctgtccacaaaagcggcgtcttcaccatagacccccgtgtcctgcatgtccatttgttcaggcgcaatggtcaaggcagcaggtaaaagaagagctggcaacctggctgaggcctctgacattgccagagttgcagagatgcttgggtatagtgggcgctcaggttgcactcgaagaggccgtgtggctcgacggactctctctgctgcccctggccttagctgctgacatccccgtgcgctacgagtcgagcgatacagacaacgccgaagttgagcctgtcggaaggaaagaaacgagaagccagctcgattacgaagtcccccgagaaaaggctttccaaaagtcctccactggctttagcccagaaacaagctttctggatagccaggttatgacggccctcaagatggagaggtatctgaaaaagattcactttctctatctgaacgtggctccttccaggtactttaggccttatagtttgatggtggtacctcctgataaggtaaatccagagcattatatattttcaccctttgggatactccatgtgcatcccgtggaggggtcagagaccatgaccctaggcacctggcatcaccactgtgtcctgtggcagcagttgcaatttattcccttcttcaagtactgtttgcttcggaaaagctttacatgttggaaaaagaatgttagactgcagggacttcatcgtcttcagaagttcctggaaaaccacttgctccttgccgtgcctcacttcggagctggtttgttacacattagtaggctactgcaggaactgcatagtgtgagctggctgcctcaagaactcgacagatgttacgaactgctggatttgcaaaccgcccttgccgaagaaaaacacaaggctctaagacttctccaccggtgtcttaacctgtgtacctccatcctgcgtctggtgcatgaagacacctaccacatgcagcagtgtttacaagagagggttcagaactgcgaccggatcaggaccggccagggatctatttaccttcagcgagtgcagcacaagcagctggagcaaaagctgaagcaagcagaggcctggtggctacagcttggaaagtttgcccggctagttgactatatgatttgtcagtctctcatctccgttttagaggaacagatcaccagctttgtggcaaacattctgcaagcccccagacagaagccgttcctgagctcccagctggtgtttgacgaccacggtcagttgtcccatgtcccttgtgtcgagaacatgattcagaccctgaccggtgggcttcaaagtgtcaaaaccagcgccctgcaggtattttag

SEQ ID NO: 14893 - DNA, 591 bp, synthetic construct
  source 1..591: mol_type = other DNA; note = Synthetic coding sequence
atggaggatctgtttgagacttttcaggacgagatgggcttctccaacatggaggacgatggccctgaggaggaagaaagggtcgccgaacctcaggccaacttcaacaccccccaggccctgaggttcgaagagctgctggccaatctcctcaatgaacagcaccagatcgcaaaggaactcttcgaacaactgaagatgaagaagccttctgctaaacagcagaaggaagtggagaaggtgaagccccagtgtaaagaggtgcaccagacactgatactggaccccgcccagaggaaacggcttcagcaacaaatgcaacagcacgtccagctgttgacacagatccacctcttggctacgtgtaaccccaatctcaatcccgaggccagtagcacacgcatatgcttgaaagaactaggtacttttgcccagtccagcatcgccctccaccatcagtataaccctaaattccagactctatttcagccatgcaacctgatgggcgccatgcaactgatcgaggatttcagcacacacgtgtcaattgactgtagtccgcacaaaactgtcaaaaagacagtttgctag

SEQ ID NO: 14894 - DNA, 888 bp, synthetic construct
  source 1..888: mol_type = other DNA; note = Synthetic coding sequence
atggagctcatccaggatacaagcaggccacctttagagtatgtcaagggggtgccgctcatcaaatacttcgctgaagccttaggccctttgcagtccttccaagctagacccgatgacctgcttattaatacataccccaaaagtggaaccacttgggtgtctcagatactggatatgatttaccaggggggcgacttggaaaaatgcaacagggcccccatatatgtgagggtgccattcctcgaagttaacgatcctggtgagccttccggtctagagaccctgaaggatacaccgccaccaagattgatcaaaagccatctgcctctggcgctcctgccgcagaccctgttggaccagaaagttaaggtggtctacgtcgcgagaaaccccaaggatgtagctgtgtcctactaccacttccatcgaatggagaaggcccacccagagcctggaacctgggatagtttcctggagaagttcatggcgggggaagtgagctacggctcgtggtatcagcacgtgcaagaatggtgggagctatcccgaacccaccccgtgctctatcttttttatgaagacatgaaagagaatcctaagcgggagatccagaagatactggagtttgtgggtagatctctccctgaagaaacgatggatttcatggtgcaacacacgagtttcaaagagatgaaaaaaaaccctatgacaaattacaccactgtcccacaggagttgatggatcattccatttcccccttcatgcggaaaggcatggcaggcgactggaagacgacttttaccgttgcccaaaatgagagatttgacgctgactacgcggagaagatggcaggttgctctctttcatttagatccgagctgtag

SEQ ID NO: 14895 - DNA, 915 bp, synthetic construct
  source 1..915: mol_type = other DNA; note = Synthetic coding sequence
atgaaacgggctcacccagaatactccagttccgactcggagctggacgagactattgaggtagagaaggagtctgctgacgagaatgggaatctgagtagtgcccttggtagcatgtctcccacaacttcatcccagatcctggccagaaaaaggaggaggggaataattgagaaaagacgaagggatcggatcaataacagtctgagcgaattgcggcggctcgtcccatccgccttcgagaagcagggcagcgccaagctggagaaggccgagattctacaaatgactgtagatcacctgaaaatgctccatactgcaggcggcaagggctacttcgatgcccatgctttggcgatggattatagatcgctgggcttcagagagtgtctcgcggaggtggcccgctacctaagcataatcgagggcctggatgcaagcgaccctctccgagtaaggctcgtgagccacctaaataattatgcttcccagagggaagccgccagcggcgcccacgctggactgggacacattccttggggaacagtgttcgggcaccacccccacatcgcacatcctctgctgttgcctcagaacgggcatggtaatgctggcactaccgcctcgcctacagagccgcaccatcaggggcgactgggcagcgcacacccagaggccccggccttaagggctcctccctcaggatctctaggtcctgtcctgcctgtagtcaccagcgcaagtaagctgtccccccccctgctaagctccgtcgctagcctatctgcttttccttttagctttggaagcttccatttactgagccccaacgccctgagtcccagcgctcctacacaagctgccaatctcggcaagccttatcgcccgtggggtacggagataggggcgttctag

SEQ ID NO: 14896 - DNA, 2529 bp, synthetic construct
  source 1..2529: mol_type = other DNA; note = Synthetic coding sequence
atgtgtggctccgagcggatcctccaagccggaaatatcctggagatacgggtggggcaggccggagcgcgccgggttgccactatgacatcgcctgtgcttgtggatattcgtgaagaggtgacctgccctatatgcctggaactcctgaccgagcctctgtcaatagattgtgggcactccttctgccaggcttgcatcacaccaaacggcagagagagcgtgattggacaagagggcgaacgtagctgccccgtctgtcagacttcttaccaaccaggaaacctgcggccaaatcgccatctggcaaatatcgttagacgcctcagagaagtcgtgctgggcccaggtaagcagcttaaggccgtgctatgtgctgatcatggagagaaactacaactgttttgtcaagaggacggcaaagtgatctgctggctgtgtgagaggagccaagagcaccggggccatcatacattcctagtagaggaggtcgcccaagagtatcaggagaagtttcaggagagtctgaagaaacttaagaatgaggagcaggaagcagagaagcttaccgctttcattcgcgagaaaaaaactagttggaaaaatcagatggagcctgagcgctgtcgcatacagaccgaattcaaccagctgagaaacattttagacagagttgagcagagggaactaaagaagttggaacaagaagagaaaaagggactgagaataattgaggaagccgagaacgacctagtgcaccaaacccagagcctccgggagctgatctctgatctcgagcgaaggtgccagggcagtacaatggaactgctgcaggacgtttctgatgtgactgagcgaagtgagttttggaccctccgcaaaccagaagcactgcctacaaagctcaggtccatgtttagggcgcccgatctgaaacgcatgctcagagtgtgcagagagctcactgatgttcaaagttactgggccatacaggggagtcttactagaagggagcgtagggcctccggtgtacgaaccaggcgttcccaggggagttcggctatggccagtaagatcctgctcaatgtacaggaagaggtgacctgtcccatctgcctggagttgctgacggaaccattgagcctggactgcggtcactctctctgtcgcgcctgcatcactgtgtctaacaaggaagctgtgacctccatgggggggaaaagttcctgccccgtctgtggcatcagctacagcttcgaacatctgcaggctaaccaacacctggcgaatattgtcgaaagactcaaagaagtcaagctttcccccgataatgggaaaaaacgtgatttatgtgaccatcatggtgagaaactgttacttttctgcaaggaagatagaaaggttatatgctggctgtgcgaaaggtcccaggaacacaggggacatcatactgtgctgactgaggaagttttcaaagagtgccaggagaaactgcaggcggtgcttaagcggctgaaaaaggaggaagaagaagcggagaaactggaggccgatataagggaggagaagacctcatggaagtatcaggtccagaccgagagacagcgtatccagacagagttcgaccagcttcgaagcatcctcaataacgaggaacagcgggaactgcagcgcctggaggaggaggagaagaagactcttgacaagttcgctgaagcggaagacgagttagtacagcaaaagcagctagtaagggagttgatctcagacgtggagtgtcgatcacagtggagcacaatggagcttcttcaggatatgtcgggcatcatgaagtggtccgagatttggcggctgaaaaagccaaaaatggtgtccaaaaagctgaaaaccgtttttcatgccccagatctcagcagaatgttacagatgtttcgcgagctgactgccgtccgctgctattgggtcgatgtcaccctcaattccgtaaaccttaatctgaacctggtgctcagcgaggatcagagacaggtgatcagcgtgcccatctggccctttcagtgctataattatggggtgctggggtctcaatattttagctcaggtaaacattattgggaggtagatgtcagcaagaaaacagcctggattttaggagtttactgcagaacgtattcccggcatatgaaatacgtggtccggcgttgcgccaaccggcaaaatctgtacaccaaatatcgcccgctgttcggctactgggtaattggcctccagaataagtgcaagtacggtgttttcgaagaaagtctcagttctgacccagaagtgctgacgctgtcaatggcagtccctccctgccgtgtgggtgtgtttctggattatgaggcgggaattgtttctttctttaatgttactagccatggctctctgatctacaagttcagcaagtgttgtttctctcagcctgtgtatccctattttaacccctggaactgccctgcaccgatgacgctgtgtcccccctcgtcctag

SEQ ID NO: 14897 - DNA, 1497 bp, synthetic construct
  source 1..1497: mol_type = other DNA; note = Synthetic coding sequence
atgaacggggcgctcgaccatagcgaccaacccgaccccgatgccatcaagatgttcgtgggccagatccccaggtcctggagcgagaaggagttgaaggaactatttgaaccttacggcgccgtatatcagattaacgtactcagagaccgtagtcagaatcccccccagtccaaggggtgttgtttcgtgaccttttacacacgcaaggcggccctcgaggcgcagaatgccttgcacaacataaaaacattgccgggtatgcaccaccccatccagatgaaacctgccgacagcgagaagagcaacgccgtcgaagatcgtaagctatttatcggaatggtaagtaagaagtgcaacgagaacgacatacgagtgatgttcagccctttcggccaaatcgaggaatgccgaatcctgaggggccctgacggactgagccggggctgtgcgtttgtcacattctccacccgggcgatggcccagaacgctattaaagctatgcaccaatcccaaactatggagggctgtagcagccccattgtagtcaagtttgccgatacccaaaaggacaaagaacaacggcggctacagcagcagctggctcagcaaatgcagcaactgaacaccgccacttggggcaacctgacgggtcttggcggtctcacaccccagtatctagcccttctccaacaggccacatctagctcgaacctaggcgcctttagtgggattcaacagatggccggtatgaatgctctgcagctccaaaacctggcaacattagccgccgctgccgcagcagcccagacctctgccactagcacgaacgctaaccctctcagtaccacgtcaagcgccctgggtgctctcactagccccgtggccgcctctacgcctaattcaacagctggcgccgccatgaactcgctgacttctctgggaacgctacaaggcctggctggggctacagttggcctgaacaacattaatgcgctcgctgcccctcggagtaagcgcttactgttgcctaaggataacaacggcatggcagcgctgaacggaggattaggggccaccgggctgaccaacggcaccgctggcaccatggacgcgctgacacaggcgtacagtgggattcagcagtatgctgctgcagcgttgcctactctgtattcacaatcactcctacagcagcagagtgcggctgggagccagaaagaaggacctgaaggagctaaccttttcatatatcacctgccccaggagttcggagatcaggatatcctgcagatgttcatgccattcgggaacgtgatatctgcaaaggtgttcatcgataaacagaccaatttgagcaaatgtttcggcttcgtgtcatatgacaatcctgtgagcgcgcaggccgccattcaggcgatgaatgggttccagatcgggatgaagcgcctcaaggtgcagctgaaaagatctaagaacgattctaaaccttactag

SEQ ID NO: 14898 - DNA, 2580 bp, synthetic construct
  source 1..2580: mol_type = other DNA; note = Synthetic coding sequence
atgctagaagtcctggaagagatctggagtgtgcgagccaggagggcccatcgtccctgtccggggccgtccctggctgacgacaccgatgctaattccaacgggagttccggcaacgagagcaacgggcatgaatcccgtggagccagtcagcggagtagccatagttcttcatcaggtaacggcaaggactcagccctcctcgaaacgactgagtcaagcaagagcactaatagccagtccccctcaccgcctagctcctcaatcgcgtattctctcctgtcggctagttcagagcaggacaacccaagcactagtggatgtagttcggaacaatccgctcgagctaggacccagaaggagctgatgactgcactgagagaactgaagcttcgattacccccggagcgtcgtggtaagggtcggtcaggaacgctcgcgacactgcaatatgcacttgcctgtgtgaaacaggtgcaagccaaccaggaatattatcagcagtggtctcttgaggagggagagccatgttccatggatatgagtacttataccctggaggagctggaacacattaccagtgagtacacattacagaatcaggatactttctcagtcgccgtgtcctttctcaccgggcgtattgtctacatcagtgaacaggccgcagtccttctgcgatgtaagcgagacgtcttcagaggcacacgattttctgaactgttagccccacaggacgtcggagtgttttacgggtctactgccccctctcgcctgccaacctggggtacgggggcaagcgccggaagcggcctgcgagactttactcaagagaaatccgtgttttgtcggatccgaggtgggcctgatagagacccaggaccaaggtaccagccatttcggctgactccatatgtgacaaagatcagagtatcagatggagctcccgcccagccgtgctgtctcctgattgccgagaggattcacagtggttacgaggcccctcggataccccctgacaaacgaatatttaccacgcgacatacacctagctgtctcttccaagacgtcgacgagagagccgctccacttttgggttacctgcctcaagatcttttgggtgcaccagtgttactgttcctgcacccagaggatcgcccactcatgctggctatccacaagaaaattttacaactagcaggccagcccttcgaccatagcccgataagattttgtgcacggaacggagaatatgtgaccatggatacctcatgggcaggttttgtccacccttggtcgcgcaaggtagcgttcgttctcggccgccataaagttcgaacagccccactgaatgaggacgtgtttacacctccagcgccaagccccgccccatcactcgatactgatattcaggagctgagcgagcaaattcaccgactgctgttgcagccggtacactctccaagccctaccgggctgtgcggagtaggggccgtcacctcacccggacctctacacagccccggcagttctagtgacagcaatggcggcgacgcagaaggacctggtcctccagcccccgtcacattccagcagatctgtaaagatgtgcacctggtgaaacatcagggccagcagctgtttattgagtctagggcgcgaccccagtcacgcccccgacttcccgctactgggaccttcaaggcaaaagcacttccgtgccagtcacctgaccccgaactcgaagctggtagcgcccctgtgcaggcacctctcgccttagtaccagaggaggccgaacggaaggaagcttcgtcttgttcttaccaacagataaactgcctggatagcatccttcggtatcttgaatcgtgtaacctcccgtctaccaccaaacggaaatgtgcaagcagctcatcttacactaccagcagtgccagtgacgatgacaggcaacgtactggtcccgtgagtgtgggcactaaaaaagaccctcctagcgccgccctgagtggggaaggcgccaccccaagaaaggagcctgtagttggcgggactctatcccctctggccctggccaacaaagccgagagtgtggttagcgtgacttcacagtgttcattttcaagcactatcgtgcacgtcggcgataagaagcctccggaatcggacataatcatgatggaggatttacccggtctcgcccccggaccggccccttcacccgcacctagcccaaccgtggcaccagatcctgcacctgatgcctacaggccagtcggactcaccaaggccgtgttgagtctgcacacacagaaggaagaacaggcctttctctcacgattccgggacctgggacggctgagagggttagatagtagttcaactgcaccgagcgcactgggcgagcggggctcccaccttggacctccaggcgcctgcccacttccctctttaggtttagactgctggggcgtgggcctgaagggtggcgtgtcggcgcccggtactcaagcaggcgttgccagcaccacacgtccgtgcctcggcacaggcccttctttagcctccccgcactag

SEQ ID NO: 14899 - DNA, 1266 bp, synthetic construct
  source 1..1266: mol_type = other DNA; note = Synthetic coding sequence
atggctagtagcagcgtcccacctgccactgtgtcagctgctaccgcgggccctggtcccggattcggtttcgcatcaaagactaagaagaagcatttcgttcagcagaaagtaaaagtgttcagagcggccgatccgctggtgggcgttttcttatggggagtggcccactccataaatgaattatcccaagtcccgcctcccgtaatgctgcttccggatgattttaaggcatctagcaagatcaaagtcaacaaccatttgttccaccgagagaaccttccctcacactttaaattcaaagagtattgtccacaagtgttccgcaatttgagggatcggttcggcatcgatgatcaggattacctcgtgagtctcactaggaacccaccctctgagtctgaaggctccgatggccgattcctgatatcttacgaccggaccctggtcatcaaagaggtttcaagtgaagacatcgccgacatgcattccaatctgtctaactatcatcagtatatagtgaaatgccatggcaatactctcttgcctcagtttctgggaatgtatcgcgtcagcgttgacaacgaggattcttacatgcttgttatgaggaatatgttctcccaccgactcccagtccacaggaaatatgacctgaaggggagtctggtctcgagagaggcctcggacaaggaaaaagtgaaagaactcccaaccctgaaggacatggatttcctcaacaagaaccagaaggtctacattggggaggaagagaagaaaatcttcttggaaaagcttaagcgcgatgtggaatttttggtgcagctgaaaatcatggattacagtctcctgttaggaatccatgatatcatccgaggctctgagcccgaggaggaagcccctgtgagagaagatgagagcgaagtggacggtgattgttcattaacagggccacctgcactggtcgggtcttatggcaccagccccgaaggaattgggggatatatacacagccaccggcccctgggaccaggggaatttgagagctttattgacgtctacgcaatccgatcggccgagggcgcccctcaaaaggaagtgtacttcatgggtctcatcgacattttaacacagtacgacgccaaaaaaaaagctgcacatgcagcaaaaaccgtgaagcacggcgcaggcgcagagatatctaccgttcacccggaacagtacgcaaagcgtttcctggattttattaccaacatctttgcatag

SEQ ID NO: 14900 - DNA, 2031 bp, synthetic construct
  source 1..2031: mol_type = other DNA; note = Synthetic coding sequence
atggccgccgccacaggagatcccggcctaagcaagctccagtttgcacctttttcctccgcactggacgttggcttttggcatgagctcacccaaaagaaactaaacgaatatcgtctcgatgaagcacccaaggacatcaagggttactactacaatggagactccgctgggctccccgctcggctgactctggaattctctgcgttcgacatgtcagcgcctacccccgcaaggtgttgccccgccatagggactctctataataccaacactctggaatctttcaagacggccgacaagaagctgctgttggagcaggctgctaacgagatctgggagtctatcaaaagcggcaccgctctcgaaaatcctgttctgctcaataaatttcttttgctgacatttgcggatctgaagaaataccacttttactattggttttgctacccggcgctatgtttgcccgaaagcctgcccctgattcagggacctgtgggtttagatcagagattttccctcaagcaaatcgaggccctggaatgcgcatatgacaacctttgccagacagagggtgtcaccgcgctgccctattttttgatcaagtacgatgagaacatggtgcttgtaagtctcctcaaacattatagcgattttttccaaggccagaggaccaagatcactatcggcgtgtatgatccctgcaatctcgcacaataccccgggtggcccctgcgtaactttctcgtcctggccgcacaccgctggtctagtagttttcagtctgtggaagttgtctgcttccgtgaccggaccatgcagggcgcccgagatgtggctcatagcattatctttgaggttaagctgccagaaatggccttcagccctgactgccctaaagcagttggttgggaaaagaatcaaaagggtggaatgggtccacgcatggtcaatctgagtgagtgtatggacccaaaacgtttagctgagagcagcgtggacttgaatctgaagctgatgtgttggcggctcgtccccacccttgacctagacaaggttgtgagtgttaaatgcctcctgctgggcgcgggcaccctggggtgtaacgtagcacggacgctgatgggctggggagttagacacattacctttgtcgacaacgctaaaatctcatacagcaaccccgtacggcagcctctatacgagttcgaagattgcctcggcggtggcaagccaaaggctctagccgcagcagaccggctgcagaaaatcttccccggcgtgaacgcccgcggattcaatatgtctatccccatgccaggacaccccgtgaacttctccagcgtcaccctggaacaggctagacgcgacgtcgagcagcttgaacaacttattgagtcccacgacgtggtgtttctgctaatggacactcgagagagtagatggctgccagctgtgattgcggcgtccaaaaggaaattggtgatcaacgccgccctagggtttgacacttttgttgtgatgcgacacggactgaagaaaccgaaacaacagggcgcaggagacctgtgccccaatcaccccgtggccagcgccgaccttttggggagcagcctgtttgccaatattccaggctataaactaggttgctacttctgtaacgatgttgttgctcccggagatagcacccgggacagaactctggaccagcagtgtacagttagtcgcccaggactggccgtcatcgcgggagctttagccgtggagcttatggtctcagtgctccagcatcctgagggagggtatgctattgccagttcatcagacgacagaatgaacgagcctcctacaagcctgggactggtcccccaccaagtgctggatcagtacgagcgcgagggatttaacttcctggccaaagtgttcaacagttctcacagttttctagaggatctgacaggccttaccctgttgcaccaggaaactcaggccgcagagatatgggacatgtctgacgacgagacaatctag

SEQ ID NO: 14901 - DNA, 1329 bp, synthetic construct
  source 1..1329: mol_type = other DNA; note = Synthetic coding sequence
atggccagtgatggtgcttcggctctacctggacccgatatgagcatgaagccgtcggctgctccaagccctagtcctgcccttccgttcctgccccccacctcagaccctccggatcaccccccacgggagcctccccctcagcccataatgccctccgtgttttcaccagacaacccactgatgctgtctgcctttcctagctctttgctggtgaccggggacggtggaccatgcctgtccggtgccggggccgggaaggtcattgtgaaggtaaaaaccgaaggtgggagcgcagaaccttcacagacccaaaacttcattctgactcagaccgccctgaacagcaccgctccgggcaccccctgcggcggcctcgagggtcccgcgcctccattcgtcaccgcttccaatgttaagactatcctgccaagcaaagctgtcggggtctctcaagagggcccccccggactgcctccccagccacccccaccagtggctcagctggtcccaatagtgccacttgagaaagcttggccaggtccccacggcacaacaggtgagggaggccccgtggctactttgagcaagccaagcctcggagatcgtagcaagatcagcaaagacgtgtatgagaactttagacagtggcagaggtacaaagcccttgcacgacgtcacctctcccagtctcccgacacagaagcagtgaaggaatacgtggatatcatggaatggcttgtgggaacacacctcgccactggagagagcgatgggaagcaggaggaagagggacagcagcaggaagaagaaggcatgtacccagaccctggcctgttgtcatatatcaatgaattatgtagtcagaaggtttttgtaagcaaggtcgaggctgtgatccacccccagttcctggccgacttgctgtctcctgaaaaacagcgggaccccctagccctgatagaggagctggagcaggaagaggggctgacactagcccaactagttcagaagcggctcatggcgctggaggaggaagaggatgccgaagccccgccctcattctcaggtgctcagctggattcatctcctagtggaagcgttgaagacgaggacggggacgggcggctgcggccttcaccgggtctgcagggagcgggaggagccgcctgcctggggaaagtcagttcttcagggaaaagagctagggaagtgcatggaggacaagaacaggctctggactcgccacgcgggatgcaccgtgacggcaatacactgccctctcccagctcatgggacctcccgacaaatggcgaaagccagtgttag

SEQ ID NO: 14902 - DNA, 666 bp, synthetic construct
  source 1..666: mol_type = other DNA; note = Synthetic coding sequence
atgcaggtccaggatgacggggtcaacctgattccctttgccaagtgctcaagggtggttagccgcagccctcccccccgcctgccaagtcaaagccttaggcctatgccccagcgctacggggacgtgttttggaagaatctgaaccagcgacccacacctacctggctggaggagcaacatattccaccgatgctgttacctcctcccgagatgctgtggcgtaggaagaagagaagaccatgcctggagggaatgcagcaacagggtctggggggtgtgcctgctcgagtgcgagctgttacctatcaccttgaagacctaaggcggaggcaatccataataaacgagctgaaaaaagctcaatggggctccagtggggctgcctcggaacctgtcgtgctcggagaggaggggtgtggctttccctcaactaatgaataccccgatctggaagaagagcgcgctacatacccgcaagaggaggatcgttttctgacacctggaagagctcagctgttgtggtctccatggtcacccctggatcaggaggaggcatgcgcttccagacagctgcattctctggcctccttttccacagtaactgcaagacgcaatccccttcataacccatggggaatggagctcgccgcttcagaggaatag

SEQ ID NO: 14903 - DNA, 480 bp, synthetic construct
  source 1..480: mol_type = other DNA; note = Synthetic coding sequence
atgcagagggtgggtaacacattctcgaatgaatcccgcgtcgcgtctcgatgcccttctgtgggattagcggagcgaaatagggttgccactatgcccgtgcggctcctgcgagactcccctgcagctcaggaggacaacgaccacgctagggacggcttccagatgaagctggatgcccacggctttgcaccagaggagctcgtggtgcaggttgacggccagtggctgatggtcactggccagcagcaactggatgtgagggacccagagcgggtaagctatagaatgtcccaaaaggtccaccggaaaatgttgccgagtaatctttctccgaccgctatgacatgttgccttacgccctcagggcagttgtgggtgagggggcagtgcgttgctttggctctgcccgaggcacagaccggtcccagcccacgactgggtagcctcggttcaaaagcatctaacctgacacgatag

SEQ ID NO: 14904 - DNA, 1782 bp, synthetic construct
  source 1..1782: mol_type = other DNA; note = Synthetic coding sequence
atggagaaactgtcagccttacaggagcagaaaggggagcttcggaagcgcctgagttatacaacacacaagttggagaaactagagacagagtttgactccactcgccactatttagaaattgagctgcggcgcgcgcaggaggagctcgagaaagttacagaaaagcttcgccgaattcagagcaattacatggcactgcaacggatcaatcaggagctggaagataaactgtatagaatgggtcagcactatgaagaggagaagagggccctgtcgcatgagattgttgctctaaatagtcatctgcttgaagccaaagtaaccatcgacaagctgtcggaagataatgaactttacagaaaggactgcaatctagccgcccaactgctccagtgttctcagacctacggaagagtacacaaagtctctgagctgccatctgactttcaagagagagtgagcttacatatggagaaacacggatgctctttgccatcccctctatgtcaccccgcttatgcggacagtgtgcccacctgcgtgattgccaaggtgctcgagaagcccgatcccgctagccttagcagccgcctgtctgatgcatctgcccgtgatctggccttttgcgatggagtcgaaaagccaggccccaggcctccatacaagggcgacatctactgctcagataccgcgctgtactgtcctgaggaacgccggcgtgacagaagacccagcgtggacgcccctgtaaccgacgtgggattccttcgtgcgcaaaatagtacggattcagccgctgaagaggaggaggaggccgaggcggcagcttttccggccggttttcagcatgaagctttcccctcatacgctggatcactccccacctcctcctcatatagttcgttctccgcgacaagcgaggagaaagaacacgcacaggcatccacgctgacagcctctcaacaggccatatatctgaacagcagggacgagctgtttgatcgcaagccccctgcaacaacgtacgagggtagcccgcggtttgctaaagccaccgctgctgttgccgccccgttggaagcagaagtcgctcccggcttcggacgtaccatgtctccatatccggccgaaacatttcgcttcccagcctcccccggcccacagcaggcattgatgcctccaaacttgtggtctctacgcgccaaaccagggaccgccaggctaccaggtgaagacatgcgcgggcagtggagaccccttagcgtcgaagacattggcgcttactcctaccccgtgtccgctgctggcagagcttccccctgcagcttcagtgaacgttactatggtggggctgggggtagtcctgggaaaaaagccgacggcagagcaagcccactttacgcttcttataaggctgacagctttagcgagggggatgacctgtcacaggggcatcttgccgagccttgctttctgcgcgcaggaggggacctgagcctttctcctggtaggtctgcagatccgctgccgggctacgcccccagcgagggtggtgatggcgaccgcctcggagtccagctatgcggcacggcctcaagccccgaacccgagcagggatctagagactctctcgaaccgagcagtatggaggctagtcctgagatgcatcctgcagccaggctgtccccccagcaggctttcccacggaccggcggcagcggtttgtctaggaaggacagcttaacaaaggctcagctttatgggactcttctgaactag

SEQ ID NO: 14905 - DNA, 2610 bp, synthetic construct
  source 1..2610: mol_type = other DNA; note = Synthetic coding sequence
atgggcaatcgtgagatggaggagcttattccactagtgaatcggcttcaagacgccttctctgcactggggcagagctgtctgttggagctgccgcagatcgctgtggtcggtggacagagtgcagggaaatcgtctgtgctcgagaactttgtgggcagagatttcctccctcgtggctctgggatcgtgaccaggcgcccgctagttttgcagctagtgacttctaaagctgagtacgctgagtttctgcactgcaaaggcaaaaaatttacagatttcgatgaggtacgcctagagatcgaggccgagacagaccgtgtgaccggaatgaacaagggcatctcctcaatccccatcaacttaagggtctatagtcctcacgtccttaatctgactttgatcgatctccccggtattaccaaggtgcccgtgggagatcagccccctgatatcgaatatcagattcgcgagatgattatgcagtttatcacccgagaaaactgtctgattttggcggtcacaccagctaatacagacctcgccaactcagatgcattaaagctggccaaagaggtggaccctcaaggtttacgtacgatcggcgtgattacaaagttggatttgatggatgagggtacagatgccagagatgtcctggaaaacaagctgctgccattaagacgcggctacgttggcgtggtcaatcggagtcagaaggacatagatgggaagaaggatatcaaggcggctatgctggctgaacgtaaattctttctcagtcatccagcttatcgccacatcgcggacagaatggggaccccgcacttacagaaagtgcttaaccaacagctcacaaatcatattagagatacactgcccaatttccggaataagctacagggtcaactattgtctattgaacatgaggtggaagcctacaagaattttaaacctgaagatcccaccagaaaaactaaggcactccttcaaatggttcaacagtttgcggttgatttcgaaaaaaggattgagggctctggagatcaggtcgacacccttgagttgtcaggaggggccaaaatcaatagaatttttcatgagcggttcccattcgagatcgttaaaatggagttcaacgaaaaggaactgcgcagggaaatcagctacgccatcaaaaatatccatggcatccggactggcctgttcacccctgatatggccttcgaagcaattgtcaagaaacagatcgtaaagcttaagggacctagcttaaagagcgtcgatctcgtcatccaagagcttatcaacacagtgaagaagtgtacgaagaaattggctaacttcccaagattatgcgaggagaccgaaaggatagtggccaaccatatccgcgagcgcgaaggcaagacaaaagatcaagtgcttctgctgatagatattcaggtgagctacattaatacaaaccatgaagattttatcggatttgccaacgcccaacagagatcttcgcaggtacacaaaaagaccaccgtagggaaccagggcacgaacctgccaccctctaggcagatcgtaattcgaaaaggctggttgactattagcaacattggaatcatgaagggaggcagtaagggatactggttcgtcctgactgcggaatccctgtcatggtacaaggacgatgaggagaaggagaagaaatacatgctcccgctggacaacctgaaggtgagggacgtggagaagagcttcatgtccagtaaacacatcttcgcactgttcaatactgaacagaggaatgtctacaaagactatcggttcctggagctggcttgtgatagtcaggaggatgtcgactcttggaaggccagcctgctccgcgccggggtgtatcctgacaaatccgtggctgaaaatgacgaaaatggccaggccgaaaattttagcatggaccctcagctggagcgtcaagtggagacgatacgaaatctggtcgactcttacatgtccataatcaataagtgtattcgagacctgatcccaaagacaatcatgcacctgatgatcaacaacgtcaaagattttataaattccgagttgctcgctcaactctatagttctgaagaccagaatacactgatggaggagtctgcagagcaagcacagcggcgggatgagatgctacgcatgtatcaggccctaaaggaagcgctcgggattatcggagatatcagtaccgctacagtcagcacacctgccccaccccccgtggacgactcgtggattcagcacagcaggcgcagcccgcctccatcccctacaacacagcggagaccgacgctgtcggcccctctggcgcgccccacaagcggcagaggtcctgctccggcaattccaagcccaggtcctcactctggcgcccccccagtccccttcaggccagggcccttgcccccttttccttcgtcttcagattcatttggcgcgcctcctcaagtaccctcccggccaaccagggctccccctagcgtgccttctcgtaggccccccccgtcaccaactaggccgaccattattaggccacttgagtcaagcctgctggactag

SEQ ID NO: 14906 - DNA, 1896 bp, synthetic construct
  source 1..1896: mol_type = other DNA; note = Synthetic coding sequence
atgaacagctcagatgaagaaaagcagctgcagcttattacttcactgaaggaacaggcaataggagaatacgaggatctgagagccgagaaccagaaaaccaaagagaagtgcgacaaaatcagacaagagcgagatgaggctgtgaagaagctcgaggaattccagaaaataagccatatggtgatagaggaagtcaactttatgcaaaatcatctggagattgaaaaaacgtgccgcgaatccgctgaagctctggcaacaaagcttaataaagagaataagacattgaaacgtataagcatgctgtacatggcaaagctgggccctgatgttattactgaagaaataaatatagatgatgaggactcaacgactgacactgatggagcagctgagacctgtgtcagcgtgcaatgccagaaacaaattaaagagctccgggatcagatcgtgtctgtacaggaggagaagaaaattctggccatcgaactggaaaacctaaagtccaaactagtcgaggtgatagaggaggtgaataaggtgaaacaggagaagaccgtgctgaacagtgaggttctcgaacagcgtaaggtcctagaaaagtgtaatcgggtctcgatgctggccgtcgaggagtacgaggaaatgcaggtcaatctggagttggagaaagaccttagaaaaaaggcggagtcatttgcccaggagatgtttatagagcagaataaacttaaacggcagtcacacctcttactgcaaagcagcatacctgaccagcagctactcaaggcattagatgagaacgcgaaattgactcagcagctcgaggaggagcgcattcagcaccagcagaaggtgaaggagctagaggaacagctcgagaacgagactcttcacaaagaaattcacaatctcaaacagcaattggagctgctggaggaggataaaaaagagttagagctcaaatatcagaactccgaggagaaagcccggaaccttaaacatagcgtggacgagctgcagaaaagagttaaccagtcagagaactccgtaccacctccaccccctccacccccacctctgccaccgccgcctcccaatccaatccggagtctcatgagcatgatacggaagcgctcacaccccagtggcagcggggcgaaaaaagaaaaggcgacccagccggaaacgaccgaagaagtcacggacctcaagagacaggccgtggaagagatgatggatagaatcaagaagggagttcatctgcggccggttaaccagaccgccaggccaaagacaaaaccagagtcatccaagggttgcgagtcagccgtcgatgaactgaaaggaatcctggggacccttaataagagcaccagctcccgcagcctgaaatctctggaccccgagaattccgaaacagagctggagcgcattttgaggagaaggaaggttactgccgaggccgacagctcctccccaaccggaatcctcgcaacatctgaaagcaaatcaatgcccgtgctcggctcagtgtcctcagtaaccaagaccgccctgaacaaaaagactttagaagcagagttcaattcgccatccccccccacccccgagccgggagagggccctcgaaaactggagggatgcacctcctccaaggtgacttttcagcccccttctagtattggctgccggaagaagtacatcgacggagaaaagcaggctgagcccgtcgtggtccttgatccagtcagtacccacgagccccagacaaaagaccaggtggctgaaaaagatcctactcaacacaaagaagacgagggcgaaattcagcccgaaaataaagaagacagcattgagaacgtgcgggagactgactcctcaaactgttag

SEQ ID NO: 14907 - DNA, 1701 bp, synthetic construct
  source 1..1701: mol_type = other DNA; note = Synthetic coding sequence
atggatctgcatcgggcagcatttaagatggagaactctagttacctcccgaaccccctcgctagcccggccctcatggtgctggcctcgaccgcggaggcttcacgggacgcctctataccctgccagcagcctcgcccctttggcgtgcccgtgtccgtggacaaagacgtgcatattccctttaccaatggctcctatacctttgcctccatgtaccataggcagggcggcgttcccggcacattcgccaatcgtgattttccaccctctctgctacacctgcacccccagttcgcccctccaaatctcgattgcactcctatctctatgttgaatcactccggagtgggggccttccgtccctttgcatccacggaggatagggaaagttatcagtcagctttcaccccagcgaagaggctcaaaaattgccacgacacagagtctccccatctgcggtttagcgacgcagatgggaaagagtatgatttcggcacccagctgccctcctccagtcccggctctctcaaggtggacgacactggaaagaagatattcgctgtcagcggattaatctcagaccgggaagcatctagcagcccagaagatcggaacgatcgatgcaaaaagaaagccgccgcgttatttgactctcaggcaccaatttgccccatctgccaggtcttattgcgaccctctgaactgcaggaacatatggaacaggagcttgaacaattggcccagctcccgtcgtctaagaacagccttttgaaagacgcaatggcgccgggcactcccaagtctctgcttcttagcgcaagtatcaagcgggagggagagtctcctaccgcttccccacactcctccgcaaccgacgatctgcaccactccgatcggtaccagaccttcttgagggtcagggccaaccggcagacaaggctcaatgcccgcatcggtaaaatgaagcggcggaagcaagacgagggtcagcgggaaggctcatgcatggccgaagatgacgccgtggacattgagcatgaaaacaataacagattcgaggaatatgagtggtgtggacagaaaagaatacgggctacaactctgctcgagggtgggttccgagggtctggattcattatgtgctccggcaaggaaaaccctgattcagacgccgacttagacgtagatggagatgataccctggagtacggcaaaccacagtataccgaagccgatgtgatcccctgtacaggggaagaacctggcgaggccaaagagcgcgaggcgctcagaggcgcagtgttgaatggcgggcccccctcaacacggatcactccagaattctcaaaatgggccagcgatgagatgccaagcacatcgaatggagaatcatcaaaacaggaagcaatgcaaaagacctgcaaaaactctgatatcgaaaaaattactgaagatagcgccgtcacaacttttgaagcccttaaagcgcgggtgagagagcttgaacgacagttgtccagaggcgaccgttataagtgcctgatttgcatggattcctacagcatgcccctgacatcgatccagtgttggcatgtgcattgtgaagagtgctggctgcgcaccctcggagccaaaaaactgtgtcctcaatgtaacacaataaccgcgccgggagacttaaggcggatttatctctag

SEQ ID NO: 14908 - DNA, 1071 bp, synthetic construct
  source 1..1071: mol_type = other DNA; note = Synthetic coding sequence
atgttgtctgctatcacgaacgtggttcagaacacaggcaaatccgtcctgacaggcggtctagatgcccttgaatttattggaaagaagacaatgaatgtgctagccgaaagtgatccaggcttcaagcggactaaaactctgatggagcggaccgtcagtttgtctcagatgcttcgcgaagcaaaggagaaagagaagcagaggttagcccagcaactaaccatggagcggacagctcactatggcatgctctttgacgaatatcaggggttgtcgcatttggaagccctagaaattctgagcaatgagagcgaatccaaagtgcagagcttcctggcttcgcttgacggtgagaaactcgaattgctgaagaatgatctgattagtatcaaggatatttttgccgccaaggagctggaaaacgaggagaatcaggaggaacagggtctagaggagaaaggtgaagagtttgcaaggatgctcaccgaattactgtttgagttacatgtggctgcaacgccagacaaactcaacaaagccatgaaaagggcgcatgattgggtcgaggaagaccagactgtagtgtctgtggacgtcgccaaggttagcgaagaggaaacaaaaaaagaggaaaaagaagagaagagccaggatccccaggaggacaagaaagaagaaaagaaaactaagacgatcgaagaggtgtatatgagctcaatagagtcgctcgcggaagtcactgcccgctgcattgagcaacttcataaagtggctgagttgatcctgcatggccaagaggaagagaaaccggcacaagaccaggccaaagtgctgataaagttgaccacagccatgtgcaacgaggtggcgtccctgtccaaaaagtttacaaattctctcacaaccgtcggctccaataagaaggctgaagttctgaatcccatgatctcatcagtcttattagaggggtgcaattcgacgacttatattcaggacgctttccagctgttgctccccgtgctgcaagtgagccacattcaaacctcgtgccttaaggcccagccttag

SEQ ID NO: 14909 - DNA, 519 bp, synthetic construct
  source 1..519: mol_type = other DNA; note = Synthetic coding sequence
atgtcctacaactgctgctctggcaacttttctagtaggagctgcgggggttatttacattatcctgctagttcttgcggcttcagttatccgagcaatcaggtttatagtaccgatctgtgttccccatctacctgccagcttgggagcagcttatacagggggtgccagcagacttgctgggagcctacatcctgccagacgtcctacgtggagtcaagcccttgccagacatcctgttatcgcccacgcactagcctcttgtgctccccttgccagaccacatattccgggagcttagggttcggatcaagttcttgtcgttctctgggatacgggtcccgatcctgctactcagttggttgtggtagctccgggttccggtccttgggatacggcggctgcggcttccccagcctcggttacggggttggcttctgtcgaccaacctatctggccagtagatcctgtcagtcaagttgttataggcctacctgtggatccgggttttattactag

SEQ ID NO: 14910 - DNA, 2253 bp, synthetic construct
  source 1..2253: mol_type = other DNA; note = Synthetic coding sequence
atggaagacctgttcgagaccttccaagatgagatgggcttctctaatatggaggatgacgggcctgaagaagaggagagggtggccgaaccacaggcaaactttaataccccacaggcacttaggttcgaagagctcctggcaaacctcttgaacgaacagcatcagatcgcgaaagagctgtttgaacagcttaaaatgaaaaagccttctgcaaaacaacaaaaagaagttgagaaggtgaaacctcagtgcaaagaagtccaccagactctaattcttgatccagctcagaggaaacgtttgcagcaacagatgcaacagcacgtacagttattgacccagatacaccttctggctacctgcaaccccaacctgaatcctgaagccagcagcacacggatctgtctgaaagaactcggcactttcgcacagagcagcattgccttgcaccatcaatataaccctaaatttcagaccctgttccaaccatgtaacctaatgggcgccatgcaattaattgaagacttctcaacacatgttagtatcgactgctcacctcataagacagttaagaaaaccgcgaatgaatttccatgtctgcctaaacaggtggcatggatcctcgccacctcgaaagtttttatgtaccccgagctgctacctgtctgtagcctaaaggcaaagaacccacaggataagattctgttcactaaggccgaggacaatttgttggcacttggcttgaagcactttgagggtaccgaattcctcaatcccttgatcagtaaatacctccttacttgtaaaacagcgagacaattgactgtccggataaaaaacctcaacatgaatcgggctccagacaacatcattaagttctacaaaaagacaaagcaactgccggtgctaggcaagtgttgtgaagaaattcagccacatcagtggaagcccccaattgaacgggaggagcaccggctccccttctggttaaaagcttcactcccctcaatccaagaagaacttcgccacatggcagacggcgcgcgggaagtaggaaacatgacaggcacaacggagataaactcggaccaaggactggaaaaggacaactccgaactgggaagcgaaacgaggtatcctctcctcctgcccaagggcgtcgtgctgaagctgaaacccgtcgctgatagattccctaaaaaagcctggcgccaaaagagaagtagtgtgctgaaaccgctgttaattcaaccaagcccttcgctacagccctcatttaaccctgggaagacacctgctcagtctactcatagtgaggcgcctccttcgaagatggttctgaggatcccccacccgattcagcctgctacggtgctacaaacggtcccaggcgtgccaccgctgggcgtatcaggaggcgagagttttgagagcccagcagcactcccagccatgccgccagaagctagaacaagcttccccctttcagagagccagaccctcctgagtagcgccccggtccctaaggtaatgatgcctagtccagcgtcatccatgttccgcaagccatacgtgcgacgaagacccagtaaaaggcggggggcacgggcatttaggtgcatcaagccagcgcctgtaatccatcccgcttcggtcatctttaccgtgcccgctaccaccgttaaaatcgtgagcctgggcggaggctgtaatatgatacagcccgttaatgccgctgtggctcagtctcctcagacgatacccatcgcgaccctgctggtcaatccaacaagcttcccctgtcctctgaaccaaccactggtcgccagttctgttagtcccctgatagtcagcgggaattcggtcaacctccctatcccgtctacccctgaagacaaagcacacatgaatgtggatattgcctgtgcggtggcagatggagagaacgctttccagggcctagagcccaaattggaaccccaagagctgagtccgctgtctgcgacagtgtttcctaaggtcgaacattcccctgggcctcctcccgttgataaacaatgtcaggagggcctgagcgaaaacagtgcttataggtggaccgtggtgaaaacagaggaggggagacaggctcttgaacccttgcctcagggtattcaggaatctctaaataactcttcccccggggatcttgaggaggtcgtgaaaatggagccagaggatgctactgaggaaatctcaggctttctgtag

SEQ ID NO: 14911 - DNA, 888 bp, synthetic construct
  source 1..888: mol_type = other DNA; note = Synthetic coding sequence
atggagctcattcaagacacctctcgcccaccactggaatatgttaagggcgttcccctaataaagtacttcgcagaggctctggggccacttcagagcttccaagcccgacccgacgatctgctgatcaatacatatccgaaaagtggaacaacatgggtgtcccagattttagacatgatttatcagggcggcgatctagagaagtgtaatagagccccgatctatgtgcgagtcccttttcttgaggtcaatgatcccggcgagccttcaggtctggagacccttaaagacaccccgccccccaggctgatcaagagtcacctgccgctcgcacttctcccgcaaacattgctggaccagaaagtgaaagtggtgtatgtcgctagaaacccaaaggacgtcgccgtatcttattatcattttcaccggatggagaaagcgcatccagagcccggaacatgggacagcttcctggagaagttcatggctggggaggttagttacgggagctggtatcaacacgtccaggaatggtgggagttatcgagaactcatcctgttttatacctattctacgaggacatgaaggaaaaccccaagagagagattcagaagatactcgaattcgtcggtcgctccctgccggaagaaactatggatttcatggtgcaacacactagcttcaaagagatgaaaaagaacccaatgaccaattacactactgtcccgcaggagctcatggaccactccatctctcccttcatgaggaaaggaatggctggggactggaagaccacttttacagtcgcgcaaaacgagcggttcgatgctgactacgccgaaaaaatggccgggtgtagcttgtctttcagaagcgagctatag

SEQ ID NO: 14912 - DNA, 1476 bp, synthetic construct
  source 1..1476: mol_type = other DNA; note = Synthetic coding sequence
atggacaccaagggttgtaccacgacaaattcccctagtacaccctgtcaaaactgctccaggatcacgaacgtgtcaactatctcaagtaataatggatgccaccctggagggctgactgttaacaattgccaaccggctggtcacgttctgaggatcccatgggatcagggttgccaacccacaccccgcttctgccgtaagcccatctacctcatgaataatttcaatgctcgctttagtttagatgattgtagctggtatggcgaaggcattaactctaatgaaaaggaaacgatgcagatactgaacgagagactcgcgaattacctccaaaaagtcagaatgctggaaagggagaacgcggagttagaatccaaaatccaagaggagagcaataaggaactccctgttttatgtcccgattacctctcatactacaccaccatcgaagagcttcagcaaaagattctgtgtaccaaggcggagaattcacggcttgtctcccagatcgataatactaagcttaccgctgatgatctccgcgcaaaatatgaagcagaggtgagcctgcggcagctggtcgagtcagacgcaaatggtctgaaacagatattaaacgtgctcactctcggtaaggccgacttagaagcccaggtgcagagcctgaaggaagagctcctgtgcttaaaaaataatcacaaagaagagatcaattctctgcagtgccagttgggggagcgcctggacatcgaagtgacagcagctcctagtgcagatctgaatcaggtgcttcaggagatgcggtgccaatatgagccaattatggaaacgaatagaaaggatgttgagcagtggttcaatacccagatcgaggaattgaatcaacaggtagtcacttcttctcagcaacagcagtgctgtcagaaagagatcatcgagctgagaagatcagtgaacacactggaggtggagttacaggcccagcatagaatgcgggatagccaagaatgcatccttacagagacagaggcacgatacactgcgttactaacgcagatccagtccctgattgataatcttgaggcccagctggccgagatacgctgcgcactcgagcgccaaaaccaggagtacgaaattctgcttgacgtgaaatcgcgactcgaatgcgaaataaccacctatcggtctttgctcgagtccagtgacggaaagaggccatgctacccaagagcaaccaagtgcgaaccctcaccttggacatcctgcaaatctggtgctatcgaaagcactgctccagcctgtacaagcagctctccgtgctcactaaaagaacattgcagtgcgtgcggcccgctctctagaattctggtcaagatttgtactataacaaaagagatcaaagatgggaaagtgatcagctcatacgagcatgtgcagccttgctttatcatccggcctgctaaggtttag

SEQ ID NO: 14913 - DNA, 1287 bp, synthetic construct
  source 1..1287: mol_type = other DNA; note = Synthetic coding sequence
atgaagcggggagggcgtgacagtgatcgcaactcaagcgaggaagggacagcggaaaagtcaaagaaactccggaccacaaacgagcactcacagacctgcgactgggggaacctacttcaggatattattctgcaggtgtttaaatacctgccgttgctggatagagcacacgcctcccaggtgtgtaggaactggaatcaggttttccacatgccagacctctggcgctgttttgagtttgagctcaatcagccagccacttcttacctgaaggctacacatcctgagttaatcaagcagattatcaaacggcattccaaccaccttcaatacgtcagtttcaaggtcgactcatctaaagagtcagcagaagccgcctgtgacatactgagccaactagtcaattgcagcctgaaaaccttaggccttatttcgaccgcgcggccgagctttatggatttgccgaaatcacattttatcagtgcacttacagtggtattcgttaacagcaaatctttatcctctctgaagatagacgacacccctgtagatgatcccagtctgaaagtactcgtcgccaataatagcgataccctgaagctgctgaagatgagctcttgtccccatgtcagtccagctggaattctgtgcgtcgcagaccagtgtcatggcttgcgtgagcttgccctcaactaccatttgctgtccgatgagctgttactggctctaagctctgagaagcatgtacgcctcgagcatctgaggatcgacgttgtctctgaaaatccagggcagacccacttccacaccatccagaagagctcctgggacgcgttcatacgccatagtccgaaggtaaatttagtgatgtacttcttcctgtatgaagaagaattcgatccgttctttcggtacgagattccagccacccacctgtatttcggtaggagtgtctccaaagatgtgttaggacgtgtcgggatgacatgccctcggttagtcgagctagtggtctgtgctaacgggcttaggcctctggatgaggaacttatcagaatcgcggaacgatgtaaaaatctctcggcaattgggttaggtgagtgcgaggtcagctgctccgcatttgttgagttcgtgaagatgtgcggcgggcggttgtcccaactgtctataatggaagaggtgttgattccagatcagaagtacagcctggagcagatccactgggaggtgtcaaagcacttgggcagagtctggtttccggatatgatgcccacttggtag

SEQ ID NO: 14914 - DNA, 3603 bp, synthetic construct
  source 1..3603: mol_type = other DNA; note = Synthetic coding sequence
atgaacaccgactccggcggatgtgctaggaagagggctgcaatgagtgttaccctgacatctgtgaaacgggtacagtcaagccccaacttactggcggccgggagagatagccagagccccgactctgcatggaggtcctataacgatggcaatcaagaaacattgaacggagacgccacttactctagcctggccgcgaagggattccgatctgtccggcctaatcttcaggacaagcgaagccctactcaatcccaaattaccgtgaacggcaacagtggcggagccgtgagcccaatgtcctattatcagcgaccttttagcccttcagcttacagcttgccggcatctcttaatagcagtattgtgatgcagcatggaacttccctggattctaccgatacatacccccagcatgcacagtccctggatggcaccacttcttcaagcattccactctacaggagttctgaggaggagaagcgtgtcacggtcataaaggccccccattatcctggcataggtccagttgacgaatcagggatacctacagcaatcagaactaccgtcgaccgcccgaaagattggtataagactatgttcaagcaaattcacatggtgcacaagcctgatgacgataccgacatgtacaacacgccatacacttacaacgccgggttgtataaccctccgtactccgctcagagtcaccccgccgcaaagactcagacatataggccactgagcaagtctcacagcgacaatagtccgaacgcctttaaagacgcctcctcaccagtgcctccccctcacgtcccgccccccgtgcccccattaaggccccgcgatcggagcagtactgaaaagcatgactgggatcccccggacagaaaggtggatacacgcaagtttcgcagtgaacctaggtctattttcgagtacgagcctggtaagagcagtattttacagcacgagcgccccgctagcctgtaccagtccagcattgatcgatccctcgagcggccaatgtccagcgcatctatggcgtcagatttcagaaaacgccggaaatccgagccagcggttgggcctccaagaggcttgggcgaccaatcggccagtcggacttctcctggccgcgtcgacctccctggctcatcaacaactctcactaagtcctttacctcatcttcaccttcatcgccttctcgcgccaaaggaggagacgattccaaaatatgcccttctctgtgcagttactcgggcctcaacggcaaccctagctcagaactcgattactgtagcacatataggcaacaccttgatgtgccacgagactctccaagagcaatctctttcaagaacggttggcagatggcaaggcaaaacgcagagatttggagttccaccgaggaaacggtgagccctaagatcaaatcccgctcatgcgacgaccttttgaacgacgactgcgactcattccctgatccaaaggtgaagtctgagtctatggggtccctcctgtgcgaggaggattcaaaagaaagttgtcctatggcctgggggtctccttacgtgcccgaggtccgcagtaatggacgcagcaggatcagacaccgctctgcgaggaatgcccctggattcttgaagatgtataagaaaatgcatcgaattaatagaaaagacctcatgaactccgaggttatatgctcagtgaagagccgcattctgcagtatgaaagcgaacagcagcataaggatctcttaagggcctggtcacagtgttccactgaagaagtgcctcgagatatggtacctacgcgtatctcggagtttgaaaaactgattcagaagagtaaatctatgccgaacctgggtgacgatatgttgtctcccgtaacactcgagccgccacagaacggcctctgtcccaaacgaaggttctcgatcgagtatctgcttgaagaggagaatcagtccggcccccctgcacgcggccgcagagggtgccaatccaacgccctggttccaattcacatcgaggtcacttcagacgaacagccgagggcccacgtggagtttagtgatagcgatcaggacggagtcgtgagcgaccattccgactacatccacttggagggatcaagtttctgtagtgagagtgatttcgatcatttctcttttacttcctcagaatctttttacggcagcagccatcaccaccaccaccaccatcaccaccaccatcggcacttgatttcttcctgcaaaggtagatgccccgccagctacacgaggttcactacaatgcttaagcatgagagagcgcggcatgagaacaccgaggaacccagaaggcaggagatggaccctggactgtctaaactggcatttctggtgagtccggtcccgttcagaaggaagaagaacagcgccccgaaaaagcagaccgaaaaggctaaatgtaaagctagcgtgttcgaagccctcgatagtgccttaaaagacatctgcgatcagattaaagctgagaagaaacgcggcagtctgccagataactcaattctacaccgccttattagcgagctcctgcccgacgtgcccgagagaaattctagtctgcgagcattaaggcgctcaccacttcaccagccactgcacccgctaccacctgacggcgccatccattgccccccgtatcaaaatgattgcgggcggatgccccgaagcgcctcattccaagatgtagatactgctaattcgtcatgccaccatcaagaccgaggaggagccctgcaggacagagagtcccctcgctcttattcctctaccttgacagacatgggtcgcagtgcacccagagagagacggggaaccccagagaaggagaagctccctgctaaagccgtgtatgatttcaaagcccagacatccaaggagctgagttttaagaaaggcgacacggtgtacattctgcgtaaaattgatcagaactggtacgaaggcgagcaccacggcagggtaggtattttcccaatctcctacgttgagaagctcacaccgccagaaaaagcccagcccgctcgccctccaccccctgcgcagcctggtgagataggagaagccatagccaaatacaacttcaatgccgacacaaatgtcgagttgtctctgagaaagggggatcgagtcatacttctgaagcgcgtggaccagaactggtatgaggggaaaattcccggaactaatcgccaaggcatattcccagtcagctatgtcgaagtcgttaagaaaaataccaagggggcagaagactaccccgaccccccgattccacacagctattctagtgatcgaatccattccctcagctcgaacaagccacagaggccagtgtttacccacgaaaatatacagggcggcggggagccctttcaagcactgtataactacacaccaagaaatgaggacgagctggagctgcgagagagcgacgtgattgacgtgatggaaaagtgtgacgacggatggtttgttggaaccagtaggcgcactaagtttttcggcacctttccaggcaattatgtgaagagattgtag

SEQ ID NO: 14915 - DNA, 1470 bp, synthetic construct
  source 1..1470: mol_type = other DNA; note = Synthetic coding sequence
atggaagactctgccagcgcctcattgtcaagtgcagccgcaacagggacctcaactagcacccctgccgcgccgacggcccgcaagcagcttgataaggaacaggttagaaaagccgtcgacgcccttctcacgcactgtaagagccggaagaacaactacggactgctgctgaacgaaaacgagtcactgtttctaatggtggtcctgtggaagatcccgtccaaagaacttcgagtcagactgactctgccacactctatccgatcggattcagaagatatttgcttgtttaccaaagacgagccaaactccacacccgagaagactgagcagttctatcggaagttgctgaacaaacatgggattaagacagtctctcagataatctcgttacagaccctaaagaaggaatataaaagctatgaggctaaactgagactcctgtccagctttgattttttcctcacagatgcccgcatccgccggttgctgcccagcctcattggtcgacacttctaccagcgcaagaaggtaccagtttcggtgaacctcctatccaaaaacttgagccgagaaattaacgactgtattggcggcacagttctgaacatcagcaagtcaggtagctgttccgccatcaggattggccacgtggggatgcagattgagcacataattgaaaatattgtcgctgttacaaaaggcttgagcgagaagctccctgagtgggagagcgtgaagctcctgttcgttaaaacagagaaatctgcggctctgccaatcttttcatccttcgtctccaattgggatgaggctaccaagaggtcactgctgaacaagaagaagaaggaggccagaagaaagaggagagagcgtaattttgagaagcagaaggagcgcaagaagaagcggcagcaagcccggaagacagcttccgtgctgtccaaggatgatgtggctcccgaaagcggggatactaccgtaaagaagccagagagcaagaaagaacagacccccgaacacggcaagaagaagagaggcagaggcaaagcccaggtaaaagcaacaaatgagtccgaggacgagattccccagttggtgcctatcggtaagaagaccccagctaatgaaaaagtggagatccagaagcacgctaccggaaagaagagccctgccaaaagccctaatccgtctactcctcgcggcaaaaagcgcaaagctctgccagcctctgagacacctaaggctgccgaaagcgagactccaggtaaatctcccgagaagaaacccaaaattaaggaagaggcagtaaaagagaaatcccccagcttagggaagaaagacgctcgccagaccccaaaaaagcctgaagcgaaattctttacaacgccatcaaagtcagtccgtaaggcctcccatacccccaaaaagtggcccaagaagcccaaagtgcctcagtccacctag

SEQ ID NO: 14916 - DNA, 3171 bp, synthetic construct
  source 1..3171: mol_type = other DNA; note = Synthetic coding sequence
atggctggtgccttgagaaggggaagagccctggggtcacgcccatccgggcccactgtcagctcccgccgctctccccagtgccccgtggcccaggaaggcctaggggctaggtccaggccccgagtggcccccaggagcctcgcccgttgcggccccagtagtaggctgatggggtggaaaccatccgaggcccggggacagagtcagtccttccaggcctccggactgcaacccagatctctcaaagctgcccgaagggccactggacggcccgaccgctcaagggcagctcctcctaacatggatcctgatcctcaggctggagtgcaggttggtatgagggttgtgaggggcgtcgactggaaatggggtcagcaggatggtggggagggcggcgtgggcaccgtggtcgaacttggacgccacggaagcccttccacccccgacagaactgtcgtcgtccagtgggatcagggaacacgtaccaactatagagccggttaccagggagcacacgatcttctgctttacgacaatgcgcagattggggtgcggcatcctaacatcatctgtgattgctgcaaaaagcacggtttgcgaggcatgaggtggaagtgtcgagtctgcctggactacgatttgtgtacccagtgctatatgcacaacaaacacgagttggctcacgccttcgaccgctatgagaccgctcattctcgtcctgtgaccctgtccccaagacagggattacctaggatacccctgaggggaattttccagggagcaaaggtagtgcgagggccagactgggagtggggatcacaggatggtggcgagggtaagccaggaagggtcgtggacatcagaggatgggatgtcgagaccggccgctctgtggcttccgttacctgggctgacggaacaacaaacgtttaccgcgtgggtcacaaagggaaggtggacctgaagtgcgtgggtgaggccgctggaggattctactacaaagatcacttaccgcgtctgggaaagccagccgagctgcagcggcgggtttccgcagattctcaaccctttcagcatggcgataaagttaaatgtttgctggacaccgacgtgttgcgagagatgcaagagggacacggcgggtggaacccaaggatggctgaatttatcggacagaccggaaccgtgcatcgtatcactgatagaggtgatgtgcgggtgcaatttaatcacgaaaccagatggaccttccaccctggagcccttacaaaacaccactccttctgggtgggcgatgtagtccgagtgatcggagaccttgacaccgtgaaacggttacaggctgggcacggtgagtggaccgatgatatggctcccgccttgggccgggtggggaaagtggttaaagtgttcggggacggaaacctcagagttgccgtggcaggccagcggtggactttctctccttcctgcctagtggcatatcggccagaggaagatgctaacctggacgttgccgagagagcgcgtgaaaacaagtcctctctgagcgtcgctctggacaagctccgcgctcagaagtccgatccggagcaccctgggagattagtcgtagaagtcgcgctgggcaatgcagcccgagccctggacctcctcaggcgccgtccagagcaagtcgacacaaaaaaccaaggacgcactgcccttcaggtcgcggcctatctaggacaggtggaactgatccggttgctgttgcaggcacgcgcgggcgtggacctgccagacgacgagggcaatactgctctccattacgccgctctgggaaatcagcccgaagcaaccagagtactcctgagcgccggttgcagagcagatgctataaactctacccaaagtactgcactccacgtggccgtacagcgcggcttcctcgaagtggttcgagccctgtgtgagcgcggctgcgacgttaacctgcctgacgctcacagtgacacacccctccattcagccatctctgcagggacgggcgcttcaggcatcgtcgaggttttgaccgaggttccaaatatcgatgtgaccgccacaaacagtcagggttttactctgctgcatcacgctagcctcaaaggacacgcccttgccgtgcgaaaaatcctcgcccgtgccagacagctcgttgacgccaaaaaggaagacggcttcacggcactgcacctcgccgctcttaacaatcatagggaggtggcccagatcctaatcagagaaggccggtgtgacgtcaacgtgcgaaaccgcaagctgcagtctcctctgcatctcgcagttcagcaggcccatgttggcctcgtacccctgctcgtagacgccggttgttcggtaaatgccgaggacgaagagggggatacggccttgcacgtcgccctccagaggcaccagttgctgccattggtggctgacggggccggaggtgatcccggccctctgcaactgttatcacgcttgcaggcctcaggacttcccgggtccgccgagttgaccgttggcgccgccgtcgcctgcttcctcgcattggaaggcgctgacgtgtcttatactaaccataggggacgatcaccccttgacctcgcggccgaaggccgcgttctgaaggcccttcaaggatgcgcccaacggttccgcgagcgtcaagctggaggaggggccgcacccggccccaggcagaccctaggtactcccaacaccgtcactaacttacacgtgggtgctgcacccggccccgaagcggccgagtgcctggtatgcagtgagctggcgctgttggtgctgtttagcccatgtcagcatcggaccgtctgcgaggaatgtgcacgccggatgaagaagtgtatccggtgtcaagtggtggttagcaaaaagctccggcctgacggatctgaggtcgcaagcgctgcccctgcccccgggcctcccaggcaactcgtagaggagttacagagcaggtaccggcagatggaagagagaatcacgtgcccaatctgcattgactcccatattaggcttgtcttccaatgtgggcacggagcttgcgccccatgtggtagtgccttgagcgcatgcccgatctgtaggcagccaatccgcgaccgtatccagatctttgtgtag

SEQ ID NO: 14917 - DNA, 858 bp, synthetic construct
  source 1..858: mol_type = other DNA; note = Synthetic coding sequence
atgtccgaagctggagaggaacagccaatggagacgaccggcgcaactgagaatggacatgaggccgtgcccgaaggagaaagccccgcaggagcagggacaggagcagccgccggagcaggcggtgcgacagccgctccgcccagcggcaatcaaaacggggccgaaggcgatcagataaacgcaagtaaaaacgaggaggacgctggcaagatgttcgttgggggactgtcctgggatacctcaaagaaggacctcaaggattatttcaccaagtttggcgaagtggtagattgtaccatcaagatggaccctaatactggcagatctagggggtttggattcatcctgttcaaggatgccgccagtgtggaaaaagtgctggaccagaaagagcaccgattagacggccgggtcattgatcccaagaaggcgatggcaatgaaaaaagaccccgtcaaaaagatcttcgtcggaggcctgaaccccgaggcaaccgaggagaaaattcgggaatattttggtgaattcggtgagattgaagctattgagctgcctatggatccaaagttgaataaacgacgagggtttgtattcatcaccttcaaggaagaagagccagtaaaaaaggtgctggagaaaaagtttcatacagtttccggaagcaaatgcgaaatcaaggtcgcgcagcccaaggaggtctaccagcagcaacaatatgggagcgggggtagagggaaccgaaatcgaggcaaccgtggcagcggaggcggaggcggtgggggagggcagggtagcaccaactacggcaaaagccagcgaaggggcgggcatcagaataactataaaccttactag

SEQ ID NO: 14918 - DNA, 1212 bp, synthetic construct
  source 1..1212: mol_type = other DNA; note = Synthetic coding sequence
atgtccgggtctgatgggggccttgaagaagaacctgaactttccatcacccttaccctgcgaatgctgatgcatggcaaggaggttggatcaatcatcgggaaaaagggcgagactgtgaaacgaattagagagcagagtagcgctagaatcactatctccgagggatcgtgcccggagcgcatcactacaatcaccggtagcactgcggctgtgtttcatgcagtgagtatgattgccttcaaacttgatgaagatttgtgtgccgctcctgccaacggaggaaatgtgtcacgaccgccagttacgctgagattagttatccctgccagccagtgtggaagtctaattgggaaagccgggacaaagatcaaggaaatacgcgaaacaacaggggcacaagtgcaggtggccggagatttactgcccaattccactgaacgtgccgtgactgtaagtggtgtaccagacgctatcattctgtgcgtgcgccagatctgtgcagtgattcttgaatctccccccaaaggcgccactattccgtaccacccgtcactatcccttggaaccgtgctgctctcagcgaatcaggggtttagcgtacagggacagtacggtgctgtcacacccgccgaggttaccaagctgcaacagcttagttcacatgcggtcccgttcgctacaccatctgttgtccctgggctggatcccggcacacagacaagtagtcaagaattccttgtgccaaatgacctgatcgggtgcgttatcggacgccagggttccaagatttcagagataagacagatgtctggcgcccatatcaaaatcggtaatcaggcggagggcgctggggagagacacgtcaccattactgggtctcctgtgtccatcgcacttgctcagtacttgatcaccgcctgtctggagaccgctaagagcactagcggcggcacccccagcagcgcacctgccgatttgccggctccattcagtccaccgttgaccgctttgcctacagcaccgccaggactgctgggtacaccttatgcaatctccctgtctaattttatcggtctgaaacccatgccttttttagcgctgcctcctgcgtctcccggccctcccccaggcttggccgcatacacagcaaaaatggccgccgccaatggatccaagaaggctgaacgacagaaatttagcccttactag

SEQ ID NO: 14919 - DNA, 1347 bp, synthetic construct
  source 1..1347: mol_type = other DNA; note = Synthetic coding sequence
atggctacggatagttgggccctggcagtcgatgaacaggaagcagctgctgagtccctgtccaatttacaccttaaggaggagaaaatcaaaccagacacaaatggagccgttgtcaagactaacgctaacgcagagaagaccgacgaagaagaaaaggaagatagggcagcacagagcctgctgaataaattgattcgctcaaacctggtggataacactaaccaggtggaagtcctgcagagagatccaaattctcccctgtattccgtgaaatcattcgaggaactgaggttaccgcagaacttgattgcccaatcccagtcaggcacaggcaaaaccgccgcttttgtgcttgctatgttgagccaggtggagccagcgaataaatacccccagtgcctctgcttatcgccaacatatgagctggccctccagactggaaaggtcatcgaacaaatgggcaaattttatcccgaactaaaattagcgtacgctgtcagagggaacaagcttgagcgagggcagaagatttctgaacaaatcgtcatagggactcccggcaccgtgttagactggtgttctaagcttaaatttattgaccccaaaaaaatcaaggtctttgtgctcgatgaggccgatgtcatgatcgcaacgcaggggcaccaggatcagtctattagaatacagagaatgctgccacgaaattgccagatgttgctattctccgccaccttcgaggactccgtgtggaagttcgcacagaaggtcgtgccggacccgaatgtgattaaactcaagagagaggaggaaaccctggacaccatcaaacaatactatgtcctttgttccagccgggacgagaaattccaagctctgtgcaacctttatggtgccattaccatagctcaggctatgattttttgtcataccagaaaaacggcctcttggttagccgccgaacttagcaaagaaggtcatcaggtggcactgcttagcggcgaaatgatggttgaacagagagctgccgtgatcgaacgtttcagggaaggtaaggagaaggtgttggtcaccacaaatgtctgcgcccggggcatagacgtagagcaagtgtcagtagtgatcaacttcgatctgcccgtggataaagacggtaaccctgataacgaaacataccttcataggatagggcgcacaggacgtttcggcaaacgcggactggcagtgaacatggtcgattctaagcacagcatgaacattctcaacaggattcaggaacattttaataaaaagatcgaaagactggatactgacgacctggatgaaatcgaaaaaatcgcaaactag

SEQ ID NO: 14920 - DNA, 1248 bp, synthetic construct
  source 1..1248: mol_type = other DNA; note = Synthetic coding sequence
atgatgctgggacccgaggggggcgaggggtttgttgtcaaactacggggtctaccatggtcttgctctgtggaagatgtgcagaacttcctgtccgactgcacaatccacgatggagccgccggtgtccactttatctacaccagagagggtaggcagagtggcgaagcattcgtcgagctgggcagcgaggatgatgtgaagatggcgctgaaaaaagatagggagagcatgggccaccgatacatagaggtgttcaagagtcacagaacagaaatggactgggtgttgaaacatagcgggcccaacagtgcggactctgccaatgatggattcgtgcgcctgcggggccttcctttcgggtgtacgaaagaggaaattgtccaattttttagcggcctcgaaatcgttcctaacggtataacgttaccagttgaccccgaaggcaagattacgggggaggcattcgttcaatttgcctctcaggagcttgccgaaaaagcactgggtaaacacaaagagcggattgggcaccgctacatcgaggtctttaagtctagccaggaggaggttaggtcctatagcgatccacccttaaagttcatgtccgtgcagagaccagggccatatgataggccagggacagcacgacggtatatcgggattgttaaacaggcaggcttggaaaggatgcggcccggcgcctatagtaccgggtatggcggttatgaggaatacagcggtctgtccgatggctacgggttcactactgacctattcgggcgggacctgtcgtactgtctctcagggatgtacgatcacagatatggggactctgagtttacagtgcagagcaccacaggacactgtgttcacatgcgcggacttccttacaaggccacggaaaacgacatttataacttcttcagtcccctcaacccagtcagagtgcatatcgagattgggcccgatggaagagtcacgggagaagccgatgtggaatttgcaacacatgaggaggcagttgccgccatgtccaaggatagagccaacatgcagcatagatatatagaactgtttttgaactcaaccacaggtgcatcaaatggcgcctacagcagccaggtgatgcaggggatgggggtgtcagctgcccaggccacttactccggcttggagagccagtccgtgagtgggtgttacggcgctggctactccggtcagaattctatgggtggatacgattag

SEQ ID NO: 14921 - DNA, 1026 bp, synthetic construct
  source 1..1026: mol_type = other DNA; note = Synthetic coding sequence
atggcacaggagtcccctaagaatagtgccgcagaaatcccagtcacaagcaacggtgaagtggatgattcccgcgaacactcatttaacagggacttaaaacactctctgcctagcggtcttggcttgagcgaaacccaaatcacatcgcatggattcgataataccaaggagggagtcattgaggctggcgcttttcaggggggccagaggacccagacgaagtcaggccctgtaatcctcgcagacgaaatcaaaaatccggctatggagaagctggagctagtgagaaagtggagcttaaatacctataagtgcacaagacagattattagcgagaaactcggccgaggatctaggacagtcgacctagagttggaagcccagattgatatcctccgtgacaataagaagaagtacgaaaatattctgaaactcgctcagaccttaagcacgcaactgtttcagatggtgcatacacagaggcagctcggggacgccttcgctgatctgtcactcaaatctctagagctgcacgaggagtttgggtacaacgccgatactcagaagcttttagccaagaacggggaaacactgctcggcgcgattaacttttttatcgcttctgtgaacactctggttaacaagaccatcgaggacaccctcatgacagtcaagcagtacgaatccgcaaggatcgaatatgacgcttatcgaacagaccttgaggaacttaacctgggccccagagatgcgaacaccctacctaagatcgagcagtcccagcacctgttccaggcacacaaggagaagtacgacaagatgaggaacgatgtttcagttaagcttaaattcctggaggaaaacaaagtaaaagtgctgcacaatcagctggtgctgttccataatgctatcgccgcttacttcgccggcaaccagaaacagctggagcagacactcaagcaattccatatcaagctgaagacccctggagtcgacgccccttcttggttggaagaacagtag

SEQ ID NO: 14922 - DNA, 1572 bp, synthetic construct
  source 1..1572: mol_type = other DNA; note = Synthetic coding sequence
atggctaacgtggggcttcaattccaagcctcggcaggggactccgaccctcaaagtaggcctctactcctcctcgggcaactgcatcatctccacagagtgccctggagtcatgtgcgcggtaagctgcagccacgcgtgactgaggagttgtggcaggccgccctgtccacgctgaatcctaaccctaccgactcctgtccgctgtatttgaactacgccactgtggccgcacttccttgcagggtgagtaggcacaacagtccttccgcggcacatttcatcacacggttagtcagaacatgtctgccacccggagctcaccggtgtattgtgatggtttgcgaacagcctgaagttttcgctagcgcatgtgcactcgcccgggcctttcctctgttcacacaccgtagcggcgccagcaggaggctggaaaaaaaaactgtgacggtggagttctttttagttggacaggacaacgggcccgttgaggtgtccacactgcaatgcctggccaacgccactgacggcgtccgcctggccgccagaatagtggacaccccctgcaatgaaatgaacactgacaccttccttgaggagataaataaagtgggaaaggagctcggcatcattcctaccattataagggatgaagagttgaaaacacgtggattcggggggatctatggcgtgggcaaagcagccctgcacccccctgccctggcggtgctgtctcacacaccagacggggccacccagaccatcgcctgggttggaaagggcatcgtgtacgatactggagggctcagtattaaaggaaaaacgactatgcctggtatgaaacgagattgcggcggcgccgctgcagtactcggagcatttcgggccgctattaagcaaggattcaaggataacctgcacgccgtcttttgtctggcagaaaacagcgtgggaccgaacgctacaagacccgacgacatccacctgctgtattccggaaaaacggtcgagatcaataatactgatgctgaaggcaggctcgtacttgccgacggggtgtcgtatgcttgtaaagaccttggggcagatatcattcttgacatggctacactgacaggcgcacaaggaatagctacagggaaatatcacgccgccgtcttaactaatagcgctgagtgggaggcagcctgcgtcaaggcgggccggaagtgtggcgatctcgttcatcccctcgtctactgtccagaactgcactttagcgaatttacgagcgccgtggcagacatgaaaaattccgtcgccgacagggacaattcccctagtagttgcgccgggctgtttatagcaagccacataggtttcgattggcccggggtgtgggtgcacctggacatcgcggcaccagtgcacgccggagagcgggccactggtttcggtgttgccctccttctggccctcttcggacgggcatcagaagaccctttgctgaacctcgtcagtcctctcgggtgcgaagttgacgtggaggagggtgacctgggaagggactcaaagaggcgccgtcttgtctag

SEQ ID NO: 14923 - DNA, 1371 bp, synthetic construct
  source 1..1371: mol_type = other DNA; note = Synthetic coding sequence
atggctgacggtggctcagagcgcgcagacgggaggattgtcaagatggaggtggattacagcgccaccgtggaccaaagactacctgagtgcgccaaactggctaaggaggggcggctccaggaggttatcgagacactcctctccttggagaaacagacaaggaccgcatcagacatggtatccacaagccgaatcctggtagctgtggtgaagatgtgctatgaagcaaaggaatgggatctcttgaacgagaacattatgctcctgtctaaacgacgctcccagctcaaacaagcggtcgccaagatggtgcagcagtgttgtacatatgtggaagagatcacagacctgcccataaaactcagactaatagacaccttgcggatggttactgaggggaagatttacgttgaaattgagagggctcggctgactaagactctggccaccatcaaggagcagaatggagatgtcaaggaagccgccagcatcctgcaggaattgcaggttgaaacatatgggagtatggagaaaaaagagcgcgtggagtttatccttgagcagatgcggctatgcttagccgtaaaggactatataagaacccagataattagcaagaagattaatactaagttttttcaggaggagaacacggagaagctcaaacttaaatactacaacctaatgatccagcttgaccaacatgaaggatcgtatctctctatctgtaagcactatcgagcgatttacgatacaccatgtattcaggcagaatccgaaaaatggcagcaggctctaaagtccgtcgtgctgtatgttattctcgcccctttcgacaatgagcagtcagacctagtgcaccgcatcagtggcgacaagaagctcgaagaaatccccaaatacaaggatctgctaaaactgttcaccacgatggaactcatgcgttggagcacccttgtggaagattacggtatggagttgagaaagggaagtctagaatctcccgcaaccgacgtctttggttcaaccgaagaaggcgaaaaaaggtggaaggacctcaaaaatcgtgtcgtcgagcataatatccggataatggctaaatactatacgcgtataacaatgaagagaatggcccagctgcttgacctcagtgtcgacgagtctgaagccttcctgtcgaacttggttgtgaataaaacaatcttcgcaaaggtcgataggctcgcgggcataattaactttcagcgtcctaaagaccccaataatttgctcaatgactggagccaaaagcttaactctttgatgagcctggtgaataagactactcacctcatcgccaaggaggaaatgatccacaacttacagtag

SEQ ID NO: 14924 - DNA, 1011 bp, synthetic construct
  source 1..1011: mol_type = other DNA; note = Synthetic coding sequence
atgaagatagacatccactctcatattctcccaaaggagtggcccgatctgaagaagcggttcggttacggcgggtgggtgcagctgcagcatcatagcaaaggcgaagcaaaacttttgaaagacggtaaggtttttcgggtagtgagagagaactgttgggaccccgaggttagaattagagaaatggaccagaaaggagtgactgtgcaggcactgagtacagtgcccgtaatgttctcctattgggccaagcccgaggacacgctaaatctgtgccagttacttaacaacgacttagcctcaaccgtagtgtcctacccacggagatttgttggcctcggcaccctccctatgcaggctccagagctcgctgttaaggagatggaaaggtgcgtcaaagagctcgggttcccgggagttcaaatcggaacccatgttaacgaatgggatctgaacgcccaggaacttttccctgtttacgcagcagccgagcggttgaagtgctccctgtttgtgcacccctgggacatgcaaatggacggccgcatggccaaatactggttgccctggttggtggggatgcccgcagaaaccacaatagctatttgtagtatgatcatgggcggcgttttcgaaaagttcccaaagctgaaggtgtgcttcgcccacggaggcggagcctttccattcacagtcggccggatcagtcacggatttagcatgaggcctgatctctgtgcacaagataaccccatgaaccccaagaaatatttagggagcttctacactgacgccttggtgcatgaccctttaagcttgaagctactcacagatgtaatcggcaaggataaagtcattctggggacagactacccttttccactgggagaactggagcctggcaagctcatcgagtcaatggaggaatttgatgaagaaacaaagaataaactaaaagctgggaatgccctggcctttctcggattagaaaggaagcagttcgagtag

SEQ ID NO: 14925 - DNA, 1617 bp, synthetic construct
  source 1..1617: mol_type = other DNA; note = Synthetic coding sequence
atggagctgtcttaccaaactcttaaattcacacatcaggcccgggaggcttgtgaaatgcgcacagaagctcgccgaaagaacttgctaattttgatctcccattacctgacccaggaggggtacatcgatactgccaatgcgttggaacaggaaacgaagctcggacttcgcagattcgaggtctgtgacaacatagatctcgaaactatccttatggaatatgagagctactactttgtgaagttccagaaatatcccaagatcgtgaagaaaagctcagataccgccgaaaataatctaccccagaggtcacggggcaagactaggaggatgatgaacgatagctgtcagaatctgcccaaaattaatcaacaaagacccagaagcaaaacaactgccgggaaaaccggggataccaagagcctgaacaaggagcacccaaatcaggaagtggtcgataacacccggctggagagcgcaaattttgggttacatattagtaggatacggaaagatagcggggaggagaatgcccatccccggaggggtcaaatcatagacttccaagggctgctgaccgacgcgataaagggcgctacctcagaactagcgctcaatacgtttgaccacaatcccgatccttctgaaagactgctcaagccactgagcgccttcatcggcatgaacagcgaaatgcgcgagctggcagctgttgtttcacgagacatatacctccataatccaaatattaaatggaacgacattataggtctagatgccgctaagcagcttgtgaaagaggcagtggtgtacccaattcgatacccgcagctgtttaccggcatcctgtcaccatggaagggactgcttctctatggaccccccggtacagggaagaccctgctggccaaagccgtagctactgagtgtaagacaaccttcttcaatattagtgcatccactatagtctccaaatggagaggtgattctgagaagctcgtgcgggtgcttttcgagctcgcccgctatcatgcaccaagcaccattttcctagacgaactggaaagtgtgatgagccagagaggcacggccagtgggggagaacacgaaggctccctgcgcatgaaaaccgagcttctggtacagatggacggtctcgctcgcagcgaggacctggtgttcgtcctggctgcgtctaatctgccgtgggaactagattgcgctatgctgagaagattggagaagcgcattctggtggatttaccctcacgggaagctcgtcaagctatgatttatcactggctaccacctgtgtctaaatcgagagcactggagcttcacacagagttggagtactcagttctgagtcaggagaccgagggctactccggctcagatattaagcttgtgtgtcgcgaggccgctatgaggccagtgagaaagatattcgacgccttggaaaaccaccagagcgagtcctccgacctgccaagaatccaattagacatcgtgaccaccgccgacttcctggacgtgctgacacacaccaaaccctccgctaaaaacctggcccagaggtatagcgattggcagagagaatttgaatctgtctag

SEQ ID NO: 14926 - DNA, 507 bp, synthetic construct
  source 1..507: mol_type = other DNA; note = Synthetic coding sequence
atggcggagggctcgcgaataccccaagccagggcattgctccagcagtgcctccatgccagactccagattcggcccgccgatggagatgtggccgcacagtgggtcgaggtgcagagaggactggttatttacgtttgcttttttaagggagctgacaaggaactactgccaaagatggtgaatactctcctgaatgttaagctcagtgaaacagagaacgggaagcatgtatccatcctggatttaccaggtaacattttgatcattccacaggccacactaggaggcagattgaagggtcgaaacatgcagtaccatagcaatagtggcaaagaagagggcttcgaactctacagccagttcgtcacactgtgtgagaaagaagtggccgccaatagcaaatgtgccgaagcacgggtagtcgtcgaacacggaacttacggcaaccggcaagtgttgaaactcgacacaaatgggccttttactcatctcatcgagttttag

SEQ ID NO: 14927 - DNA, 1764 bp, synthetic construct
  source 1..1764: mol_type = other DNA; note = Synthetic coding sequence
atggcctcggaagatatcgcgaagttggctgagaccttggcaaagactcaggtagctggcggccaattaagcttcaaagggaaatcccttaagttgaacaccgctgaggacgcaaaagatgttatcaaagaaatcgaagattttgactccctggaggcactcaggctcgaaggtaacacggtaggcgtagaagctgcaagagtgatcgccaaggcattagagaaaaaaagcgaattaaaacggtgccactggtctgatatgttcaccggtcgcctgcggaccgagatccccccagccctgatctcacttggggagggattgatcactgcaggggcacagctggtcgagctggatttgtctgataatgctttcggccctgatggggtgcaggggttcgaggctctgctgaagtcaagcgcatgttttacccttcaggaattaaagctcaacaactgcggaatgggaatcggaggcggtaaaattctggccgctgcgctaactgagtgtcatcgtaagtcttccgcacaggggaaacctctggctctgaaagtcttcgttgcaggccggaacagacttgagaacgatggggccacagcactggccgaggcgttccgcgtcatcggaaccctcgaggaggttcatatgcctcagaacggtatcaaccatccgggaatcaccgccctggcccaggcctttgctgtcaatccccttttgagagttattaacctcaacgataatactttcactgagaagggagccgtggccatggcggagaccctgaagacacttagacaagtagaggtaatcaacttcggcgactgcctcgtgcgaagcaagggtgcggtcgctatcgcggacgctatacggggtggcttgcccaagctcaaagaattgaacttgtcattttgtgagatcaagcgcgacgcagcactggccgtcgccgaggctatggctgacaaggctgagctagagaagctggatttaaacggtaacaccttaggcgaagagggctgtgagcagctccaggaagtgctagagggattcaacatggctaaggtgctcgcttccctctccgatgacgaagatgaggaggaagaagaagaaggcgaagaagaggaggaagaagctgaggaagaagaggaggaggacgaagaagaggaagaagaggaggaagaggaggaggaggaagagcctcaacagagagggcagggcgaaaagtccgccaccccctctaggaaaatccttgatccgaacacaggtgaacccgcccctgtcctgagtagtcccccccccgccgacgtgagcacctttctagccttcccgtcgcccgaaaagctgttacgcctgggccctaaaagctccgttctgattgcacagcaaactgacacatcggaccccgagaaagttgtgagtgccttccttaaagtgtcgtccgtttttaaggatgaggccacagtgaggatggccgtgcaggacgccgttgacgccctcatgcagaaggctttcaatagctcctccttcaattcgaacacattcctcaccaggctgctggtgcacatggggctgctgaaaagtgaggacaaagttaaagccatcgcaaatctctacgggcccctcatggctctgaaccacatggtgcagcaggattatttccccaaggctctcgctccactgctgttagccttcgtgacaaaacccaacagcgcgttggagagttgcagctttgcaaggcattctcttcttcagactctgtacaaggtctag

SEQ ID NO: 14928 - DNA, 2529 bp, synthetic construct
  source 1..2529: mol_type = other DNA; note = Synthetic coding sequence
atggatatctctaagggactccccggtatgcaggggggactgcatatctggatctccgaaaatcggaagatggtgccagttccagaaggcgcatacggcaacttcttcgaggagcactgctacgtgattttacacgtgcctcagagccccaaagctacacagggagcttccagcgacctgcactactgggtcgggaaacaggccggcgccgaggcacagggagctgcagaggccttccagcagcgccttcaggacgaacttggcggccagaccgtcctgcacagagaggcgcaaggccatgagagtgactgcttctgctcttacttccggcccgggatcatataccgcaagggcggattggcatccgaccttaaacatgtggagacaaatctgttcaacatccagcggctgcttcacattaaaggccggaaacacgtttcagctactgaggtggagctttcttggaacagttttaataaaggggatatttttctcttggaccttgggaaaatgatgatccagtggaacggccctaagacatcaatcagcgaaaaggcgcgcggcttggctttgacgtacagcctgagggacagagaacgaggaggcggaagggctcaaattggagtcgtggatgatgaggccaaggccccagacctcatgcaaataatggaagccgtgttgggacgtagggtcggatctctgagagcagctacaccaagtaaagacataaaccaactacagaaggccaacgttcgcctatatcatgtgtacgagaagggcaaagacctgcttcaagaagaggacttctatatcctcgatcaaggcggctttaaaatttatgtgtggcaaggccgcatgagttcgctgcaggagagaaaagcagccttctctagggccgtgggatttatacaggccaagggttaccctacatacacaaatgtggaagtggttaacgacggggccgagtcggccgcatttaagcagcttttcagaacgtggtcggaaaagcggcggcgcaatcagaagctgggagggagggacaaaagtattcatgtgaaactcgatgtcggcaagctgcacacacagccaaaactggccgcccagctgaggatggtcgatgatgggagtggtaaagtggaggtctggtgtattcaagatctgcacagacaaccagttgaccccaaacgccacgggcagctgtgcgcagggaactgttatctcgtgctctacacctaccagcgccttggccgcgtgcagtatatactctatctttggcagggtcatcaggcaaccgccgatgagatcgaggcactgaactccaatgcggaggagctggatgttatgtatgggggtgtattagtacaggaacatgtgaccatgggtagcgaacccccccacttcctggccatatttcagggccaattggtcatcttccaggagagggctggacaccatggcaagggacaaagtgcctccacgacacgcctgttccaggtacagggcacggattctcacaatacaaggacaatggaggtgcctgcacgcgcttcgtcactaaatagcagtgacatctttctactggtgaccgcatccgtttgttatctctggtttggaaaaggatgcaacggagatcagcgcgaaatggctagagtggttgtgacagtgatcagccgtaaaaatgaagagaccgtgctggagggccaggagccaccacacttttgggaagctctgggcggaagagcgccttatccaagcaacaagcgcctgccggaggaagtgccctccttccaacctagactgttcgagtgctccagccacatggggtgtctggtgttagctgaagttggttttttcagtcaagaagaccttgataagtatgacattatgcttcttgatacatggcaggagattttcctttggctcggggaggccgcgtctgaatggaaggaagcagtggcttggggacaggagtacctgaagacgcaccccgcagggcgctcccctgccactcctattgtccttgttaagcaggggcacgagcccccaaccttcatcggttggttcttcacctgggatccatataaatggacttcacacccttctcacaaggaggtcgtcgatggttcacctgcggcagcttctacgatctccgagattaccgcggaggtgaacaatttaagactcagcaggtggccgggaaacgggagggcaggcgccgtcgctctccaggctcttaaagggtcccaggactcttctgaaaatgatttggtccgctcccccaagtccgcagggtctaggacatccagtagtgtcagtagcacttcagcaactataaatgggggtttgagaagggaacaactaatgcatcaggcagtggaagatctaccagagggcgttgatccagctcgacgggagttttacttgtcagattccgacttccaagacatttttggcaaatccaaggaggagttctactccatggcaacctggcgacaacggcaggaaaaaaagcaactgggtttcttttag

SEQ ID NO: 14929 - DNA, 1620 bp, synthetic construct
  source 1..1620: mol_type = other DNA; note = Synthetic coding sequence
atggacgcgatggcctctcccggaaaggataactatagaatgaaatcctacaagaacaaggctctgaatccgcaggagatgaggaggaggcgcgaagaagaggggattcagctacgtaagcagaaacgagaggaacagttgttcaaacgcaggaacgtctacctgccccgtaatgatgagtctatgcttgagtccccgatccaggaccccgacatcagctcaacagttccgatccctgaggaagaagtcgttaccacagacatggtgcagatgatctttagcaataacgcggatcaacagctgacagccacccagaagttccgcaagcttctttcaaaggagccaaaccctcctattgaccaggtgattcagaagccgggcgtcgtccagagattcgtaaagtttcttgagcgcaacgaaaactgcacccttcagttcgaagcagcgtgggctttaactaacattgcgtcgggaacttttcttcacacaaaagtggtaatcgagaccggtgcagtcccaattttcataaagctgttgaattcagaacatgaggacgtgcaggaacaggccgtgtgggccttagggaacattgccggcgacaatgcagaatgtcgtgattttgtcctaaactgcgaaattcttccgcccctgcttgaattactgactaactccaataggcttactaccacacggaacgctgtgtgggcccttagcaatctttgtaggggaaagaaccccccacccaatttttccaaggtgtctccatgtctgaacgtactctctaggctgttattcagttctgaccccgatgttctggcagatgtatgctgggctctttcttatctctcagacgggcccaacgacaagattcaggccgttatcgattctggagtgtgtcgacggcttgtggagctattaatgcataacgattacaaggttgttagtcccgcactcagagccgtaggaaatatcgtgaccggggacgacatacagactcaagtcattcttaactgctccgcactgccgtgtttgctccacctgctatcctcaccgaaagaatccatcaggaaagaggcctgctggaccgtttccaatattacagctgggaatagagcacagatccaggctgttatcgatgccaatatttttccagtattgatcgaaattcttcagaaagctgagtttcggacaaggaaggaagccgcgtgggccatcactaatgcgacatccggggggacccccgagcaaatccgctacctcgtggcccttgggtgtattaaaccactgtgcgaccttctcacagtgatggattccaaaatcgtccaggtcgccctgaacggacttgagaatattctgagacttggtgagcaggagagtaagcagaacgggatcggaataaacccgtactgtgccttgattgaggaagcctacggcctggataaaatcgagtttctccagagtcatgagaaccaggaaatatatcaaaaggcgttcgatctaatcgaacattacttcggcgtcgaggaggacgacccctcaatagtgccacaagtcgacgagaatcaacaacagttcatctttcagcagcaagaggctcccatggatggttttcagctctag

SEQ ID NO: 14930 - DNA, 3735 bp, synthetic construct
  source 1..3735: mol_type = other DNA; note = Synthetic coding sequence
atgctgattaaggagtatcacatcctcctgcctatgagtctcgatgaataccaagtggcccagttgtatatgatacaaaagaagagccgggaagagagcagcggggaagggtcaggagttgagattctggctaatagaccctacacagacggacctggcggttcaggtcagtacactcataaagtgtaccatgtgggtagccacatcccagggtggtttcgcgctcttttaccaaaggccgccttgcaggtggaagaagagtcatggaacgcatacccttatactaggacacgttacacttgccccttcgttgagaagttttcgatagagatcgagacctactatttgccggacggtggacagcagcccaatgtgttcaatctgagcggagccgaacggcgacagaggatcctggatactattgacatagttcgcgacgcagtggcacctggcgaatataaagctgaggaggaccccaggctctaccatagcgttaaaactggaaggggccctcttagtgacgactgggcacgcaccgcggcccagaccgggcctctcatgtgtgcctataagttatgcaaggtagagttcaggtattggggaatgcaagccaagattgagcagttcatccatgatgtgggcctgagacgggttatgctgcgcgcacacagacaggcctggtgctggcaagatgagtggacagagctatcaatggcagacattcgggcgctggaggaggagactgcgagaatgctggcgcagcgcatggctaagtgtaacaccggctccgagggatcggaggctcaaccacctgggaaaccctccacagaagcgcgctctgccgcatctaatacaggaactcctgatggacccgaagcaccccctggaccagatgcatctccggacgcttcctttgggaaacaatggtcttcctcatcccgttcctcatactcaagtcagcatggtggtgcagtcagccctcagtctctctcggaatggaggatgcaaaacatcgcccgggactccgagaattcctctgaagaggaattcttcgacgcccacgaaggattcagtgactcagaagaggtattccctaaggagatgactaaatggaattccaatgactttattgatgcctttgccagccccgtagaagcagaggggacccctgaaccaggcgcagaagctgccaagggtattgaggacggggctcaggcaccacgggattcagagggcctcgatggagcgggcgagctcggcgctgaggcctgtgccgttcatgctctgttcctgatcctccatagcggtaatatactggattctggacccggggatgccaattctaagcaggctgatgtgcagacattgagttctgccttcgaagccgtgacacggatacatttccccgaggccttgggccatgtggctctgaggctggtgccctgtccgcccatttgcgccgccgcttacgccctggtgtcaaacctcagcccttacagccacgacggcgatagcctgtcacggagccaggaccacattccattagctgccctgcctctgttggccacatcttcatcccggtaccaaggagccgtcgctaccgtgatagcacggacaaatcaggcctattctgcctttctcaggtccccggaaggcgctgggttctgtggccaggtggcactgattggggatggggtgggcggcatcttgggatttgacgcactgtgtcattccgccaacgcaggcacaggctccagaggatcttcccggcgcggtagcatgaacaacgagctccttagtcccgagttcgggccggtaagagatccactagctgatggagtcgaaggcctcggccgagggtctcccgaacctagcgcccttccccctcagagaatcccttcagatatggccagccctgaaccagagggttcccagaactcgctgcaggctgctccggccaccacatcctcctgggagccccgccgagcaagcaccgcgttttgtccaccggccgccagttctgaagccccggacggcccctccagtactgcgcgactagatttcaaggtgtcaggcttctttctatttggaagtcccctcggcctggtgctggcacttaggaagactgtgatgcccgctctggaggcagcgcagatgcgtcctgcatgtgagcaaatatacaatctgttccacgccgctgacccatgcgccagccgtctggagccattgcttgctcccaagttccaagcaatcgcacccctgacagttccgagataccagaagttccctcttggcgatggctcctccctcttgcttgcagatacactacagactcatagcagtctctttttggaggaattggagatgctagtaccatccacccctacctctacctccggagcattctggaagggctcagagctagccacagacccccccgcgcaaccagcggccccctccacaacaagcgaggtggtgaagatactagagcggtggtggggcaccaaacgtatcgattatagcctttactgtccagaggcactgacagcctttcctactgtgacccttccccatctgtttcatgccagctactgggagagtgctgacgtggtggcattcatcctcagacaggttatcgaaaaagagcgaccacagctggccgagtgtgaggaaccaagtatttatagtcccgcgttccctagggagaagtggcagcgcaagaggacccaggtaaagattagaaatgtgacatctaaccacagagctagcgatacagtggtatgtgagggtcgaccccaggttctctccggtcgatttatgtacggacctctggatgtagtaaccctgaccggtgaaaaagtggatgtttatattatgacacagccactttcagggaaatggatccacttcggaacggaggttactaactcaagtggcagactcactttccccgtacctcccgagcgggcgttgggaattggggtgtacccagtgcgcatggttgttcgaggcgaccacacatacgctgagtgttgtctgacagtggtcgcaagagggaccgaggcggttgtgttttccatagacgggtcctttaccgcctcagtatctataatgggatccgatcccaaagtgcgcgcaggagccgtcgacgtggtgaggcactggcaagattccggatatctcattgtgtacgtaacggggagaccggacatgcagaagcatcgcgtagtggcctggctttcccagcacaactttccccacggcgtggtctccttttgcgacggactgacccatgacccactgcgccagaaagccatgttcctgcagtcactagttcaggaagttgagctgaatatagtagccggttacggctcaccaaaggacgtggccgtgtatgccgcactcggactgagcccctcccagacctatattgtaggtcgggccgtgagaaaattacaggcccagtgccagttcctaagcgacggttacgtggcccacttaggccaactagaggcaggcagtcactcccacgcatcaagcgggcccccaagggctgcgttgggaaagtcatcctatggcgtggcagcacctgtggacttcttacgtaagcagagccagctgttgaggagtcgtggaccaagccaggcagagcgcgaaggccctgggacacctcctaccactctcgctcggggaaaagccagatccatatctttgaaattagatagcgaagagtag

SEQ ID NO: 14931 - DNA, 882 bp, synthetic construct
  source 1..882: mol_type = other DNA; note = Synthetic coding sequence
atgaccgaagactcccaacgcaatttccgaagcgtgtactatgagaaggtgggctttaggggtgtggaggaaaagaaatccctggaaatcttactcaaggacgataggctggacactgaaaagttgtgtactttctcccagcggttccctctgccctcaatgtatagggccctggtgtggaaagtcctcctgggcattttgcctccgcatcacgaaagccacgcaaaggtcatgatgtatcgcaaggagcagtacttggatgtgttgcacgctcttaaagttgtgcgtttcgtctcagacgcgacaccgcaagcagaagtctatctccgaatgtaccagctggagagtggaaaattgccaagaagcccttccttccctcttgagcccgacgatgaggttttcctggcgatcgcgaaagcaatggaggagatggtcgaggacagtgtggactgttattggataacgaggcgctttgtcaatcaattaaacaccaaataccgagattccctaccccagttgcccaaagcttttgagcaatacctaaatctagaagatgggcgactgttaacccacctgcgaatgtgcagcgcagccccgaaacttccctacgatctgtggtttaagaggtgcttcgccggctgtctccctgaatcctccctgcagagggtttgggacaaagtcgtttccgggtcctgtaaaatcctggtgttcgtagccgtggagatattactgacttttaaaataaaggtcatggccctgaattccgccgagaagatcactaagtttctggagaatatcccacaagactccagcgatgccattgtctcaaaagcaatcgatctgtggcacaagcattgtggcaccccagtgcactcctcatag

SEQ ID NO: 14932 - DNA, 249 bp, synthetic construct
  source 1..249: mol_type = other DNA; note = Synthetic coding sequence
atgagcgagggggagtcccagaccgttctctcatccgggtctgatccaaaggtcgaaagcagctcatccgctccggggttgaccagtgtaagtccacccgtcacttcaaccacttctgccgctagtccagaggaagaggaggaaagcgaggatgagtctgagattctggaggaatccccatgcggtcggtggcagaaaagaagggaggaggtgaatcaacggaacgtgcctgggatcgactccgcctag

SEQ ID NO: 14933 - DNA, 5058 bp, synthetic construct
  source 1..5058: mol_type = other DNA; note = Synthetic coding sequence
atgtccttgccattttaccaacgttgtcaccagcactatgatctgagttatagaaacaaggatgtcagatcaacagtttcacactaccagcgtgaaaagaaaaggtcagctgtctatacccagggatccacagcctattcgtcacgttctagcgcagctcaccggagggagagcgaggcgtttagacgtgctagcgccagttccagccagcagcaggcgtctcagcatgcactgtcctccgaggttagccgaaaagctgcaagcgcatatgattacggtagtagccacggactgacagatagctctttgctgctcgacgattattcctccaaactctcacccaaacccaagagagccaagcatagcctgttgtccggcgaggagaaagagaatctcccttcagattatatggtgcccatcttctcaggccgacagaagcatgtaagtggcattaccgatactgaggaggaaaggatcaaagaagcagcagcttatattgcccagagaaacctcttagcttccgaagagggaataactaccagcaagcagtccaccgcctccaagcagaccacagcctctaagcagtcaaccgcctccaaacagtctacagccagcaaacaatctactgcctcaaggcagtctacggctagcaggcaaagtgttgtaagcaagcaagcgacctcagccctgcagcaggaggagacgagtgagaagaagtcaaggaaggtcgtcataagagaaaaggccgaaaggctgagcctccgcaaaacgttggaagagacggaaacatatcatgccaagctgaatgaggaccatcttttgcacgctccagagtttatcatcaagccgcgctcacacactgtctgggaaaaggaaaacgtcaaactccactgtagtatcgccggctggcctgaaccgagggtgacctggtacaaaaatcaggtacctatcaacgttcacgccaaccctggcaaatacattatcgaatctcgatacgggatgcataccctcgagattaacggatgcgacttcgaggatactgctcaatatagggcctctgccatgaatgtgaagggagaactgtccgcatacgctagcgtggtggtgaaaagatataaaggtgagttcgacgagactcggtttcacgcaggtgcatcaaccatgcctctgtcttttggtgtaacgccttacggctatgcctcccggttcgagattcacttcgacgacaagtttgatgtttccttcgggagggaaggggagactatgtctctcgggtgtcgagtcgtgataaccccagaaattaagcacttccagcccgagatccagtggtaccgaaacggcgtacctctgtcgccttccaaatgggtgcagacgttgtggagtggggagcgcgctaccctcactttctcccacctgaacaaagaggatgaagggctctacacaatcagagttcggatgggggaatactatgagcaatattcagcttacgtctttgtacgtgatgcagatgccgaaatcgaaggggccccagcagcacctctggatgttaaatgcttggaagctaataaggactacatcattatatcgtggaagcagcctgcagtcgacggcggctctccaattcttgggtatttcatcgacaagtgcgaagtaggcacagattcatggtcacagtgcaacgatactcctgtgaagtttgcacggttcccagtgaccgggctgatcgagggccgtagctatatattccgagtacgtgccgttaacaagatgggtatcgggttcccttcccgagtttctgaaccggtggccgccttggatccagctgagaaagcccgcctcaagtctagacccagtgcgccttggactggacagattattgtaactgaagaagaacccagtgaaggcattgtgcccggacctccaactgacttgtccgtgactgaggccacgaggtcctacgtggttctatcatggaagccccccggacagaggggccatgagggcatcatgtattttgtcgaaaaatgtgaagcggggaccgagaactggcagcgcgtgaacacagagctgccagtgaaaagccctaggtttgcgttattcgatttagccgaaggaaagagttattgcttccgggtgagatgttctaattccgccggcgtgggagaaccaagcgaggctaccgaggtgacggtcgttggagacaagcttgatattccaaaggccccgggtaaaattattccttccaggaacactgacaccagcgtagtcgttagctgggaggagtctaaagacgccaaggaactagtgggctattatatcgaagcctcagttgcaggatctggcaagtgggagccgtgcaataataacccagtcaaaggcagtcgatttacttgccatggacttgtcaccggacagagttatattttccgggttcgggccgtgaacgccgccggccttagcgagtacagccaggactccgaagccatagaagtgaaagccgcgatcggcggcggcgtgagtccagatgtgtgtcctgcccttagtgatgagcctggcgggttaacggccagtaggggtcgagttcatgaggccagcccacccacattccagaaggacgcactgctcggctccaagccgaacaagccctcactaccaagctcatcgcaaaacttgggacagaccgaggtgtccaaggtttctgaaactgtgcaggaagagctgaccccacccccgcagaaagctgcaccccaaggtaagtctaaatcagaccccctgaagaagaaaactgatcgggcccctccttctcctccatgtgacatcacatgtttggaatcgtttcgcgatagcatggttctaggttggaagcagcctgacaagatcggtggcgccgaaattacaggctactatgttaactacagggaagtaatcgatggcgttcctgggaagtggagagaagctaatgtgaaggcagtctccgaggaggcctataagattagcaatctgaaggagaatatggtgtaccagttccaggtggcagctatgaatatggcgggtttaggggcaccgagtgccgtctctgagtgctttaagtgtgaggagtggactatcgcggtcccaggacctcctcactcccttaagtgctccgaggttcgcaaagattcgctcgtactccagtggaagccccccgttcacagcggtcgtacccctgtgacggggtacttcgtcgaccttaaagaagccaaagccaaagaggatcagtggcgcggcctcaatgaggctgccattaagaacgtttatttgaaggttcgtggccttaaagagggcgtgtcctacgtgtttcgcgtcagggccatcaaccaggctggcgtaggcaagccatctgatttggcgggtccggtagtagccgaaacaaggcctggcactaaagaagtggtcgtgaacgtggacgatgacggtgtgatctccctgaactttgagtgtgataagatgacacctaagtccgagttctcatggtcaaaagattacgtttcaacagaagatagccccaggcttgaggtggaatccaaagggaacaagacgaaaatgacctttaaggacctgggaatggatgaccttggcatttattcgtgcgatgtgacagataccgacggcatcgcaagctcatatctaattgatgaagaggagttaaagcgcttacttgcgctttcccacgaacataaattcccaacggtccccgtcaaatctgagctagccgtcgaaattttggaaaagggacaggtgcggttttggatgcaggccgagaaactgagtggaaatgccaaggtgaactatattttcaacgagaaagagatatttgaaggccctaagtataaaatgcacatcgataggaacacagggataatcgagatgtttatggagaaactccaggatgaggacgaggggacttatacctttcagcttcaggacggaaaggctacaaatcattccacagttgtactggtcggcgatgtcttcaaaaaactgcagaaagaggcggagtttcagaggcaagaatggatccggaagcagggcccccatttcgtagaatacctctcgtgggaagttacaggtgagtgcaatgtactcctgaaatgtaaggtcgctaacattaagaaggagactcacatagtctggtataaagatgagagagaaatttcagtggacgagaaacatgactttaaagatggaatctgtactctgctgatcacggagttcagtaaaaaggacgctggaatttacgaagtgatactgaaagacgatcgaggaaaagacaagagtcgccttaagctggtagatgaagcattcaaagagctgatgatggaagtgtgcaaaaagattgctctgtcagctacagacctgaaaatccagtctactgccgaggggatacagctctattctttcgttacttattatgtagaggacctgaaggtgaattggagtcacaatggaagtgctatccgctacagtgatcgggtgaagacaggcgtaacgggggagcagatttggctacagattaatgagcccacacctaacgacaagggtaaatacgtgatggaactcttcgatgggaaaaccgggcaccagaagactgtcgacctatccggccaggcgtatgacgaagcctatgccgagttccagagactgaaacaggccgccatcgccgaaaaaaaccgtgccagggtgttgggcggtttacccgacgtagtgaccatacaggaggggaaagctctcaatctgacatgtaatgtgtggggtgatccaccccctgaagtctcttggctgaagaatgagaaagcactggccagcgacgatcactgcaacttgaaattcgaggcaggacggactgcatatttcactatcaacggggtgagtactgctgactctggtaaatatgggctggtggtgaaaaacaagtatggctctgaaaccagcgatttcaccgtttcagtctttatccccgaagaggaagcacggatggccgccttagagtctttgaagggcggaaagaaagcaaagtag

SEQ ID NO: 14934 - DNA, 5877 bp, synthetic construct
  source 1..5877: mol_type = other DNA; note = Synthetic coding sequence
atggctgaccggactgcgccccgttgccagctgagattggaatgggtgtatggatacagagggcaccaatgcaggaataatctttactacacagccgggaaagaggtagtgtacttcgttgccggggtgggtgtggtttacaatacaagagagcatagtcaaaaattctttctgggccataacgacgacattatcagcctggccctacaccccgacaagaccctggtggctacagggcaagtgggtaaggagccatacatctgcatttgggattcctacaacgttcagacagtttctctgctcaaagacgtccatacacacggggtggcttgcctggcctttgactccgacggccagcgcctggcctctgtgggtctggacgccaagaacaccgtctgtatatgggactggagaaaaggaaagttgctggcaagtgccacagggcacagcgatcgaattttcgatatttcatgggacccttaccagcccaatagggttgtgagctgtggtgtaaagcatatcaaattctggacactctgtggcaacgcattgactgctaaaagaggtatcttcgggaaaaccggtgatcttcagaccatcctgtgtttggcctgtgccaaagaggacatcacctactcaggcgcgctgaacggagatatttatgtgtggaaggggctgaaccttgtgaggacaatccagggtgcccactctgctggcatcttttccatgtacgcatgtgaggagggattcgctactggagggcgtgacggctgcatcagactgtgggataccgattttaagccaattacaaagatcgacctgcgtgagacagagcagggctacaagggcctgtccatccgttccgtgtgctggaaggcagacaggttgctagctggcacgcaggattcagaaattttcgaagtgatcgtccgagagcgggataaaccaatgctgatactacaggggcattgcgaaggggagctgtgggccctggcgttacaccctaagaagccacttgccgtgacaggcagcgatgacagatccgtacgactatggagcctggcagatcacgcactgatagcgaggtgcaacatggaggaggctgtgagatcagtcgccttttcccctgatggctctcagctcgctctcggcatgaaagacggaagttttatcgttttgcgagtgagggacatgactgaggtcgtccacatcaaggacaggaaggaggtcatccacgagatgaaattttcccccgatgggagttacctggctgttggcagcaatgatggacccgtcgacgtctatgcagtcgcccaaaggtataaaaagatcggtgaatgttcgaagtccttgagtttcattactcacatagattggtctctcgactctaaatatcttcagactaacgacggcgcaggagagagactgttttatcggatgccttccggaaagcctctgacctccaaggaggagatcaaaggaataccctgggctagttggacctgcgtaaaggggccagaggtgtcagggatctggccgaaatataccgaagtgacggatatcaactccgtggatgctaattacaactcaagcgtcctggtgtctggggatgacttcggtctggttaaactttttaagttcccttgcctgaaacgcggggctaagttcaggaaatacgtcggacatagcgctcatgtgactaacgtcaggtggtctcacgactttcaatgggtgctatcaacgggtggcgcagaccattccgttttccaatggaggttcatccccgagggcgtcagtaacgggatgttagaaactgcccctcaggagggcggggcagattcctactccgaagagtcagactccgatctgtcagacgtacccgagttggacagcgatatcgagcaggaggcccaaataaactacgacaggcaggtctataaggaggatctcccacaactgaagcagcagagcaaagagaagaatcacgctgtgcctttcctgaaaagggagaaggcccctgaagattcacttaagctgcaatttatccatggataccgcgggtacgattgccgtaacaacctcttctatacgcaggctggagaagtggtttatcacattgctgccgtggctgtcgtttacaaccgccagcagcacagtcagcgcttatacttaggccacgacgatgacatcctgtccctcaccattcaccccgtaaaagactacgtagcgaccggtcaagttggaagggacgccgccattcatgtttgggatacccagaccctgaagtgtctaagcctcctgaaggggcagcatcagcggggcgtgtgtgctctggacttctcagccgacggcaaatgcctcgtctcagtgggcctggatgacttccattcaattgtgttctgggactggaaaaaaggtgagaagatagctactactaggggtcataaagataagattttcgtggttaagtgcaatccccaccacgtagacaaacttgtgacggtaggaattaagcatatcaagttctggcagcaggccggaggcggttttacaagtaagagggggacattcgggtccgtgggcaagctggaaactatgatgtgtgtttcctatgggcgaatggaggatttggtgttcagtggcgcggctaccggggatatattcatctggaaggatattctccttctgaaaacagtgaaggcacacgatggtccagtctttgcaatgtatgcccttgataagggatttgtaaccggaggcaaggatggcatcgtggagctgtgggacgatatgttcgagcgctgcctcaaaacttacgctataaagcggtccgcactatctaccagtagtaagggcctccttttggaggacaacccatcgattagagctatcacattgggtcacggccatatcttagttgggaccaaaaacggagaaatcctagagatcgacaaatcagggccaatgacgcttttggtccaagggcacatggaaggagaagtttgggggcttgccgcacacccgttgttgcctatctgtgcaacagtaagtgatgacaaaaccctgagaatctgggagctcagcgcccagcaccggatgctggccgtgagaaaacttaaaaagggcggtcggtgttgcgctttttcaccggacgggaaggctcttgctgtggggcttaatgatggctccttcctggttgtaaacgcagatacagtggaggacatggtgtcatttcatcaccggaaggagatgatatcagatatcaagttctctaaggatactggcaagtacctggctgtggcctcacatgataactttgttgatatctacaacgtgctgacaagcaagcgggtgggcatttgtaaaggcgcctcatcctacatcacccatatagattgggacagcagaggcaagctgctccaggtcaattccggggctcgcgaacagctcttcttcgaagcccctagagggaagcgacacattatcaggccatctgagatcgagaagatagagtgggacacatggacatgcgtgctagggcctacctgtgagggaatctggccagcccatagcgatatcacagatgtcaatgcggccagcctcacgaaagactgcagtctcttagccacgggggacgacttcggcttcgtgaagttgttttcttatcccgtgaaaggtcaacatgccagattcaagaagtatgtgggccactcagcccatgttactaacgtccgttggctgcacaatgactccgtacttttgaccgtgggtggagcagacaccgctctcatgatatggactcgggagttcgtaggaacgcaggagtctaaattggtggattcagaggagtcagatactgacgtcgaggaagatggcggctatgattctgatgtggcccgtgaaaaggccattgattacaccaccaagatttacgctgtgtcaattagggaaatggagggcaccaagcctcatcagcaactcaaagaggtatccgtcgaagagaggccacctgtctcacgggcagccccgcagccagaaaagctgcagaagaataatattacaaaaaagaaaaaactggtcgaggaactggccctggaccacgtttttgggtaccgcgggttcgattgccgcaataacctgcattacctcaacgacggtgccgatatcatttttcataccgctgcggcaggaatcgtgcagaatctaagcactgggagccagtctttctatcttgaacatacagacgacattctgtgtctcaccgtgaaccaacatcctaagtaccgtaatgtagttgcaacttcccagattggcactacccccagcattcatatttgggatgcgatgactaagcacacgctgagcatgctgcgttgcttccattccaaaggcgtgaactatattaatttcagcgctacgggcaagttgctcgtttctgtgggcgtggacccagaacacactataacagtttggcggtggcaggagggcgcaaaagtcgcttcaagaggggggcacctggagaggatcttcgtggttgaattccggccagactcagatacacagtttgtctctgtcggcgtaaagcatatgaagttctggacactggccggctctgccttgttgtataaaaagggggtcattgggtcactcggcgcggcgaaaatgcagacaatgctgtctgtcgcctttggagccaacaacctgacattcacaggagctattaacggcgacgtgtatgtttggaaggatcacttcctaatccgtttagtcgcgaaagcccacactggccctgtgtttaccatgtataccacactcagagatggcctaattgtgactggcggcaaagagcgccctaccaaggaaggtggtgcagttaagctatgggatcaggaaatgaaaaggtgccgggcattccaacttgaaaccgggcaactggttgaatgcgtgcgttctgtgtgtcgaggcaagggcaagatcctagtcggcaccaaggacggagaaattatagaagtcggcgagaagaatgctgcgagcaacattctgattgacgggcatatggagggggaaatctgggggctagccacgcaccctagcaaggacctcttcattagcgcttctaacgacggaacagctcggatctgggacctcgccgacaaaaaactcctgaataaggtgtcacttggccacgcagctaggtgcgctgcctatagccccgacggggaaatggtcgctatagggatgaagaacggtgagtttgtgatccttctagtcaattccctaaaggtttggggtaagaagcgcgacagaaagtctgccatccaggatattagaatctctcccgacaaccgctttctagcggtaggaagctctgaacacacagtcgacttttacgatctcacacaggggactaacctgaacagaatcggatactgcaaggacatacctagctttgtgatacagatggatttcagcgccgatgggaagtacattcaagtatccacaggtgcctataagagacaggtgcatgaggttcctctgggcaagcaagttaccgaagccgttgtcatcgagaaaatcacctgggctagttggacctcagtccttggtgatgaagtgatcggcatttggcctcgaaacgccgataaagcagacgtgaactgcgcttgtgtcacgcatgctgggttaaacatagtgacgggggatgatttcggactcgtgaagctgttcgactttccatgtaccgagaagttcgccaagcataaacgttattttgggcacagtgcccatgtcacaaatatccgcttttcgtatgatgacaagtacgtggtttccaccgggggagatgactgcagtgtgtttgtgtggaggtgcctgtag

SEQ ID NO: 14935 - DNA, 630 bp, synthetic construct
  source 1..630: mol_type = other DNA; note = Synthetic coding sequence
atgaacccatctatgaaacagaaacaggaggaaattaaggagaatattaaaaactcttccgtaccccgacgcacactgaaaatgattcagcccagcgcatccggcagcctggttggccgggagaatgagttatctgcaggattgagcaaaagaaagcaccgtaatgaccaccttacgtcaacaactagctcgcctggtgtaatcgtccccgaatccagcgaaaacaagaacctgggaggagtcactcaggaaagcttcgatttgatgattaaggagaacccatcctctcagtattggaaggaggtcgcagagaagcgcagaaaagccttgtacgaggcactaaaggagaacgaaaagctgcacaaggagatcgaacagaaggataacgagatcgcccgtcttaaaaaagagaataaggagctcgcagaggtggctgagcatgtgcagtacatggccgaactgatagagcgactcaacggtgagcccctggataacttcgaatcattggacaaccaggagtttgactctgaagaggagaccgtcgaggacagccttgtggaggatagcgagatcggcacttgtgctgaaggcactgtgagctctagcaccgacgccaaaccttgtatttag

SEQ ID NO: 14936 - DNA, 1635 bp, synthetic construct
  source 1..1635: mol_type = other DNA; note = Synthetic coding sequence
atgaacacaagcatcccataccagcagaacccctacaaccctaggggtagcagcaatgtgatacagtgttataggtgcggtgacacttgtaaaggggaagtcgtccgcgtgcacaataaccatttccatatcaggtgttttacctgtcaggtgtgtggatgcggcctggcccagagcggtttctttttcaaaaaccaggagtatatctgtactcaagactaccagcagttgtatgggacaaggtgcgattcatgtcgagactttattacaggtgaagtcattagcgcactgggcaggacctaccaccctaagtgttttgtttgtagtttgtgcaggaagccctttccaattggcgacaaagttacgtttagtgggaaggagtgtgtgtgccagacttgctcccagtcaatggcgtcttccaagccaattaagattagggggccatcacactgtgccggatgtaaggaagaaataaaacatggtcagagcctgctcgccttagacaaacaatggcacgttagttgcttcaaatgccagacatgctccgttattttaacaggagaatatataagcaaagatggggtgccttattgcgagtcagattatcacgctcagtttgggattaagtgcgagacctgtgaccggtatatttccggaagagtgctcgaggctggcggaaagcactaccatcctacttgcgctcgctgcgtacgatgtcaccaaatgtttacagagggagaagaaatgtacctgaccggttcagaggtatggcatcctatttgcaagcaggcagcccgtgcagaaaaaaagctgaaacacaggcggacatctgaaacttctataagtcctccgggcagtagtattggaagcccgaaccgcgtcatttgcgacatttacgagaatctagatctcaggcagaggcgggcgagtagcccaggatacatcgacagccccacatacagtcgccagggtatgagccccacctttagccggagcccacatcattactaccgctccggggacctatctacggcaactaaaagtaaaactagcgaggacatctcccagacctcaaagtatagcccaatatatagtcccgacccatactacgcatctgaaagcgagtattggacttaccatggatctccgaaagtgccacgtgcacgacggttcagttctggcggtgaagaagatgactttgatcgttcaatgcataaactccagagcgggattgggaggctcatcttgaaggaagagatgaaagcccgcagctcctcttacgcggatccatggaccccccccagatcatccacatcgtcccgggaggccctacataccgctgggtatgagatgtcgctgaacggttccccaagaagccactacctagcagacagtgatcccttaatttcaaaatctgcaagtctgcccgcctatcgacggaacgggcttcatcgaactccttctgctgacctgtttcactatgacagtatgaacgctgtaaactgggggatgcgagagtacaaaatttacccttacgagctactcctggttactacccgtgggcgcaatcgcttgcccaaggatgtagatcggacgcgtctcgaagggaacttctggaaatcggggtgtctctag

SEQ ID NO: 14937 - DNA, 840 bp, synthetic construct
  source 1..840: mol_type = other DNA; note = Synthetic coding sequence
atgaccccctccgaaggagccagggccgggacaggaagggagctcgagatgctggacagcctcttagccttaggaggccttgtgctacttcgcgatagcgtcgaatgggaaggccgcagtctgctgaaggcactggttaaaaaatctgccctgtgcggtgagcaggttcatatcctcgggtgtgaagttagtgaggaggagttcagagagggattcgattctgacatcaacaaccgcctagtttaccacgatttcttccgggatccacttaactggagtaagacggaggaggcctttccaggtggtcccctcggcgctctgcgtgctatgtgcaagaggaccgacccggtgcccgtcaccatcgctttagattccctgagctggttgcttttacgcctcccatgcacgaccctttgtcaggtcctccatgcagtctcacaccaggacagctgccccggcgattcatcatccgtcggtaaagtatctgtactcgggctgctgcacgaggaactgcatggcccgggcccagtgggagctctatcgagcctggcacagacggaggtcactctgggaggcaccatgggtcaggcttccgcacacatactgtgcagacggccacgccagaggccaacggatcagactcaatggtttagcatcctgccagatttctcactggacttgcaggagggaccctccgtagagagccagccctacagcgaccctcacattcccccagtcagcaagaatgctaaagcgagaacgcgaaagtgcagcctggtctctggccatgggcgcgagaacaagtcttgcaggggctggggctggggacagggcttttag

SEQ ID NO: 14938 - DNA, 405 bp, synthetic construct
  source 1..405: mol_type = other DNA; note = Synthetic coding sequence
atgagcgagaatgccgcacccggattatgcggggagctcctgttgcagcggggcaccacaaaggtagccaccggactggttctcaacagagatcagcggctggcatgggccgagaattcaatcgacttcatctcccgggaactctgtgcccatagcatccggaaactccaggcacacgtgctgctcattaaggcagtccatgggtactttgactcccggcagaactactctgagaaagagtcattatctttcatgattgacacaatgaagagtactctgaaagagcagtttcagttcgttgaggtgcccgggaaccactgtgtgcatatgagtgaacctcaacatgtggccagcattataagcagtttcctgcaatgtactcacatgctgccagcccagttgtag

SEQ ID NO: 14939 - DNA, 1350 bp, synthetic construct
  source 1..1350: mol_type = other DNA; note = Synthetic coding sequence
atgatgttgggtactgaaggaggggagggcttcgttgtcaaggttaggggcctcccatggtcctgctcagctgacgaagtccagagatttttcagtgactgtaagattcagaacggggcccagggaattagattcatatacacaagagagggtagaccttctggggaggcctttgtcgagctggagtctgaggatgaggtgaaattggcattaaaaaaggaccgcgagacgatggggcaccggtatgtggaggttttcaaaagcaataacgtggaaatggactgggtactgaaacacacaggccccaactctcccgacacagctaacgacgggtttgtgagactccgcggactgccgttcgggtgtagcaaagaggaaatcgtgcagttcttcagtgggctggaaatcgtgcccaacgggatcacattgcccgtggacttccaggggagatccacaggagaggcttttgttcaatttgcctcacaggagattgcagaaaaagccctaaagaagcataaggaacgaattgggcaccggtacattgaaatattcaagtcctccagagcggaagtccggacccactatgatccaccacggaagctcatggctatgcagaggcctgggccttacgataggcctggagctggccgagggtacaacagtatcggaaggggcgccggctttgagcgaatgcggcggggggcttatggtggcggatatgggggttatgacgactataatggctacaacgacggctacggatttggatccgatagatttggcagagacctgaactattgcttctctgggatgtccgatcatcggtatggcgatgggggatcaactttccagtcaacaactggccactgcgtacacatgaggggactaccctaccgggccaccgagaatgacatctataattttttctcccctcttaatcccgtgagagtacatattgaaatcggccctgatgggcgggtcaccggcgaggccgatgtcgagtttgccacccacgaagatgcagtggcagccatgagtaaggacaaggccaatatgcagcacaggtacgtggagctctttttaaacagcacggcaggcgcatctgggggagcatatgagcaccgctatgtggaactttttctgaactccacagccggagcaagcggcggagcttacggatctcagatgatgggcggcatggggctcagcaatcagagcagttacggggggccggcatcccagcagctgagcggcggatacggtggaggttacggagggcagtctagtatgtcaggctacgaccaggtacttcaggagaacagctctgactttcagtcaaatatcgcctag

SEQ ID NO: 14940 - DNA, 4077 bp, synthetic construct
  source 1..4077: mol_type = other DNA; note = Synthetic coding sequence
atgggcaaccagctcgcgggaattgcaccctcccaaattctttccgtcgaatcctatttttccgacatccacgacttcgagtacgataaaagccttggcagtactaggttctttaaagtggcccgggctaagcatcgggaggggctcgtggtggtaaaggtgtttgccatccaagatccgaccctccccctgaccagctataaacaagagctggaggagctgaagatcagactgaattctgcccaaaattgcttgcccttccaaaaggcttctgagaaagcatccgaaaaagccgcaatgctatttcgccagtacgtgcgggacaacctgtatgaccgcataagcactcgcccatttctgaacaatattgaaaaacgctggattgccttccagattctgaccgccgtcgaccaggcccacaaatccggcgtccgtcacggggacatcaagactgaaaacgtgatggtcacatcatggaactgggttctattgaccgacttcgcctcttttaaacccacttacctgcccgaggacaaccctgccgactttaactatttcttcgatacttctcgcagacggacatgctacatcgcccctgagaggtttgttgatggcggcatgtttgctaccgagttggagtatatgagagaccctagcacaccactggtggacctgaacagtaaccagaggaccaggggggagctcaaacgcgctatggacattttttccgctggatgtgtcatagcggagctgttcacagagggggtacccttgtttgatctgtcgcagctcctggcctataggaacggccatttttttcctgagcaggttctgaataagattgaggaccacagcatccgcgaactcgttacccagatgatccaccgcgaaccagacaagagactggaggctgaagattacttgaaacaacagagagggaatgcctttcccgaaattttttatacattcctccagccatacatggcccagtttgcgaaagagacattcctctccgccgacgagagaatcttggtcatcaggaaggacttggggaacatcattcacaatctctgtggccatgacctacctgaaaaggccgagggcgaaccgaaggagaacggtctggttatcctcgtcagtgtgattacgagctgcctgcagacacttaagtactgtgatagtaagctggccgccctggagcttatactgcacctggctccgcgattgtccgtggagatccttctggaccggattacgccttaccttctccatttttcgaatgattcagtgccgcgggttcgcgccgaagctctgagaactctcactaaggtattagctctcgtcaaagaagtaccacgtaatgatatcaatatttacccggaatatatactgcccggcatcgcccacttagcacaggatgatgctaccattgtacgattagcatatgccgaaaatatcgccttgctggccgagaccgccctccgcttcctcgaactggtgcagttgaagaacttgaacatggaaaacgaccccaacaatgaagaaatcgatgaggttacccaccccaacggaaattacgatacagagctccaggccctgcacgagatggtccagcagaaggtcgtaacattattatcagacccggagaatatcgtcaagcaaaccctgatggaaaacggtatcactcgtttgtgtgtctttttcgggagacagaaagccaacgacgtgttgctatctcatatgattactttccttaacgataagaacgactggcatctcagaggagcattcttcgatagtattgtgggggtcgccgcgtacgtgggctggcagtcttccagtatcttgaagcccctcctgcagcaaggcttatccgacgccgaggagttcgtgatagtgaaagcgttgtacgctctgacgtgcatgtgtcagctggggctcttgcaaaagccacatgtgtacgaattcgctagcgacatcgccccctttctttgccacccaaatctctggataagatatggggctgtaggattcattacagtcgttgcccgacaaatcagcacagctgatgtttactgcaagctgatgccttacctcgatccctacataacacagcctatcatccagatcgaacgaaaactggtcttactgagcgttcttaaagagcctgtctcccggtcaatcttcgactacgcactgagatcaaaggatataaccagtctgtttcgtcacctccatatgaggcagaagaagcgtaacggctcgcttccagattgccccccaccagaagatcctgccattgcccagctcctcaaaaaacttctgtcccagggaatgacggaagaggaggaagacaagttgcttgcactcaaagattttatgatgaagagcaataaagcgaaggcgaatatcgtcgaccagtcccacctgcacgattcttcccagaagggggtgatcgacctcgctgctttgggcatcaccggccgccaggtggacctggtcaagactaagcaagaacccgacgacaagcgcgcccgcaagcatgtgaagcaagacagcaacgtcaatgaagaatggaagagtatgttcggttccttggaccccccaaacatgccccaggccctcccaaaagggagcgatcaggaagtgattcaaaccgggaaaccaccccgaagtgaaagttctgctggaatttgcgtgccacttagcacctcatcacaagtgcccgaagtgacgaccgttcagaataaaaagccagttatcccagttcttagttcaacgatccttccctcgacataccagattcgcatcacgacctgcaagactgagctacagcagctcattcagcagaaaagggagcagtgtaatgctgaacgaatagcgaaacagatgatggagaacgctgagtgggagagtaagccacccccgcccggctggagacctaaaggcctcttagtagctcacctgcatgagcacaagtccgcagtcaaccgcattcgcgtctctgacgagcatagcttatttgccacatgctcgaacgatggtacagttaagatttggaattctcagaagatggagggcaagactacaactaccagaagcatcctcacctactctcgcatcggaggccgagtgaaaactctaaccttctgtcagggcagtcattacctggccattgcatccgacaacggagctgtgcagttactgggcatcgaggcatctaagctgcccaagtcccctaagatccaccccctccagagccggattctcgaccaaaaggaggacggctgtgttgtggacatgcatcatttcaacagcggcgcccagtccgtgctggcatacgcaactgtcaatggctcactggtgggatgggatttgaggtcttcatccaatgcctggaccctgaagcacgacctgaaatcagggctgataacaagctttgcagtggatatccaccagtgttggctctgcatcggaacaagctctgggacaatggcctgctgggacatgagattccagctacctatatcctcccactgccatccaagcagggcgcgaattcggcgattgagtatgcacccactctaccagtcctgggttatcgccgccgtgcagggtaataacgaggtgtccatgtgggatatggaaactggtgatagacggtttacactgtgggcctcttcggcgccccccctgtccgagcttcagccctcaccccatagtgtgcatgggatctactgtagccccgcggatggcaatcccattcttctcacagctggatctgatatgaagatccgcttctgggacctcgcctaccctgaacggtcatacgtcgtcgctggaagcacctcgtccccgagcgtgtcatattacagaaagattattgaaggtacagaggtggtgcaggagatccagaataagcagaaggtcgggcccagcgacgatactccgaggaggggtcccgagtccctacccgtcggtcaccacgatatcatcacagatgtggccacatttcaaaccacgcagggctttatagtaactgcatctcgcgatgggattgtgaaggtatggaaatag

SEQ ID NO: 14941 - DNA, 993 bp, synthetic construct
  source 1..993: mol_type = other DNA; note = Synthetic coding sequence
atgccggtcgtaaccaccgacgcagagagtgaaactggcattcctaagagtctgtctaacgaacccccatccgagaccatggaggaaattgagcacacatgccctcagcctcgactcaccctgacagcgcctgcccctttcgccgatgagaccaattgccaatgccaggccccgcatgaaaagcttacaatcgcacaggcacggctcggaacccctgctgacaggcctgtccgcgtgtacgctgacgggatattcgacctctttcacagcggacatgccagggccctgatgcaggctaaaactttgtttccaaattcatatctactcgttggggtctgcagcgatgatctgactcacaaattcaagggctttaccgttatgaacgaagctgagcggtacgaggcgctcaggcattgccggtacgtcgacgaagttataagggatgcaccctggacattgactcccgagttcttggagaaacacaagattgacttcgtggcccatgacgatattccctattcctccgctggtagcgacgatgtgtacaaacatatcaaggaggctggaatgtttgttcccacccaaaggaccgagggcatcagcaccagcgacatcattacacgaatcgtgagagattacgatgtgtacgctcggaggaatctccaacgcggatataccgccaaagaattgaatgtctccttcattaacgaaaaacgctacagattccagaaccaagtagacaagatgaaggagaaggttaaaaatgtagaggagaggagtaaggagtttgtgaaccgagtggaggagaagtcacacgacctcattcagaagtgggaggaaaagtctcgcgaatttatcggcaactttctcgagctgttcggcccagacggcgcttggaaacagatgtttcaagagcggtcctctcgaatgctgcaggccctgtcccctaaacagtcacccttaaagagctgggccagatgcagggatttttag

SEQ ID NO: 14942 - DNA, 2025 bp, synthetic construct
  source 1..2025: mol_type = other DNA; note = Synthetic coding sequence
atgcagacaagctccagcagatccgtgcatctgagcgaatggcagaaaaattacttcgcgataacttcaggaatttgtaccggaccgaaggcagacgcttacagggcacagatcttgcgaatacagtatgcctgggctaactctgagatatcccaggtttgcgctaccaagttattcaagaaatacgccgagaaatacagcgccattattgactccgacaacgtcgaaagtgggctcaacaattacgcagaaaatattctgacgcttgcagggtcacaacagacggactccgacaaatggcagagcgggctgtccatcaacaatgtgttcaaaatgagcagcgtgcagaaaatgatgcaggcgggaaaaaagtttaaggattcactcctggagccagctctggcttccgtagttatacataaagaggccaccgtgttcgaccttcccaagttcagcgtctgtgggtcttcccaggagagcgattcgctccccaactcagctcacgatcgtgaccggacgcaggattttcccgaatcaaacagattgaagctcctgcagaatgcacaacctcctatggtcacaaacactgcgagaacttgccccaccttcagcgcacctgtaggtgaatctgcgactgccaagttccatgtgacacccttatttgggaacgttaaaaaggaaaaccattcctccgccaaagaaaatatcggtctcaacgtgttcctgtcaaaccaatcttgtttccctgctgcgtgcgagaaccctcagcgtaagtctttctacgggagcggtacaatagatgctcttagcaaccccatcctaaataaagcgtgcagcaagacagaagataacgggcccaaggaggatagcagcctgcctaccttcaaaactgccaaagaacagctatgggtggaccagcagaagaagtaccaccagccacagcgcgcttccggttcctcctacggcggggttaaaaagagtcttggagcgtctcgatctaggggtatcctgggtaagttcgtgcccccaataccaaagcaggatggaggcgaacagaatggcggtatgcagtgcaagccttatggagctggcccgacagaaccagcccaccctgtcgatgagcgattaaagaatcttgagcccaagatgattgaattaatcatgaatgaaattatggaccatggcccaccggtgaattgggaggacatcgctggagtagagtttgccaaggccaccattaaggaaattgtggtctggcctatgctgagacccgacatttttaccggcctgcgaggaccccctaaaggcatcctgctgtttggcccacccggaacaggcaaaactttgattggcaaatgtatagccagccagtcgggggccacatttttctccatcagtgccagttctctaacatctaagtgggtgggtgaaggggagaagatggtgagagcccttttcgccgtcgctaggtgccagcagcctgccgtcatcttcatcgatgaaatcgattccctgctctcgcagcgcggcgacggagaacatgaatcctcccgccgcatcaagactgaatttctcgtgcagctggatggcgctaccacaagctcagaagataggatcctggtggtcggcgccacaaaccgcccccaagagattgacgaggcagcccgtaggaggctagtcaagcgcctttatattcctctgcctgaggcctccgcgcggaaacagatcgtgatcaacctcatgtctaaagagcagtgctgtctttctgaagaagaaatagaacagattgtgcaacaatccgatgctttctctggtgctgacatgacccagctgtgtagggaagcgtccctaggaccaattcgttcactacaaactgccgacattgcgacaatcactccagaccaggtacgcccaatcgcatacatcgattttgaaaacgcttttaggacggtgagaccgagtgtttctcccaaagacctggagctgtatgaaaattggaacaaaaccttcggttgcggaaagtag

SEQ ID NO: 14943 - DNA, 1143 bp, synthetic construct
  source 1..1143: mol_type = other DNA; note = Synthetic coding sequence
atgctccggaggaaacccagtaatgcctccgaaaaagaaccaacacagaaaaagaaactgagcctccaaaggtcttcctcatttaaggattttgctaaatcaaagccctccagccctgtcgtgtctgagaaagaatttaacctcgacgataacattccagaagacgatagcggcgtaccgacccctgaagatgctgggaaaagcggcaaaaaactggggaagaagtggagggcggttatcagcagaacaatgaatagaaagatgggcaaaatgatggtcaaggccctgagcgaggagatggccgacactctcgaggaagggtcggccagcccaacaagccccgactatagtttggactcaccagggcctgagaaaatggccctggccttcagtgagcaagaagagcacgagctcccagtattgtccaggcaggcatctaccggctccgaactgtgttctccttcacctggaagtgggtcttttggcgaggagccccctgctccccagtacacagggccattttgtggtagggctcgcgttcacactgattttactccaagcccctatgatcatgatagcctgaaactccagaaaggcgacgtaatccagatcatagaaaagccgcctgtcggcacctggctcgggctcttgaatgggaaggtgggttccttcaaattcatctacgtggacgttctgccggaggaagcggtgggccacgcccgacccagtcgaaggcagtctaagggcaagcggcctaagcctaagaccctgcatgagttactcgagaggattggcctggaggagcacacgtctactcttcttctcaacggataccagacgctagaggatttcaaggagcttcgagagactcacttaaacgagctgaatatcatggatcctcagcaccgcgccaaactactaactgctgccgagctactgttagactacgacacaggctcagaggaggccgaggagggggctgaaagcagccaggagccggttgcccacaccgtctccgaaccaaaagtggacattccgagggactccggctgctttgaagggtcagaaagcggacgcgacgacgctgagctggctggcacggaagaacagctgcagggtctgtccctggccggagcaccatag

SEQ ID NO: 14944 - DNA, 1692 bp, synthetic construct
  source 1..1692: mol_type = other DNA; note = Synthetic coding sequence
atgaacccactatttgggccgaatctctttctcttgcaacaggagcagcaggggctggcagggcccctgggcgactcattgggcggagatcacttcgctggcggcggagatctgcctcccgctccgttgagtccagccggaccggcagcatattctccaccagggcctggcccagccccccccgctgccatggccctccgcaacgacttgggatctaatattaatgtcctgaagacccttaatctgcggtttcggtgttttctggcaaaagtccacgaactggaacgcaggaatcgactgctggaaaagcaactacagcaggcactagaggaggggaaacagggccgccgagggctcggacggcgagaccaggccgtgcagaccgggtttgtcagccccatcagacccttaggtctccagcttggggccagaccagcagctgtctgtagtcccagcgccagggtgctgggaagccctgctagatctcctgccggccctttagccccttcagccgcgtcgctctccagctcctccactagcacgtccacaacctacagttcaagtgctcgctttatgcctgggacgatctggtctttttctcacgcccggaggctgggtcctggcctcgaaccgacactggtccagggaccgggactctcctgggtgcaccctgacggtgtgggcgtccagattgacactattacacccgagatccgagctttgtataacgttttggccaaagtgaaaagagaaagagatgaatacaaacgccgatgggaggaagagtataccgtgagaattcagctccaagatagagtgaatgaactgcaagaagaggcccaagaggctgacgcctgccaagaagaactggccctaaaagtagagcagttgaaggctgaacttgtggtgttcaaaggattaatgtccaacaacctgagcgaactcgacacaaagattcaggagaaagccatgaaagtggacatggatatttgtcggaggatcgatattacggctaagctatgcgatgtggcgcagcagaggaactgcgaagacatgatccagatgttccagaagaagctggtgccgtccatgggagggcggaagagagagcgaaaagcggccgtggaagaggacactagtctgtctgaaagtgagggcccacggcagcctgacggagatgaggaggaatccaccgctctgagtatcaatgaggagatgcagcggatgctcaatcaactcagagaatacgatttcgaagacgattgcgactcgctcacttgggaggagaccgaggaaacactgctgttgtgggaggatttcagcgggtacgcaatggcggctgccgaagcgcagggtgaacagcaagaggacagcttggagaaagtcattaaggataccgagtccttgttcaaaacacgtgaaaaggagtaccaagagaccatcgaccaaatcgagctggagctggccacagcaaagaatgatatgaaccgccacctgcacgagtacatggagatgtgttcaatgaagcggggtcttgatgtgcagatggagacgtgtcggaggcttatcacccagtctggagatagaaagtcccctgcttttacagccgtaccactatccgatcctccgccgccccccagtgaagctgaggacagtgaccgagatgtcagttccgacagtagtatgagatag

SEQ ID NO: 14945 - DNA, 1893 bp, synthetic construct
  source 1..1893: mol_type = other DNA; note = Synthetic coding sequence
atgctgttcctggcgattccccagtctatcgacgaagagaccgaagtctggagtgaccacattattttccctcggataccacgtggccctgttcaacagccgctggaggatagaattttcactcccgctgtgagcgccgtgtactccaccgtgacccaggtggctaggcaaccaggtacccccacaccctctccgtattctgcgcacgagattaacaagggtcaccccaacctagctgcaaccccccccggacacgccagtagtccaggcctgtctcaaaccccttacccctccggccaaaacgcagggccaactaccctggtgtacccacagactcctcagaccatgaactcgcagccccagacaagaagcccatttgctgcaggaccaaggcccccacatcaccagtttttccagcggcctcagatacagcctcctagagccacgatccccaactcctccccctccataaggccgggggcgcagacgccgacggccgtctatcaggccaatcagcatattatgatggttaatcatctccccatgccctatcctgttccccagggaccacagtactgcattccacaatacagacacagcggtcctccctacgtggggcctccccaacagtacccagtgcagccccctggcccgggcccattttacccagggcctggtcctggcgacttccccaatgcctacggcaccccgttctatccgagccaaccggtctatcagtcagcacctatcatcgtccctacacagcagcagccaccaccggctaagagggaaaaaaagactatccgcatcagagaccctaaccaggggggaaaagatatcacagaggaaataatgtcaggcggcggcagccgcaatcctactcccccaatcgggcggcctactagcactcccactcccccccagcagttacccagccaggtccctgagcacagccctgtagtgtatggcaccgtagagtctgctcacctggccgcgtctaccccggttaccgcagcgtccgaccagaagcaagaggaaaaaccaaaacctgacccagtccttaagtccccttcacccgtactgcggctcgtgctgtccggtgaaaagaaagaacaggaggggcagacaagcgagaccaccgcaattgtaagcatagccgagctccccctgcctccttctccaacaaccgtcagcagcgtagcccggtccacaattgccgcccccacctcctctgctctgtcaagccagcccatcttcaccaccgccattgacgaccggtgtgaactgagctcacccagagaagatacgatccccattccgtccttgacctcttgcaccgagacaagcgatcctctacctacaaacgaaaatgacgatgacatctgtaaaaagccatgcagcgtagccccaaacgacattcccctggtaagtagtacaaatctcattaatgaaattaatggcgtatctgaaaaattatctgccacagagtcaattgtcgaaatagtgaagcaggaggtgctgcccctgacgctcgagctggagatactcgagaacccccccgaggaaatgaagctcgagtgcatacccgctccaatcactccttccaccgttccatcctttccccctaccccaccgactcctccggcctctcctccgcatacacctgtcatagttccagctgccgcaactactgtctcctccccctccgcagcaattaccgtgcagagggttctggaggaggacgagtcaatcagaacttgcctgtctgaggacgcaaaagagattcagaataaaatcgaggtggaggccgacggacaaactgaagagattctggattcccagaatctcaactcccgcagaagtccagtccctgagacctctaatgagtgctag

SEQ ID NO: 14946 - DNA, 414 bp, synthetic construct
  source 1..414: mol_type = other DNA; note = Synthetic coding sequence
atgatattgccaacaaaagcgatggcaacccaggagctgacagtgaagaggaaactctccgggaacactctgcaggtgcaggcatcttcaccagtggccctgggcgtgcgcatacctaccgttgcccttcacatgatggagttgttcgacactaccgttgaacagctgtactcaatcttcaccgtcaaagaactgaccaacaagaagatcattatgaaatggcggtgcgggaactggccggaggaacactacgccatggtggcactaaactttgtgcccactctgggacaaacagagctgcagctgaaggaatttctgtccatttgtaaggaagaaaatatgaaattctgctggcaaaaacagcacttcgaggaaatcaaaggctcactgcaattgacccctttgaatggttag

SEQ ID NO: 14947 - DNA, 1248 bp, synthetic construct
  source 1..1248: mol_type = other DNA; note = Synthetic coding sequence
atgatgctgggccccgagggcggagaagggttcgtagtgaagcttcggggcctcccatggtcttgctctgtggaggatgttcagaacttcctgagcgattgtacgatccatgacggagcagctggcgtgcatttcatctatacacgcgagggcaggcagtcgggagaggcttttgtggaacttggaagcgaagacgacgtgaagatggccttgaagaaagacagagaaagcatgggacaccgatacattgaggtgtttaaaagccatcggaccgagatggactgggtcctcaaacactcaggcccaaattcagccgattctgccaacgacggcttcgtcaggctgcggggactgccttttgggtgtacaaaggaggaaatcgtccagttttttagcggcctggagattgttccaaacggaatcacattgccggtggacccggagggaaaaataaccggagaggccttcgtgcagttcgcttcacaggaactggctgagaaagcactcgggaagcacaaggagcgaataggccaccgctacattgaagtattcaagtcctctcaagaagaggtgagaagctatagtgacccacccctgaaattcatgtctgtgcagcgccccggcccctacgaccgccctggcaccgccagaagatatatcggcattgtgaaacaggcagggcttgagcgaatgcgtcctggagcctattctaccggatatggggggtatgaggaatattccggcctgagcgacggctatggatttacgaccgacctctttgggcgggacttgtcctattgcctcagtgggatgtacgaccaccgttacggtgattctgagtttacagtccaatcaacgaccggacactgtgtccatatgagaggccttccttataaggctacggagaacgacatctataatttcttttcgcccctgaaccctgtgagagtgcatattgaaatcggaccagacggtcgagtgacaggcgaggctgatgtagagttcgccactcatgaggaggctgtcgccgccatgagcaaagatcgcgctaacatgcaacacaggtacatcgaacttttcctgaactccaccacaggcgcctcaaatggggcctattcaagtcaagttatgcagggcatgggggtgagtgcagcgcaggctacttattctggtctggaatcccagagtgtctcaggctgctatggggctggctactccgggcagaatagtatgggcggttatgattag

SEQ ID NO: 14948 - DNA, 1464 bp, synthetic construct
  source 1..1464: mol_type = other DNA; note = Synthetic coding sequence
atgtccagccctctcgcctcgctttccaagactaggaaggtcccattaccctccgaacccatgaacccgggaaggcgtggcatcaggatctatggggacgtgccagccagccacgatagtgagttaatggcctttatgaccagaaagctgtgggacctggagcagcaggttaaggctcaaacagacgaaatcttgagcaaagaccaaaagattgccgcactggaagacctggttcagactttgaggccgcacccagcagaggcaaccctgcagcggcaagaggagctggagactatgtgcgtgcaattgcagagacaagtacgtgaaatggaacgctttcttagtgactatggccttcagtgggttggagaaccgatggaccaagaggacagtgagtctaaaactgtgagtgaacacggagaacgcgactggatgacagccaagaaattctggaagcccggcgattcactggccccaccagaggtggattttgatcggctccttgcatccctgcaggacttatctgagctggtcgtcgaaggcgatacccaggtcacgcccgtgcccggcggcgccagattgcgtaccctggaacctattccgctcaagttatacagaaacggaatcatgatgttcgacggcccgttccaaccgttttatgacccttctacccagcgatgcttaagggatatactcgatgggtttttccctagtgagctccaacgtctgtaccctaacggggtacctttcaaagtgtcggatttaaggaatcaggtatacctggaagatggacttgatccattcccgggggaagggcgcgtcgttggccgccaactaatgcataaggccttggatcgtgtagaggaacatccaggctctcgcatgaccgctgaaaaattcctgaatagattacccaagtttgtgatacgccagggggaagttattgatattcgcgggcccatcagagacaccctgcagaattgttgccctctccccgcacgaatccaagagatcgttgtggaaactcctactctcgcggcagaaagagagcgctcacaggagagcccaaatactccggcccctcccctgtccatgctgcgcataaagtccgagaacggagagcaggcattcctgctaatgatgcagcccgacaataccataggtgatgtacgcgcgctgctagcacaggcaagagtgatggatgcatccgcttttgagattttctctacgttcccaccaaccctgtatcaggatgacacccttaccctccaggcagccggactggttcccaaagccgcactcctgctgcgcgcaagacgcgctcccaaaagctcgttgaaatttagtcctggcccctgtcctggtcccggccctggccccagcccaggacctgggcctggtccctcaccaggccctggcccgggcccgtctccatgccctgggccaagtccctcgcctcagtag

SEQ ID NO: 14949 - DNA, 1467 bp, synthetic construct
  source 1..1467: mol_type = other DNA; note = Synthetic coding sequence
atgagtgcgttttgcctgggattggtggggagagcctcagctcccgctgagcctgacagcgcatgttgtatggagttgccagcagccgcaggcgatgctgtaagatctccagccgcagccgctgccctcatcttccctggcggctcaggcgaactggaactcgcacttgaggaagagctggccctactggcagccggcgaacggccttctgatcctggcgaacatcctcaggcagaattactgtctgtgatacggcaaaaggaaaaggacttggtgctggctgcaagactaggaaaggctcttctggagagaaatcaggacatgagcaggcagtatgagcagatgcacaaagaactgaccgataaactggagcacctggagcaggagaagcacgagctcaggcggcgtttcgaaaaccgcgaaggtgaatgggagggacgtgtgagtgaattagagagtgacgtgaagcagctgcaggatgaacttgagaggcagcaaatccacctgagagaggccgacagggagaagtctcgggccgtccaggagctgtctgagcaaaaccagcgcttactagatcagcttagccgggccagcgaagtggagcggcagttatcaatgcaagtgcacgccctcagggaagacttccgtgagaaaaactcctccaccaatcaacatataatccgcttggagtccctacaagcggaaatcaagatgctgtctgatagaaagcgggagcttgaacatcgccttagtgccactttggaagagaatgacttgctgcaaggaaccgtggaggagctccaggatcgagttcttatactcgaacggcaagggcacgataaagacctgcagcttcaccagagccagctggaactacaggaggttaggctaagctgcaggcagttacaggtcaaagtggaggagctcacggaagaacgctccctgcagtctagcgctgctactagcacctctctgctcagtgagatcgaacagtccatggaagccgaggagttagagcaggaacgggagcagttacgtctccagctgtgggaggcttactgccaggtaagatatctgtgcagtcacctgcgagggaacgacagtgctgacagcgctgtgagcaccgacagttcgatggacgagtccagtgaaacttcatccgccaaggacgtgcccgcgggctctctgcgtacggccctgaatgaactgaagcgactgattcagtccatagttgacggcatggaaccaaccggctctcgcaggctggacgacgacagtctcgaggagcagatcagacagacaagcgaggacagtcgcgccctacgcgagctgatggagggcgagcgcgggaggctgccggaggccagcagatgctgcttgcccgcttgttcccagcccattcaaagtccaagcctccctcatgtcggaaaagcacagcagggttgcgccgcccgcatgtacctatag

SEQ ID NO: 14950 - DNA, 1428 bp, synthetic construct
  source 1..1428: mol_type = other DNA; note = Synthetic coding sequence
atgacaaggggcaccggaggcaccgcccagcgagggcgctccggcccggacagccaggggctgttagatagctctctaatggcttcaggtacagccagcagatccgaggatgaggaaagcttggccggtcaaaaaagggctagctcccaggcgctcggcacaattccgaagaggcggagcagttcacggttcataaagcggaaaaaatttgacgacgagctggttgaatcctccctggccaagtctagcacacgggccaaaggcgcgtcaggtgtcgagccagggaggtgcagtggcagtgagccgtcaagtagcgaaaagaaaaaagtctccaaggctccgtccacaccagtgcctccatctccagcgcctgcacctggtctgacgaaaagagtgaagaagtcaaagcagcccttacaagtaaccaaggaccttggaagatggaagcccgctgacgacctgctgcttatcaacgctgtccttcaaacaaatgaccttacaagcgtccatttaggcgtgaagttctcctgccggtttaccttgcgggaagtgcaggaaagatggtatgctctgctctatgatcctgtcattagcaaactcgcctgtcaggccatgcgccagcttcaccccgaggcaatcgcggccatccagtccaaggccctcttcagcaaggccgaggagcagctgctgtccaaggtcgggtccacttcccagcctacccttgagacatttcaggacctgctgcaccggcatccggacgccttctacctggcccgtacggctaaggcactacaggcccactggcagctcatgaaacagtattatctgcttgaggaccaaacagtgcagccacttcccaaaggggatcaggtcctcaattttagtgacgccgaagatctgattgatgactctaagctgaaagatatgcgcgatgaggtgctggaacatgaacttatggtggctgataggcggcaaaagcgagagatccggcagttggaacaggagttgcacaagtggcaggtgttggtcgacagcatcaccgggatgtcctctcctgattttgataatcaaaccctggctgtgcttcgggggcggatggttaggtatctgatgagaagtagagagataactctcgggagggccaccaaggataaccagattgacgtagaccttagtttggaaggccccgcctggaaaatcagtagaaaacaaggagtgataaaactgaaaaacaatggcgatttctttatcgctaatgaaggccggagacctatttacatagacgggcgaccagtactttgcgggtcgaaatggcgtctttcgaacaatagtgtggtggagatagccagtcttagattcgtttttctcattaaccaggatttgatcgccctgattcgcgctgaggcggctaagatcaccccacaatag

SEQ ID NO: 14951 - DNA, 1311 bp, synthetic construct
  source 1..1311: mol_type = other DNA; note = Synthetic coding sequence
atggctgacggcgggtccgagcgggctgatggtcgcatcgtaaagatggaggtcgattatagtgcgacagttgaccagcgcctcccagagtgcgccaagcttgcaaaagcctctgatatggtgagcacttcccggatccttgttgctgtcgtgaagatgtgctacgaagctaaggaatgggacctgcttaacgagaacatcatgctgctgagtaaacgacggagccagttgaagcaggccgtggcgaagatggtacagcagtgttgcacctacgtggaggagattacggatctgccgattaagttaaggcttatcgataccctgcggatggttacagaagggaagatatatgtggagattgagcgcgcccggctgactaaaacccttgccacaatcaaggaacagaacggcgacgtcaaggaggctgcaagtattctgcaggagctgcaggtggaaacgtacggctccatggaaaaaaaggaacgggtggagttcatattggagcaaatgagactgtgcctcgctgtcaaagactacatacgaacccagattatctccaaaaagatcaacactaagttttttcaggaggaaaacacagagaagctgaaattgaaatactataaccttatgatccagctggaccaacatgagggctcttatctatcaatctgtaagcactatcgcgccatatatgacaccccatgtattcaagccgaatcagagaagtggcagcaggccctcaagtccgtagttctttacgtgattttagcaccatttgacaatgaacagagcgatctcgtgcataggatcagcggggacaaaaaactggaggagattcctaaatataaggatctgctgaaactgttcacaacgatggagctaatgaggtggtcaactctggttgaggactacggcatggagcttaggaaaggcagcttggagtcccccgccacagatgtcttcggttctacagaagaaggcgaaaaaagatggaaagacctgaagaatcgagtcgtcgagcacaacattaggataatggctaagtattatactaggatcaccatgaagcggatggcacagctcctggacctatccgtcgacgagtccgaggcttttttgtccaatctggtggtgaacaaaacaatttttgctaaggtggaccgacttgcgggcattataaatttccagcgcccaaaggacccaaacaatctgcttaacgactggagccagaaactcaatagtttaatgtccctagtgaacaagacgactcatctgatagcgaaagaggaaatgattcataatctgcaatag

SEQ ID NO: 14952 - DNA, 1974 bp, synthetic construct
  source 1..1974: mol_type = other DNA; note = Synthetic coding sequence
atggacgacccggactgcgacagcacttgggaggaagatgaggaggatgccgaagacgctgaggatgaggattgcgaagacggagaagctgccggagcaagggacgccgacgccggcgacgaggacgaggaaagtgaggagccacgcgctgccagaccatcctcctttcagtctaggatgaccgggtcaagaaactggagggccactcgtgatatgtgccggtatcggcataattacccagacctggtggaaagagactgcaacggcgatacccccaacctgagcttttatcggaatgagattcggtttttgcccaacggatgctttatagaagatatactgcaaaactggacagacaactacgacctgctggaggacaaccatagctatattcagtggctgttccctttacgggagcccggagtcaattggcacgcaaaaccccttacactgagagaggtcgaggttttcaagagttctcaggagatccaggaacgcctcgttagggcgtatgagctgatgttaggtttttacggaataagattggaagatagagggacgggtacagttggccgggcacagaattaccagaaaagatttcagaacttgaactggaggagccacaataacctgcggataactagaatactaaagagtttaggagagctggggctcgagcacttccaggcacccctcgtgagatttttcttggaagagaccctcgtgcggagggagctgcccggtgtgagacagtccgctttggactatttcatgtttgccgtgagatgccggcaccagcgtaggcagctggtccattttgcatgggagcacttccgccccagatgtaagttcgtgtggggtcctcaggacaaattaaggcggttcaaaccctctagtctgcctcacccgctcgaaggcagcagaaaagtcgaagaggaggggtcacctggcgacccagaccatgaagcttccacccaggggagaacgtgcgggccagaacattcaaagggcggcggacgggtcgacgagggaccccaaccgcgcagtgtggagccccaggacgctgggcctcttgagcgctcccagggcgacgaggctgggggtcatggagaggacagacccgagcccttgagtccgaaggagtcaaaaaagaggaaattagagctctcccgccgagagcagccgcccacagagccaggtccacagtcagctagcgaggtcgagaaaattgcacttaacctggagggctgtgccctctcacagggttccctgcgcactggcacgcaagaggttgggggccaggaccccggcgaggccgtgcagccgtgccggcaaccattaggcgcccgagtagccgacaaggtaagaaagaggcgtaaagtcgacgaaggagccggcgatagcgccgcagttgcctctggaggcgctcagactcttgccctggcgggctcgccagctccctcgggccaccccaaggccggtcatagcgaaaacggagttgaagaggacacagaaggcagaacaggcccgaaggaaggaactccagggagtccatccgagacgcctggcccctcacccgctggacctgccggcgacgaacccgccgaaagtcccagtgaaactcccggccccagaccagccggaccggctggcgatgagccagctgagagtccatccgaaactccgggcccaagtcctgcaggcccaacccgcgatgaacctgcagaatctcctagcgagacgcccgggccccgtcctgccggtccagctggcgatgagcctgctgaaagtccatctgagacacccggtcctagacccgccggacctgcaggcgacgagcctgcagagagcccgtcggagactccaggaccttctcctgcaggtcctaccagagacgagccagccaaagcgggtgaggcggcagaactgcaggacgccgaagtggagagttccgctaagtccgggaaaccctag

SEQ ID NO: 14953 - DNA, 615 bp, synthetic construct
  source 1..615: mol_type = other DNA; note = Synthetic coding sequence
atggatcccaaggatcgaaagaaaattcagttcagcgtacctgcgcctccctcccagctggacccacgccaggttgaaatgatcagaagacgaaggcctactccagcaatgctcttccgattgtccgagcacagctcaccagaggaggaggcctctcctcaccagcgggcgtcaggcgaggggcatcacctgaagtcaaagcgtcctaatccctgcgcctacacgccaccgagtctgaaggccgtgcagagaattgctgaatctcatttgcaaagcatctcaaacttgaatgagaaccaggcaagtgaggaggaggacgaactgggggagctgcgggagctggggtaccctcgtgaagaggacgaagaggaagaggaggacgatgaggaagaagaagaggaggaggactcccaggccgaggtcttgaaggttattcgccagagcgccgggcagaaaacaacctgtggccaggggctcgagggaccatgggaacgacccccgcccctcgatgagagcgagagagacggcgggtcagaggaccaagtagaagaccccgctctatctgaacctggagaagagccccaaagacctagccctagtgagcctggtacctag

SEQ ID NO: 14954 - DNA, 3042 bp, synthetic construct
  source 1..3042: mol_type = other DNA; note = Synthetic coding sequence
atggggtggaagccaagcgaagccagaggacagagccagtcctttcaagcatcaggattacagccaagatctctcaaggctgccaggagggccactggccggcctgaccggagcagagccgcacgtcccaccatggacccatccgctcaccggagcagggctgccccgcccaatatggacccagaccctcaggctggtgttcaagtcggaatgagagtcgtgcgcggggttgactggaaatggggtcaacaggacggcggggaagggggcgtgggtactgttgtcgagctgggacggcacggaagccccagcactcccgaccgaacagtggtagtccagtgggaccagggcacacggacaaattaccgggcaggataccagggggcccacgatctcttgttatacgacaatgcccagattggggtgcgacaccccaatatcatttgcgactgctgcaaaaagcatggactgcgaggaatgagatggaagtgtagggtgtgtttggactacgacctgtgcacacagtgctacatgcacaacaaacacgagctggctcacgcttttgatcggtatgagacggctcactcacgtccagtcacattgtcacccagacagggactcccccgcatccccctccgagggattttccagggtgccaaggtggttcgcggccccgactgggagtggggctcccaggacgggggtgagggaaagcccgggcgggtggtggacattcgcgggtgggatgtggaaactgggcgctctgttgcttcggtcacctgggccgatggcacaacgaatgtatatcgcgtaggccacaaaggtaaggtggatttaaagtgtgtgggagaagctgccgggggtttttattacaaggaccacctgccacgactcggtaagcctgcagaactgcagcggagagttagcgcagacagtcaaccttttcagcacggcgacaaagttaagtgtttactggatacagatgtcctgcgcgagatgcaggaagggcatggtggatggaatcccagaatggctgagtttattgggcagacaggcacggtccaccggatcaccgacagaggggatgtcagggtgcagttcaaccatgagacccgctggaccttccacccgggagccctgacgaaacatcacagcttctgggtgggggatgttgtgcgagtcataggtgacctggacacggtgaaaagattgcaggctggacatggcgagtggactgatgatatggccccagcgcttggccgtgtcggcaaagttgtgaaagtgtttggcgacggcaatctcagggtggcagtcgctggccagaggtggacattttcaccatcttgcctcgttgcctacagacctgaggaggatgctaatttagacgtggccgagcgggccagagaaaacaagagcagccttagcgttgccctggacaagcttagagcacaaaagtctgatcccgagcaccctggccgcctcgtggttgaagtggcactcggcaacgcggcccgtgccctggacttactgcggcggaggcccgaacaggttgacactaagaaccagggacgcactgctctgcaagtggcagcctatctggggcaggttgagttgatccgccttctgctgcaggctagggcaggtgtcgacctcccggacgacgaaggcaatactgccttgcactatgcggcactcgggaatcagccagaagctaccagagtgctgcttagcgccggctgccgggctgatgccattaattctacacagtcaactgccctacatgtggctgttcagcgaggatttttagaggtggttcgcgcgctgtgcgaacgcggatgtgatgtgaatttgcccgatgcccactcagacacccccctgcattctgccatttctgcgggaaccggggcgagtggtatagtggaggtactgaccgaggtcccgaacatcgatgtaacagcaaccaattctcaggggttcaccttacttcaccacgcatccctgaaagggcatgcactggctgtccggaagatcctggctcgcgctcggcagttggtggacgccaagaaggaagatgggttcacggctctgcatctggccgcgttaaataaccatagagaggtggcccagattttgatcagagagggacgctgtgatgtaaatgtgaggaaccggaagttacagtctcctttacacctcgccgttcagcaagcccacgtagggctggttccactccttgtggatgctggctgctccgtcaatgcagaggacgaggagggcgacactgcgcttcatgtggctctccagcgtcaccagctattgcccctcgtggctgatggcgccggaggggatcctgggcctctccagctgctttcccgcctgcaggccagtggattaccgggctctgcagagctaaccgtcggcgctgccgttgcctgcttcctggccctcgaaggtgctgatgtctcctatactaatcaccgtggacggtccccgttggacctggccgccgaaggccgtgtgttaaaggccttgcagggatgcgcgcagagatttagagagcgtcaggcaggaggcggcgccgcccccgggccacgacaaacattgggcacaccaaacacagtaacgaatctccacgtcggtgctgcacccggaccagaagccgcggaatgtctcgtatgcagcgagctggctctgctggtgctgttcagcccttgccaacaccggaccgtatgcgaagagtgtgcaaggaggatgaagaaatgtatcaggtgtcaagtcgtcgtgtccaagaagcttaggccagatggctccgaggtggcttctgccgctcctgcaccaggccccccccgccaactggtagaggaactgcagtccaggtaccgccaaatggaggagagaatcacatgtcctatctgtattgactcacacattcgtctggtgtttcagtgcggacacggcgcctgtgccccttgtggcagcgccttatcggcgtgcccaatttgtagacagcccattcgcgaccggatccagattttcgtctag

SEQ ID NO: 14955 - DNA, 2055 bp, synthetic construct
  source 1..2055: mol_type = other DNA; note = Synthetic coding sequence
atgattccgccgcaggaggcctcagctcggaggcgtgaaatcgaggacaagctgaaacaagaagaagagacccttagttttattagggattccctcgaaaaatctgatcagttgacaaaaaacatggtgtctatcttatcaagctttgaatcaaggctcatgaaacttgagaactctattatacccgtgcataagcagaccgaaaacctgcaaaggttgcaagagaatgtggagaaaaccttatcttgtctggaccacgtcatcagctattaccacgttgctagcgacacggaaaaaatcatccgggaggggcctaccggaaggctcgaggaatacctgggctctatggccaagatccagaaggcagtcgagtatttccaagacaatagccccgactcacctgagctgaataaggtgaagctactctttgaacgaggcaaggaggccctcgagtccgaatttaggagcctcatgaccagacactcaaaggtcgtctcaccggtgctcatactggatctcatttcgggcgacgacgaccttgaggcacaggaggatgttacacttgaacatctccctgaaagcgtgcttcaggatgtgattagaatatcccgctggctggtggagtacggacgaaatcaggactttatgaacgtgtattaccagattcgctcctctcagctggataggtctattaagggccttaaagagcactttcacaagagttcatctagcagcggagtgccctacagtcccgccattcccaacaaacgtaaagacactcctaccaagaagccagttaagcgaccaggaaccatcagaaaggctcagaatcttctgaaacaatactctcagcacggcctggacggtaaaaagggtggcagcaacctcatccccttggaaggacgggatgacatgttggatgtagaaactgacgcatacatacactgtgtctctgcctttgtgaagctggcgcagtcagaatatcagttgctcgccgatattattcccgagcatcatcagaaaaaaacattcgattccttgatccaggatgctctggacggtctcatgttggagggggaaaacatagtgtcagcagccaggaaagccatcgtcagacacgatttttctacggtattgacagtttttccgatccttcggcatctcaagcaaactaagcccgagtttgatcaggtcctgcagggcacggctgccagtaccaaaaataaactgcccggcctcataaccagtatggagactatcggtgcgaaagcactggaagactttgctgataatattaagaacgatcctgacaaggaatacaatatgcccaaggacggcacagtgcacgaactcacctctaatgccattctcttcctgcagcagctgttggacttccaagagacagccggcgctatgctggcttcgcaggaaaccagcagctctgctactagttactcatccgaattctccaagcgactgctcagcacatacatttgtaaggtcctcggaaatttacagttgaatttgttgagtaaatctaaggtctacgaagatccagccctgtctgcaatcttcctgcataacaactataactatattctcaagtctcttgaaaagagtgaactgattcagttagtggctgtcacacaaaagacagctgaaagaagttatcgtgaacatattgaacagcagatacagacctatcagagaagttggctaaaggtcaccgattacattgccgaaaagaatctgccagtctttcagccgggggtgaagctgcgcgacaaagagcgtcagataattaaggagagattcaaaggtttcaacgatggcctggaggaactgtgtaagattcagaaggcttgggcgattccagacactgagcagagagataggatacgccaggcccagaagacaatcgtcaaagaaacctacggcgcatttttacagaagtttggaagtgtcccatttactaagaatccagaaaaatatatcaaatacggggtagagcaggtgggagatatgatcgatagattgtttgacacttctgcttag

SEQ ID NO: 14956 - DNA, 3576 bp, synthetic construct
  source 1..3576: mol_type = other DNA; note = Synthetic coding sequence
atgcccgtccaggctgctcaatggacagagtttctgtcctgtcctatttgctacaatgagttcgatgaaaacgtgcacaaacctatcagtttgggttgcagccatactgtatgtaagacgtgcctgaacaaactgcaccggaaggcatgtccattcgatcagactgctataaataccgacatcgacgtcctgcccgttaactttgctcttctgcagcttgtcggagctcaggtaccagatcatcaatccatcaagctcagtaacctgggagaaaacaaacactatgaggttgcgaagaagtgcgtcgaagacctggccctctatctgaagcctctatcaggggggaaaggtgtggcatctctgaaccaatccgcgctgtcgcgccctatgcagcgcaagctggtgacactggtgaattgtcagttggttgaagaggaaggccgggtgcgggcaatgcgtgccgcgaggtcgctgggggaaaggactgttaccgaactgattttacaacatcagaatccccagcagctgtcagctaatctctgggcagccgtccgggctcggggctgccaattcctggggccagctatgcaggaagaagccctgaagctggttctattggcccttgaggacggttcagccctgagtaggaaggttctggttttatttgtcgtgcagcgcctcgaacccagatttcctcaggcctcaaagacaagcatagggcatgtcgtccagctgctataccgggccagttgttttaaggtcaccaagagagacgaagatagctctctgatgcagctgaaggaagagttcagaagctatgaggccctgagacgagaacatgacgcacaaatcgttcatattgcgatggaggccggactgcgaatctcccctgagcagtggtcctctctcctgtacggcgacctggcgcacaagagccatatgcagtctatcatcgataaactgcagtcacctgaatctttcgctaaatctgtccaggagcttactatcgtcttgcaacgcacgggggaccctgccaatctgaacagactgcgaccacatctggagctgctggcaaacatagatcccaatcctgacgccgtaagccccacctgggagcagttggagaacgcaatggtggccgtaaaaacggttgtgcatggcttagtggacttcattcagaactactccaggaaggggcacgaaactccacaacctcagcctaattctaagtacaagactagcatgtgcagagacctgcggcagcaaggcggatgccccagagggacaaattgcacttttgcacactcacaagaagaactggaaaagtatcgtctgcgtaacaaaaagatcaacgcaaccgtcaggaccttcccattgctaaataaggtgggagtgaacaacacagtgacaactaccgcgggaaacgtcattagcgttattggatccactgagacgaccggcaaaatcgtgccctccaccaatggcatttcaaatgcagagaacagcgtgagtcagttgatttctcgctctaccgacagcacgctgcgggccctggaaactgtgaagaaggtgggcaaggttggcgccaacggacagaatgccgctggcccgtcggccgactcagtgactgaaaataaaatagggtcgcctccgaagacccctgtgtcgaatgtagctgcaacaagcgccggccccagcaatgttggtactgagcttaactctgtgccacaaaaatcctccccatttcttacgcgcgtcccagtctaccctccccactccgagaatattcaatatttccaagatccgcggacacagataccattcgaagtccctcagtatcctcagactgggtactatccccctccgccgaccgttcccgccggagtggcaccctgcgtccctcgattcgtgcggagcaataacgtgccagaaagctcgctaccgcctgccagcatgccttacgcggatcactacagcactttttccccaagagatcgcatgaatagcagtccataccagccccctccgccccagccgtatgggcctgttcctcccgttccctccgggatgtacgcccccgtctacgattctcgtcggatctggcggccccctatgtatcaaagagacgacatcattcgtagtaattctctaccccccatggatgtaatgcattccagcgtgtaccagacttcactgagagaacgctacaactccctggatggatattacagcgtagcttgccagccaccttccgagcccagaacgacagtgcctctcccccgagagccctgcggccacctcaagactagttgtgaagagcaaatacggagaaaacctgaccaatgggcacagtaccacacacaaaaggcccctctcgtgagttccactctaccagttgcgacacagagtcccactccccctagtcctctcttcagtgtcgactttcgagctgacttctctgagagtgtgagtggaactaaatttgaagaggatcacctgagtcactatagtccctggtcctgtggaaccatcggctcctgcatcaacgctatcgatagcgaaccaaaggatgtaatcgccaactcaaatgccgtgttgatggacttggattccggtgacgtcaagagaagggttcacctgtttgagacacagcgacggaccaaggaggaagatccaataataccctttagtgatggccctatcatatccaagtggggagccatctctcgctcaagtcgcacaggctaccacacaacagatcccgtgcaggctacagcctcacagggcagcgcaaccaagccgatttccgtttcagactacgttccttacgtgaatgccgtggatagcagatggtcatcatacgggaacgaggccacgagcagtgcccactatgtggaacgggatcgcttcattgtaaccgacctgagcggccaccgcaaacattcctccacaggcgacttgttaagtctggagctgcagcaagccaagtcgaatagccttctcctgcagagggaagcaaatgctctggccatgcagcagaagtggaactcgctggacgagggtcgccacttgacattgaatcttcttagcaaagagatcgaactccgaaacggagagctccaaagcgactatactgaagacgccaccgacactaaaccagatagggacatagagctggagctgagtgctctggacaccgatgagcccgacggccagtcagaaccaatcgaagaaatcctcgatattcagttggggatttctagccagaacgatcaacttctgaacggaatggcagtcgagaatgggcaccctgtgcaacagcaccaaaaggaaccccccaagcaaaagaaacagtcactcggcgaggaccatgttattctggaggagcaaaagactatcttgcccgtgacatcatgttttagccagccccttccggtgagcataagcaacgcatcatgcctgcctattacaacctccgtctctgccggtaacctgattcttaagacacacgtcatgtctgaagacaaaaacgattttctgaagccagttgcaaatgggaagatggtgaatagctag

SEQ ID NO: 14957 - DNA, 2100 bp, synthetic construct
  source 1..2100: mol_type = other DNA; note = Synthetic coding sequence
atgtgcggaatttttgcttatcttaactatcatgtcccacgtacccgcagggaaatattggaaacactgattaaagggttacaaagactggaatacaggggttacgactcagctggggtgggtttcgacgggggtaacgataaggactgggaggccaacgcatgcaaaattcagctcattaaaaaaaagggcaaggtaaaagcgctggacgaggaggtgcataagcagcaggacatggacctcgacatcgagtttgatgttcacctgggtattgcccacacgcggtgggccacgcacggagaaccctcccccgttaattctcatccgcagcgttctgacaagaataacgagtttatcgtgatccacaatggaattataaccaattacaaggacctcaagaagttcctagagagtaaggggtatgacttcgagagcgaaaccgataccgagaccattgctaagttggtcaagtatatgtatgacaatcgtgaaagccaggatacaagttttactaccttggtagagcgggtgatacagcaactcgagggcgcgttcgcccttgtcttcaagtccgtccactttcctggccaggcagttggcactagacgtggatcgcccttgctgatcggcgtccgatcagaacataagctcagtaccgatcacatcccaattctgtatagaaccgcccggacacagatcggctctaaatttacaaggtggggttcacagggggagagagggaaggataagaagggatcctgtaacctatcgcgagtggactctactacttgcctattcccagttgaagaaaaggcagtcgaatattatttcgcctcagacgcaagcgctgtgatcgagcacacgaacagagtaatcttccttgaggacgatgacgtggctgctgtcgtggacgggcggttatccattcacaggatcaaacgcacggctggggaccacccagggcgcgctgtacaaaccctccagatggagctgcagcaaatcatgaaaggtaacttttcgtctttcatgcagaaggaaatctttgagcagccggagtccgttgtgaataccatgcgcgggcgagttaacttcgacgactataccgtaaaccttgggggtctgaaggatcatataaaggaaattcaacggtgcaggcgcctgatcctgatcgcctgtggcacgtcctatcatgccggggtcgcaaccaggcaggtcttggaagaactgactgaactccctgttatggttgagctcgcctctgactttctggatcggaacacccccgtctttcgggatgatgtgtgctttttcttgagtcaatctggagagaccgccgacaccttgatgggccttcgatactgcaaggagcgaggcgctctcacagtcggtattaccaacacagtcggctcttccatcagcagggagactgactgcggcgtccacatcaacgccggcccggaaattggagtggcatccacgaaagcctatacgtcccagttcgtatccttggtcatgttcgccctgatgatgtgcgatgaccggatcagtatgcaagagaggcggaaggagatcatgctcggactgaagcggctcccagatctgatcaaggaagtactctcgatggacgacgagatacagaaactcgcaactgaactctaccaccagaagtcggtcctcattatgggtcgcggataccactatgccacatgcctcgagggggccttgaagataaaggagatcacttatatgcactcagaaggtatcctcgcaggtgagctcaagcatggacctctggctctggtagacaaattgatgccggtgatcatgatcattatgcgcgaccacacttacgcaaaatgccagaacgctcttcagcaggtggtagcacgccaggggcgcccagtggtaatctgcgacaaagaggataccgaaaccatcaaaaacaccaaaagaaccatcaaggtgccacactccgtggactgcctccaaggcatattatctgttataccgctgcagcttctcgcttttcatttggccgtacttcggggatatgatgtggacttcccacggaatctcgctaagtccgttactgtcgagtag

SEQ ID NO: 14958 - DNA, 2067 bp, synthetic construct
  source 1..2067: mol_type = other DNA; note = Synthetic coding sequence
atgagcgtgaacagtgaaaaatccagctcctccgaacgccccgagccacagcagaaggctcctctggttcccccgcccccacccccacctccacctcctcctccccctttgcccgaccctaccccacctgaaccagaggaggagatcctggggagcgacgacgaggaacaggaagaccctgctgactactgcaaggggggctatcatccggtgaagattggcgacctctttaatggtcgataccatgtgattaggaaactggggtgggggcacttcagcactgtttggctgtgttgggatatgcagggtaaacgtttcgtggcaatgaaagtcgtcaagtcagctcagcactatacggaaacggcgcttgacgagataaagctgctgaaatgcgtgcgcgaaagcgacccatctgatcccaacaaggacatggtcgtgcagctgattgatgattttaaaatcagcggcatgaatggcatacacgtctgtatggttttcgaggttttggggcatcacctgctaaaatggattatcaagtctaattatcaagggctgcccgttcgttgcgtgaagtccattatccgccaggttcttcagggtctggactaccttcattccaaatgcaagataatacataccgacatcaagcctgagaacatcttgatgtgtgtagacgacgcgtacgtgcggcggatggccgccgaggcaactgagtggcagaaggcgggcgccccccctcccagtggcagtgcggtgagcaccgcaccacagcaaaaacctatcggcaaaatctccaaaaacaaaaagaagaagctgaaaaagaaacagaaacgccaagccgaactactcgagaagcgcctgcaggaaatcgaggaactggagagagaggcagaacggaagataattgaggaaaatatcacttcggccgctccctcgaacgatcaggacggtgagtactgcccagaggttaagctgaagacaaccggccttgaagaggctgccgaagcagagactgccaaagataacggcgaggccgaggaccaggaggagaaagaggacgcagagaaagagaacattgaaaaggacgaggacgatgtggaccaggagttagcgaatatcgacccgacgtggattgagagtccgaaaaccaacggacatatagagaacggtccattctcgctggaacagcagctcgacgatgaggacgacgatgaggaagattgtcctaacccagaggaatacaatcttgacgagccaaacgcagagtcagattatacttactcatccagctacgagcaattcaatggcgagctaccaaacggcaggcacaagatccccgagtcccagtttcccgagttctctacctcactcttcagcgggtctttggaaccggttgcttgcggatcggtgctgtctgaagggtctcctttaaccgagcaggaagagagctctccatcgcacgaccggagtaggaccgtctctgcctctagcacaggcgatctgcctaaggctaagactcgggccgcagacctattagttaacccactcgatccaaggaacgctgacaagattcgcgttaaaattgccgacctgggtaacgcctgttgggtacacaagcatttcaccgaggatatacaaactcggcagtatagatctattgaggtcctgattggggctggatatagcacacccgcagatatttggtcaactgcatgcatggccttcgagcttgctacgggtgattacctgtttgaacctcatagcggcgaggactattcgcgggacgaggatcacatcgcccacatcattgagctgctggggtctatccctcgccattttgctttatcaggtaagtacagccgcgaattcttcaacagacgcggagaattgagacacataactaagttgaagccttggagcttgttcgatgtcttggtggagaagtatggttggccccatgaggacgccgcccagtttactgatttcctgatccccatgctggaaatggtacctgagaaacgtgctagtgcgggggagtgcctgaggcacccatggctgaattcttag

SEQ ID NO: 14959 - DNA, 1308 bp, synthetic construct
  source 1..1308: mol_type = other DNA; note = Synthetic coding sequence
atgtccggctatcagagaagacctggcgccacaccgctgtcccgagctcgctcattggcgatccccgacgcccccgctttttatgagaggcggagttgcctgccccagctgaattgcgagcgtccgcatggacgcgacttggatagcccatttttcggtattcggcccgcctttatgtgttacgtgcccagccctgtcctagcatctgtgggcgacactgatttcggatacggcaaaggcaaatgctccaagcagtctccatccggtgcacacggaacccatttcggcgatgatagattcgaagatttggaggaggcgaaccctttcagtttccgagaatttctgaagaccaaaaacctcggactgtctaaagaggatcctgcaagccggatctacgcaaaagaggcaagccggcacagcctcggcctggaccataattcgcccccttcacagaccgggggttacggcctggaatatcagcaaccttttttcgaagaccccacaggcgccggggacctgctagacgaggaggaagatgaagacacgggctggagcggggcttacctaccgagcgcaattgagcagactcacccagagagagtccccgcagggacatccccctgttcaacctatctatcctttttctccacaccctcagaattggcgggaccagagtcactcccttcctgggctctctcagatactgatagtagagtgtcaccggcttcccccgcagggtccccctccgctgacttcgctgtgcacggggagagtcttggggacaggcatctgagaaccctccagatctcatatgatgctctgaaggacgagaatagcaagctgagaaggaaactgaacgaagtacagagtttctccgaggcccaaaccgaaatggttaggacactggagaggaagctggaagccaagatgattaaagaagagtctgactaccatgacttggagtccgtagtgcagcaggttgagcagaacctggaactaatgacaaagcgcgccgtaaaagccgaaaaccacgtggtcaagttaaaacaggaaatatcacttcttcaggctcaggtgtctaacttccaacgggagaatgaagcactgagatgtgggcagggcgccagcctcaccgttgttaaacagaatgccgatgttgccctccaaaacctgagagttgtgatgaatagcgcacaggctagcattaaacaactggtgagcggcgccgagacactcaacctagtggccgagattcttaaatccatcgatcgcatcagtgaggtcaaagatgaagaggaggattcctag

SEQ ID NO: 14960 - DNA, 591 bp, synthetic construct
  source 1..591: mol_type = other DNA; note = Synthetic coding sequence
atgaaggtgaaaattaagtgttggaacggcgtggcgacctggttgtgggtggcaaacgacgagaactgcggcatttgtagaatggcttttaatggctgttgccctgactgcccactacatggcgaatccatctcaagatgcctggggtggtgtcctcaacccgtgccagtcctcggagggcgtgctcacccgcaggtgccaattaacactgcctctcctacacccggccaacatactggctctctgatgagtcgggaagaatcctcgaggtctcctgatcccacgccgcccgccctggatcaggagacttcatccttgctgcggtgcacttccccctggtgtctcgaccactcttgtgacctcttcggcattacagatcaggtttctgcggacggacccagggcatgccgccagggagcccgaagacgcctgcccgccggtgtgggacccgttctccccctgctcccccatgccttacatccccaggtggcagcacgtacagctggcgcagcagccctgccacacgtgccgcctggcatggaggtgcaaggcgtgagacctgacctggctctggcgggtggggcatcttag

SEQ ID NO: 14961 - DNA, 5127 bp, synthetic construct
  source 1..5127: mol_type = other DNA; note = Synthetic coding sequence
atggcggccatcggccgggggagaagccttaagaatctgcgtgttaggggacgaaacgatagcggtgaggaaaatgtaccactggatctcacaagggagccgagtgataaccttcgcgaaatcttacagaatgttgcccgtctgcagggggtctccaacatgcggaaactggggcacctaaacaatttcacgaagctcctgtgcgatatcggccacagcgaggagaagctcgggttccattacgaagacatcataatttgtcttagactcgcccttttgaatgaagctaaagaggtacgcgccgccggactcagagcgctgcggtatctgatacaggattcctctattctgcagaaagttctaaaactgaaggtagactacctgatagctaggtgcattgatatccaacaaagtaacgaggttgaacgtactcaggctctccgccttgtacgcaagatgatcactgtgaacgccagtctgtttccaagttcagttaccaactcactcatcgccgtgggcaacgacgggctgcaggagcgcgaccgtatggtccgggcctgcatcgctattatctgtgaacttgctctgcagaaccctgaagtggtggcccttagaggaggtctgaacacaatcctgaagaacgttatagattgtcagttatctaggatcaacgaggcattgattactacaatcctgcacttgctgaatcaccctaagacccgtcagtacgtgcgcgccgatgtcgagctcgaacggattctagcaccttacactgatttccactaccgacatagcccagacaccgccgagggccagctcaaagaggatcgtgaggccagatttttagcctccaagatgggcatcattgcgacttttcggagttgggccggcattattaatttgtgcaaaccaggaaactccggaatccagtctctgatcggtgtgctctgcatccctaacatggaaatacgcagaggtttactggaagttctgtacgacatcttccgactgcccttgccggtggtgacggaagaatttatagaggccctgctctcagttgatccgggccgctttcaggactcgtggagactctccgatggctttgtggccgcggaggctaaaacaattttgccacatcgtgctaggtccaggccagacctgatggataattacctggcactgatcctcagtgcattcatccggaatggactccttgaggggctggtggaggttatcaccaactctgacgatcacatctccgtcagagctaccattctcttaggagagttacttcacatggccaatacaattctaccccacagccattcgcaccacctgcattgtctgcccactctgatgaacatggccgcctcgttcgacattcctaaggagaagcggctgcgggcttcagccgccctgaattgcttaaaacgattccacgagatgaagaagcgtggccccaagccatactctctgcacttggaccacatcattcaaaaagccatcgcaacacatcagaagcgagaccaatatttgcgcgtgcagaaggatatttttattctcaaagacactgaggaggcactgctcattaatctgcgggattcccaggttttgcagcacaaagagaatctggagtggaactggaaccttataggcacaatactcaagtggcccaatgttaacctcagaaattacaaagacgagcaactgcaccggtttgtgcgccggctactctatttttataaaccttcatcaaagctctatgccaacctggatctagatttcgcaaaggccaaacagctgactgtggtggggtgccagtttaccgaatttctccttgaaagtgaggaagacgggcaggggtacctggaggatttagtgaaggacattgtccagtggctgaatgcttcctctggcatgaagccagaacgaagcttacagaataatggtctgctaacgactctgagccagcattattttttgttcatcgggactctatcttgccatccccacggtgttaaaatgctggaaaagtgctctgtgttccagtgccttctgaacctttgttcattaaaaaaccaggatcatctcttgaagttaacagttagcagcctcgattacagtagggacggtttggcgcgcgtcattcttagcaagatcctgacggccgccaccgatgcctgtcgcctgtatgccaccaagcaccttagagtgctcctccgtgccaatgtggagttcttcaataactggggcatcgaattactggtcacacaattgcacgataagaataagacaatttcaagcgaggccctggacatcctggacgaggcctgtgaggataaggccaatctgcatgccttaatacagatgaaaccagccttgtcccatctcggagacaagggcctccttctgctcctacgcttcctctccatacctaaaggattcagctacctgaacgagagaggctatgtcgccaagcagttagaaaaatggcatagagagtacaatagcaagtacgtcgacctgatagaggaacaacttaatgaagccctaactacttatcgcaaacccgtcgacggcgataattacgtgcgcaggtctaaccagagattacagaggcctcacgtctatttgcctatccacctgtatggacagctcgttcaccataagaccggatgtcacctcctcgaggtgcaaaacataattactgaactgtgcagaaatgtgcgcactccagacctcgacaagtgggaagagattaagaagctcaaagcatcactctgggcgctggggaacatcgggtcgtctaattggggactcaacctgctgcaggaagagaatgtcatcccagatattctcaaactggcaaagcaatgcgaggtgttgagtatcagagggacctgtgtctacgtgctgggactgatcgccaagacaaagcagggatgcgacattctgaagtgtcacaactgggatgctgtcagacatagccgtaagcacttatggcctgtcgtgcctgatgatgtggagcaactgtgtaatgaactgtctagcatcccaagtaccctttctttaaactctgaaagcactagctctcgccacaactccgaatctgagagcgtccccagttccatgtttatactcgaggatgatagatttggttcgagcagcacatctacatttttccttgatataaatgaagatacagagccaaccttctatgataggtccggccccattaaagataagaactcctttcctttttttgcctcttccaagctggtgaaaaatagaattctcaatagcttaacccttcccaataagaagcaccgttccagtagcgacccaaagggcgggaaactctcctcggaaagtaagactagcaatcggaggatcagaacacttacagagccgagtgtggattttaaccattctgacgactttacccctatctccactgtacaaaagacattgcaactcgagacatcctttatgggcaacaagcacattgaggataccggctccacgccgtcaataggtgaaaacgatctgaagttcacgaaaaattttggaaccgagaatcaccgggaaaacacatccagggaacgcttggtcgttgagtctagtacttccagccatatgaaaatccgcagtcagagctttaatactgataccaccacgagcggcatttcttctatgtctagctctccatctagagagacggtcggcgtcgacgctaccaccatggacacagactgtgggtccatgagtaccgtcgtatccacgaagacgatcaaaacatctcactacctgacacctcagagtaatcatctctcattgagcaaaagcaactctgtctctctggtgcctcccggctcatctcacacgctgcctcgaagggctcagagtctgaaagcccccagtatcgcaactattaagtctctggcagattgtaatttctcgtataccagttctcgagatgcctttggctatgccaccctcaagcgactacagcagcagcgcatgcatccgtctctcagccacagcgaggcactagcctctcctgccaaggatgtgctgttcaccgacacaataacgatgaaggcaaactccttcgagtcccggcttacacccagcagatttatgaaggccctgtcctatgcttccctcgacaaagaggaccttctgtctccaattaatcagaatactctccagagaagcagttctgttaggagtatggtcagtagtgcaacatacggaggcagtgacgactacatcgggcttgccctccctgtcgacatcaatgacatcttccaggtgaaggatatcccttattttcagaccaagaatataccaccacatgatgatcggggagcccgggcattcgcccacgatgccggcggattgcccagcggaacgggagggctcgtgaagaattcatttcacctcctgagacagcagatgtcattgacggagattatgaattctatacacagtgatgcgagcttatttctcgagtctactgaagacactggcttgcaagaacacacggatgacaactgtctgtattgcgtctgtatcgaaattctcgggttccagccttccaaccagctctctgctatctgctcccattcagatttccaggacatcccctacagcgattggtgcgagcagaccatccataacccactggaggtcgtgccatccaagttctcaggaataagcggctgctctgacggtgtttcccaggagggcagcgcctcctccaccaagtctactgagcttttgttgggagtgaaaacaatccctgatgatacaccgatgtgtcggatactgttgaggaaagaggtgcttcggcttgtgatcaacctgtctagttcagtttctacaaagtgccatgagactggactgctgacgattaaggagaagtacccacagacctttgatgatatttgtctgtactccgaagtgagccacctgctgtctcactgtacctttcggttaccttgcaggcgcttcattcaggaactctttcaggacgtgcaatttctgcagatgcacgaagaagcagaagccgtgctcgccacgcccccaaaacagcctattgtagataccagcgcggaaagctag

SEQ ID NO: 14962 - DNA, 3867 bp, synthetic construct
  source 1..3867: mol_type = other DNA; note = Synthetic coding sequence
atgccacgcaagggcacccaaccctctacagcaagaagaagggaagaagggcctccgcctccttcccccgatggggccagctctgatgccgagcctgaaccgccttcggggcgaactgaatccccagcaacagcagccgaaacggcaagcgaggagcttgataataggtccctagaggaaattttgaattctatccctccacccccaccacccgctatgaccaacgaggctggcgctccgcgactgatgatcacccatatagtgaatcaaaactttaagagttacgccggcgaaaagattctcgggccctttcataaaaggttcagttgtattataggtcctaacggatcaggtaaaagtaatgtcatcgactcaatgctgtttgttttcgggtacagggcacaaaagatcagatctaaaaagctctccgtccttatccataatagcgacgagcacaaagacatccagagctgtaccgtggaggttcatttccagaaaatcatagataaggagggtgatgactacgaggtgatccccaattctaacttttatgtgtctaggaccgcatgccgcgataacacaagcgtctaccatatttccggaaaaaagaaaactttcaaggatgtcggcaatctgttgaggtcccatgggatcgatctagatcataacagatttctgattctgcagggcgaggtcgagcagatcgccatgatgaagcccaaaggacagactgaacacgacgaggggatgttggaatatctcgaagatataatcggttgtggtagacttaacgagcctatcaaggttctttgtcggcgagtggaaattctcaatgagcaccgtggcgaaaagttgaatagggtcaagatggtcgaaaaggagaaagatgctcttgagggggagaaaaacattgccattgaattcttgacactcgaaaacgaaatttttcggaaaaaaaatcacgtgtgtcagtattacatttacgagctgcagaaaagaatcgcagagatggaaacacagaaggaaaagatccacgaagatactaaagaaatcaatgaaaagtcaaacatcctctccaacgaaatgaaggcaaaaaataaggatgtaaaagacactgagaagaaactgaataagattacgaagttcatcgaagaaaacaaagaaaagttcacacagcttgatctcgaggatgtgcaggtaagggagaaacttaaacacgccacaagcaaagcgaaaaaactggaaaagcagctgcagaaagataaagaaaaggtcgaagaattcaaatccatcccagccaagtctaacaacatcatcaacgaaaccacaacacgaaacaatgcacttgagaaggagaaagagaaggaagaaaagaagcttaaagaggtgatggattcactgaaacaggaaactcaggggttacagaaagagaaagagagccgcgaaaaggaacttatgggtttctcaaaatctgtcaatgaagcccgatcgaaaatggacgttgcccagagtgagctcgatatttacctgtcccgtcataacaccgccgtttcccagttaacaaaggcaaaggaggcactaatcgccgcctctgaaactctaaaagagcggaaagctgccatcagggacatcgagggcaaattgcctcagaccgagcaagaacttaaagaaaaggaaaaggagctccagaagctcacgcaggaagagacaaatttcaaatccttggtccatgacttatttcagaaggtggaggaggctaagagctctctagctatgaacagatcccgggggaaggtactcgacgccatcattcaagagaagaagtctggcagaattcccggcatctatgggcggctaggagatctcggggcaatagacgaaaagtacgatgtggcaatatccagttgctgccatgccttggactacattgtcgtggactcaatcgacatagcccaagagtgtgtcaattttctgaaacgtcagaatatcggcgtagctacattcataggccttgataagatggccgtctgggctaaaaaaatgaccgagatacaaacacctgagaatacaccccgcctctttgacttagtaaaggtgaaggacgaaaagatccgtcaggctttttacttcgctctgcgcgacactctagttgcagataacctcgatcaagcaaccagagtagcttaccagaaggatcgtagatggcgggtggtaaccctgcagggccagattatcgagcaaagcggcaccatgacgggcggggggtccaaggtcatgaaggggcgcatggggagttctcttgtgatagaaatttcagaggaggaggtgaacaagatggaatcccagttacagaacgattcaaaaaaggcgatgcagatccaagagcaaaaagttcagttggaagagcgggtggtcaagctacgtcattctgaacgggaaatgagaaacactctggagaagttcactgcatctattcagaggctgatcgaacaggaggaatatctaaatgtgcaggtgaaggagttggaggccaatgtgctggccaccgctcctgacaaaaagaaacagaagttgcttgaggagaacgtttctgcattcaagaccgagtatgacgccgtcgccgaaaaagcagggaaagtagaggcagaagttaagcgcctacacaacacaatcgtggaaattaataaccataagcttaaggcacagcaggataaactggacaagattaataagcaactcgacgagtgcgccagtgccataactaaagcccaggtcgctatcaaaaccgcagataggaatttgcagaaagcccaggatagtgtattaaggactgagaaagagattaaggatacagaaaaggaagtggacgatctgacagctgaattaaagtctcttgaagataaggctgccgaagtcgtgaaaaatactaatgctgccgaagagtcccttcccgaaatacagaaggagcacaggaatttgctacaagagctgaaggtcattcaggagaacgagcacgcactgcaaaaagatgccctgtcaatcaaactgaaactagagcaaatcgatgggcacatcgcagagcataattctaagatcaagtactggcacaaagagatctcgaaaatatctctgcaccctattgaggacaatcccatcgaagagatctccgtgctcagccccgaggaccttgaagccatcaagaatcccgattcaatcactaatcagattgcattactggaggctcgatgtcatgagatgaagcctaatctgggcgctatcgcggagtataagaagaaagaggaactgtacctacagagggtagccgagttggataagatcacttacgagcgggattcctttcgacaggcttacgaggatcttaggaagcaacggctgaacgagtttatggccgggttctacatcatcacgaataagctcaaggagaactaccagatgctcactctaggcggagatgccgagctggaactggtggatagtcttgatcctttcagcgaaggaattatgttcagcgtgcggccccctaagaagtcatggaagaagatctttaatctctcagggggtgagaagaccttatcaagcctggcactcgtctttgctctccaccattacaagccaacccccttgtacttcatggacgaaatcgatgccgcccttgatttcaaaaatgtttcaatagtggcattctacatttatgaacagacgaaaaatgcacagtttatcatcatctcgctgagaaataacatgtttgagatttccgacagactgattggtatatacaagacttataatataacgaaatcagtcgccgtcaatcccaaggagatcgctagcaaggggctgtgctag

SEQ ID NO: 14963 - DNA, 2829 bp, synthetic construct
  source 1..2829: mol_type = other DNA; note = Synthetic coding sequence
atgacaggatcaaatagtcacatcacaattctcacactaaaggtgctccctcactttgaaagcctcggaaaacaggaaaaaattcctaacaaaatgtctgctttccgcaatcactgtccccaccttgatagcgtcggtgaaatcacgaaggaagacctgatccagaagtctctgggtacctgtcaagattgcaaggttcaagggccgaatctgtgggcctgcctcgagaatagatgctcctacgttggttgcggtgagagccaggttgatcatagcacaatccactcccaggaaaccaaacactacctgactgttaacctgactactttaagagtgtggtgttatgcgtgctctaaagaagtgttcctcgatcggaagttgggcacccaacccagcctgcctcatgtccgccaacctcatcagatccaggagaatagcgtccaggatttcaagatcccctccaacaccaccctgaaaacacctttagttgcggtgttcgacgacctggacattgaggcggacgaggaggatgagcttcgggcacgtggcctgacggggttaaagaacatcgggaatacatgctacatgaacgccgcattgcaggcgctgtcaaactgtccccctcttacacaattctttctggattgcgggggcctggctcgaacagacaaaaaacctgccatctgtaagtcctacctgaagcttatgactgaactttggcacaaaagccggcccggatctgtagtccctaccactctgtttcagggcattaaaaccgtgaatcccacctttagaggttactcccagcaagacgcccaggaatttttgaggtgtcttatggacctgttgcacgaagagctgaaggagcaggtcatggaagtcgaagaagacccccagacaattacaacggaggagaccatggaggaggacaaatcccagagcgatgtggattttcagtcttgcgaaagctgtagtaattcggaccgcgctgaaaacgagaatggatccagatgcttttctgaggataacaacgaaaccacaatgttaatccaagacgacgaaaataattccgaaatgagcaaggattggcagaaggaaaaaatgtgtaacaagatcaacaaggtcaattctgaaggcgaattcgacaaggatagggatagcatttctgagacagtggacctgaataaccaggagaccgtcaaggtccagatccactctcgggcctccgagtacatcaccgacgtgcacagtaatgacctatctaccccacagattctccccagcaatgagggcgtgaatccacgactgtcggcctctcctcctaaaagtggaaacttgtggcccggcctggctcctccacacaaaaaggctcagtcggcctcccccaaacgaaaaaagcaacataaaaaatatagatcagttatctcggacatctttgatggtacaataattagctccgtgcagtgtctgacttgcgaccgagtaagcgtgactctcgaaacattccaggatctgtctttgcccattccaggaaaagaagatctcgctaagctgcattctagcagtcacccgacttcaattgtcaaggctggcagctgcggtgaggcatacgctcctcaggggtggatcgcctttttcatggaatacgtcaaacggtttgtggttagctgcgtgccatcctggttctggggacccgtggtaacactgcaggattgtctggctgcttttttcgcaagagacgaactcaaaggcgacaacatgtactcttgtgaaaaatgtaaaaagctccgtaacggggttaagttctgcaaagtgcagaactttcctgagattctgtgcatacatctgaagaggtttcgccacgagcttatgttctccaccaagatttcgactcatgtctccttccctctggaaggtctagatctccagccgttccttgccaaggactcacctgctcaaattgtcacatacgacctcctgtccgtcatctgccatcatgggaccgcatccagcggccattatatagcttattgtaggaacaatctcaataacttgtggtacgagttcgatgaccaaagcgtgacggaagttagtgagagcaccgtgcagaatgcggaggcatatgttctgttttatcgaaaaagcagcgaggaggcccagaaggaacgcagaagaatcagcaacctgctgaacataatggagccctcactgctgcagttctatatttcacgacaatggttgaataaatttaagacgtttgctgagccggggcctatctcaaacaacgatttcctttgtatacacgggggggtgccacctcgcaaagctgggtacatcgaagatttagtcctcatgcttccccagaacatctgggacaatctgtattcacggtatgggggcggcccggctgttaatcatctgtatatctgccatacgtgccagattgaagccgaaaagatcgagaaacggaggaaaaccgaactcgagattttcattaggttaaaccgggctttccaaaaagaagattcaccggcaactttttactgtatcagcatgcagtggtttagagagtgggagtcattcgttaagggcaaggacggtgaccctccaggaccaattgataacacaaagatcgccgtgaccaaatgtggtaacgttatgctgagacaaggagccgatagtgggcagattagcgaagagacttggaatttcctccagtccatatatggcgggggccccgaggttattctgagaccgcctgtggtccacgtcgacccagatatccttcaggcggaggaaaaaatcgaggtagagacccgctctctgtag

SEQ ID NO: 14964 - DNA, 2106 bp, synthetic construct
  source 1..2106: mol_type = other DNA; note = Synthetic coding sequence
atgatgaagcgccagctccatcgcatgcgacagttagcccagacgggtagcctggggcggacgcctgagactgccgagttcctcggggaggacctcttacaggtggagcagcgactcgaacccgcgaagagagcggcccataatatccacaaacgtctgcaggcttgcctgcagggccagagcggggcagatatggataagcgcgtcaaaaagctgcctctgatggccctctcaacaactatggcggaatccttcaaggaactggacccagattcttccatgggcaaagccttagagatgagttgcgctattcaaaatcaattggccagaatcctagcagagttcgagatgaccttggagcgggacgtcctccaacccctatctcgcctctctgaggaggagctgcctgccattctgaaacacaagaagtctttacagaagttagtgagcgattggaatacccttaaatcgcggctgtcgcaagccacaaagaattcaggctcatcccagggattaggtgggagccccggctcacacagtcacacaaccatggcgaataaggttgagaccctgaaggaggaagaagaggagctgaagaggaaggtagagcagtgccgggatgaatatttagccgacttatatcattttgtcacaaaggaagattcgtacgccaattacttcattagattgctggaaatccaggctgactaccataggaggagtctcagcagtctcgacactgccttagccgaattgagagagaatcacggccaggccgaccatagtccgtctatgacagctacacatttcccccgggtgtatggagtgagtctggcaacacatttgcaagagttggggagggagattgcgttacccattgaggcctgtgtaatgatgcttctctcagaagggatgaaagaggagggcctgttcagactggcagctggagcttccgttcttaaacgtcttaagcagaccatggctagtgacccgcattccctggaggaattctgttctgaccctcatgctgtggccggggccctcaagtcctatcttagagaacttcccgagccactcatgaccttcgacctgtatgacgactggatgagagcagcctccttgaaggagcccggcgcccggctccaggctctgcaggaagtgtgttcacgtctcccgcccgagaatctgtcaaatctgcgctatctcatgaagtttctagcccgtctggctgaagagcaggaggtgaataagatgactccaagtaatatcgccattgtcctgggacctaatctgctgtggccaccagagaaggagggagatcaagctcagctggacgccgccagtgtctccagcatccaagtggtaggggtcgttgaggccctgatacagagcgcagacacactgtttcctggcgatatcaatttcaacgtgtctggccttttttccgctgtgaccctccaagatacagtctcagacagacttgcttccgaggagcttccctccactgccgtcccaacgccagcaactaccccggcaccggcccctgcccccgccccagccccggccccggctctggcctccgctgccacgaaggaacggaccgagagcgaggtgccaccaagacccgcatccccaaaggtgacacgatctcctccggaaaccgccgcccctgtggaggatatggcccgcagaaccaaaagacccgcgcctgcgcggcctacaatgccaccccctcaggtgtctggtagtcggtctagcccacccgccccgccactcccacccgggtctggctctcccggaacccctcaggccctgcccagaaggctagtggggtcttcactgcgcgcaccaactgtgccaccccccctgcctccaacccctccccagccggctagaagacagtcccggagaagccctgcatcgccgagccctgccagccctggcccggcctcccccagccccgtgtcattaagcaaccccgctcaggtggacctgggcgccgccacggcggaaggaggcgcaccagaggccatctctggagtccccaccccaccggcaattcctccccagccacgaccaagatctctggcttcggagactaactag

SEQ ID NO: 14965 - DNA, 1818 bp, synthetic construct
  source 1..1818: mol_type = other DNA; note = Synthetic coding sequence
atggaggtccgtgcctctctccagaaaatcgtgagcaacggagacgagcagctggagaaggcaatggaggagatcctgcgcgactcagagaagcgtccttcctcccttctcgtggattgccaatctagtagcgaaatcagcgatcacagcttcggtgacatacctgcgagccagaccaacaaaccaagcctccagctgattctggatcctagcaatactgaaatctcaaccccccggccctccagccctggcggattacctgaagaggactcggtactctttaataaactgacgtatctgggatgcatgaaggtgtcctccccacgcaacgaagtagaagctcttagagccatggcaacaatgaagtcctccagtcaatatccattcccagtgaccctgtatgtcccaaatgtacccgagggtagcgttagaatcattgatcagtctagcaatgtggaaatcgccagctttccgatctacaaagttctgttctgcgcccgcgggcacgacggaactactgagtctaactgcttcgcctttacagaaagcagtcacggatcggaggaatttcaaattcatgtgtttagttgcgagattaaggaggcagtaagccgtattctgtactcgttctgtaccgccttcaagagaagttccaggcaggtgtctgacgtgaaggatagtgtgattccaacacccgacagcgatgtgtttacattctctgtaagtttggaagtgaaagaagatgatgggaaggggaactttagccctgttcccaaagatagagataaattttactttaaacttaagcagggcattgaaaaaaaggtggtcattaccgtccagcagcttagcaacaaagaactcgcaatcgagagatgttttggcatgctgctgagcccaggccgcaacgtgaaaaactccgatatgcatcttcttgatatggagagtatgggcaaatcttatgatggcagagcttatgttattacaggcatgtggaatcctaatgcgcccgtgttcctcgcactgaacgaagagacaccaaaagacaagcaggtctatatgaccgtagccgtcgacatggtcgtcacagaagtcgttgagcctgtgagattcctactagaaacagtggtgcgggtgtacccagctaacgaacggttctggtatttttctcgaaagacgtttactgagacctttttcatgaggctaaagcagtctgagggcaaaggccacacgaacgcaggcgatgccatctacgaggtggtatctctgcagagggagagcgataaggaggaacccgtgacgccaaccagcggcggaggccctatgtctcctcaggatgacgaggctgaagaagagtccgacaacgagctatcgtcggggactggtgatgtgagtaaggattgccccgagaaaatcctgtattcatggggcgaactgctggggaagtggcattcaaacctcggagctagacctaagggactgagtacactggtgaagagtggggttcccgaagccctgagagcagaagtgtggcagcttcttgccgggtgccatgataaccaggcaatgttggatagatatcgcatattgataaccaagcagcagatgaaattctccctgacgccgcgacaaacaattcacctggtgaaatacgagggttccatgaaagtgtccatgacaccctgcaatcaacttcagtttgacatacggctcgacgtgcttatcacctacactttctgcttttccagcttcccagagcccgagctgtacaaatacgtccttaagcatcagctgataaagcgtctgaatgcctgttag

SEQ ID NO: 14966 - DNA, 3120 bp, synthetic construct
  source 1..3120: mol_type = other DNA; note = Synthetic coding sequence
atggcagtgcaacttgtgcctgatagtgccctaggcctgctcatgatgactgagggaagacgatgccaggttcacctgttagacgacaggaaattggaactgctagtccagcctaagctcctcgccaaggaactcctggatctcgtggctagccacttcaatctgaaagagaaggaatacttcggcattgcttttacagatgaaacaggacatctgaattggctgcagctggatagaagagtgctggagcacgatttccctaagaaatcaggacccgtggtgctgtacttctgtgtgcggttttatatcgaatccatcagctatctaaaggacaacgcaaccattgaactgtttttcttgaacgccaagtcttgcatctataaggaactgattgacgtggattcagaggtagtgtttgagctagcttcctacatattacaagaagctaaaggggacttctcatctaacgaggtggtgagatcggacctcaagaagctgccagctcttcccacccaggctctgaaggaacacccttctctggcctactgtgaagatcgagtgatcgaacattataaaaagctgaatgggcagaccagaggacaggccatcgtaaactacatgagcatcgtggagtcactccctacctacggggtgcactactacgcggtcaaggacaaacagggcataccatggtggctcggactttcatacaaggggatcttccaatacgactatcacgacaaggtgaaaccacggaaaatattccagtggcggcagcttgagaacctctactttagagagaagaagtttagtgtggaagtgcacgacccaaggagagcttctgtgaccagacgtaccttcgggcacagcgggatcgctgtacacacctggtacgcttgccctgcactgataaaaagcatctgggccatggccatatcccagcaccagttctacttagatagaaagcaaagcaagtccaagatccatgccgctcgctccctttctgagatagctattgacctgacggagactggcaccctgaaaactagcaaactagccaatatgggcagcaaaggtaaaataattagcggaagctcaggctcattgctgtcatccggcagtcaagaaagtgattcatcgcagtcggcaaagaaagacatgcttgcagctctgaagagtagacaggaagccctcgaggagacgttgcggcagagacttgaggagcttaaaaagctttgtctgcgggaagccgagttgacgggaaagctgccggtggaatatccactcgatcccggggaagagccgcccatagttcgccggcggattggcactgctttcaaactggatgagcaaaaaattcttcccaagggtgaggaggccgagcttgaacggctggagcgcgagtttgctatccagtcccaaattactgaggccgcccggaggttagccagtgaccctaatgtgagtaagaaactcaagaaacagagaaagacgtcctatcttaacgccttgaagaagctccaggaaattgaaaatgccattaacgagaatcgtattaaaagcggcaaaaagccaacccaaagggcttcattgatcatagacgacgggaacatcgcttcagaggattcttcactttctgacgccttggtgctagaggacgaagactctcaggtcacatctactatcagtcccttgcactctcctcacaagggtctccccccaaggccgccatcccataacaggcctccccctccgcagtccctggaaggactgcgccaaatgcattatcacaggaatgattatgacaagtcacctatcaaacctaaaatgtggagcgaatctagtctggatgagccctacgaaaaagtaaagaaaagaagctcacatagccatagcagttcacacaagaggtttccatcaacgggctcatgtgcagaggccgggggcggcagcaattctcttcagaacagtcccatccgcggcctaccacattggaattcacaaagctccatgccttcaacgccggacctacgggtacggtcaccccattatgttcactcaacacgttcagtggatataagccctacacgcctacacagtctggcgttgcacttccgacacagaagctcctcgctggagagccaaggtaaactgctaggctccgaaaacgacaccggctctccggatttttatactccaaggacaaggtcaagtaacggctccgaccccatggatgattgtagttcttgtactagccacagtagtagcgaacactactacccggcccagatgaacgccaactatagtacgttggccgaggatagccccagtaaagcccggcagagacaacgtcaaaggcaaagggccgcaggtgcactcggtagcgcctcgagcggtagtatgcccaatcttgccgctcgggggggcgccgggggcgctggtggggccggcggtggcgtttatcttcatagccagagtcagccctccagtcagtaccgaatcaaggagtatcccttgtacattgaaggcggggccacccctgtcgtggtgcggtctctggaatcggatcaggagggacactactcagtgaaggctcagtttaagaccagcaattcgtatactgccgggggactgtttaaggaatcatggcgcggcggcggcggcgacgagggcgatactggccgtctgaccccaagccgcagccagattctgaggaccccttcgttagggcgggagggcgcacacgataaaggagccgggagagcagccgtgagcgatgagcttcgtcaatggtatcagaggagtacggctagccacaaggagcactcccgactgagccacacctcgagtacctcctccgactctgggagtcagtattctacctctagccagtccacttttgttgctcactctcgggtaactcgcatgcctcagatgtgtaaggccactagtgccgccctacctcagtctcagcggtctagcacaccttcatctgaaattggtgcgacacccccatcctcaccacaccacatcctgacctggcagacaggcgaagccactgagaacagcccaatactcgatggatcagagagccctcctcaccagtccacagatgagtag

SEQ ID NO: 14967 - DNA, 3228 bp, synthetic construct
  source 1..3228: mol_type = other DNA; note = Synthetic coding sequence
atggtggtagaagtagactctatgccagctgccagcagtgtgaagaagcccttcggactccgctccaagatgggcaagtggtgctgccgatgtttcccttgctgtcgtgaatcaggcaagagcaacgttggcacttctggcgaccatgatgacagtgcaatgaagactctgagaagtaagatggggaaatggtgtcggcattgttttccctgctgccgtgggagtggcaagtctaacgtcggtgctagtggcgaccacgacgattctgctatgaagaccttgcgaaataaaatgggtaaatggtgttgtcactgcttcccttgctgcagaggatcaagcaagtcgaaagttggggcttggggcgactatgatgactctgccttcatggagccacgctatcacgttcgaggcgaggatctggataagcttcaccgcgcagcgtggtgggggaaggtgccccgcaaggatctcatagtgatgctgcgggacaccgacgtcaacaaacaagacaaacagaaaagaacagcccttcatctggcctccgcaaacggcaattcggaggtggtcaagctgctgcttgaccggcgctgtcaacttaacgtactcgacaataaaaaacgtactgcattaataaaggcggtgcaatgccaggaggatgaatgtgcgctgatgctgttggaacatggtacagaccccaatatccctgacgaatacgggaatacgacactccattatgccatatacaatgaggacaaacttatggctaaggctctcctgctgtacggggccgacattgagtctaagaacaaacacgggctcaccccattactgctgggggtccatgagcaaaaacagcaggtcgttaagtttctgatcaagaaaaaagccaatctcaacgccctggaccgctacggcaggactgcgctcatcctggctgtatgttgcgggtcagctagcattgtatcactcctgctggagcagaatatcgacgttagtagccaggacctgtcggggcagaccgcgcgcgagtacgccgtgtccagccatcatcatgttatttgtcagctcttgtcggactataaggagaagcaaatgttaaaaatctcctctgagaatagtaaccccgagcaggacttgaaactgacaagtgaagaggaaagtcagcgttttaaggggtcagaaaattcacaacccgaaaaaatgagtcaggagcctgaaattaataaggatggcgatcgggaggtcgaggaagagatgaaaaaacacgaaagtaacaatgtgggcctactcgagaatcttaccaacggtgtcactgccggcaatggcgataatggtctcatccctcagcgaaagagtcggacacccgagaaccagcagtttcccgataatgaatctgaggaatatcaccgtatctgcgaactgctctctgactacaaggagaaacagatgccaaagtattcatctgagaactctaaccctgaacaagacttgaaacttacctccgaggaggagagtcagcgcctaaaaggctccgaaaatggacagcctgagaaacgtagtcaggagcctgagataaataaggatggagaccgtgagctcgaaaacttcatggctatcgaggagatgaaaaagcatcggagtacacatgtagggttccctgaaaacttgactaatggcgctactgccgggaacggggacgatggcttaatacctcctagaaaatccagaacccctgagtcccagcagttcccggacactgagaacgaagagtaccactcagatgagcaaaacgacacccagaagcagttttgtgaggaacagaatacgggcatcctgcacgatgaaattctgattcatgaagagaagcagatcgaagtcgtcgagaaaatgaattcagaactgtcactgtcatgcaagaaagaaaaggatatcctgcacgaaaatagtactttaagggaggaaatcgctatgctgcggctggaattggacacaatgaaacaccaatcacagctccgggagaaaaagtatctggaagatatcgagtctgtcaaaaaaaggaatgacaatctgctaaaggctctacagctgaatgaactcaccatggatgatgatactgcagtcctcgttatcgataatggttctggaatgtgcaaggcaggcttcgccggtgacgatgctcctagggccgtgttcccatccattgtcggacggccgcgtcaacagggtatgatgggcggcatgcaccaaaaggaatcctatgttggtaaagaagcccaaagcaagcgtggcatcctgactctaaaataccccatggagcatggcataattaccaattgggatgacatggagaagatttggcaccatacgttctacaacgaactgagagttgccccagaggagcaccctgtgctcctgacagaggccactctgaatcccaaggcaaatcgtgagaaaatgactcaaatcatgttcgagacctttaatacccccgccatgtatgtggccatccaagccgtgctgagtctgtatacaagtgggaggactaccggtatcgtgatggattcgggagatggcgtgacccatactgttcccatctacgaaggcaacgctctgccccacgccacactccgcttggaccttgccggcagggagctaccggattatttgatgaaaattctcactgagcacgggtaccgcttcactaccatggctgaacgtgagatcgtgagagatatcaaagagaagctttgttacgtcgcacttgatttcgagcaggagatggctacagtcgcctcaagtagcagtctggagaaatcttatgaattaccagatggtcaagtcattaccatcggcaatgagcgcttccggtgccccgaggcgctgtttcaaccatgctttcttggtatggagtcatgcgggatccacgagaccactttcaacagcataatgaagtccgatgtcgatatccgcaaggacctctacaccaacacagtgctctctggcgggacaactatgtatcctggcatggcacaccggatgcaaaaggaaattgccgctcttgctccttccatgatgaagatccgaattattgcaccacccaaacgcaagtattctgtttgggtgggtggcagcatcctggcctcactcagtacatttcagcagatgtggataagtaaacaggaatacgatgaatctggcccatccattgtgcatagaaagtgtttatag

SEQ ID NO: 14968 - DNA, 1752 bp, synthetic construct
  source 1..1752: mol_type = other DNA; note = Synthetic coding sequence
atgttgtcagagtccaaggagggagaggagaaggaggaggtgaccatggatacgtctgagaatagacccgagaatgacgtacctgagccgccgatgcccattgctgatcaggtctccaatgacgatagaccggaaggcagcgtggaggacgaggaaaagaaagaatccagcttgccgaaaagtttcaagaggaaaatctctgtggtatccgcaacgaaaggtgtccctgcaggcaatagtgacacagaaggcggccaaccaggtcggaagagaaggtggggggccagtacggccaccacccagaagaaaccctcaatttctataaccactgagtctttgaagtctctgattcctgatataaagccgctagccggccaagaggcagttgttgacctacatgctgacgattctcgcatcagcgaagatgaaacggagcggaacggagacgatgggacccacgacaagggccttaaaatctgtcggacggtcacacaggtggtgcctgccgagggccaagaaaatggccagagagaggaggaggaggaggaaaaggagcccgaggctgagcctcctgtaccaccacaggtcagcgttgaggttgccctacctccacctgccgaacatgaggtcaaaaaggtcacacttggagacactcttacgaggcggagtatctcacagcaaaaaagtggcgtctccatcacaatagacgatccagttcgaaccgctcaggtgccatcaccccctcgcggaaagatcagcaacatcgtgcacataagcaatctcgttcgtccattcacactgggacagttaaaagagctgctgggacgtacaggtactctggtggaagaagccttctggattgacaagattaaatctcactgtttcgtaacatacagtacagtggaggaagccgttgcgacgaggacagccctgcacggcgtcaagtggccgcagtccaaccctaaattcttatgcgctgactacgccgagcaagacgagctggattatcaccgcggtctcctagtggatcgcccctccgaaaccaaaacagaggaacagggaatcccgaggcctcttcatcctcctcctccacccccagtccagcctccacagcaccctagggccgaacagcgggagcaggaaagagctgtgagagagcagtgggccgaaagagaaagagaaatggagaggagggaacggaccaggtcggaacgagagtgggatcgcgataaagtacgggaagggcctcgatcgagatccagaagccgcgatcgacgtcggaaggagagagccaagtctaaggaaaaaaagtctgaaaagaaagagaaggcccaggaggaaccaccagcaaaactgctagatgatctttttagaaaaacaaaagctgccccctgtatctattggctccccttaacagatagtcaaatagtgcaaaaggaagctgaacgggcagaacgagccaaagaacgggagaaacggaggaaggagcaggaggaagaagagcagaaagaaagggagaaggaagccgagagagaaaggaaccgccagctcgagcgggagaagcggcgtgagcattccagagaacgggaccgcgagagagaaagggaaagggaaagggatagaggcgaccgggacagggatcgggagagagatagggagcgcggccgggagcgagacaggagagatacaaagaggcacagcaggtctcgatctcgttctaccccggtaagagacagagggggcaggcgctag

SEQ ID NO: 14969 - DNA, 963 bp, synthetic construct
  source 1..963: mol_type = other DNA; note = Synthetic coding sequence
atgtccaagtcagctagtccaaaggagccggagcagctgcgaaagctgtttatcggcggactgtctttcgagactacagacgagagcctcaggtcccacttcgagcagtgggggactctgactgactgcgttgtgatgcgcgacccaaatactaaaaggagccggggcttcggcttcgtgacttatgctactgtcgaggaggttgacgccgcaatgaatactaccccacacaaagtggatggacgcgttgtggagcctaaaagggctgtgtctagggaggactctcagcgaccaggggctcacctgaccgtcaagaaaatcttcgtcggcggcattaaggaagacactgaggaacaccacttgagggactacttcgagcaatatggcaaaattgaggttatcgaaattatgaccgacaggggatccggaaagaaaagaggttttgccttcgtgacatttgacgaccacgatagtgtggacaagattgtaattcagaagtatcacacagtaaaggggcacaactgcgaagtgaggaaggctttgccaaagcaggagatggcaagcgcgagctcatcccaacgaggccgacgtggaagcggcaatttcggtggcggtcggggagacggatttgggggtaacgacaactttggcaggggagggaacttctctggtagagggggtttcgggggatcctgtggaggtgggggctatgggggcagtggagatggatataacggatttggcaatgacggcagcaattttggtggtggaggatcctataacgatttcggcaattacaacaaccaaagctccaatttcgggcctatgaaagggggaaatttcggtggtcgcagttctggaccatacggcggggggggacagtacttcgccaagccccagaatcagggtgggtacggagtatcctcctcttcatcctcctatgggtccggcagaaggttctag

SEQ ID NO: 14970 - DNA, 3294 bp, synthetic construct
  source 1..3294: mol_type = other DNA; note = Synthetic coding sequence
atggctgccgctgctgctgagcaacagcagttctatcttctgctgggtaacctactgtctccagacaatgtggtgcgaaaacaggcagaagaaacgtatgagaacattcccggacaatccaagattacttttcttctgcaggccatcaggaacacaacagcagcagaggaagctagacagatggccgctgttctcctgcgcaggttgctgtctagcgcctttgacgaggtgtatccggccctgccctccgacgtgcagaccgctattaagtctgaattactcatgattatccagatggaaactcagagttcaatgagaaagaaggtatgtgatatagccgcagaattggccagaaacctcattgacgaggatggcaataatcagtggcctgagggtctgaaatttctattcgattcagtgtcatcccagaatgttggcttaagggaagccgcattacacatcttctggaactttccaggaatcttcggtaaccaacaacaacattatctggatgtcattaagcgaatgctggtccagtgcatgcaggatcaggaacaccctagcattcggaccctgtctgctagggcaaccgctgctttcatattagcaaacgagcacaacgttgctctgttcaaacatttcgccgatctactgcctggcttcttgcaggccgtgaatgattcgtgctatcagaacgatgattcggtgctgaagagcttagtggaaatcgcagatactgtgcccaagtatcttcgcccccatctagaagccaccctgcagctatctctcaaactttgcggggacacatcacttaacaatatgcagcggcagcttgctctcgaagtgatagttacgctctccgagaccgctgcagcgatgctccgcaagcacacaaacatcgtagcccagaccattcctcaaatgctcgcaatgatggttgaccttgaggaggacgaggactgggctaacgcagacgagctggaagacgacgacttcgactctaacgccgtcgcaggcgagtccgcccttgaccgcatggcctgtggcctgggtggtaagttggtgctgcccatgattaaggaacatataatgcagatgctgcagaatccagattggaagtatcgacatgccggtctcatggctctctctgccattggtgagggctgccaccagcaaatggagggcattctgaacgaaatagtcaattttgttttgctctttctccaggacccgcaccctagggtgcggtacgctgcatgcaacgccgtgggccagatggccacagactttgctccgggattccaaaagaagtttcacgagaaggtcattgcggccctcctgcagactatggaggaccagggcaatcagcgcgtccaggcacatgccgccgccgctctgataaactttactgaagactgcccaaagtctttacttatcccctatcttgacaatctggtcaaacacctgcattccatcatggtgctgaagctccaggaacttattcagaaggggacgaaactagtgctcgagcaagtcgtgacatcaattgccagcgtggcagatactgcagaggagaagtttgtcccttactacgacttatttatgccgtcattgaaacatatagttgaaaatgctgtgcagaaagagctaagactgctgcgcgggaaaaccatcgagtgcatctccttaatcgggctcgcagtgggcaaagagaaattcatgcaggacgcaagcgacgtaatgcagctgctgctcaagactcaaacggacttcaatgacatggaggacgatgatccacagatatcttacatgatctcagcttgggctcgcatgtgtaaaattctggggaaagaatttcaacagtatctgcccgtcgtgatgggtccccttatgaagacagccagcatcaagccggaagtggcccttctcgatactcaagatatggagaatatgtccgatgacgatggctgggagtttgtcaatctcggagatcagcagtcctttggcatcaagacagccgggctggaagaaaagtccaccgcatgtcagatgctggtgtgttacgccaaggaactgaaggaggggttcgtcgagtacacagagcaggttgttaagctgatggtgcctcttttgaaattttacttccacgacggggttagggtggccgccgccgagagtatgcccctcttgctggagtgcgctagagtaagggggcccgaatacctcacccagatgtggcacttcatgtgcgacgccctcattaaagccatcgggacagaacccgactctgacgtcttgtccgagatcatgcattcctttgcaaagtgtattgaggtaatgggagatggatgcctgaacaatgagcatttcgaggagctgggcggtatcctaaaggctaagttagaggagcactttaagaaccaggaactcaggcaagtgaagcgccaggacgaggattacgatgagcaggtagaggagtcactgcaggacgaggacgacaatgacgtgtacattctcaccaaggtctccgacattctccactccatcttcagcagttataaggaaaaagtgctcccatggttcgaacagctactccccctaattgttaacctgatttgcccgcaccggccctggcctgaccggcagtggggattgtgcatctttgacgacgtgatcgaacactgcagccctgccagctttaagtatgcagagtatttcctgcgcccaatgctacagtatgtgtgcgacaacagccctgaagttagacaggccgctgcctacggcctcggggtcatggcgcagtatggaggcgacaattacaggccgttttgcactgaagccctgcccctgcttgtgcgggtgattcaatccgcagacagcaagaccaaagaaaacgttaacgcaacggagaattgcattagcgccgttggaaagattatgaaattcaagcctgactgcgttaatgtagaagaagtgttaccacattggctgtcctggcttcctctgcacgaagacaaggaggaggccgtccaaaccttcaattatttatgcgacttgattgagagcaatcatccgatcgttctggggcctaacaacaccaatctgccgaagatcttctcgatcattgccgaaggagagatgcacgaggcaattaagcacgaagacccatgcgctaagaggcttgcaaacgtcgttcgtcaggtgcagacctctggcggcctctggacagagtgtatagcacagctgagccccgagcagcaggctgccattcaagaactgctgaactcagcctag

SEQ ID NO: 14971 - DNA, 2715 bp, synthetic construct
  source 1..2715: mol_type = other DNA; note = Synthetic coding sequence
atgttccctgcactagaaactcacctgaaacagaccatccccgacccttatgaagattttatgtatcgacacctccagtactatggctatttcaaagctcagagaggctctttacctaactctgctacgcaccaacatgtgaggaaaaataatccccaatgcctgctcaatggttcccttggcgaaaaagatgacctgatacccgacacactgcagaaggaaaaactgttgtggcctatttcattatcctccgccgtccatcgccagatagaagctattaatcgtgacttccatagctgcctgggttggatgcaatggagaggattaagtagcctgcaacctcctccgcccaggttcaaggacagccccgcgagtgcttttcgggtcgccggcataaccgattctcacatgctgagccttccacacttgagaagcagacagcttttatacgatgaattggatgaagtaaatccacgtctccgggagccccaggagctcttcagtatactgagcaccaaaaggccactgcaagcaccccgttggcctatcgagtgcgaagttattaaggagaatattcatcacatcgagtgggcgccccctcagcccgaatacttctaccaacccaagggcaatgaaaaagtcccggaaatcgtgggcgagaaaaaaggcaccgtagtgtaccagctggactctgtgccgatagagggttcctattttacatcttccagggtaggcgggaaacgggggatagtcaaggaactggctgttacccttcaaggtccagaagacaacacgctcctgttcgaatcccggtttgagagcgggaacctgcagaaggcggtgagggtggacacatacgaatacgagctcaccctgcgaactgacctttatacaaataaacacacacagtggttctactttagggtgcagaacacaaggaaagacgctacatatcgtttcactatcgtgaatttgttgaagcctaagtccttgtacaccgtcggcatgaagcctttgctatactcacagctggatgctaacactagaaatatcgggtggcgccgagaaggtaatgagatcaagtactataagaataataccgatgacggccagcagccattttattgtctgacgtggaccatccaattcccatatgatcaggacacgtgcttctttgctcatttctatccctatacttacacagatctccagtgctacttactgagtgtcgctaacaacccgatccagtcccagttttgcaagcttcagacactgtgtcgtagcctggccggcaacaccgtttatttgctcaccattacaaatcccagccagaccccccaggaggctgctgcaaagaaagccgtggtgttaagtgctagagtgcatcctggcgagtctaacgggagctgggtaatgaaaggctttctagatttcatcttgtctaattcccctgacgcacagttgctgcgggatatctttgtgtttaaggtcttaccaatgcttaatcctgacggggttattgtcggaaactaccgatgctcactggctggacgagacctgaacaggcactacaaaaccatattaaaggaaagtttcccttgtatttggtatacacgcaatatgatcaaacggctgctggaggagagagaggttttgctgtattgcgactttcatggacactcccgtaagaacaacatctttctgtatggctgcaataataacaacagaaaatattggttgcacgagagagtcttcccactgatgctatgtaagaacgctccggacaagttctcattccattcctgcaacttcaaggtgcaaaaatgcaaggaggggacagggagagtggtaatgtggaggatgggcatcctcaattcgtataccatggagtccacctttggcggatccacacttgggaacaagagagatacacatttcactattgaagacctgaagtctcttggttaccacgtgtgcgatacactacttgatttctgcgatcctgatcagatgaagtttacacaatgcctggctgaactgaaggaactcctgcgacaggaaattcacaaaaaattccacgaactggggcaagacgtggacctggaaggcagttggagcgacatcagcctttcagatattgagagcaggaattctacgtctggttccgacagcagtttgtcagacggcctccctgttcacctcgccaacattgcggatgagctcacacagaaaaagaagatgttcaaaaagaagaaaaagaagtcccttcagacccgaaaacagagaaacgagcagtaccaaaagaaaaatctcatgcagaaacttaaacttaccgaggatacctcggaaaaagccggctttgccagcacactgcagaagcaaccgactttttttaagaactccgaaaatagttccttcctgcccatgaagaacgagaatccgcggcttaacgagacaaatctgaatcgccgtgacaaggacacacctctggatcctagcatggccacgctgatcctgcctaagaataagggccggatgcaaaacaagaaacccggcttcacagtatcgtgcagcccaaaacgcacaatcaattccagtcaggaaccagctccagggatgaaacccaattggccccgctcccgatacccagcgaccaaaagagggtgtgctgcgatggcggcctatcccagccttcacatctatacatatccgtag

SEQ ID NO: 14972 - DNA, 789 bp, synthetic construct
  source 1..789: mol_type = other DNA; note = Synthetic coding sequence
atggccctatccctggggtggaaggcgcacaggaatcactgtggccttctgctccaggcattgcgctcatcgggactattactgtttccttgtggccagtgcccatggcgcggtgcggggtccttcttggacccagagatcaaagcttttcttgaagagaataccgaagttacttcttccggcagcctgactcccgaaattcaacttcggctcttgacccctcgatgcaaattttggtgggagcgagccgatctgtggcctcactccgacccttactgggccatttactggccggggggccaggccctctctcggtacttgctggacaacccagatgtcgtgcgtggaaagagcgtgctcgatctgggatctggttgtggagctacagcaatcgccgcgaaaatgagcggggcatcgcgcatcttggccaacgacatcgaccctatagctgggatggctatcacactaaactgtgaattgaacagactgaaccctttcccgattttgatccagaacatcctgaaccttgagcaggataagtgggacctggtagtcctgggcgatatgttctacgacgaggacctggcagactccctccaccaatggctgaagaaatgcttctggacctatcggactcgggtcctgatcggggatcccggaaggccccaattttccggccacagcatccagcatcacctgcataaagttgttgaatattccctgctggaaagcaccagacaggaaaactctggactgaccacctcaactgtttgggggtttcagccatag

SEQ ID NO: 14973 - DNA, 2619 bp, synthetic construct
  source 1..2619: mol_type = other DNA; note = Synthetic coding sequence
atgaactacccgggaaggggatcacccagatctccagaacataatggtcgtggcgggggaggcggcgcatgggaactgggcagcgatgctagaccagcctttggtggcggggtgtgttgcttcgagcacttgccagggggtgatcccgacgacggggatgttccactggctttgctgaggggggagccgggcctgcacttggcccctggcacggatgatcacaaccatcatcttgcactggatccttgtctgtccgatgaaaattatgatttttctagtgctgagtcagggtcgtcgctccggtattacagcgagggcgagtctggaggcggcgggagctctctatcactgcatccccctcaacaacctccactcgtgcctaccaatagcggcggtgggggcgcaacaggcggatcgcccggcgagcgaaagcgcacgaggttggggggcccagccgcgagacaccgttacgaggtcgtcactgagcttggaccagaggaagtccggtggttttataaagaagataagaagacttggaaaccattcattgggtatgattcactgagaatagagctggccttcagaacactgctgcagacaacaggagccaggccccaggggggtgatcgcgacggtgaccacgtctgtagcccaacgggcccagcttccagctccggcgaggacgacgacgaggatcgggcatgtggcttttgtcagtccactacgggccacgagcctgaaatggtggagctggtgaacattgaacctgtctgtgtgcgcggaggactgtatgaggtagatgtaactcagggggagtgctatcctgtctattggaaccaggctgacaagatacctgtgatgaggggacagtggttcatcgatggaacatggcagccactggaagaagaagagagcaatctgatcgagcaagagcacctaaactgtttccgtggccagcagatgcaggaaaatttcgacatcgaggtgtctaaaagtatagacggtaaagatgcagtccactcatttaagctgagtagaaaccacgtggactggcactcagttgatgaagtttatttatattcagacgccactacgtccaaaattgcacggacagtcactcagaaactgggcttcagcaaggcctcaagcagcggtacacggttacataggggatacgtggaggaggccaccctggaggataagccatcccaaacaacgcatattgtatttgttgtgcacgggatcggacaaaaaatggatcaaggaagaatcatcaaaaacaccgcgatgatgagggaagctgccaggaagatcgaagagaggcactttagcaatcacgctacacacgtggaattcttgcccgtcgagtggcgatctaagcttactctggacggggataccgtcgacagcattacaccagataaggttaggggattgagggacatgctcaactcttctgcgatggacattatgtactacactagtccactgtatagggatgagctggtgaaggggctccagcaggagctcaatcgcttgtactctcttttctgcagccgtaaccccgacttcgaagagaaggggggcaaggtttctatagtgtcccacagcctggggtgcgttattacatatgacattatgacagggtggaaccctgtgcgactttatgagcaactgctgcagaaggaggaagagcttcccgatgaacggtggatgtcatatgaggaacgtcacttgctagatgagctatacattaccaaacgcaggctgaaggaaatcgaagagagactccatggcctcaaggcttcctctatgacccaaacacctgccctgaagtttaaggtcgaaaatttcttctgcatgggaagcccattggctgtgttcctggctctgcgcggaatcaggccgggtaacacaggatcccaggaccacattctaccgcgggaaatttgcaacagacttcttaacatctttcatcccactgaccccgtggcataccggcttgagccgctgatccttaaacattactccaacatcagccccgtccagatccactggtataatacaagcaatcctctgccgtatgagcacatgaaaccatcctttcttaaccccgccaaggaacccacttctgtttctgaaaacgagggaataagcacgattccgtcacctgtgacctcaccagtcctgagccggagacactatggagagtccatcaccaatattggcaaggcatcaatactcggggcagctagcataggaaaaggcctcggcggaatgctcttttctcgctttggtagaagctcaacgacgcagtcttctgagacctcgaaggacagcatggaggacgagaagaaacccgtggcctcaccttccgcaaccacagtgggcacacagactctgccacattctagcagcgggttcctcgactctgcactggagctggaccaccgtattgacttcgaattgagagaggggctggtcgagtccagatactggtctgctgtgacgtcacacacggcatactggtcttctctggatgtcgcgctgtttctgcttacattcatgtataaacatgagcatgacgatgacgcaaagccaaatctcgatcccatctag

SEQ ID NO: 14974 - DNA, 1461 bp, synthetic construct
  source 1..1461: mol_type = other DNA; note = Synthetic coding sequence
atggtgagccataccttccacatgagaactgaggagtccgacgcaagccaggagggagacgatttacctaaatccagtgccaatacgagccatccgaaacaggatgatagcccaaagtcatcagaggagaccatccagcccaaggaaggggatatccccaaagccccagaagagactatacagtcaaaaaaagaagatctgcccaaatcatcagagaaggcaatccagcccaaggaatcgaacatccccaaaagcagcgccaagccgatccagcctaaattgggaaacatacccaaagcctccgttaaaccttctcagcccaaggaaggggacatccccaaagcccccgaggaaaccattcagtccaaaaaggaggacctccccaaaagctcagaggaggccattcagcccaaggagggcgacattcctaagtcttccgcgaagcccattcagcccaagctcggcaatatagcaaagacgagtgtcaagcctagccagcctaaagaatccgacattcccaaaagtcccgaagagactattcaacctaaggaaggagatatccctaaatcctccgccaagccaattcagcctaaattgggtaatatcccaaaggccagcgttaaacctagccagcccaaagaaggcgacatctcaaaatcacccgaggaggctatacagcccaaagaaggagacctgcctaagtcactcgaggaggcaatccagcccaaagaaggcgatatcccgaaatccccagaagaagctattcagcccaaagagggcgatatcccaaaatctctggaggaggctattcagccaaaagaaggagacatccccaagtctcctgaggaaaccatccaaccgaagaagggcgacatcccgaaatccccggaagaggccatacagcccaaagagggggatattccaaagtcacccaagcaagccatccagccaaaagaaggggacatcccaaagtcactagaggaggctattcccccgaaggagattgacatccccaagtctccagaagaaaccatccagcccaaggaagacgactctcctaagagcctcgaggaggccacaccaagcaaggaaggcgacatactgaaaccagaagaggaaacaatggagtttcctgagggggataaggtcaaggtaatcctctctaaggaggattttgaagcgagtcttaaggaggccggtgaacgcttagtggcggttgatttttcagctacctggtgcggtccttgcaggacgatccgccctttcttccacgctctgtcggtgaagcacgaagatgtcgtgttcttagaagttgacgccgacaactgcgaggaggtggtgcgcgagtgtgccatcatgtgtgtccctaccttccaattctataaaaaggaggagaaggtggatgagctctgcggtgccctgaaggagaaattagaagccgttatcgctgagcttaagtag

SEQ ID NO: 14975 - DNA, 1005 bp, synthetic construct
  source 1..1005: mol_type = other DNA; note = Synthetic coding sequence
atggctgcaagtggcagcgggatggcccagaagacgtgggaattagcaaacaatatgcaagaggctcaatcaattgatgagatttataagtacgacaagaaacagcagcaggaaattctagccgcgaaaccctggaccaaagaccaccactacttcaagtattgcaagatatcggcccttgccctgctaaagatggtgatgcacgcccgaagcggtggtaacttagaagttatgggccttatgctcgggaaagtcgatggcgagacaatgattatcatggattcctttgccctgcccgtagaggggacagagacccgcgttaacgctcaggctgctgcctacgaatatatggctgcatacatcgaaaatgcaaagcaggtcggacggctggagaacgcaatcggatggtaccactcccaccccggatatggatgctggttaagcggaatcgacgtgtcaacacagatgcttaaccagcagttccaggaaccatttgtagccgtggtgatcgaccctacacgaacaatatccgctggcaaggtgaatctgggcgcttttcggacttatccaaagggctataaacccccagatgagggcccatctgagtatcagaccattcccctgaacaagatcgaagattttggcgtgcactgcaagcagtactatgctctggaggtatcatattttaagtcgagtcttgacagaaagttgctcgagctactatggaataaatattgggtaaacaccttgagctcgagcagcctgctgacaaacgccgattacaccaccggacaggtgtttgatctgagtgagaagctggagcagtccgaagcccagttgggcaggggctcattcatgctgggcctagaaacgcatgaccgcaaaagcgaggataaactggctaaggctacacgagactcctgcaagactactattgaggccatccacggccttatgtcccaagtgataaaggacaaactcttcaaccaaataaatatctcatag

SEQ ID NO: 14976 - DNA, 1350 bp, synthetic construct
  source 1..1350: mol_type = other DNA; note = Synthetic coding sequence
atggtgatggagaaacccagtcctttgctggtggggagggagttcgtacggcagtactataccctgctgaataaggctcccgaatacctgcaccgcttctacggccgcaattcatcatacgtccatggcggcgtggatgcaagcggcaaaccacaggaggcggtctacgggcagaacgacatccaccataaagtccttagtctgaatttctctgagtgccatactaaaatccgccatgtcgacgcacatgccacgctgagtgacggcgtcgttgtccaggttatggggctcctgtcgaactcaggccagcctgagcgcaagttcatgcagactttcgtgctggcacctgagggatctgtgccaaataagttctacgtgcacaacgacatgttcagatacgaggacgaggtttttggtgactcagagccggagctggatgaggaaagcgaggacgaggttgaggaggaacaggaggagaggcagccttctcctgagccagtccaggaaaacgccaatagtggatactatgaggcacacccagtaaccaacggcattgaagaaccactggaggagtcatctcacgaaccagagccagaacccgagagcgagacaaagacagaggagttaaagcctcaggtggaggagaaaaacttggaggaactggaggagaaatcaacaacgccacccccggccgagccagtgtctttgcctcaggaacccccaaaacccagggtcgaagctaagccagaggtgcagagtcaacccccccgcgtgcgtgaacagcggcctcgggagcgaccagggttccccccacgaggtccacggcccggtcggggtgatatggaacagaacgacagcgacaacagaaggatcattcggtatccagactctcatcagctgtttgtcggcaatttaccccatgatatcgatgagaatgaattaaaggaattctttatgtctttcggcaacgtcgtcgagctgcggattaacacaaagggagtaggcggcaaactgcctaactttggcttcgtcgtattcgatgatagtgagcctgtgcagaggattctcatcgcgaaaccaataatgttccggggggaggtgagactgaatgtggaagagaaaaagaccagagcggctcgagagagagagacgcgcggagggggcgatgatcgccgggacatacgccgaaacgacagagggccagggggccctcggggcattgtggggggcgggatgatgcgcgacagagatgggcgaggcccaccccctcgcggggggatggcacaaaagctgggctccggaagggggaccgggcagatggaaggtaggtttaccggccagcggagatag

SEQ ID NO: 14977 - DNA, 333 bp, synthetic construct
  source 1..333: mol_type = other DNA; note = Synthetic coding sequence
atggaggaaattccagcgcaggaggccgcgggaagcccacgtgtgcagtttcaaagcctggaaactcaaagtgagtgtctgtccccggaaccacagtttgtgcaggacactgatatggaacagggactgacaggcgggatattgctgaggcttcccaccaccagaatccacagcgtgaattcttgccctgccttatcccacacccaggcttccgctttttccggcgaaacattggctgtgctgacagcaggaatcagcaaaaggtggcccaagtaccggctccctatcgacatcgcccggccctgtagcgaaaccccatttcctcgactatag

SEQ ID NO: 14978 - DNA, 822 bp, synthetic construct
  source 1..822: mol_type = other DNA; note = Synthetic coding sequence
atgggtcagaaggtgaccggcggaattaaaacagtggacatgcgggacccaacttatcggcccttgaagcaggagcttcaagggctggattattgcaagcccactaggctggacctcctgttggacatgccacccgtgagttacgatgtacagctgcttcattcttggaacaacaatgacagatccttgaacgtgttcgtcaaagaggacgacaagttgatcttccataggcaccccgtagcccagagcactgatgcgatccgaggaaaagtgggctatacgagaggactgcatgtgtggcaaattacctgggcgatgaggcagcgggggacgcatgccgtcgttggggtcgctacagctgacgctccactgcacagcgtcgggtacaccactcttgttggcaataaccacgagtcctgggggtgggatctgggccggaaccggctgtaccacgatggcaaaaatcagccaagcaagacctaccctgcattcctggagccggatgaaacgtttatcgtccccgactcattcctggttgctctcgacatggacgatggcactctcagcttcatcgttgacggccaatatatgggcgtcgcctttcggggcctgaaagggaagaagctgtaccccgtcgtgtcagccgtatggggccactgtgaaattcgcatgcgatatctcaacggtctggaccctgaaccactgcccctgatggatctgtgtcggaggtccgtaagattggctttgggcagagaacgcctgggagagattcacacattgccgcttccagcatccctgaaggcctatctgctctatcagtag

SEQ ID NO: 14979 - DNA, 2916 bp, synthetic construct
  source 1..2916: mol_type = other DNA; note = Synthetic coding sequence
ctgagccgccgggtgccatgcgtgcgacgcggctgtcgccccccccttcctcctctgccaggctcccagtcaagggcgtggtccagggacagagaagcaccgctggatcccgggagaccagcgcagagcggtcgacgtcccacatccagaagcgtttcccacgcctgctcatggaatggtggaagccttgaccctctggagggcacacccgcgctcctcaggtctgccgagcggctcatgaggaaggtcaaaaagctgaggctcgacaaagagaacaccggtagttggcgtagcttctctcttaatagcgagggtgccgaaaggatggcgaccaccggtacgccaaccgctgataggggcgacgccgccgctaccgacgaccccgctgccagatttcaagtgcagaagcattcctgggacggattgagatctatcattcatgggtccaggaagtactctggactgattgtcaataaagcgccacacgattttcagttcgtccaaaagaccgacgagagcggcccacactcacatcgtttatactacctcggcatgccatacgggtcacgtgaaaattctctcctgtattccgagatccccaaaaaggtgaggaaggaagccttgctcctgttgtcatggaaacagatgcttgaccacttccaggcaactccacaccacggagtctactctcgcgaagaagagctattgagggagcgaaaaaggcttggagtttttggcataacgtcatatgatttccacagtgagtccggccttttcctgttccaagccagtaattcactgttccactgtcgcgatggcggcaagaacgggtttatggtttctccaatgaagccgttagagataaaaacgcagtgcagcggaccacggatggaccccaagatttgtccagccgacccagccttcttttctttcatcaataactccgacctgtgggtggccaatatcgagactggagaggagcgacgtttgacattctgccatcaggggcttagtaatgtgctggacgaccctaaaagtgcaggcgtggctactttcgtcattcaagaggagtttgaccgcttcacaggatactggtggtgtcccaccgctagttgggaaggctccgagggcctgaagaccctgcggattttatatgaggaggtggatgagagtgaggttgaggtgatccacgtaccctcacccgccctcgaggagagaaagacagacagttaccggtacccacggaccggctctaaaaatccaaagatagccttgaagttggctgagttccagacagattcacagggcaaaattgtgtcaactcaagagaaagagctcgtgcagcccttcagctctctcttcccaaaagtggagtatatagccagggctgggtggacacgagacgggaagtatgcttgggctatgttcctggatagacctcagcaatggctgcagctggttctgttgccccctgccttgttcataccctcaactgaaaacgaggagcagaggctggcctccgcaagagccgttccaaggaatgtccagccctatgtggtgtatgaagaggttaccaatgtttggatcaacgttcatgacattttctatcctttcccccagagtgaaggcgaagatgagctgtgtttcctgagagctaacgagtgtaagactgggttttgccatctctataaagttacggctgtgctcaaatctcagggctacgattggtcggaaccctttagccccggagaagacgagttcaaatgtcccataaaagaagagatagcactgacaagcggcgagtgggaggtgctggcgcggcacggctcaaagatttgggtgaatgaggaaaccaaactggtatactttcagggaaccaaagatactcccctggaacaccacctctacgtggtcagctatgaagcagccggggagattgtgaggctgaccacccccggattctcccatagttgctccatgtctcagaatttcgacatgttcgtaagtcattacagttccgtgtcaacaccaccatgtgttcacgtgtacaagctgtcgggtcccgacgacgacccactgcacaagcagcctcggttctgggcctcgatgatggaagcagcgtcatgccctcctgactatgtgccgcctgaaatttttcatttccacaccagaagcgatgtgcgactgtacggaatgatctacaagccacatgcactccagccagggaaaaagcaccctacggttctgtttgtgtatggtggcccacaggttcaattggtcaataacagctttaaggggatcaaatatcttagattaaacacactagcatcccttggatacgccgtggtggtgatagacgggcgtggtagctgccaaagggggctgaggttcgagggtgccttaaagaaccagatgggtcaggtggaaatagaggatcaagtggaagggcttcagtttgtggctgagaaatatggctttatcgacttgagcagggtcgccatacatgggtggtcctatggtggttttctttccctgatgggattgattcataaaccacaggtgtttaaagtggcgatcgccggcgctcctgtgactgtatggatggcatacgatacaggttacaccgaacggtatatggatgtgcctgaaaacaaccaacacggctacgaggcagggtcagtcgcacttcacgtggagaaactgcccaacgaaccgaaccggttgttaatcttacatgggttcctggatgaaaatgtccacttttttcacactaactttcttgtttctcaactgataagagctggaaagccatatcagttacagatctaccctaacgaaagacatagcataaggtgccctgaatctggtgaacattacgaggtaaccctgctgcactttctccaggagtacttgtag

SEQ ID NO: 14980 - DNA, 2592 bp, synthetic construct
  source 1..2592: mol_type = other DNA; note = Synthetic coding sequence
atgggaaaccgagaaatggaggaactgatccctctggtcaataggttgcaagatgcattctctgctttgggccagtcctgcctcctagagcttccacaaattgctgtcgtgggcggacaaagcgcagggaaatcatccgtcctggaaaatttcgtggggagagacttcttgccaaggggttcgggcatcgtgacacgtagaccactggtgcttcagttagtcacctccaaggcggagtacgccgagttcctgcactgcaagggcaagaagttcaccgatttcgacgaggtcagactggagatcgaggcggagactgatcgcgtcactgggatgaacaaaggcatcagttcaatccctatcaatctgcgggtctacagtccacacgttcttaacttgacacttatcgacctaccgggcatcaccaaggtgccggtcggtgatcaacctcccgacatcgagtatcagatccgggagatgatcatgcagtttatcacccgggagaattgtctcatcctagctgtgacccctgccaacacagacctcgccaattcagatgctctgaagctcgccaaagaagttgaccctcaaggcttgcgcacgatcggagtcattaccaagctcgacttgatggatgagggaaccgatgcaagagacgttcttgagaataaattgttacctctacgtaggggctacgtgggtgttgttaaccgtagccaaaaggacattgacgggaagaaggacattaaagccgccatgctggccgaacggaagttttttctcagtcaccccgcataccgccacatagctgatcggatggggacacctcatctccagaaggtgctgaaccagcagctgacaaatcatatacgcgacacccttcctaactttcgaaataagcttcagggccagctgttatccattgagcatgaagtggaggcttacaaaaacttcaagccggaggatccaacgcgaaaaactaaggcccttctccagatggttcaacagtttgccgtagactttgagaaacggatcgaaggcagtggagatcaggtggatacccttgagttatctggcggggccaaaattaatcgaatctttcacgaacggtttcccttcgagattgtgaagatggaatttaacgaaaaggagctcaggcgggaaatctcctacgcaatcaagaacatccacggaatccgtactgggctatttacaccagacatggcattcgaggcaattgtgaagaaacagatcgtgaagctgaagggcccaagcctgaagtctgttgatctcgtgatacaggagttaataaacacagtaaagaagtgcaccaaaaagctagccaactttccgagactgtgtgaagagacagagaggatagtggctaatcatattagggaacgagaaggtaaaacgaaggaccaggtcctgttactcatcgacatacaggtgtcatacattaacaccaaccatgaggacttcattggatttgccaatgctcagcaaaggtcctcacaggtgcacaagaagacaactgtcggcaaccaagtgattcgcaagggatggttgacgatcagtaatatcggcattatgaagggtggctccaaggggtactggttcgtgctgaccgcagagtctctgtcgtggtacaaggacgatgaagagaaggagaaaaaatatatgctccctctggataacctgaaagtcagggatgtagagaagtcgttcatgtcttccaagcacatattcgcactgttcaacaccgagcagaggaacgtgtacaaagactaccgcttcctggagctcgcctgcgattcccaggaggatgtggactcttggaaggcatcacttctgcgcgccggcgtctacccagacaaaagcgttgggaacaataaggcggaaaacgatgaaaatgggcaagccgaaaacttttccatggacccacagcttgaacgccaagtcgagacaattcggaaccttgttgacagctatatgtccatcattaataagtgtatcagagacctaatacccaaaactatcatgcacctaatgatcaataacgtgaaggattttattaattcagaactgctagcccagttatattcgagcgaagaccaaaatacactcatggaagagagtgcagagcaagcccagcgacgggacgaaatgttgcgaatgtaccaggctttaaaggaagctttaggcattatcggcgatattagtacggctacagttagtacccccgcgcccccgccggtagacgacagctggatccagcattccagacgatcccctcccccctctcctactacacagcgccgccctacactgagcgctcctctcgccaggcccacaagcgggcgcggacctgcaccagctatcccttctcctgggccacatagtggtgcaccacccgtgccgtttagacccgggccactgcctccatttccgagtagcagcgacagctttggcgccccacctcaggtgcctagtcgtcccacgcgcgcccctcctagtgtcccttctaggagacctcccccttctccgacgagacccacaatcattcgcccgctggaatcttccttgttggactag

SEQ ID NO: 14981 - DNA, 1263 bp, synthetic construct
  source 1..1263: mol_type = other DNA; note = Synthetic coding sequence
atgttgaaggccgtgatactcattggcggtccccagaagggcaccagatttcgccctctgagtttcgaggtccccaagccactgttccctgttgctggcgtgcccatgattcagcatcatatagaggcttgcgcccaggtccctggcatgcaagagatactactcataggtttttatcagccagatgagccgcttacacagttcctggaagccgcacagcaggaattcaatttaccggtcaggtacttgcaagagtttgcacctcttgggacaggtggtgggctctatcactttagagaccaaattcttgccggctcccctgaggcatttttcgtgttgaatgccgacgtgtgcagcgattttccactgtctgcgatgttggaggcccatcgccggcaacgccacccgtttcttctcctgggaactactgcaaaccgaacccagtctctgaactatggctgtatcgttgagaacccgcagacgcacgaggtgctccactacgtcgagaagcccagcaccttcatctccgacataattaattgcggcatttaccttttctctccagaggccctgaagcccctcagggacgtcttccagcggaatcaacaggacggacaactcgaggactcacccggcctgtggcctggcgccggcacgatcaggttagaacaagacgtgttcagcgccctcgccggacagggccagatttacgtgcacttgactgacgggatctggtcccaaatcaagtccgctggatccgccctctacgcatcaagattatacttgtcgcgctatcaggatacacacccagagagactagctaaacatacaccgggtgggccatggattagaggtaacgtgtacatccacccgacagccaaagtcgctccttctgcagtactgggtccaaacgtctccattgggaagggcgttactgtaggagaaggagtgcgactgcgcgagagcattgttttgcacggcgcaaccttacaggaacacacatgcgttctgcacagtatagtggggtggggtagcaccgtgggacgttgggcacgagtcgaaggaaccccttcagatccgaaccccaatgatccaagagctagaatggattccgagagtcttttcaaggacgggaagctgctgcctgccatcactatcctcggctgtagggttagaatccctgccgaggtgctgattcttaattctatcgtgctacctcacaaagagctctctcgttcatttaccaaccagattatactctag

SEQ ID NO: 14982 - DNA, 2481 bp, synthetic construct
  source 1..2481: mol_type = other DNA; note = Synthetic coding sequence
atggtcgcgccagtccttgagacatcgcacgttttttgttgtcccaaccgtgtgagaggtgtgctgaattggtcgagtggtccgcgcggcctgttggcctttggaacttcatgctctgtcgtactctacgaccctctgaagagagtggtagtgactaacctgaatggccacactgcgcgcgtgaattgtatccagtggatatgcaaacaagatggcagcccgtccaccgaattggtgtcagggggtagcgataaccaagtaatccattgggagatcgaagataatcagctcctcaaagcggtgcacctacaggggcacgagggccctgtgtatgccgttcacgcagtctaccagcggaggaccagcgacccagccttgtgcacgctcatcgtctctgctgcagctgactctgcggtgagactgtggagcaaaaagggcccagaggtcatgtgcttgcaaacactgaattttgggaatggctttgcactagctctatgccttagctttcttcccaatacagatgtgccgatcctggcatgcggaaacgatgactgccgaattcatatcttcgctcaacagaatgaccagttccaaaaagtgctgtctctttgtggccatgaggattggattcgcggggtcgagtgggcagcctttggccgcgacctgtttctggcttcctgctcacaggactgtctcattaggatctggaagctctatatcaaatctacgtctctggagacccaagatgatgataacattaggctaaaagagaacacatttaccatcgagaatgagagcgtaaaaatcgccttcgccgtgacacttgagactgtgctggccggccacgagaactgggtcaatgcggtgcactggcagccagtgttctataaagacggcgtgcttcagcaacccgttaggctgctgagtgcgagcatggacaagacaatgattttatgggccccggatgaggagtccggcgtgtggcttgaacaggtaagggttggcgaagtgggcggaaacaccctggggttctatgattgtcagtttaatgaggatggcagcatgataattgcccatgcctttcacggtgctctacacctgtggaagcagaatactgtcaatcccagagaatggacaccggagattgttatcagtggacattttgacggggtccaagacctcgtgtgggatccagaaggggaattcatcattacagttgggacagaccaaaccacccgccttttcgccccttggaagcggaaagatcagtcccaggtgacatggcacgagattgcccggccgcagattcacggatacgacctcaagtgtctggctatgatcaatcgatttcagttcgtctcaggggcggacgagaaggtgctcagagtgttcagtgcaccgcgcaatttcgtcgaaaacttctgtgcaataacaggccagtccctaaatcatgtactgtgcaaccaagattctgacctgccagaaggtgccacagtgccggcactgggactgtccaataaggcagtgttccagggcgacatcgccagccaacctagtgatgaggaagagctcctgacaagcactgggtttgagtatcagcaagtggctttccagccctccattttaactgagcccccaactgaagaccatctcttacagaataccctatggcccgaagtgcagaaactgtatggacacggctatgaaatcttctgcgtcacttgcaactcgagcaaaactttactggcatccgcctgcaaggccgcaaagaaggaacatgcagccatcatactatggaatacgacaagctggaaacaggtccagaatctggtgtttcatagcctcacagtcactcagatggcatttagcccaaatgaaaaatttctgctcgctgtaagtagagatcgaacttggtctctctggaaaaaacaggatacaatctcccccgaattcgagccagtgttttcattattcgcatttaccaataagataaccagtgttcacagccggatcatctggtcttgcgactggagcccagactcgaaatacttcttcaccgggtctagggataaaaaagtcgtcgtgtggggcgaatgcgactccacagacgactgcattgaacacaatattggtccttgttcctcggtcttggacgtcggtggagccgtgacagcggtgagcgtgtgcccggtgctgcatccatcccagcgctacgttgtggctgtgggactggaatgcgggaagatttgcttgtatacctggaaaaaaaccgaccaggtcccggagattaatgattggactcactgcgtcgagacgtcccagagtcagtcacacaccctggcaatccgaaagctgtgttggaaaaattgttctggaaaaactgagcaaaaggaagccgaaggagcagagtggttgcatttcgcatcttgcggagaggatcatacggtaaagatccatcgcgtcaataagtgcgccctgtag

SEQ ID NO: 14983 - DNA, 1152 bp, synthetic construct
  source 1..1152: mol_type = other DNA; note = Synthetic coding sequence
atggaccgcacatgcgaggagagaccggctgaagatggcagtgacgaagaagaccccgactccatggaggcaccgaccagaatccgggacacccctgaggacatcgtgctcgaggctcccgcttccgggctggcattccaccccgcaagagatctcttggcggcgggagatgtggatggcgacgtcttcgtgttttcttactcttgccaagagggagagaccaaagaactctggtcctcaggacatcacttgaaagcctgtagggcggtagccttctccgaggacggccagaaattgatcactgtgtctaaggacaaagccatccatgtgttagacgtagagcaggggcagttggagagacgagtatcaaaggcccacggcgccccaatcaattcccttctgttggttgacgagaacgttcttgccacaggggacgatacaggcggcatttgtctgtgggatcagcgaaaagagggacccctgatggatatgcgccaacatgaggagtacattgccgacatggcactggaccctgccaaaaagcttttgttaacggcaagtggggatggctgtctggggatattcaacatcaaaagaagaagattcgagctattgagtgaaccccaatccggcgacctgacatcagtgacactgatgaagtgggggaagaaagtagcgtgcggatccagtgagggaactatatacctcttcaactggaatggctttggagctacaagtgacaggtttgcattgcgcgcagagtccatcgattgcatggtccctgtgactgaatccttactctgtactggctccaccgatggagtcataagagccgtgaatattctgcctaaccgggtggtgggttcagtaggacagcacactggcgaacctgtcgaggaactcgcactgtctcattgcggtcgctttttagccagttcagggcatgaccaacgtctcaagttttgggatatggcccagctcagggcggtagtcgtggacgactacagaagacggaaaaagaaaggtgggcccctcagggctctgtccagcaaaacctggagcacagacgacttcttcgctgggctgcgggaagagggggaggactcaatggcacaggaggagaaagaagagacaggggacgatagcgattag

SEQ ID NO: 14984 - DNA, 999 bp, synthetic construct
  source 1..999: mol_type = other DNA; note = Synthetic coding sequence
atgtcggaggctggggaagagcagccgatggaaacgacaggcgcaacggagaacggacacgaagcggttcctgagggcgagtctcccgccggagcagggactggggccgcagccggcgctggcggtgcaacagcggccccaccatccgggaatcagaatggcgctgagggtgatcaaatcaatgcctccaaaaacgaggaggacgcagggaagatgtttgtcggcggactctcatgggataccagcaagaaggacctcaaggactacttcacaaagttcggtgaagtggtcgattgtaccattaagatggatcccaacacagggagaagccgcggatttgggttcattctgtttaaggacgctgcctctgtcgagaaggtcctggatcaaaaagagcaccggctggatggtagagtgatcgacccaaagaaggccatggcgatgaaaaaggatcctgtaaaaaagatcttcgtgggaggactgaacccagaagccactgaggagaaaatcagggaatacttcggggagttcggggagatcgaggccattgagctccctatggacccaaagctcaacaaacgccggggcttcgtgtttattacgtttaaagaagaagaacctgtgaagaaggtcctagaaaagaaatttcatacagtctcgggctccaagtgtgagatcaaagtcgcccagcctaaagaagtctaccaacagcagcagtacggcagcgggggaagaggaaatcgcaacagaggcaaccgcggatctggcgggggaggtggaggcggcggtcagtcacagtcttggaaccaaggttacgggaactactggaaccagggatatggttatcaacagggctacgggcctggttacggtggttatgactatagtccctatggttattacgggtacggacccggttatgactattcccaggggtccacaaattacggtaaatctcagaggcggggaggacaccagaataattacaagccatattag

SEQ ID NO: 14985 - DNA, 2745 bp, synthetic construct
  source 1..2745: mol_type = other DNA; note = Synthetic coding sequence
atgggcgactctcgagacctttgcccccacctggactccattggcgaggtgacgaaggaagatttgcttctaaaatccaagggaacctgccaaagttgcggtgtgaccgggcccaatttatgggcatgccttcaggtggcctgcccctacgtgggctgtggcgaatcattcgctgatcattccacaatacacgcacaggctaagaaacacaaccttaccgtcaacctgaccacatttcgcctgtggtgctatgcatgcgaaaaagaggtctttctggagcagaggctggcggctcccctgctgggctcttcctctaagtttagcgaacaggattccccccccccgtctcatcctctgaaagcagtccccatcgctgtggccgacgagggcgaatctgagtccgaagacgatgacctgaaaccccgagggcttaccggaatgaaaaacctcgggaactcttgttacatgaacgccgccctgcaggccttaagcaactgccctcccttaacccaattttttctggagtgcggtggattagtgcggacggacaagaagccagccctctgcaagagctatcagaaactggtcagtgaagtctggcataaaaagcggcctagttacgtggttcctacaagcctatcccacggcattaagctggtgaatcctatgttccggggctacgcccaacaggacactcaggagttccttaggtgtctgatggatcaactgcacgaggaacttaaagagccagtcgtggccacggttgccctgactgaagctcgcgacagcgatagctccgacacagatgaaaagcgggagggtgatcgtagtccgagcgaggatgagttcttgagctgcgattcatcaagcgaccgcggcgaaggagacggacaagggcgagggggtggctcatctcaagccgagacagaactcctaatccccgacgaagcgggacgggcgatttccgaaaaagagcgcatgaaggataggaaattcagctggggtcaacagagaacaaactctgagcaggttgacgaggatgcagatgtggacacggctatggccgctctggatgatcagcccgcagaggcccagcctccctcacctcggtcatcttctccatgtcggacgcctgaaccagataatgatgcacaccttagaagctcatctcgcccatgctcccccgtccatcatcatgaaggacacgccaaattgagttccagcccacccagggcctctcctgtacgcatggccccctcttacgttctgaaaaaggcccaggtcctttcagccggaagccgcaggaggaaagaacagaggtataggtcggtcattagtgacattttcgacgggtcaatcctgtccctggtacagtgcctgacctgcgacagggtgtccaccacggtcgagactttccaagacctctcactccccatccccggaaaagaagatctggcaaagctgcactctgccatttatcagaatgtgccggcaaagccaggggcctgcggagactcatacgctgcccaaggttggctagcctttattgtcgaatacatccgaaggtttgttgtctcatgcacaccctcttggttctggggtcccgtggtgaccctggaggattgtctggccgcttttttcgctgccgatgagcttaagggggataatatgtactcatgtgagcgatgtaaaaaacttcggaatggcgtgaagtattgcaaagtactcaggctccccgagatcctgtgtattcacctaaaaagattcagacatgaggtgatgtacagtttcaagatcaattcacacgtttcgttcccactagaaggtctggatctccgtcccttcttggccaaggaatgcactagccaaattacaacctacgacttgctgtctgtgatctgccaccacggaacggcaggatccggccattatattgcctactgccagaacgtaattaacggacagtggtacgagtttgacgaccagtatgtcactgaagtgcacgagaccgtcgtgcaaaatgccgagggttacgtgctgttttaccgcaagtcttcagaggaggccatgcgagaacgacagcaggtggtaagcctggcagctatgagagagccctctctgcttcgattctatgtgtccagggagtggttaaataagttcaatacgtttgccgagcccgggccaataaccaaccagactttcctgtgtagccacgggggcattcctccccacaaataccactatatagatgatcttgtggtcatccttccacagaatgtatgggaacatttgtacaacagatttggggggggtccagctgtgaatcacttatacgtgtgcagtatttgtcaggtcgagattgaagccttggcgaagcggaggcgtatagagattgataccttcatcaaactgaataaggcattccaggcggaggaaagccctggggtcatttactgcatctctatgcaatggttccgtgagtgggaagcctttgtaaaaggaaaggacaacgagccgcctgggcctatcgacaattccaggatcgcgcaggtcaagggcagcgggcatgtgcagcttaaacagggcgccgactatggacagatcagtgaagaaacttggacttacctaaatagtctctatggcggcggacccgagattgcaattagacagagtgttgctcagccgctgggcccagaaaatctgcacggcgaacagaaaatagaggcggaaacacgggcagtttag

SEQ ID NO: 14986 - DNA, 2772 bp, synthetic construct
  source 1..2772: mol_type = other DNA; note = Synthetic coding sequence
atggccgcctccaccgggtatgttcggctatggggtgccgcgcggtgttgggtactgaggaggcccatgctggcagcagcaggcggtcgggtcccaacagccgccggtgcttggttgctgagggggcaaagaacttgcgatgcaagccccccatgggctctgtgggggaggggccctgccatcggaggctccgctggcgccggggagggccccgtgatcaccgctctgacccccatgaccatccccgacgtcttcccacatcttcccctgattgcaatcacacggaatccagtcttcccccgattcatcaagatcatcgaggtgaagaataagaaactcgtggagctgctccggcggaaggttaggctggcgcaaccctacgtgggagtatttttgaaacgcgatgatagcaacgagtctgacgttgtggaaagtctcgacgaaatataccacaccggtacgttcgcacaaattcatgaaatgcaggatctcggcgacaaactgcgcatgatcgtgatgggacaccggcgggttcacatatccaggcagctagaagtggagccggaggaacccgaagccgaaaacaaacacaaaccaaggcgaaaatctaagcgaggtaagaaagaggccgaggacgagctcagcgctaggcatccagctgaacttgctatggagccgaccccagagctgcccgcggaggtgctgatggtggaagttgaaaatgtcgtgcacgaggatttccaagtcaccgaagaggtcaaggctctgaccgccgaaatcgtgaagactattagagacatcatcgccttgaaccctctctacagggaatctgttctgcaaatgatgcaggcaggccaaagagtggtcgacaatcctatctacctgagcgatatgggggccgctctcactggagctgaatcacatgagctccaagatgtgttggaggagacaaatatccccaaaaggctctataaagctctgagcctcctgaaaaaagaattcgaactgtcgaagctacagcagagactaggacgtgaagttgaggaaaaaataaagcagacacacaggaaatatctactgcaggaacagctcaaaataattaagaaagaattaggcctagagaaagacgacaaagacgccatagaagaaaagttcagagaacgcttgaaagaactcgttgtgccgaaacatgtcatggatgtggtggatgaagagcttagcaaacttggcctcctggataatcatagcagcgagtttaatgttacccgcaactaccttgactggctgactagtattccatggggaaaatactcaaacgagaatctggacttagcaagagctcaggccgtcctcgaggaggatcactacggcatggaggatgtcaaaaaaaggatcttggagtttatagcagtgtcccagctgaggggatcaactcaggggaagatcctgtgtttttatggcccccccggggttgggaaaacgtctatagctaggtccatagcacgagctctgaatagggagtatttccgattttcagtggggggcatgaccgacgtggccgaaataaagggacatcggagaacatatgtgggtgccatgcctggcaagattattcaatgcctaaaaaaaactaaaacagagaatccactgattttgatagacgaggtagataaaatcgggagggggtaccaaggcgacccttcaagcgccctgctggaactcctggatcctgaacagaacgcgaactttctggaccattacctggacgtgcccgtggacttatctaaggtgctgtttatttgcacagctaatgtgaccgatacaatcccggaaccgcttcgtgacaggatggaaatgattaacgtttccggttacgtggcccaagagaaactagcgatcgccgagcgctatctagttccccaggcacgggcactgtgcggactggatgagtctaaagcaaagctgagcagcgacgtgctgacgctgctcatcaagcagtattgtcgggaaagcggcgtgaggaatctgcaaaagcaagtggaaaaggtgctgagaaagagcgcctacaaaatcgtctcaggggaagcagagagtgtagaagtaaccccagagaacctgcaagactttgtgggcaaacctgtctttacagttgagcggatgtatgacgttacgccccccggtgtggtgatggggttagcatggaccgcaatgggaggatccactctcttcgtagaaacttcgttgagaagaccacaggataaggatgcaaagggagacaaggatggtagtctggaagtgaccggccaactcggtgaggtcatgaaggaaagcgcacgcatcgcttatacattcgccagagctttcctgatgcagcatgctccagccaacgactatttggtgactagccatatccacttgcatgtgccagaaggggctacaccaaaggacgggccctctgccggctgtactattgtgacagcactgctgagcctggctatggggagacccgtgaggcagaacctggctatgactggagaggtctctcttaccggcaaaatactgcccgtgggcggtatcaaggagaagactattgctgccaagcgcgcgggggtcacttgcatcgttcttccagctgaaaataagaaagacttctatgacctcgccgcctttatcacagaaggcctggaagtgcacttcgtcgagcactatcgcgagatttttgatattgcgtttccagacgaacaggctgaggccctagctgtcgagcggtag

SEQ ID NO: 14987 - DNA, 681 bp, synthetic construct
  source 1..681: mol_type = other DNA; note = Synthetic coding sequence
atgggaccacttccccgcacagtcgagctgttctacgacgtgctgtccccatacagctggctgggttttgaaatcctctgtaggtaccagaatatttggaacatcaacctgcagctgagacccagccttatcacaggcataatgaaggactccggaaataagcctcctgggcttctcccaagaaaaggcctttacatggctaatgatcttaagctgctccgacatcatttacagattcccattcattttccaaaagattttctgtctgtcatgctggagaaaggttccctctccgctatgcgattcctgacggccgtaaacttggagcatccagagatgctggaaaaagcatcccgtgaattgtggatgcgagtgtggagtcggaacgaggacattacagaaccgcaatctattctagctgccgccgaaaaggccggtatgtcagctgagcaggctcaggggctgctggaaaaaatcgcgacccctaaagttaaaaaccaactgaaggagactaccgaggcagcctgtaggtatggcgcattcggcctcccaatcacagtggcccacgttgatggacagactcacatgctgtttgggtcagatcgcatggagctcctggcacacctacttggggagaaatggatgggacctataccacccgctgtcaacgcaaggctctag

SEQ ID NO: 14988 - DNA, 2055 bp, synthetic construct
  source 1..2055: mol_type = other DNA; note = Synthetic coding sequence
atggaagccaatcacagcgaacaactgagcgccgaacgccaatctactccccccggtgatagttcatctctgccaagccacaacggattagaaaaggaggatggccaggattcaccaacaccggtgcagccccccgaaaaagaagcttccgtccaccccgatatttcggaagagctaaatcgacaactggaggacattatcaatacctacgggtctgcagctagtaccgcaggcaaggagggaagtgcgcgcgcctctgagcagccagaaaacgccgaatcaccggacaatgaggacggagattgtgaggagactaccgaggaggccggcagggagcctgtcgctagtggtgagcctccaactgtgaaagaacctgtgtccaacaaagagcagaagctggaaaagaagatcttgaagggactgggaaaagaagccaacttgctaatgcagaatctgaacaagctccagactccagaggagaaattcgatttccttttcaaaaagtatgcagagctactggatgagcaccgcacagagcagaaaaaattgaagttacttcaaaaaaaacaggtccagattcagaaagaaaaggaccagcttcagggtgaacactcccgcgctatactcgcccgaagcaagctggaatccctatgccgggagcttcagcgccataataagacacttaaagaagaagccctccaaagagctcgagaagaagaggagaaaaggaaggagattacttcacacttccagtctacactgaccgatatccagggacagattgagcagcagagtgagcgcaacatgaagttgtgtcaggagaataccgaactggcagaaaaactaaagtctatcatcgaccagtacgaactccgagaggaacatctggataagattttcaagcatcgcgagctgcagcagaaacttgttgacgccaaactggaacaggcacaggagatgatgaaagaagccgaagagcgccacaaaagagagaaagaatatctcctgaaccaggcagccgagtggaagttgcaagccaaagtgctcaaggaacaggaaacagtcctgcaagcacagttgacgctttacagcggacgcttcgaagagttccagtccaccctgacaaagtcaaatgaagtgttcgccacgttcaagcaggaaatggacaagacaactaaaaaaatgaaaaaactggagaaggacacagccacctggaaggcccggtttgagaattgtaacaaagcactccttgacatgattgaagagaaagccctcagggccaaggaatatgagtgctttgttatgaaaattgggcgcctagagaacctctgtcgggctcttcaggaagaaagaaatgagctccacaaaaaaattagggacgcggagatctccgaaaaggacgaccagtctcagcataacagcgatgaagagcctgagtcaaacgtatctgtggatcaggaaatcgatgccgaggaggtaaactccgtccagacggcggtgaaaaaccttgcaacagcttttatgatcattcatcacccagagtccacgccacatcagagcaaggagactcaaccagaaattgggagtagccaggagtctgcggatgccgccttaaaggaacctgagcagcccccattaattccctcccgagacagcgagagcccattacctcctctcaccccccaggctgaggctgagggcgggagcgatgctgaacccccttcgaaggcctctaacagcccagcaggcctcggagctgaaactcagtgcgaggggctgcccgtgggagcacaggccgaccaagcctcttggaagcctgaggctgaagcttccggacaggccccccaggctccaacagaggcctctcttcagaagatggaagcagatgtgcctgccccagcctgcgccgccgaggagcacgtggccgctatggtgcccgcctgtgaaccgtcacgacagccaccccgggctgctgctgaggagctgccagtgggagcttcggcagggccacagccaagaaacgtggccgataccaaccttgaaggagtggattag

SEQ ID NO: 14989 - DNA, 1461 bp, synthetic construct
  source 1..1461: mol_type = other DNA; note = Synthetic coding sequence
atgaacggcaccttggaccaccctgaccagcctgatttggatgccattaaaatgtttgtggggcaagtgccccgtacctggagcgagaaggacctgagggagctgtttgagcagtacggcgccgtgtacgaaataaacgtgctgcgagaccggtcgcagaacccgcctcagtcaaagggctgctgctttgtcactttctacaccagaaaagctgcactggaggctcagaacgccctacataatatgaaagttctacctggcatgcatcaccccatccagatgaagcccgctgattcggaaaaaaacaacgccgtagaggatcggaagctctttatcggcatgatctccaagaagtgcacagagaatgatatccgggttatgttcagctcatttggccaaatagaagagtgcaggatcctgcgcggcccagatgggttgagtcgcggctgcgcgttcgtcacgtttacgaccagggcaatggctcagaccgccattaaggccatgcaccaggctcagaccatggaggggtgtagtagtcctatggtggtgaaatttgctgacacccaaaaagataaggagcagaaacgcatggcacagcagctacaacagcagatgcagcagatttcggcagcgtctgtctggggcaatctcgcagggctcaataccctggggccacaatacctggctctgtatctgcagttgctgcagcaaacggcatcttctggtaatcttaacacgctgagttcgcttcatcccatggggggactgaatgcaatgcagttgcaaaatctggccgctttagctgctgctgccagtgcagcgcagaacacgccaagtggaacaaacgctctgactacaagctccagccccctcagcgttctgacgtcgtccggtagcagccccagcagcagtagttcaaactcggttaatcccatcgcttccctcggggccctacaaacattggccggcgccactgccggtctgaacgtcggtagcttggccggaatggctgctttgaacggtggactgggatcctctggattgtctaacgggacgggatccacaatggaagccctgacccaggcttattctggcatacagcaatacgccgccgcggctttgcccacactctacaatcagaatctccttactcaacagagtattggggctgccggaagccaaaaagagggccctgagggagccaatctgttcatctaccacctcccacaggagttcggtgatcaagatctgcttcagatgtttatgccatttgggaatgtggtgtccgccaaagtgttcatagacaagcagacgaacctgagcaaatgcttcggttttgtttcgtacgacaaccccgtgtctgcccaggcagccattcaaagtatgaatggctttcagataggtatgaaaagactgaaggttcaactcaaacgatctaaaaatgactcaaagccatactag

SEQ ID NO: 14990 - DNA, 7812 bp, synthetic construct
  source 1..7812: mol_type = other DNA; note = Synthetic coding sequence
atggagaaagcaacagtccccgtagcagcggcaactgccgcagaaggcgagggctctccacctgctgtagcagcagttgctggacccccagcggccgctgaggtaggcggtggagtgggaggaagttctagggcccgctccgcatcctccccccggggtatggttcgggtatgcgacctccttctgaaaaaaaagcccccacagcagcagcaccacaaagccaaacggaaccgaacctgccggcctccttcttccagcgaatcctccagcgacagcgacaattccggtggcggcggcggtggaggcggaggcggaggaggtggaggcggcacctcctctaataatagcgaggaggaggaagacgatgacgatgaggaagaagaagtctcagaggtggaaagcttcattttagatcaggacgatctggagaatccaatgctggagacagcctcaaaactgcttctttcgggaacagccgatggcgctgacttgcggactgtagatccggagactcaggctcggctggaggcactgctggaggccgccggaatcggcaaactatctacggctgatggcaaagctttcgcagacccagaggttctccggagacttaccagcagcgtgtcatgtgccctagatgaagccgctgcggccctcactcgcatgcgggcagagagcactgccaatgcggggcaatcagacaatcggtccctcgcagaggcctgttctgagggtgacgtgaacgctgtacgcaagctgcttattgagggccgctccgtaaatgaacacaccgaggaaggggagtcactgctgtgtctagcctgctcagccggatattacgaattggcccaagtccttctggctatgcatgccaacgttgaagatcgggggattaaaggagatataacacctctgatggcagccgccaacggcggccacgtcaaaatagtgaagcttttacttgcccacaaggctgacgtgaacgcccaaagctctacgggaaacaccgccctaacttacgcatgcgctgggggctacgtcgatgtggtgaaagttctgttggaatccggcgccagtattgaggatcacaatgagaacggccatactcccctgatggaagcaggctctgccggacacgttgaagtggctaggctccttctggaaaacggggcaggaatcaacacccattccaacgaattcaaggagtccgcactgaccctggcttgctacaaaggacacctagaaatggtgaggttcctgctcgaagcaggagcagaccaggaacataagacagacgagatgcacaccgccttgatggaagcctgtatggacgggcatgtggaggtggccagactcctactggattctggggctcaggtaaacatgcccgcggatagcttcgagtcacctctgaccttggccgcgtgcgggggtcatgtcgagcttgctgctctgctgatcgagcgcggcgccagcctggaggaggtgaacgatgagggctacacacccctgatggaggcagctagggaaggtcatgaggaaatggtggccttgttgcttgggcagggagctaacatcaatgcccagaccgaggaaacacaggagacggccctcacactcgcctgttgcggcggattcttagaagtggctgattttctgatcaaggctggcgccgatatagagttagggtgtagcactccactgatggaagctgcgcaggaaggccacctcgagctggttaagtacctgctcgctgcgggggccaatgtccatgccacaacagccacaggagacactgcgctcacatatgcctgtgaaaatggtcacactgacgtggccgatgtgctgttgcaggccggggctgaccttgagcacgagagcgaaggcgggcggacacccctcatgaaagcagctcgcgccggtcatgtttgtaccgtacaatttctcatatcgaaaggggctaacgttaaccgtacaacggctaataatgatcacactgtcctatctctggcatgcgccggcggccacttagccgtggttgagcttcttcttgcccacggtgctgacccgactcatcggctgaaggacggatcaaccatgttgattgaagcagcaaaaggaggccatacaagtgtggtgtgttatctgctcgactaccccaataacctgctgagcgccccaccaccagatgtgacccagctgacacctccctctcacgatcttaaccgcgccccgagagtccctgtgcaggcccttccaatggtggtgccaccccaggagccggacaagccgccggccaatgtagcaactaccttgcccatccggaacaaggcagccagtaagcagaagtcttcctcacacttgccagcaaactcgcaggatgttcagggttacattacaaaccagtctcccgagagcatcgtggaggaggcacaggggaagctcacagaactggagcagagaattaaagaagcgatcgagaagaacgcgcagttgcagtcacttgaactggcacacgcagaccagcttactaaggaaaagatcgaagaactgaataagactagagaggaacaaatccagaaaaagcagaagattctggaggagcttcagaaggtagaaagggagttacaactgaaaacgcagcagcagctcaagaagcagtatctggaggtcaaggcacagagaatccaattgcagcagcagcagcagcagtcatgtcaacacctgggccttttaacccctgtcggagtgggagaacagctgagtgagggggattacgctcgactgcagcaggttgacccagtgctcctgaaggacgaaccccaacagaccgcggcccaaatgggatttgctcccatccagcccctcgctatgccccaggccctacccttagccgcaggaccattaccccctgggtctatagctaacctaacagagctgcaaggcgtgatcgtcggtcagcctgtactgggacaggcgcagctcgctggtctgggccaaggtattctcactgagacacagcaaggccttatggtcgcgtcacccgcccaaacactaaatgacacactggacgacatcatggccgcagtttccggacgcgcgtctgccatgagcaatactcccacacattcgattgccgcctcgattagtcaacctcagacccccactccaagccccatcatatctcctagtgccatgctcccaatctatcccgcaatcgatatcgacgcccagacggagtcaaatcacgatacagcgctcacactggcttgtgccgggggccacgaagagcttgtccagaccctgcttgagagaggcgcctcaatagaacacagggacaagaaggggttcactcccctcatcctcgccgccacagccgggcacgtcggcgttgtcgagattcttctggataacggggctgacattgaggcacagagcgagagaactaaggacacgcccttatctctggcctgtagtggaggccggcaggaagtagtagaactcctgttggcccggggtgctaacaaggagcataggaacgtgagcgactacactcccctgtccttggcagcgtcgggaggatacgttaatatcatcaagattcttctgaacgctggtgcggagatcaactctagaaccggaagtaagctgggtatcagtcctctgatgcttgccgccatgaacggccacaccgctgcagtaaagctgttattagacatgggcagtgacattaacgcccagatcgaaacaaaccgcaataccgccttgactctggcttgctttcaaggtagaaccgaggtggtatctctgctcctggaccgtaaagcgaatgtagagcaccgagcaaaaacgggtctgactcctttaatggaagctgcctcaggtggatacgctgaggtgggaagagtactgttggacaagggcgccgatgttaacgcccccccggtgccctcatctcgagacacagctttgaccatagcagcagacaaaggtcattataaattttgcgaactgttaattggtcgaggggctcatattgacgtgcgcaacaagaaaggcaatacccctctctggcttgcggcgaatggaggacacttagatgtggtgcagttgctggtgcaggccggcgccgatgtcgacgctgccgacaatcggaagataaccccactgatggccgcctttaggaaggggcacgtgaaggtggtgcggtacttggtgaaagaagtgaatcagtttccatccgattctgagtgtatgaggtacatcgccaccataacagataaagaaatgttgaagaagtgccacttatgcatggaatctatcgtgcaggccaaggatcgacaggctgcagaggcaaataagaacgccagtattctgctggaggagctcgacttagaaaagctgagagaagagtcccgccgtctggccctggcagccaagagagagaaacgtaaggaaaagcggcgaaaaaagaaagaagagcaacgaagaaaactggaggaaattgaggccaaaaataaggagaatttcgagctgcaagcagcacaggagaaggagaaactaaaagtggaggatgagccggaagtcctgactgaaccaccctccgccacaacgactacaacaattggcatatcagccacatggacaacattggccgggtcccacgggaagaggaacaacacgattaccaccacgtcatctaaacggaagaaccgcaaaaataagattacaccggaaaacgtgcagattatctttgacgatcctctccctatcagctatagccagcccgaaaaggtgaatggagagagcaaatccagctcaacaagcgagtccggtgacagcgataatatgaggatatccagctgctcagacgagagctccaactccaactcttcacggaaatcagacaatcactctcctgccgttgtgactacaacagtttctagcaagaaacagccatcagtgttggtaacgtttccgaaggaagagcgtaagtctgtgtctgggaaggcatcaatcaaactatctgagactattagtgaggggacatctaactctttgtctacttgtactaagtctggcccatctccgctgagctcaccaaatgggaaactcacagtagccagtcccaaaaggggacagaagagagaagagggctggaaagaagtggttcgtcgcagtaaaaaggtaagtgtaccttctaccgtgatcagtcgggtaataggacgggggggctgcaacataaacgcaatccgggagttcaccggcgcccatattgacatcgacaaacaaaaagacaagaccggtgacagaatcattacgatcaggggggggaccgagtcaaccaggcaggcgacccagcttattaatgccctgataaaggaccctgataaggaaattgacgagctcattccgaaaaatagactaaaatcttcctcagctaactcaaaaatcggcagtagtgctcctacaacgactgccgcgaataccagtctgatgggtataaagatgacaacggtggctctgagttcaactagtcagaccgccactgccctgactgtcccagccatttctagtgcaagcacgcataagacaattaaaaatcccgtgaataacgtccggccaggctttccagtgtcgctgcctttagcatacccacctccacaattcgcccatgctctgctggccgcccagacatttcagcagatccgacccccccgcctacctatgacgcatttcgggggcacgtttccgccagcgcagagcacctggggcccgttcccggttcgtccactgagccctgctagagctacaaactctccaaagccacacatggttcccagacattccaaccaaaatagttcaggtagccaggttaacagtgcgggctccctaacttcatctcctacgaccacaacctcctccagcgcatccacagtccccggcacctcaaccaatggcagtccttcctcgccgtcagtgaggcgccaactgttcgtcactgtagtgaagaccagcaacgctaccaccactactgtgaccaccactgcctcaaacaacaacaccgcgccaacaaacgctacctatcccatgccaactgccaaggagcattacccagtgtcttctccatcttcccctagtcccccagcccaacctgggggtgtgagcagaaattcgccattggattgcggatcagcaagcccaaataaagtggcctcatcttccgaacaggaagcgggctcccctcccgttgtggagactaccaacaccagaccgcctaacagctcttcatcctcagggagcagctcagcccatagtaaccagcaacagccccctggctccgttagccaggaaccgagaccccccctccaacagagccaggtccccccccccgaagttagaatgactgttccacccctagctacttcttccgcccctgtcgcagttcccagcacggcacctgtgacctacccgatgcctcagacaccaatggggtgcccccagcccacccccaagatggagaccccagccattcgccccccaccccatggaaccacagctccacacaaaaactccgcatctgtccagaactccagcgtcgcagtcctgagtgtcaaccacataaagagaccacatagtgtgccctccagtgtgcaactgcccagcactttgagcacgcagagcgcatgtcagaacagtgtgcaccctgccaataaacccatcgcacccaatttttcagctcctctgcctttcggcccattttcaaccctcttcgaaaattctccgacttccgcccatgctttttggggtggcagtgtggtttctagccagtccactcccgagtcaatgctttccggcaagtcctcttaccttcctaactcagacccgctgcatcagtccgacacaagcaaagctcccggttttagaccgcccctgcagcgacctgccccttcacccagcggaatcgttaacatggactccccttacggaagcgtgactccgagcagtacccatctcgggaatttcgcctctaatatctccggaggtcagatgtacggccctggcgcaccccttgggggagcaccagctgctgcaaactttaatcgccagcactttagcccattgagccttctgacaccctgttctagtgcttccaacgattcctcagctcagagtgttagttccggggtgagggccccctcccctgcgcctagttcagtgcccctgggaagtgagaagccatccaatgtatcacaagaccgaaaggtgccagtgcccattggaaccgagaggtccgctcgcattcgccagaccggtacctctgcaccaagcgtcatcggcagcaatttaagcacctccgtggggcacagtggcatttggtctttcgagggaatcggaggcaatcaggataaagtcgattggtgcaatcctgggatgggaaaccctatgattcatagacccatgtctgatccaggcgtattttcgcagcaccaggccatggagagggatagtaccggaatcgtaacgcccagcggcacttttcatcagcacgtgccagctgggtacatggattttcccaaggtgggggggatgcccttttccgtctatggtaacgcgatgatccccccagtagcccctatacctgatggtgctggaggcccaatcttcaatggacctcatgcagctgacccgtcttggaattctttgattaagatggtctcctcatcaacagagaataatggtccacaaaccgtgtggacgggtccttgggccccccacatgaactccgtacacatgaaccagttaggatag

SEQ ID NO: 14991 - DNA, 3075 bp, synthetic construct
  source 1..3075: mol_type = other DNA; note = Synthetic coding sequence
atgacagagggtaggaggtgtcaggtgcacctgctggacgacagaaagctcgaacttctggttcagcccaagcttctggctaaggaacttctggacttagtagcttctcacttcaatttaaaagagaaggaatactttggtatagcctttacagacgaaacaggccacctgaactggcttcagttagatagaagagtcttagaacacgatttcccaaaaaagagcggccccgtagtgctctatttctgtgttcgtttttatatcgaatctattagctacctgaaagacaatgccaccattgagctgttctttttgaatgctaagagttgtatttataaagagctgattgatgttgactccgaggtggtttttgagcttgcaagctatatcttgcaggaggccaaaggagatttctcaagcaacgaagtcgtccgctctgacttaaagaagctgcctgccctgcccacacaagccctcaaagaacatccatcacttgcttactgtgaagatcgtgttattgaacattataagaagttgaacggacaaacccggggacaagcgattgtgaactatatgagcattgtggaaagcctccccacctacggcgtccattactacgccgtgaaagacaagcaaggaatcccctggtggctggggctatcgtataagggaatttttcagtacgattaccacgacaaggtaaaaccacgcaagatcttccagtggaggcaattggaaaatctctattttcgcgaaaagaaattctctgtagaggtccacgatccacggagagcttccgtgaccaggcggacttttggacatagtggcatagccgtccacacctggtatgcttgtccagcgttgattaagagcatatgggcaatggccatttcccaacatcagttttaccttgaccggaagcagagtaagtctaagattcacgccgcacgctctctgagtgaaatcgctatcgatttaacagagaccggaaccctcaagacaagcaagctggctaacatgggtagcaaaggcaaaataattagtggctcttcaggatcgcttctctcctctggcagtcaggaatccgactcttcacagtctgcaaagaaggatatgcttgcggccctgaagtcacgccaggaggccctggaagaaactttacgccagcgcctggaggagctgaagaagctgtgcctaagggaggcagagttgaccggcaagcttccagtagagtaccctctggaccctggcgaggaacctccaatcgttaggcgccgcatcgggactgcattcaagctggatgaacagaagatcctgccgaaaggtgaggaggccgaacttgaacggttggaaagagagtttgccattcagtcccagattaccgaggctgctcgtcgcttggctagcgaccctaatgtgtccaagaagctcaagaagcagcgcaaaacaagctacctgaatgccctgaaaaagttacaagagatcgagaatgctatcaacgaaaatcggatcaagtcaggcaagaagccaacccagagagcttcgttgattattgacgatggaaacattgcttccgaggattcctccctcagcgacgctctcgttctggaagatgaggatagtcaggttaccagtactatatcacctctgcacagcccccacaaggggctgccacctaggcctccgtctcataaccggccgcccccaccgcagagcttagagggtctccgacagatgcactaccatcgtaacgactacgacaagtctcctattaagcctaagatgtggagcgaatctagcctggacgagccatatgaaaaggttaaaaagagaagttcccattcacatagtagctcacataagagatttccctccaccggcagctgcgccgaggcaggaggcggctccaacagcctccagaactctcctatcaggggtctgcctcactggaactcccagagttcaatgccttccacccccgatttgcgcgtccgaagcccacactacgtccattctaccagaagcgtagacatttcaccgactcggctccactccctggccctgcatttccgccacaggtctagcagtctcgagtcccagggaaagctgctcgggtctgagaatgacactgggtcccccgatttttacacaccaagaactcggagcagcaatggttccgatccaatggacgactgcagttcctgtaccagtcattcctcctctgaacactattaccccgctcaaatgaacgctaactattcgacccttgctgaggattctccctctaaggcgaggcagcgacagaggcagcggcagagggcagctggagcactgggttctgcttcgtcaggatccatgcccaacttggctgcgcgtggcggagctggaggcgccggtggggcgggcggcggcgtgtatctgcattcccagagtcagccaagctctcagtatcgcatcaaggagtatccactttatattgaaggtggagcaacccctgtggtagtgaggagtttggagagcgatcaggagggacactacagtgtgaaggctcagttcaaaacaagtaacagttatacggcgggcggacttttcaaggagtcctggcgaggcggcgggggcgatgagggagacaccggccggctaaccccatctaggagtcagatcctacgaacgcccagcttgggccgtgaaggagcgcacgacaagggtgctgggcgggcagccgtctccgacgagttgcggcagtggtatcagaggtcgaccgcttcacataaggaacattcaagacttagtcacaccagctcgacatcttcagattccggcagtcaatacagtacatcaagccaaagcacctttgttgcgcattcccgagtgactcgaatgccccaaatgtgcaaggccacttcggctgcgctaccccagagtcagaggtcatcaacaccctcttctgagattggcgccacaccgcccagctcaccacatcacattctgacctggcagacaggtgaggctaccgagaatagcccaatcctagacggttccgagagccctccccaccagtctacggacgagtag

SEQ ID NO: 14992 - DNA, 864 bp, synthetic construct
  source 1..864: mol_type = other DNA; note = Synthetic coding sequence
atgagccaagcctggtggcatacaagtgtaagccccgccactcaggaagccaaagcgggcggactcttgcagccaaggcggcaaagactgtggctcaagaggtgccgcatttcttcgagcgcctgcgaagatctgtctgctgccctgattgccaataagaacctgacacgaatggatctgagcggcaacggcgtcgggttccctggaatgatgctgttgtgcgaggggctcaggcacccccagtgcaggctgcagatgatccaactacgaaaatgtcaactagagagcggggcttgccaggagatggcttccgtgctggggaccaatcctcaccttgtcgagttagatcttacggggaatgctctggaggatcttggtcttagactcctgtgccaaggacttaggcaccctgtatgcagactgcgaaccttgtggctaaaaatttgcaggcttaccgccgctgcctgtgatgaactggcctccacgctgtccgtgaaccaaagcttgcgagaattagacttatcactgaatgagctgggggatttgggggtactcctgctatgtgaggggctcagacaccctacatgcaagctgcagactctgagactggattcatgcggactcacagcaaaagcctgcgagaacctgtactttactctgggcataaaccagactctcaccgatctctacctgacaaataacgctttgggcgacacaggggtgagattattgtgcaaacggcttagccatcctggctgcaaactgcgcgtgttgtggctgtttgggatggacctcaacaaaatgacgcactcaaggctagccgcgctgagggtgaccaagccatacttagatattgggtgctag

SEQ ID NO: 14993 - DNA, 615 bp, synthetic construct
  source 1..615: mol_type = other DNA; note = Synthetic coding sequence
atggctggctacttaagtgagtccgactttgtgatggtcgaagaagggttttctactagagatctccttaaagagttgacgctgggagcttcccaggcaacgacagatgaagtcgcagccttcttcgttgctgatcttggcgcaatcgtgagaaagcacttttgctttctgaagtgtctccctcgcgtgcgtccgttctatgccgtcaagtgcaatagcagccccggtgtgctaaaggtgctggcccaactgggacttggcttcagttgtgcaaataaaatcgcctccgttatcaacagcgccctggatttgtatttccccgaggggtgtggcgtggatattttcgccgagctcggtagatactatgtcactagtgcattcactgtcgccgttagcatcatagccaagaaggaagtgctgctggatcagcctggtcgagaagaggaaaatggcagtacatcaaagacgattgtatatcatttagacgaaggagtgtacggtattttcaactcagtgctgttcgacaatatctgcccaactcccatcttacagaagtctaaaaatcatagtccgtgttacatgagtctggaatcgattcattttatcgccgtatag

SEQ ID NO: 14994 - DNA, 519 bp, synthetic construct
  source 1..519: mol_type = other DNA; note = Synthetic coding sequence
atgatgaaattgaagagtaaccagacacggacatacgacggagacggatacaagaaacgggccgcatgtctgtgtttcaggagcgagtccgaagaggaggttcttctcgtgtccagctctagacaccccgatcgttggatagttcccggcggaggaatggagccagaggaggaacccagcgtcgccgcagtgcgagaagtctgtgaagaagccggggtgaaaggaacccttggaagactcgtcgggatctttgagaaccaggagagaaagcacaggacatatgtctatgtactgattgtcacagaggtacttgaggactgggaggatagcgtgaatatcggacgaaaaagggagtggttcaaaattgaggacgctataaaagttttacaatatcacaaaccagttcaggcatcatatttcgaaacgctgcggcagggctattccgcaaacaatgggacgccagtcgtggccacgacttactcagtctcagcccagtcttcaatgagcggcattcgttag

SEQ ID NO: 14995 - DNA, 4284 bp, synthetic construct
  source 1..4284: mol_type = other DNA; note = Synthetic coding sequence
atgtcgatgcttaaaccatcaggactcaaggcccccacaaagatcttaaagcctggctcaactgccctgaagacccccacagctgtagtggcgccagtcgagaaaactattagcagtgagaaggcgtcttccactcccagttccgagacacaagaggagttcgtagacgacttccgcgtgggcgaacgggtttgggtaaatggcaataaacctggatttattcagttcctcggggagacacaatttgctcctggccagtgggcaggcatcgtcctagatgagcctattgggaaaaacgatggctctgtggctggggtaagatacttccagtgcgagccgctgaaaggcatcttcactaggccaagtaaacttacaagaaaagtccaggcagaggacgaagcaaacggtctgcagaccacaccagctagccgggcaaccagtcccttgtgcacttccactgcctctatggtaagttcatccccgtccacaccctctaacatcccgcagaagcccagccagcccgcagccaaggaaccgagtgcaaccccaccgatctccaacctgactaagaccgccagtgaatcaatatcaaatctgtccgaagctgggagcatcaagaagggggagagagagctaaaaattggggaccgcgtacttgtggggggcaccaaggccggcgttgtcaggtttctcggagaaacagatttcgctaaaggtgagtggtgcggggtcgagctggacgagccgctgggcaaaaacgatggagcagtggcggggacgcgctactttcagtgtcagcccaaatacgggctctttgccccggtgcacaaagtgacaaagatcggtttcccatccactactccagctaaagccaaggcaaacgctgtaaggcgggtcatggccactaccagtgcctctttaaaacgtagcccttctgcttccagccttagctcaatgtcctccgtggcctcatcggtgagtagccgcccctcaaggaccggactgctcacagagacctcctcacgatacgcccggaagatttccgggacaacggcgctgcaggaggccctcaaagagaagcagcagcacatcgaacagctgttagctgaacgagatcttgaacgggctgaggtggctaaggccacctcgcatgtcggcgaaatcgagcaggagctcgcattggcaagggacggacacgatcagcacgttctcgagctggaagctaagatggatcagctgaggaccatggtggaggcagccgaccgagagaaggttgagctacttaatcagctggaggaggaaaaaagaaaggtggaggaccttcaatttagagtggaagaagaatcaattacaaaaggagatttagaaactcagaccaagctcgagcacgctcggattaaagaacttgaacaatctctactgttcgagaagactaaggccgacaaactccagcgcgaactggaggacacccgagtggccacggtgtctgaaaaaagtcggatcatggaactagaaaaagacttggccctgagggttcaggaggttgcagagttgagacggagacttgaaagtaataaaccggccggagacgtagatatgtccctgagcctcctgcaggagattagctcactccaagagaaactagaggttacaagaacggaccatcaaagggagattacaagcttgaaggaacactttggcgcccgggaggagacacatcaaaaagagatcaaggccttatatactgctactgagaagctcagcaaggagaacgagagtctcaagtccaaactcgagcacgcaaataaggagaattccgacgtcatcgccctctggaagtccaaactggaaaccgccattgcatcacaccagcaggctatggaagagttgaaggtgagcttctcaaaagggctcggaacagagaccgccgaattcgccgagctgaagacacaaattgagaagatgaggctagactaccagcacgagatcgagaacctccagaaccagcaggattccgaacgcgcagcccacgcgaaggagatggaggcactccgcgccaaattgatgaaagtcatcaaagagaaagagaactcactcgaagctattcggtctaaactggataaagccgaggatcagcatctggtagagatggaagatacactgaataaattgcaggaggctgagatcaaagtgaaggagctggaggtcctgcaggctaagtgtaatgaacagacgaaagtcatcgataacttcacgtcccaactgaaggctaccgaggaaaaactgctggacttagacgccttacgcaaggctagcagtgaagggaaaagtgagatgaagaagcttcgacagcaactggaagccgctgagaaacagattaagcacctggaaattgagaaaaacgccgaatcgagcaaggcttcaagcataacccgcgagctccaggggcgagagctcaaactgacaaacctgcaggaaaacttgagtgaggtctctcaggtgaaggagacccttgagaaagagctgcaaattctcaaggagaagtttgcagaggcatctgaggaggctgtctcagttcagcgttcgatgcaggagacggtgaataaactgcaccagaaggaggagcaattcaacatgctgtctagtgatctcgagaaattgcgcgaaaacctggccgatatggaagccaaattccgggaaaaggacgagcgagaagagcagcttattaaagctaaagaaaaactggaaaacgacatcgcagaaattatgaaaatgtccggggataacagcagccagttaaccaagatgaacgatgagcttagactcaaggagagggacgtggaggaacttcaactcaagttgactaaggccaatgagaacgcttccttcttacagaaatccattgaggacatgacagtgaaagctgaacagtcccagcaggaagctgccaaaaagcatgaggaggagaaaaaggaactggagagaaaattaagtgatttagaaaaaaaaatggagacctctcataatcagtgtcaggagctcaaggcccggtatgaacgcgccacaagtgaaaccaaaacaaaacatgaggaaatccttcaaaatctgcagaagacactgttggacacagaagataagctgaaaggggcacgggaagaaaattctggcctattgcaagagctcgaggagctgagaaaacaggctgataaggccaaagctgctcagacagccgaagatgctatgcagatcatggaacagatgacaaaagagaaaacagagaccctcgcatcactcgaggacaccaagcagactaacgccaaactccagaacgagctcgacacacttaaagaaaataacctcaaaaatgtggaagagctcaacaaatccaaggaactgctcacagtagagaatcagaagatggaggaattccggaaggagattgaaactttgaagcaggcggcggcccagaaaagtcagcagctatccgcactccaggaagagaacgtaaagttggcagaggagttgggacggagtcgtgatgaggtaaccagccaccaaaaactggaggaggaaagatctgtccttaataatcaactccttgagatgaagaaaagggagagcaagttcataaaggacgcggacgaagagaaggcaagccttcagaaatctataagcataacatcagccctactgactgagaaagatgccgaactggaaaaactcagaaacgaggtaacggtactgcgcggtgagaacgctagcgcaaagtctcttcacagcgtcgtccagactctggagtctgacaaggtgaagctggagctaaaggttaaaaatcttgaactgcagcttaaagaaaacaaacgccagttgagcagttccagcggcaacactgacacccaggccgacgaggacgagagggcacaagagtctcagattgactttctcaatagcgtaatagtggacctgcagaggaagaatcaggaccttaaaatgaaagtggaaatgatgtccgaggcagccctgaatggcaacggggatgacttgaataactacgattccgatgaccaggaaaagcagagtaaaaagaagccaagattgttttgtgacatctgtgactgtttcgatctgcatgacaccgaggactgcccaacacaagcccagatgagcgaagatccaccccattcgacacatcacggttcgcgcggagaggagcgcccctattgtgagatatgcgaaatgttcggacattgggctaccaactgcaatgatgatgagaccttttag

SEQ ID NO: 14996 - DNA, 1179 bp, synthetic construct
  source 1..1179: mol_type = other DNA; note = Synthetic coding sequence
atgggagatagttgtccagcagtgacatttaggtctcagaaagaaaaccgcgccggcctccaagaaaaactgagatacctgcagcaacaactgcaagatgaaaccccacggagacaggaagctgagttacaagagccggaggaaaagcaagaacccgaagaaaaacaggagcctgaagaaaaacaaaagccagaggcgggcctttcctggaactcactgggaccagcagcgacatctcaggggtgtccagggccacctgggtctccagataaaccatccagaccccacggcttggttcccgccgggtggggcatgggccctcgggccggagaaggtccttatgtcagtgagcaagaattacagaagctcttcacagggatcgaggagctgagaagggaagtgagtagccttacagcgcgctggcatcaggaggaaggggctgttcaagaagctcttcggttgctgggtggcctggggggccgcgtagacgggtttctcgggcagtgggagcgagcgcagagggaacaggctcagaccgccagagatttgcaggaattacggggcagggccgatgaattgtgtactatggtagaaagatcagccgtttccgtggctagcctgagaagtgagctggaaggactcggccctctaaagcctatcctggaagagttcggtcgccagttccaaaactccagaaggggacctgacctgtccatgaatctagatcggagtcaccaaggaaactgtgccaggtgtgcatcccagggctcccagttaagcacggagtccctgcagcagctcctggaccgggctctaacttccctggtagacgaggtgaaacagcgtggactcaccccggcttgccctagttgccagcggctccacaaaaagattctagaacttgagcggcaggcgcttgcgaaacatgtgcgcgctgaggccctctcctctacgcttaggttagcccaggacgaggcgctgcgggccaaaaatctgcttttgacggacaaaatgaagcccgaggaaaagatggctaccctagatcatctccatttgaagatgtgctcgttacacgaccatctgtccaatctccctttggaaggatcaactggaaccatgggcggcggcagctccgcaggtaccccccccaagcagggcgggtcagcccctgaacaatag

SEQ ID NO: 14997 - DNA, 1692 bp, synthetic construct
  source 1..1692: mol_type = other DNA; note = Synthetic coding sequence
atgtctgatgatgctggggatactctggcaactggcgacaaggctgaggtaactgagatgcctaactctgattccttacctgaggatgcggaggtccattgcgactctgccgcagttagccacgaacctactcccgcagacccccggggagaggggcacgaaaacgccgccgtccagggcgctggtgctgcagccatcggccccccggtgcagccacaggacgccaatgctcttgagccccccctcaacggggatgtgaccgaagatacattggcagaatgtatcgactcggtctctctcgaagcagaaccacgctccgaaatccctctccaggaacagaactacctcgccgtcgactccccaccctcaggagggggctgggctggctggggcagttggggtaaatccctgctgtcctccgcgagcgcaacggttgggcatggcctcactgcggtaaaagaaaaagccggcgctacactccggatacacggagtcaactcaggctcaagtgagggagcccagccaaacacggagaatggggtacccgagatcactgatgctgctaccgaccaggggccagctgagagcccaccgacctcaccatcttccgcctcacgcgggatgctgtcagccataactaatgtcgtgcagaacaccggaaagagtgtgctaactggcgggctcgacgcactggaattcatcgggaagaagaccatgaacgttctggccgagtcagaccccggctttaagcgcaccaagaccttaatggaacggactgtgagtctgtcccagatgctgcgggaggccaaggaaaaagagaagcagcgactggctcagcagctcaccatggagagaaccgctcactatggaatgctgtttgacgagtaccagggtcttagccatttggaggctctggagatcctgtctaacgaatctgagtcgaaggtccagagtttcctggcttccctggatggcgagaaactggagctgctgaagaacgatttgataagtatcaaagatattttcgcagcgaaggaactcgagaatgaggaaaaccaggaagaacaggggctagaggagaaaggcgaagagtttgcccgcatgttaacagagctgctgttcgagctgcacgttgccgccactcccgacaaactcaacaaggctatgaagcgggcacacgattgggtggaagaagatcaaacagttgtctcagtcgacgttgccaaggtcagtgaggaggaaactaagaaagaagagaaagaggagaagtcccaggatccccaagaggacaaaaaagaagaaaagaaaacgaagaccatcgaagaggtctatatgagtagcattgaatctttagccgaggtcactgccagatgtatcgagcagctccataaggtggccgagcttatcctccacggtcaagaggaagaaaagccggctcaggaccaggctaaggtgcttataaaactgactaccgctatgtgcaacgaagtggcctcgctctcaaagaagtttacgaatagcctcacgacagtggggtccaacaagaaggccgaggtgcttaacccaatgattagctccgtgttgttagagggttgcaatagcacgacttacatacaggatgcttttcaactcctgctgcctgtgctgcaggtgtcccatattcagaccagttgtttgaaagctcagccctag

SEQ ID NO: 14998 - DNA, 1257 bp, synthetic construct
  source 1..1257: mol_type = other DNA; note = Synthetic coding sequence
atgttctcacccgaccaggagaatcatccctcgaaagccccagttaagtacggggaactgatagtgctcggctacaatggaagcctgcctaatggggaccgggggcgacgcaaaagcaggtttgccctgtttaaacgccctaaagcgaatggggtcaagccctccacagtgcacatcgcctgcacgccccaggctgccaaagctatcagcaataaagaccagcactccattagctataccctcagccgcgcacaaacagtagtcgtggagtacacgcacgactcaaacactgatatgtttcagattggcagaagcacagaatcccctatcgactttgtggtgacagataccgtgccgggtagtcagagcaattcggacacgcagtcggtgcagtctaccatctccagattcgcttgtaggattatttgcgagcggaacccgccattcacagctaggatctatgctgccggttttgacagcagcaaaaatattttcctgggcgagaaggccgcaaaatggaagaccagcgatggtcagatggatggtcttacgacaaacggagtgctcgtcatgcatccaagaaatggcttcacagaggactccaaacctggcatatggcgcgaaatttctgtgtgtgggaacgtcttctccttgcgggagacgcgctccgcacagcagagagggaaaatggtggaaatcgaaacaaaccagctccaggatgggagtctgatcgacctgtgcggggctacactgctgtggcgtacagctgaaggattgtctcatacacctacggtgaaacacctggaagccctcagacaagaaatcaacgccgctcgcccccagtgcccagtcggcttcaatacactggcgtttccaagtatgaagaggaaggacgttgtggatgaaaagcagccatgggtgtatttaaactgtggccacgtgcacggttatcataactgggggaacaaagaagaacgggacggcaaggatagggagtgccccatgtgcaggtcagtcggtccctacgtgcctctttggctggggtgtgaggccggattttatgtggacgctggtccccctacccatgctttttcgccatgtggacatgtctgcagtgagaagacgactgcctattggtctcagatcccgctgccccacggcacccatacgttccacgccgcctgtcccttctgtgcgcaccagctggccggcgaacagggatacattaggctgatttttcagggccccttagactag

SEQ ID NO: 14999 - DNA, 3963 bp, synthetic construct
  source 1..3963: mol_type = other DNA; note = Synthetic coding sequence
atgcaagacgactctatagaagcttcaacctctataagccaattacttagagaaagctacctggccgaaaccaggcatcgaggtaataatgagcgctcccgggcggagccatcatccaatccgtgtcattttggctcaccgtctggcgctgctgaaggagggggcggtcaggacgacttgcccgacctatctgcttttttatcgcaagaggagttggacgagtccgtgaatctggctcgcttggccataaattacgaccctctggagaaagcggatgaaacacaggcccggaaacggctgagtcccgaccagatgaagcactccccaaacctgtccttcgagcctaatttctgccaggataatccaaggtcccccactagcagcaaggagtccccccaagaagcgaagcggccacagtactgttcagagacacagtctaaaaaggtgtttttgaataaggccgctgacttcattgaagaactgagttcgctgttcaaatctcactcctctaaacgcattcggccccgcgcatgcaagaatcacaaatctaaactcgagtcccagaataaagtaatgcaggagaatagctcttctttttcagatctcagcgagaggagggagcgctccagcgttcctatcccaattccagccgataccagggacaatgaggtcaatcacgccctggagcagcaggaagctaaaaggcgggaggccgaacaagccgcctcagaagccgctggtggggacacaactcctggatcttccccatcttcactttactacgaagagccattgggccaacctccaaggttcacccagaagctccggtccagggaagttcccgagggcacccgggtgcagttggactgtattgtggtcggcatcccccctccgcaagtacgctggtattgcgagggaaaagagctggagaattcaccggatattcatatcgtccaggctggcaacctgcactccttgacaattgcagaggccttcgaagaggacactgggcggtacagctgcttcgcctccaacatttacggaaccgacagcacctctgctgagatctatatagaaggggtttcatcttccgattcggagggcgaccctaacaaggaggagatgaaccgaatccagaagcctaacgaagtcagttcccctcctacaacaagcgccgtgatccccccagcggtcccacaggcacaacacctggtcgcccagccgcgagtggccactattcagcaatgtcagtcgcccaccaattacttgcagggcctggatggtaagccaattatcgcggctcccgtctttaccaaaatgctccaaaatctttcagcgagcgaggggcagcttgtggttttcgagtgtagagtgaagggagccccatctcctaaagttgagtggtacagggagggaaccctgatcgaagacagccccgacttcagaatcctgcaaaagaagccgcggtccatggcagaacctgaggagatctgtacattagtgatagcagaagtgttcgctgaagacagcggctgtttcacatgcacggccagcaataaatacggcaccgtttcatctattgcacagctgcacgtaagaggtaatgaggatttgagcaacaatggatctctccacagcgcgaactccaccacaaacctagccgccatcgagcctcagccgtcaccccctcattccgaaccacctagtgtagagcagcccccaaagcctaagttggagggggtgcttgtgaatcacaacgagccaaggtcatcttcccgtattgggttaagagtgcatttcaatttgcctgaggacgataagggcagcgaggcaagctccgaagccggtgttgttactactagacagacgcgcccggatagctttcaggagcgttttaatgggcaggcaaccaaaacccctgagccaagctctcccgtgaaggagccaccccctgtgcttgcaaaaccaaagctagactctactcagctgcaacaactgcacaaccaagtgctgctggagcagcatcagctgcaaaatccccctccctcgtcgcccaaggaatttccctttagtatgactgtgctaaactcaaacgcgccacctgcagttacaactagctctaaacaagtaaaggctccgagctcccagaccttcagcctcgccagacccaagtacttttttccatccacaaacaccactgcagcaacggtcgcaccgtccagctccccagtgttcacgctctcttctaccccacagaccattcagcgaactgtgtcaaaggaatctttacttgtatctcacccgagtgtgcagactaaatcccccggggggctgtctatccagaacgaacctttgcctcctgggcccacagaacctacccctccaccatttacattctccatcccttccggaaaccagttccaacccaggtgtgttagtcctattcccgtctccccaacaagccgcatccagaaccccgttgcttttctgagtagcgtcctcccatctcttcctgctatcccccccaccaatgcaatgggcttgccgaggtcagccccatctatgccatcccaaggactggcgaagaagaatactaaatcacctcagccggtgaatgacgacaacatccgagagactaagaatgcagtgattcgggacctcgggaagaagattacattcagcgatgtgaggcccaatcagcaagaatataagatcagttcctttgaacagcggctcatgaacgagattgagttcagattggaaagaacccctgtggatgagtccgacgatgaaattcagcatgacgagatacccactggtaagtgtatcgcaccgatcttcgacaaacggctgaagcatttccgcgtgacagaggggtctcctgtgacgtttacctgtaagattgtcggcatcccagtgccaaaggtgtattggtttaaagatgggaagcagattagcaaaagaaatgaacactgcaaaatgcgacgcgaaggagatggaacttgtagtctccatattgaaagtaccacctccgacgacgatgggaattacacaattatggccgctaatccgcaaggacggatctcgtgctccggccatctcatggtccagagccttccgattcggtccaggcttacatcggctggccaatcccatcggggacgtagcagggttcaagagagagacaaagagcccctgcaggagaggttttttcgccctcactttctgcaagctccaggagatatggtcgcacacgaaggcagactctgtcgcctggactgcaaggtttccggactccccccacctgagctgacttggctgctgaacgggcagccagttcttcctgatgcttcccacaagatgcttgtgcgggagactggcgtgcacagtcttcttatcgacccactgacccagcgagatgccggcacttacaagtgtatcgcgacaaacaaaactgggcaaaacagtttcagcttagaactgagcgtcgtcgctaaggaagttaaaaaggcccccgttatcctggaaaagctgcagaactgtggagtgcctgaaggacatccagtacgcctggagtgcagagtcattggcatgccaccaccagtcttctactggaagaaggataacgaaacaatcccttgtacgagagagcggatttccatgcatcaggacacgactggctacgcatgtttgctcatccagccggccaaaaagtctgatgctgggtggtacacgctgtcagcgaagaacgaagccggcatagtgtcttgtaccgcccgcctggatatctacgcgcagtggcaccatcagatcccaccgcctatgtcggtgagaccttcaggctctcgctatggatctctgactagtaagggactcgatatttttagcgctttcagcagtatggaaagtacaatggtttatagctgctcctcccgctccgtggtggaaagtgacgaattgtag

SEQ ID NO: 15000 - DNA, 4206 bp, synthetic construct
  source 1..4206: mol_type = other DNA; note = Synthetic coding sequence
atggccagctgcgcctcaatcgacatagaggatgcaacccagcacctccgggacatcctgaagctggatcgccccgccggcggacccagcgctgaatcaccccggccgtctagcgcatacaacggcgatctgaacggcctcctggtgcccgatccactgtgtagcggggactctacaagcgccaataagaccgggctgaggaccatgcctcccatcaaccttcaagagaagcaggtgatctgcttaagcggtgatgacagctccacgtgcatcgggattctggcaaaggaagttgaaatcgtcgccagtagcgatagttccatcagctctaaagctcggggttcaaataaggttaaaattcagcccgtggcaaaatacgattgggagcagaaatattactacgggaacctcatcgcagtcagtaactctttcctcgcctatgcaataagagcagccaacaacggaagcgccatggtgagagtcatcagcgtttcaaccagcgagcgtacccttctcaagggtttcactgggagtgttgcagacctggcgtttgcacacctgaactctccccagctcgcttgcctggacgaagctggcaacctcttcgtgtggcgattagcactggtgaacggaaaaatacaagaagagattctggtccatatcaggcagcccgaagggacaccactgaaccattttcgcagaatcatttggtgtcccttcattccagaggaatctgaggattgctgcgaggagagctctcctaccgtggccctcctgcatgaggatcgggccgaagtttgggacttggacatgttgcggtcttcacatagcacttggccggttgatgtgagtcagatcaagcagggctttatagtcgtgaaaggtcactccacgtgcctcagtgaaggggcactctcccccgatggcactgttctagctaccgcgtcgcatgatggctatgtgaaattctggcagatatacatcgagggccaagacgaaccacgctgcctgcatgagtggaagccgcacgacggcagaccactgtcatgccttctgttttgcgacaatcataaaaagcaagatccagatgtgcccttttggcggtttctcatcaccggtgcagatcagaatagagaactcaagatgtggtgtaccgtgtcttggacctgcctgcagacaataaggttctccccagacatcttctcttccgtctccgtgccaccatcccttaaagtatgcttggacctgtctgctgagtatctgattctgtcggatgtgcagagaaaggtgctgtatgtcatggaactactgcagaaccaagaagaaggccacgcatgctttagctccatctccgaattccttttgacgcaccctgtcctctcctttggaattcaggtggtctctcggtgccgcttgcgtcacacggaggtcctccccgctgaggaagagaacgacagcctaggagcagacggtacacacggcgcaggagctatggaaagcgccgctggggttctgatcaaactgttctgcgtgcatactaaggctctccaggacgtccagattcgattccaaccccagctgaaccccgacgttgtggcacccctgccaacccatacagcgcacgaggactttacgttcggcgagtcgcggcctgaactgggcagcgagggactgggatcagcggctcacggatctcagcccgatctcagacgcattgtggagctgcctgccccagcagactttctgtccctgtccagcgagaccaagccaaaactgatgacccccgacgcgttcatgactccaagcgcaagtctgcagcagatcactgctagtcccagctcatcgagtagcggcagttctagttcttcaagcagtagttcatcgagtctcacggcggtgtccgcaatgtcaagcacgtcggcggtagacccatctctgacgagacctcccgaagaactgaccctaagtccaaagctccagctggacggatcattgaccatgtcttcctcaggatcattgcaggcatcacctaggggcctcttacccggattactgccagctccagcggataagctcacccccaagggaccaggacaggtgcctacggctacttctgcattgtcactggagctacaggaggtcgaaccattaggcctaccccaagccagccccagtcggacacgctccccagacgtgatttcaagtgcgagtaccgcccttagtcaagacattcccgagatcgcctcggaggcactgtccagaggattcggatctagtgcccccgaaggattagagcccgattccatggcaagtgcggccagtgcacttcatctcctctccccaagaccgcgtccgggacccgagctgggaccgcagctgggcctggacggaggcccgggcgacggtgaccggcataataccccttctctactagaggccgctcttacgcaggaagcctctaccccagattcccaggtgtggccaactgcacctgacattactagggagacctgcagtacactggctgaaagtcctagaaacggactgcaggagaaacacaaatcactggccttccatcggcccccctatcacttactgcaacagagagattctcaggacgcttctgccgagcagtctgaccatgacgacgaggtcgccagtcttgctagcgcatctggaggctttggtaccaaagtgcctgccccacgcttgccagctaaggactggaaaacaaaaggcagtcccagaacatctcctaagttaaagcggaaatccaaaaaagatgatggcgacgcagccatgggctcaaggctgacagaacatcaagtcgccgaaccacccgaagattggcccgcactgatctggcagcagcagagagagcttgccgagctgaggcatagtcaggaggagttgttgcagcgcctctgcacccagctcgaagggctgcagtctaccgtaactggtcacgtggagagagcattagagacacgacatgagcaagagcagagaaggctcgagcgcgctctggcagagggacaacaaagaggaggccagctgcaggagcagttgacacagcaactgagccaagctctgtcctccgccgtagctgggcggctggaacggagcatccgagacgaaatcaaaaagactgtccccccatgtgttagccgatcactcgagcctatggccggacaactgtctaactcagtggcaacaaaactgactgccgtggaagggtctatgaaggagaatatttccaagttgctgaaaagcaaaaacctgactgacgccatcgcaagagccgctgctgacacacttcagggccctatgcaggcggcctaccgggaggcctttcaaagcgtcgtcctgcctgcctttgagaagagctgtcaggccatgttccagcaaattaacgattcattcaggctgggtacgcaggagtatctccagcagctggaaagccatatgaaatcccggaaggcccgcgagcaagaagctcgggagcctgtgctcgcccagttgcgaggactcgtgtcgacattacagtccgccacagagcagatggctgccactgtcgctggaagtgtgagggccgaagtacagcaccagctgcatgtggcagtaggctcacttcaggagtctatactggctcaggtccaacgcatcgtgaaaggcgaagtgagtgttgctcttaaggagcagcaggccgcagtgacgtcttcaattatgcaggccatgcgaagtgcagccgggaccccagtcccgagcgctcacctggactgtcaagcccaacaggcacacatccttcagctgctgcagcagggacacttaaatcaagcattccagcaagctcttaccgcggctgatctgaatcttgtgctgtacgtctgtgagaccgtggacccagcacaggtctttggacagcctccctgccccttgagtcagccagtgctactatctttgatccagcaactggcgtccgatcttggcacacggaccgatctaaagttgtcatatctggaggaggcggtgatgcacctcgatcacagcgacccaatcactagggatcatatgggatcagtgatggctcaggtcagacagaagctctttcagtttctccaggctgagccccataattctctaggcaaagctgcccggaggctgtcgctgatgctgcacggcctggtgaccccgtctcttccctag

SEQ ID NO: 15001 - DNA, 576 bp, synthetic construct
  source 1..576: mol_type = other DNA; note = Synthetic coding sequence
atgtcctctggcgccgacggcggcggtggcgccgccgtagccgccagatctgacaagggcagcccgggcgaagatgggtttgtcccatctgccttaggtacaagggaacattgggacgctgtgtacgagcgcgaactccagaccttcagagaatacggcgacaccggggagatctggttcggggaggagtctatgaaccggctgattcgctggatgcagaaacacaagattccactggacgccagtgttttggacatcggtactggcaacggggtcttcctggtggaactggccaagttcggatttagcaacatcactggtattgactactcgccatctgccattcaattatccgggtcgattattgagaaagaggggctatcgaacatcaagctgaaggtggaagatttcctcaatttgagtacgcagttaagcgggttccacatctgtattgacaagggaacgttcgacgccatcagtctcaatccagataacgcaatcgagaaacgtaagcagtacgtgaaatcactgtcccgcgtgctgaaagtcaaagggtttttcaacaacgttatgtag

SEQ ID NO: 15002 - DNA, 2622 bp, synthetic construct
  source 1..2622: mol_type = other DNA; note = Synthetic coding sequence
atgggtaatagagaaatggaagagctgatccctctggtgaacagactccaagacgcctttagcgccctcgggcagtcttgcctgcttgagctaccccagatcgcggtcgtcggcgggcagagtgctggaaagagtagcgtgttagagaatttcgttgggagggattttctcccccggggtagcggtatagttaccagaaggcctctggttctgcaacttgtgacctccaaggccgagtacgctgagttcctgcactgtaagggcaaaaagttcacagatttcgacgaggtgagattggagatcgaagcagaaaccgatcgcgtgaccggtatgaacaagggcatctcctcgatcccaattaaccttcgggtttacagtccacacgtgctcaacctaacactgattgatctcccaggaataacaaaggtgcccgtgggtgatcaacctccagacatcgaatatcagatacgggaaatgatcatgcaattcattactcgagagaattgccttatattagctgttacacccgcgaatacagacctcgcaaatagcgatgctttgaaattagccaaagaggtagacccacaaggcctacgaactattggagttattactaaactggacctgatggatgaaggcacggatgcccgggacgtccttgagaataaactgttgcctctgaggcgggggtatgtaggcgtagtcaaccgctcacaaaaagacatcgatggtaagaaggatataaaggccgctatgttggctgaacgtaagttcttcctgtcccatcctgcatatagacatatcgcggaccggatgggcacaccccacctgcagaaggtcttaaaccagcagctgacgaaccacatacgagacaccttacccaacttcagaaacaaactgcagggccagctactctctatcgagcatgaggtggaggcatacaagaatttcaagcctgaggacccaacaaggaagaccaaagcattactgcagatggtccaacagtttgccgtggatttcgaaaaaagaatcgaaggttcaggagaccaggtggataccctggaactgtccggcggggccaaaattaatagaatttttcatgagagattcccctttgagatcgtcaagatggagttcaatgagaaggagctgaggcgagagatctcttacgccattaagaacattcacggtattcggactgggctgtttacacctgacatggcgtttgaggccatagtgaaaaagcaaatcgttaagttgaagggaccgagcctgaagagtgtggacttagtgatccaggagttaattaacacagtcaagaaatgcacgaaaaagttagctaactttcctcggctatgcgaagaaaccgaacgcattgttgccaaccacattcgggaacgggagggaaaaacgaaagatcaggtgcttttacttatcgatattcaggtgtcatacattaataccaatcacgaggactttatcgggtttgctaatgcacagcagcgtagttcccaagtgcacaaaaagactactgtagggaaccagggcactaacctccccccttctcgacagatagttattagaaagggatggctcaccatcagcaacattggaattatgaagggtggctctaagggctactggtttgtgcttacagccgaaagcctgtcctggtacaaggacgatgaggaaaaggagaagaaatacatgctaccactcgacaatctgaaagttagggacgtagagaagtcattcatgtcctccaagcacatcttcgccctgttcaataccgaacagaggaacgtctataaggattatagatttctggagttggcatgcgactctcaggaagatgtggactcctggaaagccagcttgctgagggccggcgtctatccggacaagtccgttatgaacaaaaaggccgaaaacgacgaaaacggtcaagctgagaatttcagcatggatccccagctggagcgacaggtcgagaccataagaaatctggtggacagctatatgtcgattataaacaaatgcatcagagatctgatccccaagaccattatgcatcttatgatcaataatgtgaaagacttcattaattccgaactgctagctcagctgtactccagtgaagaccagaatactttgatggaggagagcgcggaacaagctcagcggagggatgagatgctgaggatgtaccaggccctgaaagaagctctcgggattattggcgatatctcaactgccaccgtgtcgaccccagcccctccacccgtcgatgatagctggatacagcacagtagaaggagccctcccccaagccccaccacacaaaggaggcccactctgagcgcccctctggcaaggccaacaagtggccgcggacctgcaccggccatcccaagccctgggccccactctggggctccccccgttcctttccggcccgggccactgcctcctttcccctcgagttccgacagctttggcgccccgccgcaagtgccctctcgaccaactagggcccctccaagcgtgccttccagacggccacccccctcgcccacacgtcccacgataatccgacctcttgagtcatccctactagattag

SEQ ID NO: 15003 - DNA, 3111 bp, synthetic construct
  source 1..3111: mol_type = other DNA; note = Synthetic coding sequence
atgaggaagcaggaggtgcgaaccggacgagaagccgggcaggggcatggcacaggctctcccgccgagcaggtgaaggcacttatggatctgctggcgggcaaaggctcccaaggttcccaagctccgcaagccctcgataggacacctgacgccccactgggaccttgttccaatgacagccgtatccagagacatagaaaggcgctccttagcaaggtaggtggaggtccagaattgggcggtccatggcatcggctagccagccttttgctagtggaagggctcactgacctgcagctccgtgaacatgacttcactcaggtggaagccacacgcggcggagggcaccccgctcgtacggtggccttggaccggctttttctgcccctgtctagggtgtctgtgccgccacgcgtgagtataaccataggggtggcaggcatgggcaaaacaacgctcgtgcggcattttgtccggctgtgggcacatggccaagtcggcaaggatttcagcttagtgctcccactaacctttcgggacttaaatacccacgaaaaactttgcgccgaccgattgatttgtagcgttttcccccacgtcggcgagccctccctggcagtcgccgtccctgctagagcattgctgatacttgatggattagatgaatgccgaacgcctctggacttttccaatacagtggcatgcacagaccccaagaaggaaatcccggtagatcaccttatcaccaatattatcagaggaaatctcttcccagaagtgagcatttggatcaccagtcgcccaagtgcgtcaggccaaatccctggggggttggttgatcggatgacggagatacgtggattcaatgaagaagaaataaaggtttgcttggaacagatgttccccgaagatcaggctctgctgggatggatgctttcacaggtgcaggctgatagggctctctatttaatgtgtacagtccctgccttttgcaggttgactgggatggccctgggccatctctggaggtccaggactggcccacaggatgctgagctctggccacccagaaccttgtgtgagctctacagctggtattttcggatggctctttcaggcgagggccaggaaaaaggcaaggcatcgcccaggatcgaacaggtggcacacggtggtaggaagatggtaggcacgctgggccgtctcgcgttccacgggttgctgaaaaagaagtacgtgttctacgagcaggatatgaaagccttcggtgtggatttagcccttcttcagggagcaccatgctcctgttttctgcagcgtgaggagacactcgcttcctcggttgcctactgttttacccacctgtcccttcaggaattcgtcgcggcagcctactattacggggcctctcgacgcgccatttttgacttgttcacagaaagtggtgtctcctggcctcggctaggctttctgactcattttcgaagtgccgcccagcgtgcgatgcaggccgaagatgggcggctggacgtgtttctaagattcctgagtggtctgctctcgccacgtgtcaacgcgctcttggcgggtagtctacttgctcaaggagagcaccaagcttaccggacacaggtggctgagctcctccagggctgtttgcggcctgatgccgcggtctgcgctcgtgctatcaacgtgttgcattgcttacatgagctccagcatactgaactggcgcgaagcgtggaggaagccatggaatcgggtgctcttgctaggctcaccggcccagcgcaccgagctgcgttagcgtacctgctgcaggtgtcggacgcatgcgcccaagaggccaacctgagccttagtctgtcacaaggcgtcctacaatcactcttaccacaactgctctattgtcgcaagctgcgtcttgacactaaccagtttcaggatcccgtcatggagctgctgggatcagtgctcagtggcaaggactgtcgaatccaaaaaatctccctggctgagaaccagatctcgaataaaggcgctaaggctctggcccgctccctcctcgtgaatcgtagcctcaccagcctcgacctcagaggaaattcaatcggaccacagggcgctaaggccctggcagacgccctgaagattaaccgcacactcacctcattgtctctacaaggcaacacagtcagagacgacggtgccagaagcatggcagaggctctggcttccaaccggacattaagcatgttgcatctgcagaaaaatagtattggccccatgggtgctcagcgtatggctgatctcaagcaaaatcgctccctgaaggagcttatgttctcctcaaactctataggggacggtggcgccaaggcattagccgaggccctgaaagttaaccaaggccttgagtccctggacctgcagtctaactccatcagtgacgcaggggtggctgccctcatgggtgcactttgtaccaaccagacccttctcagcttgagtctgagggagaactcaatttcgccggaaggtgctcaagctatagcccatgccctctgcgctaacagtaccctaaagaacctcgatctgcagtggaattttatccaagctggggccgcacaggcattaggacaagcactgcaattaaaccggagccttacctccctcgatctgcaagaaaacgccatcggagacgatggggcttgtgccgtggcgagggctttgaaggtcaacactgccctcacggcgttatacttacaggttgcctcaattggggcctcaggcgcccaggttcttggagaagccctggcagttaaccgcactctggagatccttgatttgaggggcaacgctattggcgtggcgggcgcaaaagctctcgccaatgcactcaaggtgaactctagcctgagacgactcaatctgcaggagaactccctggggatggacggcgcaatttgcattgccactgccctgtctggcaatcacaggcttcagcacatcaacctgcagggaaatcatatcggggactccggggcccggatgatttccgaagccatcaagaccaatgccccaacttgtaccgtggagatgtag

SEQ ID NO: 15004 - DNA, 2784 bp, synthetic construct
  source 1..2784: mol_type = other DNA; note = Synthetic coding sequence
atgttctggaagtttgatttaaatacgacgagccatgtagacaaactcctggataaggagcacgtgacactgcaggagttgatggacgaagacgacattctacaggaatgcaaggcccagaatcagaaattactggattttctgtgccgccagcaatgtatggaagagttggttagtctgatcacccaagacccacccctggacatggaggaaaaggtccgattcaaataccctaacaccgcatgtgagctcctgacctgtgacgtgccccagatttcggatcggcttggtggtgacgagagtctcctgagcctcctttatgactttctggatcacgagccacctctgaaccctctgctggcaagtttcttttctaaaactatcgggaacctgatcgcccgcaaaactgagcaggttataacatttctcaagaagaaggacaaatttatctcactcgtcctcaaacatatcggtacgtccgcacttatggatctcttactgcgactggtgagctgcgtcgagcccgccggactgcgtcaggacgttttgcactggctgaacgaggagaaggttatacaaagattggtggaattgattcaccctagccaggatgaggaccggcagtccaacgcttctcagacgttgtgcgatatcgtacggctcggcagagatcaggggtcccaactgcaggaggccctagaacctgatccattactgacagctttagagagccaggactgcgtagaacagttattaaaaaacatgtttgacggtgataggacagagagttgcttggtttcagggacccaagttttattaactctactcgagacgagacgggtgggcactgaaggtctggtggatagcttttcccagggcttagaacggtcctacgcggtctcatcgagtgtcctgcacggcatcgaacccagactgaaagactttcaccaactgctactgaatcctcctaagaagaaggcaattcttacgactattggtgtgctagaggagcctctcggcaacgcacgcttacacggcgcacgcttaatggccgccctgctgcataccaatacaccttcgataaatcaggaattgtgtagactgaatactatggacctactgctggatctttttttcaagtacacctggaacaatttccttcatttccaggtggagctctgtatcgcagctattctctcgcatgcggcccgcgaggagcgcacggaagccagtggtagcgaaagccgcgttgagccaccacacgagaacgggaatagatctcttgagacaccacaaccagcggcaagtctccccgataacacaatggtgacccacttgtttcagaagtgctgcttagtgcagcggatattggaggcgtgggaggccaatgatcatacacaagccgccggaggcatgcgacggggcaacatggggcatctgacaaggattgccaatgccgtagttcagaatctggagaggggacccgtgcagacacatatttcagaagtgataagagggctgccagcagactgtagaggtcgatgggagtcttttgtggaagaaacgctgactgagacaaaccggcggaacacggtggaccttgccttttctgactaccagattcagcagatgaccgcgaacttcgtggatcagtttggttttaacgatgaggagtttgcagatcaagacgacaacatcaatgcacccttcgaccgtattgccgagatcaatttcaatattgacgctgatgaggattcaccgtcagccgctcttttcgaagcgtgttgctctgatcggattcaaccgttcgatgatgacgaggatgaggatatctgggaggatagtgacactcggtgcgccgctcgagtgatggcccgccctcgctttggagccccgcacgcaagcgagagttgctccaaaaatggtcctgaacggggcggacaggatgggaaggcctctctcgaggcccaccgagacgctcctggtgccggagctccgccagcgcccggaaagaaagaggccccccccgtagagggtgacagtgaagctggagccatgtggactgccgtgttcgacgaacccgccaattctactccgaccgcgccaggtgtcgtccgagacgtgggcagctccgtgtgggcagcaggaacatccgcccctgaagagaaaggctgggccaagttcacagacttccagcccttctgttgctccgaaagtggcccccgctgttcttcaccagtagataccgagtgctcccatgccgaaggctccagatcccaaggtccagaaaaggcgttcagccccgcttccccctgtgcctggaacgtttgtgtaactcgcaaggcccctctgctggccagcgatagttcaagttcaggcggaagtcactcagaggacggagatcagaaggccgcttccgccatggatgcagtgtcgcgcggcccgggtcgagaagcaccccctctgccaacagttgcgaggacagaagaggcagttggtcgcgtgggctgcgctgacagccggctgctctcccccgcatgtccagctcccaaagaggtgactgcagctcccgctgtagccgtcccccctgaggccacggtggccatcaccaccgccctgtctaaggcaggtcctgcaatccccacaccagcagtgagttctgctctcgcagtggccgtacccttggggccgatcatggccgtgactgcagcacctgctatggttgcaacactggggaccgtcactaaggacggccaaatgcctcggcagaaggagcttccttag

SEQ ID NO: 15005 - DNA, 2220 bp, synthetic construct
  source 1..2220: mol_type = other DNA; note = Synthetic coding sequence
atgggcttctccaatatggaggatgatggcccagaggaggaggagagggtggccgagccccaagcaaacttcaatactcctcaggccttgcgctttgaagagctgctggctaatctgttaaacgagcaacaccagatcgccaaggaattgttcgaacaattaaagatgaagaagccttctgctaagcagcagaaagaggtcgaaaaggtcaagccccagtgcaaggaagtgcaccagaccttgattctggaccccgcacagcgtaaacggctccaacagcagatgcaacagcacgttcagctgctgacccagattcatcttcttgcgacctgcaaccctaatttaaaccctgaagctagttcgactcgcatttgtctgaaggagctgggcaccttcgcccaaagcagcatagcgttacaccaccagtataacccgaagttccagaccttatttcagccttgcaacctgatgggagctatgcagctcatcgaggacttcagcacacacgtgtctattgattgttctccccataagacagtgaagaaaacagctaatgagttcccctgtttgcccaagcaggtggcctggattctggctacgtcaaaggtttttatgtaccccgaactgttgccagtctgcagtttgaaggcgaaaaatccgcaagataaaatcctattcactaaagcagaagacaacctgctagcgctgggactcaagcactttgagggaaccgaattcctcaatcccctcatctccaaatacctgttgacttgtaagaccgccagacaacttacagtgagaatcaagaacttgaatatgaacagggcacctgacaacattataaagttttataagaaaaccaaacagctgcccgtactgggcaagtgctgcgaggaaatccagcctcatcagtggaagccgccaatagaaagagaagagcatcgcttgccattctggcttaaggcaagcctgccaagtatccaggaggaactgagacacatggctgatggggcgagagaggtgggcaatatgacgggtacgaccgagattaactcggatcagggccttgagaaagacaattctgaactggggtccgaaactcgctaccctctccttctgccaaagggggtcgtcctgaagctgaaaccagtggcggaccggttccccaagaaggcatggcgtcagaagaggagttctgtgttgaagccccttcttatccagcctagccccagtctccagcccagtttcaaccctggcaaaacccccgcccagtccacacattctgaagctccgcctagcaagatggtgcttcgtatcccgcacccaattcaacccgcaacggtgctccagactgtgcctggcgtgccccccttgggagtgagcggcggagagagtttcgaaagtccagccgcattgcctgccatgcctccagaagccagaactagttttcctctctctgagtcacagactctccttagctccgcccctgtccctaaagtgatgatgcccagccctgcgtctagcatgttccggaagccgtacgtcaggaggaggccttcaaagcggaggggtgctcgggcttttcggtgcatcaagcctgcaccggttatccatcctgccagtgtcatattcacagtacctgccacaacagttaagatagtctctcttggcggtgggtgtaacatgattcagcctgtcaacgctgcagtcgcacagtcccctcagacgattcccattgcgacactattagtgaatcctaccagcttcccttgccccctgaaccagcctcttgttgcctcctcagtgtcccccctaatagtcagcgggaacagcgtgaatcttcccattccctccacgccagaagacaaggcccacatgaatgtagatattgcttgtgcggtcgcagacggcgaaaatgcatttcagggcctggagccgaagctcgagcctcaggagctctctcctctgtctgcaacagtgttcccaaaggtggagcatagccccggacccccgccagtggataaacagtgtcaagagggcctctcagagaactcagcctaccggtggaccgttgtgaaaactgaagagggaaggcaggctctggagcccctgcctcagggtatacaggaatcgctcaataacagctcccccggggatctggaggaggtggtaaaaatggaacctgaggatgcgaccgaggagatctcaggattcctctag

SEQ ID NO: 15006 - DNA, 1911 bp, synthetic construct
  source 1..1911: mol_type = other DNA; note = Synthetic coding sequence
atggagaaggccgttaacgacgggagccacagcgaggaacttttctgtcatctaaagacgatcagcgaaaaagaagaccttccccgctgtacctccgaatctcatctctcctgcctgaagcaggacatactgaacgagaaaactgagctagaggccaccttaaaggaggcagaactagttactcatagcgtggagcttttgctgccgcttttcaaggacaccattgagaaaatcaattttgaaaacgcaaatttgtctgccctcaatcttaaaatctctgaacagaaggaaattctgatcaaggaactggatacattcaagtctgtcaagctcgccctggagcacctcctacgcaaacgtgattataagcaaacaggcgataacctcagtagcatgctgctggaaaatctgacggataacgagtctgaaaacactaatttgaagaagaaagtatttgaaaaggaggcacacatacaagagctgtcttgcctatttcaaagcgaaaaggccaataccttaaaggcaaatcggttctcacagtccgttaaggttgttcatgaacgattgcaaatccagatacacaagcgggaggccgagaacgacaagctcaaggagtatgtaaagtctctcgagaccaaaattgcaaaatggaacctgcaaagtagaatgaacaagaatgaggccatcgtgatgaaggaagcttccagacaaaaaaccgttgccttgaagaaggcctcgaaagtgtataaacagaggcttgaccattttaccggcgcaattgaaaaacttacttctcagattcgagatcaagaggcaaaattgtccgaaaccatctctgcgagcaacgcatggaagtcccattatgaaaagattgtcatcgagaagaccgaactggaggtgcagatagagactatgaaaaagcagatcatcaacctcctagaggacctcaagaagatggaggaccatggcaagaactcttgtgaagaaattttaagaaaagtgcactccatcgagtatgagaacgagactctgaacttggaaaatacaaaactgaaactccgctttccatgtagaataacagaaagcaaaaatatgaacatactgattgtgctagatatgctctgctacatttcgtctgagaaaacaacactggctgcgctcaaggatgaggtggtgtctgtggaaaacgaattatctgagctacaagaggtggaaaaaaagcagaagactttaatcgaaatgtataaaacccaggtgcagaagcttcaagaagccgccgagattgtgaagtccagatgtgaaaacttattacataagaacaatcaaattactaaaacgaagaataaaaatgtggagaagatgagggggcaaatggagagtcacctgaaagaattagagcgcgtttgtgactccttgacagcagccgagcggaggctgcatgagtgccaggagtcccttcaatgctgtaagggcaagtgcgcggatcaggagcatactatcagagagctgcaaggccaagtggatggaaaccacaacctgttaaccaagttgtcccttgaagaggagaactgccttatccaattgaaatgtgaaaacctccagcagaaactcgaacagatggatgctgagaataaggagctagaaaaaaagctcgccaatcaggaggaatgcttgaagcattcgaacctaaagttcaaggaaaagagcgccgagtatactgccctagcacggcagctggaagcagcactggaagagggacgccagaaggtggcagaggaaattgaaaaaatgagctctcgagagtcggccttacagattaaaatattggacttggagacagaactgagaaagaagaacgaagagcagaatcagctcgtgtgcaaaatgaactctgaccccgagaccccttag

SEQ ID NO: 15007 - DNA, 873 bp, synthetic construct
  source 1..873: mol_type = other DNA; note = Synthetic coding sequence
atggctgccgttgagaagcgtcggcaagcagtgcctcccccagcaggcttcacagatagtggacgacaatctgtgagtagagccgccggggcagcagaaagtgaggaggatttcctgagacaggtcggcgtgacggagatgcttagagctgccttgttgaaagtgttagaggcaaggcccgaggaaccgatcgcatttcttgcacactacttcgagaacatgggtcttcgctcacccgtcaatgggggggccggagagcctccgggccagttactgttacagcaacagcggttggggagggccctttggcacctgcggctggctcatcactcccaaagggccgctttcaataataatgtttcagtagcttatgagtgcctgtccgccggaggacggagaaaaagaccagggttagacggtcgaacgtattcggagctattacgacgaatctgccgtgatgggcaggctccagaagaagtggtggcccctctgctgcggaaggtgcagtgtagggatcacgaggcagtccctctctctgtgtttagagcagggaccctaacctgtttcgtgctgctggaatttgtcgcccgtgctggcgctctgtttcagcttttggaagatagcgccgccgccgtggctgatagacgcgtcggacaagcagtgctggacaccctggagggagccctgcaggcctcagacgctgctgctcccgcgcgctttctcgaggctgggtcacggctaggtcctgactccctcgctctcgctttggatcgggcggttggcggtcgccggccttcagcgcctatgacaagagaagaatttctggaaagagccgcggcattatttattgcgaaggtcaagccagtgggctag

SEQ ID NO: 15008 - DNA, 1221 bp, synthetic construct
  source 1..1221: mol_type = other DNA; note = Synthetic coding sequence
atggccgattcccagctgttctgtgtcgccgaagaacgctcagggcactgcgcagtggtagacgggaattttctctacgtgtggggcggatatgtaagtatcgaagacaacgaagtgtacctccccaacgacgaaatttggacttatgacattgattccgggctgtggaggatgcatctgatggaaggcgagctgccagctagtatgtctggcagctgcggcgcttgtattaacggaaaactatatatatttggtggttacgacgacaagggctactccaatcggctgtattttgtaaacttgaggacccgcgatgagacctacatttgggaaaaaattacagacttcgaaggccagccaccgaccccccgtgataagttaagctgctgggtgtataaagatcgattaatttattttgggggttatggatgccggagacacagcgagctgcaggattgttttgatgtgcacgatgcaagttgggaggagcaaatattctgggggtggcacaacgacgtccatatctttgacacaaagacccagacctggtttcagcctgagataaaggggggagtgcccccccagccgcgtgcagcacacacatgtgcggtgcttggaaacaagggctatatttttggcggtcgcgtcttacagacacgcatgaacgacctgcattatctgaatctcgacacctggacttggtccggtaggatcaccattaacggagagtccccaaagcataggtcctggcacacactaactccaattgcagatgataagctctttttatgcggggggctgtctgccgacaacatccccttgagtgatggctggattcataacgttactacaaactgctggaagcagttaactcatcttcctaaaactagaccccgcttgtggcacaccgcatgcttgggaaaagagaacgagattatggtttttggagggtctaaggacgatctgctagcactagataccggtcattgtaacgacctcctgatatttcaaacccagccctacagtttgctgcgcagctgtctggattgtattggcaaaaattccataatgttagaatcccagataagcctgctgcctcctaagctgttgcagcaggtgttgaagaagatcacattctgggccgccgccaatcatagagaggagcagcgggtgcagaaggaggaaaccgagaacaagtaccagtggatcagcagtaattag

SEQ ID NO: 15009 - DNA, 1113 bp, synthetic construct
  source 1..1113: mol_type = other DNA; note = Synthetic coding sequence
atggttcaaccatttacaaccatccctttccctccacctccgcagaatggcattcctaccgagtacggagtcccccatacgcaggattatgctggccagactggcgagcataatctgactctctatgggagcacccaggcacacggcgaacaaagctccaattctccatcaacgcagaatggctccttaactactgagggcggcgcccagaccgacgggcagcagtcacagactcagtcatcggaaaactccgagtctaaaagtacgcccaaacgtctgcatgtttctaacatcccttttaggtttagagacccagatctccgtcagatgtttgggcagttcggtaaaatcctggatgtggagattatatttaacgagagagggagtaaagggtttggttttgttaccttcgagaattctgccgatgccgaccgggccagggagaagctgcacggtacggtggtggaggggcggaagatcgaggtgaacaatgccaccgcccgggtgatgactaacaagaagatggtgacaccttacgccaacggctggaaactgagccccgtcgtgggagccgtctacggaccagagctgtacgccgcatctagcttccaggcagatgtaagcctcggaaatgatgccgcagtgccactgtccgggcggggcggaattaacacttacattcccctcatcattcctggttttccatatcctaccgcagcgactacagccgcagcctttcggggcgcccacctgcgaggacgcgggcgcactgtgtacggggccgtgcgggccgtgcccccaaccgctattccggcctaccccggcgttgtctatcaggatggattttatggcgccgacctgtacatcgaaagtgctaattgtttcaggagcaaccgggtggatatgcagccaactgacatgcactctttgctgctgcagcctcagccgccattactgcagcctctgcagccgctcactgtgacagtcatggctggctgtacccagcccacccctacgatgcctttgccacttcccctcgccatggagttagccctttggagggtgtacacggaagtagcaaccgccgatctaccacctaccgaagtgacatag

SEQ ID NO: 15010 - DNA, 534 bp, synthetic construct
  source 1..534: mol_type = other DNA; note = Synthetic coding sequence
atgtctgaagattcagagaaggaggattacagcgaccgcacgatttccgacgaggacgagagcgatgaagacatgttcatgaaatttgtcagcgaagatctgcacagatgcgcattactgacagcggactcatttggcgatcccttctttccccgcacaactcagattctccttgagtatcagttgggacgttgggtgcccagactccgcgagcccagggatctttatggcgtgtcatcctccggcccattgtctccaacaaggtggccttaccattgcgaagtgatcgatgaaaaggtccagcacatcgatggggtatcatgctggagtgagagccaccaagccggagcacaatggtgcgacctcggatcgctccagccccctccaccgcgattcaaaagattcgcttgcttcagtctgctctcgtcacgagattataggcgtgtacctccgaggtcagcaaacttcgttttcttggtggagaccggctttcatcatgtgggccaagacgggctgcgccttctcacaagttag

SEQ ID NO: 15011 - DNA, 1827 bp, synthetic construct
  source 1..1827: mol_type = other DNA; note = Synthetic coding sequence
atgtcagacaagagcgatctgaaggctgaactcgaaagaaaaaagcagcgcctggctcagataagggaggagaagaaacgaaaagaggaagagcggaaaaagaaggaagctgatatgcagcagaaaaaggagccggtccaagatgacagtgatctggatagaaaacgcagagaaacggaggctctgcttcagtccataggcatcagcccagagccacccttggtgcctacgcctatgagcccatccagtaagagtgtgtcgacaccgagtgaagccggttcccaagactcaggcgacctcggtccgctgacgagaaggcgtctgcacaaattgggtgtgagcaaagtgactcaggtcgactttttgccccgggaagtggtgtcctatagtaaggaaacccagactcctctagctacacaccagagcgaagaagatgaggaagacgaggagatggtcgagtctaaagtcggtcaggattccgagcttgaaaatcaagataaaaagcaggaagtgaaggaagccccgcctcgtgagttgaccgaagaagagaagcagcagatactccactcggaagaatttctaattttttttgaccgaactatcagggttatcgaacgggccctcgccgaggacagtgatatcttctttgactatagcggtcgcgaattggaggaaaaggacggcgatgtgcaggccggtgcgaatttgtcatttaataggcagttctacgatgaacattggagcaagcatcgcgtcgtgacctgcatggattggagcttgcagtaccctgagctcatggtcgccagttataacaacaatgaagacgctcctcacgagccagatggcgtagcgctggtttggaacatgaaatttaaaaaaacaacccctgaatatgttttccactgccagagttctgtgatgagcgtctgctttgcccgcttccacccgaatctcgtggtagggggtacgtatagcgggcagatcgtgttatgggataaccgatcgcaccgcaggactcccgtacagcgtacaccactctctgccgctgcccatacccaccccgtgtattgcgtaaacgtggttgggacgcaaaatgcgcataatctaatcaccgtgtcgactgatggcaaaatgtgctcctggagtctggatatgctgtccactccacaggaatctatggagctggtgtacaacaagtcaaagcccgttgccgtcaccgggatggcctttccaaccggcgatgtcaacaactttgttgttgggagcgaagagggcacggtttacactgcttgccgccatggctccaaggccggaataggagaggtgttcgagggacatcagggcccagtgactggtattaattgccatatggccgttggacctatcgacttcagccatctcttcgtgaccagctcattcgactggaccgtcaagctatggacaaccaaacacaacaagccactgtatagcttcgaggataacgccgactacgtgtacgacgtcatgtggtctcctgtgcaccccgccctgttcgcttgtgtagatgggatgggaaggctcgatctttggaatctgaataacgatacagaggtcccaacagcctctgtggctatagaaggcgcctcggccctaaaccgggtccggtgggctcaagctggcaaagaagtggctgtcggggatagcgaaggacgcatttgggtttacgacgtcggtgagctggccgtacctcacaatgatgagtggacccgattcgcaaggaccttagtcgaaatcagggctaaccgggccgactctgaggaggaggggacagtcgagctgagcgcttag

SEQ ID NO: 15012 - DNA, 627 bp, synthetic construct
  source 1..627: mol_type = other DNA; note = Synthetic coding sequence
atggagggggctgctgccccagtggctggggacagacccgatctggggctgggcgcgcccggttctccccgagaggccgtcgctggcgcaactgctgctctggagcctaggaaaccgcacggcgtcaagagacaccaccacaaacacaacttgaaacatcgctacgaattacaggaaactctgggcaagggcacatacggtaaagtgaagcgcgcgacagaacggttttccgggcgggttgtggctatcaaatcaatcaggaaggataagatcaaagatgagcaggacatggtgcacatcaggcgggagattgagatcatgagttcattgaatcatcctcacattatatccatttacgaagtgtttgagaataaggacaaaattgtgataattatggagtatgcaagtaaaggcgaattgtacgattacatttccgagcgcaggcgactgtctgaaagggaaactcgccactttttccggcaaatcgtgagcgcggtgcactactgtcataaaaatggtgttgtgcaccgagatctgaaattgaaaagaccgtcaagggagaaccaagtgaccacactgccacaatcagcagtctctctgaggagttgctggactgtgatgatgtag

SEQ ID NO: 15013 - DNA, 990 bp, synthetic construct
  source 1..990: mol_type = other DNA; note = Synthetic coding sequence
atggaagtggctgagccatcgagccccaccgaggaagaagaggaggaggaagaacactcggcagagccacggcctcggacccggagtaaccctgaaggggcagaggatcgggccgttggcgcgcaggccagcgtgggatcccgaagtgagggagagggtgaggctgcgtcagcagacgatgggtcactgaatacatccggcgctggccccaaaagctggcaggtgccaccacctgcgccagaggtgcagattcgcactccacgggtgaattgccctgaaaaggtcatcatatgcttggacctgagcgaagaaatgtctctgcctaaactcgagtccttcaatggtagcaagactaatgcactgaacgtgtcccaaaaaatgatcgagatgtttgttcgcaccaaacacaaaattgacaaatcgcatgagtttgctctcgttgtggtgaatgatgatacagcctggctatccggcctcactagtgaccctcgcgagttatgctcatgtctttacgatctggaaaccgcgagttgttctacatttaacctggagggcttattctcccttatccagcagaaaaccgaattgcccgtaaccgaaaatgtgcagaccattccccctccttatgtggttagaaccattctagtatacagcaggccaccctgtcagccacagttctctctgaccgagcctatgaaaaagatgttccagtgtccttatttcttcttcgatgtggtgtatatccataatggaaccgaagagaaggaggaggaaatgtcatggaaggatatgttcgcctttatggggtcactggacacaaaagggacctcctacaaatacgaggtggccctcgccggacccgccctcgaactgcataactgtatggcaaagctgcttgcccacccccttcagagaccttgccagagtcacgcctcctattcccttctcgaggaggaagatgaggcaattgaggtggaagccacagtgtag

SEQ ID NO: 15014 - DNA, 885 bp, synthetic construct
  source 1..885: mol_type = other DNA; note = Synthetic coding sequence
atgtcccaaccagccggagggagaagaaagccccggactttggggccccccgtgtgttccatcaggccttttaagtcttcagaacagtacctggaggcaatgaaggaggacctcgccgaatggttaagagatttatatgggcttgacattgacgccgcaaacttcctgcaggtcctcgagaccggcctggtcctttgccaacacgccaatgtcgtgaccgatgccgccttggcgtttctggccgaagccccagctcaagcacaaaagattccaatgccaagagtgggcgttagctgtaatggagccgcacagccagggacgtttcaggcacgggataacgtgtctaactttattcagtggtgcaggaaagaaatgggaatccaggaggtgcttatgtttgaaacagaagatttggtgttgcggaagaacgtgaagaacgtcgtgctgtgcttactggagcttggccgacgggcctggcgcttcggggtcgccgcccccaccctggtccagttggaggaagaaatcgaggaagaagtgagacgcgagctggccctgccgccccttccccaacctggccctgacggcgctgaaccctgcgaacccctgcatgtcccttctgcggtcctccacgggcagagcgtttacgtttttctggggcctgcaaggcagccccctaaagatagactgttgcgcgctgtgttaggctcaaagggaggtgaggcttcacgggtcgatggagccagtgtgggcgaagaagaggaagagggaaaggaggaaaaggagccagccgctcccctggagagttctccgcagccaccagagggcctgcagcctcattggctcaatcaagcacctctgccacctgaggaagagtcttgggtgtag

SEQ ID NO: 15015 - DNA, 1554 bp, synthetic construct
  source 1..1554: mol_type = other DNA; note = Synthetic coding sequence
atggagaccgaccttaattcacaggatcgcaaggacctggacaaatttataaagtttttcgcgttgaaaaccgtacaagtaatagtccaggccagattgggggaaaagatttgtacccgttccagcagctctcctacaggatcagactggttcaacctggctatcaaggatatacccgaagtgacacatgaggccaagaaggccctggcgggccagctcccagccgtggggcgaagcatgtgcgtggagatttccttaaagacaagcgaaggagacagtatggaactggagatttggtgtctggagatgaatgaaaagtgcgacaaggagataaaagtttcctacaccgtatataatcggctcagccttctgcttaagagtcttctggccatcacacgcgtcacaccggcttataggctttctcggaaacagggacatgaatacgtcatcctctaccgaatctacttcggagaggttcagctgtctggactgggtgagggcttccaaactgtccgagtaggcaccgttggtactcccgtcggcaccataacactgagctgcgcataccggattaacctcgcttttatgtcgacccgtcagtttgagcgaacccccccaattatgggcattattatagatcactttgtggacaggccctacccctccagcagccccatgcacccatgtaattaccgtactgcaggcgaagataccggggtgatctatcctagtgtcgaagactctcaggaggtgtgtactacgagcttttccacatctccaccgagtcagttgtcatcttcaagactgagctatcagccagcagcactgggtgtggggtccgcggatctcgcctatcctgttgtcttcgccgccgggctcaacgccacccatccccaccagctgatggtgcctggtaaggagggaggagtgcccctagcacctaatcaacctgtgcacggtacacaagcggatcaagaacggttagccacctgcactccgtctgatcgaacacattgtgccgctactccgagctccagtgaggataccgagaccgtaagcaatagtagtgaggggagggcttcgccgcatgacgtgctcgagactatattcgtgcgcaaagtcggcgcgtttgtcaacaaaccaataaaccaggtgacactgacaagcttggacatccccttcgctatgttcgcccctaaaaatcttgagcttgaggataccgatcctatggtgaacccgcctgatagccctgagaccgagtcacccctgcagggaagcctccactcagatgggtcaagtggaggctcttcgggcaatactcacgacgacttcgtgatgatcgatttcaagcccgccttttccaaggatgacatactgccaatggaccttggcaccttctatcgggaattccagaatcctccccaactgagctctctctccatcgacataggcgcacagagtatggccgaggatctcgatagcctcccagagaagctggccgtccatgagaaaaatgtccgggaattcgatgcttttgtggagacactgcaatag

SEQ ID NO: 15016 - DNA, 951 bp, synthetic construct
  source 1..951: mol_type = other DNA; note = Synthetic coding sequence
atggctacttttgttgagttaagtacaaaggctaagatgcccattgtggggctcggaacttggaaaagccccctgggcaaagtaaaagaagccgtcaaagtggcaatcgatgccggctaccggcatattgattgtgcctatgtgtatcagaatgaacatgaggttggggaagccatacaggaaaagattcaggagaaagctgtgaagcgagaggatctgttcatcgtgtcaaagttatggccaacctttttcgaacggccactggtgcggaaggcatttgaaaagactctgaaagacctgaaattaagttaccttgacgtctatttgattcactggccgcagggcttcaagagtggcgacgaccttttcccaaaggatgacaaaggaaacgctatcggaggaaaagctacgtttttagacgcctgggaagctatggaggagttggtcgacgaaggattggtgaaggcattgggagtcagtaacttcagtcactttcagattgaaaagctacttaacaagccggggctgaagtataagcccgtgacaaatcaggtggagtgccatccctatctcacccaggagaagttgattcagtactgccattccaaagggattacagtgaccgcctactcacctctaggcagccctgatagaccttgggccaagccggaggaccccagcctactcgaggaccccaagatcaaagagatcgcggccaagcataagaaaacagccgcccaggtcttgattcgcttccacattcagcgaaatgtgatagtcattccaaagagcgtgaccccagcccggattgttgaaaatatccaggtgttcgattttaagctcagtgacgaagagatggccactatcctgagctttaatagaaactggagggcgtgcaacgtgcttcagtctagtcatctggaagactatccctttaatgccgaatactag

SEQ ID NO: 15017 - DNA, 8274 bp, synthetic construct
  source 1..8274: mol_type = other DNA; note = Synthetic coding sequence
gagccaaaggtagtgtttgcgaaagagcagcctgtccacagagaggtccaggcgcaggcaggagcctccacgaccctgagctgtgaagtggcccaagcgcagacagaggttatgtggtataaagacggcaagaagctttccttcagctccaaggtgcgcatggaagcagtcgggtgtaccaggcgcttggtcgtccagcaggccggccaggccgtagccggagagtacagctgtgaagccgggtctcagagactctcctttcaccttcatgtcgccgaaccaaaggccgtcttcgccaaggagcagccagcccacagggaagtgcaggccgaagccggggccagcgcgactctgagttgcgaggtggcccaagcgcagacagaagtgacttggtacaaggacggtaaaaaactgagctcatcactgaaagtgcatgtagaagccgccggatgtactagaaggctcgtagttcagcaagcaggacaggccgatactggagaatacagttgcgaggctggtgggcagcagttatcctttagactccaggtagccgaacctaaagctgtcttcgctaaggaacaaccagcttcccgcgaggtccaagccgaggccgggaccagcgctactctatcctgtgaagtggcacaagcccagaccgaagtgacctggtacaaagatggaaaaaagttgagcagctccagcaaagttagaatggaggcggtgggctgtaccagacgtctcgtcgtgcaggaagccggccaggctgatgccggcgagtatagctgcaaggccggtgatcaacgattgtcattccatctgcatgtagccgagcctaaggtagtttttgctaaagaacagcctgctcaccgagaagttcaggctgaagctggcgccagtgctacactcagttgcgaggtcgctcaggcccagactgaagtgacatggtacaaggacggcaagaaactctcttcgtctagcaaagtgcgggtggaagctgtcggctgtactcggaggttggtggtccaacaggccggacaggcagaggctggcgaatactcatgcgaggctgggggccagcagcttagcttccggctacaggtggccgaacctaaagctgtctttgctaaggaacaggtcgtgttcgcgaaggatcagcctgtgcatcgggaggtgcaggcagaggctggaacatctacgatgctgtcttgcgaagtcgcccaggcacagaccgaggttatgtggtataaagacggaaaaaaactcagttcctcaagcaagatgagagtggaagcggtggggtgcactcgccgcttagttgtgcaggaagcaggccaggctgacgctggagagtactcatgtgaggcgggagggcagcgcctctcctttcatctgcacgtggcggagcccaaggtggtgttcgctaaggaacagcccgcttgcagggaagtgcaagcagaggcaggtgcctccgctaccttatcctgcgaggtggcacagggccaaatggaggtcacctggtataaagatggcaaaaaactgtcaagctccagcaaggtccacatggaggccagcggctataccaggcgcctcgtggttcagcaggcaggacaggctgacgctggcgagtattcctgcgaggctggaggccaaagattatccttcagactccacgttgccgaactagagccccagatttctgaacgaccgtgcaggcgcgagcctttggttgtgaaagaacacgaggacatcattttaacagcgacgttggctactcctagtgccgccactgtgacatggctgaaagatggcgttgagatccgacgttccaagagacatgagacagcttcccagggggatacacatacactcactgttcacggggctcaagtgttagattccgccatctactcttgcagagtaggtgcagagggccaagattttccagtacaggttgaggaggtggccgctaaattctgccgcctattggagccagtctgcggtgaacttggcggaactgttacgctggcctgtgagctcagccccgcgtgtgcagaagtcgtctggcggtgcgggaacacccagctgagagtaggtaagcgatttcagatggtagctgaaggcccggtgagatccctgaccgtgctgggtctgcgggccgaagacgcaggagagtatgtttgcgaaagccgtgacgaccatactagcgcacagctcactgtcagcgtgccacgcgtcgttaagtttatgtcaggactctccaccgttgttgctgaagaggggggcgaagcaacttttcagtgtgtggtaagccccagcgatgtggctgttgtatggtttagagatggggcgctgttgcaaccgtcagaaaagttcgccatttcacaatctggcgccagtcactccctaaccatatccgacctggttcttgaggacgccggccagattaccgtcgaggctgaaggggcctcgagttccgccgccctgagggtacgggaggcacctgttctgtttaagaaaaagttagaacctcagaccgtggaggaacgctcctccgtcacactcgaagtggagctgaccaggccttggcccgaactccgatggaccaggaatgccacagcgctggcccccggcaagaacgtggagattcacgcggaaggtgccaggcaccggttggtgctgcataacgtgggcttcgccgaccgtggctttttcgggtgcgaaaccccagacgacaaaacacaggccaagctcacggtggagatgcgccaggtacgtctggttcgaggattacaggctgtcgaggctagagagcaaggcaccgctactatggaagtgcagctgtcgcacgccgatgtagacggaagctggacacgggacggcctgagatttcaacaggggcctacctgtcacctggccgtgcgcggccctatgcacacattgaccctgtcgggacttcgccctgaagacagcgggctaatggtgtttaaggccgagggcgtgcatacgagtgcaagactggtcgtgaccgagcttcctgtttccttctcccgaccgcttcaggatgtggtgactactgagaaggagaaagtcactctggagtgcgaactgagccgtccaaatgtggacgtgcgctggctgaaggatggtgttgaacttagggccgggaaaaccatggcgatagcagcccaaggagcgtgccgcagtctcactatttaccggtgtgagtttgctgaccagggtgtttacgtgtgtgacgctcatgatgctcagtcttcagctagcgtgaaggtccaaggaaggacatatacactgatatacagacgcgtgcttgcggaggacgccggggaaatccaatttgtggccgagaatgccgagtctcgcgcacagctcagagtgaaagaactgcccgtgacactagtgaggcccttgcgggataagatcgctatggagaagcataggggagtgttggagtgccaagtgagccgcgcttcagcacaagttagatggtttaaaggtagccaggagttacaaccaggaccaaaatatgaactggtgagtgatggactctaccgcaaactcatcattagtgacgtgcacgcagaggacgaagatacatacacatgcgacgccggagatgttaagacatcagcacagttcttcgtcgaggagcagagcattaccattgtccgcggtcttcaggacgtgacagtcatggagcccgcccctgcgtggtttgagtgcgagacttcaattccgtcagttaggccacccaaatggttactcggtaagactgtcctacaggcaggaggtaatgtgggcttggaacaggaggggacagtgcaccgcctgatgcttagacggacatgcagtaccatgaccggccccgtgcacttcacagtgggaaaatctcggtcgagtgcccgcctcgtcgtgtctgatatccccgttgtgttaacccgcccgctggagccaaagaccgggcgcgaactacaaagtgttgtgctgagctgtgacttccgccctgctcccaaagctgtgcagtggtataaagacgacacacccctgagtccaagcgagaagttcaagatgtcccttgaagggcagatggcggagcttaggattctgagactcatgcccgctgacgctggtgtgtatcgatgtcaggcgggatctgctcacagcagcactgaagtgaccgtggaagctagggaagtcaccgtgactggtcccctccaagacgccgaggccacggaggaaggatgggccagtttctcttgcgaactgtcgcacgaggatgaagaggttgagtggagcctgaatggcatgcctctctataacgacagcttccacgagatttcccacaaaggacgccgccatacactcgtgctgaagtctatccaacgagctgatgccggtatcgtgcgggctagctctctgaaggtgagcacttccgctcgactcgaggtgagagtaaaaccggtagtttttttaaaagcccttgatgatttgagcgccgaggagcgaggaactcttgcactacaatgcgaggtgtcagaccccgaggcgcatgtggtctggaggaaagacggggtgcagctgggcccctccgacaaatacgacttcctacacacggctggcacccggggcctggtggtccatgacgtgagtcccgaggacgcaggcctgtatacatgccacgttgggtctgaggaaacaagggcacgcgttcgggtgcacgatttacacgttgggatcacgaaacggttgaagacaatggaggtgctggaaggagaatcttgttcttttgagtgtgtgttgtcccacgagtctgcttctgatccagccatgtggacagtgggaggaaagacagtgggttcatcttctcgtttccaggcaacccgtcaggggaggaagtacatcctcgtcgtgcgggaagctgctccctccgatgccggggaagtggtattctccgtaaggggcttgacatctaaagcttctctgatcgttagggaacgacccgcggctatcattaagcctctggaggatcagtgggtggctccaggtgaggacgtcgaactgagatgcgaactatcccgggctggtacgcccgtgcactggcttaaggacagaaaggcaatacgaaaatctcagaaatacgatgtggtatgtgagggcacaatggccatgctggtgattcggggcgcctccttgaaagatgccggagagtacacctgcgaagtggaagccagcaagtctacagcaagcctccacgtggaggaaaaagccaactgtttcaccgaggaactgactaacctgcaagtggaagaaaagggaaccgccgtctttacctgcaaaaccgagcaccctgccgcaacagtcacctggagaaaggggctgttggaactccgtgccagcggtaaacaccagccctcccaggagggcttgacactgcggctgacaatatcagccctggaaaaagctgatagtgacacctacacgtgtgacattggacaggcacagtcacgcgctcagctactcgtccagggacggcgggtgcacatcatcgaggatctggaggatgtggacgtccaggaagggagttctgccacattcagatgccgaatttcaccggcaaattacgagcccgtccactggtttctggacaagacccccctccacgctaatgaactgaacgaaatcgacgctcaaccaggcggttatcatgttctcactttgcggcagctggcgctgaaggattccgggactatctacttcgaagccggggaccagagggccagtgcagctctacgcgtcactgagaaaccctctgtcttttctcgggagttaaccgacgccaccattacggaaggcgaggacctgactctcgtgtgtgagacttccacctgcgatattccagtgtgttggacaaaggatggaaagacgttgcgcggaagcgctaggtgccaactatcccacgagggccaccgggctcagctgctgataaccggagctacattgcaggactccggccgatacaaatgtgaggctggtggagcgtgttcctcgtcaattgtgcgtgtccatgcaagacccgtacgtttccaggaagccctcaaggatcttgaggtgctggaagggggagcagccacccttcggtgtgtcctgtcatctgtggcagcccctgtaaagtggtgttatggcaacaatgtcctccgccccggggacaaatattccttaaggcaggaaggtgccatgctcgagctggtggtgagaaatctccggcctcaggattcagggagatactcttgctctttcggagatcagacgacatctgctaccctgaccgtgacagccctgccagcgcagttcattggcaagctccgtaacaaggaggccaccgagggagcaactgcgacactacggtgtgaacttagcaaagctgcgccggtcgaatggaggaaggggagtgaaaccttaagggatggggacagatactgtttacgacaggatggcgcgatgtgtgaactccagattagaggactcgccatggtagatgcggccgaatacagttgcgtgtgtggcgaggaacgcacgtcggcatcacttacaatccgacctatgcctgcccattttattggaagactgcggcatcaagaaagcatcgagggggcaacggccacgcttcgatgcgagctgtctaaggcagcacctgtggaatggcggaaaggacgggaaagtttgcgtgatggggatcgccacagtctacggcaggatggcgccgtctgtgagctccagatctgtggtttagcggtggccgacgccggtgaatatagctgtgtgtgtggggaagagagaacctcagctactttgacagttaaggcgttgcccgcaaagtttacagagggccttcgcaacgaggaagctgttgagggggccacagccatgctgtggtgtgaactgtcaaaggttgcccccgtcgagtggcgtaaaggacctgaaaatctgcgggacggcgatcgctatatcttgcgacaagaagggacccgctgcgagctgcagatatgcggactcgccatggcagatgcgggggagtatttgtgcgtctgtggccaggagaggaccagcgctactctgaccattagagctctgcctgcacgattcatcgaagacgtcaaaaaccaggaagctagggaaggggcaaccgccgtgctgcagtgcgaacttaattccgccgcacccgtcgagtggcggaagggctctgaaaccctgcgggatggggacaggtacagtctgcgacaggatgggactaaatgcgaactccaaattcggggtctcgctatggcagacactggagagtattcttgcgtgtgtgggcaggagcgcacctcagcgatgctaacagtgcgagccctgcccattaagttcacggaggggcttaggaacgaagaggccactgaaggggccacagctgtgttacgatgtgaattgtctaaaatggccccagtggaatggtggaagggacacgaaaccctacgggatggggataggcactctttgcgccaggacggtgcccgctgcgagcttcaaatcagaggactggtggctgaggacgccggcgaatacctctgcatgtgtggcaaagagcgaaccagcgctatgctgaccgtgcgcgccatgccgtccaaattcattgagggattgagaaacgaggaggccacggagggtgatactgcaaccctttggtgcgaactatccaaggctgcgcccgtggagtggcggaaagggcacgaaaccttacgggacggggatcggcactctcttcggcaagacggcagtcggtgcgagctccagattagaggcctagctgtagtggacgctggagagtattcatgcgtgtgcgggcaggagcgaactagtgcgaccctgaccgtaagggcgctgccagcccgatttatagaagatgtgaaaaaccaagaggcgagagaaggtgccaccgctgttcttcaatgtgagctttccaaagccgcacccgtggagtggcgtaaaggaagtgagactctgagaggcggtgacaggtactcattgcggcaagacgggacaagatgtgagctgcagatccatggcctgtctgtggcggacactggcgaatactcctgtgtgtgcggccaggagagaacaagcgcaacactgaccgtgcgggcgcttccagccaggcattcaaggtccgaggatcaaggtggccttcggagaggacacagctacacagccgtatag

SEQ ID NO: 15018 - DNA, 1449 bp, synthetic construct
  source 1..1449: mol_type = other DNA; note = Synthetic coding sequence
atggtcatggaaaaaccttcaccgctcttggtgggtagagaattcgtgcgtcagtactatacgctgcttaacaaagcaccagagtaccttcatcgtttttatggccgaaattccagctatgtgcacggcggagtagatgcgtccggcaagccacaggaggctgtttacggccagaacgatattcatcacaaagtcttgtctctgaactttagcgagtgccataccaaaatcagacatgttgacgcccacgctactctctctgatggagtggttgtacaggtgatggggcttctcagcaatagtgggcagcctgaacggaagtttatgcaaacgttcgtactcgcaccagaaggctccgtgccaaacaaattttacgttcacaacgatatgtttcggtatgaggacgaggtctttggcgatagtgaacctgaacttgatgaagaaagcgaagacgaggtggaggaagagcaagaggaacggcagccatcacctgagcctgtgcaggagaacgccaactcggggtactacgaagcccaccctgtaactaatggcattgaggaacccctcgaggagtcatcacacgagcccgaacccgaaccagaatcagagactaaaactgaagaactaaagccccaggtggaagaaaagaacttagaggaattagaagagaaaagcactacacccccacccgccgaacctgtgtctctgcctcaagaaccacctaaagccttcagctgggccagcgtgacaagtaagaacctgccacctagtggcaccgtctcgtctagtggaattcccccccacgtgaaggcaccagtgagccaaccccgcgtagaggctaagcctgaggtccagtctcagccccctcgggtgcgagagcaacgccccagagagaggcccgggttccccccacgcggaccccggcctgggcggggcgacatggaacagaacgatagtgataacagacgaattattagatatcctgattcccatcagctgtttgtggggaatctgcctcacgacattgacgagaatgagttaaaggagttcttcatgtcctttggtaatgtggttgaactgcgaatcaataccaagggcgtcggaggaaaattacccaattttggatttgttgtgtttgatgattcggagccagttcagcgtatcttaattgccaaacctatcatgttccggggcgaagtacgcctaaatgtcgaagaaaaaaaaacccgcgcagccagagaacgcgaaacgcgcggcgggggcgacgatcgccgcgacattagacgcaatgacaggggccccggcgggccccgaggtatcgtcggaggaggcatgatgcgggaccgcgacggccgcggcccgcccccccgcgggggcatggcccaaaaactcgggagcgggagaggaaccggccagatggaaggcagatttacaggccaaagaagatag

SEQ ID NO: 15019 - DNA, 807 bp, synthetic construct
  source 1..807: mol_type = other DNA; note = Synthetic coding sequence
atgtctgggaggaaacgatcattcacattcggggcttatgggggagttgataaaagttttacctcccgacggtccgtatggcgatctgacggtcagaatcagcatttcccacaggctctagaccttagcagggtgaatcttgttccatcatacacaccttcactatatccaaaaaataccgatcttttcgagatgatcgaaaaaatgcagggcagtcgcatggacgagcagcggtgtagcttccctccccctctcaaaactgaggaagactatattccttacccctccgtccacgaagtgctggggcgggaaggcccctttccactcatcttgctgcctcaatttgggggttactggattgagggcaccaaccacgagattacaagcattccagaaacagagcccttacagtcgcccaccactaaagtgaagcttgaatgtaatccaactgctcggatctacaggaaacacttcctgggaaaagagcattttaactactatagcttggacgctgctctggggcacctcgtgttcagtctgaagtacgacgtcattggtgatcaagagcaccttagactcttgctacgtacgaaatgtcgaacctaccacgacgtgatccccattagctgcctgaccgagtttccaaacgtggtacaaatggccaaactggtgtgtgaggatgtaaacgttgaccggttttatccagttctgtatcccaaggctagtcgcttgattgtcacctttgatgagcacgtgatatcaaataacttcaaattcggcgtaatctatcagaaacttggacagtag

SEQ ID NO: 15020 - DNA, 606 bp, synthetic construct
  source 1..606: mol_type = other DNA; note = Synthetic coding sequence
atgtacacattactctccgggctgtataaatacatgtttcagaaggatgaatattgcatcttaatacttggcctggacaatgctggtaagaccacctttctggaacagtccaaaacacgttttaacaagaactataaaggtatgagtctcagcaagatcacgacaactgttggcctaaatattgggaccgtcgacgtgggaaaggcacggctgatgttctgggatctcggcggtcaggaagagctgcagtcactgtgggataagtattacgcagagtgccatggcgtaatttacgttatcgattccacagatgaagaacggctcgccgagtccaaacaggccttcgaaaaagtggtaacgtcggaagcactgtgcggagtgccagttctcgttttggccaacaaacaagatgtggaaacatgcctgagcattcctgacatcaagaccgctttctcagactgcacgtccaaaattggccgaagagattgtctaacgcaagcttgttctgcattgactgggaagggggtgcgggagggcatcgagtggatggtgaaatgcgtggtgcgtaatgttcacaggccacctcgtcagagggacattacctag

SEQ ID NO: 15021 - DNA, 1707 bp, synthetic construct
  source 1..1707: mol_type = other DNA; note = Synthetic coding sequence
atggggctgctcacgtttcgggatgtggctatagagtttagtttggaggagtggcaatgcttagatacagcacagagaaacctgtacaagaatgtgatcctcgaaaactatcgcaacctggtgttcttaggcatcgctgtctcaaaacaggacctgattacttgcctggaacaggagaaggaacctctgacagtgaaacggcacgagatggtcaatgagcctcccgtgatgtgcagccacttcgcccaagagttctggccagagcaaaatatcaaagattcctttgaaaaagtgacacttcggcgatacgaaaaatgtggtaacgacaattttcaactcaaaggctgcaagagcgttgacgaatgtaaactgcacaaggggggttacaatggcctaaaccaatgcctccccactatgcagtctaaaatgttccaatgtgacaaatacgttaaggtgtttaacaagttcagtcacagcgaccgacataaaatcaagcacatggaaaataagcccttcaaatgtaaagagtgcggcagaagcttctgtatgctcagtcacctgactaggcatgaacgcaattacacaaaagttaatttctgtaaatgcgaagaatgtgagaaggctgtgaatcaatccagcaaactgaccaaacacaagcggatctacacatgcgagaagctctacaagtgtcaggagtgtgatcgtacatttaaccagttttcaaacttgactgagtataaaaaagattacgcacgcgaaaaaccttacaagtgtgaggagtgcggcaaggccttcaatcagtccagtcatctaaccacgcataaaatcattcacactggcgaaaagccatataaatgcgaagagtgcggcaaagcttttaaccagttttcgaaccttactacgcacaaaaaaattcatacaggcgaacagccctacatatgtgaggagtgtggcaaagcttttacccagtcctcaacactgacaactcataagaggatacataccggtgaaaagccctataaatgtgaagaatgcggcaaagcgtttaatcggtcttctaaactgactgagcacaagaatatccatacaggggagcagccttataaatgcgaagaatgcggtaaagctttcaatcgcagttctaacttgactgagcacaggaaaatccacacagaggagaagccttacaagtgcaaagagtgcggtaaagcattcaaacactcctctgccctcacaacacataaaaggattcacaccggggagaaaccttacaagtgcgaagagtgtggaaaagcatttaaccgcagtagcaagttaacagagcataaaaagctgcacaccggcaagaagccctacaaatgtgaggagtgcggaaaggcatttatacagtccagcaaattgactgagcataagaagatccatagtggagagatcccctacaaatgcgaggagtgtggaaaggctttcaagcacagttcatccctcactacccataaacgcatacacaccggagaaaaaccctacaagtgcgaggagtgcggtaaggcattctcaagatcaagtaaactcacagagcacaaaattatacacacgggcgaaaagccttataaatgcgagcgctgtgacaaggcattcaatcagagcgcaaatctgacaaagcataaaaagattcatacgggggagaaacttcagaactggaacgtctag

SEQ ID NO: 15022 - DNA, 1383 bp, synthetic construct
  source 1..1383: mol_type = other DNA; note = Synthetic coding sequence
atggatagcgaactcatgcacagcattgtgggcagttatcacaaacccccagaacgggtgttcgtgccgtcatttactcagaacgaaccttctcagaactgtcatcctgctaatctcgaggtgaccagccctaagatcctgcattcccccaacagccaggccctgattctggcactcaaaacgcttcaggaaaagattcatagattggagctggagcgtactcaggccgaggataatctgaacatactttcccgagaggccgctcagtataaaaaggctctggagaatgaaactaatgagagaaatctggcacatcaggagctaataaaacaaaagaaggacatcagtatccagttatctagcgcacaaagcaggtgcacacttctggagaagcaattggagtatacaaagcgaatggtgctcaatgtagaacgggagaaaaacatgatcctggaacagcaggctcaattacagcgggagaaggaacaagaccagatgaagctgtacgccaagctggaaaagctcgacgtgctagagaaagagtgtttcagacttactaccacgcagaaaactgctgaggataagatcaagcatctggaagagaaactcaaagaagaagagcaccagaggaagctattccaagataaagcttctgaacttcagacgggcctggaaatcagcaagataatcatgtcctccgtctctaatttaaagcactctaaggaaaagaagaagtcctccaaaaagactaaatgtatcaaacgaaggccgccctggcagatttgctctaaattcggtgccctcccgtttgtagccgaaaaaatgagacagcatcgcgatcctcatatcttgcagaaacctttcaacgtgacagagaccaggtgtttgcccaagcccagcaggactactagttggtgcaaggcaatccctcctgattctgagaagtccatcagtatttgcgacaacctgtccgagcttttgatggccatgcaggacgaacttgatcagatgagtatggaacatcaggagcttctgaagcagatgaaggaaacggagtcgcattcagtctgcgatgacatcgagtgtgagctagagtgcctgcttaagaaaatggaaattaagggagagcagattagtaaattgaaaaagcatcaggacagtgtctgtaagctgcagcagaaagtacagaatagtaagatgtctgaagcaagcggcatacagcaagaagattcatatcccaaaggatctaaaaacatcaagaatagtccacggaagtgcttgaccgataccaaccttttccagaagaactcgtcctttcatccgataagagtccacaacctacagatgaagttgcgcagggatgatattatgtgggagcagtag

SEQ ID NO: 15023 - DNA, 1833 bp, synthetic construct
  source 1..1833: mol_type = other DNA; note = Synthetic coding sequence
atgagccaaacctccctgaaacagaaaaagaatgagcctggaatgcgctcttctaaagaaagcctggaggccgagaagagaaaagaatccgacaaaacaggtgtccggttgtcaaaccagatgagacgcgccgtaaacccaaaccattctttgaggtgctgtccatttcagggccacagttcctgcaggcgatgcctgtgcgcagccgaaggaacagccctgggcccgtgccatacaatcaggatctatatccacatgtgcctgctgtgggagcagggtcagcaaattacaatgatgcgagggtctcaggagagttcacttaggaagactgacagtagggggtatctggttaggtctcaatggtctagaatcagcagatctcccagtaccaaagcgccaagcatcgacgagccacggtctcgcaacaccagcgcaaaattgcccagcagctctacttctagccggacaccttctaccagtccgtcccttcacgattcctctccgcctccactttctggccagccatccctccagccgcccgcttctccacagctgcccaggagtctggattctcggccccccactccccccgagccagaccccggcagtcgacgctcaaccaagatgcaggaaaaccctgaagcttgggcgcagggtatagtgcgggagatcaggcaaactcgcgatagtcagcccctcgagtattccagaacttcccctacagaatggaagagcagtagtcagaggcgcgggatataccctgcctctacacagctcgacagaaattctctatctgagcagcagcagcagcagcgcgaggacgaggatgattacgaagcagcctactgggcatctatgcgctcattttacgagaaaaacccaagctgcagcaggccttggccacccaagcctaaaaacgccatcactattgctctgagtagttgtgccctcttcaacatggttgatggcaggaagatctatgaacaagagggcttggaaaaatatatggaatatcagttaacgaacgagaatgtgattctgacaccggggcccgcctttaggtttgtcaaagcattgcagtacgtgaacgctcggctaagagacctgtaccctgacgagcaggatctgttcgacatcgttcttatgacaaacaaccacgctcaggtcggcgtgaggttaataaattcagtgaatcattacggattgctcattgacagattttgtctcactggtggcaaggacccaataggctatctcaaggcctacctgacaaacctgtatattgctgctgactccgaaaaagtgcaagaagccattcaggagggcatcgcatccgctaccatgttcgatggagcaaaggacatggcatactgtgacacacagctgcgggtcgcgtttgacggcgacgccgtactgttcagtgatgaaagcgaacactttacaaaagagcacgggctagataagttcttccagtacgatacactctgcgaatccaaaccactggcccaggggccgctgaagggattcctggaagacctgggacgactccagaagaagttctatgctaaaaacgagaggctgctgtgccctatacgcacataccttgtgactgcgcggtccgccgcctcctcaggagctcgggttctcaaaaccctgagacgttggggactagaaatcgacgaggctctatttctggcaggagcacccaagagtccaatccttgtgaaaattcgtcctcatatttttttcgatgaccacatgttccacatcgaaggtgctcagagactggggagtatcgctgcatatgggtttaacaaaaaattctcgtcctag

SEQ ID NO: 15024 - DNA, 456 bp, synthetic construct
  source 1..456: mol_type = other DNA; note = Synthetic coding sequence
atgtccaaaaacaccgtgtcctctgctcgcttccgtaaggtcgatgttgatgaatacgatgaaaacaagttcgtcgacgaagaggacggcggcgacggccaggccgggcctgacgagggagaagtggattcatgcctgcgtcaggggaacatgacagctgcccttcaggcagcccttaaaaatcctcctattaatacaaaaagccaggccgttaaggaccgggcgggctccatcgtcctgaaagtgctgatctccttcaaagcgaacgatattgaaaaggcagtacagtccttggataaaaacggcgtggatctgctgatgaagtatatctataaaggatttgagtcaccttcagataatagttcagctatgctgttgcaatggcatgagaaggctctcgccgctgggggcgtgggcagcatagtaagggtgctgactgctagaaaaactgtctag

SEQ ID NO: 15025 - DNA, 3522 bp, synthetic construct
  source 1..3522: mol_type = other DNA; note = Synthetic coding sequence
atggtgaccgtgggtactaatatcctcccatccaggcctgcagcatctgcgaacactgctcgagaagatgcagcacttttctcacgccgcataccgccccgccataagaacggagcagcccagccaggcgccgctcccggaccaggagcgcctggggcaaacatgggtaatgcccactccaaaagcggggaccggcactccgccctgcccggtaggccagaactcagcttctacggttcttttccgagaaaatggagtgaaaacgtgttcctggacaatgagctcttaacctccaagatcttatctgtccttaggcctcagtcagaacggggctttagagctggagatttgagatatccgacccactttttgtcaacaaatagcgtattggccagcgtcaccgcaagcctgaaggagcacccgaggggaacattgctttcagacggttcgccggctttatccaggaatgttggaatgactgtatcacaaaagggaggccctcagcccactccatcccctgccggtcccggcacccagctcggacccataaccggcgagatggatgaggctgatagtgcctttctcaagttcaagcagactgccgatgattccctgagcctgaccagccccaacaccgagtccatcttcgtggaggatccttacactgcttctctgcgttccgaaatcgagagtgatgggcacgagttcgaagccgagagctggtctttagctgtagatgcagcatacgcaaagaagcagaagcgagaagtcgtgaaaaggcaggacgtcctctacgagctgatgcagacagaggttcaccacgtcaggacactgaaaattatgctgaaggtgtatagcagggcactgcaggaagagctgcaattctcatccaaggcaattgggcgactgtttccgtgtgccgatgacctgttggagactcacagccactttctggccagactgaaggagcgacgccaagaatccctggaggaaggaagcgaccgcaattatgtgatacaaaagatcggtgaccttctcgtacagcagttcagcggcgagaatggcgaacgaatgaaggagaaatacggcgtgttctgttccggccataacgaggcagtgagtcactacaagctcctgcttcaacagaacaaaaagttccagaatctgataaagaaaattggtaacttctccattgtgagaaggctcggggtgcaagaatgcattctcttggtgacacaaagaatcacaaagtacccagtgctggttgagcgtattatccaaaatactgaggcaggaacagaggattatgaagacctgacacaggccctgaatctgattaaggacatcatttcccaggttgatgcaaaggtgagtgaatgtgaaaaaggtcagagacttcgggagatagccggtaagatggatctgaagtcctccagtaagctgaaaaacggcctgaccttcagaaaagaagacatgttgcagaggcagctccaccttgaggggatgttatgctggaaaacaacatccgggcgccttaaggacatacttgctatcctcctgactgacgttctcctcctgctgcaggagaaggaccagaagtacgtctttgcctctgtggatagcaagccccctgtgatctctctccagaagcttatagttagggaggtggcgaatgaagaaaaggccatgtttcttatttcggcatcacttcaaggacctgaaatgtacgagatttacaccagcagcaaagaagatcgaaatgcctggatggctcatattcagcgcgcagtagagtcttgccctgacgaagaggagggccccttttctcttcccgaagaggaaagaaaagtggtggaggcgcgagccactagactgcgtgatttccaagagcggttgtctatgaaggatcaactcatcgcccagtctctgttggagaagcagcaaatctatttggagatggctgagatgggaggtctggaggatctcccccaaccgcggggtctttttcgaggcggggatccctccgagaccctgcagggtgagctcatcctgaaaagcgccatgtctgaaatcgaaggcattcagtcactgatttgtcgccagttgggaagcgccaacggccaagccgaggatggtggttcatcaaccggtccgccaaggcgcgcagagactttcgctgggtatgactgtacaaacagcccaactaagaatggtagcttcaagaaaaaagtgtcatcaactgatccacgcccccgggactggagaggaccacccaatagccctgatttaaagctgagcgactctgacatcccaggcagctccgaggaatctccgcaggtggtggaggctcctggaacagagagtgatcccagactgcccaccgtgctcgaatccgagcttgtgcagaggatccaaactctgtctcagctgctgttaaatctgcaggcggtcattgctcatcaagacagctatgtcgaaacacagcgagccgctatccaggagagagagaagcagttcaggctccagagtaccagagggaacctcctgcttgagcaggaacggcagaggaactttgagaagcagagagaggagagggctgcacttgagaagctccagagccagcttcgtcacgaacagcagcgttgggagcgggaacggcaatggcagcatcaggaattggagcgcgctggtgcacgccttcaggaaagagaaggggaagcccggcaactccgggaaagattggaacaagaaagagccgagctggaacgccagagacaagcatatcagcacgacctggaacggctaagggaagctcagagggcggtcgagcgcgagcgggaacgtctggaactgctgaggagactgaaaaagcagaacacggcccccggcgcattgccaccagacacactagcagaagcccaacctccgtcccaccccccttcattcaatggtgagggcttggaaggaccacgagtttcaatgttacctagcggggttggtcctgagtacgcggagagacccgaggtggccaggcgcgactcagcaccgaccgagaatagactcgctaagtccgacgtccccatccaactgctaagcgctactaatcagttccagcggcaggccgccgtacagcaacagataccaacaaagctggcagcatccacaaaggggggtaaagacaagggcggaaagagcagaggctcacaacgatgggaatcatcagcttccttcgacctcaaacagcaattactgctgaacaaattaatgggcaaggatgagtctacatcgcggaatcggaggtcccttagccccatcttgcctgggcggcactctcctgccccacccccagatcctggctttccagctcctagccctcccccagctgattcgccaagcgagggtttctcccttaaagccggagggacagctctgctacccggtcccccagcgccttccccactgcctgccactcccctatctgccaaagaggatgcctccaaagaagatgtgatattcttctag

SEQ ID NO: 15026 - DNA, 1674 bp, synthetic construct
  source 1..1674: mol_type = other DNA; note = Synthetic coding sequence
atggattctacagtgccatctgccttggagctgccccagcgactggcgctgaatcctcgcgaatcaccgcgatctcctgaagaagaagagccccacctgcttagttccctagccgccgtgcagacactggctagcgtgatccgaccctgctacgggccgcacggaagacagaagttcctggtgacgatgaaaggtgaaacggtatgtactggttgcgctacagcaatcttgcgtgctctggaactagagcacccggccgcctggctgcttagagaagcaggtcaaactcaagcagaaaatagcggggacggcactgctttcgtggtcctactcacggaggctctcctggagcaggcggaacagctgttaaaggccggtctgcccaggcctcagctccgagaggcctacgccaccgccaccgctgaagtcttagccacattgccctctctcgcaatccagtcgctggggcctctggaggatccatcatgggcactgcactcagtaatgaatactcatacactttctccaatggaccacctcactaaactcgtggcccacgcctgctgggccatcaaagaactcgacggaagtttcaaaccagaaagggttggtgtctgcgccctgccaggaggtactctggaagatagctgtctcctgcctggacttgctatttcaggcaagctgtgcgggcagatggccacggtactgtccggggcccgcgtcgccctgttcgcctgcccttttggtcccgctcatccgaacgctccagcaaccgcacgcctgagctccccagcggatctagcccaattctcaaaggggtctgaccagctcttggaaaaacaggtggggcagctcgccgctgccggtattaacgtcgctgtggtgttgggagaggtggacgaagagacactgaccttggctgacaaatatggaatcgtggtgattcaggctcgatcctggatggagattatatacttatccgaggtattggacaccccattgctcccacggctcctccctccccagagaccgggcaagtgccagcgcgtctacagacaggagcttggagacggtctggccgtggtgttcgagtgggagtgcaccggcacccctgctctcactgtagtgctccggggcgcaacaacacaagggctcaggtccgcggagcaggccgtttatcacgggatcgacgcctactttcagctatgtcaggatccacgcctcatccccggagctggcgccaccgaaatggccttggcgaaaatgctgtcagataaaggatctagactggaggggccgagtggaccagcttttctagcctttgcttgggcactcaaatatctgcctaagacattagcggagaatgccggcttggccgtgagtgacgtgatggcagaaatgtctggggtgcaccagggtgggaatctgcttatgggcgttgggacagaggggattatcaatgtggcccaggagggtgtgtgggacaccctgattgtgaaagctcaaggcttccgagcagtcgctgaagtcgtgctgcagctggtgaccgtcgatgagatcgtagttgccaaaaagtcccccacgcatcaggaaatctggaatcccgactctaagaagacaaaaaagcacccaccgccagtcgaaacaaagaaaatcctggggctaaacaattag

SEQ ID NO: 15027 - DNA, 939 bp, synthetic construct
  source 1..939: mol_type = other DNA; note = Synthetic coding sequence
atgacgcgctccctgtttaaaggcaatttttggtccgctgatattttgagcacaataggctacgataacattatccagcatctgaataacggcaggaaaaattgcaaagagttcgaagattttcttaaagaaagagctgcaattgaggaacggtatggaaaagacctacttaacttgtcccgcaagaagccctgtgggcagtctgagatcaacacactcaagcgggcgctagaggtgttcaaacaacaggttgataacgtggcgcagtgtcatatccagctggcccagtctttgagggaggaggcccggaaaatggaagagttcagggagaagcagaaactgcagcgcaagaaaaccgaactaattatggacgccatacataagcagaaaagccttcagttcaaaaagacaatggacgccaaaaaaaattacgagcagaaatgccgggacaaggacgaggccgagcaggcagtgtcacgatccgccaatttagtgaatcccaagcagcaggagaaattatttgtaaagcttgccacgtccaagaccgccgtggaggactccgacaaggcctacatgcttcacataggaactctggacaaggtccgcgaggaatggcaaagcgagcacatcaaggcatgcgaagcgttcgaggcgcaggagtgcgagcgcatcaacttcttccgtaacgcactgtggctccacgtgaaccaactcagtcaacagtgtgtgaccagcgatgaacacccctcttgcatgcgcatttcaaccccaccgcgccgaatgcagagccagcaggagagattgcagggcctgacgtggcagggtgaggatccaagccagtttctcaaggctcaccaaatgataccaataacactttggctgatgacaacggtttgctccatctccaagattaatgagacaagagcgttcagcgggtag

SEQ ID NO: 15028 - DNA, 3693 bp, synthetic construct
  source 1..3693: mol_type = other DNA; note = Synthetic coding sequence
atgccaagaaaaggaacgcagccttctactgcgaggagaagagaagaggggccaccccccccttctccagacggcgcctccagcgatgccgagcccgaacctcccagtgggcgaactgaatcacccgccaccgcggccgagacagcatcagaggaactggacaacagatctctggaagagatattaaattctatccccccccccccaccccccgcaatgaccaacgaggccggcgctcctagattaatgattacccatatcgtcaaccagaacttcaagagctacgctggggagaagatactcgggccgtttcacaagaggttcagctgcattatcggacccaatgggagtggaaagtccaatgtgattgattcgatgctgttcgtctttggctacagagctcaaaaaatcagatcaaaaaaactgtctgtactgatacataatagcgatgagcacaaggacatccagagctgcacggtagaagtgcacttccagaagattatcgacaaagaaggggatgactatgaagtgatcccaaacagcaacttttacgtcagcagaactgcatgtagggataatacgagtgtgtatcacatctctgggaaaaagaaaactttcaaggacgttggcaacctcctcagaagccatggcatcgatctcgatcacaatcgatttctgatcctgcagggcgaagtggagcagatagccatgatgaagcctaaaggacagaccgaacatgacgaaggtatgctggagtacctggaggatattattggatgtggtcggctgaacgaacccattaaggtgctctgcagacgagtggagatcctgaatgagcaccggggcgagaaattaaacagagtgaagatggttgaaaaagaaaaagacgccctggaaggcgaaaagaacattgccatcgagttcctcaccctggagaatgaaattttccggaaaaagaaccacgtgtgccaatactacatttatgaactgcaaaagcgcatcgcggaaatggaaacccaaaaggagaaaatccatgaagatactaaggaaattaatgaaaaatctaatatacttagtaatgagatgaaagccaagaacaaagatgtcaaagatacggagaaaaaactcaacaaaattacaaagtttatcgaagaaaacaaagaaaagttcacccagctcgacctagaagacgtgcaggtccgcgaaaaactcaagcacgcgacctctaaggctaagaaactcgagaaacagcttcagaaggataaagagaaggtagaagagttcaagtcaataccggcgaagtccaataacataatcaacgagacaaccactcgtaacaacgccctggagaaggaaaaggagaaggaagagaagaagctaaaggaagttatggattccctcaagcaagagacacaaggacttcagaaggaaaaggagagccgcgagaaagaattgatgggatttagcaagtctgtgaatgaggcgagaagcaagatggacgtcgcacagtccgaactcgacatctacctatcgaggcataataccgctgtgtcccagctgaccaaagctaaagaagcactgatcgcagcttctgagacattgaaagagaggaaggcagccattcgggacattgaaggaaagctgccccagactgagcaggagctgaaagaaaaggagaaggagttgcaaaaactgacccaggaagaaacaaattttaagagccttgtacatgatctctttcagaaggtggaggaggccaagtcctctttagctatgaatcggtcacggggcaaggttttagatgcgatcattcaggaaaagaagtcaggacgaattccgggtatctacggccgcctgggcgatcttggagcaatagatgagaaatacgacgtcgccattagtagttgctgtcacgctctcgattacatcgtggttgactccatcgatatagcccaagagtgtgtaaatttcttgaagaggcagaacatcggcgtggcgacttttattgggctggacaagatggcagtttgggccaaaaagatgaccgaaatccagacccctgaaaatacacccaggctgttcgacctggtcaaagttaaggatgaaaagataagacaggctttctattttgcccttagagacaccctagttgcagacaacttagaccaggccactcgtgtagcttatcaaaaggacagaaggtggagagttgtgacactgcagggccagatcatagaacagtccggcacaatgaccggtggcggctcaaaggtgatgaaaggcaggatgggttcaagtctggtcatagagattagcgaggaagaagtgaataaaatggagtcacaactgcagaacgacagcaagaaggctatgcagatccaggaacaaaaagtccagctggaagaaagagtcgtgaagctgcggcattcagagagggagatgagaaacacattggaaaagtttaccgcgagcattcagaggctaattgaacaagaggaatatctgaacgtccaggtgaaggagctcgaggcaaacgttctggccactgcccccgataaaaagaaacagaaactgctggaggagaatgtttcggcattcaaaaccgaatacgatgccgtggcagaaaaagcaggaaaagtcgaggcagaagtcaagcgattacataacacaatcgtggagatcaataaccacaaacttaaggcccagcaagataagcttgacaaaatcaataagcagctggatgaatgtgcctctgccatcactaaagctcaagtggccattaagactgccgaccgaaacctgcagaaagcccaggattccgtcctaagaaccgagaaggagattaaagacacagagaaggaggtggatgatttaaccgccgagctaaagtcattagaagataaagccgctgaggtggtcaagaatactaatgccgcagagattagcaaaatctccttacatcccattgaagacaacccaatcgaggaaatttccgtgttgtcacccgaggatctggaggcaatcaagaaccctgattccataacaaatcagattgcactcctagaagcgagatgccacgagatgaagcctaacctgggcgccatcgccgagtacaagaagaaggaggagctctatctgcagcgcgtcgcggaactggataaaataacctacgaaagggattccttccgccaagcgtacgaggacttacggaagcagaggctgaacgagttcatggccggattttacataattactaacaagctgaaggaaaattatcagatgttaaccctgggcggtgacgccgaattggaacttgtggactcgctggaccccttttccgaggggatcatgttctctgtgcggcccccaaagaaatcttggaaaaagatctttaatctgtccgggggggaaaaaactcttagcagccttgcactcgtcttcgcactccaccactataaacccacacccctctactttatggatgaaatcgatgctgccttagacttcaaaaacgtatctatcgtggcattctatatctatgagcagacgaagaatgctcagtttatcattatctccttgcggaacaacatgttcgagatatctgacagactcatcgggatctacaagacctataatatcaccaaaagtgtagccgtgaaccccaaagaaatagctagcaagggtttatgttag

SEQ ID NO: 15029 - DNA, 2661 bp, synthetic construct
  source 1..2661: mol_type = other DNA; note = Synthetic coding sequence
atggaactccggtgcgggggactccttttttcatccaggtttgattccggcaaccttgcgcatgtagaaaaagtggaatcactatcctccgatggggagggagtgggcggcggagcaagtgctctgacatctggtatcgcttcctctcccgactacgaatttaatgtttggacccgaccagattgcgcagaaacggagttcgagaatggaaacaggagctggttctatttttctgtaagaggtggcatgcctggcaagctgataaaaatcaatatcatgaatatgaacaaacaatctaagctgtattcccaaggaatggccccctttgtaagaacgcttcctactaggccgcggtgggagcgtatccgagataggcccaccttcgaaatgaccgagacacagttcgtgctgagctttgtccatcggtttgtcgaagggcgcggtgcaacaacgttcttcgccttctgctaccccttcagttattccgactgtcaagaattgctcaaccagctggatcaacgctttcctgagaatcacccaactcactcctcgccactggataccatttactaccaccgtgaactactgtgttatagcctggatgggcttcgagtcgatctcctcactatcaccagctgccacggtctacgggaagaccgggagcctagattggaacaactgtttccggacacctccaccccgagaccttttagattcgcgggcaaaagaatttttttcctgtcctccagggtccatcccggagagactcccagctcttttgtttttaacggctttctggattttatattgcgcccggacgacccacgcgcccagactctgcgtcgactcttcgtgtttaaactgatccctatgcttaaccccgacggggttgtcagaggccactacagaaccgacagcaggggcgtcaatctcaatcgtcagtatcttaagcccgacgctgtgctacatccggctatatacggcgcaaaagccgtgctgctgtatcatcatgtgcacagccgtcttaactcacagtcaagcagcgagcatcaaccttccagttgtctcccaccagacgcacccgtgagcgatttggaaaaagccaacaacttgcagaacgaggcacagtgtggacatagcgctgatagacacaatgctgaagcctggaagcagaccgagcccgcagagcaaaaactgaattccgtttggatcatgccccagcagtctgcaggactcgaggaaagcgcccctgacaccataccgccaaaggagtctggagtggcctactacgtcgacctgcatggccatgcgtctaagagggggtgttttatgtatggcaatagcttcagcgacgaatcaacacaggttgaaaacatgttataccccaaattgatctcactgaacagcgctcatttcgactttcaagggtgtaattttagtgaaaagaacatgtacgcacgggaccggcgtgatggtcagtctaaggaggggagcgggagggtcgctatttataaagccagcgggatcatccattcgtacacgctcgaatgtaactacaataccggcagaagtgttaacagcattccagccgcttgtcacgacaatgggcgggcctcgcctccgcctccccccgcgttccccagccgctatactgtggagttatttgagcaggtgggcagggccatggctatcgctgcccttgatatggcagaatgcaatccttggccccgcattgttctaagcgaacatagcagtctgaccaacttgagggcctggatgctcaagcacgtgaggaatagtcgaggactctcctcaaccctgaatgttggcgtcaataaaaagagagggctcagaaccccgccgaaatcgcacaatgggcttcccgtgtcctgttcagagaatacccttagtcgagccaggtcattttcaactggtacgagcgccggcggctcctcaagttcccagcagaattcgccccagatgaagaatagcccctcgtttccttttcatggaagccggcccgctggtctccctggccttggttccagtactcagaaggtgacccaccgcgtgttgggacctgtaagggagcctcggagtcaggatcgtcgacgccagcagcagcctctcaaccacagacccgctggctcactcgccccctcacccgcacctacatcatcagggcctgccagttcccataagttgggcagctgtttgcttcctgactcgttcaatatccccggcagtagctgcagcttgctcagcagcggagacaaaccagaagccgtgatggtgataggcaaaggacttctcgggacaggggctcggatgccgtgcataaagacaaggctccaagccagaccacgcctcggtaggggaagcccacctactagacgcggtatgaaaggtagctccggaccgaccagtcccactccacggactagagagagctcggaactagagcttggttcttgcagtgcaactccaggtctgccccaggcgcgtccaccccgccctcggtctgcaccagcattttcaccaatttcatgttcactatcagactctcctagttggaattgttactctagggggcctctgggacagccggaagtctgttttgttccaaagtctccccccctcaccgtgagccctagagtgtag

SEQ ID NO: 15030 - DNA, 4221 bp, synthetic construct
  source 1..4221: mol_type = other DNA; note = Synthetic coding sequence
atgtggagcttaaccgccagcgaaggcgagagtaccactgcccattttttcttgggtgcaggggatgagggcctcggcacacgcggcattggcatgaggcctgaggagtcagactctgaactcctggaagacgaagaggacgaagtgccccctgaacctcagatcatagtggggatttgcgctatgacaaagaaaagcaagagcaagcccatgacacagatcctggaacggctgtgccgctttgattatctgaccgtggtcatcctgggcgaggatgtaatactcaatgaacccgtggaaaattggcccagctgtcattgcctaataagtttccattcgaagggctttccgcttgacaaggcggtggcgtactcaaaattgagaaacccattcctgatcaacgacctggccatgcagtattacatccaagataggcgcgaagtgtaccgcattctgcaagaggaagggattgacctaccccggtatgctgtcctcaacagagaccccgcacggcccgaagagtgtaatctgatcgaaggtgaggaccaggtcgaagtaaatggagctgttttccctaaaccgtttgtagagaagcctgtttctgccgaagaccacaacgtttacatctactaccctagttccgccggtggcggatcgcagcggctgttccgaaaaattggttcccgctcatccgtgtactcccccgagagctcggtgaggaagaccggatcgtatatttacgaggagtttatgcccaccgacggtaccgacgttaaagtttacacagtcggacctgattacgcccacgcagaggccagaaagtcgccagcactcgacggcaaagtggaacgggattctgagggtaaagagataaggtaccccgtgatgctgactgctatggagaagttagtagccagaaaagtctgtgtggcctttaagcagacagtctgcggctttgatctgctccgcgctaatgggcatagtttcgtgtgtgacgttaacggtttttcatttgtaaagaactcaatgaaatactacgatgactgcgctaaaatactcggcaacacgatcatgcgggaactcgcccctcagtttcagattccgtggagcataccaaccgaagctgaggacatacctattgtaccgaccacatctggcacaatgatggaactcaggtgtgtcattgccataattaggcacggagacagaaccccaaagcagaaaatgaagatggaggttaaacaccctcggttcttcgctttgtttgaaaagcacgggggctataagactggcaagctgaaattaaaacgccccgagcaattacaggaagtcctcgatataacaaggctgttgcttgctgaacttgagaaggagccgggtggtgagattgaagagaagaccgggaagcttgagcagctcaaaagcgtgcttgaaatgtacgggcatttttctggcattaatcggaaggtccagctgacatactacccccacggcgtgaaggcatcgaatgaagggcaggatccacagagagaaaccctagcaccttctcttctgttggtacttaaatggggcggggagctcactcctgctgggcgcgtccaagctgaagaattaggcagagctttccggtgcatgtatcccggcggtcagggcgattatgccggctttcccggatgcgggttgctgcggcttcacagtaccttccgccatgatttgaagatttatgcttctgacgagggaagggttcaaatgaccgccgcagcctttgctaaagggcttttggccctggagggggagctcacgcccatcttagtgcagatggtcaagagtgctaatatgaatggcctcctggattccgacggcgattcgctctcatcatgtcagcaccgagtaaaggcccgcctccatcacatcctgcagcaagatgccccctttggtcctgaagattacgaccagctggcccctactcgtagtacttcactgctcaactcaatgacaattatacagaaccccgtgaaagtgtgcgaccaagtgttcgccctgatcgagaacctcactcaccaaatccgagaacgtatgcaggacccccgaagtgtggatctgcagctgtatcacagtgaaacactggagcttatgcttcaacggtggtctaagttggagagggattttcgccagaagtcaggccgatacgacatttctaagatcccagacatttacgattgtgtgaagtacgacgtacagcataacggttccctagggttacagggaactgcagaactgctcagattgtctaaggccttggctgatgtggtgatcccgcaggagtatggcataagccgagaagaaaagttggaaatcgcggttgggttctgcctcccgttactgcgcaagattctgctcgatctgcaaaggacgcatgaagacgaatctgtgaacaaactccatcccctgtattcaaggggcgtccttagccctggccgccatgtgcgcacccgtctgtattttacatccgaatcacatgttcacagcctgctgagtgtctttaggtacggcggactacttgacgagacccaggacgcacagtggcagagggctctggactacctgagtgccatctcagaactgaattatatgacccagatagtaatcatgctgtacgaagacaacactcaggatcctctctcggaggagcgcttccacgtggagttacacttcagccccggagttaaaggagtagaggaggagggatccgcccccgccggatgcggtttccgtccagcttcatcagaaaatgaggagatgaaaactaatcagggctctatggagaacctttgtccaggtaaagccagcgacgagcccgatcgcgctctccagacctcccctcagcctccagaagggcctggccttcctcgcagaagtcccttgatcagaaacagaaaagctggctcgatggaagtgctcagcgagactagctcatcacggcctggaggataccggctcttcagtagtagccgaccacccaccgagatgaaacagagcggcctggggtttgaagggtgtagtatggttcccaccatctatccacttgaaaccctgcacaacgcgctgtccctacgacaggtgagtgaattcctctctcgagtgtgccagcgccataccgatgcacaagcccaggcctcagccgctctgttcgactccatgcactcgtcccaggcttccgacaacccattttcaccgccacgcacacttcactcaccgcctctccaactccagcaacggtccgagaagcctccatggttggagaccagattctgccatgtgggtcaagccggactggaactccttactagctctgatttacccgcctctgcgtctcagtctgctggtattaccggcgtgtctcatcgtacccagccggatagttctggaccctcctctaccgttagcagcgctggacccagcagtcccactaccgtcgacggaaactcgcagttcggtttctcggaccagccctcactgaactcccatgttgctgaagagcatcagggcctgggtctgcttcaggagactcccgggtctggggctcaagagctttcaattgaaggagagcaagaactctttgaacccaatcagagcccacaggtgcccccaatggaaacttctcagccctacgaggaagtgagtcagccttgccaggaagtgcccgatatcagccagccatgccaggacatatcagaagccctctcacagccatgtcagaaagtgccagacattagtcaacagtgccaggagaatcatgacaacgggaaccatacttgccaagaagttcctcacatcagtcagccctgtcagaaaagctcgcagctgtgtcagaaggtcagtgaagaagtgtgtcagctgtgcctggagaatagtgaggaagtgagccaaccctgccagggggtgtccgttgaggtaggaaagctggtacacaaatttcatgttggcgtgggctcgttagttcaggagacgttagtggaagttggaagtccagccgaggaaatcccagaggaagtcattcagccatatcaggagttcagcgtggaagtgggcaggttggcacaagaaactagtgcaatcaatcttctttctcagggcataccggagatagacaaacccagccaggagttcccggaggaaattgacctgcaggctcaggaggtccccgaggaaatcaattag

SEQ ID NO: 15031 - DNA, 1308 bp, synthetic construct
  source 1..1308: mol_type = other DNA; note = Synthetic coding sequence
atgggggacctggaattacttctccctggagaagcggaagtcttggtacgtggcctgaggtccttcccccttagagaaatgggaagcgaggggtggaaccaacagcacgagaatcttgagaagttaaacatgcaggctatcctggatgcgacagtgtcacaaggggagcctatccaggaactgctggtgactcacgggaaagtgcctacccttgtggaagaactgatcgctgtcgagatgtggaagcagaaagtgtttcctgttttctgtagggtggaagacttcaaaccgcaaaacacatttccaatttacatggtcgtgcaccatgaggccagcatcataaacctgctagagacagttttttttcacaaggaggtgtgcgagagcgccgaggatactgttcttgacctcgtagactactgtcaccggaagcttactctcctggttgcacaatcaggctgcggaggtcccccagagggagagggatctcaggattccaatcccatgcaggagctgcagaaacaggctgagctaatggaattcgaaatcgcattaaaggccctctcggttttacggtatataaccgattgcgtcgacaggcagtggtctgtgtcacagccgccacagctagctcatctgaagaggattcaacgcttacatccggtgtgctggttcttgagccccggcaagcttcaacaatttgaaggttcccgctggcacactgttgcaccatccgaacagcagaagcttagcaagctggacgggcaagtgtggatagccctgtataacctgctgctgtctcccgaggctcaggccaggtattgcttaacctcatttgcaaagggtaggctcctgaagctgcgagcattcctcacggataccttgctggaccagcttccgaacctagcccatttgcagtcattccttgcccacttgaccctgaccgaaacccagccccctaagaaggacctagtgctggagcaaatcccggaaatctgggagaggctagagcgggagaatcgcggaaagtggcaggccattgccaagcatcagctccaacatgtgttctccccaagcgaacaagacctaaggctacaagccagacgatgggctgagacctacaggctggatgtcttggaggctgtggccccggaaagaccccgctgtgcctactgcagcgccgaggcctccaaacgttgcagtcgatgccagaacgagtggtattgctgtagagaatgccaggtgaaacactgggagaaacacggcaaaacatgcgtgctcgctgctcagggagatcgggccaaatag

SEQ ID NO: 15032 - DNA, 1377 bp, synthetic construct
  source 1..1377: mol_type = other DNA; note = Synthetic coding sequence
atgaacgaggccatggcaacggactcgccccggcgacctagtcgctgtacaggaggagtagtagtcaggcctcaggctgtgacggaacagagctatatggaatccgtggtcacatttctgcaggacgtagtgccacaggtttattgctgtggggacaacattcagtcatacacagcaacagtgatcagcgccgccaagaccctcaagtctggcctcaccatggtagggaaggtcgtaacccagttgacaggcacactcccatccggagtgaccgaagacgacgtcgccatacatagcaattctcggaggagtccattagtgcccggtatcatcacagtcattgatactgaaacagtcggtgagggtcaggtattggtgtcagaagacagcgatagtgacggaatcgtagcgcactttcccgctcacgaaaagcccgtttgttgcatggcctttaacacttctggcatgctcctggttacgaccgacacgctggggcatgacttccatgtgttccagatcctcacccacccttggtcaagctcccaatgcgccgtgcatcacctgtatacacttcacagaggagagactgaagccaaagtccaggatatctgtttttcacacgattgtaggtgggttgtggtgtcaactctacgtggaacatcacacgttttcccgatcaacccgtacgggggtcagccttgtgttagaacgcatatgagccctagggtagtgaaccgaatgagccggttccagaaatcagccggcctggaggaaattgagcaggagctcacatcaaaacagggagggcgttgtagtccagttcctggactgtctagtagcccctccggctcaccccttcacggcaagttgaatagccaggactcatataacaatttcaccaataataatcccggcaacccaaggctgagtccactacccagtttgatggtggtcatgcccttggcccaaatcaaacagccaatgacgctgggtaccatcaccaagcgcacaggcaaagtcaagccccccccgcagataagccctagcaagagtatggggggggagttctgcgtggctgctatttttgggacatcacgatcctggttcgctaataatgcggggctcaagagggagaaggatcaatccaagcaggttgttgttgagagcctctacataatcagctgctacgggacgctagtagaacatatgatggagcctcagcctctgaacggtatgaactgcagtcatcgcttgatgcagaccaccctgtgcagctctctccagatgcagtactctatcatcagctcctgcttgctggcttggttcccacttgaggtattgggtcctctgcttgacatgggcttgacaactgtctag

SEQ ID NO: 15033 - DNA, 309 bp, synthetic construct
  source 1..309: mol_type = other DNA; note = Synthetic coding sequence
atgcgagcgtcaccctgcatctcacagcccgccgctagttggcaccctcggccgtccgccctgcgaccaacagccggatccgggcctgatactcgtactcctggaacggtcgaagacgggtccgctccttgccctgctttcagaagtcccgcagttagcccgtgtggggaggagccgtgttgttttcagatctctccagctgaggaaactttggaactggggcgactggtaagtcccggctgccataagtctagcgcccctcaggaaaggagactggaccctagagccagatgcgtggtacacatatag

SEQ ID NO: 15034 - DNA, 4227 bp, synthetic construct
  source 1..4227: mol_type = other DNA; note = Synthetic coding sequence
atgtggtcgctcacggcatctgagggtgagtcaactaccgcacattttttccttggcgctggggatgaggggctgggcacccgtggtattggtatgaggcctgaggagtctgacagcgaactactcgaagacgaagaagatgaggttccaccagagccccagatcatcgtggggatttgtgccatgactaagaagagtaaatcaaagcccatgactcaaattctggagcgcttgtgcagattcgactacttaacagtggtaatcctcggggaagatgttatccttaacgagcctgttgaaaactggccaagctgtcattgtctcatttcattccatagcaagggtttccccctggacaaggcagttgcatactccaagctgcggaaccccttcctaattaatgatttggcaatgcagtactacatccaggacagacgtgaggtgtataggattcttcaagaggaagggatcgacctgccgcggtacgctgttttgaatcgggatccggcacgtcccgaggaatgcaacttgatcgaaggtgaagatcaggtggaggttaacggagctgtgtttcccaagccttttgtggagaagccagtcagcgcagaagaccacaacgtgtatatatactatcccagcagtgccggaggaggatctcagcggctctttaggaagattggcagtcgctcgtcagtgtattctcctgagtcttctgtgagaaagacaggttcatacatttacgaagaattcatgcctacagatggcaccgatgttaaagtgtacaccgtgggccccgattatgcacatgcggaagctcgtaagtcccctgccctggacggcaaagttgaacgcgatagcgaaggcaaagagatccggtaccccgttatgctcacagccatggaaaaattagtggccagaaaggtctgcgttgctttcaaacagacagtatgtgggtttgacctcctgagagcaaatggccactcttttgtctgtgacgttaatgggttttctttcgttaaaaactccatgaagtattacgatgattgtgcaaagattttgggaaacacaattatgcgcgagctggcccctcagtttcagatcccatggtctattccaaccgaagcagaggacatacccatagtgccgactacatctggaacaatgatggaactgcgctgtgtgattgctatcatcagacacggagacagaacacccaaacagaaaatgaaaatggaagtgaagcatcccagatttttcgcgctgtttgagaaacacggcggctacaaaaccgggaaacttaagctaaagcgccctgagcagctgcaagaggttctggacattacaagactgctcctggccgaactggaaaaggaaccaggtggtgagatcgaggagaagaccgggaaacttgagcagttaaagagcgtgctagagatgtacgggcatttttccggcatcaacagaaaagtgcaacttacatattacccgcatggagtcaaagcgtctaatgaaggacaagatccacagagggagaccctggccccaagcttgctgctggtgttgaagtgggggggagagctcaccccggcaggtcgcgttcaggcagaggaactggggagggcatttaggtgcatgtatccgggagggcagggggattatgccggattccccggttgcgggctgctcagattacactcaactttcagacacgatctgaaaatatacgcatcagatgaggggcgggtgcagatgactgcggctgcttttgctaaaggactcctcgctcttgaaggagaactgacgcccatcctggtgcagatggtcaaaagcgccaacatgaatgggctcctggactcggacggcgactcactctcttcatgccagcacagagttaaggctagacttcaccacattttgcaacaggacgctccgttcggacccgaagactacgaccaacttgccccaacccgctcaacttccctgttaaactccatgaccataattcaaaatcccgtcaaggtgtgcgatcaagtgtttgccctcatcgagaacctgactcatcagataagggaaaggatgcaagaccctcgatctgtcgatctccaactatatcattcggaaacacttgagcttatgctccagcgatggagcaagttagaacgagactttcgacagaaatccgggaggtatgatataagtaaaattcctgacatttacgattgtgtgaagtatgacgtccagcataacggcagtctggggctgcagggaactgcagaactgctgcgcctaagcaaggcgttggccgatgtggtcattccccaagagtacggtattagccgagaagagaagctggaaatcgctgtgggcttctgcctgccattattgaggaaaatcctgttggatctccagcgtactcatgaggatgagagcgtgaacaaactgcacccattgtacagccgtggggtcctctctccaggcaggcacgtgcgaactaggctctacttcacaagcgaatctcacgttcacagcttgctgagtgtgtttagatatgggggactcctggacgagactcaggacgcccagtggcaacgagccctggattacttatccgcgattagtgaactcaattatatgacgcagatcgtcattatgttgtacgaggataatacacaagaccctctgtcagaggaacgattccacgtagagcttcattttagccctggcgtaaagggggtggaggaagagggcagcgcacccgccggatgcggatttcgccctgcatcctcggaaaatgaagaaatgaaaactaaccagggatccatggagaacctgtgccctggaaaggcaagcgacgagccagaccgggccctgcagacctcgccacagccccctgaagggccggggctgccccggagatcacctctgatcagaaacagaaaggccggatctatggaggtcctgtccgagaccagctcttcacggccaggcgggtatagactgttctcatcatctcggccacccactgagatgaaacagtcaggattggggtcccagtgtacaggactgttttcaactacagtgcttggcggaagctcctctgctcctaacttgcaggattacgcacgctctcatggcaagaagctgccccccgccagcctaaagcatagggacggatttgagggttgctccatggtacccaccatctatccattagagacactgcataacgcgctatccttaaggcaagttagcgagtttctgagcagagtgtgccagagacataccgacgcacaggctcaggcctcagctgctctctttgattctatgcacagcagccaagcatctgataacccattcagcccaccaaggaccctgcacagtcctcccctgcagctgcagcaacgctccgagaaaccgccatggtactcctcaggcccgtcctccactgtgtcctcagctggcccttcctcacccaccaccgtggacgggaatagccagtttggcttttcggaccagccaagcctgaatagtcatgtggctgaagagcatcagggactggggctgctccaagaaacccctggctccggtgcccaggagctgagcatagaaggtgagcaagaactgttcgaaccaaatcagtccccacaggtgccgcccatggaaacaagccagccgtacgaagaagtcagccagccctgtcaagaggtccccgatataagccagccatgccaagatatctctgaggccttgtcccaaccgtgccagaaggttccagacatttctcagcagtgtcaggagaatcacgataacggtaaccatacctgtcaggaagtgccacacatctcacagccatgccagaagagttcgcagctctgtcaaaaagttagtgaggaagtgtgccagctgtgtctggagaattctgaggaagtgagtcagccctgccagggggtgtccgttgaagttggcaagctggtccataaatttcacgttggcgtggggtctttggtgcaggagaccctagtcgaagttgggtccccagccgaagaaattccagaagaagtgattcaaccgtaccaggagttctcagtagaggtggggcggttggctcaggaaacctctgcaattaacctgttgtcgcagggaattcctgaaattgacaagccaagtcaagaatttcccgaggagattgacctgcaggcgcaggaggttcctgaggaaatcaattag

SEQ ID NO: 15035 - DNA, 2994 bp, synthetic construct
  source 1..2994: mol_type = other DNA; note = Synthetic coding sequence
agaccacccccagccggtcctcaggcccccgagggcgccagagccggttcccgtcctgttcaattgctggccctcttgagctcctggtgtgaagagctggggcgattgcttcttctccgacatcagaagagtcgacaaagcgatcctccgggaaagctccctatgcagcctcccctgagcagtatgtcttcgatgaaacctacactgtcccatagcgacggtagcttcccgtacgatagtgtgccctggcagcagaacacaaatcagccccctggtagtctgtctgttgtcactacagtttggggagtgactaacacttcccagagccaggttctggggaacccgatggcaaatgctaataaccccatgaatcctgggggcaatcccatggcaagcgggatgacaacatccaacccggggctaaactcccctcagttcgctggtcagcagcagcaattcagcgccaaggctgggcctgcccagccctatatacagcagtctatgtatggtcggccaaactatcccggaagcggtggcttcggcgcaagttaccctggtggaccaaacgctcccgcagggatggggataccgcctcacactcggcctcctgcagatttcactcaacctgccgcggcagccgccgctgcagctgtagcggccgccgccgctacggctacagccaccgctacagcgacggtggccgccctgcaagagactcaaaataaggatattaaccaatatggcccaatgggccccacccaggcttataatagccaattcatgaatcagcccggtcccagggggcccgcttctatgggaggatcaatgaaccctgcaagtatggccgctggtatgaccccgagcggcatgtcaggaccacctatgggaatgaaccagcctcgaccccctggaatcagcccttttgggacacacggccagcggatgccacagcagacctatcccgggccaagaccccagtcactccccatccagaacatcaagaggccatacccaggcgaacccaattacggcaatcagcagtacggaccgaatagtcagtttcccacccaaccaggtcagtatcccgctcctaatccaccgaggccactgacctctcctaactatccaggtcaaagaatgccctctcagccctcaagtggtcaataccctcctccgaccgtcaacatgggacagtactataagcccgaacagtttaatggtcaaaacaacacatttagcggctcctcatactccaattattcgcaggggaacgtgaatcgccccccccgaccagtcccagtggctaattacccccattccccggttcccggcaatccaacccccccgatgacacccggtagctcgataccaccctacctctcaccatcacaggatgtgaagccaccgttccctcccgacatcaagcctaacatgagcgcccttccgcctccaccagccaatcacaatgatgagttaaggctaacattccccgtacgcgatggggtggtcttggaaccattccggctagagcacaatctcgctgtgtccaatcatgtgttccatctacgccccactgttcaccagaccctcatgtggaggagtgacctcgagctgcaatttaaatgttaccaccatgaagatcgtcagatgaacactaattggcccgcaagcgttcaggtctccgtgaatgccacacccctcaccattgagcggggagacaataagactagccacaaaccactccacctgaagcacgtgtgtcagcctggacgtaataccatccagattactgttacagcttgctgctgctcacacctcttcgtgctgcagctggtgcaccggccatcggtgaggtccgtcttacagggtctccttaaaaagaggctcctgccagctgagcactgcatcacaaagatcaaacgcaatttttcttcagttgcggcctcctccggcaatactaccctcaatggtgaggacggggttgagcaaacggcaatcaaggtgagcctgaaatgccccatcacttttcgccggatacagctccctgctcgcggtcatgattgcaagcacgtacagtgcttcgatctagaatcctacctccaacttaactgcgagcgaggcacttggcggtgtcccgtgtgcaataaaactgccctgttggaaggcttggaagtggaccagtacatgtggggaatcttgaacgcaatccaacatagcgaattcgaagaggtaactatcgacccgacctgctcttggcggcctgtgccaatcaaatccgatctccatattaaagacgacccagatggcataccatccaaacgtttcaaaacaatgagcccaagccagatgattatgccgaatgtgatggaaatgattgccgccctgggccccggcccaagtccatacccgctacctccccccccaggaggaaccaactccaacgactacagcagccagggtaacaactatcagggccacggaaattttgacttcccgcatggtaatcccggcgggacatcaatgaacgattttatgcatggtcctccccagctaagccatccacccgacatgcccaacaatatggcagccctcgagaagcccctgagccaccccatgcaggagacgatgccccacgcgggctccagcgatcagcctcacccctctattcaacagggcctccacgtgccacatcctagcagccaaagtggcccccccctgcaccacagcggcgccccccctcctccacccagccagcccccaaggcagccccctcaggcagcaccttcctcccatccacatagcgatttaactttcaaccccagtagtgcacttgaggggcaggcaggcgcccagggggcttctgatatgccagagcccagcttggatctgcttcctgaacttaccaaccccgatgaactgctctcatacctggatccgcctgacctccccagtaacagcaacgatgatctattaagcctcttcgagaacaactag

SEQ ID NO: 15036 - DNA, 3405 bp, synthetic construct
  source 1..3405: mol_type = other DNA; note = Synthetic coding sequence
atgggcaaggagcaggaactcctggaggccgcccgtacaggccatctgcccgctgtggagaagctactctcgggcaaaagattgtcatccggtttcgggggaggcgggggcgggggatcaggcggaggggggggtggcagcggcgggggcggaggcggcttgggaagttccagtcatcctctatcatcgcttctgtccatgtggaggggtcctaacgtaaattgtgtggactccactgggtacacacctttgcaccacgccgctctgaacggacacaaggacgtcgtggaagtgttgctacggaacgacgcgctgaccaacgtggctgacagtaagggctgctacccactgcacctcgccgcctggaagggggacgcacagattgtccgactgttaattcatcagggcccctctcatactagagtgaacgaacagaataacgacaacgagaccgccctccactgtgccgcgcagtatggccacaccgaggtggtaaaagtcctactggaagagctgacagatccgaccatgcggaataataaattcgagaccccactggaccttgcagcactctacggccggcttgaggtcgttaagatgctgctgaacgctcatcctaacctgcttagctgtaataccaaaaagcatacacccctgcacctggccgcccgaaacggccacaaagctgtggtgcaagtcctgctggacgcaggcatggattccaactaccagacagagatgggctcagcgctgcacgaagcagctctgttcgggaagaccgatgtcgtccagatcttgctggccgcaggaacagatgtgaacattaaggacaaccacggcctaacagccttagacacagtacgcgagctcccttcacagaaatcgcagcagattgctgctctgatagaagatcacatgacagggaaaagatccaccaaggaagtagacaagaccccgcctcctcaacctcccctgatctccagcatggattcgataagccagaaatcgcagggagacgtagaaaaggcagtgaccgaactaatcatagacttcgacgccaacgctgaggaagaggggccctacgaagccctatacaatgcaatctcatgtcacagcctggattctatggcctcaggccgctcatcggaccaggacagcactaataaagaggcggaggccgccggtgtgaaaccagcaggtgtgaggcctcgggagcgacctccccctccggccaaacctcccccagatgaagaagaagaggaccacatagataaaaagtacttccctttaacagcgtctgaggtgctgtcaatgagacctcgtatacatggatcagccgccagagaagaagatgaacacccatacgagctattattgactgctgagacaaagaaagtcgtgctggtggacggtaagacaaaggaccaccgaaggagttcttcctcccgaagccaagatagtgccgaagggcaggatggtcaggttcctgagcagttctccggccttctccacgggagtagcccagtttgtgaggttggacaggacccattccagctgttatgcactgccggccagagtcaccccgacgggtctcctcaacagggtgcctgtcacaaggccagcatgcaacttgaagaaactggcgtacacgcacccggggccagtcaaccctctgctctggaccaatccaaacgggtcgggtacctcactggactgccgactactaattccagatcccaccccgagaccctgacacatactgctagtcctcaccccggaggagccgaagagggagatcgttcaggcgccagatccagagcgccgcctacctccaagccaaaagctgagttgaagctatcaaggtctctctccaaaagcgactccgacctcttaacgtgttcgcccaccgaagacgccactatgggtagtcgttccgaatctctgagcaattgttctatcggtaagaagcgcctcgaaaaaagtccctccttcgcgtctgaatgggacgagatagagaagataatgagttcaatcggagaagggatcgacttttcccaggaaaggcagaaaataagcggactccgaacacttgaacagtccgtgggcgaatggttggagtccattggactgcagcagtatgagtctaagctcctgctcaacgggttcgatgacgtccatttcctgggaagcaacgttatggaggaacaggatctgcgggacattggcattagcgatcctcagcatagaagaaagttgctccaggctgcacgatctctgccaaaagttaaggctctcgggtacgatggcaattcaccaccatctgtgcctagctggctggattctctcggtctgcaggattatgtgcattcctttctgtcctcaggatacagcagcattgacaccgtgaaaaatctctgggaattggaactcgtcaacgtcctcaaagttcagctgctggggcacaggaaacgcataatcgcctcccttgccgaccgaccctatgaagaacccccccagaagcccccacggtttagccagctgcggtgtcaggatctgctgagccagaccagcagcccactcagtcagaacgattcttgcacgggtcggagcgccgacctgctgctgccacctggagacaccggcagaagacgtcatgactccctgcatgacccggccgctccttcccgcgctgagaggtttaggatccaggaggagcatcgtgaggcaaagctcaccctccgcccccccagcctcgctgccccgtatgccccagtgcagagctggcagcatcagccggagaaactcatatttgagagttgcggctacgaagctaactatttggggagcatgctcatcaaggatctgcgcgggaccgaaagcacgcaggatgcctgcgctaagatgcgcaagagtacggagcatatgaagaaaattcctactatcattctaagcatcacctataaaggggtaaagttcatagatgcaagtaacaaaaacgtgattgccgaacatgaaatccgtaatatcagttgtgccgcccaggacccagaggacctgtgtacatttgcctacatcacaaaggacttacaaacatcccatcactactgccacgtattctcgactgtcgacgttaacctgacctatgaaatcattctaacccttggccaggcctttgaggtggcttatcaactcgcccttcaggctcagaagtcacgtgcaaccggggccagcgcagctgagatgatagagaccaaatcatcaaagcctgtgcctaagcctagggtgggggtaagaaagtccgcacttgagccacccgacatggatcaggatgcccagtcacacgccagcgtcagctgggttgttgaccccaagccggacagcaaacggtccctatccaccaactag

SEQ ID NO: 15037 - DNA, 3099 bp, synthetic construct
  source 1..3099: mol_type = other DNA; note = Synthetic coding sequence
atggaagcagcagccgcagtggtagcagcagaggccgaggtggaaaacgaggatggggactcaagctgcggtgatgtttgtttcatggataagggtttgcaaagcatcagcgagctgtcactggacagcactttgcatgccgtgaacctgcattgtaacaacatctcgaagatagaggccatcgaccatatatggaatctccaacacttagatttgagttctaatcagatctccagaattgaaggcctgaacaccctcacaaagctgtgtactttaaacctttcttgtaatctgattacaaaggtcgaaggcttagaggagctgatcaatctgacccgtctgaatgtttcttataaccacatagacgatctcagcgggctcatccccctgcatggaattaagcacaagctgcgatatatagacctgcactctaatcgtatagatagcatacaccacctgctgcagtgcatggtcgggcttcacttccttacaaatctgattctagagaaagatggagatgataatcccgtgtgcagactccctgggtatcgcgccgttattctgcagacgctgcctcagctccggattctcgactgcaagaatatcttcggggagcccgtgaatctcaccgagattaactcttcacagctgcaatgtcttgaaggtcttctggataatcttgtttcaagcgattccccactgaatatctccgaagatgagatcattgacagaatgcctgtgattacagcccctatagacgagctggtaccactcgagcagtttgccagcactccttctgacgccgtacttaccagcttcatgagcgtgtgccaaagtagcgaacccgagaagaataatcatgagaacgacctgcagaatgagatcaagctgcagaagctggatgatcagatcctgcaactgcttaatgagacatccaacagcatagataacgtattggagaaagacccccgtcctaagcgagatactgacatcacctcagagtctgactatgggaatcgcaaagaatgcaataggaaagtaccgcgccgctcaaaaatcccttacgacgcaaagacaatacaaactatcaagcatcacaacaaaaattacaattcatttgtcagctgcaaccggaaaatgaaacctccttatttgaaggagctgtatgtaagctcctcgctggcaaattgtcctatgttacaggaatccgagaagccaaagacggaaatcatcaaggtagaccagagtcactccgaagacaacacttaccagagtctggtagagcagctcgatcaggagagagagaagagatggagagccgagcaagccgagaacaaactgatggattatatcgatgagctgcacaagcatgccaacgaaaaggaggacatacattccctcgccctgctgactaccgataggctgaaggaaatcatttttagagagagaaatagtaaaggccagctggaggttatggtgcataaactccagaacgaaattaagaaactcactgtggagttgatgaaagccaaagaccagcaggaagaccatctcaagcatctgcggacactagagaagaccctggagaaaatggaaagacagaagcgccagcaacaggccgcacaaattaggttgatccaggaagtcgagctcaaagcctcggctgctgaccgcgagatctacctgctccgcactagccttcatcgagagagagagcaagcacaacagctgcaccaactgctagccctgaaggagcaggagcaccggaaagaattagaaacgcgagagttctttactgatgcagatttccaggacgccctggctaaagagatagccaaggaggaaaaaaagcacgaacagatgataaaggagtatcaggaaaaaattgacgtgctcagccaacagtacatggatctagaaaacgaattcaggatcgcactgactgtagaagcacgcagattccaggatgtgaaagacggattcgagaatgtggcgactgagctggctaaaagtaaacatgccctgatctgggcccagcggaaggagaacgaatcaagctctcttatcaaggatctcacctgcatggtcaaagagcagaagaccaagctcgccgaggtttccaaactgaagcaggagacagcagcgaacctccaaaatcagattaacactctggaaatactgattgaggacgataaacaaaaaagcattcagattgaactcctgaagcatgagaaagttcagttaatcagcgagcttgcagctaaagagtcccttatttttggcctcagaaccgaacgcaaagtctggggtcacgagctggcccaacagggatcctcactcgctcagaatcgggggaagttggaagcacagattgaaagccttagccgagagaatgagtgtctccgcaaaactaatgagagcgacagtgatgctttgaggattaagtgcaagattatcgacgatcagacagaaacgattagaaaactcaaggactgtctccaggagaaagatgaacatattaaacggctccaggaaaagatcaccgagatagagaaatgcacccaagagcagttggatgagaaatcttcccagttagacgaggtactggaaaaacttgaacggcacaacgagaggaaagaaaagctcaaacaacagctcaaaggaaaagaagtggagctagaggagatcaggaaggcttattcaacactcaatcgcaagtggcatgataagggagagctactatgccatctcgagacgcaggtgaaggaggtgaaagagaagtttgagaacaaggaaaagaaactgaaagctgagcgggataagtcaatcgagctgcagaaaaacgccatggagaagctacactctatggatgacgcttttaagcgacaggtggatgccattgtggaagcacatcaggccgaaatagctcagctggccaacgagaaacaaaagtgtatcgacagcgccaatctgaaagtgcatcagattgagaaggaaatgcgtgaacttttagaggaaacgtgcaagaacaagaaaactatggaggcaaagatcaagcaacttgcgttcgctctcaatgagattcagcaggatatgtag

SEQ ID NO: 15038 - DNA, 219 bp, synthetic construct
  source 1..219: mol_type = other DNA; note = Synthetic coding sequence
atgagctatcagcagcagcagtgcaaacagccatgtcagcctccgccggtgtgcccaacgccaaaatgcccagaaccatgcccacctccaaagtgtcctgagccctgtcctagcccgaaatgtccccaaccttgtccccctcagcagtgccaacagaagtatccacctgtgacaccctcacccccctgccagcctaagtgcccgcccaagtccaagtag

SEQ ID NO: 15039 - DNA, 888 bp, synthetic construct
  source 1..888: mol_type = other DNA; note = Synthetic coding sequence
atggaactcattcaagatacctctcggcctcccctggagtacgttaagggcgtacctcttataaaatatttcgccgaggccttaggacctctgcagtcttttcaggccaggcctgacgatttgcttatcaatacctatcctaagtccggcaccacttgggtatcccagatcctggatatgatttaccagggaggtgacttagaaaagtgtaatcgagcccccatctacgtcagagtgcccttcctcgaagtgaatgaccccggggaacccagcggcctagagacgcttaaggacacgcctcccccaaggctaatcaaaagtcacctgcctctcgccctacttccccagactctgctcgatcagaaggtgaaggtcgtctatgttgcccgcaaccctaaagatgtcgcagtatcatattaccatttccatcgtatggagaaggcacaccccgaacctggcacgtgggattcgtttctagagaagttcatggcgggcgaagtaagctatgggtcgtggtaccagcacgttcaggaatggtgggaactgagtcggacccatccagtgctgtaccttttttacgaagatatgaaggaaaatcctaaacgggaaattcagaagatcttagaattcgtcggtcggtccttgccagaggagacgatggacttcatggtgcagcatacatcttttaaagagatgaagaaaaatcccatgactaactataccactgtgccccaggagctcatggatcacagcatatctccctttatgagaaaaggaatggcgggggactggaaaaccactttcacagtggctcagaatgaaaggtttgatgccgattacgctgagaaaatggctggctgctccctgagtttcagaagtgaactctag

SEQ ID NO: 15040 - DNA, 1491 bp, synthetic construct
  source 1..1491: mol_type = other DNA; note = Synthetic coding sequence
atgaagctgggtaaaaaaccaatgtacaaacctgtggatccctactcacggatgcagagcacttacaattataatatgagaggaggggcttaccctcctcgatacttctaccctttcccggtgccgcccctcctgtaccaggtcgaattgtcagtgggggggcaacagttcaatggcaagggcaagaccagacaggcagctaaacacgacgctgctgccaaggcattgcgaatcctgcaaaacgaaccgctgccggagcgcttagaagtgaacggtcgcgaaagtgaggaagaaaatctgaataaatctgaaatttctcaggtgttcgaaattgcactaaagcggaaccttcctgtcaatttcgaggtcgcacgtgaaagcggcccaccccacatgaagaatttcgttacaaaagttagtgtcggcgagtttgttggagagggcgagggaaagtccaagaaaatctcaaaaaagaacgcagccattgcagtgttggaagaattaaagaagctcccgcccctacccgctgtagaacgagtgaaacctaggataaagaaaaagacgaagcctatcgtgaagccccaaacgagcccagagtacggtcagggtattaatccaataagcagattagcccagatccagcaggcgaagaaggaaaaggaacctgaatatacactgctcacagaaagaggccttcctcgaaggcgggagttcgtaatgcaggtcaaggtgggcaatcacactgcagaaggcaccggcacaaacaagaaagtagcaaaacgtaacgctgcagagaacatgctggaaatactgggattcaaagtgccacaggcccagccaacaaagccagctctgaaaagcgaagagaagactcctataaaaaaaccgggagatggcaggaaagtgacgttttttgaacccggttcaggcgatgagaacgggactagtaacaaggaggacgagtttcgcatgccctatctctctcaccagcagttgcccgcaggaatcctgcccatggtgcctgaagtcgcccaggcagtgggtgtcagtcaggggcatcacaccaaagatttcacacgtgcggctccaaatcctgctaaggccaccgtcaccgctatgatcgcgagagagttgctctatgggggcactagtccgaccgccgagacaatccttaagaataacatttcctccggacatgtgccccatggtcccctgacacgtccttccgaacaattagattacttaagccgggtgcaagggttccaggtggagtacaaggactttcctaagaataataaaaatgagttcgtgagtttaatcaattgctcctcccagcctccgctaatttcccatggtatcggaaaagacgtggaatcctgtcacgatatggccgccctaaatattctgaagttactgagcgagctggaccagcagagcacggagatgccaagaacaggtaacggcccaatgagcgtgtgtggcagatgctag

SEQ ID NO: 15041 - DNA, 1575 bp, synthetic construct
  source 1..1575: mol_type = other DNA; note = Synthetic coding sequence
atgtcctcatgtgtgagcagccagcctagttcaaatcgggccgctccccaagacgagctggggggccgtggcagttcttctatacatctcggcatggagtccttcattgtggtcacggagtgtgagccaggttgcgctgtcgatttgggcctggcccgggatcgccctctagaagccgatggtcaagaagtgccgctggacacaagtggcagtcaggcaagacctcatctatctggacgcaagctgagcctgcaggagagaagccagggaggccttgcagccgggggtagccttgacatgaacggtcgctgtatttgtcccagcttgccctattccccggtatcatcgccccaatcaagtccccggcttccacggcgaccaaccgttgagtcacatcacgtgagcatcacgggaatgcaggactgcgtgcagttgaatcagtatactcttaaggacgagatcggaaaagggtcttacggtgtggtgaagttggcctataacgagaatgataatacctattacgccatgaaagtgcttagcaaaaaaaagctgattcgccaggccgggttccctagacgccctccgcctcgaggaactagacctgcccccggcggctgtatccagccgcggggccctatcgagcaggtctaccaggaaatagccatactgaagaaactcgatcacccaaatgtagtgaagctcgtggaagtgctcgacgatccaaacgaggatcacctctatatggtgttcgagttagtaaaccagggcccagtgatggaagtccccaccttgaagccgctgtcagaggatcaggctagattctactttcaggacttaattaaggggatagagtacctgcactaccagaaaataatacaccgcgatataaaacctagcaaccttctggtcggggaggacggacacatcaagatagctgacttcggcgtgtcgaacgagttcaagggatctgacgccttattatcaaatacggtcgggactccagccttcatggcccccgagagccttagcgaaacccggaagattttctccggaaaagcactggacgtctgggctatgggagtcacgctttactgcttcgtgttcggtcagtgtccctttatggatgagcgaataatgtgtctacactcaaagattaagtcacaagccttggaattccctgaccagccggacattgctgaagaccttaaagacctcattacccgaatgctagataagaatcccgagtcgcgcattgtggtcccggagattaaacttcatccatgggtgactaggcacggggcagagccactgccatcagaggatgagaactgtacacttgtggaggtaactgaggaggaggtagaaaactcagttaagcacatccccagtctcgctactgtgattttggtgaagacaatgataaggaaacgatcatttggcaatccgtttgaaggtagtagaagggaggaacggtccctgagtgctccggggaaccttctgaccaagcagggatcagaggataatttacaggggacagacccaccccccgtgggggaggaggaagtcctcctgtag

SEQ ID NO: 15042 - DNA, 1902 bp, synthetic construct
  source 1..1902: mol_type = other DNA; note = Synthetic coding sequence
atgaaggccattaagaagagcctgacagaagaggaatatctttatctggatttcagtcaccagactgagggatgcatcttcccactacatacatcagtgaccttgttcttgctctcttactgcgactgcaaaatattcaagatttgccttgtggtgactaaagaagtatctcgtgattcgtctctcctcagggacgacctcatccaggatgtggaaatccaaattatttcaagacaggaactgcctccaatagtccagaactgctgcttgcccgccgttgtcgaaagatctgataatttctgtagggctgggctggcagtggtgctgcgccatattatacaaaagtcctatgaggccgacccactgaaaaaggaactgctggagttacttggtttcaaaaagacatgcctcaaagcgtgtgctgaagtgagccagtggacccgcctgtgtgagctaacaataccgctggctatcgagaacttcctgagggaaagctccgaccagccccctacaatccctgtggagatcttacaactggagaaaaaactctcagaacccgtccgcgttcataacgacgataagctgagaagacagaagctgaagcaacagaaagcagacggtgttggtccaccgttaacaaagggaaaagccaaatcaaaggtgcacacacaggagacttccgagggccttgatagttcctctaagagtctcgagctaaaagtggcgttttctaagctcacggtccaggaggaaccagccactaccaacagggagccgagtcacatccggaaggccaaagcatccgacctgcctccactggagcacgtgttcgccgagggcctctacttcactctggcagatattgtactgcttccttgcattcatcacttccttgtgatcatctcccggaagtttagcgaaaagctagtggagtttcctctccttgcttcttggtaccagcggatacaggaggtgccgggcgtaaagacggctgcttcaaagtgcggcatacagtttctgcatttgccgaagctccttaccactagtaccgagcagcaccccaatctttgtgaagtgcctggcgttgaggagcagtccgaccccttattcattgggggcccccggcctaccatggcgaagctgatggagaaagggattgaggtgatgttttccccccacccctgccccacctggactctcgattggaatgtactccctgctgcggtcagccctaaggagggtaagatgtcgagcgaccgtgccctccgtaagcaacaacaactcaacaacctagtgtacgtcgttacaaaccaagccaaaccaggggaccggatcgtagacttctgcagtggaggtgggcatgtgggcattgtcctggcccatatgctgcctagttgtcaagtgacactgatagagaacaaagaactatcccttatcagagccaagaagcgctcggatgaacttggcttaagtaacatttggtttatccaagccaatatggaatactttactggcatgttcaacattggtgtggctctacatgcttgtggggttgctacagacatggtcatcgagcactgtattaaaactagagcttctttcgtaacttgtccttgctgttatggcttcattcagaatacctctaaatttaacttccccaaatctgagcaatttaagaaaactttgtcatacaaggagcatatgatactttgtagattcgccgatcagacggccgtgcagctacctcctcagcgacggttgattggaaaacaatgcatgtgcttggtggacctggaccgcgcgagggcagccgaggagtgcggctattccgtgcaggtaattagcatggagccagagtcatgttctccaaaaaacaatatgatagtcggcgtaccaatttag

SEQ ID NO: 15043 - DNA, 519 bp, synthetic construct
  source 1..519: mol_type = other DNA; note = Synthetic coding sequence
atgtcctcggggaattaccagcagagcgaggctttgagcaagccaacttttagcgaagaacaggcctcagccctggttgaaagtgtgtttggactgaaggtgtcgaaagtccggccactgcctagctatgacgaccaaaatttccacgtttatgtaagtaaaacaaaggacggtccaaccgagtatgtattgaagattagcaataccaaggcatctaaaaacccagacctgattgaagtacagaaccatatcataatgtttctgaaggccgcgggattcccgaccgcttccgtgtgccatacaaagggggataataccgcgtcccttgtgagcgtcgacagcggttcagaaatcaagtcatatctggtccgcctgctgacctaccttcctggtcggcccattgctgagctccctgtttcgccccagttactgtatgagatcggaaagttagccgccaagctagataagactttgcaggaaggaaagccccgggtgaccccacttctggccaaaaattag

SEQ ID NO: 15044 - DNA, 2937 bp, synthetic construct
  source 1..2937: mol_type = other DNA; note = Synthetic coding sequence
atgggttggaagccctcagaagcgcgtggccagtcccagagcttccaagcttctgggcttcagcctcggagtctgaaggcagcccggcgcgccactggccggcccgacaggtcccgagccgcacgcccgacaatggacccgagtgcacaccggtctcgggccgcaccccctaacatggatccggatccgcaggccggagtacaggtgggcatgcgcgtggtgcgcggggtggactggaaatggggccagcaggatgggggtgaaggtggtgtcggcacagtagttgagcttggtagacatggctcacctagcaccccggaccgcaccgtggtggttcagtgggaccagggtaccaggactaactacagggctggttaccagggggcccatgacctgctattgtatgataatgcacagataggcgtgagacatcccaatatcatctgcgattgctgtaagaagcatggactcaggggtatgaggtggaaatgccgcgtctgtctcgattacgacctgtgtacacagtgctatatgcacaacaaacacgagctggcccacgcattcgacaggtatgagacggcccattctcgtcctgtcacacttagccctcggcaggggctgccccgcatcccccttcgtggcatcttccagggggccaaggttgtgaggggccctgactgggagtggggctctcaggacggcggagaggggaagccagggcgcgtggttgacattcggggctgggacgtggaaactggacgttccgtcgcatcagtcacttgggctgacggaacaaccaatgtgtacagagttgggcataagggaaaggttgatctcaaatgcgtgggagaggctgccggcggcttttactacaaagaccacctaccccggctgggcaagcctgcggaactccagcgccgagtgagtgcagactcgcaaccatttcagcacggagacaaagtgaagtgcttactggataccgacgtgctgagagaaatgcaggaaggacacggcggatggaaccctcgaatggccgagttcattggtcagactggtactgtacatcgcataaccgacaggggcgatgtgagagtacagtttaaccacgagacccggtggacttttcatcccggtgccctgaccaaggcactcggcagggttggaaaggtggttaaagtctttggagatgggaatcttagagttgcagtcgccggccagaggtggactttcagcccaagctgcctggtcgcataccgcccagaagaagatgcaaatctggacgtggccgagcgcgccagggaaaacaagtcatccctgagcgtggccctggacaagctcagagcacaaaagtccgatccagagcatcctggaagactggttgtcgaggtggctttggggaacgcggcgcgggccctagacctgctgcgacgacgtcccgaacaggtggatacaaaaaatcagggtagaacggcgttacaagtcgccgcttacctgggacaagtggaattaattaggttgctgcttcaggctagagcaggcgtggacctgcccgacgacgaaggcaacacagctttgcactatgctgcccttgggaaccagcccgaggcgactcgagtcctcctttctgccgggtgcagagcggacgcgattaacagcacacagtccacggccttacacgtggctgtacagaggggcttcctggaagttgtgcgggcactgtgtgagagaggatgcgatgtgaaccttcccgacgcacacagcgataccccactgcacagtgcaatttccgctggaacaggggcctccggcatcgtggaagttcttacagaggtccctaatatcgatgttacagccacgaactctcaagggtttaccctgttgcatcatgcgagcttgaagggacacgcgctggcagtacgaaagatattagcaagggcaaggcagcttgtggatgcaaagaaagaggacggtttcacagctcttcaccttgcggcgctaaacaaccatcgcgaggtggcacaaatcttgattcgcgagggacgttgcgatgtgaacgtgagaaataggaagctgcagagtcccctgcatctggccgttcagcaagctcacgttgggctggtcccgctcctggtggatgcaggttgtagtgtgaacgccgaggatgaggagggcgacaccgccctccacgttgcattacagaggcaccagctgctgcccctcgtggctgacggcgccggaggagacccaggacctctgcagctattgagccgactacaagcctccgggttaccgggaagcgcagagcttaccgtgggcgctgcggtcgcttgttttctagctttagagggcgccgacgtgtcctataccaaccaccgcggcaggtcgccacttgatcttgccgccgaaggacgtgtattgaaggccctccagggctgtgcccaaagattccgggagcggcaagcaggcggtggggccgcaccaggtccccgccagacactaggaactcctaacaccgttaccaacctccatgtgggcgctgcacctggacccgaagccgctgagtgtttggtgtgtagtgaacttgctttgctggtcctattttctccatgtcagcataggacggtctgcgaagagtgtgccaggaggatgaagaaatgcattcgatgtcaagtggtggtgtctaagaaactgcgccccgacggctcggaggtcgcctcagctgctcctgccccgggcccacctcgacagcttgtagaggaactgcaaagccgttaccggcagatggaagaaagaattacatgtcccatctgtattgattcccacattcggctggtcttccagtgtggacacggtgcttgcgccccatgtggaagtgccctatccgcttgtcccatctgcagacagccaatccgtgatcggatccagatttttgtgtag

SEQ ID NO: 15045 - DNA, 1074 bp, synthetic construct
  source 1..1074: mol_type = other DNA; note = Synthetic coding sequence
atgggtggagccgtgtcagccggcgaagataatgatgatttaatcgataacctcaaggaagcccagtacattcgtaccgaaagggtcgaacaggcgttccgcgcgatcgaccgtggagactactacttagaagggtacagagataacgcttataaagatctggcttggaagcacggcaacatccatctctctgccccctgcatctactcagaggtcatggaagcactcaagctgcagcccggcctgagctttctgaatttgggatctggaaccggctacctatcaacaatggtgggactgattctggggccctttggcatcaaccacggcattgagctccattctgacgtggtggagtacgcaaaagagaaactggagtcctttatcaagaacagcgacagtttcgataaatttgagttctgcgagcccgccttcgtcgtcggtaactgcctgcaaattgcatcagattcccaccagtacgacagaatttactgcggagctggagtgcagaaggaccatgagaactacatgaagatcctcttgaaggtgggaggaatcctagtcatgccaatcgaggaccagttgactcagattatgaggacaggacagaacacctgggaaagtaaaaatattttggcagtctcttttgcccccctcgtgcagcccagcaagaatgacaatggcaaacccgattccgttggcctgcctccctgtgctgtcagaaatttacaggatttagccaggatctatatccgaagaactctcaggaactttatcaacgatgagatgcaggccaagggcatccctcagcgggccccgccgaagagaaagcgtaagcgggttaaacagagaataaacacatatgtctttgtaggcaatcaattaatcccgcagccgctagatagcgaggaggatgagaaaatggaggaagacaacaaagaagaggaggagaaggaccataatgaggccatgaagcccgaagaaccgccccaaaatctgctgcgagagaaaattatgaaattgcctctccccgagagcctgaaagcgtatctgacctatttcagggacaaatag

SEQ ID NO: 15046 - DNA, 633 bp, synthetic construct
  source 1..633: mol_type = other DNA; note = Synthetic coding sequence
atgtcatgtcccaattactgctcgggaaactcgaacagcgggagcctgcgaacgtcccgtcatattcccctgacatccatcgatctgtgtcccacttccgtgtcttgtggggatgtgctgtaccttccaacatcctcacaggaccacacatgggtcactgacaattgccaggagacctgtggagagcccacgtcatgccagccagtccactgtgagacaggaaatttagaaactagctgcggatctagtaccgcttattacgtacctcgtccctgccagggctcgtcgtttctgcctgccagcttcttttcttcttcttgcctgcccgtgtcttgcaggccacagcgatacgtgagtagcggctgcaggccgttgcgccctctcttaaattcataccaacctataggggactgtgtgcccaacgcataccggccccagttttgcctgagcaagtcctgccaaccccaaaatctgctgacatcaggctgccaaccatcctcttgtctggcttatcggccccagtccttacatgtagtaagttcgtcactgcgccctttgggccccctgtttagtggctgccagcccctcactcacgtatttagcacctgtagacccagctgcagcggactctag

SEQ ID NO: 15047 - DNA, 606 bp, synthetic construct
  source 1..606: mol_type = other DNA; note = Synthetic coding sequence
atggcatcgggcgatgattcgcccattttcgaggacgacgagagtccaccctatagtctagagaagatgactgaccttgtggccgtgtgggacgtcgctctatccgacggagtgcacaaaatagaatttgaacatgggactacttcaggtaaacgggtggtgtatgtggacggcaaagaagagattcgcaaagagtggatgtttaaactcgttggtaaagaaactttttacgttggagctgcgaagacaaaagccacaatcaatatcgacgccatcagtgggtttgcctatgagtacaccttggagattaatggcaaatccctgaagaaatatatggaagaccggtcaaaaaccacgaacacctgggtgttacacatggatggggagaacttccgcatcgtgctcgagaaggatgctatggacgtctggtgcaacggaaagaagctggagacagctggagagttcgtggacgacgggaccgaaactcatttcagtatagggaatcacgattgctacatcaaggccgttagctcaggaaagagaaaagaaggaattatccatacactcatcgtggacaatcgagaaatcccggagatcgcctcttag

SEQ ID NO: 15048 - DNA, 3390 bp, synthetic construct
  source 1..3390: mol_type = other DNA; note = Synthetic coding sequence
atgccagctaccaggaagccaatgcggtacggccataccgaaggccatactgaggtgtgtttcgatgactccggttctttcatagtaacctgcggctcagatggcgatgtgcggatttgggaagatctcgatgatgatgaccctaagttcattaacgtgggagagaaggcttatagctgcgcgctgaaatcaggcaagctcgtcacagcagtgtctaataatacaattcaagtacacacttttcccgaaggcgtgccagatgggatcctaactagatttacgactaacgctaaccacgtggtgtttaatggtgatggaaccaaaatcgctgccgggtcatctgatttcctcgtgaaaattgtcgacgtgatggactccagccagcagaagaccttcaggggtcatgacgcccccgtcctgtcactttcctttgatcctaaagatatctttcttgcgagcgctagctgtgatggcagcgtgcgtgtctggcaaatcagcgatcaaacatgcgccatcagctggccattattacaaaagtgcaatgatgttatcaatgctaagtctatctgcagactagcctggcagcccaagtccggcaagctgttggcgatcccagtcgagaagagcgtaaaactatatcggagggagtcgtggagccatcagtttgacctaagcgataatttcatttcccagaccttgaatatcgttacttggagtccctgcgggcagtacctagcagctggtagtattaatggcctgattattgtgtggaatgtcgagacaaaagattgtatggagcgggtgaaacacgaaaaagggtacgcaatatgcggcctggcctggcacccaacctgcggaagaatcagctatacagacgctgaggggaacctaggtctcttagagaacgtttgtgaccccagtggcaaaactagctctagcaaggtgagtagccgcgtagaaaaggactataacgatctgttcgacggagatgacatgtctaacgcaggggatttccttaatgataacgctgtggaaattcccagctttagtaagggcattattaacgacgatgaagatgacgaggatctgatgatggccagcgggagacctcgtcagaggtctcatattctcgaagatgacgaaaattctgttgacatttccatgctgaagacagggtctagcttgctcaaggaagaggaagaggatggccaagagggctctatccataaccttccactcgtgactagccaacgacctttttacgatggacctatgccgactcctcgccagaagccatttcagtccggatccacacccttacacctcacccatcgctttatggtttggaattctatcggcattattaggtgttataatgacgagcaagataacgcgattgacgtggagttccacgacacctccattcaccacgccacacacctgagtaacaccctgaactatacgatcgctgacttaagccacgaagcaatcctcctggcttgcgagagtacagacgaattagctagcaagcttcactgtcttcacttctcttcctgggacagcagcaaagaatggatcatcgacctgccacagaacgaggacattgaggctatctgcctaggccagggctgggctgccgctgccaccagtgcacttctgctgcgtttgttcaccataggcggcgtgcagaaagaggttttttcattggctgggccagtggtgtcaatggccggacatggggagcaactttttatcgtctatcatcggggcaccggattcgatggtgaccagtgcctcggggtccagttgctggaattgggaaagaagaaaaaacagatcctgcacggagatccactccctctcacccgtaagtcttacctggcctggatcggattcagcgccgaaggcacaccatgttacgtcgattctgagggaatagtgcggatgttgaatcgaggattgggcaacacttggacaccaatctgcaacactcgtgaacactgcaaggggaaaagtgaccactattgggtggtgggcatacatgagaacccccagcaacttcgatgtattccatgcaaagggtcccggttcccacctaccttaccccggcctgccgttgctattcttagcttcaaactcccctactgccagatagcaacagagaagggtcagatggaggagcaattttggcgcagcgtgatctttcataatcacctggactatctcgccaagaatgggtacgagtatgaggagtccaccaagaaccaggccaccaaagaacagcaggagctgttgatgaagatgttagccctcagttgcaagctggagcgcgaattcagatgtgtggagttggcagacctaatgactcagaatgccgtgaaccttgctataaagtacgcatccaggtctcggaaacttatcctggcacagaagctgtcggaactggccgtcgaaaaggcagccgagcttacagccactcaagtggaagaagaggaagaggaagaagatttcagaaagaagcttaacgctggttatagcaatactgctaccgaatggagccagcctcggttccgcaaccaggtggaagaggatgcagaggactcaggcgaggccgatgatgaggaaaagcccgaaattcataaacccggccagaattccttttccaagtcaaccaattcttccgacgttagcgcaaagtccggtgctgtgactttttctagtcaaggtagggtcaacccttttaaagtgagtgcatcctctaaagaacccgcaatgtctatgaattccgcccgctctacaaacatattggacaatatggggaaaagctcaaagaagtcaacagctctgtcaaggactaccaacaatgagaaaagtcccattattaagcccttgattccaaagccaaagccaaaacaagctagtgccgcgtcctactttcaaaagcgcaattcccagaccaacaagaccgaagaagtgaaggaggagaaccttaaaaacgttttatctgaaacccccgcgatctgcccccctcagaatacagagaatcagcgtccaaagacgggtttccagatgtggctggaggagaacagatccaacattctgtctgacaaccctgacttttctgatgaggcggatattattaaggaaggtatgatccgcttccgcgttctgagcactgaagagagaaaagtgtgggctaacaaggcaaagggtgagaccgcctcagagggcacggaggcgaaaaaaaggaagcgagtcgtggatgaatctgacgaaacagagaaccaagaagaaaaagctaaggaaaatcttaacttgtccaaaaagcaaaagccactcgatttctccaccaatcagaagctctctgcctttgccttcaaacaggagtag

SEQ ID NO: 15049 - DNA, 1476 bp, synthetic construct
  source 1..1476: mol_type = other DNA; note = Synthetic coding sequence
agtggaagctcacactctttccccggcagcctggaggtgactgcccttatgaccacctggagctcacttcaaggctctcatgttagcaagcgggccctggcctacgctttagtggttacaaactgccaggagcggatccagcattggaaaaaggtggataatgattacaacgctctgagagaacgtctgagtacattgcccgacaagctctcttataatataatggtgccattcggaccttttgcctttatgcctgggaagctggttcacacaaacgaggtgacagtgctcttgggggacaactggttcgccaagtgcagtgccaagcaagcagttgggctcgttgagcaccgcaaagaacatgttcgaaagaccatcgacgatttaaagaaagtgatgaaaaattttgaaagccgtgtggagttcaccgaggatctgcagaaaatgagcgatgccgcgggcgatattgtggatattagagaggaaattaagtgcgacttcgagtttaaggctaagcaccgtatcgcacacaagccccattcaaagccaaaaaccagcgatatatttgaagccgatatcgccaatgacgtcaagtctaaagaccttctggctgacaaagaattatgggcgcgactggaggaattagagaggcaggaggaactgctcggggaactggattctaaacccgatacagtgatcgcgaacggagaggatactaccagtagcgaggaagaaaaggaagacaggaacactaacgttaatgcaatgcatcaggtaaccgactctcacaccccgtgccataaagatgtggcgtcctcagaacccttcagcggacaagtgaactcccagctaaattgtagcgtcaatggctcaagtagttaccactcggatgatgacgatgacgacgacgacgatgacgatgatgacaatattgatgacgacgatggtgataatgaccacgaagctctcggggtcggggataacagcataccaacaatctacttcagtcatacagtggaacctaaacgagtccgcatcaatactggaaagaacacaacgctcaagttctccgagaagaaggaggaggccaaacggaagcgcaaaaacagtaccggatctgggcactctgctcaggaactccccacaattcgcacccccgccgatatctatcgcgcctttgtcgacgtcgtaaatggagaatatgttccacgcaagagtatactgaaatcgagaagtagagagaacagcgtctgttccgacaccagcgagtccagcgcagccgagttcgatgatagaagaggcgtgctgcgctctattagctgtgaggaggccacctgcagcgacacatcggaatccattcttgaggaagagccacaggagaaccagaagaagctgttgcccctcagcgtcacgcctgaggtgctgcgccttgtagggtatagtagaaatttagccccactgaatgtcatactgtag

SEQ ID NO: 15050 - DNA, 981 bp, synthetic construct
  source 1..981: mol_type = other DNA; note = Synthetic coding sequence
atgcttctgagcaaattcgggtctctggcccacttatgtggtcccggcggtgtagaccacctgcccgtaaagatcctccagcctgccaaggcggacaaagagagcttcgagaaggcataccaggtcggcgcagtactgggctccggcggatttggtacagtgtatgcaggctcccgcatcgccgacggcttaccagtggctgttaaacatgttgttaaggaaagggtcacagaatggggaagcctcgggggggcaacggtgccacttgaggttgtcctgttgcggaaagtgggagccgctggcggggctaggggggtcatccggctgctggattggttcgaacggccagatgggttcctgctggtgcttgaacgccccgagccagcacaagaccttttcgatttcataacagagaggggggctttggacgaaccactcgcacggcggttctttgcacaggtacttgccgcagttcgccactgccactcgtgcggggtggtccacagagacataaaggacgagaacttacttgtggatttgagatcaggagaattgaaactgattgattttggctccggcgctctgctcaaagataccgtctatactgacttcgacgggactcgtgtgtattcacccccggagtggattagataccatcgctaccacggccgctctgcaacagtatggtcattgggggtgcttttgtacgacatggtatgtggcgacatacccttcgagcaagatgaggaaatccttagggggcggctgttgtttcgaaggcgggtgagtccagaatgtcagcagcttattagatggtgcttgtcgctgcggccttcagaacgccctagtctggatcagattgcagcgcacccatggatgctgggggccgacggcggcgtcccggaaagttgtgacctccggctctgcaccctggacccggacgacgtcgcctccacaacgtccagttccgaatctctctag

SEQ ID NO: 15051 - DNA, 2880 bp, synthetic construct
  source 1..2880: mol_type = other DNA; note = Synthetic coding sequence
atggccgcctctacaggctacgtgaggctctggggcgcggcccggtgctgggttctgaggagaccaatgctagccgccgccgggggccgggtacccacagccgctggcgcctggctgctcagaggccagcggacatgcgacgcctcacctccgtgggccttatggggtagagggcctgctatcggcggccagtggcgcggattctgggaggcgtcgtcacgaggcggtggcgcattttcagggggagaggatgcaagtgaaggtggggcggaggagggcgccggtggagccggtggctcggcaggggccggggagggcccagttataaccgcgctcactccgatgaccataccagacgtgtttccccatctgcctctcattgcaatcacccggaacccagtcttccctagattcattaagatcatcgaggtgaaaaacaaaaagctggtggaactcctcaggcgtaaagttaggttagctcagccgtatgtgggcgtttttctgaagcgcgatgattccaacgagtctgatgtggtggaaagcctggacgagatttaccatacgggcaccttcgctcaaatccacgaaatgcaagatctgggagacaagttgaggatgatcgttatgggccatagacgcgtacacatctcgcgacagcttgaggttgaaccagaagagcctgaggccgagaataaacataagcctcggaggaaatcaaagcgcgggaagaaggaggcggaagatgagctgagcgcccgtcacccagctgagttggcaatggagcccacccccgagttacccgccgaagtcctgatggtggaggtggaaaatgttgttcacgaagatttccaagtgacagaggaggtgaaagcattaacagccgagattgtcaagaccatccgcgatatcatcgccctgaaccctctctatcgggagtcagtgctgcagatgatgcaggctggccagcgtgtggtggacaacccaatctacctaagtgatatgggagctgctctgactggagccgaatcgcacgagttacaggatgtcctggaggagactaacattcctaaacggctgtataaagctttgagtctactgaaaaaagagtttgagctatcgaaactgcagcaacgtctaggacgcgaagtggaggagaaaatcaaacagacacacagaaagtatttgctgcaagaacagcttaagatcataaaaaaggaattgggcctcgagaaagatgacaaagatgccatagaggaaaaatttcgagaaagactgaaggaactggtagtgcctaaacacgttatggacgtagtcgacgaggagcttagtaagctgggcctccttgacaatcactcaagcgaatttaacgtcacccgtaactacctcgactggctcacctccatcccatggggtaaatactccaatgagaacctagacctagctagagcacaggccgttctggaggaagatcactatgggatggaggatgtcaaaaagagaatcctggagttcattgcggttagtcaactccgcggtagcactcagggcaaaattctgtgcttctacggtcccccaggcgtgggcaagactagcattgcacgcagcatcgcaagggccctgaaccgcgaatatttccgcttctcagtcgggggaatgactgacgtcgcggaaattaaaggccacaggagaacttatgttggagccatgcctggaaaaatcatacagtgtctcaagaaaaccaagacggagaatccactcattcttatagatgaggtcgataagatcggacggggttatcagggagacccttccagtgctttgctagagcttctagaccccgagcagaatgccaatttcctggatcattacctcgacgtgcccgtagacctgagcaaggtcctgttcatatgtaccgccaatgtaacagataccattcctgagcctctgcgagaccggatggagatgattaatgtgagtggctatgtggcacaggaaaagctggccattgcagagcggtacctggttccacaagccagggcactttgcggactggacgagagcaaggcgaaactatccagcgacgtccttacattgttaatcaagcagtattgcagggaaagcggggtcagaaacttgcaaaagcaggtggaaaaggtgcttcgcaagagtgcttacaaaattgtgtctggcgaagcggagagtgtagaggtcacgcccgaaaacctccaggattttgtcggcaaacccgtgtttactgtggagcgtatgtacgatgtgaccccaccaggcgtcgtaatgggccttgcatggactgccatgggggggtcaactttattcgtggaaacttccctacgacggcctcaggacaaggacgctaagggtgacaaggatggatccctggaggtgaccggccagctcggcgaggtcatgaaagagtcagcgcgaatcgcttacactttcgcccgagcttttttgatgcaacacgcgccggccaatgactacttggtgacaagccacatccatctgcacgtgccggaaggcgccacaccaaaggacggaccctcagcggggtgtacgatcgtcacagcccttttatctctcgccatgggccgccctgtccgtcagaatctcgccatgacgggagaagtgtcactgaccggtaagatactgcctgttgggggtatcaaagaaaagacaattgccgctaagagagccggcgtgacttgcatagtgttgcccgccgagaacaagaaggatttttacgatcttgccgccttcatcactgagggcctcgaggtgcatttcgtggagcattaccgggagatctttgacattgccttcccagacgagcaggccgaggctctcgcagtagaacggtag

SEQ ID NO: 15052 - DNA, 1203 bp, synthetic construct
  source 1..1203: mol_type = other DNA; note = Synthetic coding sequence
atgaaccctgcctctgcccctcccccccttcccccccccgggcagcaagtgattcatgttactcaagatctagatactgacctggaggctctcttcaattctgtgatgaacccaaagccctcctcatggcgaaagaagatccttcctgagtcattctttaaagagccggactccggctcccacagcagacagtctagtaccgactccagtggcggacatcctggacccaggctcgccggtggtgctcagcatgtgcggtcccatagttcccccgcttccctgcagctgggcactggcgcaggcgctgcaggctctcccgcgcagcagcacgcccatctgaggcagcagagctatgacgttaccgacgaactgcccctccctccaggctgggagatgacttttacagcgactggccagcgatatttcttgaaccatatcgagaaaattacaacttggcaagatccccgaaaagctatgaaccagccacttaaccacatgaatctccaccccgcagtctctagcaccccagttcctcaacgctccatggctgtctcccagcctaatcttgtaatgaatcaccagcatcagcaacagatggcgccatctactctgagccaacaaaatcatcctacgcaaaacccccctgccggactgatgagcatgcccaacgccctcacaactcagcagcagcagcaacagaaattgcgactgcaacgaatccaaatggagcgggagcgcatccgaatgcgtcaggaggagctcatgagacaggaagccgctttatgcaggcagctgccaatggaagccgagaccctcgcacctgtacaggccgctgtgaatcctccaaccatgacccctgatatgcggtccatcacaaacaattcctcggacccctttctgaatggcggcccatatcactcgagagagcaatctactgactcaggcctggggctcgggtgctatagcgttcctacaactccggaggacttcctcagcaatgttgatgagatggataccggagagaatgccggacagacacctatgaacatcaaccctcaacagacacggtttcctgactttttggactgtctgcctggcaccaacgtcgatctcgggaccttagaaagtgaggatcttatcccactcttcaatgacgttgaatcggctctgaataaatccgaaccctttctgacatggctctag

SEQ ID NO: 15053 - DNA, 2625 bp, synthetic construct
  source 1..2625: mol_type = other DNA; note = Synthetic coding sequence
atggaggtgctgagagaaaaagtggaagaagaggaagaggctgagagagaggaggcagcagaatgggccgagtgggcaaggatggaaaaaatgatgcgtccagtcgaggtcaggaaagaagaaatcacactcaaacaggaaacactccgcgatctagaaaaaaagttgtcagagattcaaatcacagtatctgctgagttacctgccttcactaaagacaccattgatatttccaagctgcctatatcatataagaccaatactcctaaggaagaacatcttctgcaggtggccgataatttttctcgccagtattctcatctttgcccagatcgagttcctctgttcctacatcctctaaacgagtgtgaggtaccgaaattcgtgagtaccaccttacgaccaacactcatgccttatcctgaactgtacaattgggacagctgtgctcaatttgtgagcgacttcctaaccatggttccactgccagatcccttaaaaccgcccagtcacctgtattcgagtactaccgtcttaaagtatcaaaaaggaaactgtttcgacttctccaccctgctctgctcaatgctcattggaagtggctatgatgcatattgcgtcaacgggtacggatccctagatctctgccatatggatctgacccgagaggtgtgcccacttacagtgaagccgaaggagactatcaaaaaggaggagaaggtgctgcccaaaaagtatacaatcaagccgccgagagacctgtgctcaaggttcgaacaggagcaagaggtgaagaaacagcaagagatccgggctcaggagaagaagagactccgtgaggaagaagagcgcttgatggaagcagagaaggcgaagccagatgccctgcacggactccgcgttcattcctgggtcctggtgctctcagggaaacgcgaagtcccagagaactttttcattgacccttttacaggacacagttattcgacgcaggacgaacactttttgggcattgaaagtctgtggaaccataaaaattactggatcaacatgcaggactgctggaattgctgcaaggacctgattttcgatctgggtgaccctgtgaggtgggaatacatgttgctggggactgataaatcccagctgtctttgacagaggaagacgattctggcataaatgacgaggatgatgtagagaatctaggcaaagaagatgaggacaagagcttcgatatgcctcactcttgggtagaacaaatcgaaatttctcctgaggccttcgaaactaggtgcccaaatggaaagaaagtgatacagtacaagagggccaaattggaaaagtgggcaccctacctaaactccaatggactggtctcccggttaactacctatgaagacctccagtgtactaacatcctcgaaattaaggaatggtatcaaaatcgcgaagacatgcttgagcttaagcatatcaataaaacgaccgaccttaagacggattatttcaagccagggcacccccaggccctaagagtccacagttataagtccatgcagcccgagatggacagagtcatagagttctacgaaaccgcacgggttgacggcttaatgaaacgggaggagacaccccgcactatgacagagtattaccaagggagaccagactttctgagttacagacacgcttctttcggaccgagggttaaaaaattgactctgtctagcgccgagtccaatccgcgccccatcgtaaagatcacggaacgcttcttccgcaaccccgccaaacctgccgaagaagacgtcgctgaaagggtctttctggtggctgaggaacgcatccaattgagatatcattgccgggaggaccatatcacagctagcaaacgtgagttcttgaggcgaactgaagtcgacagcaagggaaataaaatcattatgacacctgacatgtgcatttcctttgaggtcgaacctatggaacatacgaagaagctgctgtaccaatatgaggcaatgatgcacctcaagcgggaggagaaactctccaggcaccaagtgtgggagagtgaacttgaggtattggaaattctcaaactccgggaggaagaagaagcggcacacactttaaccatcagtatctacgacaccaagcggaatgagaagagcaaagagtatagggaagctatggaacgaatgatgcacgaggaacaccttcgtcaggtggagacccaactggattacctggccccctttctggctcagctacctcccggagaaaaactgacctgctggcaggctgtgcgtctgaaagatgagtgtctctccgatttcaaacagcggcttattaacaaggcaaaccttattcaggcacgcttcgaaaaagaaacccaggagctgcagaaaaagcagcagtggtaccaagagaatcaggtgactctgacaccagaggacgaggatttatatttgagctactgcagccaagctatgttcagaattcggatcctggagcagcgcctgaatcggcacaaggaactcgccccgcttaagtacttggcactggaggaaaagctgtacaaggatcctcgcctcggtgaacttcagaaaatctttgcttag

SEQ ID NO: 15054 - DNA, 1851 bp, synthetic construct
  source 1..1851: mol_type = other DNA; note = Synthetic coding sequence
atggacgtcatgctggagaactactgccacctgatctctgtgggctgccatatgactaaaccagatgtcatcctaaagctggagcgtggtgaagaaccctggacttcattcgcaggccacacatgcttagaagaaaactggaaagcggaagattttttggtaaagttcaaagagcaccaggaaaaatactcaagatcagtggtttccataaatcataagaaacttgttaaagagaagtctaagatctacgagaaaacctttacactgggcaaaaatcctgttaacagcaaaaatctcccaccagagtatgacacacatgggagaatactgaagaacgtctcggagctcatcatctctaacctcaaccccgcacgcaaaaggctgtccgaatacaatggttatgggaagagcctgttgtctaccaaacaggagaccacccaccctgaagttaaatcacacaaccagtccgcccgggcgtttagccacaacgaggttttgatgcaataccagaagaccgaaactcccgcgcaaagttttggctataatgactgcgagaagagtttcttgcaacgggggggactgattacccactcacgcccctacaaaggagagaacccatctgtatacaacaagaagaggcgggccaccaatattgagaagaaacacacctgcaacgaatgcggcaaatcattctgccggaagagcgtgctgattcttcaccagggaatccattctgaggaaaagccgtaccagtgtcaccaatgcgggaatgcttttcgacgaaaatcctacctgatcgaccatcagcgcacccacactggagaaaagcccttcgtctgcaacgagtgtggcaagagtttccgcctgaagacggcgctgaccgaccaccagcgcactcatactggcgaaaagtcatacgagtgtctgcaatgccgcaacgcgtttaggctgaaaagtcacctgatcagacaccagcggacacatacaggggagaaaccttacgaatgcaatgactgtggcaaatctttccgtcaaaagactaccctgtctttgcaccaacgaatacacacaggagaaaagccttacatctgcaaggagtgtggcaagagttttcaccagaaagctaacctgactgtccaccagagaacacacaccggggagaagccatacatatgtaacgagtgtggcaagtccttcagccagaagaccacactggccctgcacgaaaagacgcacaatgaggagaaaccttacatttgcagcgagtgtggcaagagctttcggcagaaaactaccctggtggcacatcaaagaacccataccggagagaagtcttatgaatgcccccactgcggaaaagcctttcgcatgaagtcttacctgatcgatcaccataggacccatactggtgagaagccttatgagtgcaatgagtgtggcaagagcttctcccagaagacaaatctcaatctccatcaacggatccacaccggagagaagccttacgtgtgtaacgagtgcggcaagtctttccgccagaaagccacactgacagtgcatcaaaagatccatactgggcagaagagttatgagtgcccacaatgtggtaaggcctttagcagaaaatcctacttgattcaccaccagcgaacacatacaggagaaaaaccgtacaaatgttcagagtgtggcaaatgcttcaggcagaagactaatcttattgttcatcagcggactcatacaggagagaagccatacgtgtgtaacgagtgcggtaagtccttctcttacaagaggaatcttatagtgcatcaaaggacgcacaagggcgaaaatatcgagatgcaatag

SEQ ID NO: 15055 - DNA, 441 bp, synthetic construct
  source 1..441: mol_type = other DNA; note = Synthetic coding sequence
atgtgccatactagttgtagcagcggatgccagcctgcatgttgcgccccttccccctgtcagccagcatgttgtgtgccaagcagctgtcaagcttcttgctgtgtacctgttggctgccagtccagtgtgtgtgttcccgtctccttcaaacccgcggtatgcctgccagtgtcctgtcagagttctgtttgcgtgcctatgtccttcaagagtgctgtgtgtgtgccagtaagttgtcagtcatctgtgtgtgtccccgtgagctgcaggcctattgtgtgcgctgcacctagttgtcagagtagtctgtgcgtgcctgtgtcttgcagacccgtagtctacgccgccccgagctgtcagtccagtgggtgctgccaacctagttgcacttccgtgctgtgcagacccatatcctactccatctcctcctgttgctag

SEQ ID NO: 15056 - DNA, 1257 bp, synthetic construct
  source 1..1257: mol_type = other DNA; note = Synthetic coding sequence
atgagggaatgtatatcaatccatgtggggcaggcgggcgtgcagataggtaacgcctgttgggaactctactgcctcgagcacggcatacagcccgacggtcagatgccttcagacaaaactatcggaggtggagatgacagttttaacacgttcttttcagaaactggcgccggcaagcatgttcctagggctgtgttcgttgacctggagccaaccgtggtcgatgaggtgcgaaccgggacctaccgacagttgttccatccagaacagctcattactgggaaggaagacgctgcaaataactatgcccgaggccattacacgataggtaaggagatcgtggatttggtcctcgatcgcatccgaaaactggcagacctctgcaccgggctccagggatttcttattttccattctttcggcgggggaaccggatcaggcttcgccagccttttgatggagaggctgtcggtggattatggtaaaaagtctaaactggaatttgcaatttatccggcgccacaggtgtctaccgccgtagtggagccatacaactccatcctgaccacacacacaaccctggaacacagtgattgtgcctttatggtggataatgaggccatttacgatatctgcaggagaaatcttgatatcgaacgtcctacttacacgaatctcaatcggttgattggtcaaattgtgtcttccatcacggcgtctctgcgcttcgatggcgccctgaatgtggacttgacagagttccagactaacttagtgccttacccacgaattcacttccctcttgccacttacgcccccgtcatcagcgctgagaaggcatatcatgagcagctgtctgtggctgaaatcacgaacgcttgcttcgagcccgctaaccagatggttaaatgtgacccccgacatgggaagtacatggcctgctgtatgttgtaccgaggtgatgtcgttcctaaggacgtcaatgcagcgattgctacaatcaagacaaaacgcactatacagtttgtggactggtgccccactggattcaaggttggaatcaactatcagccccccacggtcgtccctggcggtgatcttgccaaggttcaacgggctgtttgcatgctgagcaacaccaccgcgattgccgaggcttgggcacgcctggatctagctgctttggaaaaggattacgaagaagttggggtggattctgtcgaagctgaagcagaggagggcgaagaatattag

SEQ ID NO: 15057 - DNA, 3351 bp, synthetic construct
  source 1..3351: mol_type = other DNA; note = Synthetic coding sequence
atgtacgggagtgcacgatctgtcggcaaggtggaaccaagctcccaaagcccggggcggagtcctcgtctcccaaggagcccaagacttggccaccgccggactaattctaccggcggaagcagtgggtcatccgtgggagggggctcaggtaagacactgtccatggagaacatccagagccttaatgctgcgtacgccacgagtgggcctatgtatctgtctgaccacgaaaacgttggctctgagacacctaagtccactatgaccctggggcggagcggcggacgtctcccatacggagtgcgcatgacagccatgggaagctcacccaatatcgcgtctagcggtgtggcatccgataccatcgctttcggagaacaccacctccccccagtaagtatggcctctaccgtaccacactcattgagacaagccagggacaacaccatcatggatctgcagacacaattgaaagaagtgctgcgtgaaaacgacctgctgcggaaagacgtcgaggtgaaggaatctaagctttcaagctccatgaatagcatcaagacgttttggtcccccgaactgaaaaaggagagggccttgaggaaagacgaggcaagcaaaattaccatatggaaggaacagtacagagtggtacaagaagagaatcagcatatgcagatgacgatccaggccctgcaggacgaactacgcattcaacgtgatttaaatcagctgttccagcaggatagctcttccaggaccggagaaccctgcgtagctgaactcacagaagagaactttcagaggctgcacgccgagcatgagcgccaggctaaagagctgtttctgctgaggaagacgctcgaggagatggagcttcgcatcgagacccaaaaacaaacgctgaatgccagagacgagtcaattaagaaattgctagagatgctgcagtcaaagggtctcagcgctaaggctacagaggaggatcacgaacgaactagacgcctcgcagaagcagagatgcacgttcatcatttagaaagtctgctggagcagaaggagaaggagaactcaatgctgcgcgaggagatgcatcggcgatttgagaacgcccccgacagcgctaaaacgaaggccctgcagacagtgatagaaatgaaagactccaaaatatcttcaatggagcggggcctgagggacctggaagaagagattcagatgctcaaatctaatggcgcactgagcacagaggaaagagaggaagagatgaagcagatggaagtctaccgcagccattcgaagtttatgaagaacaaggtggagcagttaaaagaggagttgtcttccaaggaagcgcaatgggaagaacttaaaaaaaaagccgctggccttcaagccgaaatagggcaggtaaaacaggagctgtcaaggaaagacacggagttactcgcactgcagactaaactggagactctcactaatcagttcagcgactcaaagcagcatattgaagtgctgaaggagagcttaaccgctaaggaacagcgcgctgcaatcctgcagaccgaagtcgacgctctccggctcagactcgaggagaaagagacaatgctaaacaagaagacaaagcagatacaggatatggcagaggagaaagggacacaggcaggcgagattcatgacctgaaggacatgctcgatgttaaggagagaaaagtgaacgtcctgcagaaaaaaattgaaaacctgcaggaacaattgagggacaaagaaaagcaaatgtcttcattaaaagagcgcgtgaaatctctccaggcagatacaacaaacacggacactgcacttactacgctggaagaggccctggctgagaaggagcgcaccatagaaagactgaaagaacagcgagatcgtgatgaacgggagaagcaggaagaaatagacaattacaagaaggatctgaaagacctgaaagagaaagtttccctgctacagggggacctgtccgagaaagaggcgtcccttctggacttgaaggaacatgcttcaagcctcgcatcctccgggctgaagaaggactctagattgaaaactctggagatcgcattggagcaaaaaaaggaggaatgcctgaaaatggaatctcagctgaagaaggcacacgaagccgctctggaggcccgtgcatctcccgaaatgagcgatcggatccagcatctcgaaagagaaatcacccgatacaaggatgaatcatccaaggcccaggcagaggtggaccgtctgcttgaaattctaaaggaggtggagaacgagaaaaacgacaaggacaaaaaaatcgccgaattggagcgtcaggtcaaggatcaaaacaagaaggtcgcaaatttgaagcacaaggaacaagtggaaaaaaagaagagtgcacaaatgttagaggaggctcggaggcgcgaagacaacctgaacgattcctcccagcagcttcaagactcactgaggaagaaagacgatcgcatcgaggaactggaggaggcactgcgggaatccgttcagattactgctgagcgtgaaatggttttagctcaggaggaatccgcgagaactaatgcagagaaacaagtcgaggaactgctgatggctatggagaaagtgaaacaagagctggagagcatgaaggccaagctaagtagcacccaacagtcacttgcagaaaaggaaacccacctgacaaaccttagggctgaaaggcggaagcatctggaggaggtgctggagatgaagcaggaggcattgctggccgccattagcgagaaggatgcaaacatagcactcttagagctgagcagtagtaagaaaaaaacacaagaggaggtagcggccctgaaacgtgagaaggaccggctggtgcagcaactcaaacagcaaacccagaacagaatgaaactgatggccgataattatgaggacgaccactttaagtcttcacactccaatcagacaaatcacaaacccagtcccgatcagatcattcaaccactcttagagctggatcagaatagaagtaaactcaagctttacataggacatttaactaccttatgtcacgaccgggacccactcattctccgtggcctcacacctcccgcctcttataacctagacgatgatcaggcagcctgggagaatgaactgcagaagatgacacgcgggcaactgcaggatgagctggaaaagggagaacgcgataatgcagaactccaggaattcgctaacgcaatcctgcagcagatagctgaccactgtccagacatcctcgaacaagttgttaatgccctcgaggaatcgagctag

SEQ ID NO: 15058 - DNA, 3075 bp, synthetic construct
  source 1..3075: mol_type = other DNA; note = Synthetic coding sequence
atgaatttcatcaaggacaattctagagccctcatccaaaggatgggtatgaccgtgatcaagcagattacagatgatcttttcgtttggaacgtcctcaatagagaggaggtgaatattatatgttgcgagaaagtggagcaggatgcagccagggggataatccatatgattctgaaaaagggaagcgagtcctgtaatctgttcctgaagagtctgaaggagtggaattatcccctgtttcaagacttgaacggccagtccctcttccaccagacctctgagggcgatctggatgatcttgcacaggacctgaaggacctttaccatacacccagcttcctgaacttctaccccctgggtgaggatatcgacattatcttcaacttaaagtccacatttacagagccggtcttgtggagaaaggaccagcaccaccatcgtgttgaacaactgaccctgaacggcctgctgcaagcgctgcaatcaccctgcatcattgaaggagagtccgggaagggcaagtcgactttgctacagagaattgccatgctgtggggctctgggaagtgcaaagctctgacaaagtttaagtttgtgttctttctgagactttcccgagcccaaggaggactgttcgaaactctctgtgaccaactgttggacatacctggcaccattaggaaacagactttcatggctatgctgcttaagctgagacagagggtgctttttctactggacgggtataatgaattcaaaccacagaattgtccggagattgaggccctcattaaggagaaccataggtttaagaacatggtgatcgtgactaccacgactgaatgcttacgccatataaggcagttcggagcactgactgcagaagtgggagacatgactgaagactccgctcaggcccttattcgggaagtcctgataaaagagctcgccgaaggactcctcctgcagatccaaaaatcccgctgcctcagaaatctcatgaaaactccacttttcgtggtgataacttgcgctatccagatgggcgagagtgagttccacagtcacacccagaccacattgttccataccttctacgacctcttaatccagaagaacaagcacaagcacaaaggggttgccgcttcagactttattaggtccctggatcactgtggtgatttagcactcgagggggtgttctctcacaaattcgacttcgagttgcaagacgtgagctccgtgaacgaggacgtcctgttaaccaccggtctgctgtgcaagtataccgcccagcgcttcaagccaaagtataagttcttccacaaatcttttcaggaatacaccgcaggcaggagactatcatctctgttgaccagccatgaacccgaggaggtgactaaaggtaatggctacctgcaaaagatggtttctatctcagacatcacatccacatatagctctctcctccgctacacatgcggtagctccgtggaagcaacccgggctgtgatgaaacacctggcggccgtgtaccaacacggctgtctccttgggctctccatcgctaagagacctttgtggagacaggagtcgctacagtccgtcaaaaacactacagagcaggaaatcttaaaagccatcaacatcaacagtttcgtagagtgcggcatccacttgtaccaggagtccactagtaaatccgccctctcccaggaatttgaggcttttttccagggaaagtccctttacatcaactctggcaacattccagactacttatttgatttcttcgaacatttaccaaattgtgcatcagctctggacttcataaaactggacttctacgggggagctatggcaagttgggagaaggcggcagaagacaccgggggaattcacatggaggaagccccagaaacttatatcccgtctagagctgtctccctgttctttaattggaagcaagaattccgtaccctggaggtaactctgcgagatttctctaaactgaataaacaagacatccgctacctcggcaaaatcttttcttcggccacgtccctgcgtcttcagatcaaaaggtgtgcaggagtcgccggctctctcagcctagtcctctctacctgtaagaatatttactcccttatggttgaggcgtcaccattgacgattgaggatgagcggcatattaccagcgtcacaaacctaaagaccttatccatacacgacctgcaaaaccagcgtctacctggcgggctgactgattctttggggaatctaaaaaatctgaccaagttaattatggacaacataaagatgaacgaagaggatgctataaagctggcagagggacttaagaacctaaagaagatgtgcctgttccaccttactcacctgagtgatatcggcgagggcatggactacatcgtgaaaagcctctcctcagagccgtgtgaccttgaggaaattcagttggtgagttgttgcttaagcgctaacgccgtgaaaatacttgcccagaatctgcacaatcttgtgaagctcagtatcttggacttgagtgaaaattatctcgagaaggacggcaacgaggctctgcacgaactgatcgatcgcatgaacgttttagagcagctgaccgcactcatgctcccctggggctgcgatgtccagggctccctgagtagcttgttaaaacatcttgaggaggtcccgcagctggttaaactgggcctgaaaaactggagactcacagacaccgaaatccgcatcctgggagcattttttggaaagaacccccttaagaacttccagcagctgaaccttgccggaaacagggtgagtagtgatggctggttggcctttatgggggtgttcgagaatttgaaacagctggtcttctttgattttagcaccaaggaatttctgcctgacccggctctcgtgagaaagttgtcccaggtcctttcaaagctaacttttcttcaagaggctcggctcgtgggttggcagtttgatgacgatgatctgtccgtgatcaccggagccttcaagctcgttactgcatag

SEQ ID NO: 15059 - DNA, 1065 bp, synthetic construct
  source 1..1065: mol_type = other DNA; note = Synthetic coding sequence
atggcagagtctccaaccgaggaagcggctaccgctggggcaggcgcagccggacctggggccagctccgtggccggcgtcgtgggggtatcggggagcggggggggattcggccctccgttcctgcctgatgtgtgggcggcagccgcagccgcaggaggtgcaggtggcccaggctctggcctcgctcctctacccgggctccctccttctgcagcagcccatggggcagcccttctttcccattgggatccgaccctgagctccgattgggatggagagcggaccgcccctcagtgtttgcttaggattaaaagagacatcatgagtatttacaaggagccacctcctgggatgtttgttgtaccagacactgtggatatgaccaagatacatgccctaataactggccccttcgacaccccatacgagggcggctttttcctgttcgtcttccgctgtccccccgactatccaatccatccacctagggtgaaactaatgacgaccggcaataacacagtgcgatttaatccaaatttttacaggaatggcaaggtgtgcctgtcaatcctcggaacctggacagggcccgcctggtcaccagcacagtcgattagcagtgtgttgatctctattcagagtctaatgactgagaatccataccacaatgagcctggcttcgaacaagagcgccacccaggagatagcaagaattacaacgaatgtattagacatgaaacaattagagtggccgtgtgcgatatgatggaggggaagtgcccatgccccgagcccttacggggagtgatggagaaaagcttcctcgaatattatgacttttatgaagtagcctgtaaggataggctgcacctacagggccaaaccatgcaagacccctttggggagaagcggggtcatttcgactatcaaagcctcctaatgcgcctggggcttatcaggcagaaggtgctggaaaggctacacaacgaaaacgcggagatggactctgatagtagtagctccggtacagagaccgacctgcatgggtccctgagagtctag

SEQ ID NO: 15060 - DNA, 2487 bp, synthetic construct
  source 1..2487: mol_type = other DNA; note = Synthetic coding sequence
atggattcagaagcattccaatccgctagagatttcttggatatgaattttcaaagcttggctatgaaacacatggacctgaagcaaatggagcttgacaccgccgccgcaaaagtggacgaactcacaaaacaacttgagtccttatggagcgattcgccggccccccccggcccccaggcaggaccaccatccagaccccccaggtattcctcctcaagcattcccgaaccttttgggagccggggcagcccgagaaaagccgctactgacggcgccgacacaccattcgggaggagcgaaagtgcaccaacactccatccatacagccccctgtccccaaagggacgtccctcatctccgaggacccccctgtatcttcaacctgacgcatacgggagcttggacagggcaacaagcccgaggccccgggctttcgacggagcaggatcaagccttggaagggccccctcccctaggcccggtcccggccccctgcggcagcaaggcccccccactcctttcgacttcctcggacgcgcaggcagccctcgtggttctcccctggctgaagggccacaggcattcttccccgagagagggcctagcccaagaccaccggctaccgcttacgacgcgcccgctagtgcatttggctcttctctccttggaagcggcggatctgcttttgcgccccccctgagagcccaggacgacttgactttacgccggcggccgccaaaagcttggaacgagtcagacctagatgttgcgtacgaaaagaagccctctcagaccgcgtcttatgaacgtttagacgtttttgctcggcctgcttccccctcccttcagctgctgccttggagagaatcctcactggacggattaggtggcacgggtaaagacaacctgacgtcagcaactctgcccagaaattacaaggtttcccctctggccagcgatcgcagaagtgatgcggggtcctaccgccgctccctgggttcagcaggtccgagcggaactttgcccaggtcatggcagcctgtgtcccggattccaatgcctccctccagtcctcagccacgtggagcccctaggcagaggccgattccactctccatgatcttcaaacttcagaacgccttctgggagcacggcgcaagtcgggccatgctacccggttctcccttattcacccgggccccaccaccaaagctgcaaccccaaccgcaaccacagccacagcctcagtcccagccccagcctcagctgcccccccagccacagactcagccacagactccaacacctgcaccgcaacacccgcagcaaacatggccaccggtcaatgagggcccacccaagccaccaacggagttagagcccgagcccgagatcgaaggtctgctaacgcctgtcttggaagctggggacgtggacgagggacccgtggcaaggcctctttctccaacccgtctgcaacctgccctacctccagaggcgcagagtgttcctgaactcgaagaggtggctcgcgtgctggctgagatccctcgccccctgaagcgaagaggctcaatggagcaggcaccagccgtagccttgccacccacccacaaaaagcagtaccagcagatcataagtaggttgttccaccgccacggcgggcctgggcctggaggcccagagccggagttgagccctataactgagggctccgaagcaagggctggcccaccggctcctgctccaccggcaccaataccccctcctgcaccttcgcagtcctcccctcctgagcagcctcaaagtatggaaatgaggtccgtcctcagaaaggcaggctcaccgcgcaaggcaaggagggcacggctaaatccccttgtgcttctgctagatgccgctttgacaggcgaacttgaagtggtacagcaagccgtaaaggaaatgaacgacccctctcagccgaatgaggagggaattaccgccctgcacaacgctatctgcggagcgaactattctatcgtggatttcctcattactgccggggctaacgtcaactcccccgatagccacggatggaccccactccattgtgcggcctcctgtaatgatacagtaatatgcatggcgctagtccagcacggagccgctatattcgcaacaactttgtctgacggcgccaccgcatttgagaaatgtgacccttatcgtgagggatacgctgattgtgccacctacctggccgacgtagagcagagtatgggattgatgaattccggcgctgtctacgccttgtgggactattcagccgagttcggagatgagctgtccttcagagaaggagagtcggtgaccgtactccgcagagacggcccggaagaaacagattggtggtgggctgcccttcacggtcaggaagggtacgtcccgcgcaattactttggtctttttcccagagtaaagccgcaaagatccaaggtatag

SEQ ID NO: 15061 - DNA, 1131 bp, synthetic construct
  source 1..1131: mol_type = other DNA; note = Synthetic coding sequence
atggtcgtggaggtcgatagtatgcctgccgctagttcagtcaagaagccgtttggccttagaagtaagatggggaagtggtgttgcagatgctttccttgttgtcgcgagtctggcaagtccaatgtggggactagtggcgatcacgatgactcagccatgaagacccttaggtccaaaatgggaaagtggtgccggcactgcttcccgtgttgtcgaggcagcggcaaatccaatgtgggagcttccggcgatcacgacgacagcgccatgaaaacactgcgaaacaagatggggaagtggtgctgtcactgttttccgtgttgccgaggatctagtaaatccaaggtcggagcctggggcgattatgatgactctgcattcatggaacctaggtaccacgtgaggggcgaagatctcgacaagctgcatagggccgcgtggtgggggaaggtccccaggaaggacttgattgtgatgttgcgcgacacagacgtaaacaagcaagacaaacagaagagaaccgcccttcacctcgcgtccgccaatggcaactctgaagtggttaaattgcttttagacagacggtgccagctgaatgtgctggataacaaaaagaggactgcactcatcaaggccgtgcaatgccaggaagacgagtgcgccttaatgctcctggagcacggcacagaccctaacattcctgatgagtatgggaataccactctgcactacgcaatatataatgaagacaagctcatggccaaagcgctgttgctgtacggcgccgatattgagagtaagaataagcacggattgacgcctctgctactgggggtacacgagcagaaacagcaggtggtgaaattcctcataaagaaaaaggccaatctgaatgccctagaccgatatggcagaaccgctctaatcctggccgtgtgctgcggcagcgcctcaattgtgagcctcctgctcgagcagaatatcgacgtaagcagtcaggatctgtccggccaaactgcccgcgaatatgccgtgagtagccaccatcacgtgatctgccagctgctcagcgactacaaggagaagcaaatgttaaaaatctcttccgagaattcaaatccgggctag

SEQ ID NO: 15062 - DNA, 765 bp, synthetic construct
  source 1..765: mol_type = other DNA; note = Synthetic coding sequence
atgcctgctagtttcccaatgcttagatgcgcccggagcccctgctggacagtgtgctggtctccctggtgtcgcgctttgccagacgggaggtgtagttgcctatctagtccaccaagcccccttggccccacccgcgatccggtggcaaccttcttggagacttgtcgtgagccagggtcccagccagcaggacctgcctcgttaagggccgagtatctccccccgtcggtggcgagtataaaggtaagcgcagagctgctgagggccgccctgaaggacggccactcgggggtgcctctgtgttgcgcaaccttgcaatggttactggccgagaatgccgctgtcgatgtggtcagagcccgcgcactgtctagtattcagggcgtggcacccgacggtgcaaacgttcacctcatcgtaagggaggttgctatgactgatctttgtcctgctggtcccattcaggctgtcgagattcaagtggaatcatcttctctggcggatatatgccgggcccatcatgccgttgtaggcaggatgcaaaccatggtgaccgaacaagccacccaaggttcaagcgcccctgacctgagagtgcagtacctccggcagattcacgctaatcacgaaacactgcttagggaagtgcagacactgagagacagactgtgcactgaagatgaagcttccagttgcgccacagcacagcgactgctgcaggtgtaccgccagctgcgccatccatctctgatccttctgtag

SEQ ID NO: 15063 - DNA, 2046 bp, synthetic construct
  source 1..2046: mol_type = other DNA; note = Synthetic coding sequence
atgtgtggcatcttcgcttatctgaattaccatgtcccgcgtacccggagggaaatccttgagacactgatcaaggggctgcagcgtctggagtacaggggatacgatagtgcaggggtgggttttgacggaggcaatgataaggactgggaagccaacgcttgcaagatacaattgataaagaagaaaggcaaggtgaaggctttggacgaagaggtgcataaacaacaggacatggacctcgacatcgagttcgatgtgcatctgggcatcgcccacacccggtgggcaacacatggagagccgtctccggttaacagtcacccacagcggagtgacaagaacaacgaatttatcgttatccacaatggaattatcacgaactataaggatcttaagaagttcctagaaagcaaaggctatgacttcgagtctgaaacagacacagagaccattgccaagctcgtgaaatatatgtacgataaccgggaatcccaggatacttctttcaccacccttgttgagcgggttattcagcagttggagggggccttcgcgttggtcttcaaatctgtccactttcctggacaggcggtcgggacacgccgagggtcccctctgcttatcggcgtgaggtccgagcacaaacttagcactgaccacattccaattctctatcggacaggcaaggacaaaaagggttcttgcaatcttagccgagtcgactcaactacctgcctttttcctgtcgaagaaaaagccgtcgaatactattttgctagcgacgcaagcgccgtgatcgagcacactaaccgagtgattttcctcgaggatgatgatgtggcagctgtagtggatgggagactatccattcataggattaagcgcaccgcgggcgaccatcctgggagagcagtgcagacattgcaaatggagctgcagcagataatgaaagggaacttcagcagtttcatgcagaaggaaatctttgaacagccggagtctgtggttaataccatgagaggtagggtaaacttcgacgactacaccgttaacctcggcggccttaaggaccacatcaaggaaattcaacgttgccggaggttgatcctgattgcttgcggtacttcataccatgcaggtgtggcgacccgtcaggtgctagaggaactgacagaacttcccgtgatggtggaactcgcaagtgatttcttggaccgaaatactcctgtttttcgcgatgatgtatgtttcttcctgtctcagagcggcgagacagccgacaccttgatgggactcaggtattgcaaggagcgcggggcccttactgttggcatcactaacaccgtgggaagctctatttctagggagactgattgcggcgtgcacatcaacgctggacctgagatcggtgtggctagcactaaagcctacacgtcacagtttgtatccctggtcatgttcgccctgatgatgtgcgatgatagaatttctatgcaagaacgccgcaaggaaatcatgcttggtctgaagcgactgcctgacttaattaaagaagtgttgtcaatggatgatgaaatccagaagttggccactgagctctaccaccagaagtccgtgctcattatgggcagaggatatcactacgcaacttgcctggagggggcactcaagataaaggagattacttacatgcacagtgaggggatactggctggagagctgaagcatggccctttggcactggtggataaacttatgcccgtgattatgattattatgagagaccacacctacgccaagtgtcagaacgccctgcagcaagtcgtggccagacagggacggcctgttgtgatctgcgacaaagaggatacagaaaccatcaagaatacgaagcggaccatcaaagtcccacattcagtggactgcctgcagggcattctctcagttatacccctacagttgttggcgttccacctagcagtgttgaggggatatgatgtggacttccctaggaacctggctaagagcgtgactgtggagtag

SEQ ID NO: 15064 - DNA, 498 bp, synthetic construct
  source 1..498: mol_type = other DNA; note = Synthetic coding sequence
atggaagatctgttcgagacttttcaggacgaaatggggttttcgaacatggaagacgatggcccagaagaagaagagagagtggcggagccacaggcaaacttcaatactcctcaagctctccggttcgaagaactgctcgccaatctgctgaacgagcagcatcagatcgccaaggagctgtttgaacaactgaagatgaaaaagccatccgctaaacagcaaaaggaggtcgaaaaggtgaagccccagtgcaaagaagtccatcagaccttgatcctagacccagcccagaggaaaaggctccagcaacagatgcaacagcatgtgcagctcctaacccagatccacttgctcgcgacctgcaaccctaacttgaatcctgaagcctcaagtacccgcatctgcttaagttgggaaccacttctgaaagccccaagccccttcacaattagtacaactccaagctttaggccctgcagcaaccccgtgacttag

SEQ ID NO: 15065 - DNA, 633 bp, synthetic construct
  source 1..633: mol_type = other DNA; note = Synthetic coding sequence
atggcagcctccgtggagcagcgggagggcacaattcaggtgcagggacaggccctgttttttcgcgaagccctcccaggcagcggacaggcacgtttctcagttttattactccatggaattcgcttcagcagcgagacatggcagaacttgggaaccctgcacaggctggcgcaagctggctatcgggccgtggcaatcgacctgcctgggcttggccactccaaggaggctgcagcccccgcccctatcggagagcttgctcctggatctttcctagctgccgtagtcgatgccctggagctgggaccccccgtggtgatttcaccatctctcagtggaatgtattctctcccctttctgactgctcctggaagccagttgcctggattcgttcctgtggctccaatctgcaccgataagataaatgctgctaattacgcaagcgtcaagacgcctgcactgatcgtgtatggggaccaggatcctatgggacagactagtttcgagcacttgaagcagttaccaaatcatagagttcttataatgaaaggggccggacacccttgttaccttgataagccggaagagtggcatactggcctgttagacttccttcagggtctgcagtag

SEQ ID NO: 15066 - DNA, 1248 bp, synthetic construct
  source 1..1248: mol_type = other DNA; note = Synthetic coding sequence
atgcgcgctgcggatagtggcagttgggaaagggttcgccagctcgccgcccaaggcgaaccggcgccaagttgcggtgctggagcaggtcctgccagacctccgggcccggcggcctgtgagcaatgcgtcgacgcagcgggaccaggcgacagacccagggctggagttcctcgagtgcgggccgatggcgactgttcccagcccgtgcttctccgagaggaggtctcgcggctgcaggaagaggtacatttgttaagacaaatgaaggaaatgttggccaaggacctggaggaaagccaaggcggcaaatctagcgaagttttatcagccaccgagctcagggtgcagttagctcagaaggaacaggagctggcgcgggcaaaagaggcattgcaggctatgaaggcagaccggaagcggctgaaaggcgagaaaacagatctggtctctcagatgcagcaactgtatgcaacgctggaatctcgagaggaacagctgcgggacttcatcagaaactacgagcaacaccggaaggagagcgaggatgccgtgaaggcactggcgaaggaaaaggatttgctggaaagagagaagtgggagctgaggcgccaggctaaggaggccactgaccacgccacagcccttaggtcccagctcgaccttaaagacaataggatgaaagagctggaagccgagctcgctatggctaaacagagcctcgcaacactcacaaaggacgtgccaaaacgtcattccctagcaatgcctggtgaaaccgtcctaaatggcaaccaggagtgggtcgtgcaggccgatctgcctctgactgccgccattaggcaaagtcagcagacactgtaccactcccatccccctcaccctgccgataggcaagcggttagagtgagtccctgtcattctcgacagcccagcgttatcagtgatgcatcagctgctgaaggagacaggagctccactccatcagatatcaattcaccccgccacagaacacactcattgtgtaacggagattctcctgggcctgttcaaaagaatctccacaaccctatcgtccagtctctggaagaccttgaagatcagaaaaggaaaaagaagaaggagaaaatgggctttggctccatctcacgggtctttgcgcgcggcaaacagagaaaatccctggaccccggattgttcgacggcactgccccagattattacatagaagaagatgccgattggtag

SEQ ID NO: 15067 - DNA, 693 bp, synthetic construct
  source 1..693: mol_type = other DNA; note = Synthetic coding sequence
atggaggccgcggaaacagaagccgaagcagctgccttagaggtcctagctgaagtggctggaatcttagagccagttggcttgcaggaggaggctgaactgccagcaaagatcttggttgaattcgtagttgatagccagaagaaggacaaattgctttgtagccaactgcaagtagcggatttcttacagaatattctggcccaggaagataccgccaagggtctagatccgctagcttctgaggatacttcaagacagaaggccattgctgctaaagagcagtggaaagaactgaaagctacttacagggagcacgtggaggccatcaaaatcggcctgaccaaagctctaactcagatggaagaagcacagcggaaaaggacccagctgcgggaagctttcgaacagctgcaagccaaaaagcagatggcaatggagaaaaggcgggctgttcagaaccagtggcaactgcaacaggagaaacatttacaacacctcgccgaggtgtccgcagagggcaaactgctattccccgaagctgaagccgaggctgagaacctccctgacgacaaaccccagcagccaaccagaccgcaggaacagagtactggcgacaccatgggcagagatcccggcgtaagctttaaggccgtgggcttacagccagccggcgatgtgaatctcccttag

SEQ ID NO: 15068 - DNA, 2547 bp, synthetic construct
  source 1..2547: mol_type = other DNA; note = Synthetic coding sequence
atgcaggctgaagccgccgactggttcagcagcatgcctttccagaagcatgtatattatcccctggcaagtggccccgaaggtcccgatgtggccgtcgccgctgctgcggccggcgccgcatctatggcttgcgctccaccgtctgcagccagtgggcctctacctttttttcaatttaggcctagacttgaatccgtggactggcgccggttatccgccatagatgtcgacaaagtggcaggagccgtggacgtcctgacgctgcaggagaacattatgaatattaccttctgtaagctcgaagacgagaagtgtccacactgccagagcggggtcgatcccgtactgctgaaacttataaggctggcccagtttacaattgaatacctgctgcattctcaagaatttctgacgagccaactacacaccctggaggagaggctgaggttgtcccactgcgacggagagcagagtaagaaactgctgactaagcaggcaggagagatcaagacgttaaaggaagagtgtaagaggcgcaagaaaatgatttccacgcagcagctaatgatcgaggccaaggcgaattattatcagtgccatttttgtgataaggcctttatgaaccaagccttcctccaatcccacattcagcggcgccacactgaggaaaatagccactttgaatatcaaaagaacgcccagattgaaaaacttcggtctgagatcgtggtgctgaaggaagagctgcagctcacacgctctgaattggaagctgcgcaccatgcaagcgccgtgcggtttagcaaggagtacgaaatgcagaagaccaaagaagaggacttccttaaactgtttgacagatggaaggaagaggagaaagaaaagctggttgacgagatggagaaggtcaaagagatgttcatgaaagaattcaaggaacttacttctaagaattccgcgctggaataccaactgtccgagatacaaaaatccaacatgcaaattaagtcaaatatcggcactctgaaagacgcgcacgaattcaaggaggacagatctccataccctcaggattttcataatgtgatgcaattactggattcccaagaatctaagtggactgcccgagtgcaggccatacaccaggaacacaaaaaagaaaaaggccgcctgctgagtcacatcgaaaagcttaggacatcaatgatcgacgacttgaatgccagtaatgttttctacaaaaagaggattgaagaactgggccagcgtctccaggagcagaatgaattaattattacacaacggcagcaaattaaagattttacgtgcaacccccttaattcaatttctgaacctaaagtaaacgcacccgctcttcatacgctggagacgaaaagcagtctgccaatggtgcacgaacaggctttctcctcccacatccttgagcccattgaagagttatctgaggaggagaaaggaagggaaaacgagcagaagctgaacaacaacaaaatgcacctgcgaaaagctctcaaaagtaattctagtttgacgaaggggctgaggacaatggtcgaacagaaccttatggagaagctcgaaacgctcgggatcaacgctgatattagaggcatcagtagcgatcaattgcacagagtgcttaagtcagtggaatctgagcgacacaagcaggagagggaaatcccaaatttccaccagatcagagagttcctggagcaccaggtttcatgtaaaatcgaggagaaggccttattaagcagcgaccagtgcagcgtgagtcagatggacacactgagtacaggagaggtcccgaagatgatccagctgccctctaaaaatcggcagcttatacgtcaaaaggccgtgagcacggataggactagcgttcccaagataaagaaaaatgttatggaggaccccttcccacggaagagcagtacgattactacaccccctttctcttccgaggaggagcaagaggatgacgacctgataagagcatatgccagccctggacccctccccgtcccgcctcctcagaacaagggctcttttgggaagaatactgtgaagtcagatgcggacgggactgaaggatccgagatcgaggataccgatgactcaccaaagcccgccggcgtcgcggttaagacacctaccgaaaaagtggagaagatgttcccccaccgcaagaatgtgaacaagccagtcggcgggacaaacgtccctgagatgtttatcaaaaaggaggaattgcaggaactgaagtgcgcagatgttgaagatgaagattgggacattagcagtctcgaagaggagattagtttggggaaaaaatcaggcaaggaacagaaggaacccccgccagctaaaaacgaaccccatttcgcccacgtgctgaatgcctggggggcctttaaccctaaaggccccaagggggaagggttgcaggagaatgaatcatctacattaaaatcatctctggttactgtgaccgattggtcagatacaagcgatgtctag

SEQ ID NO: 15069 - DNA, 1185 bp, synthetic construct
  source 1..1185: mol_type = other DNA; note = Synthetic coding sequence
atggttgtggaggtggacagtatgccggctgcctcgtccgtaaaaaagccgtttggtctgaggagcaagatgggcaagtggtgctgccgttgcttcccctgttgcagggaatcagggaagtctaatgttggaacaagcggggaccatgacgactccgcgatgaaaacactgaggtctaagatggggaaatggtgccgccattgtttcccttgctgccggggttctggtaagagcaacgtgggagctagcggggaccatgacgattccgccatgaaaacattacgtaacaaaatgggaaagtggtgctgccattgctttccctgttgtcggggctcgagtaagagtaaagtgggagcttggggggactacgacgacagcgcatttatggagccacgttaccacgtcaggggagaagatctggataaacttcatcgagcagcatggtgggggaaggttccacgcaaggacctcatcgtgatgcttcgagacaccgatgtgaataaacaggacaagcaaaaaagaaccgcattgcacctggcctccgccaacgggaactcagaagtcgtcaagctgcttctagatcgcagatgccagttaaacgtgctggataacaagaagaggacggcgcttattaaggtgtgttctagccaactctaccagcatgaagcagtgcagtgtcaggaggatgaatgtgctcttatgcttctggagcacggcacagacccaaacatcccagacgagtacgggaacacgaccctccattatgccatctacaatgaagacaaactgatggctaaagccctcctgctgtacggggcagacatcgagagcaaaaacaaacacggactcaccccactcttactaggcgtgcacgagcaaaaacaacaagtcgtgaaattcctgatcaagaaaaaagccaatctgaacgcactcgaccggtacggccgcaccgcactaattctggccgtgtgctgtggctcagcatccattgttagcctgctgctggagcagaatatcgacgtgtcatcccaggacctctctggccaaactgcccgagaatatgccgtctcttcacatcatcatgtgatctgtcagctcctgagcgactacaaagagaaacaaatgctgaaaatctcatcagaaaattcaaatcctgagaatgtatcacggacacggaacaagtag

SEQ ID NO: 15070 - DNA, 1308 bp, synthetic construct
  source 1..1308: mol_type = other DNA; note = Synthetic coding sequence
atggctccattcggacgcaatcttctcaagacgagacataaaaatagatctcctacgaaagatatggattcagaagagaaagagatagttgtctgggtgtgccaggaagaaaaactcgtatgcgggctgaccaaacgtacaacctcagctgacgtcattcaggccctgctggaggaacacgaagctacatttggagaaaagcggtttctgttgggcaaaccttctgattattgtatcattgaaaaatggcggggttcagagcgcgtgctgcctcccttgacacgcattctgaagctgtggaaggcatggggcgatgaacaaccaaatatgcagttcgtcctagtgaaagcagatgcattcctgcctgtacccctatggaggaccgcagaagctaagctggtacagaacaccgaaaagctctgggagttaagccctgctaactacatgaaaacattgccaccagataagcaaaaacgaatcgttcggaagactttccggaaactcgcaaaaattaagcaggatactgtgtcacatgaccgagataatatggaaacgctcgtccatcttatcattagtcaggaccataccatccaccaacaggtaaaaagaatgaaagaacttgatttggaaattgaaaaatgtgaggccaaattccacctggatcgcgttgaaaacgatggtgagaattacgtacaggatgcatatctaatgcccagctttagtgaagtagagcagaatctggatctgcaatatgaagagaaccagacgcttgaggacctgtcagagtcggatgggatcgagcagttggaagaacgccttaagtattaccggattctgatcgacaaactttccgctgagatcgagaaagaggtaaagagtgtgtgcatagatatcaatgaagacgctgaaggggaggccgcttctgagttggaaagtagtaacctggaaagtgtgaagtgcgatctggagaagtctatgaaggcgggccttaaaatccactcacacctgagtggcatccagaaggagatcaagtactcagactccttactccagatgaaggccaaagaatatgaactgcttgccaaagagtttaattccttgcacatcagtaataaggacgggtgccagctgaaggagaacagggcaaaggaatctgaagtaccttcctctaatggagaaattcccccattcacccagcgcgtctttagtaattacacaaatgacaccgactcagatacaggaatctcatctaaccacagccaggactccgagacaactgtgggcgacgtggtgctattgagtacttag

SEQ ID NO: 15071 - DNA, 1644 bp, synthetic construct
  source 1..1644: mol_type = other DNA; note = Synthetic coding sequence
atggcgggcaccaagaataaaacaagggcccaagctaagactgaaaaaaaagcagctatccaggctaaggcaggggccgagcgcgaggcaactggggttgtacgacccgtggcgaaaactcgagcgaaagccaaagcaaagaccgggagtaagaccgatgccgttgcagaaatgaaggcagtctctaagaataaagtcgttgccgagactaaagaaggggcccttagcgagcctaagacccttggcaaagctatgggagattttactcctaaggccggcaatgaaagtacttcaagtacttgcaagaatgaagccggcaccgacgcttggttctgggcaggcgaggaggctactataaattcatggttttggaacggagaagaagccgggaattcatttagcacaaagaacgataaacctgagatcggcgcccaagtgtgcgcagaagaattagaacctgctgctggggctgactgtaagccccgctctggcgctgaggaggaggaggaagaaaacgtcataggcaactggttttgggagggcgacgatacttctttcgatccgaaccctaagccagtgtctaggattgttaaacctcagcccgtgtatgagattaatgagaaaaaccggcccaaggactggtctgaagttaccatttggccaaatgcgcctgccgtaactcccgccgtgctggggttccggtctcaggctccctcggaggcatcccctccatcttacatcgtgctcgctagcgcagaggagaatgcctgcagcttgcctgtcgccactgcttgtagaccttcgagaaacacacgcagttgtagtcagcctattcccgagtgtcgttttgattcagatccgtgcatacaaactattgatgagattcgcaggcagataagaatccgggaggtgaatggaataaagccatttgcctgcccctgtaagatggaatgttacatggacagcgaggaattcgaaaagctcgtaagccttctcaagagcaccacagaccccctgattcataaaatagctaggatagcaatgggcgttcacaacgtgcacccttttgcccaagagttcatcaatgaagtgggagtcgtgaccctgattgagtccctgcttagcttcccttctcctgagatgcgaaaaaaaactgtcattactctgaacccacctagtggtgacgaaagacagcgtaagatcgagctccacgtgaagcacatgtgcaaagaaacaatgtcattccctctgaacagtcctggccagcagtctggcctcaaaattctcggtcaattaaccactgattttgtgcaccactacatcgtggccaactatttctctgagctatttcacctcctgagctccggtaactgcaagaccaggaatctcgtcctaaaactgttgctaaacatgtcagagaatcccacagccgcccgagatatgattaatatgaaggccctggccgcgctcaagttgatatttaaccagaaagaggccaaagcaaatctggtctctggtgttgcgatatttatcaatataaaggagcatatccggaagggcagcattgtggtggtggaccacctgtcctacaatacactgatggcaatctttcgggaagtgaaagaaattatagaaacaatgtag

SEQ ID NO: 15072 - DNA, 1362 bp, synthetic construct
  source 1..1362: mol_type = other DNA; note = Synthetic coding sequence
atggcacgcaaagtcgtatctaggaaaaggaaggcacccgcgtctcctggtgcaggcagcgatgcccaaggccctcagttcgggtgggatcacagcctccataagcgaaaaaggctaccccctgttaaaagatccctggtatactacctcaagaatagggaggtgcggctgcagaatgaaacgtcctactctagggtgttgcacgggtacgcagcgcagcagttaccctcacttttaaaggaacgggagttccatctgggcaccctgaacaaagtctttgcatcacagtggctgaaccatcggcaggtggtgtgtggaaccaagtgcaacacgttgttcgtggtcgacgtgcagacctcacagattactaagatcccgattctaaaggacagagagcccggaggcgtcacgcaacaagggtgtgggattcacgcgatagagctcaacccttcccgtacccttctggctaccggaggagataaccctaattctcttgcaatttatagactgcctacactcgatccagtgtgtgtgggagacgatggccataaagactggatctttagtatcgcttggatcagcgatactatggctgtgagcggttcgcgcgatggctccatgggactctgggaagttactgatgatgtgctcacgaagagtgatgctaggcataatgtctctagggtgccagtgtatgcccatattacacacaaagccctgaaggacatacctaaagaggacacaaatcccgataactgtaaggtccgggccctcgcgttcaacaacaaaaacaaagagctaggcgctgttagccttgacggatatttccacctgtggaaggccgagaacactctatccaaattgctatctacaaagcttccttactgtcgagagaacgtgtgcctggcctatggctctgagtggagtgtgtatgccgtgggctctcaggctcacgtgtcgttcctggatccaaggcagccaagctataatgtgaagagtgtatgttctcgtgaacgaggcagcggaatcagatccgtgtccttctatgaacacattatcacagtggggaccggtcagggatccctcttgttttacgacatccgcgcccagagatttttggaggaacggctctctgcttgttacgggagcaagcccaggttagccggcgaaaatcttaagttaaccactggcaaagggtggcttaaccatgatgagacttggaggaattactttagcgatatcgattttttccctaacgccgtgtatacgcactgctatgatagctcaggaaccaagctgttcgttgccggaggtcccctgcccagcggcttgcacggcaactatgctggattgtggagctag

SEQ ID NO: 15073 - DNA, 2439 bp, synthetic construct
  source 1..2439: mol_type = other DNA; note = Synthetic coding sequence
atggaggcatttcaggagctccggaaaccatcagcccgactggagtgcgaccattgttcttttcggggcaccgattatgagaacgtccagatccatatgggaactatccatcctgaattctgtgacgaaatggatgcaggtggactggggaaaatgattttttaccagaagtccgcaaagctctttcactgccataagtgtttctttacaagcaaaatgtattctaacgtatactaccacattacctcaaagcacgcctctccagacaaatggaatgataagcctaagaatcaactcaataaagagaccgacccagtaaagtctcctcccttgccagaacatcaaaaaatcccctgtaacagcgccgagcctaagtcaatcccggctctatccatggaaacgcaaaaactcggttcagtgctcagtcctgagagtccaaaacccacaccactaacacccctggaaccacagaagcccggcagcgtcgtttctcctgagcttcagaccccactcccttcacccgagccatccaagcctgcctccgtctccagccctgaacctcctaaaagcgtgcctgtgtgtgaatctcagaagctggctcccgtgccaagcccggaaccccagaaaccagcccctgtgtctccagaatcggtgaaagccacactctcaaatccgaaaccgcagaaacagagtcatttccccgaaaccttaggacccccctccgcttcctcccctgagagcccagttcttgccgcatccccagaaccgtggggacctagtcccgctgcgtctcccgaatccagaaagagcgctcggactaccagtcctgagccaagaaagcctagtccctcagaatctcctgagccctggaaaccctttcctgcagtgagccctgagccacggagaccagctcccgctgttagccccgggtcctggaagcccggcccgccaggcagtccgagaccgtggaagtcaaacccttccgcttcaagtggaccatggaaacctgctaagccagcccccagcgtgtctcctgggccatggaagcccatccctagcgtgagtcctggtccctggaagcctacaccttccgtcagcagtgcatcctggaaatcttcatcagtctccccttcttcttggaaatccccccctgcgagcccagaaagttggaagagcggcccccccgaactccgaaaaacagcaccgactctgagccctgaacactggaaggccgttccccctgtgagcccggagcttcggaagccaggcccacctctgtctccggaaatccgatcacccgctggttctcccgagctcaggaagccgtctggctcccctgatttatggaagctcagtcccgaccagcggaaaacaagtccagctagcttggactttcccgaatcccagaaaagctcccgcggagggtctcccgacctttggaaatcctcattttttatcgagccacagaaacctgtcttccctgagacgagaaagcccggcccatcgggcccatctgagagccccaaagctgcctcagacatttggaagcccgtgctctctattgatacagaaccacggaaaccagctctctttccagagcctgccaagactgcgccccccgccagtcccgaagcgcgtaagagagcactctttcctgaacctcggaagcacgcacttttcccagagttgcctaagtcagccctttttagcgagtctcaaaaggccgtcgaactgggggatgaactgcaaattgacgccattgacgatcagaagtgcgacatcctggtgcaagaggagctcctcgctagcccgaagaagctcctagaggataccctctttccctcatctaaaaaacttaaaaaggataaccaggagtcatccgatgctgagctgtccagcagtgaatatatcaaaacggatttggacgctatggacatcaaggggcaggagtcgtcatctgatcaggagcaagtagacgttgagagtatcgatttcagtaaggagaacaaaatggatatgacttcacccgaacagtcgcggaacgtgctccagtttactgaagagaaggaggcatttatttccgaggaagagatcgcaaagtatatgaagaggggtaaagggaagtactactgtaaaatatgctgttgcagggccatgaagaaaggagcggtcctgcatcacttggtcaataagcacaatgtccacagcccttacaagtgtaccatttgtggcaaagcttttctgctagaatctcttctgaagaatcatgtcgccgctcatggccagtctctgcttaagtgcccaagatgtaacttcgagtccaacttcccacggggctttaaaaagcacctgactcattgccaatctagacataatgaggaggccaataaaaaactcatggaagccctggagccacccctcgaagagcagcaaatctag

SEQ ID NO: 15074 - DNA, 1974 bp, synthetic construct
  source 1..1974: mol_type = other DNA; note = Synthetic coding sequence
atggatgaacaggaggctctcaactccatcatgaacgatttagtcgcgctgcagatgaatcgtcgacaccgcatgcccggctatgagacaatgaagaacaaggatacaggacatagcaaccggcagaaaaaacacaattcctcgagcagcgcgctgctgaattccccgacggtcacaacgtcaagctgcgccggggcttctgaaaagaagaagtttctgagtgacgtcagaatcaaatttgagcataacggggagagaagaataatcgctttttcgagaccagtgaagtacgaggacgtagaacataaagtcacaacagtgttcggacagccattggacctccactacatgaacaacgagcttagcatcctcctgaaaaaccaggatgacctcgataaggccattgatatcctggatagatcgtcctctatgaaaagcctcaggatactgctgctgagtcaagatcgcaatcacaattcaagctcacctcactcaggagtgtctcggcaggtccgaattaaggcatctcagtccgctggagacataaataccatttatcagccccccgagccaagatccagacacctttccgtgtccagccaaaaccccggtaggagttcaccgccaccaggatatgtccctgagagacagcagcatatcgcccgccaaggctcatatacgagcattaactccgaaggcgagtttatccctgagactagcgagcagtgcatgctggaccccctgtcctccgcagagaatagtctgagcggcagctgtcagtctctggacagaagcgcagactcaccgtcctttcggaagagtagaatgtccagagcacagtcattcccggataaccgacaggagtactctgacagagaaactcagttgtacgacaaaggagtgaagggaggaacctacccaagacgttatcatgtttccgtgcaccacaaagactattcggacgggagacgcaccttccccaggattcgccggcaccagggcaacttattcacacttgtgcctagctccagatccctgtccacgaatggagaaaatatggggcttgcggtacaatacctggatccacggggtcgcttacgaagcgccgatagcgagaatgccctctccgtgcaagaaaggaatgttccgacaaagagtccaagcgcccctatcaattggagaaggggcaagctgctgggacagggtgccttcggccgcgtttacctctgctatgatgtggacaccggtagggagctcgcaagcaagcaggtgcagtttgatcccgattctcccgagacctcaaaagaggtgtctgcactggaatgcgagattcagctgctgaaaaacctgcagcacgagcgcatcgtgcagtactacggctgcctccgggatagggccgagaagacgctcacaattttcatggaatatatgccgggcggcagtgttaaggaccagcttaaggcttacggtgcccttactgaatcagtgactaggaagtacactagacagattctggaggggatgtcttatctacacagtaatatgattgtgcatagagatatcaagggggctaacattttacgtgactcagccgggaacgtcaagcttggtgacttcggagcctccaaacgtcttcagaccatttgcatgtctgggactggcatgcgatccgtgactggcactccctattggatgtccccagaggtcatctcgggggaaggctacggtcgcaaggctgatgtgtggagtctcggatgcacggtggtagagatgctcactgaaaagccaccttgggcagagtatgaggccatggccgctattttcaagatcgctacccagccaactaatccccagcttccctctcacatatcagagcacggacgcgacttcctaaggcgcatcttcgtcgaggcccgacagagacctagcgccgaggaactccttacccatcactttgctcagttaatgtattag

SEQ ID NO: 15075 - DNA, 2547 bp, synthetic construct
  source 1..2547: mol_type = other DNA; note = Synthetic coding sequence
atgcaggctgaggctgcagactggttcagctccatgccattccagaaacacgtctattacccgctggccagtggccccgaagggcccgatgttgccgtagccgccgcagccgccggagccgccagcatggcctgtgcccctccctccgccgcaagcggcccgctgcctttctttcagtttcggcctagactggaatcggttgattggagacggctctctgctatagatgtcgacaaagtggccggcgccgtggatgttctcactcttcaggaaaacatcatgaatatcacattttgcaaactggaggacgagaaatgtccacactgtcagtccggggtggacccagtgctcctgaagttaattcgattggctcagtttacaatcgaatatcttctgcactcacaggagtttctgacgtcacagttgcacacactggaggaaaggttaagactttcccactgtgatggcgagcagtcgaagaagttattgacgaagcaggctggagaaatcaagaccctgaaggaagaatgtaaaaggcggaaaaagatgatatcaacccagcagctgatgatagaagccaaggctaactactatcaatgccatttttgcgataaggcctttatgaatcaggcttttctacagtctcatattcagagaaggcatacggaggagaactcacactttgaataccagaagaatgcccaaatcgagaagctgagatctgaaatcgtggttcttaaggaagagttgcagctgacccggagcgaactcgaggccgctcaccacgcaagcgctgtgcgattcagtaaagagtacgagatgcagaagactaaagaagaagatttcctgaaattattcgacagatggaaggaagaggaaaaggagaagcttgtggacgaaatggaaaaggtgaaagagatgtttatgaaagaattcaaggagctgactagtaaaaactctgccctggaataccagctcagcgagatccaaaagtcaaacatgcagattaaaagcaatatcggcactttgaaggacgctcacgagttcaaggaggacagatctccatacccccaggacttccacaatgttatgcagcttctcgactctcaggaaagtaaatggactgcccgtgtgcaggctatccaccaggagcacaaaaaagagaaagggaggcttttgagccatatcgaaaagctgcgaacgtccatgatagacgacttaaacgcctccaacgttttttataagaaacgcatagaagaactaggtcaaagattgcaggaacaaaacgagctaattatcacacagcgccagcagatcaaggacttcacatgtaatcctctgaattctatcagcgagcctaaggtgaatgcacccgcccttcacacgctcgagactaaatcctcgttgcccatggtccatgagcaagctttttcaagccacattcttgaaccgattgaagaactctccgaggaagagaagggccgggagaacgagcaaaagctcaacaataacaagatgcatctccgtaaagctcttaagtctaactcctctctcacgaaaggactccgcaccatggtggaacaaaatcttatggagaagctcgagaccctaggaataaatgctgatataagaggcatcagctctgaccaactccaccgggtgttaaaatcagtggaatcagagcgacataagcaggaaagggagataccaaacttccaccagatcagggaattcttggagcatcaggtatcctgcaagattgaggagaaggccctcctgagctcagatcagtgctccgtatcacagatggacacactgtcaactggggaagtgcctaagatgatccagttgccttctaagaaccgccagctgattcgccagaaagctgtgagcactgacagaacctcggtccccaagatcaagaaaaacgtaatggaagacccctttccgcgaaaaagctctacaattacaaccccccctttttcttctgaggaggaacaggaagacgatgacctcatacgcgcctatgcatcaccaggaccattgccggtcccacccccccagaacaaaggctcatttggaaaaaatacagtgaaatcagatgcggatggaactgagggttcagaaatcgaggataccgacgatagccctaagccagccggggttgccgttaaaacccccaccgaaaaagtggagaaaatgttcccgcaccgaaaaaacgttaataagcccgttggcggaacaaacgtccctgagatgttcattaagaaagaagaactgcaggaactgaagtgcgctgatgtagaagatgaggattgggacatctcctctctggaagaggaaatctctctgggaaagaaaagtggtaaggagcagaaggagccaccgcccgccaagaacgagccccactttgcacatgttttgaatgcatggggcgcatttaatcctaaaggtccaaagggcgaggggttacaggagaacgagtcttctacgctcaaaagttccctggttaccgtgaccgactggagtgacacaagtgatgtgtag

SEQ ID NO: 15076 - DNA, 4074 bp, synthetic construct
  source 1..4074: mol_type = other DNA; note = Synthetic coding sequence
atggccgatacagacttgttcatggagtgcgaagaagaggagctggagccctggcagaagatttcagacgtgatagaggactcggtggtagaggactataacagtgtggacaaaacaaccaccgccggcaaccctctggtacagcaggggggacaaccccttatattaacgcagaaccccgctccaggtctcgggaccatggtcacccagcccgtcttgagaccagtgcaggtgatgcaaaacgccaaccacgtaacaagtagccctgtcgctagtcagccaatctttatcaccactcagggctttcccgttcgaaacgttagacctgtccagaacgccatgaaccaagttggaattgttctgaatgtgcagcagggccaaacagttagaccaattaccttggttcctgctcctggaacccagtttgtgaagccaacagtaggagtaccacaagtgttttcacaaatgacgcccgtgagacccggctccaccatgcctgtgcggccaaccacaaatacatttaccactgtaatacctgcaaccctgaccatacgatctactgtgcctcagtctcagtcccagcagactaaatctacgcctagtacttccacgacgcctacagccacacagccaacaagtctcgggcagctggcggtgcaaagtccaggccagagcaaccagaccactaaccctaaattggcccctagcttcccctctccacctgcagtatccattgcctcttttgtgactgttaagagacccggggttacaggggaaaactcgaatgaggtggccaagctagtgaatacccttaacaccattccatcactgggccagtcgcctgggccagtggttgtgagcaataatagcagcgcccacggaagtcagagaaccagcgggcccgaatcctcgatgaaggttacctctagtattccggtgtttgatcttcaggacggaggaaggaagatttgtcctagatgtaatgcgcagtttcgagtcaccgaggctctgaggggacacatgtgttactgttgccctgagatggtcgagtaccagaaaaaaggcaagtccctggacagcgaaccttccgtgccatctgcggcaaaacctccctcccccgaaaagaccgctcccgtggcttcgaccccaagctctacccccatccctgccctatcaccgcccaccaaagtgcctgaaccaaacgagaatgtgggtgatgctgtgcagactaagctgatcatgctagttgacgacttttactacggcagggatggaggaaaggtggctcagctcaccaactttcccaaagtggccacttccttccggtgtcctcactgtaccaagcgacttaagaacaatatcaggttcatgaatcacatgaagcaccatgtcgaattggatcagcaaaacggcgaggttgatggtcacaccatctgccagcattgttatcggcaattctccacgccgttccagctgcagtgtcatttggagaatgtgcactcgccctacgaatcaactaccaaatgtaaaatttgtgagtgggcgttcgaatcagaaccactgttcctgcagcacatgaaggacacacacaagcctggagaaatgccctacgtttgtcaagtgtgtcagtataggtcctccctctattctgaggtcgacgtccactttcgcatgattcacgaggacaccaggcatctgctgtgcccatattgcctcaaagtgtttaaaaatgggaatgcctttcaacaacactatatgcgccaccagaagcgcaacgtttaccattgcaataagtgcagacttcagtttctcttcgcaaaagataagatagaacacaagctgcagcaccataaaacatttaggaaaccaaaacaattggagggcttgaaacctggtaccaaagtgaccatccgagcttctaggggccaacctaggacagttcccgtgtctagcaacgatacgccaccatcagctctgcaggaagccgctccactgactagctccatggaccccctgccagtatttttgtatccccccgttcagagatcaattcagaaacgagcggtgagaaagatgtcagtgatgggccggcagacatgcctagaatgctcattcgaaattcctgattttccaaatcacttcccaacctacgtccactgctcactgtgccggtactccacttgctgttcccgcgcgtacgctaatcatatgattaacaatcacgtgccccgcaagagccccaaatatctggctttgttcaaaaattcagttagcgggattaaactggcatgcacttcctgtacatttgtgacatccgtcggcgacgccatggccaagcacctggtgttcaatccgagccacaggagctctagcattcttccccgcggcttaacctggattgctcatagtcgacacggtcagactagggaccgagtgcatgatcgcaatgtcaaaaacatgtacccccccccttccttccccactaacaaagctgccacggtaaagtccgcgggcgcgacgccggctgaaccagaagaactgttgacgcctctagccccagccctgccttcccctgcgagcaccgcaacacctccccccacacccacccacccgcaagcactcgcccttcctcctttggccaccgagggggctgaatgccttaatgtggacgatcaggacgagggatcccctgttactcaggaacccgaattggcttccggcggcgggggatctggtggggtcggtaagaaggagcaactctcagtcaaaaagctccgtgtggtgcttttcgccttgtgttgcaacactgagcaggcagccgagcactttcgtaaccctcagaggcggattagacgttggctgaggcgctttcaggcatcccagggggaaaacttggaagggaaatacctcagttttgaagctgaagaaaagctggcagagtgggtcttaacccagcgcgaacagcagcttcctgtgaatgaggagactctgttccagaaggccactaagatcgggcggtctctggaggggggcttcaagataagctacgaatgggccgtacggtttatgttaagacaccatctgactcctcacgctcgacgggctgttgcccacacactgcctaaggatgtggctgaaaatgccggattgttcattgattttgttcagcgtcagattcataaccaggacttgccactgagcatgattgtagctattgatgagatctctttatttctcgacacagaagtactgagctccgatgaccgaaaggagaatgctttgcaaaccgtgggcaccggcgaaccatggtgtgatgtcgtcctggccatcctagcggatggcactgtgctgcccacactcgtgttttacagaggtcagatggaccagcccgctaacatgcctgacagcatcttgttggaggctaaagagtctgggtactcagacgatgagattatggagctgtggtccacccgggtttggcaaaaacatactgcatgccaaaggtctaagggtatgcttgtgatggactgccaccggacccacctctctgaggaggtactggcaatgctcagtgccagctccacgctgccagcggttgtgcccgcagggtgctctagtaaaatacagccactggacgtttgcataaagcgaaccgtcaaaaatttcctccataagaaatggaaggaacaggctagggaaatggctgacacagcctgcgactccgacgttttactacagctggtcctcgtgtggcttggagaggtcttaggcgtgatcggtgactgccccgaactcgtccagagatcatttctggtggcttctgtactaccagggccagatgggaacatcaacagtcctacccggaacgccgacatgcaggaagaacttattgcgagtctggaagagcaactgaaactgagcggcgagcacagtgaatccagcacaccacgaccaaggtccagccccgaggaaactatagagcccgagtccctgcatcagctgtttgaaggggaatctgagaccgaaagcttctacggattcgaagaggcagatctggacctgatggagatctag

SEQ ID NO: 15077 - DNA, 2904 bp, synthetic construct
  source 1..2904: mol_type = other DNA; note = Synthetic coding sequence
atgggtcccggccaacctgcctccacctgcgtgcatctcgcaccacggacacagcttgacggtagatccgatcccaaggtcttacaaacacagaaccagcttcagtttaatcgaaatgtaccaacgcactcatctaatctggctatccgttactcttgtccacatgctatccgaatagaaaagctgaaacactcctacaatgaaagttatcattgcaaagacgccgactgcagagtgggccccgatctggggtcttctgtctcgttcagtgttattagccaggagcggctatcttacgccgtccacctggcccgtagggatgtgaagagaagacagttcgaaaaacacattaaggagcatcatctgcggtcacagcctcagtctagccagaagtgtggccacactaaatacaagatacctgaccaccgggtagagcgcaaagagagcaaatctcaggcggcttgccagtgcagccaccagccttccaaagtggagatctccagctcaggcgctaaagtctatctgtactccagccatcctggacagagtgacctgacagtgcccaatagccctcccacccatgacccggggcttcagccacaccccagaatcggagaccacaaaaacatttctgaacaaaaatcactcttagaagttcaacggctgcagaaggaactttcgagttgtatccataagatcgaggaggtgactaagaaagatcggctcgaggaggcgctggaccctgatgaggagcggagaataagaattcgccgccaggagcaagccgctaggtccgccagaatgctttatgtactccaacagcaggtcaaagagattcaggaggagctggataaactctcaccacacaagataaagcacacaaagaaaagttgggccatgagtaaattagcagcagcccatcgcggggccatccgcgctcttcagatgtttgtaacgcagtttacagataggggtgagcatcccctgcccgctagatgcaaggagttgggcagcctgattcgtcaactgtcgctgtgctcagtgaaactcgacgctgatccgtcagtgcctgacgtggtaatcgatattcttcagcagatcgaagcactcgaatctttactcgaaaaaaagctgagtcccaaaaaggtgaaaaagtgtttctcggaaatacgcagcagatttccaattggatcacagaaggccctggagcgctggccgtcgacttcccccaaaggagagaggaggcctctcacggcaaaagataccttccctcaggaaacatctcggccttctgttgccaagcagctcctggctgataaatatcagcctgatacagaactgcccgaaacacagcgattacagagtgagctggatgtcttggatgctgatattgtcctggaagaaggcccattcatactggaccagtcagcctcttttaaggacgaagtattagccgtggccaaaacgaaggccgggaagaagaaacccgtgacagagaatgtaccttttcgaaaaaaagataccctagccccagcccgccaacagggacttaggaaagctgagcggggaaggcagtctcagcctcactctaagtctagggtacagcaaaccaccgtcagtagccggcttaagatgaatcgtcagccagtgaaagacaggaaggccccttggatacctcctaacccaacttcaccgcctgccagtcctaaatgtgcagcttggctcaaagtgaaaacctccccaagagatgcaactaaggaaccactgcagcaggaggacccacaggaggaatctcatctcacaggagcagtcgaacatgaagccgcccgccttgcatggcttgatgctgaaacaagtaaacgattaaaagagttggaagagctcaaagccaaggagattgatagcatgcagaagcagcggctggattggctagatgccgaaacctctcgccggacaaaggagctgaacgagctcaaagccgaagagatgtacaggcttcagcagttgtctgtgtctgccacccatttggccgataaggttgaggaggctgttctagatcgactgaagcctttgctagtcaaagcccagagagtgaacagcaccactgaagcaaacatccacctgaaggacggaagcagtgtgaacaccgctaaggcccaaccagcacaggaggtggctgctgtcgatttcgaatctaataacatcagacaactcgacgacttcctggaggattgcgcgagcgagctatgggcagtaacccatgcaaaaattttaggatccgagacgctggccacagtggaagactccaaggactcgcctgacctggaaataatgatgagacggatggaagaaatggaaaagtaccaggagagtgtacggcagcgatataataaaatcgcttatgccgacccccgtctctggatgcaggaagagaacaatgaccaaaaaattagcgcgatttccgaaaaacctctcagtccgcacccaatcagaattactaagacagtggacaggaaggatcccgcagtgaatatcatgctggagcgtccctgcaacggaaattcgttagacgagagtgtagggactgaagaaggctctgaaaagcgagaagctccactccttagcctcgccgaagatagccagcagaaagaggggagagcaccgctctttgtgccccccggaatgcagcattccattggagattattgctccaggttcgagcagtacctgcggattatctcccacgaggccgtgggctcattcaacccctggctgatagcagaatccttttccgaagagctcgtggatgaagccttaggggcagtggccgcggagctgcaggacatgtgcgaagattacgcagaggcagtatttacatccgagtttctggaggctgctacttag

SEQ ID NO: 15078 - DNA, 6840 bp, synthetic construct
  source 1..6840: mol_type = other DNA; note = Synthetic coding sequence
atgtataggtcgagtgcgcggtcaagcgtttcctctcatagacctaaggacgatggcggcggaggccctcgctccgggcgctctagcggatcgagctccggtccagctagacgctcatcccctcctccaccaccatcaggcagcagcagtagaactcctgctaggcgcccgaggagcccctcaggccatcgtggtagacgggcaagtccatccccaccccgcggacgacgtgtgagcccctcgcccccacgggctcgacgtgggtctcccagccctcccagggggcgtcgtctgttcccccccggacctgcgggattccgaggctctagtaggggggagtcgcgcgcagattatgcacgcgacgggaggggtgaccatccaggcgactctggctcccgtcgtagatctcccggcctctgttctgattctctcgaaaaaagtttgaggataactgtgggcaacgaccacttctgcgtttccacacccgaacgtcgtcgactctccgaccgtctgggttctcccgtggacaacctggaggatatggaccgggacgaccttactgacgactcagtgtttacaagaagttcacagtgttcaagaggactcgagcggtacataagccaggaagaggggccactaagcccttttttgggtcaactcgacgaggactaccgtactaaagaaacttttctgcacaggagtgattattcaccacatatcagctgccatgacgaactccttaggggtactgagaggaatcgagaaaagttgaaggggtattccattcggagcgaagagcgaagcagggaagctaaacgtccgaggtatgacgacaccgtgaagataaacagcatgggcggtgaccacccaagttttacctccggcacccgtaactacaggcagcggcggaggagcccaagtccacggttcctggacccagagttccgcgagctcgatctggcacgtaggaagcgagaggaagaggaggaaagatcacgctccctttcacaggaactcgtgggcgtcgacggtggaggtacgggctgcagcatacctggcttatcaggtgttttgacagcttcagaacccggctactcactgcacaggccagaggaggtcagcgtgatgccaaagaagtctatactgaagaaacggatagaggtagacataatggaaccatccatgcaactagagagtttctctagctccacatcttctagccaggaccatcccttgtatagcggccatccaagcctgcccttatcgggagcaatcgccgcttttgcttccgaaattgagaataagggtaccatggtagaaactgctttaaaggaacctcaggggaatttgtaccagtgggggcctctgcccggtatcccgaaggacaacagcccactccgggaaaagttcggaagcttcttgtgtcataaagataacctcgatctgaaggccgaggggcccgaaagacacaccgatttccttctgccccatgagcgcgcaagccaagatggtagcgggtttagccgcattctgtctatgctggcagattccacatctacacaagagaagaggaggcgctcgttccccgacattgaggacgaagagaaatttctgtacggcgatgaggaggaggatctgaaggctgagtcagtccctaagcctttgggatcctctgagtccgaggtgatgcgccagaaagcttctagcctaccctcgagcgccccagccgtcaagttggaatccctagaagagacaaatcctgagtacgctaaaattcacgacctgctcaaaacaatcgggttggacattggagttgccgagatctcgcaattagccgctagaactcaagaacgcctgcacgggaagaagccttcactgagatccagcgccgaccgaaggtccagtgtggaccgctacttttcggcagatcactgcagcagcgtagatcaccgtttctctgctgaccgatgtagcagcgtcgatcattgcttcagcgctgataggagatcctcagatccacaccggctcgaatctagagaggctcatcattccaatacccatagtcccgaggtgagccacccccaccccccaagccctgtcgatccatatctgctgacaaaaaatagcccccctttcctgaagtcagatcacccagtcggacacatctccggtcccgaagtcgtgggctctgggttccagtctagtgtggcggtccgctgcatgttaccctccgctccatccgccccaattcgactgccccataccgctgccctgagtcagttccacatgcccagggcaagccagttcgccgcagcacgcatcccaccaaactatcagggcccagcaatacctccagcttccttcgacgcttacagacattatatggcgtatgcggcaagccggtggccaatgtaccctacctctcagccttccaaccacccagtgcccgagcctcacagaattatgccaattaccaaacaggctacccggagtaggcctaacctccgggtaattcccacagtgactccagataaacccaagcagaaggaatcactccggggttctataccagcggcccaagtgcctgtgcaagtctccatcccttctctcattagatacaatcccgaaaaaattagcgatgaaaaaaaccgcgccagtcaaaaacagaaggttatagaagaacgagaaaagctgaaaaacgaccgtgaggctaggcaaaagaaaatgtattatttgcgaaccgaattggagcgactgcacaaacaacagggtgaaatgttgcggaagaagagacgcgaaaaggacgggcacaaagatcctctacttgtcgaggttagtcgcctgcaggataacattatgaaggacatcgctgaactgaggcaggaggccgaggaagcagagaaaaaacagtcggagctggacaaagttgcacagattcttggaattaatatcttcgataagagccagaagagcctgtcggattcccgtgaacctaccgagaagccagggaaggcggaaaaatctaaatcaccagagaaagtcagctcattttctaacagttccagcaacaaggagtcgaaggtcaacaacgagaagttccggaccaagagtcccaaacctgcagaaagtccacaatctgcgaccaaacagctagatcagcccacagcggcctacgagtactacgacgccgggaatcattggtgtaaggactgcaatactatttgcggaacgatgtttgacttttttacgcatatgcataataagaaacacacccagaccctcgacccctataatcgtccatgggcttctaagacccagtccgaggcaaagcaggatgccatcaaaagaaccgataaaatcactgtgcccgcgaaaggatcagagttcctcgttccaatctctggcttctactgtcagctttgcgaggagttcttgggggaccctatcagtggagaacagcacgtcaaagggcaccagcataatgaaaaatataagaagtacgtagacgagaacccattatacgaggagaggaggaacctggaccgccaggccggcttggctgtggtgctggaaacagaacgaaggaggcagagcgaattgaaacgcaagttatccgagaagccaaaagaggagaagaaagagaagaaagctaaagcagtgaaggaagtgaaggaggacgacaaagtcagcgaaaagctcgaggatcagctgtcagagggcagaaatagcccagagaaagccgagaacaaacgcaatacgggaatcaagctgcaattgaaagaggaagttaaaaaggaatctcctacctctagttcgttcggcaaattttcctggaagaaaccggagaaagaagaggagaagtcctcgctggttacacctagtatttccaaggaagaaattttagagtccagcaaggacaaggaagatggcaaaactgaggccggtaaggccaagcctataaaaatcaagctctctggtaaaacagtggtggcacacacatcaccatggatgcctgttgtgactacctcaacccagaccaagattagacctaatctccccatcccctccacagtgttacgcaagtcctgctccgcgacaatgtccaagcccgctcccttgaacacctttctgtccattaaatccagtggtacaaccgcaaagccgctccccgtggtcaaagagtctagtgctgatctcctgttacctccagacatcatcagtaaagcctttgggggcgaggaggtaatactcaagggatctcccgaggaaaaagtggttctcgccgaaaagagcgagccatcccacctgcccgaacagattctgccacctccaccgcctccacccccaccacctccaccacccccgcccgtgatccctcacccagctgcgccttctgctgctcaggccaacgccattttggcccctgtcaaatccaacccggtggtgagtcagactcttagccccggtttcgtcggacctaacattttaaacccggttctgccagtcgccatcatggcgagtgcgcaacccgcagctatcccgtcagacgagactgcacctggagtatcagagagtgatcgagatcaaaccttgttttctgtgctggtcagacctccaccgcccctctccagtgtctttagcgaacaggccaagaaattggagaaacggaactcctgcctggctaccgcaaacgctaaagatctgtatgacatattttattcaagcggcggaaagggcgcgccagaaacaaaaggagccccagaaaccaagctgagtggcggacccctggcaaacggcgagaacagtaatctgtcccgcactaaaagctccgacacatcatccacatctcctttaaatagttcagccagccaggaggagctgcaccaggatgaggggctggttgctgccccaatcgtaagtaattcagagaaacccattgctaaaacactcgtggccctcggtaagtggtcagtggttgagcacgtgggccctaagtccaccggaagcacgtacgggttcctgcagccacttactcgactttgtcagagccgaccttacgagactattactcctaaaacagatactctggcaatctggacaagtagcagcttccagagtgatacttcgagggacatctctccagaaaagtcagagctggacctgggcgagccaggtcctcccggagttgaacctcctccacagcttcttgatatccagtgtaaagagagtcagaagctggtggaaatccacctccgtgagtccgtgaaccaagataaagaaagccaagagctccgcaaatctgaggattgccgggagtctgaaatcgaaaccaacaccgaattgaaggagcgcgtaaaagagctcagcgagggaattgtggacgagggagtgtccacctccattggtccccattctatcgacgattctaatctgaaccacggcaaccgctacatgtgggaaggggaggtaaagcagcccaatcttcttatgatcgacaaagaagccgagcagagcaacaagctcatgaccgggtccgagaccccctcaaaggtcgtaataaagctctcaccacaagcctgttccttcaccaaagcaaagctggactcgtttctgagtgaggccaggagtcttctcaacccccaggacacacccgtaaagatctctgcacctgagttgcttcttcacagtccagctcgcagtgctatgtgcttaaccggtagtccacaggaacaaggtgtgagtgtggtcagtgaggaaggactcgagaacagcgccccggagtccgcttccaggacttcgaggtacagatctctcaagctcaaaagagaacgatccaaagacttccaggtgaagaagatatatgagttggctgtgtgggacgaaaataagaaaagaccggaaacctgggaatcccccgaaaaacctaaaactgaagcactggaattacaggatgttcaccccgagctgacagtgaccattgagtctaaggctctggaggacttcgaggctacggacttaaaggtggaggagctgaccgccctggggaacttgggagatatgcccgtggacttttgtacgacacgtgtaagccccgctcatagaagtcccaccgtactgtgccagaaggtttgtgaggagaactcagtgtcccctatcggatgtaactcaagtgatccggctgatttcgagcctatcccgtccttttccgggtttccattagattcaccgaagaccttggtccttgatttcgaaacagagggcgaacgcaactctcccaatcccaggtcagtcagaatccctagtcctaatatcctgaaaactggactgactgaaaatgtggatcgggggttgggggggctggaggggactcaccaagccctcgacctgcttgccggtggaatgatgcctgaggaggttaaagaatcaagtcagctggacaaacaggagagtctgggccttgagctcaagaccatcaattctgccggacttggcccctctccatgcctgcccgacctggtcgatttcgttactaggacaagcggcgtccagaaagacaagctttgctccccgcttagcgagccgggggacccctcaaaatgtagcagcttggagctaggaccattacagctggaaatatccaatgcaagtactacagaagtggcgatcctacaggtcgatgacgatagcggggatcctctgaacctggtgaaagcaccagtgtccagaagccccccgagagaacaggtcattgaggacaatatggttccacagggcatgcccgaacaggaaacaaccgtgggtgctattcaagaccacaccgaatcttcagtgcataattag

SEQ ID NO: 15079 - DNA, 1932 bp, synthetic construct
  source 1..1932: mol_type = other DNA; note = Synthetic coding sequence
atgggccaggagagcagcaagcctgtttggcccaaccccactggtggataccagtctaatacagggcgcagatatggccgcagacatgcatatgtgtcttttcgccctcctacatcccaacgtgagcggatcgccagtcagcgcaagacgaatagcgaagtgccaatgcatcgtagcgcaccttcacagaccacaaagaggagcagatctccattctcaaccaccagacgcagttgggacgactccgaaagcagtggcacaaacctcaacattgataacgaagactacagccggtatccaccgcgcgagtaccgggcctccggatcccgtcgcggaatggcgtacggtcatattgattcatacggggccgacgatagcgaggaggagggcgccggaccagtcgagaggccccccgtacgaggaaagaccggaaagttcaaggacgacaagctttatgatcctgaaaagggggcacgttcactcgccggaccccccccccacttttctagttttagcagagacgtaagggaggagcgcgataagctcgatcctgtcccagccgcaaggtgcagcgcctcaagagccgatttcctgccccagtcatccgttgcttcacagagttcaagcgaaggcaagctggctaccaagggcgactcctctgagagggaacggcgcgagcagaaccttcctgcacgaccctctagggcaccggtgtcgatttgtgggggaggagaaaatacaagtaagagcgcagaagagccggtggtgcgacccaagatccggaatctggctagtcctaattgcgtcaaacccaagatattcttcgacacggatgacgacgatgatatgcctcactctaccagcaggtggcgggatacggccaacgataacgaggggcacagtgacggactcgccaggcgtgggcgcggcgagagctccagcggctatcccgagcctaagtacccagaagataaaagagaagccagatctgaccaggtgaaacctgaaaaagtgccacggaggagacggaccatggcagacccagatttttggacgcacagcgatgactattataagtactgtgacgaagatagtgacagcgacaaggaatggattgctgcgcttaggagaaagtaccggtctcgcgagcagacactctcctcgtccggagaatcatgggagacacttcccggcaaagaggagcgggagcccccacaggcgaaggtgtcagccagtacagggacttcccccggtccaggagcaagcgcatcagctggtgccggcgccggcgcttccgcagggtcaaatggttccaattatctcgaggaagtgcgggaaccctctttgcaagaagagcaggcctctttggaggaaggcgagattccttggctacagtaccacgaaaatgactcttcctccgagggtgataatgacagcgggcatgaactgatgcagcccggggtctttatgctggatggaaacaataacttggaagacgactcctcagtctcagaggacctggaggtcgactggtccttgttcgatgggttcgccgacggtttgggggtggctgaagcgattagctatgtggatccacaattcctaacctacatggctttggaggagcgtctcgcccaggctatggagacagccttggcccacttggagtctttggcagtcgacgtggaagtggccaatcctcccgccagtaaggaaagcatcgatgctcttcccgagattttggtgacagaagatcatggtgctgtaggccaggaaatgtgctgccccatttgctgctccgagtacgtcaagggagaggtcgcgaccgaactcccctgccatcactatttccacaaaccatgtgtatctatctggcttcagaaatctggcacgtgtccagtctgtcgatgcatgtttccaccgcccctatag

SEQ ID NO: 15080 - DNA, 1113 bp, synthetic construct
  source 1..1113: mol_type = other DNA; note = Synthetic coding sequence
atgcctacggagacactgcaaactggctctatggtgaagcctgtgagtccagctggaactttcactagtgccgtccctcttagaatcctcaataaggggccggactactttcgccggcaagccgaacctaatccaaagaggctatctgccgtagagaggctggaagcagacaaagcaaagtatgtgaaatcccaggaggtcattaacgccaaacaggaacctgtaaaaccagccgttttggcgaaacctccagtgtgccctgcagcaaagagggcacttggttcacccacactgaaggtgttcggtaaccacgcgaagacagaatccggggtgcaaagggaaaacctcaagttggaaatactaaagaacatcattaattcctcagaaggaagctcttctggatccggccataaacattcttcaagaaattggcctccacacagatctgaggccactgacctgcaccggcactcatttgcagagtccctcaaggtgtacccaacacaggggcgccgcagtccacaggaaggcggatctcatgtgggtagacggctcctcgaacagtccgccgaatcattcctgcatgtctctcactcttcctctgacatacgtaaagtaacctccgtgaaaccactcaaagctattccctgttcttccagtgcgcctcccctgcctcccaagccaaaaattgcagccatagcttccatgaaatcaccggaggctgatccggttgagcctgcttgtggcgttagtcggcgacccagcctccaaagaagcaaaagtgaccttagcgaccgatattttagagttgatgccgatgtggaacggtttttcaattactgcgggctcgatcctgaagaactggaaaatctcgggatggaaaacttcgcccgggcaaatagcgatatcatctctctgaattttagaagcgctagcatgatttccagcgactgcgagcagagccaggattccaattctgatttgcggaacgatgattcagccaatgaccgggtcccctacgggatcagtgccatcgagagaaatgcacgaatcatcaagtggctgtattccattaagcaagcacgggaaagccagaaggtatcccacgtgtag

SEQ ID NO: 15081 - DNA, 3126 bp, synthetic construct
  source 1..3126: mol_type = other DNA; note = Synthetic coding sequence
atggccgctgctgcagcagcaggagctgctagcggccttccaggtccggtggcccagggcctcaaggaggccctggttgacaccctgaccggtatcctctcccctgtccaagaggttagggccgctgccgaagaacaaatcaaggtcctggaggtcaccgaggagttcggggtccacttagcggagctaacagtggacccccaaggggcgctcgctatcaggcagctggcttccgtaatacttaaacagtacgtagaaacccactggtgtgcacaaagcgagaaatttaggcccccagagactactgagagagcaaaaattgtgataagggaactgctgccaaatggtttgagggagtccataagcaaagttaggagctccgttgcatacgcagtgtccgccattgcgcactgggactggccggaagcgtggccccagttgttcaacttattgatggaaatgctggtgtcaggggatctcaacgctgttcatggcgctatgagggttctgactgagtttacaagggaggtgaccgacacccagatgcctcttgtggcccccgtcatcctgccagaaatgtataagatcttcactatggccgaagtgtacggcattagaacaagatcaagagcagtggagatcttcactacctgcgcccatatgatttgcaatatggaggaacttgaaaaaggagcggcaaaggttctgattttccctgtcgtgcagcaatttacggaagcctttgttcaggcattacagatccctgatggcccgacatctgacagtggcttcaagatggaagtcctaaaggctgtgacagcgctagtgaaaaatttcccaaaacatatggtgtcctctatgcaacagatcttgccaatagtttggaacacattaaccgaatctgcagcattttacgtccgtactgaggttaattatacagaggaggtcgaggaccctgttgactcagacggagaagtcctcggcttcgagaatcttgttttttctatttttgagttcgttcacgcgctgctcgaaaatagcaagtttaaatccaccgtcaagaaggctctgccagagcttatctactatatcattctctatatgcagatcacagaagaacaaatcaaagtgtggaccgcgaacccgcagcagttcgtggaagacgaggacgacgacaccttcagctacacggtgcgtattgctgcccaggatctgctcctggctgtggcaacggacttccagaacgagtctgctgctgctctagcagctgcagcgaccagacaccttcaggaggctgagcagaccaaaaacagtggcaccgagcattggtggaagattcatgaggcgtgcatgctggctctgggttctgttaaagccattatcacagattctgtgaaaaatggacggatccatttcgacatgcatggatttcttactaatgttattctcgccgatctgaatctctctgtgagcccgttccttctgggaagggccctgtgggccgctagcagatttaccgttgctatgagccccgagctcattcaacagttcctccaggccacggtgtccgggctgcatgagacccagccgccatctgtgcgtatctccgcggtccgcgccatctggggatattgtgaccagctgaaggtgagtgaaagcacacacgtgctgcagccatttctgccgtcaattctggacgggcttatacatctggctgcccagtttagttccgaagtcctgaatctggtgatggagacattgtgtatcgtatgtaccgtggatcctgaatttacagctagcatggaaagtaaaatttgcccctttaccattgccatattcctcaaatattccaacgaccctgtggttgcctccctggctcaagatatcttcaaagagttgtcacagatagaagcctgtcagggacccatgcagatgaggctaatccctactctggtgtcaataatgcaggcaccggccgacaagattcctgcaggcctgtgcgccacagcgattgatatactgaccacagtggtaagaaatacaaagcctcccctgtcacagttactaatctgccaggccttcccagccgtcgctcaatgcacattgcacaccgacgacaacgccacgatgcagaatggcggcgagtgccttcgcgcctatgtgagcgtaactttggaacaggtggcccagtggcatgacgagcagggccacaatggcctgtggtatgtgatgcaggtagtgtctcagctgcttgacccacgaacatccgagttcaccgccgctttcgttggccgcctggtaagtactcttatttctaaggccggcagggagctcggtgaaaacctggaccaaatactcagagcaattctatcgaaaatgcaacaggcggaaactctatcagtgatgcagtctctgatcatggttttcgctcacttggtacacacccaattagagccgctgttggagttcctctgttcacttcctggccctaccgggaagcccgcattagaattcgttatggccgagtggacctccagacaacacctcttttacggacagtacgagggcaaggtctcctccgtggctctctgcaagcttcttcagcacggcattaatgctgacgataaaagactccaagatatcagggtgaaaggcgaggagatatactcaatggatgaaggtatcaggactcggtctaagagtgcaaaaaatccagagcggtggaccaatattcctctgttggtgaagattctgaagctgatcatcaatgaactgtctaacgtcatggaagccaacgcggcccgacaagctacacccgccgaatggtcgcaggatgattccaacgacatgtgggaggatcaagaggaagaggaggaggaagaggaagacggactggccgggcagctgctgtcagatatccttgcgacctctaaatacgaagaggactactacgaagatgacgaagaagacgaccccgacgccctgaaggaccctctgtaccagattgatctgcaggcctacttgacggacttcctgtgccaatttgcccaacaaccatgttatattatgttcagtggccacctgaatgataatgaacgccgcgtgctccagaccattggcatctag

SEQ ID NO: 15082 - DNA, 156 bp, synthetic construct
  source 1..156: mol_type = other DNA; note = Synthetic coding sequence
atgagcagtcataagacatttcggataaaaagatttctcgcaaagaagcaaaaacagaaccgacctataccacagtggatccgtatgaaaacaggaaataagatcaggtataactctaagagacggcattggcgcaggacgaagctgggtctttag

SEQ ID NO: 15083 - DNA, 3627 bp, synthetic construct
  source 1..3627: mol_type = other DNA; note = Synthetic coding sequence
atggatagccttccagatgagtttttcgttaggcatcccgccgtggaggaccagcgcaaagaagaaaccgagaacaaattggagaagagttctggacagttgaacaagcaagagaatgacatccccactgacctggtccccgtaaacctactgcttgaggtgaagaaactgctgaatgcaatcaataccttaccgaaaggcgtcgtcccacatatcaagaaatttctgcaggaggacttctcctttcaaacaatgcagagagaagttgctgccaactcccagaatggggaggagatcgtgcccgccctgaccctgaggttcctgatcacccagctggaggccgctctgagaaatattcaagctggaaattatacagcacatcagatcaacatcggctactatctgaccttacttttcctctatggggttgcacttaccgaacgagggaaaaaggaagattacacagaggcggaaaacaagtttctggttatgaagatgatgattcaagagaacgagatatgcgagaatttcatgtccttggtatacttcggccggggtctgctgcgctgcgcccagaaaagatacaacgggggcctccttgagtttcataagtccctccaggagattggagataaaaatgatcactggtttgacattgaccctacagaggacgaagatctccccactacctttaaggatctcctgaacaacttcattaaaacgacagagtcaaacattatgaaacagacgatatgctcttatctggattgcgagcgctcatgtgaagctgacattcttaaaaataccagctacaagggtttcttccagctcatgtgctcgaagtcttgttgtgtgtactttcataaaatctgctggaaaaagttcaaaaacctgaagtatccaggagaaaatgaccaaagtttttccgggaagaaatgcttaaaagaaggatgcacgggggacatggtgaggatgctgcagtgcgacgtccctgggatcgtgaagatactattcgaggtcgtacgaaaggatgagtacattaccattgagaacttgggtgcaagttatagaaaactgatctccctcaaaatcactgacaccgacattcgccccaagatcagcctcaaattcaatactaaagatgaaatgccgatcttcaagttagattacaactacttttaccacctcctgcatatcatcatcatctccggcactgacatagtgagacagattttcgatgaggccatgcccccccctctcctgaaaaaggaactgctgattcacaaaaacgtcctcgaaagctactataaccacctttggaccaatcaccccctcggcggtagctggcacctgctttaccctccaaataaggaacttccgcagagtaagcaattcgacttgtgtttactgctcgccctcatcaagcatttaaacgtgttccccgcaccaaaaaagggctggaatatggaaccacccagttccgatataagtaagagtgcagatatactgaggctgtgcaagtatagggacattcttttgagcgaaatccttatgaacgggctgactgagagccagttcaattccatatggaagaaggtgtccgatatcctcttaagacttgggatgatgcaggaggatattgataaagtcaaggagaaccctattgaaaatatatccctcgactatcaccagctgtccgtttatcttggcattcccgtgccagagatcatacaaagaatgttatcctgttaccagcagggtattgctctgcagtctataaccggatcccaaagaatcgagattgaggaactacagaacgaagaggaggagctctctccgcccctgatggagtataatattaatgtaaagagccatcccgagattcagtttgctgaaatcaataaggacggaacctccattccctccgagtcatcgacagagagcttaaaagacttacaggaagttaagtccaagcagcgaaagaaaaagaagactaagaacaagaaaaataaggactctaaagaagaccaggtcccctacgttgtcgaaaaggaagaacagctcaggaaagaacaggcgaatcctcatagtgtgtctcgcctgataaaggatgacgctagtgatgtccaggaggactctgcaatggaggacaagttttattcgctggatgaactgcacatactggatatgattgagcagggttctgccggcaaggttacaaccgactacggggaaaccgagaaagaaaggttggccagacagcgccaactgtacaaattgcactatcaatgcgaggatttcaagcgacaacttcgaaccgttacattccgctggcaggaaaaccagatgcagatcaagaaaaaggacaagatcatcgccagcctcaatcagcaagtcgcttttggtataaacaaggtgagtaaacttcagcggcaaatacatgccaaagacaacgagatcaaaaatctgaaagagcaactctccatgaaacgatctcaatgggagatggaaaaacataacctagagagcaccatgaagacgtacgtgtcgaaactgaatgcagaaacatcgcgcgctctcaccgctgaagtgtacttcttgcagtgccggcgagactttggtctgctacaccttgaacaaacggagaaagagtgtttgaaccagttggcacgggtgacccacatggctgccagcaatctggaatcgcttcagctcaaggccgcagtggacagctggaacgctatcgtcgccgatgtgcgcaataaaatagcttttcttcggacccagtacaacgaacaaatcaacaaagtcaagcaaggatttgcactgtctaccctgcctcccgtccagctgccgcctcccccaccaagtcccgagatcctgatgcaacagtttcttggcagacccctagtaaaagagtcattcttccgccccatcctgaccgtaccacagatgccagcagtgtgtccaggcgttgtgagcgccactggccaacccagagcgcccctgatgaccggaatcgcgtgggcactacctgcacctgtgggggatgcagtccctccatcggccgggctccggtctgacccatcaattatgaactgggaaagaattacagatcggctcaagaccgctttcccccagcagactaggaaggagttaaccgatttcctgcggaagttgaaagatgcttatggaaaatcattaagtgagctgactttcgacgaaattgtgtgtaagatatctcagttcattgatccaaagaaaagccagagtcagggaaagtccgtaagtaatgtaaactgtgtttcacctagccatagtccatcacaaccagacgcggctcagcctcctaagccagcctggcgtcctttgacaagtcaggggcccgcaacctgggaaggtgcgagcaatcccgatgaggaggaggaagaggaggagccgtgcgtgatttgtcacgaaaatctgtcgcccgagaatctctccgtcctcccctgcgcacacaagttccacgcgcagtgtattcgtccgtggctgatgcaacagggcacatgccctacttgccggctgcacgttcttctgcccgaagaattccccggacatccctcaagacagctgcctaagatctag

SEQ ID NO: 15084 - DNA, 996 bp, synthetic construct
  source 1..996: mol_type = other DNA; note = Synthetic coding sequence
atgtccagacagcttagtagagcccgccctgctacagtcttgggcgccatggagatgggcagacgcatggatgcccccacttccgccgccgttacccgtgccttcctggaacgcggccacactgagatagatactgccttcgtgtacagtgaagggcagtcagagactatcctcgggggtttggggcttaggctgggagggagtgactgcagagtgaagatcgatacaaaagccattcccctgtttggtaactcgctcaagcccgattcactcagattccagctggagacgagcctgaagaggctgcagtgccctcgagtagatttgttctacctacacatgccagatcattccaccccagtggaagaaacactgcgagcctgtcaccaacttcaccaggaagggaagtttgtagagctgggactcagcaactatgccgcttgggaggtcgctgagatctgtaccctttgcaaatctaatggatggattttacccactgtctaccaggggatgtacaacgccatcaccaggcaagtcgagactgaactctttccgtgcctgcgacattttggcttgagattttacgccttcaatcctctcgccggaggactgctgactggtaaatataaatatgaggacaagaacggcaagcagcccgtgggtcgcttctttggtaacacatgggctgaaatgtataggaatcgatactggaaagagcaccattttgagggaatcgcccttgtggagaaggctcttcaggccgcctacggcgcctccgctccctcaatgacctctgcaaccttgagatggatgtaccatcactctcaattacagggcgcacacggggacgccgtcattttaggaatgtcatctctcgagcagctcgagcaaaatctggccgccgcagaagaaggacccctggaacctgctgtcgtggatgcttttaaccaagcctggcacctggtgacgcacgagtgccccaactacttcagatag

SEQ ID NO: 15085 - DNA, 1131 bp, synthetic construct
  source 1..1131: mol_type = other DNA; note = Synthetic coding sequence
atgtcaccggaagtcgccctcaaccgcatctcgcctatgctatctccttttatatcctccgtggtgcggaacggaaaagtggggctagatgcgacaaactgcctgaggattaccgatcttaaatctgggtgtacaagtctgactcccggtcctaactgtgacaggtttaaacttcatataccttacgctggcgagacactgaagtgggatattattttcaacgcccaatatcctgagctgccacctgatttcatttttggagaggacgcggagttcttgccagacccgagtgctctccagaacttagcttcctggaatccatctaaccccgaatgtttactgttagtggtgaaagagctggtccagcagtaccatcagtttcaatgctctcgcctgcgcgaaagttcaaggctgatgtttgaataccagacattactggaggagccccaatatggagagaacatggaaatatatgcaggtaagaaaaacaactggacaggcgaattctctgcccggtttctgctgaagctaccagtggatttctcgaacattcccacatacttgctcaaagacgtaaatgaggatcccggcgaagacgtcgcccttctgtctgtctcatttgaggatacagaagcaacacaagtgtaccccaagctgtatctgtctccccgtattgaacacgcacttggaggcagctccgcactccacattccagcctttcctggaggagggtgcctaatcgactacgttccgcaagtgtgccacctgctgaccaataaggtgcagtatgtaatccaggggtaccacaaaagacgggaatacatagccgctttcctatcccacttcggtacgggtgtagtggagtacgatgcagaagggtttactaaactgactctgctgctgatgtggaaggacttctgttttctcgtacacatcgacctgccattgttctttccacgggaccagccgacgctcacttttcagtcagtctaccattttaccaactccgggcagctctattctcaggcccagaagaattacccgtacagtccccggtgggatggcaatgagatggcaaagcgtgccaaacgggagtctaaccgagacggcgaagagtcttcttccgcgtag

SEQ ID NO: 15086 - DNA, 1881 bp, synthetic construct
  source 1..1881: mol_type = other DNA; note = Synthetic coding sequence
atggacgagcaggaagccctcaacagcattatgaacgatctggtggcactgcagatgaaccgccgccatcgtatgcccggatacgaaacaatgaaaaataaagacaccggccatagcaataggcagagcgatgttcggataaaattcgaacataatggagaacggcggatcatcgccttctcccgccccgtgaaatacgaggatgtggaacacaaagtgacgactgtctttgggcaaccccttgatttgcattatatgaacaacgagctgagcatactgctgaaaaaccaggacgacctcgacaaagctatagatatccttgacagatcaagctccatgaaaagtctgcgcatcttgctgctcagccaagaccggaaccacaactcttcttctccacactctggcgttagtcgccaggttaggataaaagcgagtcagagtgcgggagacatcaacaccatctaccaacctcctgaacctaggtccaggcacctttccgtgtcttctcagaaccctggccgcagttctccgccaccgggctatgtgcccgaacgccagcagcacattgcgcgccagggcagctatacatctatcaattctgagggagagtttatcccggaaaccagtgaacagtgcatgttagatcccttgtcctctgcggaaaattctttgtccggttcctgtcagagcctggataggtctgcagattcaccttcttttcgcaagtccaggatgtcaagggctcaatctttcccagataaccgacaggaatatagcgaccgagagacccaactgtacgacaagggggtaaaaggagggacatacccacggcgctaccacgtgagtgtccaccacaaggactattcagatggtaggaggacatttccgagaatccggcgtcaccagggaaatctcttcacgctggtcccctctagcaggagcctctctacaaacggggaaaacatgggactggctgtgcagtatctagatccccgtggaagattacgaagtgctgattccgagaatgccctgtcggtccaagaaaggaacgtgccaaccaagagcccttccgcacccatcaactggcggagaggcaagctgctgggtcagggtgcctttggcagggtttacctgtgttatgatgtcgatacaggcagagagctggccagcaagcaagtgcagttcgatcccgattcacctgagacaagtaaggaggtaagcgcccttgaatgcgagatccagctgcttaaaaacctgcaacacgaaaggattgtgcaatactacggatgtctcagagacagggcagagaagaccctaaccattttcatggaatatatgcccggaggatcagtcaaggaccaattaaaggcctatggcgccttaactgagtctgtcactcgaaagtacacgcgccagattctggagggaatgagttatcttcactcaaatatgatagtgcatagagatatcaaaggcgccaacattctccgcgatagcgctggcaacgtcaaactcggggatttcggcgcgagcaaacggctgcaaacaatttgtatgtctggcaccggaatgagaagtgtcaccggcaccccttattggatgtcaccagaggttatatctggagaaggatatggtcggaaagctgacgtctggagtctgggatgtactgtcgtggagatgctgaccgagaaaccaccatgggcagaatacgaggcaatggcggcgatattcaagattgccacgcagcctaccaaccctcagcttccaagtcatatatccgaacatggccgcgacttcctgcggcgtatctttgtagaggcgagacaacggccgtccgccgaagagctcttgactcatcattttgcccagctgatgtactag

SEQ ID NO: 15087 - DNA, 1701 bp, synthetic construct
  source 1..1701: mol_type = other DNA; note = Synthetic coding sequence
atggatctgcacagagcggcatttaagatggagaattcgtcctaccttcctaatccacttgcaagccctgccctgatggtcctggcctctacggctgaggcaagccgggatgccagtatcccatgccagcagcctcggccatttggagtccccgttagtgtggacaaagatgtgcatattccttttactaacggctcctacacattcgccagcatgtaccaccgacaaggaggagttcccggcacatttgccaatagagacttcccacccagcctgttgcatctgcatcctcaattcgctccaccgaatctcgactgtacccctatcagcatgctaaaccactcaggggtgggagccttcaggccatttgccagtaccgaagatagagagtcctatcagagtgcattcacccccgcaaaacgcttaaaaaactgccacgataccgaaagccctcatttgagattttctgacgcagacggaaaagagtacgactttggcacccagctccccagctcatcaccgggctctctcaaggtcgatgacactggaaagaagatctttgccgtaagtggcctcatttccgatcgtgaagccagttcctctccagaggaccgcaatgatcgctgtaaaaagaaagcagcggccctgtttgactcgcaggcgccaatttgtccaatttgtcaggtgttattaagacctagcgaattgcaggagcatatggaacaggagctggagcaactggcccagctcccttccagtaaaaatagtctcttgaaagacgctatggcaccagggacccccaaaagtttgcttttgtccgcatccattaagcgagagggggagtcaccaacagcctcacctcactctagtgccaccgacgacctgcaccattccgacaggtaccagactttcctgagagttcgggcaaatcgacaaacgaggcttaacgcgaggattgggaaaatgaaaaggcgtaaacaggatgagggacagcgtgaaggatcttgcatggctgaagatgacgctgtggacatagaacatgagaacaataatcggttcgaggaatacgagtggtgtggccagaaacgcatcagagcaactacgttgctagagggcggcttccgaggaagcgggttcataatgtgttcgggcaaggagaatccagattcggacgcagacctagacgtggacggcgatgatactctggagtatggcaagccccaatacacagaggcagacgtcataccttgtaccggtgaggaacctggtgaagcaaaggagagggaagccctgcgtggagctgtcttgaatggcggccctccctccacccgaataacaccagaattcagcaagtgggccagcgacgaaatgccctccacgagcaatggcgaatccagcaagcaggaagcgatgcagaaaacctgtaaaaattccgatattgaaaaaatcactgaagattcagcagtgacgacctttgaggcgctgaaagcgcgggtcagagagctggagaggcaactctcccgaggcgataggtacaagtgtctcatctgcatggatagttacagtatgccactgactagcattcagtgttggcatgtgcactgcgaagaatgttggctgagaactctaggtgctaaaaagctgtgtccccagtgtaacacgatcaccgctcccggcgatctgaggagaatctatctctag

SEQ ID NO: 15088 - DNA, 456 bp, synthetic construct
  source 1..456: mol_type = other DNA; note = Synthetic coding sequence
atggagggctgcgtctctaacttgatggtgtgtaaccttgcatatagtggtaagctggaggaattgaaagagtccatcctggccgacaagtcactggcaaccagaacagatcaggattcacgcaccgcccttcactgggcctgctccgccggccacaccgagatagtcgaattcctgttgcagctaggggtcccggtgaatgataaagatgatgccggttggtcccctcttcacatcgccgcttctgccggacgcgatgaaatcgtgaaggcactgttgggcaagggagcccaggtaaacgccgtgaatcagaatggatgtacccccttgcactacgccgcttcaaaaaaccgccatgagatcgccgtgatgctgcttgaaggtggtgcgaacccagatgccaaggatcactacgaggcaactgcgatgcaccgggccgctgctaaggacacgtag

SEQ ID NO: 15089 - DNA, 2220 bp, synthetic construct
  source 1..2220: mol_type = other DNA; note = Synthetic coding sequence
atgggattttccaacatggaggacgatggtccggaggaagaagaacgggtggctgaaccccaagctaactttaatacccctcaggcgctccgctttgaagagctcttagctaatctccttaacgagcagcaccaaatagccaaggaattgttcgagcaactgaaaatgaagaagccgtcggccaaacagcaaaaagaggtggagaaggtgaagccgcagtgcaaagaagtccatcagacactcatccttgacccggcccaaagaaaaaggctccagcagcaaatgcagcaacatgtgcagcttctgacccagatacacctgctggccacctgcaacccaaatctaaaccccgaagcctcttccacaaggatctgtctgaaagagctgggaactttcgcacagtcctcaatcgctttgcaccatcagtataaccctaagttccagaccctgtttcagccttgtaacctaatgggcgcgatgcagctgatcgaagatttctcgactcatgtttctattgactgcagccctcacaaaaccgtcaaaaagactgccaatgagttcccctgcctccccaagcaggtggcctggatcctggccacgtcgaaagtctttatgtacccagagctgttgcctgtatgcagcctcaaggcaaagaacccccaggacaaaatccttttcaccaaagccgaggacaaccttttagccctcggattgaagcacttcgaggggaccgaattcctgaatccactgatttcgaagtatctcctcacatgtaagacagcccggcagctgactgttcgcatcaagaatctgaacatgaatcgggcacccgataacatcatcaagttttacaaaaagacgaaacaattgcctgtcctgggcaagtgttgtgaagagatccagccccatcaatggaaacctcctatcgagcgggaggagcaccgacttcctttctggctgaaagcctcgctacccagtattcaagaggaactgcggcatatggcggacggtgccagagaggtaggcaacatgacaggtacaacggagatcaacagtgaccaaggactagaaaaggataattccgagttgggctcagaaacgagatacccgttgcttttgcctaagggggtggttcttaagttgaagcccgtggccgatcgctttccaaagaaggcctggaggcagaaaaggtcatcagtgttaaagccacttctgatacagccttccccttcccttcagcccagtttcaatccaggtaagactccggcacagtctactcacagcgaggcccctccttcaaaaatggtcctgcgaataccacacccaattcagcccgctaccgtgcttcagacagtgcctggagtcccccccctcggagtgagcggcggtgaatcttttgagagcccagccgccttgcccgcaatgccaccggaggccaggaccagctttccactgtcagaatcacaaaccctgctcagctctgcaccggtacccaaagtgatgatgccctctcctgcttcatctatgtttcgcaaaccttacgttagacggaggccttccaagcgtcggggagcacgggcttttcgctgtataaagcctgcccctgtgatccatccggcctctgtgattttcaccgtcccagccactactgtgaaaatagtgagcttggggggaggttgcaacatgatacagccagtcaatgctgccgttgctcaatctccacagacaattcctatcgcaaccctgctggtgaaccctaccagttttccatgccccctgaatcagccactggtcgcaagcagcgtcagcccccttattgtctctggtaactcagttaacttacccattccctccactcctgaggataaggcccacatgaatgtggacatcgcgtgcgcggtggctgacggcgaaaacgccttccaaggcctggagccaaagctggagccacaagagctgtcacccctgtccgccacagttttcccgaaggtggagcattcccctggaccaccccccgtagacaagcagtgccaggagggtctgagcgagaacagtgcttatagatggactgtcgtaaagactgaagaggggaggcaagccctggagccccttccacagggcatccaggaaagcttgaacaattcctccccaggggacttggaagaggtggttaagatggaacctgaagacgcgacggaggaaatctcaggttttctctag

SEQ ID NO: 15090 - DNA, 1692 bp, synthetic construct
  source 1..1692: mol_type = other DNA; note = Synthetic coding sequence
atgagcagaccgtctagcagggccatttaccttcaccgaaaagaatacagccagaatctgacatctgaaccaacattattgcagcaccgggttgaacacctcatgacatgcaaacagggctcccaacgagtccagggccctgaggacgcccttcaaaagttgttcgagatggacgctcagggcagggtgtggtcacaggacttaatcttgcaggttcgcgatgggtggcttcagctgctggacatagaaacgaaagaagagctggattcctatcgcctggatagcatacaggctatgaacgttgcgctaaacacttgcagctacaatagtatcctatctattaccgtgcaagaacctggacttccaggaacttctactctgcttttccagtgccaggaagtgggtgccgaacgcttgaagacatctctacagaaagcacttgaggaggagcttgaacaaaggcctaggctggggggtcttcaacctggccaggaccgatggcgcggccctgccatggagcggcccctgccaatggaacaggcccggtatcttgagccgggtatcccacctgagcaaccgcaccagcgaacactggagcacagtttgcctccttctccaagacccttacctaggcataccagtgccagggagccgagcgcattcacgttgccgccaccacggaggagctcatcacctgaagaccctgagcgcgatgaggaggtattaaatcacgtgcttcgtgatatcgaactgttcatgggtaaattagaaaaagcccaggcaaagaccagccggaaaaagaagttcggaaagaaaaacaaagaccagggcggtctgacccaggctcagtatatcgactgtttccagaagatcaaacactctttcaatctgctaggtcgtcttgcaacctggttgaaagagacctctgcgccagagcttgtccacattctcttcaagtccctgaattttatcctggcacgctgtcctgaggccggtctggcggctcaggtaattagcccactcctgaccccaaaagctatcaacctgttacagagttgtttgagccctcccgagagcaacctgtggatgggccttggcccagcctggacaacttcccgcgccgattggactggcgatgaaccactgccttatcagccaaccttttccgatgactggcagctccccgagcccagcagccaagcaccgctagggtaccaggacccagtgtctttacgacccagctctccaaagccggcacaacctgcactgaaaatgcaagtcctatatgaatttgaagcccgtaaccctagggagctgacagtagtgcagggagagaagttggaagttttggaccatagcaagaggtggtggctcgttaagaatgaggccggccgctctggttacatcccatccaacatcctagaaccactgcagcctggtactccgggtacacagggacagtctccttcaagggtccccatgctccgtctctcttctagacccgaggaagtgacagactggctccaagctgagaactttagtaccgcaaccgtgcgaacactgggttcacttacgggctcgcaactcttaagaatacgcccgggggaactccagatgctgtgtcctcaagaagcgccacgtattctttcacgactcgaggccgtaaggcgcatgctgggcatttctccatag

SEQ ID NO: 15091 - DNA, 525 bp, synthetic construct
  source 1..525: mol_type = other DNA; note = Synthetic coding sequence
atgacttgttgtcagacgagtttctgcggttacccgagcttctcgatctctgggacctgtggatcatcttgctgtcagccctcttgttgcgagactagttgctgtcagcccaggagctgccagaccagtttttgtggcttcccgtcgttcagcacatctggcacatgttcttcctcatgttgtcaaccaagctgctgcgagacgagttgctgccagccctcttgctgtgagacgtcctgctgccaaccgtcttgttgtcagatctcctcctgcggaaccgggtgcggaattggaggagggatttcctacggacaggaaggctcgtccggggccgtgagcaccagaatccggtggtgtcgacccgactcacgtgtagagggaacttatctgccgccatgttgtgtggttagctgcacacctccttcatgctgtcagctgcaccatgcacaggccagctgctgcaggccttcctactgcggtcagagctgttgtcgcccagtctgctgttgcgagccgacctgttag

SEQ ID NO: 15092 - DNA, 1173 bp, synthetic construct
  source 1..1173: mol_type = other DNA; note = Synthetic coding sequence
atgagaggcgacagagggcgcggaagaggcgggcgttttgggagccgcggggggcctgggggcggatttcgtcccttcgtcccacatattccattcgacttttacctctgcgagatggcattccctagggtcaaaccggctcccgacgaaacctctttcagcgaagccctcctgaaaaggaaccaggacctcgcccccaattctgctgaacaagcaagtattctgagtcttgtgactaagatcaataatgtcatcgataatctcatagtagcaccagggacattcgaagtgcaaatcgaagaagtcaggcaggtgggctcatataagaaggggaccatgacaacaggacacaacgttgcggacctggttgtcatcctgaagattcttccgactctggaggctgtcgcagcactcggcaataaagttgtggaatccctgcgggctcaggacccttctgaggtcctgacaatgttaaccaacgagactggattcgagattagctcatcggacgcgacagtcaagatcttgattacaactgtgccacctaatctgcggaagctcgaccctgagctacacctggacatcaaagtgctgcagagcgcgctggctgccattagacacgctcgatggtttgaagaaaacgcaagtcagagcacagtgaaagtgcttattaggctccttaaggacctcaggataaggttcccggggttcgaacctctcacaccttggatattggatctgttaggtcactatgcagttatgaataatcccacacggcagccactggcactaaacgtggcatacagacggtgcctgcagattctcgctgccggcctctttctccccggctccgtgggaattacagatccttgcgagtctggcaatttccgagtccacacagtgatgacccttgaacagcaggatatggtgtgttacacagctcagacattggtgagaattttgtcccatggtgggttccggaagatattgggacaggagggcgatgccagttacctagcgtcagaaatttctacatgggacggcgtgatcgtgaccccttctgaaaaagcttacgagaaaccaccggaaaaaaaggagggcgaagaagaggaggagaataccgaggaaccgccccaaggggaagaggaggaatcaatggagacacaagagtag

SEQ ID NO: 15093 - DNA, 3606 bp, synthetic construct
  source 1..3606: mol_type = other DNA; note = Synthetic coding sequence
atgccccgcggggaagcccctggccctggcagacgcggggctaaggacgaggctctcggggaggagagcggagaacgctggagcccagagtttcatctccaacggaaattggcggatagcagccatagcgagcagcaggacaggaatcgcgtgtctgaggagctcattatggtggttcaggagatgaaaaaatactttccgtcagaaagacgcaataaaccttccacactcgatgcgcttaactacgccctcagatgtgttcatagtgttcaggcgaacagtgaattcttccagattttgagtcagaatggtgcacctcaggccgacgtgtccatgtatagcttagaagagctggcaaccatcgcctcagaacataccagcaagaacaccgataccttcgtggccgtgttttctttcttgtctggtcggctggtccacatttcagagcaggctgccctaatcctgaatcgaaaaaaggatgtcttggctagcagccacttcgtggacctcctggccccgcaggatatgagggtattttacgcacatacagctagggcacagctacccttttggaataactggactcagagagcagctcgctacgagtgtgctccagttaagccctttttctgtcgcattcgcggcggggaagatcgcaagcaagagaagtgccactctcccttccgtataatcccgtacctgattcatgtccaccaccctgcccaacctgaattggaatcagagccctgttgtctgactgttgttgagaaaatccacagcggttatgaggcccccaggattcctgtcaacaagcggatattcactacaacacatacccccggttgtgtgttcctcgaagtcgatgagaaagcagtgcctttgctggggtacttaccacaggatcttattggcacttccattctgtcttacctacaccctgaggatcgcagccttatggtagctattcatcaaaaggtgcttaagtacgccggtcatcctccatttgagcattccccaatccgcttttgcacccagaatggtgattatatcatcttggatagctcatggtcctctttcgttaacccctggagtcgcaagatttcatttattattggtcggcacaaagtgagaacgagcccactgaacgaggacgtttttgccaccaagatcaaaaagatgaatgacaatgataaagatattaccgaattgcaggaacagatatacaagctccttctgcagccggttcacgtgtccgtctcatctggctatggttcccttggctcctccggttcacaggaacagctggtgagtattgcttcgagcagcgaggcctccgggcacagggtcgaggaaacgaaggctgaacagatgactctacaacaggtgtacgcctccgtgaataagatcaaaaaccttgggcagcaactatacatcgagtcaatgaccaagtcctcttttaagccagtaaccggtactcggacagagccaaacgggggcggagagtgcaagactttcacgtctttccaccagacactgaagaataattcagtttacacagagccttgcgaggacctcagaaatgacgagcactctcctagttatcagcagattaactgcattgactccgtcatcaggtacctcaaaagttacaatattcccgcgctcaagcggaagtgtatctcatgcaccaacacaactagtagttcaagtgaagaggataaacagaatcacaaagctgatgacgtgcaggccctccaggcaggcttgcaaatccccgccatcccaaagagtgagatgcctacaaacgggcgctctattgacacaggcgggggcgcgccgcaaattctgtccactgcgatgctctctctgggttctggaatcagccagtgcggatatagcagcaccatcgtgcatgttcctcctcccgaaaccgcccgggacgctacactattttgcgagccttggaccctgaacatgcaacctgcgccccttacctccgaagaatttaaacatgtcggacttaccgccgctgttctatctgctcacacacagaaggaggagcagaactacgtcgataagttcagagagaagattctgtcgagcccgtacagctcttatctccaacaggagtctaggtcgaaagcgaaatatagctacttccagggggactccacctccaagcagacccgatccgccgggtgtagaaagggcaagcacaagcgcaagaaactgccagagccacccgattcatcttcttccaatacagggtccgggcccagacgaggcgctcatcagaatgcacagccctgctgcccctcagctgccagctccccccatacatcttccccaaccttcccacctgcagccatggtgccatcccaggccccgtatcttgtgcccgcatttccactcccggctgctacctctccaggcagggagtatgcggctcccgggacagcccccgagggcctccacggccttcccctgtccgaggggttgcagccctatccagcgttccctttcccctatctggatacttttatgacagtattcttacccgacccgcctgtgtgcccccttctgtccccttctttcctcccatgccccttcttaggcgccaccgcctctagtgcaatttcacccagcatgtcctcagctatgtcacctacgctggacccccccccctcagtaacgtcccaacgtagggaagaggaaaaatgggaagctcaatccgagggacatccattcattacttctcggtctagtagccctctccagctgaacctgctgcaggaggagatgccgaggcctagcgaaagccccgatcaaatgcgacgcaatacatgccctcaaaccgagtactgcgtcactggtaacaacggtagcgaatcatccccggctactacaggagccctaagcactggaagccccccacgtgaaaatccgtctcacccgactgcatcagccctttccacaggcagtccaccgatgaagaatccttctcatccaacagcgtctgctttatctaccggctctccacccatgaaaaatccatctcaccctaccgctagtactcttagtatggggctgccaccctctagaaccccatcgcatcctaccgctaccgttctgtcaacggggtcgccccccagtgagtcaccctccaggaccggctcagctgcctctgggtcctctgacagtagtatttatcttactagttccgtgtacagttccaagatctcacagaatggccaacagtcccaggatgtgcaaaaaaaggaaacctttcccaacgttgccgaagagccaatatggaggatgatccgtcagaccccagagcggattcttatgacttatcaggttcctgaaagggtaaaagaggttgtgttgaaggaggatctcgaaaagctagaatccatgcgtcaacagcagccacagttcagccatgggcagaaagaggagctcgcaaaagtctacaattggatccagtcacaaacagtgacacaggagattgatatccaggcctgtgtgacgtgcgagaacgaagactccgctgacggcgctgctacgtcctgtgggcaagtgctagtggaagactcatgctag

SEQ ID NO: 15094 - DNA, 1296 bp, synthetic construct
  source 1..1296: mol_type = other DNA; note = Synthetic coding sequence
atgagcgaccaaattaagttcattatggattccctgaataaagaaccctttagaaaaaactacaaccttatcacctttgattccctggaacctatgcagttgctgcaggttctctctgacgtgcttgccgagattgatccaaagcagttagtcgatattcgcgaagagatgcctgagcaaacggcaaagaggatgctgagtttattgggcattctgaaatataagcccagtggaaatgctactgacatgtctactttccgccagggcctggtcataggttcaaaacctgtgatctatccagtgctgcattggctcctgcagagaaccaacgagctgaaaaaacgcgcctatctcgcacggtttctcattaaactcgaagttccctctgaatttctgcaagatgaaactgtggcggacaccaataaacaatatgaagagctgatggaggcgttcaaaaccctgcacaaagagtacgaacaactaaagatttctgggttttccaccgcagagatcaggaaagacatatccgccatggaagaggagaaagaccagcttatcaaacgagtggaacacctgaagaaaagagtggagactgctcaaaatcaccagtggatgcttaagattgctcgacagctgagggtagagaaggagagggaagaatatctggcccagcaaaagcaggagcagaagaatcagctgttccacgcggtccaacggctgcagagggttcagaatcaactgaaatccatgagacaggccgcggctgatgctaaaccagagtcactgatgaagagactggaggaggagattaaatttaacctttacatggtgaccgaaaaatttcccaaagaattggagaataaaaagaaagagctgcattttctgcagaaggtggtttccgagcctgctatgggacattcggatctgctcgaacttgagtctaagatcaatgaaatcaacacagagatcaatcagctcatcgagaagaaaatgatgaggaatgagccaatcgaaggcaaactctcactctatcgccaacaggcttctatcataagccgcaagaaggaggcaaaggcagaagaactccaagaggccaaggaaaagctcgctagcctggagcgagaagccagcgtcaagcgaaatcagacacgagaattcgacggcacggaggtgctgaaaggggacgagcgccaagacctgaccctgtctccccgcctcgagtgcgggggtgttataatggcctactgttcactaaagctgctggggtcttccgatcccccaacgtcagcatcttag

SEQ ID NO: 15095 - DNA, 1119 bp, synthetic construct
  source 1..1119: mol_type = other DNA; note = Synthetic coding sequence
atggcatccagtgcttctgcccgtacacccgccgggaaacgggtgattaaccaggaggagctcagaagactaatgaaagaaaaacagcgtctctctacaagtcgcaaaagaatagaatctccttttgccaaatacaatcggctcggacagctctcttgtgccttgtgcaatacacccgtgaagtcagaactgctttggcagacacacgtcctgggcaaacagcacagagaaaaagtggctgaactgaagggagctaaagaagcctcccagggatccagtgcatccagcgccccccactctgtcaaacgaaaggccccagacgcggatgatcaggatgtcaaaagagctaaggctactttagtcccacaagtacaacccagcacaagcgcgtggacaaccaattttgacaaaatcggaaaggaatttatccgggctacaccttccaaacctagtggcctgtccctgcttcccgactacgaggacgaggaggaggaagaggaggaagaggagggcgatggtgagcgtaaaagaggagacgcttcaaaacccttatcagatgcacaaggaaaggaacactctgtgtcttcctcaagagaggtcactagctctgtgcttcccaatgacttttttagtactaacccaccgaaagcaccaattattccccactccgggtccatcgagaaggccgagattcatgagaaggtagtggagcggcgggagaacacagcagaggctctacccgagggttttttcgatgatccagaggtggacgctcgtgtgcggaaggtcgatgcccctaaagaccaaatggacaaagagtgggacgagttccagaaagccatgagacaggtaaatacaatttccgaagcgatcgttgccgaagaagacgaggaaggacgacttgacagacaaattggggagattgacgagcagatcgagtgttacagaagggtagagaagctacggaaccgtcaggacgagataaagaacaaactgaaagaaatcctcaccatcaaagagctccagaagaaggaggaagagaacgcagactctgacgatgagggggaacttcaggacctcctcagccaggactggagggtgaagggcgcattgctctag

SEQ ID NO: 15096 - DNA, 1782 bp, synthetic construct
  source 1..1782: mol_type = other DNA; note = Synthetic coding sequence
atgagccggcctagctcaagggcaatttatttgcaccgcaaggagtacagccagaatctgacctcagaaccaaccctgcttcaacacagagtggaacatttgatgacatgtaagcagggaagccagagggtccagggcccagaggatgctctgcagaagctgttcgaaatggatgcgcaaggccgagtctggagccaggacctgatcctgcaggtccgcgacggttggctgcagcttttggacattgagacaaaggaagagctcgattcataccggctcgactccatacaggctatgaacgtggcgcttaatacctgtagctacaattccatcctatctataactgtccaggagcctggcctaccaggaactagcacactcctttttcagtgccaggaggtgggagcagaacggctcaagacttccttacagaaagcacttgaggaggagctcgagcagcgcccccgcctcggaggactccaaccgggtcaagataggtggcgaggcccagctatggaaaggcccctgccaatggaacaggctaggtacctcgagcctgggatccctcccgaacagccgcaccagagaacgttggagcactcacttccacctagccccaggccactgccacggcatacctccgcccgagagccttccgcatttacactcccacctcctcggcgatcatcaagtcccgaggaccctgagagggatgaagaggtcctgaatcatgtgttgcgcgacatagagctgttcatgggcaagctcgaaaaagcacaggcaaaaacttccagaaagaaaaagttcgggaagaaaaataaggatcaggggggtctcacgcaggcccagtatatcgattgctttcagaagataaaacattcattcaatttgctggggcgactggccacgtggttgaaggaaactagtgccccggagctggtgcacatcctattcaagtcactgaacttcattctcgcccgctgtcccgaagcagggctcgcagcccaggtgatcagtcctctgctcacaccaaaggcaatcaatctgctccaaagctgcctgagccctcccgaaagcaacctgtggatgggcctaggacccgcttggacaacaagccgagccgactggaccggggacgagccattaccgtaccagccaaccttctctgatgattggcagctacccgaaccatcaagccaggcgccacttggctaccaggaccccgtaagtctgagacgcgggagccatcgtctcggtagcactagccattttccacaagagaagacccacaatcacgatccacaacctggggacccaaattccaggccctcctctccaaaacctgcacaacccgctctgaaaatgcaggtgctctacgagttcgaggctaggaatcctcgagaacttaccgttgtgcagggggagaaattggaagttcttgaccacagtaaaaggtggtggctggtgaagaacgaagctggccgttctgggtacattccatcgaatatactggaacctctgcaaccgggtacaccgggtactcaaggacagtctcccagtagggttccaatgcttcggctgtcaagtagacccgaagaagtcactgattggcttcaggctgagaattttagcaccgctacagtacgaacactgggctccctgacgggcagccagcttttacggattaggcctggcgagctccaaatgctatgcccacaggaggcccccaggattcttagtcgactggaagccgtgagacggatgctcggcatttcaccttag

SEQ ID NO: 15097 - DNA, 1050 bp, synthetic construct
  source 1..1050: mol_type = other DNA; note = Synthetic coding sequence
atgaaactcacaagcgagaagctgcccaagaatcccttttacgcgtccgtgagccagtacgctgctaaaaatcagaaattcttccagtggaaaaaagagaaaacggaatcggactacacacacgccaatctggtagataaggccttacagttactcaaagaaagaatactgaagggagacacactggcctacttcctcagaggtcagttgtacttcgaggagggatggtatgaggaggccctggagcagtttgaggagattaaggaaaaagatcaccaggcaacttatcagctaggtgtgatgtactatgacggtctcggtactacactagacgccgaaaagggagtcgactacatgaaaaagatacttgactcaccctgcccaaaggcacggcatctgaagttcgcggctgcatataatctagggcgagcgtattatgagggtaagggagttaaaaggtcaaatgaagaggctgaacgactgtggctgattgctgccgataatggcaaccccaaggcatctgtgaaagcccagtctatgcttggattgtactacagtacgaaggagcccaaggaactcgagaaagccttttactggcattcagaagcatgcgggaacgggaatctggagtcccagggtgctttgggactgatgtacctgtatggccaaggcatcagacaggacactgaagcggccctccaatgcctgcgggaagcagcagagagaggcaacgtttacgcccaaggcaatctggtggaatactattataaaatgaaatttttcactaagtgcgtcgccttctctaaaaggatcgccgattatgacgaggtgcatgatatccctatgatcgcccaagttacggactgcctccccgaattcattggccgtgggatggccatggcttctttttatcacgcgcgttgtcttcagctcggcctaggcatcacaagggacgagacaactgctaagcactactatagcaaggcgtgtcgactgaaccccgcactggccgacgaactgcatagcctcctgatacgccaaaggatctag

SEQ ID NO: 15098 - DNA, 1236 bp, synthetic construct
  source 1..1236: mol_type = other DNA; note = Synthetic coding sequence
atgggcctcaaaaaaatgaaagggctgtcatacgatgaggcattcgccatggcaaatgatccgctcgagggtttccatgaggtcaatcttgcttcccccaccagtcccgacctgctgggagtgtacgagagcggcacccaggagcagaccacttcccccagcgtgatctatcggcctcaccctagcgccctcagcagcgttccaatccaagctaacgctctggacgtgagcgagctgcccactcaaccggtctattccagtcccaggcggctcaactgtgcggagattagctcgatcagttttcatgtgacagaccctgcaccttgctctacatcgggcgtcacagcaggcctgaccaagctcaccacgaggaaggataattacaatgccgaacgggagtttctccagggcgcaaccatcactgaagcttgtgacggatcagacgatattttcgggctgtccacggattctttatcccggttacgttccccatcagtgcttgaagtgcgggagaaaggttacgaaaggctgaaagaagagttagccaaagcacaaagggaactcaagctgaaagatgaggaatgtgaaagattgtctaaggttcgggatcagttaggacaagaacttgaagagttaacagcgtctcttttcgaggaggcacataagatggtcagagaggcaaacatcaagcaggccacagcggaaaaacaactcaaggaggctcagggcaaaatcgatgtgttgcaggctgaggtggccgcccttaagacactcgtgttaagcagctcgcctacttcccccacccaggagccactacctggcggtaagacccccttcaaaaaaggacacacacgcaacaagtccaccagctctgcgatgtccgggtcacatcaggacctgtctgtgattcaaccaatagtgaaagactgcaaagaggcggacctgtctctttacaatgagttccgcctctggaaggacgaacccaccatggatcggacctgcccgtttctcgataagatctatcaggaggatattttcccgtgtcttaccttctcgaaaagcgaactcgcctcggctgtgctggaagctgtggaaaacaatacgctttcaatcgagcccgtgggcctgcaaccgatccggtttgtcaaagcatctgctgtagaatgcggaggccccaaatcccttctgtacgttacatttcttcacaccttcgacacattttcgagagattcttag

SEQ ID NO: 15099 - DNA, 2148 bp, synthetic construct
  source 1..2148: mol_type = other DNA; note = Synthetic coding sequence
atgtttgggagaaagaggtccgtgtccttcgggggattcggatggattgacaagacaatgctggcctccctgaaagtgaagaagcaggagttggccaacagctctgatgctacccttcctgatcgccccttaagcccccccctgactgccccacccacgatgaaaagctcggagttcttcgagatgctcgagaagatgcaggatgactacatcccatacccaagtatcgacgaggtcgtagagaaaggtgggccttacccccaggtcattctcccccaattcggcgggtattggattgaggatccggaaaacgtgggaacccctacatcactcgggtcttcaatctgcgaagaggaggaagaggacaacctgagccctaatacatttggctacaaactcgagtgcaaaggcgaggccagggcatataggcggcacttcctgggcaaggatcacttaaacttctactgtacagggtctagtctcgggaacctgattcttagcgtgaaatgcgaggaggccgaaggcatagagtatctgagagtgattttgcggtccaagctgaagactgttcatgaacggattccccttgcggggttgtctaaactgccatctgtcccacagatcgcaaaggccttctgtgatgatgccgttggtctaaggtttaatccagtcctgtatcctaaagcatcacagatgatcgtgtcatacgacgagcatgaggtgaacaacactttcaaatttggcgtgatctaccagaaggcccgccaaaccctggaagaagagctcttcggcaacaatgaggaatccccagctttcaaggagtttttggacctcttgggcgacaccatcacattgcaggattttaaagggtttaggggaggattggacgtgacacacggtcagactggagttgaaagtgtctacactaccttccgagaccgggaaatcatgttccacgtgagtactaagctcccctttaccgacggcgacgcacagcagctgcagaggaagcggcatatcggcaacgatatcgtcgctatcatcttccaggaagagaatacacccttcgttcccgacatgatcgcatccaactttctgcatgcatacatcgtggtgcaggttgagactcccggcacagaaacaccttcatataaagtctcagtcaccgcaagggaagacgtacccacattcggccctccactgccctctcccccagtcttccaaaagggacctgaatttcgggagtttctcctcactaagttgaccaatgcggagaatgcttgctgcaagtcggataagtttgctaagctcgaggacaggaccagggcagctctgctggataacctgcacgatgaactgcacgctcatacccaggccatgctgggattgggccctgaagaggacaagttcgagaatggcggccatggggggttcctggaatctttcaagagggctatcagggtccgatcacacagtatggaaaccatggtgggtggacagaaaaagtcccatagcggtggaatccctggttcactgtcaggaggaatttcccataactctatggaggtaaccaaaactacattcagcccaccagttgtggccgctacagtgaaaaatcagagcagaagccctattaagaggcggtcagggctgttcccacggctccacacaggatccgagggacagggcgattcacgcgctaggtgcgatagcaccagctccacacctaagaccccagatggcggacattccagccaggaaattaaaagcgagacgagctcaaatccaagcagtccagagatctgccctaacaaagagaaaccatttatgaaattaaaggaaaacggacgcgctatttctaggtcatcctcctcaacttcatcagtgtcgagtactgccggcgagggagaagctatggaagagggggatagtgggggctcgcaaccctccaccacaagcccgtttaaacaagaggtgtttgtgtattccccttcaccatcttcagagtcccctagtctgggagctgctgccacacccatcattatgagccggtcccctacagacgctaaatcacgaaatagtccacgttctaatcttaagttccgtttcgataaactctctcatgcatcgagcggcgcgggccattag

SEQ ID NO: 15100 - DNA, 2271 bp, synthetic construct
  source 1..2271: mol_type = other DNA; note = Synthetic coding sequence
atggaggaagagttgaaatgtcccgtgtgcggctccctgttcagggaacccataatcctgccgtgctctcacaatgtgtgcctgccttgcgcaagaaccatcgcagtgcaaacgccagacggcgagcagcacctgccccaacctttgctcctctcacggggctccgggctccaggcaggagcggccgctgcagcatccctggaacatgacgcagccgcaggaccggcctgtggaggcgccggcggctccgctgccgggggccttggaggcggagctggcggaggcggcgatcacgccgataaactgtcattgtattccgagacagacagcggatacggtagctatacaccatctctgaagagcccgaacggagtgcgcgtgctcccaatggtccctgcccccccaggctcctctgctgctgccgcgcgtggcgccgcctgcagttccctgagcagttctagttcctctatcacctgccctcagtgtcacaggagtgcctccttagaccacagggggctgcgaggatttcagaggaaccgtcttttggaagcgatcgtccagaggtaccagcagggtaggggggccgttcctggcaccagcgccgcggctgccgtggccatttgtcagctgtgcgaccgcacccccccggaacccgccgctactctatgtgagcagtgcgacgttctctactgcagcgcatgccagttgaagtgtcatcctagtagagggccattcgccaaacacaggttagtgcagcccccccccccgccaccgccgccagctgaggcagccagcggcccaaccggaaccgcacagggcgcacctagcggcggcggtggttgcaagtcccctggaggtgcaggagccggcgcaactggtgggtctacagccagaaagtttccgacttgtcctgagcacgagatggaaaattattctatgtattgcgtctcctgtaggacacccgtgtgctatctttgtctagaagaggggagacatgctaaacacgaggtgaaacccctgggggcgatgtggaagcaacacaaggcacaactgtcccaggccctgaatggggtctcagacaaggctaaagaagcaaaggaatttttggttcagttgaaaaatattctgcagcagatacaggaaaacggcctggactacgaagcatgcctcgttgcgcagtgtgacgcactggtagacgccttgacacgacagaaggccaaacttctcaccaaagtcaccaaggagcgtgagcacaaattgaagatggtgtgggaccagatcaatcactgcacacttaagctgaggcagtcaaccggcctgatggaatactgcctggaggtgatcaaagagaacgacccttctggatttctgcaaatttctgacgctctgataaagcgtgtgcaggtctcacaggaacagtgggtgaaaggggcactggaacccaaggtgtctgccgagttcgacctgacattggatagtgagcctttgctgcaggccatacatcagctggactttatacagatgaaatgcagagtgcctcctgtgcccctgctgcagctggagaagtgttgcacccgaaacaatagcgttacgctcgcctggaggatgcctccctttactcactccccagtcgatggatacattctggagttagacgatggcgctggtggccagttcagggaggtctatgtgggcaaggagactctgtgcacaattgatggcttgcacttcaattctacttataacgcccgcgtcaaagccttcaactccagcggcgtgggaccatattcaaagacagttgttctgcagactagcgacgtggcctggtttacctttgatcctaattccggccaccgcgacatcatcctgtcaaacgataatcagaccgcaacttgctctagttacgatgaccgcgttgtgctgggcaccgctgcttttagcaagggcgtgcattactgggagctccacgtagacaggtacgacaaccaccccgaccccgcttttggagtggcacgcgcctctgtcgtgaaagacatgatgcttggaaaagatgacaaggcctgggccatgtacgtagataacaatcgatcgtggtttatgcactgtaacagccatactaaccgtacagagggaggtgtgtgtaaaggtgctactgtgggcgtccttctggacttaaataagcataccctgaccttcttcattaacggccagcaacagggtcccacagcctttagtcatgaagttcagcctagtgtcacctccctcttctag

SEQ ID NO: 15101 - DNA, 2352 bp, synthetic construct
  source 1..2352: mol_type = other DNA; note = Synthetic coding sequence
atggaagaggagttgaagtgcccagtttgcggcagcttgtttcgcgagcccattattctgccctgctctcacaacgtctgcctgccctgcgcgagaacgatagcagtgcagacacccgacggcgaacaacatctgccacagccactgttgctgtccaggggaagcggcctgcaggcaggtgctgccgccgctgcaagcctggagcacgacgcagcagctggtcccgcttgcgggggggctggggggtctgcagcgggggggcttgggggaggcgccggaggaggaggcgatcatgccgacaagctctcgctctactcagagacggacagcggttatggcagttataccccaagcctgaagagtcctaatggggtgcgtgtgctccccatggttcccgcacctccaggttcctccgcagccgcagcccgcggggcagcatgctcatcactgagtagctcctcttcctccatcacctgtccgcagtgccaccggagcgcctccctcgatcacagaggccttaggggtttccaacggaatagacttctcgaagctatagtgcagcggtaccagcagggaagaggagcagtgcccggcacgtcagcagcggccgcagttgccatctgtcagttgtgtgataggactccacctgagccggcggcgactctatgtgagcagtgcgatgttttgtattgttctgcatgccagttaaaatgccacccctctagaggacccttcgccaaacataggttggtgcagcctcccccacccccccctccgccagccgaggctgcaagcgggccaaccggtacagctcagggagcaccttcaggagggggtggctgtaaatcccccggcggcgcaggcgcgggggccacgggcgggagcacggccaggaaatttccaacatgcccagaacacgagatggagaactactctatgtattgtgtttcttgccgcactccagtttgctacctgtgcttggaggaaggccggcacgccaagcacgaagtgaagcctctaggcgctatgtggaagcagcacaaggctcaactgagccaggccctgaacggggtctcagataaggccaaagaggccaaagagtttctcgtgcagctgaagaatatcctccagcaaattcaagagaatggactggactatgaagcctgcctcgtggcgcagtgtgacgccctggtggatgcattaaccagacagaaggcaaaactgctcaccaaggtgactaaggagcgagaacataagctgaagatggtgtgggatcaaattaatcactgcacgctgaaacttagacagtctaccggtctgatggagtactgcctagaggtcattaaggaaaacgacccatcaggcttcttgcagatctccgatgcactgatcaagcgcgtccaagtgtcccaggagcagtgggtaaagggcgccctcgagcccaaggtgtcggccgaattcgatctgacactggattccgaaccactccttcaggcaattcatcagctggactttatccagatgaagtgcagagtcccaccagtgccattgctgcaactagagaagtgctgcactcgcaacaacagcgtgaccttggcttggagaatgccgcccttcacgcactcccccgtcgacggatatatcctcgagctggatgatggggccggaggacaattcagggaagtttacgtcgggaaggagacgctttgcacgatagatgggctacatttcaactctacgtacaatgctagagtgaaagcctttaatagcagcggagtaggaccatacagcaaaactgtggtgctgcaaacatcagacgtggcctggtttacatttgaccctaacagtggacacagagacataatcctgagcaacgataatcagacagctacatgctctagttacgatgatcgcgtggtcctgggtacagccgccttcagcaaaggagtccactattgggaactgcacgtagacagatatgataaccatccagatccagcctttggcgtcgccagagcttccgtcgtgaaggatatgatgctaggtaaagatgataaggcctgggcaatgtacgtggacaacaacagatcctggttcatgcactgcaattcccacacaaatcggactgaagggggcgtctgcaagggagccaccgtgggcgtactcctagacctgaataaacacactcttaccttttttattaacggccagcagcaaggtcctaccgcattctcacatgtggacggagtgttcatgcccgcgctgagtctcaacagaaacgtgcaggtgacattgcacaccggtctcgaagtgcccaccaacctgggacgccctaagctgtctggcaattag

SEQ ID NO: 15102 - DNA, 471 bp, synthetic construct
  source 1..471: mol_type = other DNA; note = Synthetic coding sequence
atggtgcccgtttttacatccagcgctctgccagtgaaagatgttgaggataagccagagcaacagacccgaactagagagaccgataagtcccccacaagtacggagccgagacagcagcccagtgccttattcgctcgcggtaaccggaaggctgtcaaatcaccacagcggagctcaagcaagattaaagaaaataagcatcctttcgctctctacggctggggggaaaaacagacagacaccgggagccagaagacgcataatgtttgtgcctccgcgccggtgcacgagattcatgagtccgcactgcgggccaaaaacagacgccaagtggagaaacgcaagctggttgcacagagacagcgcgcacacagcgtagacgtggagaagaatcggaaaatgaaagctagcagttccgaaaacccatggatgaccgagtacatgcgttgctatagcgccagagcttag

SEQ ID NO: 15103 - DNA, 813 bp, synthetic construct
  source 1..813: mol_type = other DNA; note = Synthetic coding sequence
atgtctcccggctcgggggttaaaagtgagtatatgaaacggtatcaagagccccggtgggaggagtatggcccctgctacagggagttgttgcattatagactcggcagacgattactcgaacaagcccacgcgccttggctgtgggatgattgggggcccgctgggtcaagtgaggatagcgcatcttctgagtccagcggtgctggggggcctgctcctcggtgcgcccctccttccccacctcctcccgtcgaacctgctactcaggaagaggccgagcgtagggcaagaggggctccagaggagcaggacgccgaggctggagatgctgaggcggaggacgccgaagacgctgcgctgccagccctgcccgtgaaagacgtggaggataagcctgaacagcagacccggacacgagaaactgataaatcccctactagcactgagcccaggcagcagccaagcgccctattcgcacgagggaatcggaaggctgtgaaatcacctcagcgtagttcttctaagattaaggaaaacaagcatccatttgcattgtacgggtggggcgagaagcaaacggatacaggatcgcaaaaaacgcacaatgtctgtgcgtcagcaccagtgcatgagattcacgagtccgcgctgagggcaaaaaaccgtaggcaggtagaaaaacgcaagctcgttgcccagcgccaacgtgctcatagtgtggacgtagagaagaaccgaaagatgaaggcaagtagttccgagaatccatggatgaccgagtacatgagatgctactctgcccgagcctag

SEQ ID NO: 15104 - DNA, 1158 bp, synthetic construct
  source 1..1158: mol_type = other DNA; note = Synthetic coding sequence
atggcggcaccagatctgtccactaatctgcaggaagaagctacatgcgctatctgcctcgattatttcaccgacccagtcatgaccgactgtggccacaatttctgcagggaatgcatccggcggtgttggggacagcctgaggggccctatgcctgccctgaatgccgcgagctcagtccccagaggaatctgcggcccaatagacccttagcaaagatggccgaaatggctaggaggcttcaccccccatcgccagttccacagggggtctgtcccgctcaccgggagcccctcgccgcattttgtggggatgagctgcgcctgctttgtgcggcctgtgaacgcagcggggaacactgggctcaccgtgttaggcctctacaggatgccgcggaagatctgaaggccaaacttgagaagtcactggagcatctgagaaagcaaatgcaggatgcactactgtttcaggcccaggcagacgagacatgtgtcctatggcaaaagatggtagagtcccaaagacagaacgtgctgggcgagtttgaaagattgaggagattacttgccgaagaagagcagcagctcttgcaacggctagaagaagaggaactggaggtcctcccaaggctgagagagggtgcagcacatttgggtcaacaatcagctcaccttgccgaactgattgccgagctcgagggcaggtgccagctcccagcactggggctcctacaggacatcaaagatgcactgcggcgggtccaggacgtaaagttacaaccacccgaagtggtccctatggaactgaggactgtgtgcagagtgccagggctggttgaaaccctgagaagattcagaggcagatgcgggggaccccgttggggggacgattcgaggcggggccccgctaaagacctcggttcccagcctcgagtgctgtgtccggctacagccagctccaagcttactgtgtcttggtggtgggtagtgggaaaaacgtctagcgctcacacaagcgatattagctgcgttggaatctttacacctaataatagctccacttccggaaacgaactagggattcagggcttccattctgccttaaatcgcatcgcgtccgcggacacgactggggtgtctacggatccgactgactag

SEQ ID NO: 15105 - DNA, 1251 bp, synthetic construct
  source 1..1251: mol_type = other DNA; note = Synthetic coding sequence
atgccactgtataatgacagttttcacgagatcagccacaaagggcggaggcacacgctcgtactgaaaagcattcagcgggctgatgctggaattgtccgggcctcttcacttaaggtgtctacaagtgcgagactggaggttcgtgtgaaaccagtggtgttcttaaaggctctggacgatctttctgccgaggagaggggcacactcgctctgcaatgtgaggtgagcgatcctgaagctcacgtggtgtggcggaaagatggcgtacagctcgggccaagtgacaagtatgacttcctgcataccgccgggacccgtggccttgtagtgcatgacgtgtcaccagaggatgccggactgtatacatgccacgtagggagcgaggagactagggcacgcgtacgggtgcacgacctgcacgttggcatcacaaaacgactaaaaaccatggaagtcttggaaggtgagtcatgttcttttgagtgcgtcctgagccacgagtcagctagtgacccagccatgtggaccgtgggcggcaaaactgtgggtagcagtagcagattccaggccacacgccaaggccgaaaatatattctggtggttcgagaggccgccccatcagacgcgggggaggtggtatttagcgtccgtggattgacgtcaaaggcatcactgatcgtgcgggagaggccggctgccattattaagcccctcgaggatcagtgggtcgcacctggggaggacgtcgagttgagatgtgaactgtccagagctggcaccccagtgcattggctgaaagatcggaaggcaatccggaaaagccagaaatacgatgtggtctgcgagggcactatggctatgcttgtgatccggggtgcttctcttaaagatgccggagaatacacatgcgaggtggaggcatcaaagtccacggcctctctacacgtcgaagaaaaggccaactgcttcactgaagaacttacaaacttgcaggtggaggagaaaggcacagcagtctttacctgcaaaacggaacatccagcagctacagtcacctggcgaaagggcctgctggaactgcgtgcttccggcaagcatcagcctagtcaggaggggttgaccctccggctcaccatctctgctctggaaaaagctgactcagacacatacacttgcgacatcgggcaagcccagtcgagggcccagctccttgtccagggagaagccgctaagtgcgcccgggcatag

SEQ ID NO: 15106 - DNA, 2130 bp, synthetic construct
  source 1..2130: mol_type = other DNA; note = Synthetic coding sequence
atggaaaagcacaggggagttctagagtgtcaggtctccagagcttcggctcaagttaggtggttcaaagggtcccaggagttacaacctggccctaagtatgaactagtgagcgatgggctgtatcgcaagctgatcatatctgacgtacacgcagaggacgaagacacctatacctgcgatgctggtgatgttaaaacatccgcccaattcttcgtggaggaacagtccatcacgatagtgcggggcctgcaggacgttactgtaatggaaccggctcctgcgtggttcgagtgcgagaccagcattcccagtgtgcgtccccctaaatggctgttgggaaaaaccgtgctccaagcaggtggaaacgtgggattggagcaggagggcacggtccacaggctgatgttacgaaggacatgtagtaccatgaccggtcccgttcacttcaccgtcggcaagtcccggtcatccgcccgactggtagtgagcgatatacctgtcgtgttaaccaggccgctcgaaccaaagaccgggcgcgaactgcagagcgtggtgctaagctgcgatttcagacctgctcctaaggctgtgcagtggtacaaggacgatactcctctaagcccatccgaaaagttcaaaatgagtctggaagggcagatggcagaacttcgaatcctgcgacttatgccagcagatgccggagtgtacagatgccaagcagggtccgcccactcgtccacagaggttaccgttgaggctagagaggtgactgttacaggtccactgcaggatgccgaggctacagaggagggctgggcaagtttctcctgtgaactgagccacgaggatgaggaagtggaatggtctctgaatggcatgcctctgtacaacgattcatttcatgaaattagccataaaggtcgacgccacacgcttgtgcttaagtcaatacaacgcgctgatgctggcatcgtccgtgcgtcgtctctcaaagtttctaccagcgctagactggaagtacgggtgaagcctgtagtgttcttgaaggcgttagatgatctgagcgcagaagaacggggcacactagccctgcagtgtgaggtctctgatcccgaggcacacgtggtatggcggaaggacggtgtccaactaggaccttccgacaagtatgattttttgcacacagcaggaactcggggtttggtggttcacgacgtctcacctgaggacgccgggctctacacatgtcacgtgggctcagaggaaactcgggcccgtgtgagagtgcatgatctccacgtgggcattacaaagcgcctcaaaaccatggaagtactagaaggggagagctgtagcttcgagtgtgtgctgagccatgagagcgccagcgatcctgcgatgtggactgtcggggggaaaaccgttgggagctcctcacgttttcaggctacgagacagggacggaagtatatcctggtcgtgagggaggctgctcctagtgatgcaggcgaagtggttttctctgtccgcgggctgacttccaaagcgtccctgatcgtgcgagaacgccccgccgctattattaagccgctcgaggaccaatgggtagcgcctggggaagatgtagagctacgctgtgagctctctagagccggcacccctgtgcactggttgaaagaccggaaggccatccgaaagagtcagaagtacgacgtggtgtgtgagggtacaatggccatgttggtcattcgaggtgcctctctcaaggatgccggagaatatacttgtgaagtggaggcatccaagagcacagcctccctgcacgtcgaggaaaaagcaaactgctttactgaggaactcacgaacctacaggtagaggagaaggggacagccgtatttacctgtaaaactgagcaccccgcggccacagtaacatggaggaagggcttgctggaactgagagcttcagggaaacaccagccatctcaggagggcctaacactccggcttactatctccgctctcgagaaggcggacagcgacacatacacttgtgacatcggacaggcacagtcccgggcccaattgctcgtccagggcgaggccgcaaaatgtgcccgcgcctag

SEQ ID NO: 15107 - DNA, 16809 bp, synthetic construct
  source 1..16809: mol_type = other DNA; note = Synthetic coding sequence
atgttagtgatacgcggagccagcttgaaggatgccggagagtacacatgcgaggtcgaggcaagcaagagcactgctagccttcacgttgaggaaaaggctaactgtttcaccgaggagctgactaatctgcaggttgaagaaaaaggcaccgctgtgtttacctgtaaaaccgaacaccccgcggctactgtcacctggagaaaggggctgctggaattgcgtgcttcgggtaaacatcaacccagccaagaaggcctgacactgcggttaaccatcagtgcgctggagaaggccgattctgatacatacacctgcgacattggccaggcacaaagcagggcccaactgttggtgcaggggcgtcgggttcacatcatcgaggacctagaagatgtggatgtccaggagggatcttcggcaacattcaggtgcagaatcagcccagcaaattatgagcccgtgcattggtttctggacaagacacccctgcacgctaatgagttgaacgagatcgacgcacagccaggtggatatcacgttctgaccctgcgccagctggcactgaaggacagcggaacgatttattttgaggccggcgaccagcgggcgtctgccgccctgcgagttactgagaagcccagcgtgttttccagagagctgacagacgctacgattaccgagggtgaagacctgactctagtgtgtgaaacctcgacctgcgacatccccgtctgctggaccaaagatggtaaaactcttagaggcagcgcccgctgtcaactatctcatgagggccatagggctcaactgctgatcaccggagccactcttcaggactcaggccgttataaatgcgaagctggcggggcttgctcaagctccattgtgcgggtacacgcacgacccgtacgatttcaggaagccttgaaagacctcgaggtgctggaggggggagccgccaccttaaggtgtgtgctgagttccgtggccgcgccagtgaaatggtgttacggcaacaatgtgcttaggccaggggacaagtactcgcttcgccaggagggagctatgctggagctggttgtcaggaatcttagaccgcaggatagtggtcgttactcttgtagcttcggggaccagaccacttccgccacgttaactgtgacagcgctgcctgcacagtttatcggaaaactcaggaacaaagaagccaccgagggagcaaccgccactctgaggtgcgagctgtccaaggctgcaccagtggaatggaggaagggaagcgaaactctaagggacggtgatagatattgcttaaggcaggatggcgctatgtgtgagctacagatccggggtcttgccatggtggacgccgcggaatattcttgtgtttgtggtgaagaaaggacctccgcctccttaacaatcaggcccatgcccgcgcactttattggaagacttagacaccaggagtcaattgagggtgctacggctacgttgagatgcgagctgtccaaggccgcccccgtggagtggagaaaaggaagggagtctctgcgcgatggtgatcgccacagtctccgccaggatggcgcagtctgcgagcttcaaatttgtgggctggcagtggcagatgccggagagtattcatgtgtctgtggggaggagagaacatccgcaactctgacagtgaaagccctcccagcaaaatttacagagggccttcgcaacgaggaggcggtggagggggccactgctatgctatggtgcgaactttctaaggtagcccccgttgagtggaggaaaggtcccgaaaacctgcgagacggtgatagatacatcctgaggcaagagggaactaggtgtgaactacaaatctgcggacttgcaatggctgatgctggggaatacctatgtgtctgtgggcaagagcgcactagcgcaactcttacaattagggccctgcccgcccggtttatcgaggatgtgaagaaccaggaggcccgagagggcgctaccgccgtgctgcagtgtgagctgaacagtgccgcccccgtggagtggcgaaaagggagcgaaactctccgggatggagaccgctattcgttgagacaggacgggaccaagtgcgaattacaaatccgcggtctggcaatggcagacacaggcgagtatagctgcgtttgtggtcaggaacgcacttctgctatgctcactgttagagcgttacccattaagtttacagaaggacttagaaacgaggaagccaccgagggcgccacggccgtactcaggtgcgagctctcgaagatggctcctgtggaatggtggaaggggcatgagacccttagagatggcgatcgccactcccttcggcaggacggtgctcgctgtgagcttcagattaggggccttgtggctgaagatgcgggggagtacctttgcatgtgtggaaaagaacgtacctcggctatgctaactgtcagggctatgccttctaagttcatcgagggcctccgcaacgaagaagcgaccgagggtgacacagccactctgtggtgcgaactgtctaaggccgcgccagttgagtggcgcaagggccacgaaacattgagggacggagatcggcatagtctgcggcaggacgggtcccgttgcgagctgcaaatcagaggccttgctgtggtggacgcaggcgagtactcctgtgtttgcggacaggagaggactagcgctacactgacggtgagagctttaccagccaggtttatagaggacgtgaaaaaccaagaagcacgcgaaggtgcgaccgccgtccttcaatgtgaactgagcaaagccgctcctgtggaatggaggaaaggctcagagacgctgaggggcggagacagatattctctgagacaagacgggaccaggtgcgaattgcagattcacggccttagcgtcgctgacactggtgaatattcctgtgtgtgcggccaggaaaggacttccgccacgcttactgtcagggcgttacctgcgcgctttacccaggacttaaagaccaaagaagcatcggagggtgctacagctacactgcagtgtgaattgagcaaagtggcccctgtagagtggaaaaaaggacctgaaacactgagggacggtggtaggtattcgctgaagcaggatggtactcggtgcgagctgcagatccacgacctctccgtcgctgatgcgggcgagtactcttgtatgtgcgggcaggagcggacaagtgcgaccctaacagtgcgagcccttccggctcgctttaccgagggcctgcggaatgaagaagcaatggagggtgccaccgcaacgctgcagtgcgagctcagcaaagcagcccccgtcgagtggagaaagggattagaagctctcagggacggggataaatactctctgcggcaggatggcgcagtctgcgagctacaaatccacggcctcgcaatggctgataacggagtctattcttgcgtgtgcggccaggagcgaactagcgccaccctgaccgtgcgcgctctgcccgctcggttcattgaagatatgcggaatcagaaggcaaccgagggagccacagtgacgctccagtgtaaactgagaaaggccgcacccgtcgaatggaggaaagggccaaacaccctaaaggatggcgacaggtactctctgaaacaagacggaaccagctgcgagttgcaaattagaggcctggttatcgccgatgctggagaatactcctgtatttgtgaacaggaacgcacgagcgcaacattgactgtgagggctctccccgcacgcttcatagaggatgtgcgcaaccacgaggctactgaaggagcgactgccgtcctccagtgcgagctcagcaaggcagctccagtcgaatggcggaagggctctgagaccttacgcgatggcgaccgctactcactacgtcaggacggcacaagatgcgaactgcaaatccgcggccttgcagtggaagacactggcgaatacttatgcgtatgcggacaggagcgtacctcagctacgttaactgtgagagccctacctgcccgcttcatagacaacatgacgaatcaggaagcccgggaaggagccactgcaacattgcattgtgagttgtccaaagtggcgcctgtagagtggagaaaaggaccagaaaccttgagggatggcgatagacatagcctgaggcaggacggcacgcgctgcgagttacagatcaggggcctaagcgtcgcagacgccggtgaatacagctgcgtttgtggtcaggaacggacctcagcgactctgaccatcagagaagctaccgaaggagccacagccatgctgcaatgcgagctgtccaaggtggctccagtggagtggcggaaaggaccggagacactgagggacggtgaccgctataatttgaggcaggatggcacacgctgtgaactccagattcacggtttgtcagttgcagatacgggcgagtactcttgcgtctgcggacaagaaaagaccagcgcaactctgactgttaaagccccccagcccgtttttcgggaaccactccagtccttacaagccgaggagggttctaccgctacgttgcaatgcgaacttagcgagcctaccgctacagtggtctggagtaaaggcgggctccagctgcaggccaacgggcgcagagagccacgactgcagggctgtaccgctgaacttgtgcttcaagacctgcaacgggaggatactggcgaatacacttgcacctgcgggagtcaggcgacttccgcaactctgaccgttacagccgctcctgtgcggtttctgcgcgaactccagcaccaagaagtggatgaaggtgggacagctcacctttgttgcgagctttcgagggcaggcgcatccgtcgagtggcgaaaaggctccctgcaactcttcccatgcgccaagtaccagatggtgcaagacggtgcagcagccgaactcctggtgcgcggggtcgagcaggaagacgccggtgattacacctgtgatacaggacatacacaaagcatggcatctctgtctgtcagagtcccacgacctaagttcaagacacggctccagtcactggagcaggagacaggtgatattgccaggctgtgctgccaactctccgacgccgaatccggcgccgtcgtgcagtggctcaaagaaggagtggagctgcacgccggtcccaagtatgagatgcgatctcaaggtgccactagagagcttctgatccatcagcttgaagctaaagatacaggagaatacgcatgcgtcactggagggcaaaagaccgccgcgagccttcgcgtgactgaacccgaagtgactatagtgagaggtctcgtggacgctgaggttactgctgacgaggacgtcgaattcagctgcgaggtttccagagccggggccacaggcgtacagtggtgcctgcaagggctgcccttgcaaagcaatgaagttactgaggtcgccgtccgggacggtaggatacacactctgcggttgaagggagtgacccccgaagatgctgggactgtctcttttcatctgggcaaccatgcatcctccgcacaactcaccgtccgagctcccgaggtgactatcttggaacccctgcaagatgtgcaactctccgaaggacaggacgctagctttcagtgtagactgagtagggcctctggacaagaggcaagatgggccttgggaggtgtacctctgcaagcaaatgaaatgaacgatatcactgtggagcagggtaccttgcacctcctcacactgcataaagtgacgttggaagatgcaggcactgtgagtttccatgtaggaacgtgttcctcagaagctcagttgaaggtgactgccaaaaacaccgtagtgagaggacttgagaatgtggaggctctggaaggtggcgaggccctcttcgagtgtcagcttagtcagcccgaggtggctgctcatacctggttactggacgatgagccagtccatacgtccgagaacgccgaggtggtgttttttgaaaacggtctgcgccacctcctccttctcaagaacctgcggcctcaggacagctgtcgggtcacttttctcgctggagatatggttacatcagcctttctcacagtcaggggatggcggctggaaattctagaacccctcaaaaacgctgccgtgcgagccggggcccaggcctgtttcacatgcacgctgtccgaggctgtcccagtaggggaagccagctggtatattaacggcgcagcggtgcagcctgacgatagcgattggactgtgaccgcagacggctctcatcatgcccttctgttgcggagcgcacagcctcatcatgcaggtgaagtgacattcgcctgtcgggacgccgtcgctagcgcccgtctcaccgtcttagggcttccagaccctccagaagacgccgaagtcgtcgcccgcagcagccataccgtcacactctcatgggcagcaccaatgtctgatgggggcggtggtttatgcggttatagagtggaggtgaaggagggagccaccggccagtggcgcctttgccacgagttggtgcctggtccagagtgtgtggtcgatgggctcgcacccggggagacatatagatttcgcgttgccgctgtggggcccgttggcgctggcgagccagtacacctgccccagacagtgcgtttggctgagccacctaaaccagtgcccccacagccgtctgcccctgagagccggcaagtggctgcgggagaagacgtgtccctcgagctggaggtggttgccgaggcaggcgaggtcatctggcacaaggggatggaacggatccaacccggcggacggtttgaggtggttagccagggccgacagcaaatgctcgtgattaagggtttcacagccgaggaccagggggaatatcactgtggtctagcgcagggcagcatctgtccagcagccgccactttccaggtcgccctctcgcctgcgagtgtggatgaggctccccagcctagtctgccgcccgaggcagcgcaggagggagatctgcacctgctgtgggaagctctggcacgcaagcggagaatgtcccgcgaacctacactggactctattagcgaactgccggaggaagatggccgttctcagcgcttaccccaggaagccgaggaggtggctcctgacctcagtgaaggatattccaccgcagatgaactcgcccgcacgggtgacgcagatctatcacatacaagcagtgacgacgaatctagagccggtaccccaagcctggtgacgtatttaaagaaggccggtcgtcccggcacatccccactagctagcaaggtgggcgcgcctgcagcaccgtccgtaaagccgcagcaacagcaggagcctctcgcggctgtcaggccgcccttgggagacctgtctaccaaagatttgggcgacccaagcatggataaggcagctgtgaagatccaggctgcgtttaagggctataaagtcagaaaagagatgaagcaacaggagggccctatgttctcccacacattcggcgacacagaagctcaggtcggagatgctctccgactggaatgcgttgtcgcttccaaagctgacgtccgggcacgatggttaaaggatggagtggaactgactgatgggcgacaccaccatattgatcagctcggcgacggaacctgctctctgttgatcacaggactggaccgcgcggacgcaggatgctatacatgtcaggtgtcgaacaagtttggccaagtaacacacagtgcttgcgttgtcgtttccgggagtgagtctgaggctgagtcctcatccggaggcgagctggatgacgcatttagaagagcggcccgtaggctccataggttgtttagaacaaagtccccggctgaggtgagcgacgaggagcttttcctgagcgcggatgaggggcccgccgagcctgaggagcctgccgactggcaaacatacagagaagatgagcattttatctgtatcagatttgaggccttgaccgaggcccgccaggccgtgacccgatttcaggaaatgtttgctacgcttggaattggggtagaaatcaagctggtggaacagggaccgcgcagggtcgaaatgtgcatttcgaaagaaactccagcgcccgttgtgcctccagaacccctccccagtttgctgacctccgatgcggccccagtgtttctgaccgaactccagaaccaagaagttcaggatggctacccagtaagtttcgactgtgtggtgaccggccagccgatgccttcagtcaggtggttcaaggatgggaagctgcttgaagaggatgatcactatatgatcaatgaagatcagcagggtggccatcagctgatcatcacagcagtagtccccgccgatatgggtgtctacagatgtctggccgagaactctatgggagtctcaagcacaaaggcagagctcagggtggacctcacgtcaactgactatgacacagccgctgacgcgaccgagagttcctcctacttcagcgctcaaggttatctatcatcgcgggaacaagagggaaccgagagcacaactgatgaggggcaactgccacaggtggtcgaagaactcagagacttgcaggtggcacctggcacgcgactggcaaaatttcagctcaaggtgaaaggatatcctgctcccagactgtactggtttaaagacggtcagccactcacagccagcgcgcatattcggatgactgacaaaaagattttgcatacgctggagattatctctgtgacccgcgaagacagtgggcagtacgctgcctacattagtaacgccatgggagccgcatactcctctgcccgtctccttgtccgtggaccagatgagcccgaggaaaagcctgccagtgacgttcatgagcagttggtccccccaaggatgctggaacggtttactcccaaaaaggtgaagaaaggaagttccattacgttttcagtgaaagtggagggccgccccgttcccaccgtccattggcttcgagaagaggccgaaaggggtgtactatggatcgggccagatacccctggatatacagtggcatcctccgcgcagcagcattctcttgttctgcttgacgtcggtcgacagcaccagggcacatatacctgtatcgcaagcaacgccgccggccaagctctgtgtagcgcgagcctgcatgtctctgggcttcccaaggttgaggagcaagagaaggtaaaagaagcactgattagcacatttctgcaggggacaactcaggctatcagcgcgcagggactagaaaccgcatcattcgctgatcttggcgggcaacggaaggaggagcctttagctgcaaaggaggccttggggcatcttagcttggccgaagttggtactgaagaattcctgcaaaaactgacctctcagatcaccgagatggtttccgctaaaatcactcaggccaaactccaggttcccggcggggattctgatgaagactctaaaaccccctctgcctccccccgccatggccgctcccgcccaagctcctcaatccaggaaagctcttccgaatctgaagatggagacgctagaggggagatatttgacatttacgtcgtaacagccgactacctccctcttggtgctgaacaggacgcaatcacactacgtgagggtcagtatgtcgaggttctggatgctgcacatcctctcagatggctggtgcggaccaagccgactaagagctcgccatccagacaaggatgggtcagcccagcttacctcgatcgtcgattgaaactttcacctgaatggggagccgccgaagctccagagtttcccggagaggcggtatccgaagacgaatacaaagcccggttgtcctctgtcatccaagagctgctgagttccgagcaggcgtttgtcgaagagctgcagttcctacagtctcatcacctccagcacctcgagcggtgtccacacgttccaatcgcggttgccgggcagaaggctgtgatcttcagaaatgtgcgcgatattgggcgattccattcttccttccttcaagagttacagcagtgtgacaccgacgacgacgtggcaatgtgcttcatcaaaaaccaggccgccttcgaacagtacttggagtttctggtcggaagggtgcaggccgagtcagtggttgtttctacagcaatccaggagttctacaaaaagtacgccgaggaagccctgctcgccggagatccttcccagcccccacctccacccttgcaacattatctggagcagccggttgagcgtgtccagcggtatcaggccttgctgaaagagctgattcggaacaaggccaggaaccggcagaattgcgcactgttagagcaagcgtacgcagtggttagcgctttacctcaaagagcagaaaacaaactgcacgtcagcctgatggaaaactatcccggaacactccaggccctcggggagcccatcagacagggccatttcatcgtgtgggagggagcccctggggccagaatgccttggaagggacacaaccgccacgtgtttctctttaggaaccaccttgtcatttgtaagccccgccgcgactctaggactgacacagtgagctacgtgtttcgcaacatgatgaaactgagctcgattgatctgaatgatcaagtggaaggggacgaccgagcttttgaagtgtggcaggaaagggaagactccgttagaaagtaccttttgcaagccaggaccgccattataaaatcaagttgggtgaaggagatttgtggaatccaacaaagactggcactccccgtgtggcggccgccagacttcgaggaagaacttgctgactgcacagcagagctgggagagactgttaagttggcatgccgggtgaccggcacccccaagcccgtcatctcatggtacaaggacggtaaagccgtacaggtagaccctcatcacattctcatcgaggatcctgatggtagctgcgccctgattttggattccctcaccggcgtggatagcgggcaatatatgtgtttcgccgcatcggctgccggtaactgtagtactctggggaagattcttgtgcaagtgccccctaggtttgtgaacaaagtgagggcatcacccttcgtcgagggcgaggacgcccagttcacttgtaccatcgagggagctccataccctcagatcaggtggtacaaggatggtgccctgctcactacggggaacaagtttcagacgcttagtgagccacggtcgggcttactggtgctggtcatacgggccgcaagtaaagaagaccttgggctgtatgaatgtgaactggtgaacaggctgggcagcgcccgggcatctgctgaattgagaatccagtcccctatgctccaggcgcaagagcaatgccacagagagcaactagtggccgcagttgaggataccacccttgagagggccgaccaggaagtaacttccgtgctgaaaaggttacttgggccaaaggcacccgggcctagcacaggggatctgactgggcccggaccgtgtccacgcggcgcacccgctctgcaggagacaggcagtcagccccccgtgactggaacctcggaagcaccagctgtcccacccagggtcccacagcccttgctgcatgaaggccccgagcaagagccagaggcaatcgcaagggcccaagaatggacggtccccatccgcatggaaggtgctgcttggcccggcgccggcaccggcgagctcctgtgggacgtccactctcatgtagttagggaaaccacccagcgcacctacacatatcaggccatagacactcacaccgcgcgaccgccttcgatgcaggtgaccattgaggatgtgcaggctcaaactggcgggacagcccagttcgaggctataatagagggagatccacagccgagcgtgacctggtacaaggattccgtacagcttgttgattcaaccagactaagccaacagcaggagggaaccacttacagcctcgtgctcaggcacgtggcttcaaaggacgctggggtatacacctgtctcgctcagaatacggggggccaggtgttgtgcaaagcagaactgctggtcctcgggggggataacgagcccgacagcgagaagcagagccaccggcggaaactgcatagcttctacgaagtcaaagaggagattggtcggggggtattcggatttgttaagcgggtgcagcataagggaaataagattctctgcgctgccaaatttatcccactgagatcacgcacccgcgcccaggcctacagagaacgcgacattctggctgccttgtcccatcccctcgtgacaggactcctggatcagtttgagacaagaaagaccttaatcctcattttggagctttgctctagcgaggagcttttagatagactgtatcgcaagggcgttgttacagaggcagaggtgaaagtttatatccagcaactagtggagggattacattatcttcacagccacggcgtgttacatttagacattaagccttccaatatcttgatggtgcaccccgctagggaggatatcaagatatgcgacttcgggtttgctcagaacataactcctgccgagctgcagttcagccagtacggaagtcccgagtttgtttcccccgagatcatccagcagaaccccgtatccgaggcgtcggacatctgggctatgggtgttatatcttacctgtcactcacatgtagtagcccctttgcaggcgagagcgatagggccacccttctgaatgttttggaagggcgggtctcctggagctcccctatggctgcgcacctctctgaggacgccaaagattttattaaagccacactgcagcgagcaccccaagcacgcccctcagccgctcagtgtttgtcccacccctggttcctcaaatcgatgcccgcagaggaggcccacttcatcaacactaaacaattaaaattccttctcgccagatcaagatggcagagatccttaatgagctacaagtctatactcgtgatgagatctattcctgaactcctgagaggcccaccggatagcccgtcattgggggtcgcgcgacatttgtgtagagacactggagggtccagctccagtagcagctcatccgacaatgagttggctccattcgcacgggcaaagtccttgcctccttcccctgtaacccactccccactgcttcatccccgaggctttctgaggccttcagcgagtcttccagaggaagccgaagcatccgaaaggtcaaccgaggcccccgcacccccagcatcccctgagggcgcaggccctcctgcggcccagggctgtgtgccccgacactccgtgattagatccctgttctatcatcaagcaggagagagtcccgaacacggtgccctcgcacccgggtcacgcaggcatcctgccagaagaaggcatctcttaaaggggggttacatcgctggagccctgcctggcctgagggagcctcttatggagcaccgagtgttggaggaagaggccgcccgtgaggaacaggctacgcttctagccaaagccccttcttttgagaccgcactgcgcttaccagctagtggaactcacctcgctcccggacactcccactcacttgaacatgactccccgtctaccccacggccctctagtgaggcctgtggggaagcacagcgcctgccttctgccccatcaggcggtgcgcctatcagggatatgggtcatccgcagggatctaaacagctgccaagcacaggcggccatcccggcaccgctcagcccgaacggccttctccagattccccctggggacagcctgcccccttttgccatcccaagcaaggaagtgccccgcaagaaggatgcagtccccatccggccgttgctccttgtcctccaggctcctttcctcctggctcctgtaaagaagcgccactggtcccttcctccccctttcttggtcagccacaggccccacccgctcctgctaaggcctccccccccctggattccaaaatgggcccaggagacatttctctaccagggagaccaaaacccggcccgtgctcgtctccagggtctgcatcacaggcctcttctagccaggttagttcgctgagggttggatcttcccaagtgggaacggagcctggcccttccctcgatgctgaggggtggactcaggaagccgaagatttatccgattctacgcctaccctacagagacctcaggaacaggccaccatgcggaaatttagcctcggggggcgaggggggtacgccggcgtagccggctacggcacgtttgcttttgggggtgatgccggagggatgttgggccaggggccgatgtgggctcgcatagcttgggcagtcagccaaagcgaggaagaggagcaggaggaagctagggccgaaagccagagtgaagagcagcaggaggccagagctgagtctcccctgcctcaggtctccgccaggcccgttccagaggttggccgtgcccccacgagatcctctcctgagcctacaccctgggaggacatcggacaagtgtccctcgttcagatccgagatctctcaggggacgctgaagccgccgatacgatctcacttgatatctctgaagtcgaccctgcctatcttaacctgtctgatctgtatgacattaaatacttgccatttgaatttatgatatttcgcaaggttccaaaatcagctcaaccagagccgccaagccctatggcggaagaggagctggcagagttccccgagccaacttggccatggcctggggagctgggcccgcatgctggcctcgaaatcacagaggagtcagaggacgtggacgccctgttggctgaggccgccgtgggtagaaaaaggaagtggagcagcccatcaaggtccctgtttcacttccccggtagacacctccccctcgacgagccagccgaactcggacttagggaacgagtgaaagcatccgtagaacacatctcacgcattttaaaaggccgcccagaaggcctggagaaggaaggcccaccacgaaagaaaccgggtctagcttcattcagactgtccggtcttaaaagttgggacagggcccctaccttccttagagagttgtcagatgaaacggttgtgctaggacagtctgtgacccttgcctgtcaggtgtcagcacagcccgctgctcaggcaacttggtctaaggacggcgccccccttgagtctagcagcagggtcttgatatccgccacactcaaaaattttcagttgcttacaattcttgttgtggtggcggaagatctgggagtgtacacatgctctgtgagcaatgccttggggacagtaaccaccaccggtgtgctgagaaaggccgaacgaccaagctcttccccctgtccggatataggagaggtatacgccgatggagtcctgcttgtatggaagcccgttgagtcgtatggccctgttacatatattgtgcagtgtagcttggagggcggatcttggaccactcttgcttcagatatcttcgactgttgttacctgacctctaaactcagtagagggggaacttacaccttcaggaccgcgtgtgtgagtaaggctggcatggggccatattcctcacccagtgagcaagtgctgttgggcggtccctctcacttggcaagcgaagaagagtctcagggaaggtcggcccagccgctgccatctacaaagacattcgcattccagacacagatccagcgcgggcgcttctccgtggtccggcagtgttgggaaaaggcatctggccgagccctcgccgccaaaatcatcccttaccaccccaaagacaaaactgctgtgctcagggaatatgaggccctgaaagggctacgacatccccatctggcccagctccatgcggcatacttaagtccccggcacctagtcctgatcctggaactgtgttccggtccagaactgctcccctgccttgccgagcgggctagctacagcgaaagcgaagttaaagattacctttggcagatgctaagcgctacccagtacctgcataaccagcacatcctgcacctggacctgcggtccgagaatatgatcataacggagtacaatctgctgaaagtcgtagatttgggcaacgcccagtcgctcagtcaggagaaagtgcttccaagcgacaaattcaaggattacttagaaaccatggcccccgaacttcttgagggacagggtgccgtccctcaaaccgatatctgggctatcggagtgacagcctttatcatgctatctgcggagtacccagtgagtagtgagggtgcaagggacctacagcgtggactcaggaaagggctcgttaggttgtctaggtgttacgctggtttgagcgggggagcggttgcctttcttcgctctacgctgtgcgctcagccctggggacgcccctgtgcctccagctgcctgcagtgtccctggctgactgaagaagggcctgcctgttcgcgacctgctcccgttacatttcccacagcccggctgcgcgtatttgttaggaaccgagagaagcggagggctctactgtataagcgccacaatctcgctcaggtgcgatag

SEQ ID NO: 15108 - DNA, 11220 bp, synthetic construct
  source 1..11220: mol_type = other DNA; note = Synthetic coding sequence
atgctggtgatcagaggggcttcactgaaagacgccggggagtatacctgcgaggtggaagcgagcaaatcaactgcctccctccacgtggaggagaaggccaattgtttcaccgaagagctaacaaacctgcaggtggaagagaagggaaccgctgttttcacctgtaaaactgagcacccggctgccactgtaacttggaggaagggccttctggagctacgggcatctgggaaacatcagccttctcaagaaggacttacactcagattaacaatatcagcactggagaaggccgatagcgatacctatacgtgtgatattggccaagctcagtctagggcccagctgctggtccagggccggagggtgcacatcatcgaggacctggaagatgttgatgtccaagaaggctccagtgccactttcaggtgtcggatttcgcctgccaattacgagcctgtgcactggttcctcgataagacaccactccacgctaacgagttgaacgagatcgatgcccagcctgggggctaccacgtccttacgctgaggcagctagccctgaaggattccgggaccatttatttcgaggccggcgatcagcgtgcaagcgccgcactgcgcgtaactgagaagccgtcagtctttagccgtgaactgactgatgcgacgattaccgagggcgaagatctgaccctggtctgtgagacctcaacatgcgatatcccagtttgttggactaaagacgggaagacattacgtgggtccgcaagatgtcagctgagtcatgaaggccacagggcacagctgctgataacgggagctacactccaagattccggaagatataagtgtgaggcaggaggagcctgctcctcttctatagtgagggttcatgcccgacccgtcaggttccaggaggccttgaaggacttggaagtgttggaaggcggagcagccaccctaagatgtgtgctttctagcgttgccgccccagtcaaatggtgttatggaaacaacgtgcttcggccaggggacaagtattctctgagacaagagggcgccatgctagaactggtcgtccggaaccttcgaccacaggacagtggacgctacagctgtagcttcggcgatcaaaccacatctgctacactcactgtgaccgctctgccagcccagtttataggcaagctcaggaataaagaggcgaccgaaggcgctacggcgacactaaggtgcgagttgagcaaagcagcacccgttgagtggcgaaaggggtctgagactctgcgagacggcgacaggtattgccttcggcaggatggagcgatgtgcgaacttcaaattcgtggattggccatggtggacgccgctgagtatagctgtgtgtgcggcgaagagcgtacaagtgcttccctgaccataaggcctatgcctgcacatttcattggacgccttcggcatcaggagagcatcgaaggggctactgcaacacttaggtgcgagctatctaaggcggcccccgtggaatggcgaaagggcagggagtcactcagagacggagacagacatagcttgagacaggacggtgcggtgtgtgagctgcaaatttgtgggttagctgttgcagacgccggagaatacagctgtgtctgtggggaagaacgaacaagtgccacactgacagtgaaagctctgcccgcgaaatttacagagggcctgcgcaacgaggaggctgtcgaaggagccacggcaatgctatggtgcgagctgtccaaagttgcccctgtggagtggagaaaggggccggaaaacctaagagatggggacagatatatcctgcggcaggagggtactcgctgtgaactgcaaatctgtggcctggcgatggctgacgcaggcgaatacttgtgtgtatgtggccaagagcgcacatcggcgactctcaccatccgtgctctgccagctaggttcatcgaggacgtcaaaaatcaggaggccagggagggcgctactgcagtccttcaatgcgagctgaattctgcggccccagtcgagtggaggaaaggatctgagactctgcgcgacggagaccgctactctctcagacaagacggcacaaaatgtgagctgcagattcgtggccttgccatggccgacacgggtgagtatagctgcgtctgcggccaggagagaacctcagccatgttgactgtgagagctctgcccatcaagttcaccgagggcctgcgaaatgaagaagcgactgagggagcgacggccgtcctcagatgcgaactgagtaagatggcaccggtcgagtggtggaagggacacgaaactctccgagacggtgaccgacatagcctgcggcaagacggagccaggtgcgagctccagattagaggactggttgcggaggacgcaggggagtacctgtgcatgtgtgggaaggaaaggacctccgctatgttgaccgtccgagccatgccatctaagttcattgagggtttgcgcaacgaggaagccaccgagggtgatacagctacactctggtgtgaactctccaaggccgccccagtagagtggcgaaaagggcacgaaaccttacgggacggagacaggcattccctccgacaggacggttcgaggtgcgaacttcagattagggggctcgctgtcgtggatgccggagagtacagttgtgtctgtggacaggaacgcactagcgctacactgacggtccgagccctgccagcccgctttatagaggacgtaaaaaaccaggaggctagagaaggcgccacagcagttcttcagtgcgaactctccaaggctgcgcctgtagagtggcgcaaagggtccgaaacgctccgggggggggatagatactcattaagacaggacgggacacgctgtgaactgcagatacatggactcagtgttgcggacacaggagagtactcttgtgtttgcgggcaagaacgcaccagtgcaaccctcaccgtgagagccccgcagccagtatttagagaacctttgcagtcactacaggctgaggagggatctaccgctacccttcaatgtgaactctcagagccaacggcaacggtggtttggagtaagggcgggctgcagctccaagctaacgggcgtagggaaccgcggctgcaggggtgcacagcggagctggtgctgcaggacctccagcgagaggatacaggggaatacacttgcacttgtgggtcccaggcaacgtctgccacattgacagtgactgccgcccctgtgcggtttctgcgggagctacagcaccaggaggtggatgaaggtggcacggcccacctgtgttgtgagctgagccgcgcaggcgcctccgtagagtggcggaaggggtccttacaacttttcccttgcgccaagtatcaaatggtccaagatggagcagctgctgaactcttggttcggggtgtggagcaagaggacgccggcgactatacatgtgatactggacatacacagtctatggctagtctcagcgtaagagtgccccgcccaaaattcaagaccaggctccagtctctcgagcaggaaactggtgacatagcccgcctttgttgccagctatccgacgccgaaagcggtgcagtcgtccagtggctcaaggagggcgtagaacttcatgccgggccgaagtatgaaatgcgcagccagggagcgaccagagagttactcattcatcagctggaggcaaaggataccggcgagtacgcgtgcgtcactggaggacagaaaaccgcagcaagcctcagagtgactgaacccgaggtgaccatagtgagaggcttggttgatgccgaggtaaccgccgacgaggacgtcgagttttcttgcgaggtgagccgtgccggggcaaccggcgtgcagtggtgtctgcagggacttccactacaatcgaatgaagtgaccgaagtggccgtgagggacggacgtattcacacgctgcgactaaagggggtgacgccagaggacgctggtaccgtgtcctttcacttgggaaaccatgcttcatccgctcagctgaccgtccgagccccagaagttactattttagaaccgttgcaggatgtccagttgagcgaggggcaagatgccagttttcagtgtaggctatcacgggcctccggccaggaggcaagatgggccttgggaggcgtacctttacaggccaacgaaatgaacgatatcaccgtagaacagggcactcttcacctgctgacgttacacaaggtgacccttgaggatgccggcactgtgtcctttcatgtagggacctgtagttcagaggctcagctgaaagtgactgctaagaatacagtcgtccgggggttggaaaatgtggaggccctggaaggcggcgaggcccttttcgagtgccagctttcacaaccggaggtcgccgcccacacctggctcctagatgatgagcccgttcatacatccgaaaatgctgaggtggtattcttcgagaacggattgcgacacctgttgctgctcaaaaacttacggcctcaggattcttgccgcgtaactttccttgctggggatatggtaactagcgcgttcctcactgtccgcggatggagactggagatcctggaacccttaaagaatgctgccgttcgggccggtgctcaggcttgtttcacatgcacactgtctgaggcagttcccgtaggggaagccagttggtatataaatggcgctgcagttcagcccgatgatagtgactggactgtgacggcggatggtagccatcacgcactcctgttaagatccgcccagccacaccatgccggagaggttacttttgcgtgccgcgacgctgtagcctccgccaggctgactgtgctgggcctacctgatccccccgaggatgcagaggtggtcgccagaagctcccacacagtgaccctaagctgggctgctcccatgtctgatggcgggggtggcctgtgcggatacagggtcgaagtcaaagaaggcgccacaggtcagtggaggctctgtcacgaactcgtccctgggcctgagtgtgtcgtggacggtttagctcctggagaaacatatagatttcgtgtggctgccgtgggcccggtaggggccggtgagcctgttcatctgcctcaaaccgtgcggctagccgaaccccctaagccggtgccacctcagccctctgcgcccgagtcccgccaggttgcagccggagaagacgtgtcgctggaactggaggttgttgccgaggctggagaagtgatatggcacaaaggcatggagagaatacagcccggaggaaggtttgaggtggtaagccaagggcgacagcagatgctggtgatcaagggattcacagccgaggaccaaggagagtatcactgcggcttggcccagggcagtatctgtcctgctgctgccactttccaggttgctttgtccccagcctcggtggatgaagcaccacagccaagtttaccgcctgaagctgctcaggagggagatctacacctcctgtgggaggctctcgcacgaaagcgtcgaatgtcaagagaaccgaccttggatagtatcagtgaattaccggaagaagacgggaggtcccaacggctcccacaggaggctgaagaggtcgcgccagatctgtccgaaggatactctacagccgacgagctggcgaggacaggtgatgcagacctaagccacacttccagcgatgacgagtccagagctggcacaccgtccctcgtcacctacctgaaaaaagccggacgaccaggaacctcccctctggccagtaaagttggtgcccctgccgcaccatctgtcaaacctcagcagcaacaggaaccacttgctgcagtccgcccaccccttggggacctgtccaccaaggatcttggcgatccttccatggataaggctgccgtcaaaatccaggcagcctttaagggctataaggtcagaaaggagatgaagcagcaggaggggcccatgttctcccatacatttggggatactgaggctcaggtaggggatgcactgcggttggagtgcgtggtggcctccaaggccgacgtgagggctcgatggttgaaggacggcgttgaactgaccgatggacggcatcaccacattgatcagcttggtgacggcacttgcagtctgcttattacagggctggatcgggctgatgcaggctgctacacatgccaagtgtctaataagttcggccaggtaacgcattcagcttgcgtcgtagtgagcgggtcagagagtgaagccgaatcctctagtggaggcgagctggatgatgccttcaggcgggcagcccggcgtctccataggctgttccgtacgaagtcccccgccgaggtctccgacgaggagcttttcctgagcgcggatgagggcccagccgaacctgaggaaccggcagactggcagacatatcgggaggatgaacactttatctgtatccgcttcgaggcattgacagaggcccgccaggcggtgacccgttttcaggagatgttcgccaccctcggcataggtgttgagatcaagctagtcgaacaggggccccgcagggtggagatgtgtattagcaaagagactccagcccctgtggtgcccccagagccgctaccgagtctgctgacatccgatgcagcacccgtcttcctgacagagctccagaaccaagaggttcaagatgggtatccagtgtcgttcgattgtgtcgtgaccggacagcccatgcccagcgtgcgctggtttaaggacggcaagttgctggaggaggacgatcattatatgataaacgaggatcaacaggggggtcaccagctcatcattacagccgtggtgccagccgatatgggagtctaccgatgcctcgccgagaattccatgggggtctcatctactaaggcggagctacgcgtggacctgacttcaactgattacgacaccgccgcggatgctaccgagtcatcctcctatttcagtgcacagggctacttgagttctcgggagcaggagggaacagagtccacaacagatgaaggccagttacctcaggttgttgaagagctgcgtgacctacaggttgcaccaggcacccgtttggccaagtttcagctaaaggtgaagggctaccccgcacctcggctgtactggtttaaagatgggcaacccctgacagccagcgcccacatacgcatgacggataagaaaattttacatacgctcgaaattatatcagtcactcgcgaagattcgggtcagtatgctgcttacatttcgaatgcgatgggcgccgcttatagttccgctagactcttggtgagaggccccgacgagcccgaagaaaaacctgcctctgatgtgcatgagcagctagtgccccctcgcatgctggaacgcttcaccccaaaaaaagtaaaaaagggttcttcaattactttcagcgtgaaagttgagggccgaccagtgccaacagttcactggttacgggaagaggcagagcggggagtgctgtggatcgggcctgacactcccggctacaccgtggcttcatccgcacagcagcatagtctggtgttgcttgatgtgggccgacagcaccagggcacctatacctgcattgcgagtaatgccgccggtcaggctctctgttccgcttccttgcacgtgtcagggttgcccaaggtagaggagcaggaaaaggtgaaggaagccctgatcagcacgttcctacaaggcacaacccaggccatttccgctcagggactggagacagcctccttcgcagatttgggtgggcagagaaaagaagagccactggcagccaaggaggcgctgggccaccttagtctggcagaggtgggaaccgaggaattcctgcagaagctgacaagccagattaccgaaatggtgtccgcaaagatcactcaggccaagctccaagtccctgggggggatagcgatgaggattctaaaacgccctctgcgtcaccgaggcacgggcgctcacgtccttcttcttctatacaggaaagttcttctgaaagtgaggacggggatgctcggggagaaatctttgatatttatgttgtcacagcggactacttacccctgggtgcagaacaggacgccattacccttcgggaggggcagtatgtcgaggtgctggatgccgcccaccccctgcggtggctggtacgaacaaagcccacgaagtcttctcctagtcgtcagggctgggtgagccctgcgtatctggacaggaggctgaagttgtctcctgagtggggggcggcggaggctcccgaatttccaggggaagctgtgtcagaggacgagtataaagctaggctcagcagtgtcatccaggagctcctgagcagcgaacaagccttcgtcgaagagctccagtttcttcagagccaccatttacagcatctcgaaagatgtcctcacgtgcctatcgccgtagccggacagaaagccgtcatcttccggaatgttagagacattggccgtttccacagttcattccttcaggaactccaacaatgtgacaccgatgacgacgtcgcgatgtgtttcatcaagaaccaggcagctttcgagcagtacctcgagtttctggtaggacgcgtgcaggccgagtccgtcgtggtgtctacagcaatccaggagttttataagaaatatgctgaggaggctttgctggctggcgatcctagccagccccccccaccacccctccaacactacctggagcagcctgttgaaagagtccaacgctaccaggcactgctgaaggagttgatccgcaataaagctagaaacagacagaactgtgctctgttagagcaggcctacgctgtggtctcagccttgccccagcgggccgagaacaaactccatgttagcctaatggaaaattacccaggtaccttgcaggcgctgggagagcctattagacaaggacattttatcgtctgggagggcgcacctggcgctagaatgccttggaaaggacataacagacacgtttttctctttcgaaatcacctcgtgatatgtaagccgcgacgggattcccggactgacactgtgagctacgtattccgcaacatgatgaagctgtcaagcattgacctgaacgatcaggtcgagggtgacgacagagcttttgaagtgtggcaagaacgagaggactccgtgagaaaatacctcctgcaagcccgtacagcgattattaagagctcatgggtgaaagagatttgtggcatacagcagcgactggccctaccagtgtggcgccctccggactttgaagaggagctggctgattgtaccgccgagctgggagaaaccgttaagctggcttgtagagtgacggggactccaaagcccgtgattagttggtacaaagacggaaaggctgtccaggttgacccacaccatatccttatcgaggatccggacggcagttgtgcacttatcctagactcattgacaggtgtcgactctggccagtatatgtgttttgcagctagcgcagccggaaactgcagcacattgggcaagatcctggttcaagtgcctcctcgctttgtaaacaaggtgcgagcctccccctttgtggaaggcgaggacgcacagtttacttgtactattgagggagccccttacccgcagattcggtggtacaaagatggcgccctactgactactggcaacaagtttcagacactgtcggaacccaggtccggactcttggttttggtcatcagagctgcgtccaaagaagaccttggcctgtatgaatgtgagctggtgaatagattggggtcagcgagagcctcggccgagctgcgaattcagtccccaatgctccaggcccaagagcaatgccatcgggagcaactggtcgctgctgtcgaggtcaccgagcaggaaactaaggtgccaaaaaaaacagtgatcatcgaagaaacgattaccactgtggtcaagtcaccaagaggccagcgccggagcccaagcaaatcgccctcacgcagtccgtcacgttgttctgcttcacctttgcgccccggtctgctcgctcccgacctactgtacctcccaggagctggacagcctaggcgtcccgaagccgaaccaggacagaaaccggttgtacccaccctgtacgtgactgaagccgaagctcattcacccgctctgcccggactgtcgggacctcagcctaaatgggtggaggtcgaggagacgatcgaagtacgagtaaaaaagatggggcctcaaggcgttagccctaccaccgaggtgccacggtcctcctccggtcacctctttaccctgcccggagcaaccccaggaggggaccctaattctaacaactcaaacaacaagttgttggcgcaggaggcatgggcccaggggacagctatggtgggtgtcagggaacctctggtctttagagtagatgcaaggggctccgttgattgggcagcgagcgggatgggatctctggaggaggagggaacaatggaagaagccggcgaggaagaaggcgaagatggtgacgcgttcgtaacagaggagtctcaggacacccactcactcggggacagggaccccaagatcttgacacataacggaaggatgctgacgttggccgatctggaagactacgtgcctggggaaggcgagacgtttcactgtggaggcccaggccctggagccccagatgatcctccctgcgaggtcagcgtcatccagcgcgagattggcgaacctaccgttggccagccggtcctcctctcagtcggccatgctctgggccctagaggcccactgggactttttagacccgagccccgtggtgcctcaccaccgggtcctcaggtgcgatctctagaaggcacaagctttctccttcgcgaggctccggcccgcccagtcggtagcgctccatggacccagtccttttgcactcgcattcggcgcagtgccgacagcgggcagtctagtttcaccaccgaattatctacacagaccgtgaactttgggaccgttggggaaaccgtgaccctgcacatatgtcccgatcgtgacggcgacgaggcagctcagccatag

SEQ ID NO: 15109 - DNA, 1071 bp, synthetic construct
  source 1..1071: mol_type = other DNA; note = Synthetic coding sequence
atggccacagccgctttgctgaggggggcgacaccagggagaggcggtcccgtgtggcgttggaggctgagggccgctccgagatgtcgcttggcacactcctcatgtagcccaggaggagacccgacagccggcgccgcatgggcttgtttcagactcgatggacggacgctcttgagggttcgaggtccggatgccgcccctttcttactggggctgctcacaaatgagttacctcttccctcccccgcggcagctggcgcacctcctgccgcacgagctggctatgctcatttcctgaacgtgcagggtcggactctttacgatgtgatcctgtatggattacaggaacactcggaggtgtccggattcctcctggaatgcgactcttcagtacagggtgccctgcagaagcaccttgccctgtaccgtattaggcgcaaagtgactgtggaacctcatccagagctccgtgtgtgggcagtgctgccttctagcccggaagcgtgtggggcagccagtttacaggagcgcgcaggcgcagccgccatcctgatcagggaccctagaaccgcaagaatggggtggcgtctgctgacccaagatgagggacctgcacttgtgccaggcgggcggcttggggacttgtgggactatcaccagcacagatacctgcaaggagtaccagagggtgtcagagaccttccgccaggggtggcgttgcctttagagtcgaatctggcttttatgaacggggtatctttcacaaaaggctgttacatcggccaagagctgactgctcggacacaccacatgggggtgatccgtaagcgcctctttcccgttcgcttcctcgaccccctgcctacgtcaggcatcactcccggagcaactgtgctcactgccagcggccagacggtagggaaattcagagcagggcagggtaacgtcggtctggccctgctatggtcggagaaaattaagggaccactgcacattagagcgtccgagggcgctcaggtggctctggccgcttctgtgcccgactggtggcccactgtaagcaagtag

SEQ ID NO: 15110 - DNA, 1395 bp, synthetic construct
  source 1..1395: mol_type = other DNA; note = Synthetic coding sequence
atgcgagcggccaggagaggcttacactgtgcaggtgctgaacgaccaaggagaagggggcgcctgtgggacagctccggcgtgccccagcgccaaaagcgcccaggcccgtggcgaacacagacccaggagcagatgtcccgggatgtatgcatccatacttggccctgcacttattacctggagccaaaacggcggtgggtaaccggccagctctcactgacctctttatcactcaggtttatgaccgactcaaccggggaaattctggtgtccttccccttaagttccatcgtggaaatcaagaaagaggcctcgcactttatattcagctccataaccatactagaaaagggacatgcaaagcattggttttcctccctgcgaccaagccgcaacgttgttttctctattatcgagcatttttggagggaacttctcctgtcccagccaggagctgttgctgacgcaagcgtaccacggacgcggggtgaggaactgacaggccttatggccgggagtcaaaagagacttgaggatactgccagggttcttcaccaccagggccagcagctagacagcgtcatgcggggactcgacaaaatggagtcagacctggaagtagcagaccgactgctgaccgagctggaatcgcccgcgtggtggcctttttcctctaaactttggaaaactccaccagagactaaacccagggaggacgtttccatgacgtcatgtgagccttttggaaaagaaggcatcctcatcaagattcccgcagtgatttcacacagaaccgaatctcatgtcaagccggggagactaacagtcctggtatctggccttgagatccacgactccagcagcctgttaatgcacagatttgaaagagaagatgttgatgacatcaaggtacattccccatatgagatatcaatccgccaacggttcattggcaagccagatatggcctacaggctgatcagcgcaaagatgccggaggttattcccatcctagaggttcagttcagcaaaaagatggagcttttggaagatgctttggttcttaggagcgccaggacgagttccccagcagagaagtcttgcagcgtatggcatgcagcttccggcctgatgggtcggactctccaccgggaaccaccggccggtgaccaggaagggacagctctgcacctacagactagtctgcctgccttatctgaggcagatacgcaggagctgacccaaatcctccgacggatgaaaggtctggctctggaggccgaatcagaactggagcgacaggacgaagcgctggatggcgtggcggccgccgtggaccgggcgaccctgacaattgataagcacaaccgtcgtatgaaacgcctgacttag

SEQ ID NO: 15111 - DNA, 669 bp, synthetic construct
  source 1..669: mol_type = other DNA; note = Synthetic coding sequence
atgacgtcctgcgagccctttggaaaggaggggatactcataaagatcccggccgttatctctcatagaactgagagccatgttaaacctggccgactgaccgtacttgtatctggcctagaaattcatgactcttcctccctcctgatgcacagatttgagagagaagacgtggacgatattaaggtccactccccatacgagatctcaatccgccaacgttttataggtaaaccggacatggcttataggcttatttctgccaagatgcctgaggtcattccgatactcgaggtgcagttctctaaaaagatggagcttctggaggatgccctggtcctgcgcagcgctcggacttcatcccccgccgagaaatcatgttcagtgtggcacgccgcaagcggcctaatgggcaggacactgcaccgtgagccccccgctggggaccaggaaggcacagccctgcacttacaaacctcactcccggccctctctgaagcagacactcaggagcttacacagattctacgcaggatgaaaggtcttgccctcgaagccgagagtgagctggagagacaggacgaagcacttgacggggtcgccgctgctgtcgacagagctacgctgacaatcgataaacataaccggaggatgaagagattgacctag

SEQ ID NO: 15112 - DNA, 201 bp, synthetic construct
  source 1..201: mol_type = other DNA; note = Synthetic coding sequence
atgccacagtatcagacgtgggaggagtttagccgggctgctgaaaaactttatctggcagatcccatgaaggctcgggtggttctgaaatacaggcactctgacgggaatctttgcgttaaggtgaccgatgacttggtccagtggcacctgaattactgcacactgcggcatggaattgccggcggtctcgaaacatag

SEQ ID NO: 15113 - DNA, 249 bp, synthetic construct
  source 1..249: mol_type = other DNA; note = Synthetic coding sequence
atgccacagtaccagacgtgggaggagtttagcagggccgccgagaaactctacctcgccgatccgatgaaggcccgtgtggtgctcaaataccggcactcggatgggaacctctgtgttaaggtgactgacgacttagtgaggcaatgtcttgcattgcttctgaggctgcaatgttcaggcatgattattgcacattgcatactcgatctcctggggtcttccggacccctggcatccgcttcttag

SEQ ID NO: 15114 - DNA, 651 bp, synthetic construct
  source 1..651: mol_type = other DNA; note = Synthetic coding sequence
atgcaggccaacggggccggagggggtggaggcggcggaggaggtggggggggcgggggaggcggaggtggcggtcaaggccaaacgcctgagctcgcttgcctctccgcccagaacggagaatcttccccttctagcagcagctcagcaggggaccttgctcatgccaacgggttgctgccgagtgccccctccgctgctagcaacaacagcaattctttgaatgtcaacaacggcgtgcctgggggtgcagcggctgcctccagcgccacagtcgccgccgcctcagctactactgctgcctcctcatccctcgccacaccagaactcggtagtagcctaaaaaagaagaagaggctctctcagtctgatgaagacgtgattaggctcattggccagcatttgaatggtttgggcctgaatcagaccgttgatctgctcatgcaagagagcggatgccgcctagagcatccaagcgctaccaaatttagaaatcacgtgatggaaggtgattgggataaagctgagaatgatctgaatgagcttaaaccacttgttcattccccccacgcgatcgtcgcccagacatttagcgaaactagcatcaacttctttcctctcaccgccgcattttgtcatgtgagaggctag

SEQ ID NO: 15115 - DNA, 2340 bp, synthetic construct
  source 1..2340: mol_type = other DNA; note = Synthetic coding sequence
atgaggatcgaagagcgaaagagccaacacctgacgggcctgactgatgagaaagtgaaagcctatctgagcctgcatcctcaggtactagatgaattcgtgtccgaaagcgtaagtgccgaaaccgtcgaaaagtggctgaaaagaaagaacaataagtcggaggatgaatcggccccaaaggaggtcagccgctatcaagatacaaatatgcagggagtcgtctatgaattgaacagttatattgagcagcggctggatacgggaggagataaccagttgcttctgtatgaactgtcctccatcattaaaatcgccaccaaggccgacggcttcgctttgtactttctaggcgagtgtaacaacagcctgtgtatcttcacccccccggggattaaggagggcaaaccgcggcttattcccgcaggccctatcactcaggggactaccgtttcggcttatgtcgccaagagcagaaaaacactgctcgttgaagatatactgggggacgagcgctttccgagaggcactggactggaatcaggcaccagaatccaatccgtcctgtgcctgccaatcgtgacagccataggcgacctaatcggcatccttgagctgtacaggcactggggaaaagaggcattttgcctttctcaccaggaggtggcaaccgctaatctggcatgggcatctgtagccattcatcaggtacaagtctgtcgcgggctggccaagcagaccgaactcaacgatttcctcctcgatgtgtcaaagacttacttcgacaatatcgtagctattgactccttactggagcacattatgatttatgccaaaaatctggttaatgctgatcgctgcgccctgttccaggtggaccacaaaaataaggaactgtacagcgatttgtttgatatcggggaggagaaggaaggtaagccagtattcaagaaaacaaaggagatccggttttcaatcgagaaaggtattgccggccaggtcgcccgcaccggggaggtgctaaatatccccgacgcttatgccgacccaaggtttaaccgggaagtagatctgtacaccggttatactacaaggaacatcctgtgcatgcctattgtcagccgcgggtccgttataggcgtggttcagatggttaacaaaatcagcggaagcgccttttcaaagacggatgagaacaacttcaagatgttcgcagtgttctgcgcgctggcactgcactgcgccaacatgtaccatcggattcgccacagcgaatgtatataccgtgtcacaatggagaaattgagctatcacagcatatgtacctctgaggagtggcagggcttgatgcagtttacactcccagtccgtctttgtaaggagattgaattgtttcatttcgacataggcccctttgagaatatgtggccagggatattcgtatacatggtgcaccgcagttgcgggacatcctgttttgagcttgaaaaactgtgcaggttcatcatgagcgtgaaaaaaaactataggagggtgccataccacaactggaagcatgccgtaacagtcgcacattgtatgtacgccatactgcagaacaaccacacattgttcacagacctggaacgaaaaggtctgttaatcgcctgcctttgtcatgacctggatcacagaggcttttctaattcatatctccagaaattcgatcatcctttggccgcactgtactctacaagtacgatggaacagcaccacttcagtcagaccgtttctatcctgcaactggagggccataatatcttttcaacccttagcagctccgaatacgaacaggtgctggaaattattagaaaggcaattatcgcaaccgacttagccctgtattttgggaaccgcaagcagctggaggaaatgtaccagaccgggtcccttaatttgaacaatcagagccaccgggaccgcgtgataggcctgatgatgactgcctgcgatctgtgttcagtgacaaaactttggccggttaccaagctgactgccaacgatatttatgccgaattctgggctgaaggagacgagatgaaaaagctcggaattcaaccaattcctatgatggatcgcgacaagaaagatgaggttccacaaggccagctggggttttataacgcagtagccattccctgttatacgaccctgactcagatcctcccaccaactgaaccactgctgaaagcgtgccgggacaatctctcacagtgggagaaggttattcgcggcgaggagactgcaacctggatctccagcccctctgtggctcagaaggcagccgcctccgaagattag

SEQ ID NO: 15116 - DNA, 666 bp, synthetic construct
  source 1..666: mol_type = other DNA; note = Synthetic coding sequence
atggccgcagcttcaggaagtgtgctgcagcggtgtatcgttagtccagccggacggcacagcgcgtcattgatattcttgcacggcagtggcgattctggacagggcctccgcatgtggataaagcaggtcctgaatcaggacctcactttccaacatattaagataatctatcctacggcacctccccgttttaagattaccaacgattgccccgagcatttagagagcattgatgttatgtgtcaggttctgaccgatcttatcgacgaagaagtgaagagcgggattaagaagaacagaattctcattggcggcttctcaatgggaggctgtatggcaatccatttggcctatagaaaccatcaggatgttgctggagtctttgccctctcttcatttctcaacaaggcaagcgctgtgtatcaggccctccagaaaagcaacggtgtcttacccgagcttttccaatgccacggtaccgcagacgagctcgtgttgcacagttgggcagaggaaacaaattctatgctgaaatccttgggcgtgaccactaagtttcatagctttcccaacgtataccatgagttgagcaaaacagagctggacatcctcaagctgtggatcctgaccaagctacccggggaaatggagaagcaaaaatag

SEQ ID NO: 15117 - DNA, 714 bp, synthetic construct
  source 1..714: mol_type = other DNA; note = Synthetic coding sequence
atggcggcagcatctgggtccgtcctgcagaggtgtatagtatcacccgccggacgccacagcgcctcacttatctttctgcatggttctggcgattccggacagggccttcgcatgtggatcaagcaggtgcttaatcaggacctgacctttcagcacatcaagattatttatcctacggcccctccccgcagttacacgccgatgaagggtggcatctccaacgtctggttcgatcggtttaaaatcaccaatgactgtcctgagcacctagaaagtatcgatgtaatgtgccaggtcctgaccgacctcatcgatgaagaagtgaagtccggtattaagaagaatagaatcctgattggcggcttctcaatgggggggtgtatggccattcaccttgcataccgtaaccatcaggatgttgcaggggtttttgctctgtcttcattcctaaataaagcttcggccgtgtaccaagccctgcagaagtccaacggggtgcttcctgaacttttccagtgtcacggcacggctgatgagttggtgcttcacagctgggccgaggagaccaattcgatgctgaagtctcttggagtgacaacaaagttccacagtttccccaacgtctaccacgaactgagtaaaaccgagctggacatcctgaagctttggatcctcaccaagttgccgggcgaaatggaaaagcagaaatag

SEQ ID NO: 15118 - DNA, 471 bp, synthetic construct
  source 1..471: mol_type = other DNA; note = Synthetic coding sequence
atggagactgctaaggaaatgacgcgcgaatcgctgccgatcaagtgcctggaggcagtgattttggggatttatttaaccaatgggcagccttccatcgaacgatttcctatctccttcaaaacttacttttcaggcaactacttccaccacgtagttcttggtatttattgcaatggaaggtacggctccctcggaatgagccgccgcgcagagctgatggacaaacctctgaccttccgaactctgtctgatctcatttttgacttcgaagactcctacaaaaagtatctccacactgtaaaaaaggtcaagatcggcctttacgtgccgcatgagccccattcattccagccaatagaatggaagcagttagtgctaaacgtctcaaagatgctgcgggccgatattcgcaaggaactcgaaaagtacgcccgcgacatgaggatgaagggtttgtgctcccactag

SEQ ID NO: 15119 - DNA, 936 bp, synthetic construct
  source 1..936: mol_type = other DNA; note = Synthetic coding sequence
atgactggcagcgcagccgacacccatcgctgtccacatccaaaaggcgcaaagggcactaggtctaggtcttcacacgcccgccctgtgtccttagctacctcagggggcagcgaagaggaggataaggatggcggcgtgctgtttcatgtcaataagagtggcttcccaattgatagtcatacctgggaacgaatgtggatgcacgtagccaaggtccatcctaaaggtggagagatggtcggtgccattagaaacgctgcatttctcgcaaagccctctatcccgcaggtgccaaactaccgactgtcaatgaccattcctgactggctgcaggcgatacagaactatatgaaaacactgcactatctgacaaacgggcagccctccatagaacggttcccaatcagcttcaagacctatttctcgggcaattatttccaccacgtcgtgcttggcatctactgcaacgggcggtatggctccctgggtatgtctcgaagagccgagctgatggataaaccactgacattccgcaccctgtctgacctaatctttgattttgaggatagttataagaagtacttacataccgtcaagaaagttaaaattggcctctatgtgcctcacgaaccccactcattccagcccatcgagtggaaacagctcgtcctgaatgtgagcaagatgctgcgtgctgacattaggaaggagttagagaaatacgcacgggacatgagaatgaagatcttgaagcccgcatccgcccattctcctacacaggtgcgttcgcggggaaagtctctgagcccccgtcggaggcaggccagcccgcctcggcggcttggtaggcgggagaagtcacctgccctacccgagaagaaggtggctgacctatcgacattaaacgaggtcggttatcaaattaggatctag

SEQ ID NO: 15120 - DNA, 873 bp, synthetic construct
  source 1..873: mol_type = other DNA; note = Synthetic coding sequence
atgtggatgcacgttgctaaggtccacccaaaagggggtgagatggtgggggccattcgaaatgccgcattccttgcaaaaccgtcaatcccccaagtgcccaactatcgtttaagcatgaccatccctgattggctgcaagccatccagaactacatgaaaacgctccagtacaaccacaccgggacacagttttttgagattagaaaaatgagacccttaagtggacttatggagaccgccaaggaaatgacccgagagagcctgcctattaagtgcttggaggccgttatcttggggatctatctgaccaacgggcaaccctcaatcgaaagatttcccatcagttttaagacatatttctccggaaactacttccaccacgtggtgctaggaatttactgcaatggaaggtatggaagccttggtatgtctcgacgggctgagctgatggataagccactaacattcaggaccctgagtgatcttatattcgacttcgaggacagttacaaaaaatacctccataccgtcaagaaggttaaaatcggcctctatgttccgcacgagccacactcttttcaacccatcgaatggaagcagcttgtgcttaacgtgagcaagatgcttcgagcagacatccggaaagaactggagaaatacgccagggatatgagaatgaaaatcctgaaacccgcctctgctcacagcccgacacaggttcgtagccgtgggaaaagtctatcacctcggcgtcggcaagcctccccacccagacgtctgggcagaagggaaaaaagcccagcgctgcctgaaaagaaagtggcagatctgagcaccctgaacgaggttggctatcaaatacggatttag

SEQ ID NO: 15121 - DNA, 756 bp, synthetic construct
  source 1..756: mol_type = other DNA; note = Synthetic coding sequence
atgacgattcctgattggctccaggcaatccagaattacatgaagacactccagtacaaccacaccggaacccaatttttcgaaattcgcaagatgaggcctttaagtgggctgatggagacagccaaagagatgacaagagagagcctcccaatcaaatgtctcgaagcagtcattctaggtatctatctgacgaacggccagccatccattgagcggtttccaatctcttttaagacctatttctcgggcaactactttcaccatgtggtgcttgggatatattgtaacgggagatacggatctctcggaatgagtaggcgagcggagctgatggacaaaccactcacctttaggaccctctccgatctgatctttgatttcgaagacagttacaaaaagtaccttcacaccgtgaagaaagttaaaatcggattatacgtccctcacgagccgcactcttttcagcccatcgaatggaagcaactggtgcttaatgtttcaaagatgctgagggcagacatcaggaaggagctcgaaaaatatgcgagggatatgcgaatgaaaatcctgaaaccagcctccgcccactcccccacccaggtgcggtccagaggaaaatctctatctccccgccgtcgacaagcatcgccaccaaggaggcttggacgcagagaaaaaagccccgcgcttccagagaagaaggttgccgacctgagtacgttaaacgaggttggataccagattcggatctag

SEQ ID NO: 15122 - DNA, 873 bp, synthetic construct
  source 1..873: mol_type = other DNA; note = Synthetic coding sequence
atgtggatgcatgtcgcaaaagttcatccaaagggaggcgagatggtgggggcaatcaggaatgctgctttcttagccaaacctagcatcccacaggtcccgaattacaggttaagcatgaccattcccgattggctgcaggcaatccaaaattacatgaagactctacagtataaccatactggaacgcagttcttcgagataaggaagatgcggccactgtccgggctgatggagaccgcaaaggagatgacgcgcgagtctttgcccatcaagtgcctggaggcagtgattctgggcatttacctcaccaatggacaaccaagcattgagcgctttcccatctcattcaaaacgtacttctcgggcaattactttcaccatgtggtccttgggatatactgcaacgggaggtatggcagcctggggatgagccggagggcagaattgatggacaagcctctgacattcagaaccctttctgatcttatttttgactttgaggactcttacaaaaaatatttgcacactgtcaagaaggtcaagattggactgtatgtcccccacgagcctcattcctttcaacccatagagtggaaacagctcgtgctgaatgtctcaaagatgctgcgggccgacatcagaaaggagctggagaagtacgccagggatatgcggatgaaaatactgaagcccgcttcagcccactcccctactcaggtacgatctaggggcaagtcgttgtcccctcggagacgtcaggcttccccccctcgaagactgggacgccgggaaaaatctcccgcactgcctgaaaaaaaggttgccgacctgtctactctgaatgaggtcggataccagatacggatctag

SEQ ID NO: 15123 - DNA, 723 bp, synthetic construct
  source 1..723: mol_type = other DNA; note = Synthetic coding sequence
atggccggatctccagagttggtggtgctcgacccaccttgggataaggaactcgcagcagggaccgaatcccaagccctggtaagcgcaactcccagggaggatttcagagtcaggtgcacttccaagcgcgccgtgaccgagatgttgcagctgtgtggccgcttcgtccagaagctgggtgacgcactccctgaagaaattcgggaaccagccttgcgggacgcgcagtggaccttcgagtcagccgtacaagagaatataagtattaacgggcaggcttggcaggaggctagcgacaactgctttatggactctgatataaaggtgctggaagaccagttcgatgagattatcgtggacattgctactaagagaaagcagtatccgcgcaagatccttgaatgtgttattaagaccataaaggcaaaacaagagatcctgagcctccctgccctgatagagcagggcgaggggttctcacaagtactgcgtatgcagcctgtgatacacttacagaggatacaccaggaggtgtttagttcttgccatagaaagcccgacgccaagccagaaaacttcatcactcagattgaaaccacacccacagagaccgcatccaggaaaacgagtgatatggtgctcaagagaaagcagacaaaggactgcccccagaggaagtggtacccattgcggcccaagaagattaatctggatacttag

SEQ ID NO: 15124 - DNA, 519 bp, synthetic construct
  source 1..519: mol_type = other DNA; note = Synthetic coding sequence
atggctggctcacccgagctcgtggtcctggaccctccatgggacaaggagttggcagccgggacagagtctcaggctctcgtcagtgcaacaccacgtgaagactttagagtgaggtgcacatcgaaacgggcagtgacggagatgctgcaactttgcggcaggtttgtccagaagttgggcgatgccctgcctgaagagatccgggagcccgcactccgggatgctcaatggaccttcgagtcagcagtgcaagagaatatctccataaacgggcaggcctggcaagaggcctcggacaattgcttcatggattccgacattaaggtgctcgaggaccaattcgacgagatcattgtggatatcgccaccaagcgtaagcagtaccctcgcaagattttggagtgtgtgattaagactatcaaagctaagcaggagattctgaaacagtaccaccccgttgtgcatcctctggacctcaaatatgaccccgatcccgtgctcgcctgtatcaattag

SEQ ID NO: 15125 - DNA, 846 bp, synthetic construct
  source 1..846: mol_type = other DNA; note = Synthetic coding sequence
atggctgggtcccccgagctggtggtattggaccccccatgggacaaagagctggctgccgggacggagagccaagctctggtgtctgcaacaccacgggaggacttcagggtgagatgcactagtaagcgggccgtaactgaaatgctgcagctgtgtggcaggttcgtccaaaaacttggagacgccctgccagaggaaattagggaaccagccctgagagacgcccagtggacctttgaatctgcagtacaggagaacatatcgataaatgggcaggcatggcaagaggcctccgacaattgcttcatggatagcgacatcaaggtgcttgaagatcagttcgacgaaatcatcgtggacatcgcaactaaaaggaagcagtacccccgcaaaatccttgagtgcgtaattaagaccatcaaagccaaacaggaaatcctgaagcagtatcaccctgttgtacaccctttagatctcaagtacgacccagacccagctccacacatggaaaatctcaaatgtcggggcgagactgtagccaaagaaatcagtgaggccatgaagagtctgcctgctcttatcgagcaaggagaaggattttctcaggtattaaggatgcaaccagtgattcacttgcagcgcattcaccaggaagtcttcagttcttgccatcgtaagccagatgcaaagccagaaaatttcattactcagatagagacaacccctacagagacagcgtcccgaaagacttctgacatggtcttgaaacggaagcagacaaaggattgccctcagcgcaaatggtatccccttaggccaaagaaaatcaaccttgatacctag

SEQ ID NO: 15126 - DNA, 228 bp, synthetic construct
  source 1..228: mol_type = other DNA; note = Synthetic coding sequence
atggattctgatattaaagtattggaagatcagtttgacgaaattattgtagacatcgccacaaagcggaaacagtacccccgaaaaatcttggagtgtgttatcaaaaccattaaggctaaacaggagatcctgaagcagtaccaccccgtagtacacccattggatctgaagtatgacccagacccaggcgccaagcccggcggcctggctctgggggcagtctag

SEQ ID NO: 15127 - DNA, 279 bp, synthetic construct
  source 1..279: mol_type = other DNA; note = Synthetic coding sequence
atggaggactatcaagccgcagaggagaccgccttcgtggtcgatgaggtgtccaatatcgtcaaagaggcaatcgagtcagcgataggcggcaacgcctaccagcactctaaggtgaatcaatggacaaccaacgtggtagagcaaacactctcccagctgactaagcttggtaagccattcaagtatatcggcaacggggtgctattcctgttgtacctccgggacgggtttctgaccttgattcgaggcgcatcatccacgaggaataattcctag

SEQ ID NO: 15128 - DNA, 204 bp, synthetic construct
  source 1..204: mol_type = other DNA; note = Synthetic coding sequence
atgcaaaaaaacggggcaggcctgcacacagcttccagctgtttttgggattcaagcacggacgggatgatctttatccacgtgtgcgaggtactgctgtgcgagatctatgattggaaattccctatttttgagtgcaatgcctgcctgagtccctttaaaacttttaacaacaggctggctaaggtgctttgtgtggcttag

SEQ ID NO: 15129 - DNA, 342 bp, synthetic construct
  source 1..342: mol_type = other DNA; note = Synthetic coding sequence
atggaagattaccaagccgcggaggagacagccttcgtggtggacgaagtctccaatatagtaaaggaagctattgagagcgccattggaggcaacgcctatcagcacagcaaggtaaatcaatggactacgaacgtggtggaacagactctgtcccagttgaccaagctcgggaaaccatttaagtatatcgtaacctgcgtcataatgcagaagaacggtgcagggctccacaccgcctcctcttgcttctgggacagctctacggacggttcttgcactgttcgatgggagaacaaaaccatgtattgcattgtcagcgccttcgggctgtcaatctag

SEQ ID NO: 15130 - DNA, 2037 bp, synthetic construct
  source 1..2037: mol_type = other DNA; note = Synthetic coding sequence
atgtatgccgcagtggaacacggcccggtcctgtgctccgatagcaacatcctgtgtttgtcctggaaaggacgggtccctaaatccgagaaggagaaacctgtgtgtcgtcggcgctactatgaggagggttggctggcaacaggcaatgggcggggggtggtgggtgttactttcacttcgagtcactgccgcagggatagatcaaccccgcagcgcattaattttaacttgagggggcataatagtgaggttgtgctggtcagatggaatgaaccatatcagaagctcgcaacatgcgacgccgacggtggcatctttgtgtggattcagtatgaagggcgctggtctgtggagctagtgaacgacagaggcgcacaggtctcggactttacctggtctcatgacggaacccaagcacttatcagttatcgcgacggttttgtgttggtaggtagcgtgagcgggcagaggcactggagttcagaaatcaatctcgagagccagataacctgcggcatatggacgcccgacgaccagcaggttctctttggcaccgctgacggacaagtcattgtgatggattgccacgggcgtatgcttgcccatgtgctcctgcatgagtctgacggtgtgctcggaatgagttggaactacccaatattcctggtggaagactccagcgagagcgatactgatagcgacgactatgctcctccacaggatgggcccgccgcatatcctattcctgtgcaaaatattaagcctctgctgaccgtctcattcaccagtggagatattagcctgatgaacaactatgatgacctgtctcctacggtaatccggagtggcttgaaagaagtggtggcccagtggtgtacccaaggcgacctcctggccgtggccggaatggaacggcagacgcagctcggagaattgcccaatggtccactgctcaaatctgctatggtaaaattttataacgtgaggggagagcacatattcactctggatacgttggtgcagcgacctattatttccatatgctgggggcatcgagactctcggctactcatggcttccgggccggccctctatgtcgtcagggtcgaacatagagtatcttccctccagctgctttgtcagcaggcaatcgctagtacgctcagggaagataaagacgtctccaagctgacgctgccaccacgcctgtgttcctatctgtctactgcattcatccctactatcaaaccaccaattccagaccccaataacatgcgtgatttcgtgtcatacccaagcgccgggaacgaacggctccactgtacaatgaaacggactgaggatgaccctgaggtgggtggaccttgctatactctttatttggaatatttaggaggcctggtccctatactcaaaggacgcaggataagtaaattacgaccagaatttgtcattatggatcctcgtacggactctaagcctgatgaaatttacggcaacagcctaatcagcaccgttatcgactcctgtaactgctctgattcctctgatatcgagctgtccgatgactgggccgccaaaaaaagtccaaaaatctctagagcgtcgaagtcccctaaactcccccgaatctccatagaagccagaaagagtccgaaactcccccgcgcagcccaggaactgagccgttcacccagactgcctctgcggaaacccagcgtcgggtcacccagtctcactcgccgggagtttccctttgaggacatcactcagcataattatctggcccaggtaacatccaatatatggggaaccaagtttaaaatcgtggggcttgcagcgtttttacctaccaacctcggggctgtgatctataaaacctctttactccacttgcagccccgccagatgacgatttacctccctgaagtaagaaagatctccatggactacattaacttacctgtgtttaatcccaatgtgtttagcgaagacgaagatgacctgccaggagacgccgtttggacagattag

SEQ ID NO: 15131 - DNA, 4632 bp, synthetic construct
  source 1..4632: mol_type = other DNA; note = Synthetic coding sequence
atgtatgctgccgtagaacacggacctgtgctctgctcggattcgaacattctctgtctaagctggaagggccgagtgcccaaaagtgagaaggagaagcctgtttgtcgacgtaggtattatgaggaaggctggctcgcaactggcaacggccgcggcgtggtgggggtgacattcactagcagccactgccgcagagaccgctccaccccccagcggatcaatttcaacttgcgcggccacaatagcgaagtggttctggtacgttggaacgaaccttaccagaaattagccacttgcgacgctgatggggggatcttcgtgtggatacagtatgagggaaggtggtccgtggagctagtcaatgaccggggggcccaggtcagtgacttcacatggtcccatgatggtacacaggccttaatctcgtacagagatggatttgtactggtaggctcagtcagcggacagcgccactggtcctccgagattaacctggagtcgcagattacttgtggaatctggacacccgatgaccaacaggtcttattcggcactgctgatggccaggtgatcgtcatggattgccatggacggatgctcgcacacgtgctactgcatgaatccgacggcgtgctgggaatgtcctggaactacccaatttttctagttgaggattcatcagaatctgacacagattccgacgactacgcccctccacaggatggcccagcagcctaccccataccagtccagaacattaagccacttctcactgtgagcttcactagcggcgacatctctctaatgaacaactatgatgatctcagcccaactgtgattaggtctggtctgaaggaggtcgtcgcacaatggtgcacccagggagatctgttggccgtcgcagggatggagcgccagacccaattgggggagctccctaacggtccattactcaagagcgccatggtgaaattctacaacgtgcggggagaacacatcttcaccttagataccttggtgcaaagaccaatcatctcaatttgctggggtcatagagacagtaggctcctgatggcttccggaccagccctctacgttgtaagggtcgaacacagagtttcaagtctgcaattgctgtgccagcaggcaattgcttctacactgcgagaggacaaagacgtgtccaaactgaccctgccgccacgcctgtgttcatatctctccacagcttttatcccaaccattaagccgcctatcccggacccaaataacatgagggatttcgtaagctaccctagcgccgggaacgagagactgcactgtacgatgaaacgcaccgaagatgaccctgaggtggggggtccttgctatacactgtaccttgagtacctaggtggactggtgcccatcctgaagggccggaggatatctaaactccggcctgagttcgttattatggaccccagaacggatagcaagcccgacgaaatctacgggaatagtctaatatcgacagtgattgacagttgtaattgcagcgatagttcggatatcgagctttcggatgattgggccgctaaaaagtcacctaaaatcagcagggccagtaagtcacccaaattaccccgcatctcgattgaggccaggaaaagccctaagctcccccgcgcagctcaggagctctcacggagccccaggttacccctcagaaaaccatccgtggggtctcccagtctcacaagacgggagtttccattcgaagatataacgcaacacaattatctcgcgcaggtgacgagtaatatctgggggacaaagtttaaaattgtgggcctggcggcctttttgcctaccaatctgggagccgtgatctacaagacctccctgcttcaccttcagccaagacagatgacgatttaccttccagaagtacggaagatatcaatggactatatcaacctgcctgtttttaaccccaacgtattttctgaggacgaggatgacctgccagtgaccggcgcatccggggtgccagagaattctccgccgtgtacagtgaatatccctattgctcccatccactccagtgcacaggccatgtcccccacccagagtattgggctggttcaatcacttctagctaatcagaacgtgcagttggatgttctgactaaccagacgacagccgtcggtaccgctgaacacgcaggcgattccgccacccagtacccagtctcaaaccgctatagcaatcccggccaggtgatttttgggagcgtcgagatggggcggattattcagaatccaccccccctttccctgccacctcccccccagggacccatgcagctgtccacagttggccacggcgacagagatcatgagcatttacagaaatccgcgaaagctctgcgccctacgcctcaactggctgccgagggcgatgcggtcgtgttctccgccccgcaggaagtgcaggtaacaaaaatcaacccacctccaccgtacccaggcactatcccagccgccccaacaactgcggcccctcctccacccctgcccccaccccagccccccgtggacgtatgtctgaagaaaggcgatttttccctgtatccaacctcagtccattatcagacccctctcggctatgagcgcattaccaccttcgacagctcgggcaatgtagaggaggtgtgcaggcctcgcaccaggatgctgtgttctcaaaacacatatacccttcctgggcctggctcatctgcaaccctgagattaaccgcaacggagaaaaaagtgccacagccctgcagtagcgctaccctgaacaggctgaccgtcccaaggtactccattccaaccggagacccccccccttacccagagatagccagccagcttgctcaaggccggggcgcggcccagcggtccgataacagcctgatccacgcaacactcaggcggaacaaccgcgaggccacactgaagatggcacagctcgccgactcccctcgggcaccgctgcagcccctagccaagtcaaagggtgggcccggcggggtcgtgacacaactgcctgcacgacctccccctgcactgtatacgtgtagccaatgttctgggacggggccttcaagtcagcccggagcatcactggcccacaccgcttctgcctccccgcttgcaagccagtcatcatatagcctgctgtcaccccctgactctgcaagggatagaaccgactacgtaaatagcgcatttacagaggacgaagctctgagtcagcattgtcagctggagaagccactgcgccatccccccctacctgaggcggcggtgacgctaaagaggcctccaccttaccagtgggaccccatgttaggggaggatgtgtgggtgccccaggagaggactgcacagacgtctggacctaaccccctgaagttaagtagtctgatgctttcccagggccagcacctggatgtaagcagattacctttcatctcacctaaaagcccagcaagccctactgccacgtttcagacgggctatggcatgggcgtcccataccccggctcctacaataatccacccctgcccggagtgcaggccccctgctcgccgaaggatgcactgtccccaacccagtttgcgcaacaggagccagcagtggtcttacagcctctatatcccccctcactcagctactgtactttaccacctatgtatcctggctcatctacttgctcttccttacagcttccacccgtggcactgcatccatggtccagctatagcgcctgtccccctatgcagaacccccagggcactctgcctcctaagcctcaccttgtggtggagaaacctctggttagtccaccacccgccgacttgcagtcccaccttggcactgaagttatggtggagacagccgacaattttcaggaagtgctctcacttaccgagagccctgtgcctcagaggaccgaaaaatttggtaaaaaaaacagaaaacgcctcgactccagagctgaggaggggagtgtgcaggcaatcacggagggcaaggtgaaaaaggaggcgcgaaccttgtctgacttcaactctctgatatcttcaccccacctcggtagagaaaagaaaaaggtgaaaagtcaaaaggatcagctgaagagcaagaaattaaacaagaccaacgaattccaagacagttcagagagcgaacccgaactgtttatttccggggatgaactgatgaatcagtcacaaggctctcggaaagggtggaaatccaagcggagtcctagagcagccggcgaactcgaagaggcaaaatgccggagagcatctgagaaggaggacgggcggttgggatcacaaggttttgtttatgttatggccaataagcagcccttgtggaacgaagcgacccaggtgtaccagcttgacttcggcggtcgtgtgacccaggagtcggctaagaactttcaaattgaactggagggccggcaggtaatgcagttcggacgaatcgatggcagcgcctatatcctggacttccagtatccctttagcgcagtccaggcatttgctgtcgcactggccaatgttacacagaggctcaaatag

SEQ ID NO: 15132 - DNA, 3234 bp, synthetic construct
  source 1..3234: mol_type = other DNA; note = Synthetic coding sequence
atggactcaaaaatgaaaaaaatggcggaactgcagctgtccgttgttagtgatccgaagaaccggaaggcgattgagaaccagatacagcagtgggagcaaaacctagaaaaatttcacatggacttattcagaatgcgctgctacttggcttcacttcaaggcggtgagctgccaaaccctaagtctttgctcgctgccgcttccagaccgtctaagctggccctgggcagacttgggatcctgagtgtctcaagcttccacgccttggtgtgctcccgcgacgactccgcgcttcggaaaaggaccttgagcctcactcagaggggcaggaacaaaaaagggattttcagctctctgaaaggcctggacacactggcacgtaagggcaaggaaaaacggcccagcatcactcaaatctttgatagcagcggctcccacggattcagcggaactcagttaccgcagaattcctccaattctagtgaagtggatgagttacttcatatctatggatcaacagttgacggcgtgccccgcgacaatgcgtgggagatacagacttatgtgcactttcaggataatcatggggtgacagtcggtatcaagcctgaacatcgtgtggaggacatattgaccctggcctgtaaaatgagacaactcgagccgagccactatgggttgcagttgagaaaactcgtggatgataatgtggagtattgtataccagccccatatgagtacatgcaacaacaagtctacgatgaaattgaagttttcccattgaacgtgtacgacgttcagctgaccaagaccggcagcgtctgcgactttggattcgccgtgacagcccaggtcgatgagcgacagcatctctcccggattttcatttcagatgtgctgcctgacgggctcgcttatggcgaaggtctcagaaaaggcaatgagataatgaccctgaacggagaggctgtgtcagatcttgacttgaagcagatggaggctctattttcggagaagtctgtgggcctaacactgattgctaggccgcccgacactaaagccacgctctgcacaagttggtccgactccgaccttttcagtcgcgaccagaagtctttgctccctccacctaatcaaagccagcttctggaggaatttctcgacaacttcaagaagaatacagccaatgatttttccaatgtgcctgatatcacgacagggttaaagagaagccagacagacgggaccctggaccaagtgagtcaccgggagaagatggaacaaacttttagatccgctgagcaaattacggcattgtgccggtcttttaacgattcgcaagcgaatggtatggagggcccgagagagaaccaagacccacctcctaggtccctggccagacacctttctgatgccgaccgcctgagaaaagttatccaggagctggtggatacagagaaaagctatgtgaaggacctgagctgtctcttcgagttgtacctggagcccctgcagaatgagacattcttgacacaagacgagatggaaagtcttttcggctcccttcctgagatgctcgaatttcagaaggtgtttctagaaacacttgaggacggaatctctgcaagctctgactttaacacattggagacaccatcacagttccgtaaactgctttttagtctcggcggtagctttctgtattacgctgaccatttcaagctttattccgggttctgcgctaaccacattaaggtgcaaaaagtactggagagggcaaagaccgacaaggcctttaaggcgttcctggacgcccgcaaccccacgaaacaacactctagcaccctggaatcatatttaattaaaccggtgcagcgtgttttgaaataccccttgctgttaaaggagctggtgagtctgacagaccaggagtctgaggaacactaccatcttacagaggccttgaaagcaatggagaaggtggcaagtcatataaacgaaatgcaaaaaatctacgaggattatgggacagttttcgaccagctggtggccgagcagtccggtaccgaaaaagaggtgaccgagctgtcaatgggtgagctactgatgcactcaaccgtgtcatggctgaaccccttcctttccctcgggaaggcgcgaaaggacctagagctgactgtcttcgtctttaagagagccgtaattctcgtatacaaggagaattgcaagctcaagaaaaagctgccctccaattcccgaccagctcataatagcaccgatctcgacccatttaagtttcgctggttaattcctatctctgcattgcaagtccgtcttggcaatcctgccggtactgagaataatagcatttgggagcttatccacacaaagtccgagattgaaggccgccctgagactatttttcaactgtgctgcagcgatagtgagagcaagaccaacatcgtgaaagtgatccggtctatcctgagagagaattttcgtcggcacattaagtgcgaactcccactggagaaaacctgcaaggataggctggtacctctgaaaaaccgcgtgccagtgtccgccaagctagctagttctaggtcactgaaagtcctcaaaaacagcagctccaatgagtggaccggggagaccggcaagggcaccttacttgattccgacgaaggtagcctcagcagtggcacccagagctccggatgcccaactgctgaaggcaggcaagactctaagtccacatctccaggtaagtaccctcatccaggccttgccgacttcgccgataacctaattaaggaatctgacatcttgtctgacgaagatgatgatcacaggcagaccgtcaaacagggctcccctaccaaagacattgagatccaatttcagagactgcgaatatccgaggatcccgatgtgcaccccgaagccgagcagcagccaggccctgagagtggcgaagggcagaagggtggcgaacagcctaagctggtgcgaggccacttttgccccatcaagcgcaaggctaacagtaccaagcgggaccgagggacactcctcaaagcccaaatccgccaccagagcctggacagccagtctgaaaacgcaacaattgacctgaactctgtgttggagagagaatttagtgttcagtctctgacctctgtagtttctgaggaatgcttttacgagaccgagtctcatggcaagagctag

SEQ ID NO: 15133 - DNA, 579 bp, synthetic construct
  source 1..579: mol_type = other DNA; note = Synthetic coding sequence
atgagtcagtgcgcctgccttgaggaggtgcacctgccaaatatcaaaccgggcgagggacttggcatgtacattaagtccacgtacgatggactgcacgtgattactggcacaaccgagaacgtgggatggcagctgaagaatctcgtgaagaagttgcgcgagaaccccaccggcgtggtgctcctgctcaagaaaaggcctaccggttctttcaactttactcccgcacctctcaagaacttgagatggaagccacctcttgtacagactagccccccccccgctaccactcagtcaccagagagtacaatggacacaagtttgaaaaaggagaagagtgcgattcttgacctgtacatcccccccccaccagcagtaccttactctcctagagatgaaaacggttcctttgtctacggggggagctctaagtgcaaacagcctctacctgggcctaaggggagcgagagccccaacagttttcttgatcaggagtcgcgcagacgcagatttactatagctgactccgaccaattgccagggtactcagtcgagactaacatcctcccaacatag

SEQ ID NO: 15134 - DNA, 1668 bp, synthetic construct
  source 1..1668: mol_type = other DNA; note = Synthetic coding sequence
atggagccagtgacaaagtggagccccaaacaagtagtagactggaccagggggctcgatgattgccttcagcagtacgtccacaagttcgaacgagaaaagatcaacggtgaacaactgctgcaaatcagccaccaggaccttgaggagctgggggtgacacgaatcgggcaccaggagttagtgctcgaagccgttgatcttttatgcgccctcaactacggattggaaacagacaacatgaaaaacttggtgcttaaactcagagctagttcgcataatctccaaaattatattagctcgagacgcaaatcaccagcttacgatggaaatacatcccggaaggcgccgaacgaattcctcacttctgttgttgagctgatcggcgcagcaaaggccctgctggcatggcttgacagggcaccttttacgggaataaccgactttagcgtgactaaaaataaaataatccaactgtgtcttgacttaaccacgaccgtgcaaaaagactgcttcgtcgcggagatggaggataaggtccttacagtagttaaagtgctgaacggaatttgcgacaagaccattcgctctaccacagatccagttatgagtcagtgcgcgtgccttgaagaagtccacttgccaaacatcaagccgggcgaaggcttgggaatgtatatcaaatctacatacgacggcctacacgttattactggcacaaccgaaaacagcccggccgaccgctcacaaaagatccatgcaggagatgaggtcatccaagtaaatcagcagaccgtggtgggctggcagcttaagaatctggtaaagaagttgcgggagaatccgacgggcgttgtgctcctcctcaagaagcgccctacaggctcgttcaactttaccccggcaccactcaagaacctgcgatggaaacccccgttggtccagacgagtccccccccagctacaactcagagccccgagtctacaatggatactagtttgaagaaggagaagtcagcaatcctggacttatatatacctcccccaccagctgtgccgtactctccacgcgacgaaaatggctccttcgtgtacgggggatcatctaagtgcaagcagcccctcccaggacctaaagggtcagagtccccaaattcctttctggatcaggagtcaaggagacgccgatttactattgccgactcggaccagcttccaggctattccgtggagaccaatatcttgccaactaaaatgagggagaagacgccatcctacggcaaacccaggcctcttagcatgcccgccgacggaaattggatgggaatcgtggatccattcgccaggccaagagggcacggcagaaagggggaggacgcgctctgtaggtacttctctaatgagagaattcctcccatcatagaagagtcttcctcaccgccctacaggtttagccgaccgacaactgaacgacacctagttcggggcgcggactacatccgcgggagtagatgttacatcaactctgatcttcattccagcgctacaattccatttcaggaggaaggtacgaagaaaaaatccggtagctcagccactaaaagctcctccactgaaccctccttgctggtgagctggttcactaggttaaagctcctgacccactag

SEQ ID NO: 15135 - DNA, 708 bp, synthetic construct
  source 1..708: mol_type = other DNA; note = Synthetic coding sequence
atgagaagccgagttttatggggagccgcccgatggctctggcccagacgggcagtgggcccagcgcggcggcctttatcgagcggcagcccacccttggaggagctgtttactcgtggaggcccactccggaccttcttggaaagacaggccggtagtgaagcccacctgaaggtgcgacgtcctgagcttcttgctgtcattaaactgctgaacgaaaaagaaagggagctcagggaaacagaacacctgctgcacgacgaaaacgaagacctcagaaagctagccgagaacgaaattacattgtgccagaaggaaatcacccagctgaaacatcagatcatccttctgctggtgccttctgaagagactgatgaaaacgacctgattctcgaagtcaccgccggtgttgggggaggcctacggcacgccagcgcatcgatcggaggaagcgaggcttaccggcatatgaagttcgagggtggagtccacagggtgcagcgggtgcccaaaacagaaaaacagggaagggtccacacatctaccatgacagtggcaatcctgcctcagcccacggaaattaatcttgtcatcaaccctaaagatctgaggattgatacaaagagggctagcggagccggcggacagcatgtgaacacgactgattctgctgttcgtattgtgcatctccccaccgactggaagtag

SEQ ID NO: 15136 - DNA, 816 bp, synthetic construct
  source 1..816: mol_type = other DNA; note = Synthetic coding sequence
atgaggtccagagtcctgtggggcgccgccagatggctgtggccacggagggccgtgggtccagcacgcagaccactatcaagcgggtctccacctctggaggaacttttcactaggggcggaccactccgcacgtttctcgagcggcaggctggatcagaggctcatttgaaagttagaaggcccgagcttcttgctgttatcaagctgttaaatgagaaagagcgtgaactccgggaaactgagcaccttttacacgacgaaaatgaggacttgcggaagctggctgagaatgaaataacactgtgccagaaagagattacacagctgaaacaccagattatcctgctactcgtgccatcagaggagacagatgagaacgatctgatcttggaagtgaccgccggagtgggaggccaggaggccatgttgtttacttccgaaatttttgacatgtatcagcagtacgcagccttcaaacgctggcactttgagaccttggaatattttccaagcgaactggggggacttagacacgcaagtgcatcaatagggggatccgaggcctacaggcatatgaaattcgaaggcggtgtccaccgcgtgcagagggtgcccaaaactgagaagcaagggcgggtccacacttcgactatgacagtggccattctgccacagcccacagaaatcaacttggtgatcaatcccaaggacctcaggattgacacaaagagagcctcaggcgcaggaggccagcacgtaaacacaaccgactctgccgttcgcattgtgcacttgcctacggattggaaatag

SEQ ID NO: 15137 - DNA, 1143 bp, synthetic construct
  source 1..1143: mol_type = other DNA; note = Synthetic coding sequence
atgcggagccgggttctctggggggccgcccgatggctttggcctaggagggcggttgggcccgccaggcgccccctttccagcggctcacctccacttgaggagctgtttacaaggggtggaccactgcgcacctttctcgagcgacaggctggatccgaagcccacctgaaggtgagacggccggaacttctggccgtgatcaaattgttgaatgagaaagaacgggaactacgggagaccgagcacttattgcacgacgaaaacgaggatctgagaaagctggccgaaaacgagataacactctgtcaaaaggaaataactcagctaaagcaccagatcatcctcctgctcgtcccatctgaggagacagacgagaacgaccttattctggaagtcacagcaggcgtcggaggacaggaggctatgctgttcacttcagaaatcttcgacatgtaccagcagtacgcggcctttaaaagatggcactttgaaaccttggagtacttcccgagtgagttgggggggctgcgccacgctagtgcctctattggaggcagtgaggcttaccggcacatgaaatttgaaggtggtgttcaccgggttcagagagttcctaaaaccgagaaacaaggccgcgtgcacacctccactatgactgtcgcaatcctgccccaaccaactgagatcaatctggttatcaaccctaaagacttaagaattgataccaaacgagcctcaggggcaggaggccaacacgttaacactacggattctgccgtgcgaatagtgcacctgcctacaggcgtggtgagtgagtgccagcaggagaggtcccagctgaagaacaaagaactggccatgacaaaactgcgcgcaaagctatattctatgcacctcgaggaagagattaataagcgtcagaatgctaggaaaattcagattggctcaaaaggaaggtcagaaaagattcgcacttataacttcccccagaacagggtcacagaccatcgtattaacaaaactctccatgatttggaaacgtttatgcagggcgactatctccttgacgagttggtgcaatcattgaaagagtacgcagactacgagagcttggtggaaattatttcccagaaggtatag

SEQ ID NO: 15138 - DNA, 3561 bp, synthetic construct
  source 1..3561: mol_type = other DNA; note = Synthetic coding sequence
atgtgcgaggtgatgccgaccattaatgaaggtgatcgcttaggccccccacacggcgctgacgcagatgcaaacttcgaacaattgatggtaaatatgctggacgagcgcgagaaactactggagagcctaagggaatctcaggagacactggccgctactcaaagccgtttgcaggatgctattcacgaaagagatcagctgcagaggcatttgaatagtgccttgccccaggaatttgctaccctcacacgcgaattgagcatgtgtagagagcagctactggaaagagaagaggagatcagtgagctgaaagcagagaggaacaatactcggctgctcctagagcacctcgagtgcctggtgtcgcgtcacgagaggagtctccgtatgaccgtggttaaacgtcaggcacagtccccgtctggagtatccagtgaagtggaggtcctgaaagcattgaaaagtcttttcgagcaccacaaagccctcgacgaaaaagtaagggagaggctccgcgcagccctggagcgcgtaacaaccctggaagaacagctcgcgggcgctcatcagcaggtgagcgcacttcagcagggggcgggtgttcgggacggcgctgcagaagaggaaggtaccgtggagctaggcccaaagcgcctgtggaaggaggacactgggcgcgtggaagagctacaggaactgctcgaaaaacagaatttcgagctgtcccaggcccgtgagcgactggtcacattaaccaccacagtcaccgaacttgaggaggatttggggacagcacggcgcgacctaataaaatcagaagagctctcctctaaacaccagcgcgatctccgtgaagcgctggcccagaaggaggatatggaagagcggatcactacactagagaaacgatatcttgctgctcaaagagaagccacctcaatccatgacctcaacgataaactggagaacgagctagccaataaagagagtctgcaccggcagtgtgaggagaaagcacgacacctgcaggaacttctcgaagtggcagagcagaaacttcagcagactatgcgaaaggccgagacactccctgaggtggaggccgaactggcccaacggatcgcggctctaactaaagccgaggaaaggcatggcaatattgaggagcacctgcgacaactggagggacagctggaggagaagaaccaagaactcgcgcgcgtgcgtcagcgcgaaaagatgaacgaggatcataacaaaaggctgtccgacacagtggacagattgctttccgaatctaatgagcggctacaactgcatctaaaagagcggatggctgcactggaagaaaaggggcggttgagtgaagaaatcgagaagctgcggcaggaagtggatcagctcaagggccggggtggtccatttgtggatggagtccacagccggtcccacatgggcagcgcggccgatgtcaggttttcattgggaacgaccacccacgcaccccccggtgtccaccgcaggtattcagctttacgcgaggagtcggccaaagattgggaaacttctccgctgcctggcatgctggcgcctgcagcgggaccagccttcgacagcgacccggagatttctgacgtagatgaagatgagccgggcggactggtgggttcagccgacgtggtttcgccctctggacacagtgacgcccagactcttgcaatgatgctccaggaacagttggacgctattaatgaagaaatccgcatgatacaggaggagaaggaatctacagagctgcgcgctgaagaaattgaaaccagagttacttccggcagtatggaggcactgaacttgaagcagctgcggaaacgtggcagcatacccacatctctcaccgccctgagccttgcttctgcctcacctcccctgtctggtaggtcaactcccaagctaacatcacggagcgccgcacaagatctggatagaatgggcgtgatgacactaccaagtgatctgcggaagcacagacggaagctcttatcacccgtgtctagggaggaaaaccgtgaggataaggccactatcaagtgtgaaaccagccctcctagctccccaagaacactgaggctggaaaagcttggtcaccccgccctcagccaggaagagggcaaatctgccttggaggaccagggctctaatccatcatcgtctaacagcagccaggatagcctacacaagggagctaagaggaagggcatcaagtcatcaatcggccggttgttcggtaagaaagagaaggggcggctcatccagctcagtcgtgacggagctacaggccatgttctgttaaccgactcggaatttagcatgcaggagcccatggtgcccgctaaactgggcactcaggcagagaaggaccggcgtctcaagaaaaaacaccagttgctggaggacgcccgcaggaagggcatgccctttgcacaatgggacggccctaccgttgtgagctggctggagctgtgggtgggaatgccggcttggtatgttgctgcatgcagagccaacgtgaaatccggcgcgataatgtccgccttaagtgacacagagatccagagggagatcggtatctcaaacgccctgcacaggctcaagctgcgcctggcaattcaggagatggtctcccttacatcccccagtgctccccctacctcacggaccagttccggaaatgtatgggttacccacgaggagatggaaaccctggagacatcgaccaagaccgattccgaggaagggagctgggctcagactctcgcctacggtgatatgaaccatgaatggataggcaacgagtggctgccctctttgggcttgccacagtatcggtcctatttcatggagtgcctcgtggacgctagaatgctggaccacctcactaagaaggaccttcgggtccatctgaagatggtggactcatttcatcgcacctcactccaatacggaatcatgtgcctgaagagactcaactatgacagaaaagaactggaaaagaggcgggaagagagtcagcacgaaatcaaagacgtgttggtgtggacgaacgaccaagtggtgcactgggtccagtctattggactgagggactatgccggcaacctgcatgagagcggagttcacggtgccctgttggcattggacgaaaatttcgaccacaacacacttgccctcatcttgcaaatccccacacaaaacactcaagcaaggcaagtcatggagcgtgagtttaataatctactcgcactcggaaccgatcggaaactggatgatggggatgataaagtgttccgcagggccccaagctggcggaagcgattcagacccagagaacatcacggccggggcggtatgctgagtgcttccgcagaaaccctcccggcgggcttcagagtatccaccctgggaaccttacagccacctcctgccccccctaaaaaaataatgccagaggcacactcacactacctgtatgggcacatgctgagcgcttttcgtgattag

SEQ ID NO: 15139 - DNA, 1803 bp, synthetic construct
  source 1..1803: mol_type = other DNA; note = Synthetic coding sequence
atgtctcgcgtggcaaagtataggcgccaggtgtcggaggacccggacattgattccctcctggaaacgttatctcccgaggagatggaggagctggaaaaagagctggatgttgttgaccctgacggctccgtgccggtcgggctgaggcagagaaaccagactgagaagcagagcacaggcgtttataaccgcgaggcaatgctgaacttctgcgaaaaggagacaaaaaaactgatgcagcgtgagatgagtatggatgaaagcaaacaggttgaaaccaaaacagatgccaagaatggagaagagagaggccgggacgcatcaaagaaggccctgggaccccggcgggactccgaccttggaaaagagcctaaacggggtggtctgaaaaaatccttttcacgggatagggacgaggccggaggcaaatctggcgagaagcctaaggaagaaaaaatcatccgtgggatagacaaaggacgggtgagggcagcagtagataaaaaggaggctggcaaagatggacggggggaagaaagggcagtggccactaagaaagaagaagagaaaaagggttccgatcggaacactgggttgtccagggacaaggataagaaaagggaggagatgaaagaggtggccaagaaagaggacgacgagaaagttaaaggcgaaaggcgcaacacagacaccaggaaggagggcgagaagatgaagcgcgcaggcggaaataccgatatgaagaaggaagacgaaaaggtcaagagggggacaggaaatacggatacaaagaaggacgatgagaaggtgaagaaaaacgaaccactccacgagaaagaggccaaggatgatagtaagaccaaaacaccagagaaacagactcctagcggccccacaaagccatctgagggaccagcaaaggtcgaagaagaagccgcgccctcaattttcgacgaacccttagaaagggtcaagaacaatgatcccgaaatgaccgaggtaaacgtcaacaactcggattgcattacaaatgaaatattagttaggttcacagaagcgcttgaatttaatacagtggtcaagctgttcgccttggccaatacgagggctgatgaccacgttgctttcgccattgcaatcatgttgaaagcaaataaaaccataacaagccttaatctggacagcaatcatattactgggaagggaatccttgctattttcagagctctgttacaaaacaacacactcactgaattgcggtttcacaatcagaggcatatctgcggagggaaaaccgagatggagatagccaagctcctgaaggaaaatactactttattgaagcttggctaccactttgagctggctggtccacggatgaccgtcacaaacctgctttcaagaaacatggataagcagcgccagaagaggctgcaagaacagcgacaggcccaggaagcaaagggtgaaaagaaggacctgctagaagtgcctaaagcaggcgctgtggcaaaagggagccctaaaccaagccctcaaccgtccccaaagccttccccaaagaacagcccaaagaagggaggcgcacccgccgctcctcccccgccacccccacccctggcccctcccctgattatggagaatctcaagaattccctaagtccggctactcaacggaagatgggcgacaaggttctacctgcacaggagaaaaacagtcgtgaccagctgctggcggcaatccggagcagcaacttgaagcagctcaaaaaggttgaagttccaaagctcttacagtag

SEQ ID NO: 15140 - DNA, 828 bp, synthetic construct
  source 1..828: mol_type = other DNA; note = Synthetic coding sequence
atgggaacccggctgcccctggtcctccgacaacttaggagaccaccacaaccacctggacccccccgcaggctcagagtaccctgcagggcctcttccggcggcggcggaggcggcggaggcggccgggagggactgctcgggcaaaggcgaccacaagacggtcaggcccgcagcagctgcagccccggcggccgcacgcccgccgcgcgtgatagcattgtgcgtgaggtcatacagaattcgaaggaggtgctctccttgctgcaggagaagaaccctgctttcaagcccgtgctagcaataatccaggctggggatgataacctgatgcaagaaatcaatcagaatcttgccgaggaagccgggttgaatataacccacatttgtcttccccctgactcttcagaggcagaaattatcgatgagatcctgaaaattaacgaagacactagagtgcatggccttgcactacaaatcagcgaaaacttatttagtaacaaagtcctcaacgccctgaagcctgagaaggacgttgatggcgtgaccgacattaatctgggaaagcttgtgcggggcgatgcccatgagtgttttgtcagccctgtagcaaaggccgtcatcgaactgcttgagaagagcggcgtcaatctggatggaaagaagatcttggtagtaggcgcccacggctcactcgaggccgctctgcagtgcctgtttcaacgtaagggttcgatgactatgtccatccagtggaagactcgccagctccagagtaagactgaatcccgatccgtgacacggctggagtgtcgaagagtaatttag

SEQ ID NO: 15141 - DNA, 999 bp, synthetic construct
  source 1..999: mol_type = other DNA; note = Synthetic coding sequence
tgagggcgggagggtttactaggtcagcggcgaccacaggacgggcaggcacgctcatcatgctccccaggaggccgcacccccgctgctagggattcaattgttagagaggtgattcaaaacagcaaggaagtgctgtcacttcttcaagagaagaatccagcctttaagcctgtgctggccatcattcaggccggcgacgataacttaatgcaggagatcaatcaaaatttggccgaagaagccggactaaacattacacatatctgtttgcccccagatagctcagaagccgagataatagacgagatactgaaaatcaatgaggacacccgggtccatgggctggctctccagatatccgagaacctcttcagtaataaggttttaaatgccttgaaaccagaaaaggacgtcgatggtgtcaccgacatcaacttaggcaaactggtcaggggcgatgcccatgagtgcttcgtgtctccagtcgcaaaagctgtcatcgagcttcttgagaagtcggtgggagtgaatctggatggtaagaaaattctggttgtaggggctcacgggagtctggaagccgccctgcagtgcctatttcagcgcaaaggaagcatgacgatgtcgattcagtggaaaacgaggcagctgcagtctaagctgcacgaggcggacatagtggtgctgggcagtcccaagcctgaggagatccctctcacatggatccagccaggtacaacagtactcaactgtagccacgattttctttccgggaaagttggatgcggcagtccaagaatccattttggaggtcttattgaagaagacgacgtgatccttttagcagcagcgctgcgcattcagaacatggtatcatctggtaggcgctggctgagagaacagcagcatcgacggtggcgtcttcactgccttaagttgcagcccctaagccccgtgcctagtgatatcgagatctccagaggacaaacaccgtag

SEQ ID NO: 15142 - DNA, 2937 bp, synthetic construct
  source 1..2937: mol_type = other DNA; note = Synthetic coding sequence
atggggacaagattgcccctagttcttcggcaactgaggaggccaccacagccccctggacccccacggagactacgggtcccctgccgagcctctagcgggggaggcgggggaggcggggggggacgcgaaggattgctggggcaaaggcgaccacaggacggacaggcgagaagcagctgctccccgggaggaaggactccagcagccagggacagcatagtccgcgaggtgattcaaaattctaaagaggtcttgtccttactccaagaaaagaatcccgcctttaaacccgtgctcgctatcatccaggcgggagatgataatttaatgcaagaaattaaccagaatctggcagaagaggccggcctgaacattacccacatttgcctgcctcctgatagctctgaggccgagatcatcgatgagatactgaagatcaatgaggacacgagagtacacggtctggctctgcagatttccgagaacctcttttctaacaaggttctcaacgccctgaagccggaaaaagacgttgatggggtcacagatattaacttggggaaactggtgagaggggacgctcacgagtgctttgtgtctcctgttgctaaggctgtcatagaactcctggagaagtcgggagtgaatttggatggcaagaagatcctggtagtgggcgcccatgggagcctagaggcagccctgcaatgcctgttccaaaggaaagggagcatgactatgtccattcagtggaaaacaaggcagctccagtctaaactccatgaagccgacatcgtggtgctcggttccccaaaaccagaggagattcccctcacctggattcaaccaggcacaactgtccttaattgttcccacgattttctgtccgggaaagtgggctgcgggtcgcctcggatccacttcgggggactgattgaagaagacgatgtaatactcctggcggcggccctgcggattcaaaatatggtatctagcggacgtaggtggttgcgcgagcagcagcatcgtcgatggagattgcactgtctcaaactccagccgctgtctcccgtgcccagcgacatcgaaatctctcggggacagacaccgaaggccgtggatgtgcttgccaaggagattggcttactggcagacgaaatcgagatttacggaaagagcaaggccaaggtgcgcctctccgtgttagagaggctaaaggatcaggcggacggaaagtacgtcctcgtggcgggaattacccctacaccactcggtgaggggaagtccacagttacaatcggacttgtgcaggcccttactgctcacctgaacgtaaatagcttcgcctgtttacgtcagccttcccaggggccgaccttcggagtcaagggcggggccgccggaggtggatatgcacaggttattccaatggaagagttcaatctgcacttgacaggggacatacatgctattaccgcagcaaataacctcttggctgctgctatcgatacgcggatactccacgaaaacactcaaacagacaaagcgctctataatagactagttccacttgtgaacggagtgagagaattttccgaaatccaactggccagattaaagaaactgggaatcaataagactgacccttctaccctgacagaggaagaggtgagcaagttcgcacgcctggatatagatccttcaaccataacatggcagagagtgcttgacacgaacgatcgctttcttcggaaaatcacaataggccaaggcaacaccgaaaaggggcattacaggcaggcacaattcgacattgctgtagctagcgagattatggctgtgttagcactgactgattcactggccgatatgaaggcccgcttgggccgtatggtggtggcctcggacaagagtgggcagcccgtgactgccgacgatctgggcgtgactggcgccctgaccgttctgatgaaggatgcgatcaagccaaatctgatgcaaactttggaaggtacccccgtgttcgtgcacgccgggccgtttgccaacatcgctcatggcaattcatctgtgctggctgacaagatagctctcaaattggtgggggaagaaggctttgtggtgacggaggctggttttggcgccgacatcggcatggagaagttttttaatatcaaatgccgggcctccggcctcgtacccaacgtcgttgttctcgtggcaactgttcgggccttaaaaatgcacgggggtggtcctagtgtgactgccggtgtccccctcaaaaaagagtatacagaagaaaacatccagctggtggctgacggatgttgcaacctgcaaaaacaaatccagattactcagctgtttggggtcccagtggtggtagctctgaatgtcttcaaaacagatactcgggcagagattgacctggtctgcgagttggcaaaacgtgccggcgcttttgacgcagtgccatgctatcactggagcgttggcggaaagggctcagttgatctggctcgtgccgtgcgggaggcagcaagcaagcgaagcagattccagttcctctacgatgtgcaagttccaattgtcgataaaattcgaaccattgcgcaggcagtgtatggagctaaggatatcgagctaagccctgaggctcaggctaaaattgatcggtatacccagcaaggttttggaaacttgccgatttgtatggccaagactcatctcagcctatcccaccaacccgataagaaaggggtaccacgggacttcatactgccgatttcagacgtgagggcgagtataggtgctggatttatttatcctctagtcggaactatgtctacgatgcctgggcttcctactcgtccttgtttctacgatatagacctcgatacagagacagaacaggtaaaaggcctgttctag

SEQ ID NO: 15143 - DNA, 408 bp, synthetic construct
  source 1..408: mol_type = other DNA; note = Synthetic coding sequence
atgatccccaacggttacttaatgtttgaggacgagaactttattgagtctagcgtggccaaactgaatgcccttcgtaagtctggccagttctgcgatgtgcgcctccaggtttgcgggcacgagatgctggcacacagagctgtcctcgcttgttgctcaccttatcttttcgagatctttaatagcgacagcgatccccacggtatctcccacgtcaagttcgacgatctgaacccggaggctgtggaagtcctcctgaattatgcctataccgcccagctaaaggctgacaaggaattggttaaggatgtttatagtgcagccaaaaagctcaaaatggatcgggttaagcagcatctcttgtacttttgtctccattcaacgtcaacctcctcactgctgtag

SEQ ID NO: 15144 - DNA, 1929 bp, synthetic construct
  source 1..1929: mol_type = other DNA; note = Synthetic coding sequence
atgatcccaaatgggtaccttatgttcgaagacgagaactttatcgagtccagcgtggcaaaactgaacgcattacggaagtctggtcagttctgtgatgtgcgtctgcaagtttgtggccatgaaatgcttgctcatcgcgccgtcctcgcctgttgcagtccatacctgtttgagatattcaatagtgatagcgatccacatggcatcagccatgtgaagttcgacgatctgaaccctgaggccgtggaagtgctgctgaactacgcctacaccgcacagcttaaggctgacaaggagctggtcaaagatgtgtatagtgcggccaagaagctcaagatggaccgcgtcaagcaggtgtgcggagattatctgttgagccgcatggatgtaacgtcttgcatcagctacaggaatttcgcttcttgcatgggcgactctaggctactgaataaagtggatgcctacattcaggaacacctcctgcaaatatcggaggaagaggagttcctaaagctgccacgactgaaactggaggtgatgctcgaggacaatgtctgtttgccatcaaatgggaagctgtatactaaggtcataaactgggttcagagaagcatttgggaaaatggtgactcattggaggagctcatggaggaggtacaaaccctgtattattccgcagatcacaaactgttagacggcaacctccttgatggtcaggctgaggtcttcggctctgatgacgatcacatccagttcgtgcagaagaagcctccacgggagaacggtcacaaacaaatctccagcagttcaaccggatgcctctccagcccgaacgccaccgtgcagagtcccaagcatgaatggaagatagttgcttcggagaagacaagcaataatacgtatctctgcctggcagtgttggacgggatcttctgcgttatttttttgcacgggagaaactctcctcaatcatctcccacaagcacgcctaagctctccaagagcctgagtttcgaaatgcagcaggacgagctgatcgagaaacctatgagccccatgcagtacgctcggtccggactgggcacagctgaaatgaatgggaagctcatcgccgccggcggatataaccgggaggagtgcttgagaactgttgagtgctacaaccctcataccgatcattggtcgtttctcgccccaatgcggacaccccgggcccggtttcagatggccgtgctaatgggtcaactgtacgtagttggtggctcaaacggtcattctgatgacttgagctgtggcgagatgtacgattcaaatattgacgattggattcccgtgcctgagctgcgcaccaataggtgcaacgccggggtttgtgccttgaatggcaaactgtacatcgttggaggcagcgatccatacggccagaagggtctcaagaactgtgacgtctttgatccggtaacaaagctgtggacatcatgtgcgccccttaatataaggagacaccagtcagccgtgtgtgaactggggggttatctttacattattggcggggccgagagctggaattgtctaaataccgtagagagatacaaccccgagaacaacacgtggaccttgattgctcccatgaatgtggctagacgcggcgcaggagttgctgtcctcaacggaaagctgttcgtatgcggcggattcgatgggtcccatgctatttcctgcgtggaaatgtacgatccaacacgtaatgagtggaaaatgatgggaaatatgacatcgcctaggtctaacgccggaatcgcgaccgtcggaaacacaatttatgctgtgggaggttttgacggtaatgagtttctgaacacagtggaggtttataatctcgaatcaaatgagtggtcaccttacacaaagatttttcaattttag

SEQ ID NO: 15145 - DNA, 408 bp, synthetic construct
  source 1..408: mol_type = other DNA; note = Synthetic coding sequence
atgtccaagaatacagtgtcatctgcacggtttcgcaaggtggacgtcgacgaatacgacgaaaataaattcgtcgatgaagaagatggcggagacggccaggccgggccggatgaaggcgaggttgacagttgtctccggcagggcaatatgaccgccgccctgcaagccgcactcaagaaccctcctatcaacacaaaatctcaagctgtgaaagacagagccgggagcattgtcctcaaggtgctgatttctttcaaggcaaatgatatcgagaaggcggtacaatctcttgacaagaacggggtggatttgctgatgaaatatatatataaggggttcgagtctccatctgataattccagtgcgatgcttctacaatggcatgagaaagttcctctggtgtag

SEQ ID NO: 15146 - DNA, 849 bp, synthetic construct
  source 1..849: mol_type = other DNA; note = Synthetic coding sequence
atggccagttctttcttaccggctggcgccatcacaggagatagcggcggagagttgtcatctggagacgacagcggggaggtggagttcccacattctcccgaaatagaagaaacctcgtgcctagctgaactgttcgaaaaagccgcggctcacctccagggcctgatacaagtggcatcaagagaacagctcctgtatttgtacgcaagatacaaacaggtgaaagttgggaattgtaatacccccaaaccttccttcttcgactttgagggaaaacaaaagtgggaagcctggaaggctctcggagactcttcacctagtcaggccatgcaagaatacatcgctgtggttaagaagctggacccgggttggaatccccaaatccctgaaaaaaaaggcaaggaagcaaatactggttttggcggacccgttatctcaagtctctaccatgaggagactattcgtgaggaggataaaaatatctttgattactgccgagaaaataatattgaccatatcacgaaggctattaaatccaaaaacgtggatgtgaatgtcaaggatgaggaaggaagagccttactacactgggcatgtgaccgcggccataaagaattggtgacagttctactgcagcatcgcgccgatattaactgccaagacaatgagggccagaccgccctccattatgcctctgcatgtgaatttctggacatcgttgaactactcctgcaaagtggcgccgaccccacactccgagaccaggatggatgtttgcccgaggaagtgacaggctgtaaaacagtcagccttgtcctgcagcgtcacaccaccggtaaagcatag

SEQ ID NO: 15147 - DNA, 9354 bp, synthetic construct
  source 1..9354: mol_type = other DNA; note = Synthetic coding sequence
atgcgaagctcaaaaagcaaagaggtgcctttgcctaaccctcgcaatagccaatctaaagataccgtacaagcagatatcacaacctcttgggatgctttatcacagactaaggcagctctccgtcatattgagaataagctggaagtagccccaacatcaactgctgtctgcgatagtgtgatggacactaagaaaagctccacatccgcgacacgcaaaatttcccggaaggacggccgctatctcgacgactcttgggtgaatgctccaatttctaagtcaacaaagagtcgaaaggagaagagtcggtctcctctgcgagctacaactcttgaaagcaatgtcaagaaaaataatcgggttgaattcagggagccgctggtgtcctaccgggagattcatggagccccttcaaatttttcctcatcccatctggagagtaaacacgtatactgcgtggatgtcaacgaagaaaagactgaaagcgggaattggatgatcggctctcgagaagagcggaatatcaggtcatgtgacttcgagagctcccagtcttccgtgatcaacgataccgtggtgagattcctgaatgaccgccccgctatcgacgcactgcagaattccgagtgcctaattcggatgggcgctagcatgcgtacagaggaggaaatgccaaaccgcaccaagggctctgagaacaacctgaagctctctgtgaataacatggcccatgatactgatcccaaggcccttagactgaccgatagcagtccatcatccaccagtacttccaacagtcagaggctggatatcctaaagagacggcagcacgacgtcaaacttgaaaagctgaaagaacgtatacgaaagcagtgggaacactccgaagaaacaaacggaagggggcagaagctgggccacatagaccatccagtgatggtggtgaacgttgacaactcagtcaccgctaaggtccgaaaggtagcgacggctccaccggcccctgcctataaaggttttaatcccagcgaaaccaagatacgcacaccagatggaaaagtgtggcaggaggccgagttccagaacatgtcacgagaactttacagggatttggcactgcacttcgcggatgacatttctatcaaggaaaagcccgctgaaaaaagtaaggagaaaaaagtggtaaagccagtacggaaggttcagaaggtcgctcagctcagttccacagagtgtcgaaccgggtcttcgcatttaatttccacatctagctggcgggatggccagaagctggtgaagaagatcctcggtcctgccccacgcatggagcccaaagaacagagaactgcttcaagcgaccgcggcggaagggaacgaaccgccaagtcaggcggccatatcggccgggccgaatccgatcctcgtctggacgtgctgcatagacaccttcaaaggaactccgaacgctctaggtctaaatctcggagcgaaaacaacatcaagaagctggcctcatctctgccagacaacaaacaggaggagaacactgccctgaataaagatttcctgccgatcgaaatccgtggaatactggatgacttacagcttgattccactgctcataccgcaaagcaagataccgtcgagctccagaatcagaagtcgtctgctcccgtgcacgcgccacggagtcattctccagtcaaacggaaacccgataagataaccgccaatgaggatccgcctgtcatctctaagcgaagacattacgataccgatgaggttcgccagtacatcgttagacaacaagaagagcggaagaggaaacagaatgaagaaaagaaggcccaaaaagaggctaccgagcaaaagaacaagaggctccaggaactataccgcaaacagaaagaggcgttcactaaagtgaaaaacgtgccaccttcagagccatcagcaacaaggcgcctgcaggaaacatacagtaagttactgctggagaaaaccctgctggaagagcccagccaccaacacgttactcaggaaacacaagcgaagccaggctaccagccgtccggcgagtccgacaaggagaataaggtgcaggagaggcccccgtccgcttctagcagtagcgatatgtctctatccgagcccccccagccacttgctcgcaaagacctgatggagtcgacgtggatgcagccagagcggctgagcccccaagtgcaccacagccaacctcagccttttgccggaacagcggggtctttgctgagccacctgttgtcccttgaacatgtcgggattctgcacaaagatttcgagagcatactcccaaccagaaagaaccacaatatggccagtaggcctctcactttcactccccaaccctatgttacatcacccgctgcatacactgacgctctgctgaaaccatctgcatcccagtataagtcaaagctcgatcgtatcgaggcccttaaagcaacggctgctagtttgtcgtctcgaatcgagtccgaggcaaagaagctcgccggcgcatcaattaattacgggtccgcgtggaatactgaatatgacgttcagcaggcgcctcaagaggatggtccatggacaaaggctgtgacaccccccgtcaaggatgataacgaagatgtgttctccgcaaggattcagaagatgttgggcagctgcgtcagtcacgccactttcgacgatgacttaccgggagtgggaaacctgtccgagtttaaaaagttgcccgaaatgattagaccccaaagcgccattagttcattcagagttagatcccccgggccaaaaccagaggggctgctggcccagttgtgcaaacggcaaaccgacagcagttcatccgacatgcaggcctgtagtcaagacaaggctaaaatctcactgggttctagcattgactccgtgtctgagggtcctttgctctcagaaggaagcctaagcgaggaagagggtgatcaggatggccagcccctactgaaggtcgccgaaatcctcaaggaaaaggagttctgccccggcgagcggaacagctacgagcccatcaaggagtttcagaaagaggctgagaagttcctgcctctcttcggtcacattgggggaacacaaagtaagggtccatgggaggagttagctaaaggttcaccacactccgtaattaatatttttactaagagctatcagctgtacgggaaaggattcgaggacaagctagaccgcggaactagcaccagtaggcccttgaatgccaccgcgaccccgctgagcggcgtgtcttatgaagatgatttcgtgtcctcgccaggaaccggaacatccacggaaaaaaaatccaccctggagccccattcaactctctccccacaggaggaccactccaataggaaatctgcttatgatccatcgtccgtggatgtgactagccaacattcctccggagcccagtccgccgctagcagtcggagctctaccagcagtaaaggcaaaaaggggaagaaggagaagacggaatggctggacagttttactggcaatgtgcagaacagcctcctggatgaggagaaagccgaacggggctctcatcaggggaaaaagagcggaacctcctccaaactgtcggtcaaggatttcgaacagacactcgacacagacagtacactggaagacctctccggccatagcgtttcagttagtagtgacaagggtcgttctcagaaaacgcctacgtctccactaagtcccagtagtcagaagtcattgcagtttgatgttgccggtacgtcatccgagcgtagcaagtcaagcgtgatgccacccacgatcacagggttcaagccaaatgctcctttgactgatctgaatcccgcagcttctcgcacaaccaccgaaaacatggcacccattccaggcagcaagagattctctcctgctggtctccaccatagaatggccgctgagctgtcctacctgaatgccatagaggaatccgttcgccagctcagcgacgtggaacgagtccggggcataagcctagcgcagcaagagagcgtcagcctcgcccagatcataaaagcacagcagcagcgccatgaacgggacctagcactcctaaagctgaaagctgagcaggaggcgcttgaaagtcaacgccagctcgaggagactcgcaacaaagctgcccaagtccatgcggagagcctgcaacaggtagtccagagtcagcgggaagtgaccgaggttcttcaggaggcaacctgcaaaattgcggctcagcagagtgagacagcaagattgaccacagacgcggcccgccagatctgcgagatggccgaactaaccaggactcacatcagcgatgcggtcgtagcttcgggtgcccccctggctatcctgtacgatcaccagcgccagcatctcccagattttgtgaaacagctgcgcacacgaaccgaaacagaccggaaaagcccgagcgttagtcttagccagtccaaagagggaactctggactctaaacaccagaagtatagcgcttcctatgattcctattctgagagcagtgggtataaaaatcacgaccgacggtcttcatctgggtcaagccgtcaggagtctccgtcagttccatcctgtaaagagaacgagaaaaaattgaacggagaaaagatcgaatcttccattgatgagcaggtgcagaccgcggccgatgattcactgagatctgacagcgtgccatcattgcctgatgagaaggacagcactagcatagctaccgaatacagtctcaagtttgacgagagcatgactgaagatgaaattgaagaacagtcgttccggagcttgctgccttccgagtcccaccgacggtttaatatggagaaaaggagaggacaccacgacgacagtgacgaggaggcttctcccgaaaaaactaccctctctaccgccaaggaattaaatatgcccttctcagggggccaggactcattctccaaatttactatggagatggtccggcagtatatgaaggaggaggaaatgagggctgcacatcagtcgtcactgctcaggctgagggagaaggcgctgaaagagaagacaaaagctgagctcgcctggctggagcaccagaaaaagcatctgcgggacaagggggaagacgacaagatgccacctcttcgcaagaaacagcggggtctgctccttagactacagcaggaaaaggccgagatcaagcgtctgcaggaggctaacaaggcagcgcgcaaagagaggcagcttattttgaagcagcaggaagaaatcgagaagattcgtcaaacaacgataaagttgcaagaaaaactcaagagcgcaggcgagtccaagctggactcacactctgacgacgatactaaagacaataaagcaacttcccccggacctactgatctggaaactcgtagcccctctccaatttccatatcaagctcagagacaagcagcatcatgcagaagctgaaaaagatgcggagtcggatggatgaaaaatttctgaccaagagggaacagaagctgatgcagcgccggcagcatgctgaggagcttctggagtggaaacgccgcttggacgctgaggaggccgaaattcggcagatggaaaagcaggcactggctgcttgggacaaggagctgatcaaaccaaaaactccaaaaaaagaacttgaagaccagagaacagagcagaaggagattgcttccgaagaggagagccccgtgcccctctactcccatttaaatagtgagagctccatacccgaggagttgggctcgcctgcagtggagtacgtgccctcagaaagcatcggccaggagcaacctggctctccagatcactccatcctaactgaggagatgatttgtagtcaagagctagagtcatctacatctcctagcaagcactccttacccaaaagctgcacgagcgtctccaagcaggagagctcaaagggatctcatagaaccggagggcaatgtcatttgcccattaagtcccaccaacactgttatagctggagcgatgagtccttatccatgacccagtccgaaaccacctcggaccagagcgatatcgagggtagaattagagcactcaaagacgagttgcggaaaagaaaatccgtcgtaaatcagctgaaaaaggagcagaagaagcgccagaaggagagattaaaagcacaggaggccagcctgataaaacaactagagagttatgacgagtttattaaaaaaaccgaggccgagctttcccaagacctcgagacctcccccaccgccaagccccagattaaaaccctctctagcgcctcagagaagcccaagattaaacctcttacacccttgcaccgatccgagacagccaaaaactggaagagcttgactgaatcagagcggtccagagggtccctagagtccatcgctgaacatgtagacgcctccctatctggatcagagagaagtgtgtctgagcgctctctgagcgcatatgctaagagagtaaacgagtgggactcacggacagaagactttcagacaccgagcccggtgctgcgcagctcgaggaagatccgggaagagtcaggtgacagcctggaaaatgtgcctgctcttcatctgttgaaggaactgaacgccacctctcggatactggacatgtccgatggaaaagtcggtgagagttccaaaaagtctgagataaaagaaatcgagtacacgaaacttaagaaaagtaagattgaggatgccttcagtaaggaaggaaagtccgacgtgttgctgaaactggtgctggagcagggggactcaagtgagatcctctctaagaaagatctccccctcgacagcgagaatgtccagaaagacctggttggcctggctattgagaatttacacaagagtgaggaaatgctaaaagagcggcagtctgaccaggatatgaatcatagtcccaatatacagagtggaaaagacatccacgagcagaagaacacgaaagagaaagatctgtcttggtcagaacacctctttgcccctaaggagattccatactccgaagatttcgaggtcagttctttcaagaaagaaatttccgcagaactgtacaaagatgattttgaggtctcaagcctgctgagccttaggaaagactcccagagttgtcgggataagccccaacccatgcgcagtagcacaagcggagcgacatcctttggctcgaatgaggaaatctccgagtgcctcagtgaaaagagtctcagcattcacagcaacgtccactcagatagacttctagaactcaagtctcccacagaactgatgaaatcaaaagagagaagcgatgtggagcatgaacagcaagtcacagagtcaccttcactggccagcgtgcccaccgcagatgagctcttcgacttccatatcggtgaccgggtcttgattggaaacgtgcagcccggtatcctgagattcaaaggggagacgagctttgccaagggtttttgggccggtgtcgaattggataagccggaagggaataataatggcacatacgacgggattgcatatttcgaatgcaaggagaaacatggtattttcgctcctccacagaagatctcccacatcccagaaaacttcgacgattatgtggatatcaatgaggacgaggactgctatagcgatgagagataccaatgttataatcaggagcaaaatgatacggaaggacctaaggatcgagagaaagatgtgtccgagtacttctatgaaaaaagtcttccttccgtgaacgacatagaagcttccgtcaatcgttcaaggagtctcaagatagaaactgataacgtccaggatatttccggcgtgcttgaagcgcatgtgcaccagcagtcttccgtcgactcacaaatctcatcgaaggaaaacaaagatctcattagcgacgcaaccgaaaaggtttcgatcgccgccgaagatgacaccttagataatacatttagtgaagagttggagaaacagcagcagttcacggaagaagaggataacctctatgcggaggcgagcgagaagttgtgtacgccattactggacctgcttaccagagagaagaatcagcttgaggcccagctgaagtccagtctgaacgaagagaagaagtctaagcaacaactggaaaagatcagcctgttaacagacagtcttctgaaagtgtttgtgaaggataccgtgaatcagctgcagcagataaagaaaactcgcgatgaaaaaatccagttaagcaatcaggagctgctgggcgatgaccagaaaaaggtgacccctcaggaccttagtcagaatgtcgaagagcagtctcccagcatcagcgggtgttttttgagctcagaactcgaagacgaaaaggaggagatttccagcccagacatgtgcccacggccagaatctccagtgtttggtgcctccggacaggaggagcttgccaaacgtttagcagagttggagttaagccgcgagttcttaagtgcattgggggacgatcaggattggttcgatgaggacttcggcctgagttcatcccataaaatccagaaaaataaggccgaggagaccatagttcccttgatggccgaaccaaagcgcgtcacccaacaaccttgtgagacactgttagctgtcccccacactgccgaagaggtggagatcttagtccataatgccgcggaagagctttggaaatggaaagaactgggtcacgaccttcattcaatcagtattcccaccaagctgctggggtgcgcttcaaaaggcctggatatcgagagcaccagcaagagagtatacaaacaggcggtgttcgacctgaccaaggagatctttgaggaaatctttgctgaagaccccaatctgaaccagcctgtctggatgaagccctgcaggatcaacagctcttacttccggagagttaagaatccgaacaacctggatgagattaagagttttatcgctagcgaagtgctgaaactgttttcgctgaaaaaagaacctaatcacaaaactgattggcagaagatgatgaaattcggacggaagaagcgtgacagagtggatcatatcctcgtgcaagaactccacgaggaagaggcacagtgggtgaattatgacgaggatgagctctgcgtcaagatgcagctggctgatggcattttcgagacactcatcaaggacactatagacgtgctcaatcaaatatcagagaaacaaggacgcatgctgctggtatag

SEQ ID NO: 15148 - DNA, 2946 bp, synthetic construct
  source 1..2946: mol_type = other DNA; note = Synthetic coding sequence
atgtccgaacaggagcgaattcaggagtgcctgagaaaggagatcagatcgctgcttatctcaacaaaagatggcttgagtccacaggagctggaaaaagagtacctgcttatggtaggtaaccatctgcccctccggatcctgggctatagatcaactatggaactggtcctcgacatgcccgatgttgtgagggtctgcccaggcgccggcgggacagtaatactgaaggcgattcccgacgagagtacgaagggtatcgcgagtctggtcgctaaacagcgttcctctcacaagttaaggaattcaatgcacaaaggcaggccctccatctatagcggaccacggtcacaccggcgggttccataccgggggagggtcgccccaatcctgcccgccgtggtgaagagtgaattgaaggatctactagctttatctccggtcttactgagcgactttgagaaagcatttgctaagcggttcggtagatcattccagtacatgcagtacggctttcttagcatgtttgaggtgcttaatgccgccagtgatgttatatccgtggagcaaacacgggccggaagtcttctgatgctaaaaaagtccgttacagaggagaagccccggggttgtccagcgggcaaaatttttacgcagccgttcaggatgaaacaggggagttacagcacaggtttcccagtggccaagccatgcttctctcagccaacctcaaacatggaacccccgaagcagataatgtccatggaaaaaacctcaaaattaaacgtggtagagacctcaaggctcaatcacaccgagaagctgaaccaattagagaatacgttcaaatctgtcatagcgcagatcggtccgggaggcactatttcctccgaactgaaacataagatcaaattcgttgtgagcaagtttcctgaaggattattcatctccaagcttctcggggaatatgaagtgatttttaaggagcagctgagccctaagaagctcggatttctgaatgtcacagagctggtgggcgctctttcagatattctccatgttgaattcaggaaaggccaccaggacttgctggtttttgacgccgacaagaagcctctgcctccagtgcagtctgacaagaaaattgaggccaaggcatgcgtatcatctccaccgcgcaattctctgtcaactgcagctgtcaaagagaccgtgtggaattgccccagtaagaagcagaaggaacctcagcagaagatctgtaaaaaacctaaccttgtcgtgaagccattacagctgcaggtggaaacaaataaatcagagctaaatttagccatggctaaccatgacatcccacctgacgcggtacccaataagaaactttgcagactccctcctctcgacactagcagcctgattggggtcttcgtggagtacatcatctctccttcacaattctacattcgcatttattcccgggattcatccgagttgctggaggacatgatgatcgaaatgcggcgttgctactctaaccaactggtcagcgatagatatgttatgcccgagtgctttattcaacctgggcacttgtgctgcgtgcgaattagcgaagataagtggtggtatagagtgataatccatcgtgtcttggagaagcaggaagtagaagtcttctatcccgactttgggaatatcggtatagtccaaaaatcttccttgcgattcttgaaatgctgttatacaaagctgcctgctcaagccataccatgtagtcttgcgtgggtgcggccggttgaggaacactggaccagtaaggccatccttcagtttcagaaactatgtgggctgaaaccattggtaggagttgttgacgagtacgtagacggcattctcaacatctttttgtgcgacacttctagtaacgaagatgtgtatttccaccacgtgttgaggacagaggggcatgcaatcgtttgcagagaaaacattagtagcaaagggtttagcgaactgaaccctttagcgctctacaccacctcttctggagggcccgaggatattgtgctcaccgagctgggttacccttcccagcagcactattttaatgaggaccgcaaaatatctccacagtccaaagagtcagaattgcgtatacttgatgagatccctacgggaatgccctgtctagaatcagtgacaattggcgacgatatttgggatgaaaactggcttcccctgcaggcgaagatgggcaaggggggcgatgctgcaagtcatctctttaccgcgtctctgggaggcaagaaccaatattccagttgcaaggagatgcctcaaaaggactggtgtttctcgactccgaaggatacatgggatgactcatggcagccctcaggtcttgtgaatggcaccaaagtggaagtgcacaaacccgaggttctaggcgcgcaggaaaagaatacaggaactaatcgcacgcagaagcagctcgatatcaatggttcctccgacagttcaacacttccgaagcttgaagagttttgcactagtcttactcagtccgagcaatccgccgatgggagtcagtccgaaccaaacaacagccagactcagcccaagcagatccagctgagcacagctgctccctgcagcactaccgctgttgacgatagtgctgaaaaaccgagcggctctgtggagtcttcgccggagatcctcaagaatgaggatttttcctctagccgcgcaatcaccttgtacaaagacaaaaggcaggaatctgttgaccagctttccctgatactgagctacgagtgtcagatctcccaaaagctgtatatccccagaagcaccgccactgcagccctgggggccgctgctcgcctcgcaacctctcgttccctgctgcattggtatccgagtgtgaagaggatggaggcctag

SEQ ID NO: 15149 - DNA, 648 bp, synthetic construct
  source 1..648: mol_type = other DNA; note = Synthetic coding sequence
atgtccgctaagagagccgagctgaaaaagacccacctcgtgaaggagcggcattgctggactagtaagaattacaaggccgtctgtctggaattaaaacctgagcccacaaaaacatttgactacaaggcagttaagcaggaggggagattcaccaaggcgggtgtgacacaggatctgaaaaacgaactgcgtgaggtacgcgaggaattaaaagaaaaaatggaagaaattaaacagatcaaagacctgatggataaggattttgacaagctgcatgagttcgtggagattatgaaagagatgcagaaggacatggatgaaaaaatggacatacttattaacacccagaagaactataagcttcctttaagacgcgccccaaaagaacaacaggaactccgcctcatgggtaagacccatcgagagcctcagctgcgtcccaagaagatggacggcgccagtggcgtgaacggggcaccttgcgccctgcataagaaaactatggcgccccagaagactaagcaggggtccttggaccccctgcaccattgcggaacatgttgtgaaaagtgtctactatgtgcactgaaaaacaattataacagagggatttacgccgcagttggccttctggacctgtggtag

SEQ ID NO: 15150 - DNA, 606 bp, synthetic construct
  source 1..606: mol_type = other DNA; note = Synthetic coding sequence
atgtccgctaagcgggctgagttgaaaaaaacccatttaagcaagaattataaagcagtatgtctcgagctcaagcccgagcctacaaagacattcgactacaaggcagtgaaacaggagggcagattcaccaaagcaggggtgacgcaagatctcaaaaacgagctgcgtgaggtacgagaggagctcaaagagaagatggaagagatcaagcagatcaaggatcttatggacaaggattttgacaaactgcacgaattcgtggagattatgaaagaaatgcagaaggacatggatgagaagatggatattctgattaatacacaaaagaattataagctacctctgcgaagggctccaaaagagcagcaggaactccggctgatggggaaaacacacagggaaccgcagctgcgaccaaaaaagatggatggagcttcaggagtgaatggtgcaccatgcgccttacacaagaagaccatggcccctcaaaagacaaaacagggtagtctggaccctctgcaccattgcggaacctgctgcgtgtcagagacacttccggagcctagcacaggcgcaaggccactggctcccgcaccttggtag

SEQ ID NO: 15151 - DNA, 300 bp, synthetic construct
  source 1..300: mol_type = other DNA; note = Synthetic coding sequence
atgagtgctaaacgcgccgaactcaagaaaacccacttatctaagaattacaaagcagtgtgtctggagctgaagccagagccaaccaaagtgcgatccccatttgaagcaatgcaggcagctcggcccgagattcatggagaggtgaccagatcccagggttctttcgcggatcctagtggtcaagacctctcccagactttcgactataaagcagttaagcaagaggggcggtttacaaaggccggaaggactcctcgactgctggaggagttgtcattgctgttgttgcctttgtag

SEQ ID NO: 15152 - DNA, 639 bp, synthetic construct
  source 1..639: mol_type = other DNA; note = Synthetic coding sequence
atgagtgccaagcgggccgagctgaagaagactcatctctctaagaattacaaagcagtgtgcctggaactgaagcccgaaccaaccaagacctttgactataaagccgtgaagcaggagggccggttcactaaagctggagtgacacaggacctaaagaatgaattacgtgaagtcagggaggaactaaaggagaaaatggaagaaatcaagcagataaaggacctgatggacaaggacttcgataagcttcacgagtttgtggaaattatgaaggagatgcagaaagacatggacgagaagatggatattctaattaacactcaaaaaaattacaagctgccactccgtcgtgctccgaaggaacagcaggaactgcggctgatgggtaaaacacacagagagccgcagctccgcccaaaaaaaatggacggggcgtccggagttaatggtgccccctgtgccctgcataagaaaactatggctcctcaaaagaccaaacaaggttcgctggatccgttacaccactgtggcacatgctgcgagaagtgcctgctgtgtgccctgaaaaataattacaacagggcccaactgcagaacttgcctgccgtgcctatacatcacctccaggctccttag

SEQ ID NO: 15153 - DNA, 402 bp, synthetic construct
  source 1..402: mol_type = other DNA; note = Synthetic coding sequence
tgatatgaattgagagaagagcatctggataagatatttaaacacagggaactgcagcagaaactcgtggacgcgaaactggaacaggcacaggaaatgatgaaagaagcagaagaacgccataagcgtgaaaaggaataccttttgaaccaggccgcagaatggaaacttcaggctaaggtcctcaaagagcaggaaactgtgttgcaagcacaggtgcggccggggggtaggggtatgggggtcctatctagtctatcccccgataagaaagccggtgcaaagggaggccagcagaaatcatcctatgtggcaggagatggcggaatggggattggcaacgaggagcagctgcacatatattcttactttcaggtcaaaatcaaggcccagtattactag

SEQ ID NO: 15154 - DNA, 687 bp, synthetic construct
  source 1..687: mol_type = other DNA; note = Synthetic coding sequence
atggccagcgaagaacttcagaaagacttggaagaagtgaaggttctcttagagaaggccaccaggaagcgagttcgcgacgccctaacagccgaaaagagtaaaatcgaaaccgaaattaagaataaaatgcaacagaagagtcaaaagaaggccgaactgttggataatgagaagcccgcagccgtcgtggcacctattaccaccggttatacggtcaagatttccaattatggttgggaccagtcagacaaattcgttaagatatacattacactgaccggggtgcaccaggttcccaccgagaacgtgcaggtgcactttacagaaaggagttttgacttgctggttaagaatctgaatggaaagagttattcaatgatcgtcaacaatctgttaaagccaattagcgtggaaggcagctccaaaaaggtgaaaaccgacacagtgctgattctctgtcgcaagaaggtcgaaaacacacgctgggattatctgactcaggtggaaaaagagtgtaaggaaaaagagaaacccagctacgatacggagacagacccctcagaaggattgatgaatgtcctgaaaaagatctacgaggatggggacgacgatatgaagaggaccatcaacaaagcctgggtagaatcacgggaaaagcaggctaagggcgacaccgagttttag

SEQ ID NO: 15155 - DNA, 558 bp, synthetic construct
  source 1..558: mol_type = other DNA; note = Synthetic coding sequence
atgcagcagaaatcccagaaaaaggctgaattactcgataacgaaaagccggcggccgtggttgctcccataaccacaggatacactgtgaagatttccaattacggctgggatcagtctgacaagtttgttaaaatttacatcacgttaactggggtgcaccaggttcctactgagaatgtgcaggtgcatttcacagagagatccttcgaccttctggtgaaaaacctgaacggaaaaagttactctatgatagtaaacaacctgcttaaacccataagcgtcgaaggaagcagtaagaaggtgaagacagatacagtgcttatcctttgcagaaagaaggttgaaaacactagatgggactatttgacacaggtggagaaggaatgtaaagagaaggagaagccctcctacgatacggagaccgaccccagcgaggggctgatgaacgtcctcaagaagatttacgaagacggagatgacgatatgaaacggacaattaacaaggcatgggtcgaatcccgggagaagcaagctaaaggtgacaccgagttctag

SEQ ID NO: 15156 - DNA, 1134 bp, synthetic construct
  source 1..1134: mol_type = other DNA; note = Synthetic coding sequence
atggaacagctaccagatcttcatagtcacttcagcgatctgaaccttgaggctcacatgtacgcttcacaatggtttctcactctgttcaccgccaaattcccactgtgcatggttttccacattattgatcttcttttgtgcgaggggctgaacatcatcttccacgtcgctttagctctgctgaagaccagcaaggaagaccttttgcaggctgatttcgaaggcgccctcaagttttttagagtacagctgcccaagcgctaccgagcagaagagaatgcccggcgcctgatggaacaagcttgtaacataaaagtgcccacgaaaaaactgaagaagtacgagaaagaataccagaccatgagggaatctcagctgcaacaggaggatccaatggatcgctacaaaagggagaaccgtaggcttcaggaggccagcatgaggttggaacaagagaacgacgatctggcccatgagctagtgacatcaaagattgcactgaggaacgacctggatcaagccgaggataaggcagacgtactgaacaaagagctacttctcacaaagcagagacttgtggagacggaagaagagaagaggaagcaggaggaggagactgctcagctgaaagaagtctttaggaagcagctggagaaagctgagtatgaaatcaagaagactacagcgattatcgctgagtataagcaaatttgctcccagctatccacaaggctcgaaaaacagcaggctgcttcgaaggaggaactggaagtagtgaagggtaagatgatggcctgtaagcactgtagcgatatcttctccaaggagggtgccctgaaattagccgcaaccggccgggaggaccagggtatagaaaccgacgacgagaaagatagcttgaaaaagcagttgcgggagatggagctcgaactggctcagacaaaactgcagctggttgaggccaagtgtaaaatccaagaacttgaacaccagaggggagctctgatgaatgaaattcaagcagcaaaaaacagttggttctctaagactcttaattcaatcaagactgccactggcactcaaccactgcagcccgcgcccgtgacccagccgccaaaggagtccacctag

SEQ ID NO: 15157 - DNA, 762 bp, synthetic construct
  source 1..762: mol_type = other DNA; note = Synthetic coding sequence
atgattgaaaacagcagttggtccatgacttttgaagaaagggaaaacaggcgtctgcaggaggcctcaatgcggttggagcaagagaatgacgatctggcgcacgagttagtgacctctaaaatagccctgcgaaacgacctagaccaggctgaagacaaagccgacgtactcaataaagagctcctcctgaccaagcaacggctcgtggaaacagaggaagagaaaaggaaacaggaagaagaaactgcgcagctgaaggaggtcttcaggaaacagctggaaaaagcagagtacgagataaaaaaaactaccgcaattatcgctgaatataagcagatctgttctcaattgagtacaaggctggagaagcagcaggctgcttctaaggaagaacttgaggtggtcaaaggcaaaatgatggcctgtaaacactgctccgatatttttagcaaggagggcgcgctgaagctcgccgccaccggcagagaggatcaaggcattgagacagatgacgagaaggactctctgaagaagcagctacgcgaaatggagctcgagctcgcgcagacaaagctgcagctagtagaagcgaagtgcaagatacaggagctggagcaccaacggggcgctttaatgaacgagatacaggccgcaaaaaatagctggttcagtaagacgctgaattctatcaagacggctactgggacgcagcctttacagcctgctcccgtgactcagccacctaaggagtcaacctag

SEQ ID NO: 15158 - DNA, 759 bp, synthetic construct
  source 1..759: mol_type = other DNA; note = Synthetic coding sequence
atgggtaaatcatacgacggacgcgcttacgtaataacaggaatgtggaaccctaacgcaccagttttccttgcactcaacgaagagactcctaaggataaacaggtgtacatgaccgtggctgtggacatggtcgttacagaggtcgtcgagcccgtcaggtttctgctcgagactgtggtacgggtgtatcccgccaacgaaaggttctggtatttttcccgcaagacgttcactgaaacctttttcatgaggctcaaacagtccgagggaaaggggcatacgaacgctggagatgctatctacgaagtcgttagcctgcagcgtgaatcggataaagaagagcccgtgactcccacgtccggcgggggccctatgtccccgcaggatgatgaggctgaagaggagtctgataacgaactcagcagcggcacaggagacgtttcaaaggactgtccagagaagattctgtactcctggggtgagctgctcggcaaatggcatagtaacctgggtgctcgccctaagggtcttagtacactcgtgaaatctggtgtgcccgaggctttgcgagccgaagtgtggcagctgttagccggctgccatgacaatcaggccatgctggaccggtatcgcatactcatcactaaggtctgctggtccctgctcgaggtgcacagccggccctgccttcctggatatcatcaatggaagctgcagaacagtaagtactgccggatggctaatgtggccgcttag

SEQ ID NO: 15159 - DNA, 2484 bp, synthetic construct
  source 1..2484: mol_type = other DNA; note = Synthetic coding sequence
atggaagtacgagcctcactccagaaagtgtcgggcagctctgacagcgtggccactatgaacagtgaagagtttgtgttggttccccaatatgctgacgacaactcaacaaagcacgaagagaaacctcagctgaaaattgtgtcaaatggagacgaacagctcgagaaagctatggaagagatactccgggactcggaaaaaagaccatcctctctgctggtcgactgtcagtcaagcagtgagatttccgaccacagctttggcgatattcctgcctcccagactaataaaccgtccttgcagttgatattagatcctagcaataccgagatcagcaccccacgtcccagctcaccgggtgggctgcctgaggaagacagcgtgctcttcaacaaactgacctacctcggatgtatgaaagtgagcagtcctcggaatgaagttgaagcattacgtgcgatggctacaatgaagtcttcctcccagtacccattccccgtgaccttgtatgtgcccaatgtgccagagggctctgtgcggattatcgaccagtcgtctaatgtggaaatcgcatctttcccaatctacaaagtattattttgcgcaagagggcatgacggaactacggagagcaattgcttcgcattcaccgaatcttcccacggctctgaggaattccagattcacgtgttttcctgtgaaatcaaggaagccgtcagtagaatcctgtattctttctgcacagccttcaagaggagtagcaggcaagtctctgacgtgaaggactcagtcattcctacgcccgacagcgacgtatttactttcagcgtgtccctggaggttaaagaagatgacggtaagggcaattttagactgcttgtaattcctattcctttcgaatacttcagtccagtgcccaaagatagagataaattctactttaagcttaaacagggcattgagaagaaggtggtgatcacagtccaacagctctctaataaagaactcgccattgagcgctgtttcgggatgctgctgtcacccggtaggaatgtgaagaattcagatatgcatctgctggacatggagagcatgggcaaatcctacgacggtagggcgtatgtgattaccggaatgtggaatcctaacgctcccgtcttccttgccctgaacgaggagacccctaaggacaagcaggtgtacatgactgttgccgtggatatggtggtaaccgaggtggtagagccggtcaggtttctgctagagactgtcgttcgagtgtacccagccaacgagcggttctggtatttctccagaaaaactttcaccgagaccttctttatgcgcctgaaacagtcagagggtaaaggccatactaatgctggagacgcgatctatgaagtcgtaagtttgcagagggagtccgataaggaggagccagttacacccacttcaggcgggggccctatgtcaccccaagatgatgaagcagaggaagagtccgataacgagctgagctctgggacaggggacgttagcaaggactgccctgagaaaatcttgtattcctggggcgagttgctggggaagtggcactctaatcttggtgcgcgccccaagggcctttccaccttggtgaaatccggggtacctgaagcactgagggccgaagtctggcagcttttagccggctgccatgataatcaggccatgttggacaggtaccgcattctgataaccaaggactccgcccaggagtccgttattacacgggacattcatcgaacgttccccgcacatgattattttaaggacaccggtggagatggacaggaaagcctgtacaaaatttgcaaggcttattccgtttacgacgaggatatcggctactgccagggccagtcttttctggctgccgtactgttgttacatatgcctgaggagcaagccttttgtgtactggtcaagatcatgtatgattatggactgagggatctctatcggaacaactttgaggacctccactgcaagttttatcagctggaacgtctgatgcaggaacagctgccagatctgcactcccacttttccgatttgaatctcgaggcacatatgtatgcgagccagtggttcctcacgttgttcactgcaaaattcccactgtgcatggtctttcacattattgatttactcctctgcgaaggactgaatattatctttcatgtcgcactggcattactgaaaacatccaaggaagacctgctgcaggccgattttgagggagctctcaagttttttcgcgtgcagctacctaaaagatatagggcagaagagaatgccaggcgcttaatggaacaggcttgcaatattaaggttccaacaaagaagcttaaaaagtacgagaaggagtaccagactatgcgggaatcccaactgcagcaagaagacccaatggacaggtacaaattcttcttcctgtag

SEQ ID NO: 15160 - DNA, 2580 bp, synthetic construct
  source 1..2580: mol_type = other DNA; note = Synthetic coding sequence
atgggtaaccgcgagatggaagagctcattcccctcgtgaataggttgcaggacgccttttcagccctcggccagagctgtcttttagaactgccacagatcgctgttgtgggaggtcagtccgccggcaaatcaagcgtattggaaaatttcgtcggacgtgactttctcccccggggcagcgggatagtgacgagacgtccccttgttttacagctggtgacatccaaggccgaatacgctgagtttttgcactgcaaaggcaagaagttcacagacttcgatgaagtgagactggagatcgaggccgagacggaccgggttaccgggatgaataaaggaatttcctccatcccaataaatctacgggtgtattcccctcacgttttgaacctgaccctcatcgatctgcccggcattaccaaagtgcctgtgggagatcagcctcccgacattgaataccaaatccgagagatgataatgcagttcatcactcgggagaattgccttatcctcgctgttacaccagctaacaccgacctcgccaacagcgacgcactgaaattggccaaggaggtggaccctcagggtctgaggactattggggtaataacaaagcttgacctgatggatgaggggacggatgcaagggacgtgctagaaaacaaacttctcccgctcaggaggggttatgtgggagtcgtgaatagaagccagaaggatatcgacggcaaaaaggacatcaaagcagccatgcttgccgagaggaaattttttctatcccatcctgcctataggcacatcgctgatcgaatgggaactccacatctgcagaaggtcctgaaccagcagctcaccaatcatattcgtgacaccctccccaacttcagaaataagctacaagggcagctgctttccatagagcacgaggtggaagcctataagaactttaagccagaggatcctaccagaaaaactaaggcattactgcaaatggtgcagcagtttgcagtggattttgagaaacggattgaagggtcaggtgaccaggtcgacaccctcgaactgtctggaggcgcaaaaatcaacaggatcttccacgagcgcttccccttcgagatcgtcaaaatggaatttaatgaaaaagagcttcggagggagatctcatatgcaatcaaaaacattcacggcatacgaaccgggctatttacaccggacatggccttcgaagcaattgtcaagaaacagatagtgaaactgaagggaccatccttaaaaagtgtcgacctggtcatccaggagttaatcaacactgtgaaaaaatgcaccaaaaagctggccaacttccctcgcctttgcgaggagaccgaaaggatcgtagccaaccacatccgcgagcgagagggaaagactaaagaccaggtactcctcctgatcgacatccaggtcagttatattaacacaaaccacgaggatttcattggttttgctaacgctcagcagagatccagccaggtacacaaaaagactactgttggaaatcaagtaatcaggaaaggctggctcaccataagtaacatcgggataatgaaaggggggtcgaaaggatattggtttgtcttgacagcagaatccctgagttggtataaggacgatgaggagaaagaaaaaaagtatatgttgcctttggacaacctgaaggtcagggacgtggagaagtcatttatgtcaagtaagcatatctttgctctcttcaacaccgagcagcgcaacgtttataaagattaccggttcttagagcttgcctgcgacagccaggaggatgtggactcttggaaggccagcctgctgcgggccggggtctatccagataagagtgtggccgagaatgacgaaaatggccaggcggagaacttcagtatggacccgcaactagagcgccaggtggaaacaatcagaaatcttgtcgacagttacatgtctatcattaacaaatgtataagggacctgatccccaagaccattatgcatctcatgattaacaatgtgaaggattttatcaattcagagctgctcgcgcaactatacagctctgaagaccagaatactctgatggaggagtccgccgagcaggctcagagaagggacgaaatgttgaggatgtatcaggcactgaaagaagcccttgggataattggagatatctcaactgctactgtatccacaccagctcccccccccgtcgacgattcgtggatccaacacagccgaagatcaccacccccatcacctaccacacaacggcggccaactctgtccgccccactagctagacctacgagcggcagggggcccgccccagcaatcccttcacctggacctcacagtggcgcaccacctgtgccatttcgtccgggcccgttaccgcctttccctagttctagtgattcctttggagccccccctcaggtccccagtcggcctaccagggcccctccctccgtgccctccaggcggcccccccccagccctacacgcccaacaatcatcaggccactggagtcatcccttctggactag

SEQ ID NO: 15161 - DNA, 1761 bp, synthetic construct
  source 1..1761: mol_type = other DNA; note = Synthetic coding sequence
tccgaatccctctcatccgccgtgttcgtggaaggcctgaagcggcagggcgggtgcgcgcgcttagaggaggcatgcttgtcggaggccggcgaggacctcacaggagtgagattttcccttccaggcaaaaacttcccctgcggttcttcttcttcgtcctcccgaagccggaactcctcctctagcaatagtagctccagctcctctacgacaacgaccactacatcatccagtggggctcaggacagaatgcctgtactcgagcggtatttccatcccgccgagctaggtcggcggtggaccggacctgaaggggtcctgcctagttctcccggatccagacctggttgtcagcaaggacccttaccatgggatctacccgagatgatccggatggtcaagttagtgtggaagtccaagtctgaacttcaagccaccaagcaaagggggattctggacaatgaagacgcgttgagatctttccctggcgatatacgtctgcgagggcagaccggggtgcgcgccgaacggcggggctcatacccctttatcgacttccgtctgcttaatagtacgacatattcaggggaaattggcactaagaagaaggtcaaacggctcttgagcttccaaaggtacttccacgcctctcggttgctgagaggcattattccacaagccccactgcacctccttgatgaagattatcttggccaggcaagacatatgttgagcaaagtgggtatgtgggatttcgatatttttctgttcgatcgcttgaccaatgggaatagtttagtcacactgttgtgccacctttttaacacccacggtctgatccaccactttaaattggacatggtaaccctccataggtttctggtgatggtgcaggaagattaccacagccaaaatccctaccataatgcagtgcacgctgctgacgtcacccaggccatgcattgttatctgaaggaacccaaactggcgtcatttctcactcccctggacatcatgctgggcctgctcgcagcggctgctcatgatgttgatcacccgggagtcaaccagccatttttaattaaaaccaatcaccacttggctaatctttatcagaacatgagtgtactggaaaatcatcattggcgctccaccataggaatgctgcgtgagtcccgtctgctggcccatcttccaaaggagatgacacaagacatcgaacaacagcttgggtcattgattttggcaacagacattaatcggcagaatgagttcctgacccgtttgaaggcacacctacataacaaggatctgagactggaagacgcccaggaccgccactttatgttgcagatcgcgctgaaatgcgcagacatttgtaatccttgccgtatctgggagatgtcaaaacagtggtctgagcgtgtgtgtgaggaattctacaggcagggcgagctggaacaaaaatttgagctggagattagccccctttgcaaccagcagaaggattcaattccttccattcaaatcggcttcatgtcatatatcgttgagcctctctttagggaatgggctcattttactgggaattcgactctgtctgaaaacatgctcgggcacctggcacacaataaggcacaatggaaatcactgttgccacgacagcacagatcccgcgggagctctggctctggtccagaccacgatcatgccgggcagggaacagagagcgaagagcaagagggcgatagcccatag

SEQ ID NO: 15162 - DNA, 525 bp, synthetic construct
  source 1..525: mol_type = other DNA; note = Synthetic coding sequence
atgacgacgaaaaatctggagactaaagtcacagtaacctcctcccccatccgaggcgcgggagatggaatggaaaccgaagagccacccaaatcggtcgaagtgacctccggggtgcagtcccggaagcaccattctcttcaaagtccctggaagaaagctgttcctagtgaatcacccggggtgctgcagctaggtaaaatgcttactgagaaggcaatggaagtcaaggccgtacgaatcctggttcctaaagccgctattactcacgacattccaaataagaacaccaaggtgaagagcctcggccaccacaaaggggaatttctgggtcaaagtgagggcgtcatcgaacccaacaaggagctaagtgaggtgaagaacgttctggaaaagttgaagaattctgaacgccgacttctgcaggataaagaaggcctgagcaaccagctaagagtgcaaactgaagtcaggcgggccctaatagacaaaatgtcgacaactctttatgtctggacattttag

SEQ ID NO: 15163 - DNA, 1203 bp, synthetic construct
  source 1..1203: mol_type = other DNA; note = Synthetic coding sequence
atgacgactaagaatctggagaccaaggttactgtgacttcctctccgatccggggcgctggcgacggcatggagaccgaagaaccgcctaaaagtgtggaggtcacaagtggcgtgcagtctcgaaaacatcattcccttcagtcaccatggaaaaaggctgttccttctgaatcccccggggtcctgcagctgggcaagatgttgacagaaaaggccatggaagtgaaagctgtgaggatattggtcccaaaggcagcaatcactcacgacattcctaataagaatacaaaggtcaaatctctcggccatcataagggggaattcctcgggcagtccgaaggggtgattgaacctaacaaagagctttcggaagtcaagaatgtcctggagaagctgaaaaacagcgagcgcagactgctgcaggataaggaaggactctctaaccagctgcgggtgcagacagaagtcaaccgcgagctgaaaaagctcctcgtcgcttctgtgggcgacgatctccagtaccacttcgagcggctggcacgggagaagaatcagctgatcctggaaaacgaagccttgggccgcaacacagcccagctctccgagcagctggagagaatgagcatccaatgtgacgtctggcgcagtaagttcctagcaagtcgcgtgatggccgacgaactgaccaattcccgcgctgccttgcaaagacaaaacagggacgcccacggagctatccaggatctgctttctgaacgggagcagtttcggcaagagatgatcgcgactcagaagttgctggaagagttgttggtatccctgcagtgggggagggagcagacctacagtccgtccgtgcaaccccacagcaccgcggagctcgcactgacaaaccacaagttggccaaagccgttaattctcacctgctgggaaacgtaggcatcaacaaccagaaaaagatcccaagtactgtggaattctgttccacgcctgctgagaagatggctgaaactgtcctgagaattctggaccctgttacctgcaaggagagctcgccagataacccgtttttcgagtcatcccctactaccctcctagcgacaaagaagaatatcggccgcttccacccctataccaggtatgagaatataaccttcaattgctgcaatcactgtagaggcgaactgatagcattatag

SEQ ID NO: 15164 - DNA, 276 bp, synthetic construct
  source 1..276: mol_type = other DNA; note = Synthetic coding sequence
atggacgctgacagcgacgtcgcgctggacattctgattacgaatgttgtttgtgtcttccggacacgttgccatcttaacctccggaagatcgccttggagggggccaatgtgatctacaaaagggacgtgggaaaggtgctgatgaaactccgtaagcccagaattaccgccaccatctggagctccgggaaaattatatgtactggggctacctccgaagaggaggccaagttcggcgcacgtcgcttggcccgatccctgcagaaactgtag

SEQ ID NO: 15165 - DNA, 492 bp, synthetic construct
  source 1..492: mol_type = other DNA; note = Synthetic coding sequence
atggatgcggacagtgacgtagctttagacattctgattaccaacgtcgtgtgcgtgttccgtactcggtgtcacctgaatttaagaaaaattgccctggagggtgccaacgttatatacaaaagggacgttgggaaagtgcttatgaaattgagaaagccacggataactgcaaccatctggagtagtggcaagattatttgtacaggtgccaccagcgaggaggaggcaaagttcggtgcacggagactggctagatcacttcaaaaattgggattccaagtgatatttacggattttaaggtcgtgaacgttctcgcagtgtgcaacatgccttttgagatcaggctacccgagttcacaaagaataaccgccctcatgcgagctacgaaccagagttgcatcctgccgtttgttacagaatcaaaagtctgagagcaaccctccagatctttagtactgggagcatcactgtgactggcattctgtag

SEQ ID NO: 15166 - DNA, 1023 bp, synthetic construct
  source 1..1023: mol_type = other DNA; note = Synthetic coding sequence
atgctggaagctcccgggcctagtgacggatgcgaactctccaacccaagcgcatcgagggtttcttgtgcagggcagatgctggaagtgcaaccaggcctgtatttcgggggagcggccgccgtggcggaacctgatcacctccgggaagccggcataaccgcagtgctgactgttgatagtgaggaacctagttttaaagccggccctggcgtggaggacttgtggcgcttgtttgtgccagccctcgacaaacccgagaccgatcttttgagtcatctggataggtgtgttgcattcattggacaggctagagccgagggtagagcagtccttgtgcactgtcacgccggcgtctcacgttccgtggccattataactgctttcctgatgaaaacggaccagctgccgtttgaaaaggcatatgaaaagctgcagattttaaaacctgaggctaagatgaatgaaggatttgagtggcaattgaaactgtatcaggctatggggtacgaagtagatactagtagcgccatctacaagcaataccgcctacagaaagtgaccgaaaaatatcctgaactgcagaaccttccccaggagctttttgctgtggatccaaccacagtatcacaaggcctcaaggatgaagtcctttacaagtgtagaaaatgcagaaggagcctcttccgtagcagctctatccttgaccaccgggagggcagcggcccaatagccttcgcgcataagcgaatgactccctcatctatgctgaccaccgggcggcaagcacagtgcacaagttatttcattgaacctgtgcagtggatggagtctgccctcctgggtgtcatggatggacagcttctatgccccaaatgttcagccaaactgggcagctttaactggtatggcgagcagtgttcctgtggccgatggattacccccgccttccagatacataagaatcgagtggacgaaatgaaaattctgccagtgctgggctctcagaccggaaaaatttag

SEQ ID NO: 15167 - DNA, 807 bp, synthetic construct
  source 1..807: mol_type = other DNA; note = Synthetic coding sequence
atgtggccactgacggctctcctgctcctagccactctggagaaaccaatcttgtccctgcatcctccatggaccaccatatttaagggggagcgagtgactctgaagtgtgacggataccatcccctccttctcgaactgcaacccataagtaccctgtggtacctgggtcacctcttattgcctagtcacaagaagtctattgaggtacagacgcccggcgtgtatagatgtcaaactagaggcgcaccagtgagtgaccctattcatctctcggtttcaaatgactggctgattctgcaagtcccatacgcgccagtttttgaaggggaacctctggtcctgcggtgccgaggctggtacgacaaggtggtgtataagctgcactactaccacgacggacaggctgttagatacttccacagctctgccaactacactgtgctgcaagccagagcttcggactctggtcggtaccagtgttccgggacgatgcggatcccagtcgagagcgctcctatgttcagcgcaaaggtagccgtgacagttcaagaggcgcgccacgcagccgccgtaagagtcctccaagttcagcccagaggggctcctctcaggttaggtcgtcgcgtccattcacccggagcgcgcggcaggggcgccaggatagtgttggtgcgggggggttacaggcacccacagtgcccggaaactcagtctgtggccgcggctccaggcgctggttttagccccggccccggcctgcaccaccgaccaagctctatgggcagatccctggggtcttggtag

SEQ ID NO: 15168 - DNA, 936 bp, synthetic construct
  source 1..936: mol_type = other DNA; note = Synthetic coding sequence
atgtggccgctcacagccctgttgctcctcgctaccttggagaaacctatactgtctctccatcctccatggacgacaatcttcaaaggcgaaagggttacacttaaatgtgacggatatcaccctcttctgctggagctacagcccatcagcacactttggtatcttggacatctgttattaccctcacacaaaaagagcatcgaggtccagactcctggcgtgtacaggtgccagacccgcggggcccctgttagcgatccaattcatctgtctgtctctaacgactggctcattcttcaagtaccctacgctcccgtgttcgaaggcgagccacttgtgctgaggtgtaggggatggtacgacaaagtggtctacaaactccactactatcacgatggccaggctgtgaggtacttccactcttctgcgaactataccgttctgcaggctcgcgcttcggacagcgggaggtaccaatgttcaggaaccatgagaataccggtcgagtccgcacctatgttctcagccaaggtcgcagtaaccgtccaagcggctcgatgtgctgcctccaccggagcgcctagtacccaaagccgtagtccccgctccaggagtagtaatagaacgggcgcacgacggctgccaccccccgcggtgagcggcaacgccgtgagaggctgttcttcgcgtggtcgggtgctgccttggacacgcccacctcctccaccccagttacatggaccacagccatggctgctggtgatcgggagattcccaagcgagtcacctaggtgtcctgatagatcacggtggtcacctccgtccggcactccgcctccccctggttgttcctctagaagagccgccccacggttgcgggggcatcctccagctctgcggcggcgtccatggaataaccgacttgaaccgtag

SEQ ID NO: 15169 - DNA, 957 bp, synthetic construct
  source 1..957: mol_type = other DNA; note = Synthetic coding sequence
atgtggcctctcaccgccctgcttctattggtcccttcaagtggtcaggcggccaccctggaaaagccgatcctgagtttacacccgccgtggacgaccattttcaagggtgagagagtaaccctgaagtgtgatgggtaccaccccctgttactggagttgcaacctatctcaaccctgtggtacctcgggcacctgctcttaccttcacacaagaagagtatcgaagtgcaaactcctggagtgtataggtgtcagactagaggtgctcctgtgtccgatccaatacacttgtcagtgtcgaacgattggctcatcctgcaggtaccgtatgccccggtttttgagggtgagcctctcgtccttaggtgccgcggatggtatgataaggtggtttacaagctgcactattaccacgatggacaggccgtgcgttacttccactcttccgcaaactacacagtgctgcaggccagagcctcggacagcggcagataccagtgcagcggaactatgcgcattcccgtagagtcagcccctatgttctctgcgaaagttgcagtgacagtgcaggcagcccgctgcgccgccagtacaggcgctcctagcacacaatctagatcaccccgtagccggtcgagcaatagaaccggggcgcggcgtttgcctcctcccgccgtaagcggtaatgctgtccgaggttgcagtagccgaggccgcgtgctcccttggaccaggcccccccccccacctcagctacacggaccccagccttggctactggttatcggccgatttccctctgaatctccccggtgccccgaccgctctcggtggtccccaccctccgggaccccacccccacctggctgtagtagtaggagggctgctccaagacttagagggcaccccccggctctgcgaagaagaccctggaataaccgccttgaaccttag

SEQ ID NO: 15170 - DNA, 1281 bp, synthetic construct
  source 1..1281: mol_type = other DNA; note = Synthetic coding sequence
atgtggccactgaccgccctcttactgctcgtgccaagttcaggtcaagctgcaacccttgaaaagcctattctgagcttacatcctccttggactaccatcttcaaaggagagcgcgtaactcttaagtgcgatggttatcatccccttctgctggaactgcagccgatcagcaccctatggtaccttggacacctcctgctaccatctcacaagaaatcgatcgaggtgcagaccccaggcgtatacaggtgccagacaagaggcgcacctgtctccgaccccatacacttgagtgtttctaacgactggcttatcttgcaagtaccttacgctcccgtatttgagggggaacccttggtgctgagatgcagaggctggtatgacaaggttgtctacaaattgcactattatcatgatggtcaagccgtaagatactttcattctagcgcgaactacacagtgttgcaggcccgggctagcgacagtgggaggtaccagtgctctggtaccatgcgtatccctgtggagtccgcacccatgttctcggcaaaagtcgcagtgactgtacaggaactgtttcgagcacctgtgctgcgagtcatgggacctcgagaggctcgcggcgccgccctaggtggggtagtcctacgctgcgacacgaggttacatccgcagaagcgagacaccccacttcagtttgcgttctacaaatatagtagagcggtaagacgttttgactggggcgcagaatacaccgtccctgaaccagaggttgaggaactggaaagctactggtgtgaagccgcaacagccacgcgctcagtgcgcaaacgttccccctggcttcagctgccgggcccaggctcgccactggacccggcgagcactactgcacccgccccatgggccgcggcattggcccctggcaatagacccctgagctttcgaaagccccctgtgtcccgctcagtgcctctggttacttcagtcaggaatacaaccagcacgggtctccaatttcccgctagcggggccccaacggccggccccccagcctgcgctcccccgactcctttggagcagtcagcaggggccctaaaacctgatgttgatctcctactgcgagagatgcagctcttgaagggactgctgtcacgagttgtgcttgagctaaaagaaccacaggctctcagagagttgcggggcaccccggagacccctacttcacacttcgccgtctcccctggaactccagagaccacaccggtcgagagttag

SEQ ID NO: 15171 - DNA, 369 bp, synthetic construct
  source 1..369: mol_type = other DNA; note = Synthetic coding sequence
atggcaggtggttgtcgcgctcccagctcggcgcccacagtcagcttgccagaattgaggagcttactggcaagtggtcgggcaaggctcttcgacgtgcgctcacgagaggaggccgccgcgggcaccatccccggggcactcaacatccccgtttcagagctcgagtccgcattgcagatggagcctgctgccttccaagccctgtactcagccgaaaagccgaaacttgaagacgaacatttagtattcttttgccagatgggcaaaaggggccttcaagcaactcagctggcacgcagtttgggatacaccggggcacggaactatgcaggggcttacagggagtggctggaaaaggaaagctag

SEQ ID NO: 15172 - DNA, 225 bp, synthetic construct
  source 1..225: mol_type = other DNA; note = Synthetic coding sequence
atggcaggggttagtgagttggagtccgccctgcaaatggagcccgctgcctttcaagcactctatagcgctgagaagccaaagctggaggacgaacatctagtgtttttttgccaaatgggaaagcgggggttacaagctacccagctcgcccgatccttaggctataccggcgcccgtaactatgctggagcctatcgcgagtggctcgaaaaggaatcttag

SEQ ID NO: 15173 - DNA, 1794 bp, synthetic construct
  source 1..1794: mol_type = other DNA; note = Synthetic coding sequence
atgtcttccaaggggagtagcaccgacggccgaaccgacttggcgaacggaagcctgagttcaagtcccgaagaaatgtccggggccgaagagggacgggaaacttcatctggtatcgaagtggaagcaagtgatctgtcgctgtcgctcacaggagatgatggcgggcctaataggacctctactgaaagtcggggcaccgacacagaaagtagtggagaggataaggactccgattctatggaagatactggccactattcaattaacgatgagaacagagtgcatgataggtccgaggaggaggaagaagaagaggaggaagaggaagaagagcaacctcggagacgcgtccagcggaagcgggccaaccgtgatcaggacagctccgacgatgagcgggccttagaagattgggtgagctctgagacgagcgcgcttcccaggccaaggtggcaagcgcttcccgccttacgcgagcgcgagttaggcagctcagcacgatttgtgtacgaggcctgcggcgccagggtcttcgtgcagagatttcgccttcaacacggcctcgagggccatacagggtgcgtgaatacgcttcactttaatcaacgggggacgtggttagctagtgggagcgatgatctcaaggtggttgtgtgggattgggtgagaaggcagccggtgctggactttgaaagcggccataagtcaaacgtttttcaggccaaattcctgcccaatagcggcgactccaccttagccatgtgcgctagggatggccaggttcgagtggccgagctgtcagcaacccaatgttgtaagaacactaagcgagttgctcagcacaaaggcgcctcccacaagctggcgctggaacctgattccccctgtacatttctatctgcaggcgaagatgcggtcgtgttcaccatcgacctgagacaggacagacctgccagcaaacttgtagtcactaaggaaaaggagaaaaaagtagggctgtacaccatctacgtgaatcctgctaatactcatcagtttgctgtcggcgggagggaccagttcgtgaggatttacgatcaacgaaaaatcgatgaaaacgagaataacggcgtcttgaagaaattctgcccccatcatcttgtgaactcggagtcgaaggctaatatcacctgcttggtttactctcacgatggtacagaattgctggcctcctacaatgatgaagacatttatttatttaactcttcccatagcgacggagcacagtacgtcaagcgttataaaggccaccgcaacaacgcgactgtcaaaggcgtgaacttctatggaccgaagagcgagttcgtggtctctggatctgactgcggtcatatctttctgtgggagaaatcttcctgtcagataattcagtttatggagggagataaagggggggtcgtgaattgcctggagcctcacccccacctgcctgtcctggctacaagcggcttggaccatgacgtgaagatctgggcgcctacggccgaggcctctaccgagcttactggcctgaaggacgtgatcaaaaagaacaagcgagaaagggatgaggattctctccaccagactgacctctttgacagccatatgttatggttcctaatgcaccatttacgccaaaggcggcatcatagacggtggcgggaacccggggtcggtgccactgatgctgacagcgatgagagtccttcaagctcagatacatcggatgaagaagagggtcccgacagagtacagtgcatgccatcttag

SEQ ID NO: 15174 - DNA, 1794 bp, synthetic construct
  source 1..1794: mol_type = other DNA; note = Synthetic coding sequence
atgtcaagtaagggtagcagtacagatggcagaactgaccttgctaatggaagcttgagctctagtcccgaggagatgtcaggggcagaggaaggaagggagacctcttctggcatcgaggttgaagcctctgacctgagcttatccctcacaggggacgatgggggaccgaaccggaccagtaccgagtctcgcgggaccgacacagagagctccggcgaagataaagattccgacagtatggaggatacggggcactactctattaacgatgagaacagagttcacgaccgtagcgaggaggaggaggaggaggaagaagaggaggaagaggaacaacctcggagacgtgtgcaaagaaagcgggccaatcgagatcaggattcatctgacgacgaacgtgcactggaagattgggtctcttcagaaacctctgctctccccaggccgcggtggcaggccttacccgcccttcgtgaacgtgagctggggtcttccgcgcggttcgtctatgaggcctgcggagccagagtgttcgtgcagagattccgcctccagcacgggttagagggtcatactggctgtgtcaacacccttcactttaatcagcgaggcacttggctggcaagcggttctgacgatctcaaagtcgtggtatgggattgggtgcgtcgccaacccgtcctggacttcgagtcaggacacaagtctaatgtgtttcaggccaagttcctgccgaattccggagatagcaccctcgcaatgtgcgcacgagacgggcaagttcgcgtggcggagctgagtgcaacccagtgctgcaaaaataccaagagagttgctcaacacaagggggccagtcataagctcgctctggagccagatagcccttgcacattcctttcagccggcgaagatgcggtcgttttcactatcgatcttcggcaagacaggccggctagcaagttagtggtcactaaggaaaaagagaagaaggtaggactttacaccatatacgtgaacccagccaatacgcatcagttcgctgttggcgggcgggaccaattcgtgagaatctacgatcaacgaaagatcgatgaaaatgagaacaatggagtcttgaagaagttttgtcctcaccatcttgtcaactccgagagcaaagctaacatcacctgtctcgtgtattctcatgacggtaccgaactgctggccagctacaacgatgaagatatttatttgtttaacagcagccacagcgatggggcacagtacgtgaagagatacaaagggcaccggaacaacgcgacagtcaagggcgtcaatttctatggcccgaagtccgagtttgtcgtatctgggtccgactgcgggcatatctttctgtgggagaagagctcatgtcagataatccagtttatggagggcgataagggcggagtagtcaattgtttagagcctcacccccatctgcccgtgcttgcgacatccggccttgatcatgacgtcaaaatttgggcccctaccgcggaggcctcgaccgaactgactggactgaaagatgttatcaagaaaaacaagcgagagcgcgacgaggatagtcttcaccagacggacttgtttgattcccacatgctgtggtttctgatgcatcacctccggcagcgacgccatcaccggcgatggagagagcctggcgtcggggcaaccgatgctgactctgacgagtcccctagtagtagcgatacatcagacgaagaggaaggccctgatagggtacagtgtatgccatcttag

SEQ ID NO: 15175 - DNA, 453 bp, synthetic construct
  source 1..453: mol_type = other DNA; note = Synthetic coding sequence
atgggcgtgcaaccaccgaattttagctgggtgctccctggtcgcttggctggtctcgctctgcctcggctgcccgcgcactatcagttcctgctggatttaggcgtacggcatctggtgagccttaccgaacgcggccctcctcactcagactcctgccctggtttaactctgcacaggctgcgcatccctgacttttgtcctcccgcaccagatcagatcgaccggtttgtgcagatagtcgacgaggcaaacgcacgaggcgaagccgtgggagttcattgtgctctgggcttcggccgcactggcactatgctcgcctgttatttggtgaaggagagaggcctggcagcaggggatgctattgcggaaattcggcgactaagacctggctctatagaaacatacgagcaagagaaggccgtcttccagttctaccagcggacaaagtag

SEQ ID NO: 15176 - DNA, 453 bp, synthetic construct
  source 1..453: mol_type = other DNA; note = Synthetic coding sequence
atgggggtgcagccaccgaattttagttgggtcctccctgggaggctggcagggctggcattgcccagattacccgcacattaccagtttcttctggaccttggtgtaaggcacctggtctctttgacggaaagggggccaccgcactctgactcctgtcctggtctgactctccaccgcctgcgcatccccgacttttgtccaccagccccagaccagattgacagattcgttcaaattgtggatgaggcaaatgcacgcggggaagcagtgggggtgcattgcgcgcttggctttgggcgtactggaacaatgctggcatgctatctcgtcaaggagaggggcttggccgctggggatgcaatcgcagagatccgccgccttcggcctggatcaattgagacctacgaacaagagaaagcagttttccagttctatcagagaacaaagtag

SEQ ID NO: 15177 - DNA, 453 bp, synthetic construct
  source 1..453: mol_type = other DNA; note = Synthetic coding sequence
atgggggtgcagccccccaacttcagctgggtcctgcctggcagactggctgggctggcgcttccccgcttacctgcccattatcaattcctgcttgatcttggcgtacgccacctcgtatcccttacggagcgtggcccaccacactctgactcatgtcctggactgacgcttcataggctgcgcataccagatttctgcccgccggcaccggaccaaattgaccgattcgttcaaattgtggatgaggccaacgcaagaggagaagctgtgggtgtgcattgcgcgctgggcttcggacggacaggcacaatgcttgcctgctacctggtgaaggaacgcggcctggcagccggggatgctattgccgaaatcaggagactgcgccccggttcgattgagacatatgagcaagaaaaggctgtgtttcagttttatcagcgcacgaagtag

SEQ ID NO: 15178 - DNA, 4866 bp, synthetic construct
  source 1..4866: mol_type = other DNA; note = Synthetic coding sequence
atggaggggtgcatgggggaagaatctttccaaatgtgggaattgaaccgcaggctcgaggcctaccttgcccgcgtcaaggcgttagaggagcagaacgaactgctgagcgccgaacttgggggtctgcgtgcacagtccgctgatacgagttggcgggctcatgcagatgacgaattagcagccttgagggctttagtcgatcagaggtggcgggaaaagcacgcagcagaagtagcacgtgataacttggcggaagaactagagggagtagccgggcggtgtcagcagttgcggctggctagagaaaggacaacggaggaagttgctaggaaccggcgcgctgtcgaagcggagaaatgtgctcgcgcctggctttcctcacaggtggcagagctggagcgagaactggaagcactccgcgtcgcgcacgaggaggaacgggtagggctgaatgcacaggccgcctgtgcccctaggtgtcccgctcctcctcgcgggccacccgcccccgcgcccgaggtcgaagaactggcccgccgtctcggtgaggcctggcgcggcgcggtgagagggtatcaggaaagggtggcacatatggaaacatcgttaggccaagcccgtgaacgcctcggtcgtgcagtgcagggggcccgtgaggggaggctggaactgcagcaactccaggcggaaagaggaggcctacttgaaagaagggccgccctggaacagcggctggaaggtcgctggcaggagcgacttagagcaacagagaagtttcagctggcagttgaagcattagagcaggagaagcaaggtcttcaatcgcagattgctcaggttctcgaggggcggcaacagttggcacacctgaagatgagcctgagtctcgaggtggccacctaccgcacactgttggaagcggagaactctcggctgcaaactccgggcggaggaagcaagaccagcctgagcttccaagatccaaagttagaacttcagtttcctcgaacacctgaaggccgcagactcggtagccttctccccgtgttgagcccaaccagtcttcctagccctctccctgccacgctcgagacacccgtgcccgccttcttgaaaaatcaagagttcctccaagctaggaccccaacattagcctccaccccaatccccccaactccccaggcgccctctcccgcggtggatgccgagatccgagcccaggatgcaccgctctctctcttgcagactcagggaggccgcaaacaggccccggaacccctcagggcagaagcccgagtcgccattcccgcctctgtgctccctggaccggaggaacccggagggcagagacaggaagcttcaacaggccagtctccagaggaccacgcctcacttgccccgcccctatcacctgaccactcctctctcgaagccaaggacggtgaaagcggcgggtcccgagtgttttctatctgccggggcgagggagaggggcagatttggggtctcgtggagaaagagacagccattgagggtaaagttgtctcatcactacagcaggagatttgggaggaagaggaccttaaccgcaaagagattcaggattcacaggtaccactggaaaaagaaacactgaaaagtctcggagaagagattcaagagtctttgaaaaccctggaaaaccaatcccacgagaccctagaacgggaaaatcaggagtgcccaaggagcctcgaggaggatctagagaccctgaagagccttgagaaagaaaacaaagaactgctgaaagatgtcgaagtggtccgtccccttgaaaaagaggctgttggtcagctgaagccgacaggcaaggaggacactcaaaccctgcagagtttacaaaaagagaaccaggagcttatgaaatcacttgagggaaacctggaaaccttcctgtttccaggaacggagaatcaggaattagtttcatctctgcaggagaatctcgagtcactgaccgctctcgagaaggagaatcaggagcccctccgatcccctgaggtcggcgacgaagaggcattacggccactcacaaaggagaaccaggagccgctccggtccctcgaggacgaaaacaaagaggctttccgtagtctggagaaagaaaatcaggaaccactgaagacccttgaggaagaggatcaaagcatcgttcgtccactggaaactgagaaccataaatctctgcgctcactggaagagcaagatcaggagaccctcagaacactcgaaaaggaaacacaacagagacggcggtccctgggcgaacaggaccaaatgacactgagaccaccagagaaggtcgacctggagcccctgaaatcactcgatcaggagatcgctcggccgctggagaacgaaaatcaggaatttctcaaatcactgaaagaagagtccgtggaggctgtgaagtcacttgagactgagatcctggagagcctcaagtcggcaggtcaggaaaatctagaaacccttaagtctcccgaaacccaggccccactttggacgcccgaggaaatcaatcagggggcaatgaaccctctggagaaggaaatccaagaacccctcgagtcggtagaagtcaaccaggaaactttcaggctgttggaagaggagaatcaggaaagcctccgatctctgggggcctggaatttggagaacctgcgcagccctgaagaggttgacaaggagtcacagcggaacctagaggaagaagagaacctgggaaagggggagtatcaggagtcccttaggtcgctggaggaggagggccaggaattgccccagagcgccgacgtccagaggtgggaggataccgtcgaaaaagaccaggaactggcccaggagtctcctcccgggatggccggcgtagagaatgaggatgaggctgaacttaatctgagggagcaggacggttttaccggcaaagaggaagtggtcgaacagggtgagctgaatgcaacagaagaagtttggatccccggggagggccatcccgaaagcccagagccaaaagagcagagaggtcttgtggagggcgcttccgtcaagggcggcgccgagggccttcaagaccctgaaggacagtcccagcaggtgggggcaccaggactgcaggccccacagggactgcccgaagcaatcgagcccttagtcgaggacgatgtggcaccaggaggggaccaggcctctcctgaggtgatgttgggatccgaacccgctatgggcgaatccgccgcaggagctgaaccagggcctggacagggcgtggggggactgggcgatccagggcatctgactcgcgaagaagtgatggaacctcccctggaggaggaaagtctggaggctaagcgcgtccaaggactagaagggcctcggaaggacctagaagaggctggcggactgggaacagagttttccgagcttccagggaagtcacgggatccatgggagcctccccgggaggggcgtgaggaatccgaagccgaggcccccaggggcgccgaggaggcattccctgctgaaaccctaggtcataccggaagcgatgcaccttctccttggcctctgggctctgaggaagccgaggaggatgtgcccccggtactagtttctcccagccccacctacaccccaatactggaggatgctccaggcccacaaccacaggcagagggtagccaggaagcttcatggggagtacagggtagggccgaggcgctcgggaaggtggagtcagagcaggaggagcttggctctggtgaaattccagagggcccgcaggaggagggggaagaatcaagggaggaatctgaagaggacgaactcggggaaactctacctgatagcacccctctgggcttctacctgcgctcccccactagtcctcgttgggatcccacaggtgagcagaggccaccccctcagggcgagaccggtaaagaaggatgggatccggctgtgcttgcttcagaaggattggaggcacccccttccgagaaagaagaaggggaagaaggcgaagaggagtgcgggcgagattcggacctgtctgaggagtttgaggacctcggcacagaggccccattcctgccgggcgtgccaggcgaggtggccgaacccctgggacaggtgccccagctcctcctggacccagcggcatgggaccgcgatggcgagtctgatgggttcgccgacgaggaggaatcaggcgaagagggcgaggaagatcaagaagagggcagagaacccggtgccgggaggtgggggcctgggtcatccgttggctctctgcaggccctttcatccagtcagagaggtgagttcttggaatccgattctgtctcagtgtctgtaccctgggatgatagtctgagaggagctgtcgcaggggctccgaaaacagccctcgagaccgaatcacaggactctgctgaaccttcaggcagcgaagaggagtccgatccggtctccctggaaagggaggacaaagtgcctggtcccctggaaatcccatcaggcatggaagatgcagggccaggtgctgacatcatcggtgtgaatggccagggaccaaacttggaaggcaaatcacagcacgttaatggcggggtaatgaacggtctggagcagagtgaggaggttggccagggtatgccattggtcagcgagggcgacaggggatccccctttcaagaggaagaggggagtgctctgaaaacttcctgggccggagctcctgtgcaccttgggcagggccagttcttaaaattcacacagcgcgagggcgatcgtgaaagttggtcttccggggaagattag

SEQ ID NO: 15179 - DNA, 378 bp, synthetic construct
  source 1..378: mol_type = other DNA; note = Synthetic coding sequence
atggagcgccatacatctcatcccaatcggaaggttcctgccaaagaggaggcaaatgccgtacctctctgtcgtgctaagcctagccccagctacatcaatctccaggcctcctccccacctgctacctttctgaacatccaaactactaagctcccctcagttgaccataagcctaaggagtgcttaggcctcttggaatgcatgtacgcaaatttgcagctgcagactcaactcgcgcagcagcaaatggcagtgttggagcacctgcaggcatccgtgacacagctggctcccggcagggggtccaataattctagcctccccgctttgtctccaaaccccctgcttaatcatctccctcagttctctaaatag

SEQ ID NO: 15180 - DNA, 378 bp, synthetic construct
  source 1..378: mol_type = other DNA; note = Synthetic coding sequence
atggaaaggcatacctctcacccgaaccgaaaagtgccagccaaggaggaggcgaacgccgtccccttgtgcagggctaaaccatccccttcttatataaatctccaggctagctcccctcccgccacttttcttaatattcagacaaccaaactgcctagcgttgatcacaaaccaaaagagtgtcttggcttgttggaatgcatgtatgcaaatctgcagctgcaaacccaactggcacagcaacaaatggcagttttagagcacttgcaggcatccgtgacacagttggcccctggccgcggctccaataattcttctcttccagctctgtctcccaaccctcttctcaaccatttaccccagttttccaaatag

SEQ ID NO: 15181 - DNA, 378 bp, synthetic construct
  source 1..378: mol_type = other DNA; note = Synthetic coding sequence
atggaaaggcacacttcccaccctaacaggaaagttccagccaaggaggaagctaatgccgtgcctctgtgtcgtgcgaaaccgtcaccaagctacatcaacttacaagcatcaagccctccagccacattcctgaacatacagaccacaaagctgccctctgtagatcataaacccaaggaatgcctcggcctgctggagtgcatgtacgcaaatttgcagcttcagacgcagctggcacagcaacagatggctgttttggagcatctacaagcttccgttacccagcttgccccagggcggggctccaataattccagcctccctgcactttcgcccaatcccctcctgaatcacctaccacagttctccaaatag

SEQ ID NO: 15182 - DNA, 378 bp, synthetic construct
  source 1..378: mol_type = other DNA; note = Synthetic coding sequence
atggaaagacatacctcccaccccaaccgaaaggtgcccgcaaaggaagaagcaaatgcagtcccactgtgccgtgctaaaccatctccaagctatatcaatctgcaagcttcctctccgcctgcaaccttcctgaacatccagacgactaagcttccttccgtggatcataaacccaaggagtgcctggggttactggaatgcatgtatgccaatttacaactgcagacccagctcgctcagcaacagatggccgtgttggagcacctccaggcgtcagtgacacagcttgccccgggtagggggtccaataatagctctcttcccgcattgtcccccaatcccctgttaaatcatctgccccagttctcgaagtag

SEQ ID NO: 15183 - DNA, 378 bp, synthetic construct
  source 1..378: mol_type = other DNA; note = Synthetic coding sequence
atggaaaggcacacctcacaccctaacagaaaagttccagccaaggaggaagcgaacgccgtgccactttgtcgggctaaacctagccccagctacatcaacctgcaggcaagttctccgccggccaccttcctcaatatccagacgactaaattaccctcagtggaccataaacctaaggagtgtctcggtcttctcgagtgtatgtacgccaatctgcagctccagacccagctggcacagcaacagatggccgtgctagaacacctccaggcgtcagtcacacaactggccccagggcggggctccaataactctagtctcccagcactatctcccaatcccctgctcaatcatctccctcagttcagcaagtag

SEQ ID NO: 15184 - DNA, 624 bp, synthetic construct
  source 1..624: mol_type = other DNA; note = Synthetic coding sequence
atggccgaggcctcctccgcaaatcttggctctggctgtgaggagaaaagacacgagggtagtagctcagagagcgtgcctccgggcacaacaattagcagagtgaagctgttggatacaatggttgataccttcctccagaaactggtcgccgcgggtagcagtcctctcctgcactgggatggctccgccggccctcggctacctagcggtggacaaagcgtgaagcaggccttttcttgggcagcgtgcaggctgccccagggaagaaaagaagagattagcgacataaaggaggaggggaatctcgaagcggtcctgaatgctctggataagatcgtggaagagggtaaggttcgtaaggaaccagcatggagaccctcaggaattcctgaaaaagacttacattccgttatggccccttattttttgcagcagcgcgacactctacgccgccatgtgcagaagcaggaagcggagaaccaacagctcgcagacgcggttctcgctggacggcgccaggtagaggagttacagttgcaggtgcaagcgcagcaacaggcttggcaggccctgcaccgggaacagcgggagttggtagcagtgctgagagagcctgagtag

SEQ ID NO: 15185 - DNA, 618 bp, synthetic construct
  source 1..618: mol_type = other DNA; note = Synthetic coding sequence
atggcagaggcctcatccgctaacctgggctccggatgcgaggaaaagagacatgagggctccagttcagagagcgttccgcccgggaccacgattagcagggtcaagctgctagatactatggtggacaccttcctgcagaagctcgtggctgccgggtcctatcagaggtttacggactgctacaagtgcttctaccaactccaacctgcaatgacccaacaaatctacgacaaattcattgcccagctacagaccagcatacgggaagagatttcagacatcaaggaagaaggcaacctggaggctgtactcaatgcgctcgataaaatagtcgaagagggaaaagtcagaaaagagcctgcttggaggccttctggaatcccagaaaaggacctgcactccgtgatggcgccatattttctacagcagcgcgacactcttagaaggcacgttcaaaaacaagaggccgagaaccagcaactagcagacgctgtgttagccggtcgccggcaggtggaagaactgcagctgcaagtgcaggcccagcagcaggcctggcaggccttgcaccgggagcagcgggagctcgtcgctgtcctgagggaacccgaatag

SEQ ID NO: 15186 - DNA, 543 bp, synthetic construct
  source 1..543: mol_type = other DNA; note = Synthetic coding sequence
atggctgaagcatcatccgcaaacctgggctccggttgtgaagaaaagagacatgagggttcctcatcagaatctgttccccccggtaccacgatttcccgcgttaaacttctggataccatggtcgacacttttttgcagaagctcgtggcagccggatcataccaacgttttaccgactgttacaaatgcttctaccagctgcagccagccatgacgcagcagatttacgataaatttatagctcagctccagacctcaatccgtgaggaaattagtgatatcaaagaagaggggaatttagaagccgtgctgaacgctttagataaaatcgtggaagagggaaaagtcagaaaggagccagcatgtaatggcaccccttgcggagccatgtgccggaataggaggccccggacctcttcgtggcagatgccatcttggcagggaggaggccgctggaggtcctgcagttatcgctcaaggccttcgtcccgcccagggcgactgtatactgaaaataggggaagctggctgctgtgttag

SEQ ID NO: 15187 - DNA, 2253 bp, synthetic construct
  source 1..2253: mol_type = other DNA; note = Synthetic coding sequence
atggaggacctattcgaaactttccaggacgaaatggggttcagcaacatggaggacgatggccccgaggaggaagagcgggtggccgaaccccaggctaatttcaatactccccaagcacttcggtttgaagagcttctggctaatctactgaacgaacagcaccagatcgcgaaagagctcttcgaacaactcaaaatgaagaaaccttctgccaaacagcagaaagaggtcgagaaagtcaagccacagtgtaaggaagtgcaccagaccctgatactcgatcccgcccagaggaaacggctgcagcagcaaatgcagcagcacgtgcagttacttacccagattcacttactggcaacctgtaatcccaatctgaaccccgaagcttcctctacacgcatttgtctgaaggagctgggaacttttgcacagtcatcaatcgctctgcatcatcaatacaatcctaagtttcagaccctcttccaaccatgcaatctgatgggcgccatgcagttgatcgaggacttttcaacgcacgtctccattgactgcagccctcacaagaccgttaaaaaaacagctaatgaattcccctgcctcccgaagcaggtcgcatggattctggctacaagtaaggtctttatgtatcccgaactcctccctgtgtgcagcctcaaagctaagaaccctcaagacaaaattctctttaccaaagcggaggataacctgcttgcccttggcttaaaacacttcgagggcactgaattcctcaaccccctgattagcaaatatcttctgacctgtaagaccgcccgccaattaaccgtgcgtatcaagaatctgaacatgaaccgcgccccggataacataatcaagttctacaagaagacaaaacagttgcccgttctgggcaagtgttgcgaggagatacaaccacatcaatggaagccgcctattgaacgggaggagcatcgccttccgttctggctgaaagcgtcccttccttctattcaagaggaactacgtcatatggctgacggtgctagagaggtcggtaatatgactggcaccacagagatcaactcggatcaaggccttgagaaagacaactctgagctggggagtgagacacggtacccgctgctcctacctaagggcgtggtgctgaagctgaagcctgtggccgaccggttcccaaaaaaagcatggagacagaagcgctcctccgtcctgaagcctctgcttatccagccttctccctctctccaaccaagttttaatcctggcaagacccccgctcagagcacccattctgaggcgccaccttcaaagatggtccttcgcataccccatccaatccagccggctaccgttctgcaaacagtgcccggagtgccccctttgggggtgtcaggcggcgagtccttcgaatctccggcagccctgcccgctatgccaccggaggctagaacgtcctttcctttgagcgaatcccaaactcttctgtctagcgcccccgtgccgaaggtgatgatgccaagcccagcatcttccatgttcaggaagccatacgtgcgcagacgcccatccaagaggcgcggggcgcgagcttttcggtgtattaaaccagcccctgtgatccatcccgcatctgttatttttaccgtgcctgccacaaccgtgaagattgtgtccttgggaggaggttgcaacatgatccagcctgtgaatgctgcagtggctcagagtcctcaaactattcctatagcaaccctgctggtcaacccaacatcttttccttgtccacttaaccagcctctagtagcctcctcggtgtcgccgcttattgtatccgggaattccgttaatctgcctattccttccactcctgaagataaggcacatatgaatgttgatatcgcctgtgcagtagctgatggagagaatgctttccaaggtctggagcccaaactggagcctcaagaattgagccccctttccgcaacagtttttcctaaagtcgagcattcccctggacccccacccgtagataaacagtgtcaggagggtctgtctgagaattccgcctatagatggacagtcgtgaagactgaggagggccgacaggccctggaacctttaccgcaaggcattcaagagtctctcaacaattcctcgccgggtgaccttgaggaagtggtaaagatggaaccggaagatgctaccgaggagataagcggatttctttag

SEQ ID NO: 15188 - DNA, 2667 bp, synthetic construct
  source 1..2667: mol_type = other DNA; note = Synthetic coding sequence
atggctggagttgggcgttctgggggaccatgggggcggacacgggggggtagatcaggccgtttgggcgtatccttgggggctcttagcagtctgcctcttgaggaattgcctcggcccctatgctgcagacgctgtagacgacatttcggctttgcactgagaggcgaaaccatccctgtcagcgtcgctggctccgccagttctcaattcgcccctctcgctctacacctgagcttactgttgtcacgcatctccgcttctaggcttactcggtggcctccacctgacaagagagaagggagtgcggtggatccaggcaagaggaggagcctggccgcgactccgagctctagtctcccgtgcacacttatagcactgggtttgcgccacgagaaagaagctaatgagctcatggaagatctgttcgagacgttccaagacgagatggggtttagcaacatggaggacgacgggcccgaagaggaagagagggtggccgagccccaggccaactttaatacgccccaggccttgaggttcgaagagctgctggccaatctcctaaacgagcaacaccagatcgctaaggaattgttcgaacagctcaagatgaaaaaaccctccgccaaacaacagaaggaggtggagaaagtcaagccacaatgtaaggaggtgcatcaaaccctgattttggatcctgctcagcgtaagagactgcagcagcagatgcaacaacacgtccagctacttactcagatccatctgcttgcgacgtgtaatcccaacctgaatcctgaagcttcgagcactcgcatctgcctgaaggaactgggaacctttgcccagagcagtatagccctccaccaccagtacaaccccaaatttcaaacgctcttccaaccttgtaacttaatgggagcaatgcaacttattgaggacttcagtacacatgtgagtatagactgctcccctcacaaaaccgttaagaaaaccgccaacgagtttccctgcctgccaaagcaggtggcctggatcctggccacgtcaaaagtatttatgtatcccgagctcctgcctgtgtgcagcctgaaagccaagaacccacaggacaaaatcctctttactaaggcagaggacaacctgctcgccctcggcctgaagcattttgagggcacagagttcttaaatcctttaatttcaaagtaccttctgacttgcaaaacagcccgacaactcaccgtgcgaataaagaatctcaatatgaatcgggccccggataatattattaagttttataagaagacgaagcagctccccgtgttgggaaagtgctgtgaagagattcagcctcatcagtggaaaccaccaattgaacgggaggaacatagactgccattctggctcaaagcgagtctgccatccatacaagaagaactgcgccatatggccgatggggctagagaggtcggaaatatgaccgggacaactgaaatcaacagcgaccagggactggagaaggacaattctgagctgggctcagaaaccaggtatccattgcttttgcccaaaggagtcgtcttgaagctcaagccagtcgcggatcggttccctaaaaaggcatggcgccaaaaaaggagtagtgtgctgaagccgttgctgattcaaccatccccctcattacagccctcatttaatcctggcaagactccagcacaatctacacactctgaagcaccccctagtaagatggtattgagaattccgcatcccattcaacctgcgactgtcctccagacagtccccggcgtgcccccccttggcgtgtcaggaggggagagcttcgaatcccctgctgccctccctgccatgccaccagaagccagaaccagttttccactttctgaaagtcagaccttattgagctccgctccggtgcctaaggtgatgatgcccagccctgcgtctagcatgttcagaaaaccatatgtgcgcaggcggccaagcaaacgcaggggggcccgagcctttcgctgtatcaagcctgccccagttatccatccagcctctgtgatcttcacagtgccagccaccaccgttaagatagtgtcactggggggcggctgtaatatgatccagcccgtgaacgccgctgtcgcccagagtccccagacaatccctattgctactctgcttgttaaccctaccagcttcccttgtcccttgaatcagccactggttgccagttccgtgtccccactgatcgtttccgggaactcggtaaatctgcccatcccatctaccccagaagataaggctcacatgaatgtggatatagcctgcgcagtggcagatggcgagaacgccttccaagggctcgagccaaaactggagccacaggaactgtcacctttatccgctacggtgtttcccaaagtggaacactccccaggcccccctcctgttgataagcaatgtcaggaggggctctctgagaactctgcctatcggtggactgtggtgaaaacagaggagggtcggcaggcactggaaccattaccgcagggcatccaggagtccttaaacaatagttccccaggggacttagaggaggttgtcaagatggaacctgaggatgctacggaagagattagtggcttcctgtag

SEQ ID NO: 15189 - DNA, 2607 bp, synthetic construct
  source 1..2607: mol_type = other DNA; note = Synthetic coding sequence
atggccggcgtggggagaagcggcggcccatggggaagaacaaggggcggccgatcggggaggctgggggtttcgctcggtgcactgtcctctcttcctctcgaggagctgccgaggcctctgtgctgtagaaggtgccgtagacatttcggattcgctctgaggggtgagacaattccggtttccgtggccggatccgcgagttcccagtttgcccccctagcgctccatttgtcactgctgctgtctagaatttccgccagccggttaacccgatggccgcctccagacaagagggagggctccgcagttgatcctgggaagagaaggtcactggcagcaacaccctcgtcatcattgccctgcaccctgatcgccctcggactgaggcatgagaaggaagctaatgaattaatggaggacctcttcgaaacgttccaggatgagatggggtttagcaacatggaggacgacgggcctgaagaggaggaaagagtggcagagccacaagcaaatttcaatactccacaggcactaaggttcgaagagctcctggctaacctgctcaatgaacagcaccaaattgcaaaggagctgttcgaacagttgaagatgaaaaagccctcagcaaagcagcagaaggaggtggaaaaagttaagccacagtgcaaggaggtacaccagaccctaatcctagatccggcacagaggaagaggctgcagcaacagatgcagcaacacgtacaattgctgactcagattcatcttctggccacatgtaaccctaatttaaatcccgaggcttcatcgacccgtatctgcctcaaagagttaggcacgtttgcccagagctctattgccctccatcaccaatacaaccccaaattccaaacccttttccagccctgcaacctcatgggtgccatgcagctcattgaagacttcagtacccatgtatccattgattgcagtccccataagactgtgaagaagaccgccaatgaattcccctgtctgcccaaacaggtagcctggatactggccacctctaaggttttcatgtatcccgagctcttgccagtgtgcagcctcaaagctaagaaccctcaggataaaatcctctttacaaaagccgaggacaacaagtacctgctgacatgcaagactgccaggcaactgactgtgcggatcaagaatctcaatatgaacagagccccagacaatattattaaattctacaaaaaaacaaagcaactcccagtgttgggcaaatgttgtgaagagattcaacctcaccagtggaaacctccgattgagagggaggaacatcgtttgcctttttggctgaaagcctctcttccttcgattcaggaagaactgcgtcacatggccgacggggctcgggaggtcggcaacatgactggcacaactgaaataaattccgaccaaggtctggaaaaagataacagcgaactggggagcgagacaagatatccgctgctcctgccgaagggtgtggtgctcaaattgaagccagtcgccgatcggttccccaagaaagcctggagacagaaacggagcagcgtgctaaagccactcctgattcagccgagtccttcgttgcagcctagctttaatccagggaagacaccagcacagagtacccatagcgaggccccgcctagcaaaatggtgctcaggatccctcaccccattcagccagctaccgtgctgcagactgtaccgggcgtgccacctttgggagtaagtggtggggagtcatttgagtcacccgccgctttgcctgcaatgcctccggaggctcgcacttcattccccctgtcagaatcccagactctgttgtccagtgcccctgtcccgaaagtgatgatgcctagtccagcctccagcatgtttcgcaagccgtacgtgcggcggagacctagcaagcggcggggggctagggcttttaggtgcatcaaaccggcgcccgtcatccacccagcgagtgtgatattcaccgtgccggccaccacagtgaagattgtctcccttggggggggatgtaacatgatacagcccgtcaacgctgccgtggcacagagccctcagaccatccccattgccaccctcttggtcaacccaacaagcttcccctgccctttgaatcaaccactagtggccagcagcgtgagcccacttattgtctccggcaactcggtcaatctcccaattcctagcacccccgaagacaaggcgcacatgaatgtagacattgcttgcgcagtagcagacggagagaacgcatttcagggattagagccaaaattagagcctcaagaattgagtcccctgtccgctaccgttttccccaaggtggagcattctcctggaccccccccagttgacaaacaatgtcaggaaggcctgagcgagaatagcgcctataggtggactgtggtcaaaaccgaagaaggtagacaagcactcgagcctcttccgcaggggatacaggaatcgctgaacaactcatctcctggggatctcgaagaggtcgtgaagatggagcccgaggacgctacagaggaaatcagcgggttcttgtag

SEQ ID NO: 15190 - DNA, 1575 bp, synthetic construct
  source 1..1575: mol_type = other DNA; note = Synthetic coding sequence
atggctggcggagccagagaggttctcacattacagctggggcactttgcagggtttgtgggcgcccactggtggaatcagcaggacgccgctctcggacgggccactgacagtaaggaaccacctggtgagctgtgccctgacgtcctttaccggacaggccggaccctgcacgggcaggaaacctacaccccaaggctaatccttatggacctcaagggtagcttaagcagcttgaaggaggagggcggtttgtatcgggataagcagctggatgctgctatcgcctggcaggggaagctgaccactcataagggcagcagtcctcttcctaccgctaccacccccaagcctctcattcccacagaggccagtataagagtctggtccgatttcctgcgggtgcatctgcaccctaggtctatctgtatgattcaaaagtataatcatgatggcgaggccggacggctcgaggcctttggccagggagagtcagtgctgaaggaacctaagtaccaggaagagctggaagacaggctgcacttttacgtcgaggagtgcgactatctgcaggggtttcagatcttatgtgacctacacgatggcttctccggcgtgggcgccaaagcggctgaactgctgcaagacgagtacagtggcagggggatcataacctggggcctgctgcccggtccatatcatcgcggggaagcacagcgcaacatttatcggttgctgaacacagctttcggtcttgttcatttgacggcacacagttctcttgtctgtcccttgtcactaggtggatccttgggtctgaggccagagcctcctgtgtctttcccatatttgcactacgacgctaccctcccatttcactgtagcgccatactcgcaacagctcttgataccgtgacagtgccataccggctctgctcatcgcctgtgagcatggtgcatctggcagatatgttgagcttctgtggcaaaaaggtggtaacagccggagccattattccgttcccattagctccaggacagtctctcccagactctctaatgcagtttggcggtgctaccccatggacacccctgagcgcctgtggagaaccgtccgggacacgatgttttgcccagagtgttgttctgcgtggcatcgatcgagcttgtcatacctcacagctgactcccggtacaccacctccctccgccctccacgcatgcacgacaggggaagaaatcctagctcaatacctacagcagcagcagcctggcgtaatgagcagttcacacttgctcctgacaccctgtcgtgtggcacctccttatcctcaccttttcagcagctgctccccacccgctgtggaaagcatccccgtgtttggcgctctctgcagttccagcagcttgcatcagactctggaagcattagcacgagacctgaccaaactggatctacgacgctgggcatccttcatggatgccggggttgaacatgatgatgttgccgaattgctccaggagttacagtctctcgcccagtgctaccagggtggagatagcctggttgactag

SEQ ID NO: 15191 - DNA, 1479 bp, synthetic construct
  source 1..1479: mol_type = other DNA; note = Synthetic coding sequence
atgccacccacctgcagcccaggtctgaggcgacaagactgggctcctgggcggtgtgcagggctgcacttgcctcctagggctccaagctcccctgctctgcaggctcttgcagggcaagccggggttcgcagctcctggagtttcgccggggtgcctggtgcacaacggctctggatggcggaggcccaatccggcactggacaactccaggaacagaagaaaggactgctgatcgcagttagtgtgtccgtggataaaattatatctcattttggcgccgcccgtaacttggtgcagaaagcacagctgggtgatagccgactgtcgccagacgttggtcacctagtgttgaccacgttatgccctgccctccatgctctggtggccgacggactgaaaccgttccggaaggatttgattacggggcagcgccgttcgagcccttggtccgtcgttgaagccagcgtgaaacccgggtcttccactagatctctcggtactctgtactctcaggtctcgcgactagccccactctcaagttcgagatcaaggtttcacgcctttatcctagggctgcttaatacgaaacaactcgaactttggttttcctccttgcaggaggatgctgggttgctcagcctgctgtacttgcctaccggcttttttagtctcgcgcgcgggggctgcccttcattgagtaccgaactgttactgttgcttcagccactgtctgtgctgacatttcacctggacttattatttgagcaccatcaccatctcccattaggcccaccacaggccccagccccccccgggccaccgcccgcactgcagcaaactatgcaggcgatgctgcactttggcggccgtcttgcccagagtctgcgaggcacgtctaaagaggccgcctctgacccttcagactctccgaatcttcccacccctggctcctggtgggaacaattaacacaggcgagccgagtttacgctagcggcggtaccgagggcttccctctgtcacgctgggctcctggaagacatggcacggctgcagaagagggcgctcaggaacggcccctgcccaccgatgaaatggccccagggcgtggactgtggctggggcgcctgttcggcgttccagggggtcccgccgaaaacgaaaatggtgcgttgaagtctaggcggccctcctcctggctcccaccaacagtgtcggtgctcgccctggtgaagcgaggcgctcctcctgaaatgccgagcccccaggaactcgaagcctcagccccgaggatggtccagacccaccgggctgtcagagctctttgtgatcatacagccgccaggccagaccagctaagttttaggcgtggtgaggtgctccgcgtaataactactgtggacgaagactggctgagatgcggtcgggatgggatggaaggtttggtgcccgtcggctacacctcactggtgctgtag

SEQ ID NO: 15192 - DNA, 1302 bp, synthetic construct
  source 1..1302: mol_type = other DNA; note = Synthetic coding sequence
atggctgaggcccagtcaggtacaggccaacttcaagagcagaagaaggggttgctaatagcagtctccgtgagtgtggataaaataatttcacattttggggccgctaggaatttggttcagaaagcgcagctaggtgattctagactgagcccagacgtgggtcacctggtacttactacactgtgccctgctctgcacgccctcgttgcggatggtctaaagccttttcgaaaggatttaatcacagggcagcgacgcagttccccatggagcgtagtcgaagcgtcagtgaaaccagggtcgtctacaaggagcctgggcaccttgtacagccaggtatcccggttagcccctctgagttcctctcggtctcggtttcacgcgttcatacttgggctgctgaacaccaagcagctggaactttggttctcttccctacaggaggacgccggccttctgtcactcctgtacctgcccactgggttctttagtctcgcaagggggggatgtcccagtttatcaacagagctcctgttgctgctgcagcccctctctgtactgaccttccatctcgatctgctctttgaacaccaccaccacctccccttggggcctccccaagcacccgcgcctcccggtccaccaccagctctccagcagacaatgcaggctatgctgcacttcggtggccgtctcgcccagtcattacgagggacatctaaggaggccgcttctgaccctagcgattcaccaaaccttcccacgccaggttcctggtgggaacaactgacgcaggcttcgcgagtctatgcctccggcggcactgaggggtttccattatccaggtgggcacctggccgtcatggcaccgcggcggaggaaggcgcccaggagagaccgcttcccacggatgagatggcccctggacggggactgtggctgggaagattattcggcgtgcctggcggccccgctgaaaatgaaaacggcgcgctaaagagtcgacgaccaagcagttggctgcccccgaccgtaagcgtgcttgctctggttaagcgcggggcaccaccagagatgccctctcctcaggaactcgaagcctcggcaccacgcatggtgcagacacacagggcagtgcgtgcactgtgcgatcacaccgccgccagaccggaccagctttcttttcgccgaggagaggttttacgtgttatcacaacagtcgacgaggactggctcaggtgtggaagggatggcatggaaggcttggtccccgtcggttacacctctctggtgctgtag

SEQ ID NO: 15193 - DNA, 2709 bp, synthetic construct
  source 1..2709: mol_type = other DNA; note = Synthetic coding sequence
atgctgagtcctcagagagccctgttgtgtaatctgaaccatattcacctacagcacgtcagcctcggccttcacctgtccaggagaccagagctccaggagggaccacttagcactccgccccccccaggcgacacaggcggcaaagaatcacgaggaccctgttcaggaacgcttgtggatgctaactctaattcccctgcagttccttgccggtgttgccaggagcatggccctgggctggagaatcggcaagatccctcgcaggaagaagagggggctgcttccccctcggatcctggctgctcctcttccctttctagctgctctgatttgagccctgatgaaagccctgtgtctgtgtatctgcgtgatctaccaggggacgaggatgcgcatccgcaaccttccatcattcccctcgagcagggatctccactggcctctgctgggccaggcacatgttcaccggactcattttgttgcagccctgacagttgttctggcgcaagctctagcccggatcctggcctggatagcaactgtaacgctctcaccacctgccaggacgtcccctccccgggtctggaggaggaagacgagagggctgaacaggatctgcccacaagcgagctgctcgaggccgatgacgggaagattgatgccggcaagaccgagccttcatggaaaatcaaccccatctggaagattgacactgaaaaaaccaaagccgaatggaaaactacagaaaacaataatacaggatggaaaaataacggcaatgtaaactcttcatggaagtcggaacccgaaaaatttgacagtgggtggaagaccaacacaagaataacggattcagggtcgaaaaccgacgcaggcaagatcgacggtgggtggaggtcagacgtgagtgaagagccagtaccccaccggaccattacctctttccatgagctggcacagaaacgtaagcgcggacccggcctgccactggttccgcaggcaaaaaaagaccggagcgattggttgatcgtgttctccccagatacagaactgcctccctccggtagccccgggggtagttccgctccccccagagaggttacaacatttaaggaactccggtctagatctagggcacctgcgccccccgtcccccctcgagatccccctgtggggtgggcacttgttccccccaggcccccccctccgcccgtaccacccaggcgcaagaagaaccgtcctggcttacagcccattgctgaaggccaatccgaggagggacgcgccgtctcaccagccgcaggcgaggaagcccctgcagctaaggaacccggggcccaggcgggtctggaggtacgctcgtcctggagttttgcaggcgtgccaggtgcgcagagattgtggatggccgaggctcagagtggaacgggacagcttcaagagcaaaaaaaggggcttctgatcgctgtttccgtctccgtcgataagatcatcagccacttcggtgccgcccggaacctggtccagaaggcccaactgggcgatagtagactgtcaccagacgttggccacttggtacttaccactctgtgccccgcactgcacgctctggtggcagacggcctcaaaccattccgtaaagacctgatcacgggccagagacgatccagtccctggagtgttgtcgaggccagcgtgaaacccggctcatccacacgctccttgggcacactgtactcccaggtgagccggctggcaccactttcaagcagcaggtccagatttcacgcctttattcttggactgctgaatacaaagcagctggagctgtggttttcgtccctgcaggaggacgctggtctgctgagcctgctgtacctccccaccggttttttctccctggcacgcggtggctgccctagtttgtccacagagctgttgctcctccttcagccgctttccgtgctcacctttcacctggatctgctgttcgaacatcatcaccatcttcccctggggccaccacaggccccagctcctccaggaccccccccagcactccaacagacaatgcaggcaatgctgcactttgggggacgattggcccagtccctgagaggcacaagcaaggaggccgccagcgacccatcagattctccgaacctgcctacaccaggttcttggtgggaacaactgactcaggcctctcgcgtctatgcatccggcggaactgaaggattccctctgtctaggtgggcccctggtcggcacggaacggcggccgaggaaggggcccaagaacggcctctcccaaccgacgaaatggctcccggccggggcctatggctcggaagacttttcggtgtgcccggagggcctgctgaaaacgaaaacggcgctctgaaatcacgtaggccgtcttcatggctgcccccaacggtgagtgttctggcactagtgaaaagaggcgccccccctgaaatgccctcaccgcaggaattggaggcctctgccccaagaatggtccagacacaccgggctgttcgggcactatgcgaccacaccgctgctaggccagaccagctgagttttcgaaggggtgaggtcctccgcgtcattactacagtcgatgaagactggcttagatgtggtcgagacggcatggaggggctggtgcctgttggctacacctctctggtgctttag

SEQ ID NO: 15194 - DNA, 2391 bp, synthetic construct
  source 1..2391: mol_type = other DNA; note = Synthetic coding sequence
atgttatccccacagcgagctctgttgtgcaacctcaaccatatccatctgcagcatgtctccctgggactgcatctatcccgacggccggagttgcaagagggtccactttcaacaccgcccccccctggagataccggggggaaagagtcccggggcccctgttcagggacattggtagatgccaactcgaatagccctgccgtcccctgtcgatgctgccaggagcatggccctgggctggagaatcggcaggacccaagccaggaagaggaaggagccgctagcccaagcgatcccggatgttcctcttcgctctctagttgctcggacttaagtcccgacgagtctcccgtgtctgtctatctgcgagacctgcccggcgacgaagatgcgcacccccagccaagtattatacccttagaacagggctccccactcgcaagtgctggaccaggcacatgttcaccagactccttctgttgttcaccggacagctgctcaggggcctcatctagtcctgacccagggctcgattccaattgtaacgctctgactacctgccaagacgtcccgagtccaggccttgaagaggaggatgagagggccgagcaagatctccctacctccgaactgctagaagccgacgatggcaagatcgatgcaggcaaaacggagccctcatggaagataaatcctatttggaagattgacacagaaaaaactaaggccgagtggaagactaccgagaacaataacacgggctggaagaacaatggtaatgtaaactccagctggaagagcgagccggagaaatttgactccggatggaagactaatactcggatcaccgacagcggctctaagaccgatgcgggaaaaatcgatggtggatggagaagcgacgtatctgaagagccagtgccacatcggaccatcaccagcttccatgagcttgcgcaaaaacgtaagcgcggcccaggactgcctctcgttccccaggcgaagaaggatcgctctgactggctgatcgtattttcccctgatacagaactgccgcccagtggtagtccaggggggtcctcagccccccctcgcgaagtcacaaccttcaaggagctgcgctccaggtctcgcgctcccgcaccaccggtgcccccaagagatcccccggtcgggtgggctctggtgccccccagaccacctccaccaccagtcccgccacgtcgaaagaagaatagacccggactgcagcccatagccgagggccagtctgaggagggccgtgccgtttctccagccgccggggaggaggcccctgccgcaaaggaaccaggagcgcaggctggcctggaggtgcggagttcttggagcttcgccggagtgcccggggctcaaaggttatggatggctgaagcccagtctggaacaggccaactgcaggagcagaagaaggggctgcttatcgctgtatcagtcagtgtagacaagatcataagccattttggggccgccaggaacctggttcagaaggcccagctgggtgatagtcggttatcccctgacgtagggcatctggtcctgactaccctgtgccctgccctgcatgcgttggtggccgatggtctaaagcccttccggaaggacctgattacaggacagaggcgctctagcccgtggtctgtcgtggaagccagtgttaagcccggttccagtacgcgttcactggggactctttattcccaggtcagtcgactcgctccgctgtcctcgtccaggtctagatttcatgcatttattctgggcctgctcaacactaagcagctggaactttggtttagttcacttcaggaagatgcagggagttggtgggagcagctaactcaagctagcagggtctatgcatctgggggtacagaaggtttccccctgagtcggtgggctcccggccggcacggtaccgcagccgaagagggcgcccaggaacgccccttgccaacggatgagatggctcccggacggggattgtggctgggccgactcttcggcgtgcccggcggccccgccgagaacgagaatggggcactgaaaagccgcagaccctcttcctggttaccccccacagttagcgtgctagccttggtgaagaggggcgctcctccggagatgccctccccacaggaactggaagcatctgctccaagaatggttcagacacaccgcgctgtgcgggctttatgtgatcatactgctgctcgccctgaccaactcagcttccgacgaggagaggtcctgcgggtcatcactactgtggatgaggattggctcagatgcggacgggacggcatggagggcctagtaccagtcggctatacatccctggtgctgtag

SEQ ID NO: 15195 - DNA, 513 bp, synthetic construct
  source 1..513: mol_type = other DNA; note = Synthetic coding sequence
atggcatcagttagttcagccacgttcagtggccacggtgctaggtctctgctacagtttctccgcctggtaggacagctgaagagagttcctcgaaccggatgggtgtatcgtaacgtccagaggcctgaatccgtgagtgatcatatgtaccggatggcagtcatggctatggtcattaaggacgataggcttaataaggacagagaggcaatgaagcagatcacacagctgctaccagaggatcttagaaaagagttgtatgagctctgggaagaatatgagactcaaagctccgcagaggctaaatttgtgaaacaactggaccagtgcgagatgatcctgcaggcctcggagtatgaagacttggagcataaaccaggccggctgcaggatttttacgattcaacagccggtaagttcaatcaccctgagatcgtgcaactggtgagcgagcttgaagcagaaaggagtacgaatattgctgctgccgcttcagagccacacagctag

SEQ ID NO: 15196 - DNA, 396 bp, synthetic construct
  source 1..396: mol_type = other DNA; note = Synthetic coding sequence
atggaagcccaggctcagggtttgctggagacagaacctttgcagggcactgatgaagacgccgtggccagcgctgatttcagctcaatgctgagcgaggaggaaaaggaagagctgaaagccgaattggtgcaattggaagatgaaattacgacactgaggcaggtgctctcagccaaagaaagacacctggttgagatcaagcagaaactcggaatgaatctcatgaacgaactgaaacagaattttagtaaaagctggcatgacatgcagaccaccacagcttacaaaaaaacacatgaaactctgtcacacgcagggcagaaagctaccgccgccttctcaaacgtggggaccgctatttctaaaaagtttggagatatgaggaggaagtag

SEQ ID NO: 15197 - DNA, 435 bp, synthetic construct
  source 1..435: mol_type = other DNA; note = Synthetic coding sequence
atggaagcgcaagcgcaggggctgcttgagacagagcccctgcagggaaccgatgaggacgctgtggcttctgccgatttcagttcaatgctgtctgaggaggaaaaggaggagcttaaagccgaacttgtgcagctggaagacgagattactactttaaggcaggtgctgtccgctaaggaacggcacctcgtggagatcaagcagaaactcggtatgaatcttatgaatgaactcaaacagaacttcagcaagtcctggcatgacatgcaaactacgaccgcctataaaaagacacatgagacgttgagccatgccggacagaaggccacagctgcctttagcaacgtgggcacagcgatttcgaagaagtttggcgacatgtcatattcgattcgccatagcataagcatgccagctatgcgtagaaaatag

SEQ ID NO: 15198 - DNA, 948 bp, synthetic construct
  source 1..948: mol_type = other DNA; note = Synthetic coding sequence
atggccagctgccccgacagcgataactcctgggtgttggccggttctgaaagtttaccggtggagacgttaggtccagcatctagaatggatccggagagtgaaagggccctgcaggctccacacagcccgtcaaagactgacggcaaggaactagccggcacaatggacggagaggggacattgtttcagaccgaaagccctcagtcagggtctatccttactgaagaaaccgaggtcaagggcactctggagggggacgtgtgtggagtcgaaccacctggacctggcgacaccgtggtgcagggagatttacaggagacaactgttgtgacaggactgggccccgacacccaggaccttgaaggacaatcacctccccagtccctccccagtacccctaaagccgcctggataagggaggaagggaggtgttcctcttctgatgatgatacagacgtcgatatggagggcctgcggcgcagaagggggcgagaagccggacccccccagcccatggtccctctggctgtggagaatcaggctggcggaggtctctccgagtctgagacaggcccaatggaagaggtagaacgacaggtccttccggatccagaggtgcttgaagcagtgggcgaccgccaggacggcctgcgggaacagctccaagcgcccgtgccacccgattccgtcccatctcttcagaatatgggcctcctgttagataagcttgctaaggagaaccaggatataagactgctgcaggcacagctccaggtaggcaccggtcgccggggttgggctagggtaactcatcttggacaagcatctgttcttgcatcatctcctaaacggaacgtgagctatttacctacccaccccgacccccccctgagccactactctcagggcgtcttcccagtgctcggctctcaccctttgtgctag

SEQ ID NO: 15199 - DNA, 2196 bp, synthetic construct
  source 1..2196: mol_type = other DNA; note = Synthetic coding sequence
atggccagttgcccggattctgacaacagttgggtcctagctggctctgagagccttcccgtagagacactcggtccagcgtcacgtatggacccggagagcgaaagggccctacaggcccctcatagcccctcgaagaccgatggaaaagagctggcaggtacaatggacggcgaaggtactctattccagaccgagtcccctcagtccgggagtatattaacagaggagaccgaagtgaaggggactttggagggagatgtctgcggcgtggaacctccaggacccggcgacaccgtagtgcagggtgacctgcaagaaaccactgtcgtgactggtctgggtcccgacacccaagacctagagggacagtccccaccccaatccctcccttccacccctaaggccgcttggatacgcgaggagggtagatgttctagctctgatgacgataccgacgtggacatggagggcctgcgacgccggcggggtagggaagccggacctcctcaaccgatggtgcctctcgccgtggaaaatcaggccggaggagagggcgccggcggagagctcggtatctccttaaacatgtgtctcctgggagcacttgttctgctcggcctgggggtgctgttgttcagtgggggactttccgagtctgagactgggcctatggaggaagttgaacgtcaagtgttacccgatcccgaagtgcttgaggccgtcggcgacaggcaggatggcttaagggaacaactccaggctcccgtgcctccagactcagttccttcactccaaaacatgggtctcctgctggacaaactcgctaaagagaatcaggacattcgccttctgcaggcccaacttcaggctcaaaaagaagaactgcagtcccttatgcatcagcctaaaggcttagaagaggaaaacgcacaactgcggggtgctctacagcagggggaggccttccagagggctttggagtctgaattgcagcaattaagggccagactacaagggctggaggccgactgcgtacgaggcccagatggcgtctgtttgagcggtggcagaggtccacagggggacaaagcgatacgggagcagggccctcgggaacaggagccggaactatcctttctgaaacagaaggaacagctggaggctgaggctcaggcactgcgccaggagctagagaggcagcgaagactcctcggatctgttcagcaggatctggaacgctctctacaggacgccagtcgcggcgatccggcccatgccggactcgctgaactggggcaccggctggcccagaaactacaagggcttgaaaattggggtcaggaccctggagtctctgctaacgcctccaaagcatggcatcagaaatcccatttccagaacagtcgcgagtggtcaggcaaggagaagtggtgggacggacagagggatcgcaaggccgaacattggaaacataagaaagaggaatcaggaagagaacgaaaaaagaattgggggggacaggaggaccgggaaccagccggcaggtggaaagagggacgtcctagggtcgaagagtcaggttctaaaaaggaaggtaaacggcaggggccaaaggagccgccccgaaagtccgggtctttccactccagcggagagaagcagaagcagcctcggtggcgggagggtaccaaggattctcatgatcctttgcccagctgggcagagctgctcagacccaagtatagggccccacagggatgctctggcgttgacgagtgcgcgagacaagagggccttacatttttcggtacggaattagccccagtaagacagcaagagctggcctcccttctgcgaacatatctggcccgcttgccttgggccggacagctaaccaaagaacttcccctgagtccagcattctttggcgaggatggtatctttcggcacgaccggctgagatttcgggatttcgttgacgctctggaggattccctcgaagaagtggctgtacagcagactggggacgatgatgaggtggatgacttcgaagattttattttctctcatttctttggagataaggctctgaagaagagatcagggaaaaaagacaaacactctcaaagccctcgtgctgcaggaccacgggaagggcacagtcattcccaccatcaccaccaccgaggttag

SEQ ID NO: 15200 - DNA, 2109 bp, synthetic construct
  source 1..2109: mol_type = other DNA; note = Synthetic coding sequence
atggacccagaaagtgagagggccctgcaagctccccacagcccatctaagaccgatggaaaggaactggctgggactatggacggtgaaggtactctgtttcaaaccgagagtcctcagagtggaagtatactcacagaagagaccgaagtcaaaggtacccttgaaggagatgtttgcggagtcgagcccccaggcccaggcgatactgttgtacaaggggatctacaagaaactactgtggtcaccggtctgggcccagacacacaagacttggaaggccagtcccctcctcagtctttgccatctacacccaaggccgcctggattagggaagaaggtcggtgttccagttccgacgacgacaccgacgtggacatggaagggctcagacgaagaaggggccgggaggcaggacctcctcaaccaatggtgcctctagccgtggagaaccaagccggcggcgaaggagccggaggcgagcttggcataagtctaaatatgtgcctgttgggcgccttagtcctccttggactgggggtgctgctgttcagtggaggtctctcggaatcagagacaggtcccatggaggaggttgagcggcaggtcctgcctgacccagaggtcctcgaggccgtgggggataggcaggacggactgcgagagcagctgcaggccccggtgcccccagacagtgtgccaagtctccagaacatgggcctgctgctcgataaactggccaaggaaaatcaggacatccggctactgcaggcccaactgcaggcccagaaggaagaattacagagtctaatgcaccagcccaaggggttagaagaggagaacgcccaactgagaggcgccctgcagcagggcgaagcgtttcagcgcgctctcgaatcagaactgcagcagttgcgggcgcggctgcagggactggaagctgattgcgtgcgagggcccgacggagtttgtttgtctggtggacgtgggccccaaggagataaggcgatcagggaacagggaccgagggaacaggagcctgaattatccttccttaagcagaaggaacaactcgaagctgaagcccaagctctgaggcaagagctggagagacagcggaggctgctgggtagtgtgcaacaagatctagagcggagtctgcaggatgcgtcccgcggggatcccgcgcatgccggtctggccgaactggggcatcggttagcacagaaactgcaaggactcgaaaactggggacaagacccgggggtctccgcaaacgcctctaaagcatggcatcagaagtcacattttcagaatagccgtgaatggtcagggaaagagaaatggtgggacggccagagagatcggaaggccgagcactggaagcacaaaaaggaggagagcgggagggagaggaagaaaaactgggggggccaggaagatagagaacccgcaggccgctggaaggaggggaggccaagagtcgaagaatccggcagtaaaaaggaaggaaagagacagggcccaaaggaacctccccggaaaagcggatcgttccatagctcaggtgagaagcagaagcagcctaggtggcgcgaaggaacgaaagactcccatgaccctctgccatcttgggccgagctactgaggcccaaatacagagccccccaggggtgctctggagtggacgaatgcgcccgtcaggagggacttacctttttcgggacggagctcgcaccagtacgccagcaagaattggcctcactcctgcgcacttacttagctcgactgccgtgggcaggacagctcaccaaggaactccctctcagccccgccttctttggcgaagacggaatcttccgacacgacaggttgagattccgcgactttgtggatgcactcgaggattcgttagaggaggtggcagtgcagcagactggcgacgatgatgaggtcgacgatttcgaggatttcatctttagtcacttttttggggacaaggcattaaaaaaaaggtctgggaagaaggataagcattcccagtctcctagagccgcaggccctcgggaaggccattctcactcgcaccaccatcatcaccggggctag

SEQ ID NO: 15201 - DNA, 2427 bp, synthetic construct
  source 1..2427: mol_type = other DNA; note = Synthetic coding sequence
atgatttggcggaacaactggaaaagcaccaccgggcggctcaatgtaaaactgcagagcgataaactgcaacacggctgtgggcccgattactccagcgcctggctccccgccaacgagagtctgtggcaagctactacagtgccgtccaatcaccggaataatcacatcagacgacactcaatcgcttcggatagcggagatacaggaatcggtacttcctgcagcgactctgtcgaggatcactcgacttcttctggaacgctgagctttaaacctagccaaagcctcattactctccctaccgctcatgtgatgccctccaattcttcggcttcaatcagtaaactgagagagtccttgaccccagatggtagtaagtggtccacatccttgatgcaaacactaggaaatcatagcagaggtgaacaggattcttccttggacatgaaggattttcgaccactcaggaagtggagttcattgagcaagctcactgcaccagataactgtggccaaggtgggactgtgtgcagggaagagtcgaggaatggtttagagaaaatcggcaaggcaaaggcgttgacatcacaactacggaccatcgggccctcatgcctgcatgactcgatggagatgctcaggttagaagataaggaaatcaacaaaaagcggagtagcacactggattgcaagtacaaattcgagagttgctccaaagaagatttcagagcatccagttctaccctgcggcgccaacccgtagacatgacttacagtgctctgcccgaatccaagccaataatgacttcttctgaggctttcgaacccccaaaatacctcatgctgggtcagcaggcagtgggcggggtccccattcaaccatcagtacgcactcagatgtggctcaccgagcaattaaggaccaatcctctcgagggccggaacacggaggactcatacagcctggccccttggcagcagcagcagatagaggacttcagacaaggcagtgagacacccatgcaggtgttaaccggaagctctcgtcagagctactcgcccggataccaggatttttctaagtgggagagcatgctaaaaatcaaggaagggttgttgcgtcagaaagaaattgtgattgatagacaaaagcagcagatcacgcatctgcacgaacgaatcagggataacgaactgcgagctcagcacgctatgttggggcactacgttaactgtgaagacagctatgtggcgagtttgcaaccacagtacgagaacactagtctgcagactccattcagcgaggaaagcgtctcacatagtcaacaaggcgaattcgagcagaaactggccagtaccgagaaagaggtgcttcaacttaatgagtttctgaagcagcggttatccctttttagcgaagagaaaaagaaactagaggagaagttgaagaccagagaccggtatatatccagcctgaagaaaaagtgccaaaaagagtccgaacagaacaaggagaagcaaagacggattgagacgctggagaagtatctggctgacctgcccacccttgacgatgtgcagagtcaatccctgcaattacagatccttgaggagaaaaacaagaatctccaggaagcccttattgatactgagaagaaattggaagaaattaagaagcagtgtcaagacaaagagacccagctcatttgtcaaaagaaaaaagagaaggagctcgttacaacagtgcagtccctgcagcagaaggtggaacgctgcctagaagatggcatcaggttgcccatgctggatgccaagcagctgcagaatgaaaacgataacttaaggcagcagaacgagaccgcatcaaagatcatagattcacaacaagacgagatcgatcgcatgatactggaaatccagtcgatgcagggtaagctcagtaaggaaaaacttaccactcagaaaatgatggaggagttggaaaaaaaggaacgcaatgttcagaggctaaccaaagcattactagaaaatcagcggcagaccgacgagacatgcagtctgctcgaccagggccaggagcccgaccagtcacggcaacagacagtcttgtctaagcgtccgttatttgacctgactgttattgaccaactgttcaaggaaatgtcctgctgtctctttgatcttaaagccctctgtagtattctgaatcagcgcgcacagggcaaggagcctaatcttagcctactgcttggaatccgctcaatgaactgctccgcagaggaaacagaaaacgaccactcaaccgagaccctgaccaagaagctgtctgatgtctgtcagctcaggagagatattgatgaactgcggacgaccataagcgatcgctacgctcaagacatgggcgacaactgcatcacacagtag

SEQ ID NO: 15202 - DNA, 2418 bp, synthetic construct
  source 1..2418: mol_type = other DNA; note = Synthetic coding sequence
atgtgggggaggtttcttgcaccagaggcatccggaagggattccccaggcggggcacgaagcttccccgctgggcccgattattcaagcgcttggctgcctgccaatgaatcactgtggcaggcgaccaccgtccccagcaaccaccgcaacaatcatattcgtcgacactcaatagcttccgactccggtgacaccggaatcgggacctcttgctctgactcagtagaggatcactctactagtagtgggactctgagcttcaaaccaagccagagcctgatcacactgccaaccgcccacgtcatgccgtctaattctagcgcaagcatctccaagttgcgggagtctttgaccccggacggatctaagtggtctacctccctcatgcagacactgggcaaccattctaggggagagcaggactcctcattagacatgaaggactttagaccgctgcgcaaatggtccagtctgtctaaactgaccgcccccgataactgcggtcaggggggcactgtgtgcagggaagaatctcgaaacggacttgagaagattggcaaagcaaaggcgttgacctctcagctgcggaccatcggaccttcctgcctgcatgactctatggaaatgctgcgactagaggacaaggagataaacaaaaagcgatctagcactctcgattgtaaatacaagtttgaaagctgctctaaggaggactttagggctagcagctctaccctccgcaggcagcccgtagacatgacatacagtgcgttgccggagagcaaacctatcatgacctcgtcagaagcgtttgagccccctaaatatttaatgttgggacaacaagctgtcggaggtgtccccattcagccttctgtgcgcactcagatgtggctaactgagcagctcaggacgaaccccctcgaaggccggaatacagaggactcctattcattggctccttggcaacaacagcagatcgaagattttagacagggatccgagacgccaatgcaagtgctcaccggctcttctaggcaaagctacagcccaggctatcaggattttagtaagtgggaatcaatgctgaagattaaagagggcttgttgaggcagaaagagatcgttattgaccgacagaaacagcaaatcactcatcttcacgagcggatccgagacaacgaacttcgcgcacagcacgcaatgcttgggcattacgtgaactgcgaagatagctacgtcgcctctcttcagccacagtatgaaaatacctccctgcagactcccttttctgaggagtctgtctcacattcccagcagggtgagtttgagcagaaactagcgtccaccgaaaaggaagtactgcagctgaatgaatttctgaagcagcgtttgtctttattctccgaagagaagaaaaagctagaggaaaagctgaagaccagggaccgctacataagttccctgaagaagaagtgccaaaaggaatcggaacaaaataaagagaagcagcgcagaattgaaaccctcgaaaagtatctagctgacctaccaactctcgatgacgtgcagagccaatccctacagcttcagattctcgaggaaaagaataaaaatctccaggaggcattaattgacacagagaagaaattggaagaaatcaagaagcagtgccaggataaagaaacgcaactgatttgtcaaaagaaaaaagagaaggagctggtcaccaccgttcagagtcttcagcagaaagttgagaggtgcctggaagatgggatcaggcttccaatgctggacgctaagcagcttcagaatgagaacgataatcttcgacagcagaacgaaacagcatctaagattattgattcacagcaggatgagattgatcgaatgatactcgagattcagagcatgcaaggaaaactgtcaaaggagaaactgacgacgcagaaaatgatggaggaacttgaaaagaaagagcggaacgttcaacgcctgaccaaagccctgcttgagaaccagaggcagacagacgaaacatgttcactgctggaccagggtcaagagcctgatcagagcagacagcagaccgtgctttccaagcgcccactcttcgacctgacagtcattgaccagttatttaaagagatgtcctgttgcttattcgacctcaaagccctatgttcaatactgaaccagcgagcacaaggtaaggaacctaatctgtcccttcttctgggcatcaggagcatgaactgctccgctgaggagacagaaaatgatcacagtaccgagaccctcaccaagaaactcagtgatgtatgccagctgagacgggatattgatgagctgagaaccacaattagtgatagatatgcacaggatatgggtgacaattgcatcacacagtag

SEQ ID NO: 15203 - DNA, 1488 bp, synthetic construct
  source 1..1488: mol_type = other DNA; note = Synthetic coding sequence
atggtggaagagcacgagttgagaaaagagaggattcaagaggactataacgacaaatactgggaccagagatacacaatcgtgcagcagcagatcccctctttccttcagaagatggctgataagatcctgtcaactggtaaatatttgaacgttgtacgtgagtgcggacacgatgtcacctgtcctgtggcaaaggaaataatatacactctgaaggaacgagcctacgtagagcaaatcgaaaaggccttcaactatgcttccaaagtactccttgactttttgatggaggaaaaggaactagttgcacacttgaggtccatcaaacgatattttctgatggaccagggagatttttttgtccatttcatggacttagccgaggaagagttaaggaaacctgttgaggatatcactccaccaagactggaagcccttttggagctggccttgcgtatgagcacagccaacaccgatcccttcaaagacgatctcaaaatagatctaatgcctcacgaccttatcacacagctgcttcgggtactcgcaatagaaacaaagcaggaaaaggccatggcccatgcggatccaaccgagctagctctctcagggctcgaagccttctccttcgactatatcgtgaaatggccactatcccttatcattaatcggaaggcattaacacgctatcagatgttgttccgccatatgttctactgtaagcacgtggaaaggcagctttgtagcgtgtggattagcaacaagaccgcaaaacagcactcgctgcatagtgcccaatggttcgctggagccttcaccctgaggcaacgaatgctaaatttcgtgcagaacattcaatactacatgatgttcgaggtgatggagccaacctggcatatcctcgaaaagaatttgaaaagtgctagcaatatcgacgacgtacttggccatcacaccggatttctggatacatgtttaaaggattgcatgctcaccaacccagagctcctcaaggtgttttcaaaactcatgagtgtctgtgtgatgttcactaattgtatgcagaagtttacccagtcgatgaagcttgatggcgagctcggagggcagaccttggaacattcaactgtgcttggtttgccagccggagccgaagaaagagctcgcaaagaattggccaggaagcacctggccgagcatgcagatacagtgcagcttgtctctggatttgaggctaccatcaataagtttgacaaaaacttctccgctcacttgctagatctccttgctcggttatccatctattcaacttcagattgtgagcacggaatggccagcgtgatttcaaggttagactttaatggcttctacactgagagactggagcgcctttcggctgaacgctcccaaaaggccaccccacaagtccctgtgctccggggacccccggctcccgcccccagagtggcagtgaccgctcagtag

SEQ ID NO: 15204 - DNA, 2709 bp, synthetic construct
  source 1..2709: mol_type = other DNA; note = Synthetic coding sequence
atgtcagagttccgcattcaccacgatgttaacgagcttctgagtttactccgagttcacgggggggatggcgcggaagtatacattgacttgcttcagaaaaatcgtacaccttacgtgacaactacggtgtctgctcattctgcaaaagttaagattgccgaattctccagaacaccagaagactttctgaagaagtatgatgagctcaagtccaaaaataccaggaatctggacccgttagtgtacttgctcagtaagttaacggaggataaagagactcttcagtacctgcagcagaacgccaaggaaagggcagaactggccgccgcggccgtcggatcgtctactacctccattaacgtccccgcagctgcctcaaagatcagtatgcaagagttagaagagctcaggaaacagctgggctcggtcgccaccggctctaccctccaacagtccttggaattgaaaaggaagatgctaagggataagcagaataagaagaatagtgggcagcatctgcctatcttccctgcatgggtgtatgaacgtcctgccctgattggtgatttcctcatcggggctggaatatcaactgatacagccttgcccatcggcaccttgcctctggcaagccaggagagcgcagttgtcgaggatctcctgtacgtgctggtgggcgtggatggccgatacgttagtgcccaacccctcgccggacgccaaagccgcactttccttgtggaccctaatttggacctgagcatccgcgagctggtacatagaatacttcccgtggctgcctcctactcggccgtgacccggttcatcgaagagaaaagcagctttgaatacggtcaagtcaaccatgcactggcagcggccatgaggactctggtgaaagaacacctcatcctggtttcccagctggagcaactccaccggcaaggactgctgtctctccagaaattatggttctacatacagcccgccatgaggaccatggacatcctggccagcttggcaacctccgtggacaagggcgaatgtcttggcggatccacactgtctttgctgcatgacagatcattctcctacacgggcgattcccaggctcaggagctctgcctgtatctcaccaaagccgcttctgcaccctacttcgaagtgctcgaaaaatggatttatcggggtatcatacacgacccatatagcgagttcatggttgaggaacacgaactgcgcaaagagaggattcaggaagattacaatgacaaatactgggatcagagatatactatagtgcagcagcagatccctagcttcctgcaaaagatggctgataagatcctcagtactggtaagtacctgaatgtggtgagagagtgtggccacgacgtaacttgccccgttgctaaggaaatcatatacacgcttaaagagagggcctatgtcgagcagatcgaaaaagccttcaattatgcatctaaggttcttctcgatttcctgatggaagaaaaggagctcgttgctcatttgagaagtattaagcggtactttctgatggatcagggagactttttcgttcattttatggacttagcggaagaggagctaagaaaaccggtggaggacattactccaccccgcctggaagccctgctggaacttgctttgcggatgtctaccgccaataccgacccattcaaggacgaccttaaaatagatttaatgccgcacgatctgattactcagctgctgagagtcctggctatcgagacaaagcaagagaaggccatggcacacgccgaccctacagagcttgccttatctgggctcgaagcgtttagtttcgactatatcgtcaaatggcctctgtctctgatcattaatcgaaaggccctcacccgctatcagatgctctttagacacatgttttactgtaaacatgtggagagacagctttgtagcgtttggatcagtaacaagacagccaaacaacattctctgcatagcgcacagtggtttgctggcgcattcacactgagacagcgcatgctgaactttgttcaaaatatccagtactacatgatgtttgaagtgatggaacccacctggcacatcctcgaaaagaatctaaagagtgctagcaacatcgacgacgttctgggacaccataccggattcctcgacacctgtttgaaagactgtatgcttactaatcccgagctactgaaggtgttttctaagctgatgtctgtatgtgtgatgttcactaactgcatgcagaagtttacacagtccatgaaactggacggggagctcggcggtcagaccttggaacacagcaccgtcctaggactcccagctggggccgaagagcgcgccagaaaggaactggctcggaaacatctcgctgagcatgctgacaccgtccagctagtctccggctttgaggccacaataaataaatttgacaaaaacttttcggcacacctcttggacttgttggctcgcctgtccatctactccacatctgactgtgaacacggaatggctagtgtcatctctcgcctggacttcaatggattttatacagaacgcctcgagaggctttccgccgaacgaagccagaaagccacaccccaagtgccagtcctccgggggccgccagctcctgctccccgtgtagccgtaaccgcccagtag

SEQ ID NO: 15205 - DNA, 1620 bp, synthetic construct
  source 1..1620: mol_type = other DNA; note = Synthetic coding sequence
atggatgcgatggcctcaccaggtaaagacaattaccgcatgaagtcatacaagaacaaagcactaaatccacaagaaatgcgtcggcggagagaagaagaggggattcagctcagaaagcagaaacgggaagaacagctattcaaacggcggaatgtgtacttaccacgtaatgacgagtccatgctcgagtcgccaatccaggatcccgacatctcctcaacagtgccaatccccgaagaggaggtggtgactaccgatatggtgcagatgattttcagcaataacgccgaccagcaactgacagcgacccagaagttccggaaactgttatctaaggaacccaaccccccgattgatcaagtcattcagaaacccggtgtggtgcaaaggttcgtcaagttcttagaacggaacgagaattgtactctccagtttgaggctgcgtgggccctgacaaacatagcatctggcactttcctgcacaccaaggtggttatagagacgggagcagtccccatctttatcaagctgctcaacagcgaacatgaggatgtgcaggagcaggcagtatgggctcttggcaacatcgccggagataacgccgagtgcagagacttcgtactcaattgcgagatcctgccaccactgctagagctgttaaccaactctaatcgacttaccactacacggaatgctgtttgggctctgtctaacctctgccggggtaaaaatccgccccctaatttctctaaggttagcccctgtctcaatgtgctgtcaagactgctgttcagtagtgacccagacgtccttgctgacgtttgctgggctttatcatatttgtctgatggcccgaacgacaaaatccaggccgtgattgacagtggcgtctgccgccggctggtggagctgttgatgcataacgattacaaagtggtgtcccctgccctgcgggctgttggtaacattgtcaccggggatgatattcagactcaggtaatcctaaactgctcagccctgccctgtttactccacctgctgagctcccccaaagaaagcattaggaaagaagcctgctggactgtgagcaacatcacagccggcaacagggctcagatacaagccgtgatcgatgcaaatatctttcctgtgttgatagagatcctgcagaaggccgaattcagaaccagaaaggaagccgcctgggcaataaccaatgctacctctggtggaactcctgagcagatccggtaccttgttgccctcgggtgtatcaaaccactctgtgatttgttgactgtgatggacagtaagatcgtccaggtcgcacttaacggtttagagaatattcttcgcctgggcgagcaagagtctaagcagaatggtatcgggattaacccctattgcgcactgatcgaggaggcatacgggctggacaaaattgagtttctccagtctcatgaaaaccaagagatataccagaaggcttttgatctgattgagcattatttcggagtcgaagaagacgatcctagcatagtcccacaggtggacgagaatcagcagcagtttatcttccagcaacaggaggctccgatggacgggtttcaactgtag

SEQ ID NO: 15206 - DNA, 453 bp, synthetic construct
  source 1..453: mol_type = other DNA; note = Synthetic coding sequence
atgagaggcgaccgcggcagagggagggggggtcgattcggttcacgaggcggacctggcgggggctttcggccttttgtgccccatatcccatttgatttttacctatgtgagatggcattccctcgcgttaagcccgctcccgacgaaacgtcatttagcgaggccctccttaaacggaatcaggacctggcccctaacagtgcagagcaggcatccatcctctccctcgtgaccaagattaacaatgtcatcgataacctcatcgtagcccctgggaccttcgaagtccagatcgaagaggttcggcaggtcggttcatacaagaaaggcaccatgaccactggtcataacgtagcggacctggttgtgatcctgaagatcttgccaacttgtgagtgtgcctgcttttggtcatgggaacagaatatcgcactgggcctgggggtgtag

SEQ ID NO: 15207 - DNA, 348 bp, synthetic construct
  source 1..348: mol_type = other DNA; note = Synthetic coding sequence
atggcctttccaagagtgaagccagcacctgacgagacaagcttttccgaggccctcctgaagagaaaccaggacctggcaccgaactccgccgagcaggccagcatactgtctctcgtgaccaagatcaataacgttattgacaatctgatcgtggccccaggcacatttgaagtgcagatcgaggaggtccgccaagtgggcagctacaagaaaggcacaatgactactggccataacgtcgccgatctcgtggttatccttaagatcctaccaacacttgaggcagtcgcggcactggggaacaaagtcgttgaatcattgcgcgcccaggaccccagtgagtag

SEQ ID NO: 15208 - DNA, 312 bp, synthetic construct
  source 1..312: mol_type = other DNA; note = Synthetic coding sequence
atgagcgattgctacacagagctggagaaagcggttatcgtcttggttgagaatttctataaatacgtctctaaatacagcttggtgaagaacaaaatctccaagagttctttcagggagatgctgcagaaagagcttaatcacatgctgagtgacactggtaaccgcaaagcagctgacaagttaatccagaacctggatgctaatcatgacggacggatttcctttgacgagtattggaccctgattggtggaataactggcccaatagcaaaattaatccacgagcaagaacagcagagcagctcctag

SEQ ID NO: 15209 - DNA, 312 bp, synthetic construct
  source 1..312: mol_type = other DNA; note = Synthetic coding sequence
atgagtgattgctatacggaactcgaaaaggcagtaattgttctggtggaaaacttctataaatacgtgtcgaagtactccttggttaagaataaaatttctaagagctctttccgggagatgctgcagaaggaacttaaccatatgctctcggataccgggaataggaaggccgcagacaaactaatccagaacttagatgcaaaccacgatggtaggatctcctttgacgaatactggaccctcatcgggggcatcacaggacccatcgctaagctcattcatgagcaggagcagcagtctagcagctag

SEQ ID NO: 15210 - DNA, 312 bp, synthetic construct
  source 1..312: mol_type = other DNA; note = Synthetic coding sequence
atgagcgactgttataccgagctggagaaggctgtgattgtactagtggaaaacttctacaagtatgtgtccaagtattcccttgtgaaaaacaaaattagcaaaagttcttttcgcgagatgctgcagaaggagctgaaccatatgctgtctgacaccggcaaccggaaggccgccgacaaacttatccagaacctcgacgccaatcacgatgggaggatttcatttgatgagtactggacactcatcgggggtatcacgggacctattgccaagctgattcacgagcaggagcagcagtcctccagttag

SEQ ID NO: 15211 - DNA, 312 bp, synthetic construct
  source 1..312: mol_type = other DNA; note = Synthetic coding sequence
atgtctgattgttataccgagctagagaaggcggtgattgtgctagtggagaatttctacaaatatgtatcgaaatattccttggttaagaataagatctctaaaagttcattccgggagatgctgcaaaaagagttgaaccacatgctgagcgacaccggcaaccgtaaagctgcagacaaactgatacaaaacctggatgccaatcacgacggaaggataagtttcgacgaatattggacattgataggtggcatcacagggccaattgcaaaactgattcacgaacaggaacagcaaagctccagttag

SEQ ID NO: 15212 - DNA, 306 bp, synthetic construct
  source 1..306: mol_type = other DNA; note = Synthetic coding sequence
atgtcaaacacacaagcagaacgctctataattgggatgatcgatatgttccacaagtacaccggtagggatggcaaaatcgaaaagccatccttacttaccatgatgaaggagaattttcctaattttctaagtgcttgtgataagaaggggatccactatctggccactgtgtttgagaagaaagacaaaaacgaagacaaaaagatagattttagcgagttcctcagccttctcggtgacattgccgccgactatcacaagcaaagccacggcgccgccccctgctcgggtgggtcccagtag

SEQ ID NO: 15213 - DNA, 306 bp, synthetic construct
  source 1..306: mol_type = other DNA; note = Synthetic coding sequence
atgtccaacacccaggcagaaagatctatcatcggcatgatagacatgttccataaatataccggacgggacgggaagatcgaaaaaccttcacttctgaccatgatgaaagaaaacttcccaaactttctgtccgcttgtgacaagaagggaatacattatttggcaaccgtgtttgaaaaaaaggataaaaacgaagataagaagattgacttttcggaatttctctctctcctcggagatattgctgccgactatcacaaacagtcccacggcgctgcgccatgctccggcgggtctcagtag

SEQ ID NO: 15214 - DNA, 222 bp, synthetic construct
  source 1..222: mol_type = other DNA; note = Synthetic coding sequence
atgtcctatcaacagcagcagtgtaagcagccatgccagccaccgccagtctgtccaacacccaagtgccctgaaccgtgccctccgccaaaatgccctgaaccatatctgcctcctccctgcccaccggaacattgtcccccccccccctgtcaagataagtgcccccccgtccagccttatcctccttgtcagcaaaaatacccacccaagtctaaatag

SEQ ID NO: 15215 - DNA, 219 bp, synthetic construct
  source 1..219: mol_type = other DNA; note = Synthetic coding sequence
atgtcataccagcagcagcagtgcaagcagccttgccagccgccacctgtttgccctactccgaaatgtcccgagccgtgtcctcctcccaaatgtcccgaaccctgtcctccgcccaaatgccctcaaccttgtccaccgcagcagtgtcaacagaagtgtcctccagtgactccctcaccgccatgccagccaaagtgtcctcctaagtccaagtag

SEQ ID NO: 15216 - DNA, 219 bp, synthetic construct
  source 1..219: mol_type = other DNA; note = Synthetic coding sequence
atgtcataccagcaacagcaatgcaaacaaccctgtcagcccccacctgtgtgcccgaccccaaaatgccccgagccatgtcctccacctaagtgtcccgagccatgtcccccccctaagtgtccccagccctgccctccccagcagtgtcagcagaagtgcccccctgtgacaccgagccctccctgccagccaaagtgcccacccaaatcaaaatag

SEQ ID NO: 15217 - DNA, 219 bp, synthetic construct
  source 1..219: mol_type = other DNA; note = Synthetic coding sequence
atgtcctaccagcagcagcaatgtaaacagccctgtcagccgccaccggtttgccctacaccaaagtgcccggagccgtgtccaccccctaagtgtccagaaccttgtccctctccaaagtgcccacaaccctgtcccccacagcagtgccagcagaagtatccacctgtcaccccatccccaccctgccagcccaagtgcccaccaaagagcaagtag

SEQ ID NO: 15218 - DNA, 219 bp, synthetic construct
  source 1..219: mol_type = other DNA; note = Synthetic coding sequence
atgagttaccaacaacagcagtgtaaacaaccgtgccagcccccccctgtgtgccccactcctaagtgcccagagccatgccctcccccgaagtgccctgaaccctgcccatcccccaagtgcccccagccctgccccccccaacagtgccaacagaaatacccccctgtcacccccagccctccttgccagccaaaatgccctcctaagtccaagtag

SEQ ID NO: 15219 - DNA, 219 bp, synthetic construct
  source 1..219: mol_type = other DNA; note = Synthetic coding sequence
atgtcataccaacaacagcagtgcaaacagccatgtcagccccctccagtatgccctactccgaaatgtcctgagccctgcccgcctccgaagtgccccgagccttgtccaagccctaaatgcccccagccgtgcccccctcagcagtgtcagcagaaatatcctcctgtcaccccctctccgccctgccagccaaagtgtcctccaaaaagtaaatag

SEQ ID NO: 15220 - DNA, 8553 bp, synthetic construct
  source 1..8553: mol_type = other DNA; note = Synthetic coding sequence
atgcctaaactgcttcagggggtgataacagtgatcgacgttttttaccagtacgccactcaacatggcgagtacgacacactcaacaaggctgaattaaaggagctgcttgaaaatgagtttcaccagattctgaagaacccgaatgatcctgacaccgtcgatataatcctccaatcactcgaccgcgaccacaacaagaaagtagacttcaccgaataccttctcatgatttttaagctggtgcaagcccggaacaagattatagggaaagactactgccaggtgagtggctcgaaactacgtgatgacacacaccagcatcaagaagagcaagaagagaccgaaaaagaggagaataagcgccaagagagctcgttttcccactcgtcctggagcgccggcgaaaatgacagttactcccggaatgtgcgcgggagccttaagcctggaaccgaaagcatttctcgcaggcttagcttccagcgggatttctccggccagcacaatagttacagcggacagagttcctcgtatggtgaacaaaactccgacagtcaccagtccagcgggaggggtcagtgcgggagtggcagtggtcaatcacctaattacggacaacacggctctggctctggacagtcatcctcaaacgatacacatggttcaggcagcggacagagctcaggcttttctcaacacaagtcctcttccggccagagtagcggttactcacagcatgggtctggctcagggcactcttccggatacggtcagcacggttcccgttcaggacagtcttctcgaggcgaacgtcacaggagctcttcgggctcttcatcatcgtacgggcaacacggatccggcagccgccaaagtttgggacatggtcggcagggaagtggcagtcggcaatcgccttcacacgtgcgacatggcagtggcagcggtcatagctctagtcatggccaacatggcagtggctctagctacagttatagccgtggacactacgagtcgggtagtggccaaactagcgggttcggtcagcacgagagcgggtcagggcagtcctcagggtactccaaacatgggtctggatctgggcattcctctagccaggggcaacacgggtcgacgtcaggtcaagcatcctcttctggccagcatggaagctcttcacgtcagagctccagctatggacaacatgagagtgcatcccgccacagctcgggcaggggtcagcatagctccggtagcggtcagtctccgggtcatgggcagcgcggctcgggatctggccagtctccatcttccggccaacacgggaccggtttcgggaggtcctcaagcagtggaccctatgtgtctggaagcggatactcatccggcttcggccatcatgaatcctcatcagagcattccagtggatatactcagcatggctcgggatccggtcactctagcggacacggtcaacacgggtctaggtcaggccagtccagcagaggcgagcgacagggctcctctgcaggatcctcatcctcatacggtcaacacggcagtggctcccgacaaagcctgggccacagtaggcacggatctggcagcggccagtcacctagcccttctagaggccgccacgagagtgggtcccgccaatcctcgtcctatgggccacacggctatggcagcggccgttcatctagccgcggaccctacgagtccggttccggtcacagttcaggattagggcaccaggagtcaaggtccggccagagcagcggatatggacagcatggttcctcgtccggtcactccagcacacacggccagcacggtagtacctctggacagtcctcttcttgcgggcaacatggagcgacctcaggtcagtcttctagtcatgggcagcacgggtcagggtccagtcagagctctaggtatggacaacagggttcgggtagtggccagagccctagcaggggaaggcatggcagcgactttgggcacagttccagttacggtcagcatgggagcggttctggatggtcctccagtaacggccctcacggctctgtatcaggccagtcatcaggcttcggccacaaatccggtagcggccaaagttcggggtacagtcaacacggctccggctcttcacattcttctggctaccgcaaacacggcagtaggtctgggcagtcttccagatcagagcagcatgggtccagttctggcctgagttcctcctacgggcagcatggatccggatcccaccaatcaagtggacacggtcgccagggcagcggtagcgggcattccccctccagggtgagacacggctcctccagcggtcacagctcgagtcatgggcagcatggatcaggaaccagctgctccagttcatgcggccactatgaaagcggcagcggccaggcctccggatttggacagcacgagagtggatccggtcagggttacagccaacatggatccgccagtggtcacttttcaagccagggccgccatgggtccaccagcggccaaagcagctccagcggccaacacgattcaagttctggacagtcttcttcatatggacaacatgagagcgcctctcatcacgcgagtggaagaggtcggcacggtagtgggtctgggcagagtcctggacacggccagcggggtagcgggagcggtcaatccccctcatatggcagacacggaagtggttcaggccggagctcaagtagtggtaggcatgggagtggcagcggtcagagcagtggctttgggcataaatctagctctggacagagctctggttatacccagcacggatcagggtccggccatagttcttcttacgagcaacacggaagtcgctccggccagtcgtctcgcagtgaacagcatggcagcagcagcggcagttccagctcttacggtcagcatggatcgggaagtagacagagtctgggacacggccagcatggaagtggttccggccagtctccttcaccatccaggggccgacacggcagcggctcaggccaatcatctagctacgggccatataggagcgggtccggatggtctagcagcagaggaccctatgagagcgggagcgggcatagtagcggactcggccatcgggagagccgtagtggacaaagttcagggtatgggcagcatggttcttcgtcaggccacagctctacccatggacaacacggctccacatcgggtcaaagttcttcatgtgggcaacatggagcgtccagcggacagtcgtcatcccatgggcagcatgggtctgggtcctcccagtcgagcggttatggtagacaggggagcggaagcggccagagcccaggccatggccagagagggagcgggtctcgtcagtccccaagttacggacggcacgggtccggctcgggacgttcctccagctccgggcaacatggttctggcctcggagagtcctcgggcttcggccatcatgaatcctcctcaggccagagcagttcctattctcagcatgggagcgggagcgggcattcatctggatacggccagcacggttcaaggtcagggcaatcctcccggggtgaacgccacggttccagtagcggttcaagcagccactacggccagcatggttccgggtctaggcagtccagcggacacgggcggcaaggctcaggctccggccattcaccctcaagaggacgacatggtagtgggttgggacacagttcctcacacggccagcatggctcaggatcaggccggagcagctcccggggcccatatgagtctcggtccgggcattcaagcgtctttggccaacacgagtccggaagtggtcacagctctgcttactctcagcacgggagtggcagcgggcatttctgtagtcagggccagcatggcagtacttcaggacagtccagtaccttcgaccaggaaggaagctcaactggacagagctcttcatacgggcatagggggtcagggagctctcagtcatctggatatggtcgacatggtgctggtagcggccaatctccctctaggggacggcacgggagcgggtctgggcactcctcctcgtatggccagcacgggtcgggctccggatggagctcttccagcggtcggcatggatccggaagcgggcagtccagcggctttggacaccacgagtcaagttcttggcagtcctctggttgcactcagcacggtagtggtagcgggcacagctcatcatacgaacaacacggatccaggagcggacagtccagccggggagaaagacacggctcaagcagtggttcctcttcctcttatggccagcacgggtctggctctcgacaatcgctggggcacggccagcacgggagcggttcgggccagagtccttccccaagcagaggccggcacgggtccggctctggccagtccagcagttacagcccttatggcagtggttctggatggagctctagtagaggcccttatgagagtggtagttctcattctagtggtctgggacatagagaaagccggagcggccagtctagcgggtatggccagcacggttcaagctccgggcattcctctacccatggtcagcacggctccacatcggggcagagtagtagttgtgggcagcacggtgccagttccgggcagagctcctctcatgggcaacatggcagcggatccagccagagtagcggctatggtcgtcagggatcggggagcggacaaagccctggccacggtcaacgggggtcaggcagcagacagtcccctagctatgggcggcacggatcgggatcaggccgatcgtccagctctgggcaacatgggtctggcttgggcgaatcctcaggtttcgggcaccatgagtcaagcagtgggcagtctagttcctactcccagcatggatcaggctccgggcactcttccggctacggacagcacggcagtcgcagcggccagtcttcccggggcgagcggcacggctctagctcacggagcagcagtcgttatggccagcatgggagcggttctcggcaaagttcgggacacggaagacaaggatccggtagcggccaatctccatccagagggcgccatggttctgggcttggtcatagcagctcacacggacagcatggttccggcagtggtcggtcttcctccagaggcccatatgaatctcgaagcggacactccagtgtgttcggccaacatgaaagtggtagcgggcactcatctgcttacagccagcatggctcaggatccggccacttttgtagccagggacagcacgggagcacaagtggacagtctagtaccttcgaccaggaaggctcatctacgggccaatcctcgagccacggccagcacggatccggaagtagccagtccagctcatacggccagcagggttctggctccgggcaatctccaagccgggggcggcatggcagcggttctgggcatagctcgtcgtatgggcagcatggctccggttccggatggtccagctcaagcggccggcacggctccgggagtggtcagtcttccggcttcggtcaccacgagtcatcctcatggcagtcatccggatacacacagcatgggtctgggagcggccatagttcaagctatgagcagcacggctcaagatcaggccagtcttcacgcggagagcagcatgggtcttcatcaggctcatcctcttcctatggccagcatggtagcggttcacggcagtccctaggtcacggccagcacggaagcggcagtgggcagagtccttcgccttctaggggcaggcatggttccggtagcgggcagtccagctcttatggcccatacggaagcggttccggctggtcatccagtcgcgggccatacgagagcgggtcaggacatagctcaggattagggcaccgagaatccagatctgggcagagttccggctacgggcaacacgggtcttccagtggccactcgtcaacacatgggcaacatgggagtgcttccggacagtcttcatcttgtggacaacatggggcttcctccggccagagctctagtcacggacaacacggtagcggatcatctcagtctagcggctatggtcgtcagggcagtggaagtggccaatcccctgggcacggacagcgcggctccgggtcccggcagtctcctagctacggccgacatggctctggctctggacggtcaagctctagcgggcagcatggccccgggctgggcgagtcaagtggctttgggcatcacgaatcctctagcggccagtccagtagttacagtcagcacgggtctgggtccggacactcctccgggtacggccagcacggcagtcgatccggtcagtcttcccgtggggagcggcatggctcttccagcgggagttcctctaggtacggacagcacggtagcggcagccgacagagctcaggacatggccgacaggggagtggaagtggacatagtccgtcgcgcggacgacacggaagcggcagcggacacagtagcagtcatgggcagcacggatcaggttcaggacggtccagctcgcgtggcccctacgagtcacgcagtggccacagctccgtcttcgggcaacacgagtccggcagcggccactcctcggcgtatagtcagcatggatccggttcaggccacttttgctctcaggggcagcacggatcgactagtggacagagctcgacctttgaccaagaaggtagctctaccggccagagcagctctcacggccagcacggctctggtagctcacagagctctagttatgggcaacaggggagcggcagtggacagagcccctctagaggtcgtcacggatccgggtctggccactcctctagctatggccagcacggctctggatctggatggtcttcaagtagcggtcgccacgggagcggctccggccagtcttccggcttcggccatcacgaatcctcatcatggcaatcctctggatatacacagcatgggagcggctccggacattcatcctcctacgaacagcacggctcaaggagtggtcagtccagcagaggggagaggcacggctcttcaagcggcagttcctccagttacggacagcacgggagtggttctcgacaatctctcggccatggacagcatggcagtggatctgggcaatcaccttctccctctaggggaaggcatggcagtggctcgggtcagagcagctcttacagcccctacggctcgggtagcggctggtcttcgtcgcggggtccctacgagtctgggtccgggcattcctctggattaggtcaccgcgagtcccgttccggacagagttcaggctacggccagcatggttcgagttctggccactcaagcactcacgggcagcacgggtctacctcagggcagtcctcgtcctgcggtcagcacggggccagctccggccagtcctccagccacggacagcacggcagcggcagcagtcaatcaagcggttacgggagacagggatccgggagtggccaatcacctggtcatggacaacgcggttcaggcagccgccagagtcccagctacggtcggcatggctccgggagcggccggagttcaagctcgggccagcacggcagcggactgggggagtcctctggtttcggacatcacgaatcatctagcggccagtcatctagttactcacagcatggcagtgggagtggacactcctccgggtacggacagcacggctctcgtagcggacagagttcacgaggggagcgtcacggatcatccagcggctcaagtagtcactacggccagcacggttctggatctcgacagtctagcggacacggaagacagggttccggaagcggccagtctccttctcgtggccgacacggctcagggttgggacacagctcatcccacggccagcacgggtctggatccggtcgatccagctccagaggcccatatgagtcaaggctcgggcatagctccgtgtttggacaacacgagtccggttcaggccactcctcggcctacagccagcacggctctggctccggtcacttctgctcacaagggcagcatggcagcacatccggacaaagctccacctttgaccaggagggatcatcgacaggccagtcgtcatcttacggacaccggggcagcgggagttcgcagtcaagcgggtatggacgccatggggcagggagcggccagtccttaagccatggaagacacggatcgggcagtgggcaatcctctagttacggacagcacggaagtggatcagggcaaagctctgggtattcccagcacggctctggatcaggacaggatggttatagctactgcaagggcgggtccaaccacgatggaggttcttccggctcttacttcttgtctttccctagctccactagtccctacgaatatgttcaggagcaacgatgttacttctaccagtag

SEQ ID NO: 15221 - DNA, 876 bp, synthetic construct
  source 1..876: mol_type = other DNA; note = Synthetic coding sequence
atgagtagcggcgcggacgggggggggggagctgcggtggcagctcgcagcgacaagggctctccaggcgaagacggctttgtccccagcgccttggggaccagggaacattgggatgccgtatacgaacgcgagctgcaaacattcagggaatatggcgatacaggagaaatctggttcggggaggaaagcatgaataggcttattagatggatgcaaaaacacaaaataccactggatgcatccgttcttgacatcggtacgggtaacggggtttttcttgtggaattagccaagttcggtttctctaacatcacggggatcgattacagtccatcagcgatccagctgtcgggatccatcatagaaaaggagggcttgtccaatatcaaattaaaagtagaggactttctgaacctgagcacacaactatccggttttcacatttgtatcgacaagggcacattcgatgccatcagcctgaatccggataacgctattgagaaacgcaagcagtacgtgaagtccctgagtagagtcctcaaggtgaaaggattcttcctgattacttcatgcaattggactaaagaggagttgcttaacgagttttccgaagggtggtccacagttgccggcttctggctcactgcagctttgacgtcatgggcccaggctatcttctcaacgtctgcctctcgggtcggcggcacaaccggaacccaccaccatgcttggatcatattcgttttcctcgccgaaactaggttttgtcatgtagttcaggctgggcttgagttactgggatctagtgacagtccaacatggccacccaaagttctgggtctctaccatgcacgcccatccttggcattttag

SEQ ID NO: 15222 - DNA, 633 bp, synthetic construct
  source 1..633: mol_type = other DNA; note = Synthetic coding sequence
atggccccttggggcaaacggctggctggcgtgaggggggttttattggatatttcaggagtgctttatgattccggggccggcggtgggactgctattgcagggtctgttgaagccgtggctcgcctcaagagatccaggctcaaagtgcgcttctgcacaaatgaaagtcagaaatctcgcgccgagctcgtgggccagctgcagcggctggggttcgacatctctgagcaagaggtcacagctcctgcgccagccgcttgtcagatactgaaggaacagggtttgcgcccctacttgctcatccacgatggcgttaggagtgagtttgaccaaatagacacatcaaaccctaattgtgtggtgattgccgatgcaggagaaagcttttcgtaccaaaatatgaacaatgccttccaggtgctcatggagctggagaaaccagttctgatctcactcggtaaaggtaggtattacaaagaaaccagcggtctgatgctggatgttggcccctatatgaaagctcttgagtacgcttgtggcatcaaagccgaggtcgtgggcaagcccagcccagagttttttaagtctgctttgcaagctatcggagtggaggcccatcaggcccaatag

SEQ ID NO: 15223 - DNA, 813 bp, synthetic construct
  source 1..813: mol_type = other DNA; note = Synthetic coding sequence
atggccccctggggtaaaagactggctggggtgcgtggtgtcctgctggatatctcaggagtgctgtacgactctggagcgggcggcgggacggctattgccggctctgtcgaggctgtagcccgactcaagagaagccgtctgaaggtgaggttctgtaccaacgagtcgcagaaatcaagggcagagcttgtgggacagctacagcgcctggggttcgatatctcggagcaggaggtgacagcaccagccccagccgcctgccaaatattaaaggagcagggccttaggccatacctgctgattcacgacggggtgagatctgaatttgaccaaatcgatacgagtaaccctaactgcgtcgtaatagccgacgcgggggagtcattcagctaccagaacatgaataatgcattccaggttctgatggagcttgagaaacccgtgcttatctccctaggtaaaggaagatattacaaggagacctcgggacttatgctggatgtgggtccatatatgaaagctcttgagtacgcctgcgggatcaaagccgaggtagtggggaaaccctcacccgaattttttaaatctgcactgcaggcgataggtgtggaggctcatcaggcggtgatgatcggcgatgacattgtgggagacgttggcggcgcccagcggtgcggaatgagagcactgcaggtacgcacgggtaagttccgacccagcgatgaacaccacccggaggtcaaggctgatggatacgttgacaaccttgccgaagctgtcgaccttcttctacagcacgcagataaatag

SEQ ID NO: 15224 - DNA, 3948 bp, synthetic construct
  source 1..3948: mol_type = other DNA; note = Synthetic coding sequence
atggcagacacagacctgttcatggagtgtgaggaagaggagctcgaaccttggcaaaagattagcgatgtgatcgaggacagcgttgtggaggattataatagtgtggacaaaactactactgtgtccgtctcacaacaacccgtctctgccccagttcccattgccgctcatgcgtccgtggctgggcatctttcaacaagcaccactgtcagctctagcggcgctcagaactccgactccaccaagaagacacttgtgacgctcatcgcgaataataacgcccccggaacacaatttgtgaagccgactgtgggggttccccaggttttctcgcagatgacccccgtcaggccaggttccacgatgcctgtgcggcccaccaccaacacctttaccaccgtaatccctgccactcttaccattcgatcaactgttccgcagtctcaaagccagcaaactaaatcaaccccatccactagcacaacgccaactgctacacaacctaccagtctgggccaattggccgtgcagtccccagggcagagcaatcaaaccacaaaccccaagctggctccgagcttccctagtcctcccgcggtgagtatagcgtcttttgtgactgtcaagcggccgggcgtcactggtgaaaatagtaatgaggtcgcgaagttggtgaatacactgaacacaattccctctctgggacagtctcctggcccagtagtggtaagtaacaacagcagtgctcatgggtcccagaggacttcaggaccagagtcctccatgaaagtcactagcagcattcctgtgttcgatctccaggacggggggcggaagatttgtcctaggtgcaatgcccaattccgagttactgaggccctgcgcggtcatatgtgttactgctgtccggagatggtggagtaccaaaagaagggtaagtccctcgactctgagccatcggttcccagcgccgcaaagcccccttcccctgagaaaactgcccctgtggcaagcacacccagctccaccccaatccccgcgctgtctcctccaaccaaagttccggagcccaatgagaatgtgggcgatgccgtgcaaacaaagctcatcatgttggtcgatgacttctactatggccgcgatggcggtaaagttgcccagttgactaattttccaaaggtggctacctcatttcgctgcccccattgtacaaagcgcttaaagaataacatacgattcatgaatcacatgaagcatcatgtggaactggatcaacagaacggtgaagttgatgggcatactatctgccagcactgttacaggcagttttccactccatttcagttacagtgccacctcgagaatgttcatagcccatatgagtccaccactaaatgcaaaatttgcgaatgggcgtttgaaagtgagcccctgttccttcagcatatgaaggatactcataagccgggtgagatgccctacgtatgtcaggtctgccagtatagatcatccctttatagcgaggtcgacgtccattttagaatgattcacgaggacactcggcacctcctgtgcccgtactgcctcaaagtgttcaaaaacggaaacgcctttcagcaacattacatgcggcaccagaagcgtaacgtgtatcactgtaacaagtgccgcctgcagttcctgttcgccaaagataagatagagcacaagttacaacaccacaaaactttccggaagcccaagcaactggaaggcctgaagcctggtaccaaggtgacaatcagggcatctagaggtcagcctcgaacagtgccagtcagttcgaatgacacacccccaagcgcactgcaggaggccgcccctttgacctcctcgatggaccctctgcctgtctttctatatcctccagttcagagaagcattcaaaaacgcgcagtgcgcaagatgagcgtcatgggacggcagacgtgcctcgagtgctctttcgagatacccgactttcccaatcacttccccacatacgtacactgcagtttatgtcgctactcaacttgctgctcacgggcctacgccaaccatatgattaataaccatgtccccagaaagtctcccaaatatcttgctctcttcaagaattctgtgagtgggattaaactcgcctgcacaagctgcacttttgttactagcgtgggagatgctatggcaaagcatctggttttcaacccatcacatcggtccagctcaatattgcccagaggactgacctggatcgctcactcgcggcacgggcaaactagagatcgcgtccatgacagaaacgtgaaaaacatgtacccccctccgtcatttccaaccaacaaggcggcaactgtgaagagcgccggtgccactcccgcagaaccggaagaactccttaccccactcgctccagcactgccgtcccccgcctcgaccgcgaccccccccccaacaccaacccatccccaagcactggcactcccccccttggctacagagggagcggaatgtctgaacgtcgacgaccaggacgagggaagccctgtcacccaggagccagaactagcgagtggtgggggcggaagcggcggggtcggtaagaaggagcaattgagtgtgaagaaattgagggtggtgttattcgccctttgctgtaatactgagcaagccgctgagcactttcgaaatccacagcggcgcattcggcgttggctccggagattccaggcctcacagggcgaaaacctggagggaaaatatctttcttttgaggcagaagagaagctggctgagtgggtcctcacccagcgggagcagcaactccccgtaaacgaggaaacattgtttcagaaggcaaccaagatcggcagatcccttgaaggaggattcaaaatttcatacgagtgggcagtgcggtttatgttacggcatcacctaactcctcacgctcggcgcgctgtggcacacacactgcccaaagatgttgccgaaaacgccggtctgttcatcgatttcgtgcagaggcaaatccataatcaggatttacccttgtcaatgatcgtggcaatcgatgagatctcactgttcttagataccgaggtgctatcaagcgatgaccgcaaagaaaatgctctgcagactgtgggtacaggggagccttggtgtgacgtagtcctcgctatactcgcggacggcaccgtgctcccaacactggttttctatcgcgggcagatggatcaacctgctaatatgccagattctattcttctcgaggctaaagaaagcgggtactctgacgacgagatcatggagctctggtcaacccgcgtatggcagaagcacacggcctgccagagatccaaaggcatgctggttatggattgtcatcggacgcatctgagtgaggaggtcctggccatgttatccgccagcagcactctgcctgccgtcgtccccgccgggtgcagttccaagatccagcccctggatgtgtgtatcaagcggaccgtgaagaactttcttcataaaaagtggaaagagcaggccagagagatggcagacactgcatgcgatagtgacgttctcttgcagctagtcctggtgtggctcggcgaggtcctcggagtgatcggtgactgtcccgagcttgttcaacgcagcttcctcgttgccagcgtcttaccggggcccgatggaaacatcaacagcccaaccagaaacgcagatatgcaagaagaactgatcgcaagccttgaagaacaactgaaacttagtggcgaacattccgagtcttcgacccccaggccacgctcgagtcccgaagaaaccatcgaaccagagtcgctgcaccagctctttgagggagaatctgaaaccgagagtttctatggttttgaagaggccgacctggatctcatggaaatttag

SEQ ID NO: 15225 - DNA, 2406 bp, synthetic construct
  source 1..2406: mol_type = other DNA; note = Synthetic coding sequence
atgggagacaccgtcgtagaaccggcccccctaaaacctacatccgagccaacatctggtccgcctggcaacaatggcgggtcactactctcggttatcaccgagggtgtgggcgagctgtccgtgatcgatccagaggtggctcagaaagcctgtcaggaagtgttagagaaggtgaagcttctgcacgggggcgtggccgtaagctcacgcggaacacccctggaattggtaaatggggacggtgtggattctgagatcaggtgcctcgatgaccctccggctcagatacgagaagaagaagacgagatgggagctgccgtggcaagcggaactgctaagggggctaggcgcagaaggcagaacaacagcgcgaaacagtcatggctcctgcgtttgtttgaatccaaactgtttgacatcagcatggcgatttcttacctgtacaattccaaagagcccggagttcaagcatacatcggtaacagattattttgtttcaggaatgaagatgtggacttttacctgccacagttgctgaacatgtatatccacatggacgaagacgtgggcgacgctataaagccctatatcgtgcatagatgtcggcagagtattaacttttcactccagtgcgccctgctgcttggcgcctattcttctgacatgcacatttctacgcagcgtcattctagaggcacaaagctgcgcaagctgattctcagtgatgagctgaagcccgcccatcgcaagagagagctgccaagtctgagccccgcccccgatacaggcctatcaccatcgaaacgcactcaccagcggtcaaaaagcgacgcaacggcctccataagcctgagctcaaacttaaagcgtaccgctagcaacccaaaggtggaaaatgaggatgagccggtgcgccttgcccccgagcgagaattcattaaatctctgatggcgatcggaaagcgactcgccaccctccctaccaaggaacaaaaaacgcagcgccttatcagtgaactctctctgctgaaccacaagctacccgccagagtgtggctgcctacagcaggtttcgaccaccacgtcgttagagtgccacatacccaagccgtggtgctgaatagcaaggataaggctccatatctcatttacgttgaggtactggagtgcgagaatttcgataccacctctgttccggcaaggattcccgaaaatcggatccgcagcacccgtagcgtggagaatcttcctgagtgcgggattactcatgagcagagagcaggctcgttttcaactgttccaaactatgataatgatgatgaggcttggtcagtggatgacatcggcgaactgcaggtcgagctgccagaggtgcatactaactcatgcgacaacatttctcagttttcagtagactcaataacttcacaggagagtaaggagccggtgtttattgcggccggcgacatccggcgcaggctttcagaacagttggcccacacaccgactgctttcaagcgagacccagaagaccctagcgcggttgcccttaaggagccatggcaggagaaagtaagacgcatacgggagggatccccgtatggacacctcccaaactggcgccttctttccgttatagtgaagtgtggagatgatctcaggcaggaactgcttgcattccaggtcctgaagcagcttcagtctatctgggaacaggagcgagttcccctgtggatcaaaccctacaagatattagtgataagtgcggattcaggtatgattgaacccgtggtgaacgccgtgagtattcaccaggtgaagaagcaaagtcagttgtctctgctcgactatttcttgcaggaacacggaagttatactaccgaggcatttctgagtgcacagagaaatttcgtgcagagttgcgctggctattgcctcgtctgctacctactgcaggtgaaggatcgccataacgggaacatcctgctcgacgcagagggccatataatacatattgattttgggtttattctgagctcctccccgaggaatcttggattcgagacctctgctttcaagcttaccacagaattcgtggacgtgatgggaggtctagacggtgacatgtttaattactacaaaatgctcatgctgcaagggcttattgctgccaggaaacacatggacaaggtcgtccagatcgtcgagatcatgcaacaaggaagccaattaccttgctttcacgggtcaagcaccatcagaaacctcaaagaaaggttccacatgtcaatgaccgaggagcagttgcagctcctagtggagcagatggtggacggctctatgagaagtattaccactaaactgtatgacgggtttcagtaccttaccaacggtattatgtag

SEQ ID NO: 15226 - DNA, 2451 bp, synthetic construct
  source 1..2451: mol_type = other DNA; note = Synthetic coding sequence
atgggcgacaccgtggtggaacccgccccactgaagcctaccagcgagcctacaagcggccccccaggcaataacgggggttccttgctgtcagtaattaccgagggggtgggcgaacttagcgtaatagacccggaggtggcccaaaaggcatgccaagaggtgctggagaaggtgaaactgctgcatggtggggtagccgtgtcatccagggggacgcccttagagcttgtgaacggagatggggtcgacagcgaaatccgttgtttggacgatccccctgcccaaatccgcgaagaggaagatgagatgggcgcagccgtcgcctcgggcacagctaagggggcaaggaggaggcgccagaataacagcgcaaagcagagttggctgcttaggttatttgaatctaagctcttcgatattagcatggccatatcatatctgtacaacagcaaggagccgggtgtgcaggcctacataggcaatcgacttttctgctttcggaatgaggacgtggacttctatctgccccagctattaaatatgtacattcacatggatgaggatgtgggagatgccattaaaccgtacatcgtccacagatgtaggcagtccataaatttctccctgcagtgcgccctgcttctgggcgcctactcaagcgacatgcacatcagcacccaaagacactccaggggaacaaagctgcggaagctgattctgtcagacgagctcaagcctgcacatcgcaagcgtgagcttccctccctttccccggccccagacacggggctctcaccttcaaagaggacacaccagagatctaaaagtgacgctaccgcatcgatctcactctcctccaacctcaagcgaaccgccagcaatcccaaggtagagaacgaggacgaggagcttagcagtagcacagaatctattgacaattccttttcttctccagtgagacttgcccccgaacgagaattcatcaagtcccttatggctataggcaagagactggccacactgccgacaaaggagcagaaaactcaacgcctgatcagtgagttgtcacttcttaaccataaacttccggctcgggtctggctgcccactgccggctttgatcatcacgtcgtccgcgtcccgcacactcaggccgtcgtgcttaactctaaggataaggccccctacctgatctatgtggaagtgctcgagtgtgaaaactttgacactacctccgtgcccgccagaattcctgagaataggatcagatctacacgcagcgtggagaacttacccgagtgtggcatcacccatgagcagagggccgggagcttttcgacagtgccaaactacgataacgatgatgaggcttggagcgtcgatgatatcggcgagctgcaggtggagctccccgaagtgcataccaactcctgcgacaacatcagccagttttcagttgattcaattacttcccaggagagtaaagagccggtattcattgccgctggggatattagacgcagattatcagagcagttagcccacacgcccaccgctttcaaacgggatcccgaggacccatcggctgtggccctcaaagaaccctggcaagaaaaggtaagaaggattcgggagggcagtccttatggccatctccccaattggaggctcttgtccgtcattgtgaagtgtggcgacgatttgaggcaggaactgcttgcgtttcaggtcctgaagcagctccagagtatttgggagcaagaaagggtccctttgtggatcaaaccttataagattttggtgattagtgccgattcaggcatgattgagcctgtggtaaatgcagtgagcatacaccaagtaaaaaaacagtcacagctcagcttattggattattttctccaagaacacggctcatacacaacggaagcgtttctgtcagcacagcgcaacttcgtgcagtcttgcgccgggtactgcttggtctgctatttgctgcaggtgaaagacaggcataacgggaatatccttcttgacgccgaaggacacattatacacatagactttggattcattttgtcatcatctccgcgaaatctgggattcgagaccagcgcttttaagttgacaactgagttcgtcgatgtcatgggcggattggatggcgatatgtttaattactataagatgctaatgcttcaaggactcatcgccgcaagaaagcacatggataaggtagtccagatagtggaaatcatgcagcagggctctcagttaccttgtttccatggtagctctacgattcggaacctcaaagaacggtttcacatgtcaatgacggaggaacagcttcagcttttagtggagcagatggttgatggcagtatgcggagtatcaccaccaaactttatgatgggttccagtacctgactaacggaataatgtag

SEQ ID NO: 15227 - DNA, 2406 bp, synthetic construct
  source 1..2406: mol_type = other DNA; note = Synthetic coding sequence
atgggtgacacagtcgtggaacctgcaccactcaagcccacaagcgagcctacgtccggacctccagggaataatggaggctcccttttgagcgtgattacagagggtgtgggagagctgtctgtgatcgacccagaggtcgcccagaaggcatgtcaggaggtgctggagaaggtgaaactgctgcatggtggcgttgcggtaagcagcaggggaacaccactggagttagttaacggagatggggtggattctgaaattagatgtttagatgaccctccggctcagattcgcgaggaggaggatgaaatgggggcggctgtcgccagtggaacggctaaaggggcccgccggcggaggcagaacaattccgcaaaacaatcctggctgcttaggctctttgaaagtaaactgtttgacatttccatggcaatctcatacctttacaattcgaaagagcccggcgtgcaagcatacataggtaacaggctgttctgtttcaggaatgaggatgtggatttttacctcccacagctgctaaacatgtatatccatatggatgaggacgttggtgatgcaataaagccatacattgtccaccggtgccgccagtccattaacttctctctgcaatgcgccttgttactgggcgcgtactcctccgacatgcacatatccacccagcgccattctcgcgggaccaagcttcgaaagcttattcttagtgatgagctgaagccagcccatcggaagagagagcttcccagtctgtctcccgcgccagacactggcctgagcccttccaagaggacccatcagcgatccaaaagtgatgctacagcttcaatctccttgagctctaatctaaagcgcaccgccagcaacccgaaagtcgaaaacgaggatgaacccgtcagactggctccggaaagagagttcatcaaaagcttgatggccatcggtaaacgattggcgaccctcccgacaaaggaacagaaaacccaacggctgatctctgagttgtctctgctgaatcataaactgccagctcgagtctggcttcccactgcagggttcgaccatcatgtggtgagggtgccgcacactcaggcagtggtgctgaatagtaaagataaggccccttatctcatctacgtggaagtactggaatgcgaaaactttgataccacctccgtccctgctagaatccccgagaacaggatacggagtacacggtccgtggagaaccttcctgaatgcggaatcacccacgagcagcgcgccgggagtttcagtactgtcccaaactacgacaatgacgatgaagcctggagcgtggatgatattggcgaacttcaggtggaattaccagaagtccatacaaattcttgcgataacataagtcagtttagtgtcgactccattacatcacaagaatccaaagagcccgtgttcatagcagccggagatatcagaaggagactgagcgaacagctcgctcatacgcccactgcctttaaacgtgatccggaggatcccagcgccgtagctctgaaggagccttggcaggaaaaagtacgaagaatcagggaaggttcaccctatggacatcttcccaattggagactactctcggtgatcgtaaaatgcggggacgacttacgacaggagcttttggcctttcaagtactaaagcagttgcagtcgatatgggaacaggagcgcgtgcctctctggattaagccttacaaaattctggtgatttctgcagactccggcatgatcgagcctgtggtaaatgccgtgtcaattcatcaggttaagaaacagtctcaattgtccctattggattatttccttcaggaacacggatcttacacaaccgaagctttcctgagcgcccagcgcaactttgttcagagttgcgctggctattgcctggtatgttaccttctccaagtcaaggatcggcataatggcaatatactcttagacgcagagggacatatcatccatatcgattttggctttattcttagcagctcacccaggaacttgggctttgagaccagtgcttttaagctgacaacagaattcgtggatgtaatgggcggattagacggcgatatgtttaactactacaaaatgttaatgctgcagggcttgatcgctgctcgcaagcacatggacaaagtagtgcagattgtcgaaataatgcagcaaggatcccagctcccatgtttccacggcagttccaccattcggaaccttaaggagcgctttcatatgtctatgacggaagagcagctccagctcctcgtggaacagatggttgatgggagcatgagaagcattaccaccaaactgtatgacggattccagtatctgacgaacggcattatgtag

SEQ ID NO: 15228 - DNA, 2487 bp, synthetic construct
  source 1..2487: mol_type = other DNA; note = Synthetic coding sequence
atgagatttttggaagcccggagcctggccgtcgctatgggggatacagtcgtcgagcccgcccctctcaagcccacttctgagcctacaagcggtcccccagggaacaatggcggatcacttctgtccgtgatcacagagggagtaggcgagctgagcgttattgaccctgaagtggcacagaaggcctgccaggaggtgctcgagaaagtgaaactgctgcacgggggggtggcagtatcgtcccggggtacgcctctggagctggtaaacggcgacggcgtcgacagcgagatacggtgtctggacgatccacctgcacaaattcgcgaggaagaggatgaaatgggggcggcagtcgctagcggcactgcaaagggcgctagacgacgccgccagaacaacagcgctaaacagtcgtggctgctacggctgttcgagtccaaattattcgacatttcaatggcgatcagttacttgtataatagcaaggagcccggggtgcaggcctacattggaaacaggcttttttgtttccggaacgaggacgtggacttttacctgccacagctgctgaacatgtatatacatatggacgaggatgttggggacgccatcaagccttacatcgttcaccggtgccgccagtctatcaacttcagtctacaatgtgccctccttctcggggcttactcttctgatatgcacatcagtacgcaacgccattcacgaggaacaaaactccgaaaactgatcctgagtgatgaactgaaaccagctcatcgtaaacgggaactgccttcacttagcccagctccggacaccggcctttcaccatccaaacggacccatcagcgttccaagagcgatgccacggcttctattagcttaagtagcaatcttaagcggaccgcaagcaaccctaaggtggagaatgaggacgaggagctctccagtagcactgagtccattgataatagcttctcgagcccggtgcgcctggctcccgaacgggagtttataaagagcctgatggccatcggaaagcggctggcaacactgccaactaaagagcagaagacacagcgacttatcagcgaactttctctgctgaatcataaactcccagccagagtgtggctgcctaccgccggctttgaccatcacgtggtgagggttcctcacacacaggcagtggttctgaattccaaggataaggcgccctatctgatctacgtagaggtgctcgagtgcgagaactttgacaccacctccgttcccgctcggatcccggaaaatcgaataagatccacacgaagtgtggagaaccttcccgaatgcggaattactcacgagcaacgcgctggaagcttttccacggtgcccaactacgacaacgatgacgaagcttggtctgtggatgatattggtgagctgcaggtcgagctcccagaggtgcacaccaactcatgtgacaacatcagccagttttcagtggatagtatcaccagccaagagtctaaggagccagtgttcatcgctgcgggggatatcagacgacgcttgtcagagcagctggcccacacgccaacagcatttaaaagagatcctgaagacccgtccgctgtcgcgctgaaggagccttggcaggagaaagttcggaggataagggagggttcgccctacggccacctgcccaactggcgactgctcagcgtgatcgtcaagtgcggagacgacctgcgacaagagctccttgccttccaggtgctgaaacagctgcagagcatctgggaacaagaacgcgttcccctgtggatcaaaccatataaaatactcgtgatctccgccgattctgggatgatagaacccgtcgttaatgctgtgtctatccaccaggtaaaaaagcagtctcagttgagcttgttggattacttcctgcaggagcatggaagctacactacggaagcatttctctccgcgcaacgtaacttcgtccagagttgcgctggatattgcctcgtctgctatctgctgcaggtgaaggaccggcacaatgggaatattctgcttgatgcagaaggacacatcatccacatagacttcgggttcatattgtcgtccagtccacgcaacctgggatttgagacctctgctttcaagctgactacagagttcgttgatgtaatgggcgggctagacggtgacatgtttaactattataaaatgcttatgctgcagggcctgattgccgctcgaaagcatatggataaggtagtgcagattgtggagattatgcagcagggaagtcaactgccctgttttcatggcagcagcaccatcaggaatctgaaagaacgattccacatgtccatgaccgaggaacaacttcagctgctcgttgaacagatggtggacggctcgatgcggtctattacaaccaaattgtatgacggattccagtacctgacaaacggaatcatgtag

SEQ ID NO: 15229 - DNA, 1143 bp, synthetic construct
  source 1..1143: mol_type = other DNA; note = Synthetic coding sequence
atggtcctggagtccaccatggtctgtgtcgataactccgagtacatgagaaatggtgatttcctcccaacacggctgcaggcccaacaggatgctgtcaatattgtgtgccatagcaaaacacggagcaatccagagaacaatgtgggattaataacactggctaatgattgtgaggtcctaacaactctgactcctgataccgggcggatcctgtcaaagctccatacagttcagccgaagggcaagatcaccttttgcaccgggattcgcgtggcacatcttgcactcaaacatagacaaggaaaaaaccataaaatgcggataattgcttttgtggggagcccagtcgaggacaacgagaaagatctggtcaaactggccaaacgcttaaaaaaggagaaggtgaatgtggacatcattaacttcggggaagaagaggtgaatactgagaaactgaccgcgttcgtcaataccctgaacggcaaggatggcacgggatcgcatctggtgactgtgccccccggcccttcgcttgctgatgctttgataagttcacccatactcgccggcgaagggggggccatgcttggattgggcgcgtccgactttgaatttggcgtagacccctccgctgatccggagctagcgttagccctgagagtttctatggaggagcaaaggcagcggcaagaggaagaagccaggcgcgcggccgcagcgtcagcagctgaagcaggtatcgcaaccactgggacagagggtgagcgcgattctgatgatgccctgttgaagatgaccatctctcagcaagaattcgggcgtacgggactccctgaccttagctccatgaccgaggaagagcagatagcctatgccatgcagatgtcactgcagggggccgagttcggccaggctgagtcagctgatatcgacgcctcttccgccatggacacttctgagcctgccaaagaggaagatgattacgatgtcatgcaggaccccgaattccttcagtccgtcctggagaacctgcctggtgtggatccaaacaacgaggccatcagaaatgccatgggttctctcgcctctcaggcgacgaaagatggcaaaaaagataaaaaagaggaagacaaaaagtag

SEQ ID NO: 15230 - DNA, 1134 bp, synthetic construct
  source 1..1134: mol_type = other DNA; note = Synthetic coding sequence
atggtgcttgaatcgacaatggtttgcgtcgacaactccgaatacatgaggaatggggactttttacctacccggctgcaagctcagcaggacgccgtgaatattgtgtgccactccaagacccgctccaaccctgaaaataacgtgggactcatcactctggctaatgattgcgaggtcctcaccacactgacccccgatacaggaagaattctgagcaaactgcacactgtgcagcctaaaggaaagatcactttttgcacgggcattagagtggcccatttggcactgaagcaccgacagggcaagaaccataaaatgcgtattattgcttttgtggggagtccagtggaagataatgaaaaagatctagtcaaactagctaaaagactcaagaaggagaaggttaatgtggacatcataaactttggcgaggaggaagttaacacggaaaagctcaccgcattcgtcaatactctcaacgggaaggacgggacagggagccaccttgtgacagtacctcccggcccaagtcttgctgatgcgctcattagctctcccatcctggcgggcgaaggaggcgcaatgttgggtctcggcgcctccgattttgagtttggggttgacccttctgctgacccagagctggcactagccttacgggtttccatggaagaacagcggcaacggcaggaagaagaggccaggcgcgccgccgccgcatcagccgcagaggctgggatcgccaccacaggaacagaggattcagacgatgctcttttgaagatgaccatctctcagcaggaatttggaaggacaggactgccagatctgtcttccatgactgaggaggagcaaattgcctacgcaatgcagatgagcctgcaaggtgcggagttcgggcaagcagaatccgcagatatcgatgcctcatccgcgatggatacatcagagcccgctaaagaagaagatgactatgacgtgatgcaggaccccgagtttttgcagagcgtgttggagaacctcccaggagtggaccccaacaacgaagcgattagaaacgcaatgggatcgctcgcaagtcaggccacaaaagacgggaagaaggataaaaaggaggaggataagaagtag

SEQ ID NO: 15231 - DNA, 933 bp, synthetic construct
  source 1..933: mol_type = other DNA; note = Synthetic coding sequence
atgcggccagcccggcactgggagacacgattcggtgcccgcgatttcgggggtttccaggactgctttttccgggacagattaatggataccgccaggatcgccgtcgtcggggccggcgtggtgggtctctctactgccgtgtgtatctccaagctggtgcctaggtgttcagtgactattatcagtgacaaatttacaccggataccacaagtgatgtggctgccggcatgctcatcccacacacctaccccgatacccctatccacactcagaaacaatggttcagagagacattcaaccacctgttcgcaatagccaacagtgccgaggccggcgatgccggggttcatcttgtgtctgggatcaaaggctccggaggctggactctaaccagaagaatcgaagatctgtgggagctgcacccgtccttcgacatcgtagtcaattgctcagggctgggcagtcgacagctggccggggactccaaaatcttccctgtcagggggcaggtgctgcaggtgcaggccccctgggtagagcattttatccgagatgggtctggactcacctacatctacccgggaaccagtcacgtgactctgggcggtaccaggcaaaagggggattggaacctgtcacctgacgctgaaaattcccgggaaattctctctcgttgctgtgcactggagccctctctccatggagcatgcaacattcgagagaaggttggattgcggccttacagaccaggtgtgaggcttcagacggaactgctggcacgggacgggcagcgattacccgtagttcatcattacggccatggcagtgggggaatatctgtgcactggggtaccgctctcgaggctgcaagactggtatccgaatgtgttcatgctctgcgcactcctatccctaagtcaaacctgtag

SEQ ID NO: 15232 - DNA, 1110 bp, synthetic construct
  source 1..1110: mol_type = other DNA; note = Synthetic coding sequence
atgcggcccgcacgccactgggaaacccgctttggcgcacgcgacttcgggggctttcaggactgctttttccgagataggctgatggacacagccaggatcgccgtggtcggggcaggtgtcgtgggcttgtctaccgccgtatgcatttctaaactcgtccctaggtgttctgttaccatcatttccgataagttcacaccagacacaacgagtgacgtggcagcagggatgctgatccctcacacatatcctgacacccctatccacacgcagaaacagtggttccgcgaaaccttcaaccatttattcgcaatcgcaaactcagcagaggctggtgatgctggtgtgcacctggtatccggatggcaaatcttccagtccacacctactgaggaagtgcccttctgggccgacgttgttctgggatttaggaaaatgaccgaggctgaactcaagaagttcccccaatatgtgtttggtcaggccttcaccacattaaaatgtgagtgtcccgcttacctgccatggttggaaaagcggattaaaggctcaggaggttggacactcacacgccggatcgaagacctttgggagctccatcctagctttgatattgtggtcaattgctcaggcttgggcagtcgccagctagcgggagactcaaagattttccctgtaagaggccaagttctgcaggtgcaggccccatgggtggaacatttcattcgggatggaagcgggctgacctatatctatcctggaacatcacatgtcaccttgggaggcaccagacagaaaggggattggaatttgtctcccgatgctgaaaattccagagaaattctctcaaggtgctgcgctttagaaccttctttgcacggcgcatgcaacattcgcgagaaggttgggctcagaccctataggccaggtgtgaggctccagactgagctgctcgcccgggatggccagcgcctcccagtggtgcaccattatggacatggcagcggcgggatttctgtgcactggggcaccgcactggaagctgcgcgtctagtttcagaatgtgtgcacgcactaagaacacctatacccaagagtaacctgtag

SEQ ID NO: 15233 - DNA, 1026 bp, synthetic construct
  source 1..1026: mol_type = other DNA; note = Synthetic coding sequence
atggacaccgctagaatagctgtcgtaggagccggggtcgtgggtctttctaccgcagtgtgtataagcaagttggtaccgagatgctccgttacaattatcagtgataagttcaccccagacaccacttctgacgtggcagcagggatgctcatcccacacacttacccagacacccctatccacacccagaaacagtggtttcgggagacattcaatcatctatttgccattgcgaactctgctgaggctggagatgctggagtacatttggtgagcggatggcaaatctttcagagcacccccactgaggaagtgcccttctgggccgatgtagtactgggcttccgaaaaatgacagaggcagagctgaaaaaattccctcagtacgtgttcggacaagcctttacgacattaaagtgtgaatgccctgcgtacctgccctggttagaaaagaggattaaagggtcaggtggatggaccctcacccgacggatcgaggacttgtgggagttacatcctagctttgacatcgttgtaaattgtagtggactcggctcgcggcaactggccggtgactctaaaattttccccgtgcgaggccaggtgctgcaggtccaggccccttgggtggagcactttatcagagacgggtccgggttgacctacatttacccgggaacatcacatgtgactctcggggggactcgacagaaaggagactggaacctgtcccctgacgccgagaatagccgagagattttatccagatgctgcgccctggagcctagcctgcacggagcatgtaatatacgggagaaggtggggctacgcccttatcggccaggcgtgagactacagactgagctgcttgccagggatgggcagaggctgcccgtagtccatcactacggccacggtagcggtggcataagcgtccactggggcacggcactcgaggctgcgcgactcgtgtccgagtgcgtccacgcgttgcgaaccccaattcctaagtctaacctttag

SEQ ID NO: 15234 - DNA, 1074 bp, synthetic construct
  source 1..1074: mol_type = other DNA; note = Synthetic coding sequence
atgggtacaatacaagaggccggtaagaagaccgatgtcggcgtgagagaaatagctgaggccccagagctgggcgcggccctgcgccacggagaactcgaacttaaagaagaatggcaagacgaggagtttccccggctgttgcccgaagaagccggcacctccgaagatcctgaagatcctaaaggggatagccaggctgccgcaggcacacctagtacactggcgttatgcggccagcggcctatgaggaagcgtctctctgccccggagctgcgtttgtcactcaccaagggaccaggaaatgatggggcgtcgcccacccaatcggctcccagtagccccgatgggagctctgatttggagatcgacgaactggagacaccgtctgacagcgagcagctggactcaggtcatgagtttgaatgggaagatgaattacccagagcagagggtctcggtacgagtgaaacagcagaaagacttggtcggggttgcatgtgggacgtgactggggaggatgggcatcattggcgggtctttagaatgggtcctcgggaacagcgggtggatatgacagtgatcgagccctataagaaggtgttgagtcatgggggataccatggggacggcctgaacgctgttatcctttttgcctcctgttacctgccccgttcgtccattccaaactatacatacgtaatggagcatctgtttcggtacatggtgggcacactggaactccttgtggctgaaaattacctcttggtgcacctctcgggcggtacgtcacgggcccaggtaccgcccttgagctggatccgtcaatgttaccgaactctggaccgccgcctcagaaagaacctgcgggctctcgtggtagtccacgcgacgtggtatgtcaaggcattccttgctctcctccggcccttcatcagcagcaagtttactcgaaagattaggttcctggactccctcggcgagttagctcagctgatttcactcgatcaagtgcacatccctgaagctgtgcggcagctggaccgggatctgcatgggagcggcggcacctag

SEQ ID NO: 15235 - DNA, 1269 bp, synthetic construct
  source 1..1269: mol_type = other DNA; note = Synthetic coding sequence
atgctgaagttcctcgcgaaaggcgaagttccgaagggatcttgtgaggatgagcctatggattccacaatggacgatgcagtcgctggggacttcgccctaatcaataaactggatatccaatgcgatctcaagactctctctgatgatattaaagaaagtcttgagagtgaaggcaaaaatagcaagaaagaagagccgcaagagctgctgcagtcacaggatttcgttggcgaaaaactgggctctggtgagcctagccacagtgttaaagtgcacaccgtgcccaagcccggcaagggggcggatctaagcaagcctccatgtcgtaaagcaaaggagattcgaaaggaaaggaaacggctgaaattaatgcagcaaaacccggcgggcgagcttgaaggctttcaggcacaggggcacccaccatccctgtttcctcccaaggctaagagtaaccagcctaagtctttagaggacttaatctttgaatcactcccagaaaacgcaagtcacaaattagaagtgcgactcgtccctgtcagttttgaggatcccgaattcaagtcttccttttcccaatcattttccttgtacgttaagtaccaggttgcaattcatcaggacccgcccgacgaatgtggaaaaaccgagtttacaaggttcttgtgttcttcgcccctagaggccgaaaccccccccaacgggcccgattgtggatacgggtcttttcaccaacagtattggttggatggcaagattatcgctgttggcgtgattgatattcttcctaactgcgtctcctccgtctacctctactacgacccggactattcgttcttgagtttgggggtttactcagcgctacgagagatagccttcacacgccagctccacgaaaagacatctcagctctcttattattacatggggttttatatacatagttgcccgaagatgaagtacaaaggccagtacagaccgtccgatttactgtgccccgaaacatatgtatgggtcccaattgagcagtgcctcccgtctctcgagaatagcaagtattgtcggttcaatcaggacccagaagccgtagatgaggatcggtctaccgagcccgaccgcctgcaggtgttccacaagcgagctatcatgccttatggggtctataaaaagcagcagaaagacccttcagaggaagccgcagtgcttcaatatgcctcgctggtgggccagaagtgtagtgaaaggatgctgctgtttcggaattag

SEQ ID NO: 15236 - DNA, 1557 bp, synthetic construct
  source 1..1557: mol_type = other DNA; note = Synthetic coding sequence
atggccttctgggcgggcggttccccatcagtcgtggattacttcccctcggaggacttttaccgttgtggttactgcaaaaatgaatcaggatcgaggtcaaacggcatgtgggctcactctatgaccgtgcaggattaccaggatcttatcgaccgcggctggcggaggtctgggaaatacgtttataagccagtaatgaaccagacctgctgcccccaatacacaataaggtgtcggcctttgcagtttcagcccagtaagagtcacaaaaaagtgttaaaaaaaatgctgaagttccttgccaaaggggaagttcccaaaggatcgtgtgaagatgagccaatggactcaacaatggatgacgctgtggccggtgattttgccctgatcaataaacttgatattcagtgcgacctaaagaccttgagtgacgatattaaggaaagtctggagagtgaggggaagaacagtaagaaagaggaaccacaagaactgctacagtcccaagattttgtgggcgaaaaacttggatcaggcgagccctcccactccgtgaaagtccacaccgtgcctaagcctggaaaaggggctgacctctcgaagcctccttgcaggaaagcgaaggaaatacgcaaagagaggaagcggctcaagctgatgcagcagaatcctgcaggagaactggaaggtttccaggctcagggacatccgccctccctttttcctcctaaagcgaaatcaaaccagcccaaatccctcgaggatcttatattcgagagcttgcccgagaacgcctcacacaagctagaggtgaggctagttccagtatcttttgaagatccagaatttaagtcctccttttctcaaagtttctcattgtatgtgaaatatcaggtggcaatccaccaggacccacctgacgaatgcgggaagaccgagttcacgcggttcctctgtagctctcctttggaagccgaaacgcctcccaacggaccagactgtggatacggatcttttcaccagcagtactggctcgatggaaaaataatcgccgtcggcgttatcgatatcttacctaattgcgtgtctagcgtgtatctctactacgatcccgattactcattcctttctctgggggtctacagcgccctccgagaaatcgcattcacacgccaactgcacgaaaaaacctcccagctatcctattattatatgggcttttacatacattcttgtccaaagatgaagtataagggccaataccggcccagcgatttgttgtgtcctgaaacttacgtgtgggtacctatcgagcagtgcctcccctccctcgagaattccaagtactgcagattcaatcaggaccccgaagcagtcgatgaagatcgaagtacagaacctgatcggctgcaggtgtttcacaagcgagccatcatgccctacggagtgtacaaaaaacagcagaaggatcctagcgaggaagccgcagttctacaatacgcgagcctggtgggtcaaaagtgttccgaacgcatgctacttttccgcaactag

SEQ ID NO: 15237 - DNA, 3003 bp, synthetic construct
  source 1..3003: mol_type = other DNA; note = Synthetic coding sequence
atggccgagcgaaagccaaacggggggagcggaggggctagcacatcttcctcaggcaccaatttgctgttctcaagctcagctacagaattttcgttcaatgtacctttcattcccgtaacgcaggctagcgcctcccccgccagcctccttcttccaggggaagactctaccgatgtgggtgaggaagattcatttcttggtcagacatccatccacacttctgccccccagacattctcctacttcagtcaggtgagcagtagctctgaccccttcggtaacattggtcagtcgcccttaaccacggcagctactagcgtcggccagtctggatttcccaagccactgaccgcactcccatttacaaccgggagccaagacgtttccaacgctttctcccctagtatatcaaaggcgcaacccggggcacctccttctagccttatggggatcaatagttatctgccttcccagccgtcgagtctgcccccatcctattttggtaaccagcctcagggcatcccacagcctgggtacaacccctataggcacacccccggcagcagtcgggctaatccttacattgcccctccccagttgcagcaatgccaaacgcccggcccccctgcacacccacccccatcaggcccccccgtacaaatgtaccaaatgccccctggatcacttccccctgtccctagctcagtgcaaagcccagctcagcagcaggtgcctgctcgtcccggcgcaccatcggtccaggtcccgtccccgtttctcctgcagaaccaatacgagcctgtgcagccccactggttttattgcaaggaagtcgagtataagcaactctggatgcctttctccgtattcgactcactcaatctggaagagatttacaacagcgtccaacctgatcctgaatccgtggtcctggggaccgacggaggtcgatatgatgtgtatttgtacgaccggattaggaaggcagcctactgggaggaggagccggcagaagtgcgccgctgtacatggttttacaaaggcgacaccgacagccggtttatcccctatacagaggagttctccgagaaactggaagcagagtataaaaaagcagtcactacaaaccaatggcaccggaggctagaattcccatccggcgagacgatcgttatgcacaacccgaaagtgattgttcagtttcaaccttctagcgtgccagatgagtggggaacaactcaagatggacaaacaaggcctcgtgttgttaaaagagggattgatgacaacttggacgaaatcccagacggggaaatgccgcaggtggaccacctcgtctttgttgtgcacggaatcgggcctgtttgcgatctacggttcagatctattattgagtgtgtggatgatttcagagtcgtctccctcaaattgttaagaacacacttcaagaaatcgctggacgatgggaaggttagccgagtggaattcctgcctgtgcactggcattcctctttaggaggagatgctactggcgtcgaccgaaatatcaaaaagattacactaccgagcattgggcgcttccgccactttacaaatgagacgctgctggacattttattttataactcccctacttactgtcagacgattgttgaaaaggtaggtatggagattaatcacctgcatgccctgtttatgtcgcggaaccccgattttaagggtggggttagtgtcgcaggtcactccctgggttcactgatcttatttgacattctctctaatcagaaggacctgaacctcagcaagtgccctgggccactcgccgtggcgaatggcgtggtaaagcagctccacttccaggagaaacagatgccagaagaacccaagcttacactcgacgagagttacgatctggtcgtggagaataaagaggtgctgactctgcaggaaaccctggaagccttgtctttaagcgagtatttctctacattcgagaaagaaaagattgatatggagtctctgttgatgtgcaccgtggacgatctgaaggagatggggatccctcttggcccccgaaagaaaatcgcaaattttgtggagcataaggcagccaagctgaaaaaagccgcgtctgagaaaaaggccgtcgcagctactagcacgaaagggcaggagcagtccgcgcagaagaccaaggacatggcttcactacctagcgagtcaaacgaacccaagagaaagcttccagtcggggcttgcgtgagtagcgtgtgtgtgaattacgagtcgtttgaggtgggcgccggacaagtctccgtggcctataatagcctcgacttcgagcctgagatattttttgcactcggtagcccaatcgccatgtttctgacaataaggggtgtcgataggatcgacgaaaactacagcctccctacttgtaaagggttttttaacatctaccaccctctcgatcctgtagcttaccggctagagcctatgatcgtgcccgacctcgatcttaaagcagtgctgatcccccaccacaagggccgcaagcggctgcacttggagctcaaggaatcacttagcaggatgggcagcgatctcaagcagggcttcatctcttctctcaaatccgcttggcaaaccctaaatgaattcgcgagggcacacacgtccagcacccaattacaagaagaactagagaaagttgctaatcaaatcaaagaggaagaggagaagcaggtcgtcgaagcagagaaggtcgtggagtcacccgatttcagcaaggacgaagattacctagggaaggtcgggatgctcaatggcggcaggcggatagactatgtactacaggagaagccaatcgagtccttcaacgagtacttgtttgcacttcagagtcacttgtgttattgggaaagtgaggacaccgctctgttgctgttgaaggagatctaccggacgatgaacatctcacctgaacagccgcagcactag

SEQ ID NO: 15238 - DNA, 495 bp, synthetic construct
  source 1..495: mol_type = other DNA; note = Synthetic coding sequence
atggtgaattccgtggtgttctttgatatcacagtagacggaaagcccctgggcagaatctccattaagctgttcgccgataaaatcctgaagaccgcagaaaactttagggctctttcaactggcgagaaggggttcaggtacaaaggcagctgttttcacaggattatcccaggctttatgtgccagggcggagactttacacgccacaacggcacaggggacaagagcatttacggcgagaagttcgacgacgaaaatctcattaggaaacacacaggatccggcatcctgtcaatggccaacgctggccccaacaccaacggaagtcaattcttcatctgcgcagctaaaacagagtggctggatggcaagcacgtagctttcggaaaagtgaaagaaagagtaaacatcgtggaagctatggagcatttcggctaccggaattcgaagactagtaaaaaaatcacgattgccgactgtggtcaattttag

SEQ ID NO: 15239 - DNA, 426 bp, synthetic construct
  source 1..426: mol_type = other DNA; note = Synthetic coding sequence
atgaagattctcgacgtgggatgtgggggtggcttgcttactgagcccggaggtagcttgttcatcactacgattaataaaacacagctctcctacgcactggggatcgtgttttctgagcagattgcaagcatcgtgccaaagggcacccacacctgggaaaaatttgtctctccagagacgcttgagtcgattcttgagtctaacggactgagcgtccagactgtggtgggaatgttgtataatcccttctctggctattggcattggtctgagaacacctcactgaattatgcagcctacgctgtaaagtcccgggtacaggagcaccccgcctcagccgaattcgtgctgaagggcgaaacagaagagttgcaagccaatgcttgtactaacccagcagttcacgagaaattaaagaagtag

SEQ ID NO: 15240 - DNA, 426 bp, synthetic construct
  source 1..426: mol_type = other DNA; note = Synthetic coding sequence
atgaaaatactggatgttgggtgcggaggtggcttacttacagagcccggcggatcactgttcatcactactattaacaagacacagctgagctacgcactaggaatcgtgttttccgaacagatcgcaagtatcgtgcccaaaggtactcacacttgggagaagtttgtgtcaccagagaccctcgagtcgatccttgagtccaatggattgtccgttcaaaccgtggtcggtatgctgtacaaccctttttccggctactggcattggtctgaaaatacaagcttgaactatgcggcttatgccgtcaagagcagggtccaggaacaccctgcatcagctgaatttgtgttaaaaggcgagactgaggagttgcaagccaacgcttgcaccaatccagcggtgcatgagaaattgaagaaatag

SEQ ID NO: 15241 - DNA, 2157 bp, synthetic construct
  source 1..2157: mol_type = other DNA; note = Synthetic coding sequence
atgctgatgaccctggaaatgaccgagctgacagatccacatcacacaatgggagattacaaagtggcacacccacaggatccccatcacccctcagagaaacctgtcatccattgtcacaaatgtggcgaaccatgtaagggggaggtactcagggtacagaccaaacactttcatatcaagtgcttcacttgtaaggtttgcggctgtgacctcgcccagggcggcttctttataaaaaacggcgagtacctctgcactctcgactatcagcgaatgtacggaaccaggtgtcacggctgtggagagtttgtcgagggcgaggttgtcacagccctcggtaagacgtatcacccgaattgcttcgcttgcacaatttgtaaacggcccttcccacccggagaccgggtcacttttaatgggagagactgtctctgccagctgtgcgcccagccaatgtcttccagcccaaaggagactactttttccagcaattgcgccggatgtgggcgagatatcaaaaacggtcaggcacttctggcgctggacaaacagtggcacttgggttgcttcaaatgcaagtcttgtggtaaggtactcaccggcgagtacatctcaaaggacggggccccatattgcgagaaggattaccagggactgttcggcgtcaaatgcgaggcatgtcaccagttcattactggcaaagtcctcgaggctggagacaaacactaccacccttcatgcgccaggtgttcccggtgtaatcagatgttcaccgagggtgaggagatgtacctccaaggttcaacggtctggcatcctgattgtaaacaatctaccaagaccgaggaaaagctgaggcccaccagaacatcttccgagagcatctactcccggccagggtcctccatccccgggtctcccggccatacgatctacgctaaagtcgacaacgagatactggattacaaagacctggccgcaatacccaaagtaaaagctatatacgacatcgagcgacctgatctgatcacttacgagccattttataccagcgggtatgatgataagcaggagcgccaaagccttggggaaagccctcgaaccctgagtcccacgccaagtgcagaaggttatcaagacgtgcgggataggatgatacatagaagtacatcacaaggatcgatcaattctcctgtgtactccaggcacagttataccccaaccacatcgcgctctccccaacactttcatcgccccgggaatgagccttcttcgggtcgaaactccccccttccttatcgaccagattcccgcccactcacccccacttatgctcaggcgcccaagcactttcacgtccccgatcaggggatcaatatttaccggaaacctccaatatataagcagcatgccgccctggccgctcaatccaaatcctcagaggatatcatcaagttctcaaaatttccagcagctcaggcacccgacccgtcagagactcctaagatcgaaacagaccattggcccggcccgccctcctttgccgttgttgggccggatatgaagcgaagaagctctggacgagaagaagatgatgaggagttattgagaaggcgacagctgcaggaagaacaattgatgaagttgaactcgggcttgggtcagctgattttaaaggaggagatggagaaagagagcagggaaagaagctccttgttagcctctagatatgactctccaatcaatagcgcgagtcacatcccgagcagcaagaccgccagcctcccaggctacggccgcaatgggctccaccggccagtatctacagatttcgctcagtataacagctacggggacgtatctggcggcgtccgggattaccagacgttgcccgatggccatatgcctgcaatgcgaatggaccggggcgtcagtatgccaaacatgttagagcctaagatctttccatatgaaatgttgatggtgaccaatagaggaaggaataaaattcttcgcgaggtggaccggaccaggctggaaaggcacctggcaccagaggttttccgcgagatctttgggatgtctatccaggagttcgatagacttcctctttggcggagaaacgacatgaaaaaaaaggcaaaactgttctag

SEQ ID NO: 15242 - DNA, 1593 bp, synthetic construct
  source 1..1593: mol_type = other DNA; note = Synthetic coding sequence
atgttcacagagggcgaagagatgtacttacaaggatctaccgtttggcaccccgactgcaagcagagcaccaaaacggaggaaaaactgaggttaccgaacatccgcagaagctctagtgattttttctactcaaaatcattgatccgaagaacaggaaggtcaccatcactgcagccgacaaggacatcgtcagagtcaatctatagcaggccgggcagctcaattcctgggtctcctggccacacaatatatgccaaagttgacaacgaaatcctggattacaaggatctggcagccatccctaaggtcaaagctatttacgacatcgagagacccgacctgataacctatgagcccttctacactagcgggtatgacgacaagcaggaaaggcaatccctaggagagagcccacggactctctcacccacaccgtccgctgagggttaccaggacgtcagagacagaatgattcacaggagtacgagtcagggctcaatcaatagtccagtctattcaaggcactcttacactccaacaacttccaggtctccccagcattttcacaggccagaactgctctctcctggagtacaacgcctgtcatatctgaggacctcatcgctaagtcccactcacagtgattcccgtcctaaccctccattccggcaccatttcattccgcacattaagggtaatgagccatcgtccgggagaaacagtcctctgccataccgccctgatagccgacctcttacccccacctacgcacaggccccgaaacattttcacgtcccggaccaggggattaacatttatcgtaagccccccatctataaacagcacgccgcactcgcggcacaaagtaagtcctctgaggacatcattaaattctctaagttcccagccgcccaggcccccgatccatcagagactccaaagattgagaccgatcactggcctgggcctccaagtttcgcagtagtgggccctgatatgaaaagaagaagtagcgggcgggaagaagatgatgaggaactcttgaggcgcagacaactgcaggaggaacagcttatgaaactgaatagcgggctaggccaactgatccttaaagaggaaatggagaaggaatcccgtgaacgctcctcactcttggcatcaagatacgactctccaattaattcggccagtcacatcccatcaagcaaaactgcatcattacccgggtacggccgaaacggcctacaccgcccagtgagtactgacttcgcccagtacaattcctatggagatgtgagtggcggggtccgcgactatcagacactgcccgatgggcatatgcctgccatgcgcatggacaggggagtctcaatgcctaatatgttggaacctaagatattcccttacgaaatgcttatggtgaccaatcggggacgtaacaaaatcctgcgggaagtggatagaacaagattagaacggcacctggcccccgaggttttcagggagatcttcggcatgagtatccaggagtttgatcgactgcctctgtggcggcgcaacgatatgaagaaaaaagctaagctgttctag

SEQ ID NO: 15243 - DNA, 2109 bp, synthetic construct
  source 1..2109: mol_type = other DNA; note = Synthetic coding sequence
atggtcaaagaaaaagtcgctcatccacaagacccccatcatccctcagaaaaacctgtgattcactgtcacaagtgcggggaaccgtgtaagggagaggtcttgagggtccaaacaaaacatttccacatcaagtgtttcacatgtaaggtctgcggttgtgacctggcccagggtggcttctttataaaaaatggagagtatctgtgcacactggactatcagagaatgtacgggactaggtgtcatggatgcggagaattcgttgagggcgaggttgtgactgcactcggcaaaacgtatcacccaaattgtttcgcctgcaccatttgtaaacggccattcccccctggtgatagagtgacatttaatggcagagactgtctgtgccaactttgcgcccagcccatgtcctccagccccaaggagacaaccttcagtagtaactgcgccggctgtggccgagacataaaaaacggccaagcccttctggccctggataagcagtggcacctaggatgtttcaaatgcaagtcatgcggtaaagtgctgacgggggagtacatttcgaaggatggggccccttattgcgagaaagattaccaagggttgtttggtgtgaagtgcgaggcatgtcaccagttcattacaggcaaagtacttgaggccggcgacaaacattaccacccctcctgtgcacgctgtagtcgctgcaaccagatgttcactgagggggaggagatgtacttgcaagggtccaccgtatggcacccagactgcaagcaatcaacgaagaccgaggagaagctgcggcctacccggactagcagcgaatcaatttactcgagaccaggttccagtattcccggcagccctgggcacactatatacgccaaggtcgataacgagattctggactacaaggacttggccgctattcctaaggtgaaggctatatatgacatcgaaaggcccgacctcattacttatgagcccttctatacaagtggctatgacgacaagcaggaacgacagagtctcggagagagtccccgaacactctcccctacaccaagcgccgagggatatcaggatgtcagggaccgaatgatacacaggtccacgtcccagggaagcattaacagtcctgtttatagtcgccattcctataccccaacaacgtccaggtcacctcaacacttccaccgcccgggcaacgaacctagttcgggacggaatagtcctctgccttatcgccctgatagtaggccacttacaccaacctatgcccaagcccccaaacacttccacgtgcccgaccagggtattaacatataccgtaaacctcctatctataaacagcatgccgctcttgcagctcaaagcaaatcaagcgaggatatcatcaaattttctaagttccccgcagcacaggcgcctgatccgtctgaaacacctaaaatagagaccgaccactggcccggccctccctctttcgcagtcgtggggcctgacatgaaacgccgttcgtcgggacgggaggaggacgatgaggaattgttgcggcgccggcagttacaagaggaacagttaatgaagctgaattctgggttaggacagcttatactgaaggaggagatggagaaggaatctcgtgagcggagctcactcttggcatcacgatatgattcccccattaattccgcaagtcacatacccagtagcaaaaccgcaagtctgcccggatatggccggaacgggctccatagacccgtgagtactgattttgctcaatacaattcatacggcgacgtcagcggaggtgtgcgagactaccagacgctgccagacggccacatgccagccatgaggatggatcggggggtaagtatgcccaatatgttggagccgaagattttcccctatgagatgctgatggtcactaatcgcgggcggaacaagattctgagggaggtggatagaaccagactggagcgtcacctcgctcccgaggttttcagagagatctttggtatgagcatccaagaatttgaccggctccccctttggagaaggaacgacatgaagaagaaggcaaagctgttctag

SEQ ID NO: 15244 - DNA, 1206 bp, synthetic construct
  source 1..1206: mol_type = other DNA; note = Synthetic coding sequence
atgtttaccgaaggggaagaaatgtacctacagggctccactgtgtggcatccagattgtaagcagtcaaccaagaccgaagaaaaattaagggccaaagtcgacaacgaaattttggactataaagacctcgccgcgatcccaaaagtgaaagccatttatgatattgagcgtccagatttgatcacctatgagcccttctacacatccgggtacgatgacaagcaggaacggcagtctctgggagaatcgccgcggacactgtcccccacgccgagtgctgaaggataccaagacgttcgcgacaggatgattcacaggagcacctctcaggggagcattaattcccctgtgtattcgcgacattcctacacccccaccacgagtcgatcaccgcagcattttcaccggccagaccagggcattaatatttaccgaaaaccccccatctacaagcaacacgcagctctagcagcccaatctaaaagcagcgaggatattataaaattttccaaattcccagcggcacaagcccccgacccgtccgagaccccaaaaattgaaaccgatcactggcccggaccgcccagcttcgcagtggtcgggcctgatatgaaacggagatcttccgggcgagaggaggatgacgaggaactgctaagaaggaggcaattgcaggaggagcagctgatgaaactaaacagtggattgggccaactgattctgaaggaagaaatggagaaagaaagcagagagcgctcaagtctattagcctcccgttacgactcaccaatcaacagtgcaagtcacattcctagtagcaagaccgcctctctgcccggctatggccgcaacggactgcatagacccgtgtccactgattttgcgcagtacaactcttacggcgacgtttcgggcggcgtgcgcgattatcagactctcccggacggacacatgcctgcaatgcgaatggatcggggcgtgtcaatgcccaatatgcttgagccgaagatcttcccctacgaaatgctgatggtgacaaaccgaggccgcaataaaatccttcgcgaagttgacaggacacgcctggaaaggcacctggcacccgaggtttttcgtgagattttcggaatgtcaatccaggaattcgacagactgcccttatggaggcgcaacgatatgaagaaaaaagccaaattgttctag

SEQ ID NO: 15245 - DNA, 1968 bp, synthetic construct
  source 1..1968: mol_type = other DNA; note = Synthetic coding sequence
atggtgaaagagaaagttgctcaccctcaggaccctcaccatccatctgaaaaacccgtcatccattgtcacaagtgtggggagccatgcaagggagaagtgctcagggtccagacaaagcattttcacatcaagtgtttcacctgcaaagtgtgcgggtgtgatcttgcgcaggggggcttcttcatcaaaaatggagaatacttatgtaccctggactaccaacgcatgtacggaaccaggtgtcacggatgcggggaatttgtcgaaggggaagttgtgactgctcttgggaagacctaccaccccaattgttttgcctgtactatttgtaaacgcccctttccacctggggacagagtcacctttaatggcagagattgcctgtgccaactttgtgctcagcccatgtctagtagtccaaaggagactacattttcaagcaattgcgccggatgcgggcgcgatatcaaaaacggccaggcactccttgccttggacaaacagtggcacctgggttgtttcaagtgtaagtcttgtgggaaagtgctgaccggagagtacattagtaaggatggagctccatattgtgagaaagactaccaaggcctattcggagtgaaatgtgaggcatgccatcagttcatcaccggaaaagtgttggaggctggcgacaagcattaccatcctagctgtgctcggtgttcacgctgtaatcagatgttcacagaaggagaagagatgtacctgcaggggtcaaccgtgtggcaccctgactgtaaacaatctacaaagacagaggagaagctacgacctacaaggacatcaagtgaaagcatatactcaagacccggatcctcaatccctggcagtcctggacataccatttacgccaaggtggataatgaaattctcgattataaagatcttgccgctattcctaaagtgaaggctatttatgatattgagcggcctgaccttattacgtatgagcccttttatacctctggttatgacgacaagcaggaaagacagtccctgggcgagagcccacgcaccctgtcccctacaccttctgcagagggataccaggacgtccgggatcgcatgattcatagatccacctcccagggatccattaactcccctgtatactccagacactcttacacgcccacgacatcacgctcaccacagcactttcatcggccaggcaacgagccaagcagcggacgcaactcccccctcccgtatcggcccgactctagacctttgactccaacatacgcacaggcccctaaacactttcacgttccagatcaggggatcaatatctatcgaaaaccacctatatacaagcagcatggacccgatatgaagcgccggtcctcaggacgggaggaggatgacgaagagctgctgcgccgcaggcagctgcaggaagaacagcttatgaaacttaattccggtctcggccagcttatcctgaaagaggagatggaaaaagaaagtcgggagcgcagtagccttctcgcctcccggtatgactctccgatcaactccgctagtcacatcccaagttctaagactgcatctttgcctggctacggccgtaacgggctacacaggcctgtatcaacggatttcgctcaatacaatagctatggggatgtctctggcggcgtgagggattttcagaccttgcctgatggtcacatgcccgctatgcgcatggatcgtggagtttccatgccaaacatgctggagcccaaaatctttccgtatgagatgctaatggtcaccaatcgtgggcgtaacaaaattttgcgagaagtagatcggaccaggctggaacggcatctcgctccggaggtctttagggagatttttggaatgagtatccaggagttcgatcgactgcctctctggcggagaaacgacatgaaaaagaaagcgaagttattctag

SEQ ID NO: 15246 - DNA, 2541 bp, synthetic construct
  source 1..2541: mol_type = other DNA; note = Synthetic coding sequence
atgcccgcctttctcggactcaagtgtctcggaaaactgtgtagtagtgagaagtcaaaagtcactagttctgaacgcaccagtgccaggggcagcaatagaaaacgcctgattgtcgaggatcgtagagtcagtggaacctcttttacagcacaccggcgcgccacgatcacccacttattgtatctgtgccctaaggattattgccctcgtgggcgagtgtgtaacagcgttgacccttttgtggctcaccctcaggacccacatcatccatctgaaaagccagtaattcactgccataaatgcggcgaaccttgcaaaggcgaagtcctgcgcgtgcagacaaaacacttccacatcaagtgcttcacatgcaaagtgtgcggctgcgacctcgcccaggggggtttttttatcaaaaatggtgagtatctgtgcacgctggattatcagcggatgtatgggactcgttgccatggctgcggcgagttcgtggagggtgaggtggtgacggctctcggaaagacctatcatcccaactgcttcgcgtgcaccatttgcaagcgcccttttccacctggcgatagagtgacattcaacgggcgcgattgcctatgccagctttgcgcccagccaatgagttcttcaccaaaagaaacgaccttctcatctaattgcgccggctgcgggagggatatcaaaaacgggcaggccctgcttgccctcgataaacaatggcatcttggctgctttaagtgtaagtcatgcggcaaggtactcactggagagtacatttctaaggacggtgcaccctattgcgaaaaggactaccaggggctgttcggtgttaaatgcgaggcctgccaccagtttataacagggaaggtactggaggccggagacaagcactatcatccttcctgtgccaggtgttcaagatgtaaccagatgtttacggagggcgaagagatgtacctgcagggtagcactgtgtggcatcccgactgtaagcaatcaacaaagactgaggagaagctccggttgccaaatattcgtcggtcctcatccgactttttttattctaaatctcttattcgccggaccggtaggtctccgagcctgcagccgacccggacctctagcgagagtatatacagccgaccaggctcaagtatccccggatctccaggtcatactatttacgcaaaagtggacaatgagattctggactataaagacctggccgcaattcctaaggtgaaggccatctatgatatcgaaagacccgacctgataacctacgagcccttttataccagcgggtatgacgataagcaagagcgtcaaagcctgggagagtctccgcggaccctaagtcccacaccttccgcggaaggttatcaggacgtacgagacaggatgattcaccgctccacctcccaaggctccatcaactctcccgtatactcgagacattcgtacacacctactacctcccgtagccctcaacacttccaccgccctgagctgctcagcccaggggtgcagcggctcagctatctgcggacttctagcctttcgcctacccattcagactctaggcctaaccccccattcaggcaccatttcatcccacatataaaaggtaatgagccctcatcagggaggaacagccctttgccgtatcggccagattcccggcccctaacacccacatacgcccaggcgcccaagcacttccacgtgccagatcagggcatcaacatctatcgcaaaccccccatctacaaacagcatgcagcgttggccgcgcagtctaagtccagtgaggatatcattaagttctccaagttccctgccgctcaagctcctgatccttcagagacacccaagatcgagaccgaccattggcccggccctccgagcttcgcagtcgtgggtccagacatgaagcggagatcatccggtagggaagaagacgacgaggaactgctgaggcgccgccagttgcaagaggagcagctcatgaagctaaattcaggcctcggtcaattgatcctgaaggaggaaatggagaaagaatcacgggagcgctcaagcttacttgcatcacgttacgactctccaatcaactctgccagtcatatcccaagcagcaaaaccgctagtctgccaggatatggacggaatggtttacatcggcctgtgagcacagattttgcacagtacaattcctacggcgacgtgagcggcggggtacgggagtaccaaactctgcctgacgggcatatgcctgcaatgcgtatggaccgcggtgtgtcaatgccaaacatgctcgagccaaaaatattcccatacgaaatgctgatggtcaccaaccgcggccgtaataaaattctacgcgaggtagacaggaccagactcgagagacacctggctccggaggtgtttcgcgaaatctttggcatgtcaattcaggagttcgaccgcctccccttatggcgaaggaatgacatgaagaagaaagcgaaactgttctag

SEQ ID NO: 15247 - DNA, 2109 bp, synthetic construct
  source 1..2109: mol_type = other DNA; note = Synthetic coding sequence
atggtcccagatcccgtggcccatccacaagacccgcatcatccttctgagaagcccgttattcactgccacaagtgtggcgagccttgcaagggcgaagtactgagggtacagactaaacactttcatatcaagtgtttcacttgtaaagtttgtggctgcgatttggcccagggaggattctttatcaaaaacggagagtatctctgcacattagattatcagcgcatgtacggaaccaggtgccacggctgcggtgaattcgttgaaggggaggtcgtgactgctttgggcaaaacgtatcatcctaactgtttcgcatgcaccatctgcaaacggccttttcccccaggggacagagtcacattcaacgggagagactgtctttgtcagttatgtgcacagcccatgtctagcagtccaaaagagacaaccttcagctcaaactgtgccggatgcggccgcgatataaaaaatggccaggcactgctggcactggacaaacaatggcacttaggatgtttcaagtgtaagtcttgtggtaaagttcttacaggggaatatatctccaaggatggcgctccatactgtgagaaggattaccaaggtttgttcggagtgaagtgcgaggcttgccaccaattcatcacaggtaaggtgctagaggccggggacaaacactaccatccttcgtgcgcaaggtgctctagatgcaaccaaatgtttaccgaaggcgaggagatgtaccttcagggctccaccgtttggcatccagactgtaagcaaagcaccaaaactgaggagaagctgcgacctacccgtacttcatccgagagcatttacagcagacctggcagctcaatccccggtagtccaggacacaccatctatgctaaggtggacaacgagatactggactacaaggatttggccgccatcccaaaggtgaaagctatttatgatattgagcgccctgacctgatcacatacgaaccattttatacgagtggatacgatgataaacaggaaagacagagtctgggggagtcccccaggactctgagtcccacacctagtgctgagggctatcaggacgtgcgtgaccgaatgatccaccgctccacgtctcagggtagcattaattccccagtgtatagccgccacagttatacacccactacaagccgttctccacaacattttcaccgcccaggaaacgagcctagttccgggagaaattcccccctgccttataggcctgattcccgccctctgacaccaacatatgcgcaggctcctaaacatttccatgttccggaccaaggcataaacatctatcgtaagccacccatctataaacagcacgctgccctcgccgcccagtcgaagtcttccgaggatatcataaagttctccaaatttcccgctgctcaggcacctgatccatcagaaacccccaaaatagagactgaccactggcctggaccaccttcttttgcagtcgtgggacccgatatgaaacgccggtctagtggtagggaggaagacgatgaggagcttttgcggcggaggcaactacaggaagagcaactcatgaaattaaactccggcctcggacagttaattctgaaagaggagatggaaaaagagagtcgcgaaaggtcctcccttttggctagccgatatgattccccgataaattcagcttcacacataccaagttcaaaaactgcgagtctgccaggttacggacgaaacggactgcaccgcccggttagcactgactttgcacaatataattcttacggcgacgtgtctggtggtgtcagggagtaccagacacttcctgacggccacatgcccgctatgaggatggatcggggtgtgtccatgccaaatatgctcgaacccaaaatttttccttatgaaatgttaatggtgacaaacagagggcgcaacaagatcctgagggaggtcgatagaacccggctggaaagacatctcgcacctgaagtgttcagggaaattttcggcatgtcgatacaggaattcgatcgattaccactatggagacgtaacgacatgaagaaaaaggctaaactcttctag

SEQ ID NO: 15248 - DNA, 1368 bp, synthetic construct
  source 1..1368: mol_type = other DNA; note = Synthetic coding sequence
atgtttacagaaggcgaagaaatgtacctccagggaagtacggtgtggcaccctgattgcaagcaatccacaaagaccgaggagaagctccgattacctaatatccggaggtcttcatctgacttcttttactctaaatccctgatccggagaactggtcgctccccctccctccaacccacaaggactagcagcgagtcaatctacagcaggcctggcagctcaatccctggttcccccggacacaccatttatgctaaggtggataatgaaatcctggattataaagaccttgcggctatacctaaggtgaaagccatttacgatattgaaagaccagaccttataacctacgagcctttttacacaagtggctatgatgataaacaggagagacaatctctgggggagagcccccgcaccttaagccctaccccgtcagcagaaggatatcaagacgtccgggaccgaatgattcaccgctccacaagtcagggctctatcaattccccagtctatagccgtcattcatacacccccacaacatctaggtctccacagcacttccatagaccagaccagggaattaacatctaccgcaagcccccaatctacaagcagcatgctgccctggccgcccagagcaagtcaagcgaggacataattaagttcagcaaatttcccgcagcacaggcccccgacccgtccgaaacacctaagatcgaaacagatcattggccagggccgccatccttcgcagtggtcggccctgacatgaaacgcaggtcatctggacgtgaagaggatgatgaagagctgcttaggaggcgccaactgcaggaagaacaattaatgaagctgaactccggcctggggcagttgatcctgaaggaagagatggagaaggagtcccgtgaacgcagttcattactggcctcacgctacgattccccgataaattcagcaagtcacatacctagctctaagaccgcatctcttcccgggtacggtcgcaatggcctccaccgcccagtttccaccgacttcgcccagtacaacagctacggcgacgtgtcaggaggtgtacgggactttcaaaccctccccgatggacacatgccggctatgcgcatggacagaggggttagtatgcccaacatgcttgaaccaaaaatcttcccttacgaaatgctcatggtcacgaaccggggccgtaacaagatcttgcgcgaggtggatcggaccagactggagaggcacctggccccggaggtcttccgggagattttcggaatgtccatccaggaattcgatcgtctgcccctgtggcgtcgaaatgatatgaaaaaaaaagcaaagctgttttag

SEQ ID NO: 15249 - DNA, 2241 bp, synthetic construct
  source 1..2241: mol_type = other DNA; note = Synthetic coding sequence
atgcttatgaccctcgagatgaccgaactcaccgatcctcatcacaccatgggagattataaagtggcacacccccaagatccgcatcacccttcagagaaacccgtgattcattgccataaatgcggcgagccctgcaagggggaggtcctcagagtgcagactaagcacttccacatcaaatgcttcacttgtaaagtgtgtgggtgtgatctggcacaaggagggttttttatcaaaaacggagagtatctgtgtacattggactaccagcgaatgtatggcactcgctgccatggatgcggggagtttgtagagggtgaagtcgtgaccgccctcggcaagacttaccatccgaattgtttcgcatgcacaatttgtaaacggccctttcctcctggcgaccgcgtgacctttaatggaagggactgtctctgccagctttgcgcgcagcccatgtcaagcagccccaaagagactaccttttccagcaattgcgcagggtgtggccgcgatatcaaaaatggacaggcactgctggctcttgacaagcaatggcacctgggttgtttcaaatgcaagtcatgtggaaaagtgttgactggggagtacatctcaaaagacggagccccgtattgcgagaaagactaccaggggctcttcggagttaagtgtgaagcatgccaccagtttatcaccggtaaagtactcgaggcgggggacaaacattatcatcctagttgtgctcgttgttcccggtgtaatcagatgttcactgagggcgaagaaatgtatttgcaaggttctaccgtctggcatcctgactgtaaacagtccactaaaacggaagagaagttgcgcctgcccaacattcggcgctcctccagcgactttttctattccaaatcactcatccgacggacagggcgatcccccagtctgcagccgacgcggactagtagtgagagcatctacagccgccctggatcctcaatccctggatcccctgggcataccatctatgcaaaggtcgacaatgagattctggactataaggacctggccgcaatcccaaaggtgaaggctatatatgatatcgagcgtccagatttaattacctatgagccattttacacaagtggctatgatgacaagcaagaaagacagtccctgggagagtctccccgaaccctgtctccaaccccctctgccgagggttaccaagacgtgcgtgatagaatgattcacaggagcacttctcagggttctatcaatagccccgtctatagcaggcattcctataccccgactacttcccggagcccacagcactttcacaggccaggcaatgagccctcaagcggccgaaactcccctctaccctacagacccgatagccgcccccttactccgacatacgcccaggcacccaagcactttcacgtccctgatcaggggatcaatatttataggaagccgcctatctacaaacaacacgctgccttagctgctcagtcgaagtcctccgaggacattattaaattctccaagtttcctgccgctcaagcgccggatccctcagagacacctaagatcgaaaccgatcattggccaggcccaccatctttcgcggtggttggtccagatatgaagcggcgcagctcgggccgcgaggaagatgatgaagagctcttgaggcgtcgccagttgcaggaggaacagctcatgaagctgaattcaggcctgggccagctgatcctcaaggaggaaatggagaaagaaagcagggagaggtcttctttactagcttccagatacgattcacctatcaactctgcctctcacatcccttcttccaagacggcatcccttccaggatatggaagaaatggacttcaccgcccggtgtccacggattttgcccagtacaactcctatggggacgtttccggaggcgtcagggacttccagaccttacccgacggtcacatgcccgccatgcgaatggatcggggcgtttcgatgcctaacatgctggagcccaagattttcccctatgaaatgcttatggtaacaaatcggggccgaaacaaaattctccgcgaggttgatcggacacgcttggaaaggcacctggcacccgaggtattcagagagatttttggtatgtctatccaggagtttgaccgcctcccactgtggcgacgcaacgacatgaagaagaaggctaaattgttctag

SEQ ID NO: 15250 - DNA, 915 bp, synthetic construct
  source 1..915: mol_type = other DNA; note = Synthetic coding sequence
atggctgaagcctctgcggcgggagccgactctggcgctgctgtagccgcacaccggttcttctgtcatttctgcaaaggcgaggtttcgcccaaattgccagagtacatttgcccccggtgcgagtctggcttcatcgaggaagtgaccgacgacagttcctttttaggaggcggaggatctcgtattgataacaccactacaacgcacttcgctgagctgtgggggcaccttgaccacacaatgtttttccaggatttcaggccatttctttcaagttctcctctcgaccaggacaaccgggctaatgagcgtggccaccaaacacatacggacttttggggtgctaggcccccgcgcctccctttgggccgccgttataggagcaggggaagctcacggccagataggtcccccgcaattgaggggatactccagcacatttttgctgggtttttcgccaattctgccatccccggctcaccacatcccttcagctggagtggaatgctgcattccaaccccggtgattacgcttggggacagactgggctggacgccattgttacacaactgcttggccagttggagaacacaggacctccccctgcggacaaggagaagattacgtcactgcctacagtgactgtgacccaggagcaagttgacatggggcttgagtgccctgtatgtaaagaggattacacagtggaagaggaagtccggcagcttccctgtaatcactttttccactcgtcctgcatcgttccttggctggaattacacgacacgtgtcccgtctgcaggaagtccctgaatggagaggactccaccagacagtcccagagcactgaggcgagcgcctctaatagattcagcaacgactcccagctacacgataggtggactttctag

SEQ ID NO: 15251 - DNA, 636 bp, synthetic construct
  source 1..636: mol_type = other DNA; note = Synthetic coding sequence
atgagttgtactatcgaaaagatcctcactgatgcgaagacgctgttggagcggctgcgcgagcacgatgccgccgccgagagcttggtcgaccagtccgctgccttacaccggcgcgtggcggccatgcgcgaggcaggaacagcacttcccgaccaagttagacagagatatcaagaagacgcatccgacatgaaagacatgtcgaagtataagccacacattttgttgtcccaagagaatacacagatccgtgacctgcagcaagagaatcgtgaattatggatctctttagaggagcaccaggatgccctggaattgatcatgtcaaagtacagaaaacagatgctgcagctcatggtcgcaaaaaaagccgtagatgccgagccggtgttgaaggcccaccagtctcactccgctgagatcgaaagtcagatcgatagaatatgcgaaatgggcgaggtcatgcgtaaggccgtccaggtcgatgacgaccagttctgcaagattcaggaaaagctcgctcagctggagctggaaaataaagagctgcgagagctcttgtccatctcatccgagtccttgcaggcgagaaaagaaaattccatggacaccgcctctcaagctatcaagtag

SEQ ID NO: 15252 - DNA, 2451 bp, synthetic construct
  source 1..2451: mol_type = other DNA; note = Synthetic coding sequence
atggtgttgatgtttcagatccggtatattagtcagacacaaggattgccagccgagtatcttttatccgcagggactaagacaacacgcttttttaaccgggatcctaatctaggctatccactgtggcggctgaagacccctgaggagcacgaactggaaaccggaatcaagtcaaaggaagccagaaaatacattttcaattgtctggatgatatggctcaagtgaacatgtccaccgatctcgaaggtactgacatgctggcggagaaagcagacagaagagagtacattgacctgctaaaaaagatgctgacgatcgatgccgacaagagaataacccctctgaagacgcttaaccatcagttcgtaaccatgacacatttgttggatttcccgcactccaatcacgtaaaatcttgtttccagaatatggagatatgcaaaaggcgagttcatatgtacgataccgtgagtcagatcaaatcacctttcacaactcatgtggcacccaatacctccactaacttgactatgagcttcagtaaccagctcaacacagtgcacaaccaggcgtcagtcctggcctccagttctacagctgctgccgccacattgtccttggctaacagtgacgtctcccttctgaattaccagagcgcgctatatccttccagtgctgcccccgtacccggtgtcgcccagcaaggggtgtctttacaaccgggcaccacccaaatatgcacacagaccgacccctttcagcagacgttcatagtctgcccccctgcctttcagactggccttcaagccacaaccaagcatagcggcttcccggttagaatggacaacgccgttccaattgtccctcaagcccccgcagcgcagccactgcagatccagtccggcgtactgacccagggctcatgtactccgttaatggtggctacactccacccccaagtcgctacaattacccctcagtacgctgtcccattcactctgagctgcgctgcgggtaggcctgctctggtggaacagacggccgctgtgctccaagcatggcctggcgggacccagcaaatcttgcttccatccacctggcagcagctacccggcgtggccctacacaatagtgtgcagcctaccgccatgattcctgaagctatgggtagcggtcagcaactggccgattggcggaatgctcattcccacgggaaccaatactctactatcatgcagcagccaagtttattaacaaatcacgtgaccctggccaccgcccagcccctgaatgtgggggtggcccacgtggttcggcaacagcagagcagcagcctgccttcgaagaagaacaaacagtctgctccagtgtcttcaaagtcttctctcgatgttcttccctcgcaggtgtatagcctcgtgggctcctcaccactgaggacgacgagctcatacaactcacttgtgcccgtgcaggaccagcatcagcccattatcattcctgataccccttcaccaccagtaagcgttattacaattcggtctgatacagacgaagaagaagacaataagtacaagccatccagctctggtctgaaaccccggtcaaatgtaatatcctatgtgacagtcaatgacagtcccgactccgattcatctcttagctccccctattccacagacacactgtccgcactcagggggaatagcggctcagtccttgagggccctggccgggttgttgctgatgggaccggaacaagaacaatcatcgtaccgcccttaaaaacgcagctgggcgactgtacggtggcgacacaagcctctggtctgttatcaaacaagaccaaaccggtggcctcagtgtctggccagtcaagtggatgttgcatcacccctactggctaccgcgcccagaggggaggaacatcagcagcacagccccttaatttgtcccaaaaccagcaatctagtgctgcccctaccagccaggaaaggtcttcaaatcccgccccccgccgccaacaggcattcgttgctcccctttcccaagccccctataccttccagcatggtagccctcttcactcgaccggacatcctcacctggcccctgcccccgcccatttgcccagtcaggcgcacttgtatacttacgctgccccaacctcagccgcagcacttggttccacgtcttctatagctcaccttttctcaccccagggatcctcacggcacgctgccgcttacacaacgcatccatcgaccctagtgcaccaggtcccggtctctgtaggcccctcacttttgacctcggccagtgtagctccggctcagtatcagcatcagttcgcaacccagtcctacattggaagctcaagggggagcactatctacaccgggtacccgttatcacctacaaaaatcagccagtattcttacctgtag

SEQ ID NO: 15253 - DNA, 3498 bp, synthetic construct
  source 1..3498: mol_type = other DNA; note = Synthetic coding sequence
atggcatcccaactccaggtcttctccccccctagtgtgagctcgagcgctttctgctccgctaagaagttaaaaattgagccttcgggctgggacgttagtggccaatctagcaacgataagtattacacccattccaaaactctgcccgccacacagggtcaagcaaactcatcgcaccaagttgccaactttaatattcctgcctatgatcaagggctgctgctgccagctccagccgttgaacacattgtggtgaccgctgccgatagctctgggtcggctgcaaccagcacattccaatcctcccagactctgacacatagatcgaatgtctccctgttagagccttatcagaagtgcggattgaaacgtaaatcggaggaggtggatagtaacggctctgtgcagatcatcgaagagcacccacccctgatgttacagaatcgcaccgtggttggcgccgccgcgactacgaccaccgtgaccaccaaatcttcctctagctccggtgaaggcgattaccagctagttcaacatgagatcctgtgtagcatgacaaactcgtacgaagtgctggaattcctcggaagaggcactttcggacaggtcgccaaatgctggaaaaggagcactaaggagattgtggctatcaagatcctcaagaaccatcctagttatgctcggcagggacagattgaggttagcatcttgtctcggctgtccagtgagaatgctgatgaatacaatttcgtgcgcagctacgaatgtttccaacataaaaaccacacgtgcctggtgttcgagatgctggagcaaaatctgtatgatttccttaaacagaacaagttcagcccacttcctctgaaatacatccggcccattttacagcaggtggccactgccctgatgaaactgaaatccttaggactcattcatgcggatctcaaaccagagaatatcatgttggtagacccagtccgccaaccgtatcgggtcaaggtgattgattttggaagtgcatctcacgtttctaaagccgtgtgctctacatacctccagtcccgatattaccgagctccggagataatactcgggctccctttctgtgaggctatagacatgtggtccctcgggtgtgtgattgccgagctctttctgggctggcctttgtaccctggggcttcagagtacgatcagattagatatatctctcagacgcaggggctccctgcagaatatttactctccgcaggtactaagactacgcggttctttaacagggatcccaacctgggatatcctctgtggcgcttaaaaacacctgaagagcacgagctggagaccggaattaagtccaaagaggccagaaaatacattttcaactgtctggatgatatggcacaggtgaacatgagtactgacctcgagggaactgatatgttggcagagaaagcggacaggcgcgagtatattgatctgctgaagaagatgctaacgatcgacgctgacaaacgcattactcctctcaagaccttgaatcatcagtttgtcacaatgacccacctgctggactttccccacagtaatcatgtaaagtcctgtttccagaatatggaaatttgtaaaagaagagtccacatgtatgacactgtgtcacaaattaaaagtccattcacgacccacgtagccccaaatacctcgactaatctcacaatgagtttctcaaaccagctgaataccgtgcataatcaagcgagcgtgctcgcctcatcttcaaccgctgctgccgcaaccttaagtttagcgaattccgacgtatcgttgctcaattatcagagtgcgttgtatccatctagtgccgctcctgtccccggcgttgcccagcaaggagtctccttgcagcctggaactacacaaatatgtacacaaactgatccgtttcaacagacctttattgtctgcccgcctgcttttcagaccggactgcaagccactactaagcatagtgggtttcctgtacggatggacaatgcagtgccaatcgtgcctcaggcccccgccgcgcaaccactgcagattcagtccggagtattgacccagcaagcctggcccggaggaacccaacagattttactcccgtctacctggcaacagctgcctggagtcgctctacataacagtgtgcagccaacagctatgattccagaagcaatgggcagtgggcaacagctggccgattggagaaacgctcacagtcatggaaaccagtactccaccatcatgcagcagccgagtctgcttaccaaccatgtaaccttggccactgcccagccccttaatgtgggcgtagcacatgtggtcaggcagcagcagagttctagtctgccctcaaaaaaaaacaagcagagcgcacccgtctctagcaagagtagcctagacgtgctgccttctcaggtctactctttagtaggctctagtccacttagaaccacttcaagctataattccttggtccctgtacaggatcagcaccaacccatcattattccggacactccgtctccccccgtatctgttataacaatccggagcgataccgatgaggaggaggataacaagtataaacctagttccagtggcctaaaacctcgctcaaacgtgatctcatatgtgacagtaaacgacagccctgacagtgattcatctctgagttcaccttacagcaccgatacactgtctgcacttaggggcaattccggctcggtcctggagggaccaggacgcgtagttgcggacggcacaggcaccaggaccataatcgtcccacccctgaagacccagctgggagattgcacggtggccactcaggccagcgggcttttgagcaacaaaacaaaaccagtggctagcgtgtcagggcagtcttcgggctgttgtattacccccaccggctacagagcgcagagaggcggaacttctgcagctcagccgcttaaccttagccagaatcagcagtcttctgcggctcccacgagtcaggaaagatccagcaatcccgccccaagacgacagcaagcattcgtcgctcctttgtcacaggcaccatataccttccaacacggttcaccactgcactccaccggccatccacatctggcccccgcacctgcccatctgccctcccaagcccatctgtatacatacgcagcccccacgagcgccgccgcacttggaagcacttccagtattgcccatctgttttcgccccaaggttcctctagacacgcagcagcctacaccacacatccatccaccttggtacatcaggtgcctgtcagtgttggcccatctctcctcaccagtgcctctgtggcacctgcccaataccaacatcaatttgctacgcagagctacataggatcaagcagggggagcacaatatacaccggttaccctttgtcacccaccaaaattagtcagtactcctacctctag

SEQ ID NO: 15254 - DNA, 3498 bp, synthetic construct
  source 1..3498: mol_type = other DNA; note = Synthetic coding sequence
atggcatcacaactccaagtcttctccccgccttccgtgagcagtagtgcattctgttccgcaaagaagttgaagatagaaccctccggctgggacgtgtcagggcagtcaagtaacgataaatactatacacactccaagactctgcctgcaacccaaggacaggcgaatagcagccaccaggtggccaatttcaatattcctgcgtatgaccagggcctgttgctgccagctccagccgttgagcacattgtggtgactgccgccgatagttctgggagcgcggccacttccacttttcagtcttctcagaccttaacccatcggagtaatgtaagcctgctagaaccttaccagaagtgcggtcttaaaagaaagtcagaggaagtggactccaacggttctgtgcagattatagaggagcatccacccctgatgctgcagaaccggaccgtcgtgggcgcggcagctaccacaaccacggtaactactaaaagctctagctccagtggagaaggcgattatcagctcgttcagcatgaaattttatgcagcatgacaaatagctatgaggtactggagtttctcgggaggggcacctttggacaggtggcaaaatgttggaaacggtctacaaaggaaattgttgcaatcaagattctgaagaaccaccctagctatgccagacaaggtcagattgaggtatcaattctgagtagactgtcatcagaaaatgccgatgagtataacttcgttcgaagttacgagtgtttccagcataaaaatcacacatgtctggttttcgaaatgctggaacagaatctttatgattttttaaaacagaacaaattctctcccctgcccctgaaatatattagacctatcctccaacaggtggccaccgccctgatgaaattgaagagcctgggactcatccatgcagacttgaaacccgaaaatatcatgctggtggatcccgttcgccagccctaccgagtcaaggtcatcgactttggcagcgcatcacatgtgagcaaagctgtctgcagcacctatctgcagtccagatattacagggcgcctgaaattatcctgggcctacccttctgtgaagccattgacatgtggtcactagggtgtgtgatcgccgagctgttcctgggttggccactgtatccaggggcctcagaatatgaccaaattaggtatatctctcagactcaaggattacctgctgagtatctgctgtcagcagggaccaaaaccacacgtttctttaaccgggaccccaatttaggataccccctgtggagactcaaaaccccagaagaacacgagctggagacaggtatcaagtccaaggaagcacgcaaatacatattcaattgccttgatgacatggcccaggtgaacatgtccacagatctggaagggacagacatgcttgccgaaaaagctgaccgaagagagtatatcgacctactcaagaagatgcttaccattgacgcggataagaggatcacccccctaaagaccctaaatcaccagtttgtgacaatgacacacctactcgattttcctcatagtaatcatgtaaagtcctgctttcaaaacatggagatttgtaaacggagggtgcacatgtatgatacagtctcacaaatcaaatcaccttttacaacccatgtagcccctaatacgtcaacgaatctgaccatgtccttttctaaccaattgaatactgtccacaaccaggctagcgtgcttgcatccagcagcactgccgccgccgcaacccttagcctagcgaatagtgacgtcagcctcttaaactaccagagtgccctgtatccctcctccgctgccccagtgcccggggtcgcccagcagggcgtgagcttacagcctggtactacccagatctgtacccagacggacccgtttcagcaaaccttcattgtgtgccctcctgcattccagacaggcctccaggctaccactaagcatagcgggttccccgttagaatggacaatgcagtgcccattgtgccccaggcacctgctgcccagcccctgcagatccagtccggagtgttgacccagcaggcctggcccgggggtacacagcagattttgctcccatctacctggcaacagctgccaggggttgcattgcataatagcgtccagcctactgccatgatccctgaggctatgggaagcggacaacagctggctgactggcgcaatgcccattcccatggaaaccaatattccactattatgcagcagccatcactattgacgaatcatgtgactctggcaaccgcacagccgttaaatgtcggagtggcccacgtcgtacgtcaacaacagtcgtcttcgctgccgtcaaagaagaacaagcaatcagcacccgtgagttctaaaagcagtctggatgtgctcccttcacaagtgtactctctggtgggtagctcccccctgagaactactagcagttacaacagtttggtgcccgtgcaggatcagcatcaaccaattatcatcccggacaccccctctccacctgtgtctgttatcacgatccgatccgacactgacgaggaagaggataataaatataagccatcctcctcagggttaaaacccagaagcaatgtaatctcttatgtcactgtgaatgacagccccgatagtgattctagcctgtcaagtccttactctaccgacaccctgtcagccctacgtggaaactcgggttcagttctcgaaggacctggccgtgtagtggctgatggaaccgggacccgcacgatcatcgtccctcctctaaagactcaactcggcgactgcacagtggccacccaggcctccgggctgcttagcaacaagaccaaaccagtcgcatccgtttccggtcagtcaagtggatgttgtatcacaccaacaggctacagggctcagaggggtggtaccagcgctgcccagccgctgaacctcagtcagaatcagcagagctccgcagcccctacgagccaggagagaagcagtaatccagccccacggagacaacaagcctttgtagcaccattgagccaagctccatatactttccagcacggctcaccgctgcacagcacaggtcacccacacctagcccccgcaccggcccaccttccgagccaggctcatctgtacacttacgcagccccaacatctgctgccgcattagggtccacctcttctatcgcccatctgttctctccgcagggttccagccgccacgccgctgcctatactacccatcccagcaccttggttcaccaggtcccggtgagtgtgggtccttcattgttaacgtcggcaagcgttgccccggcgcagtaccaacaccaatttgcgactcagagctatattggatctagcagggggagtacaatctataccggataccctctcagcccaaccaaaatttctcagtatagttacctgtag

SEQ ID NO: 15255 - DNA, 3633 bp, synthetic construct
  source 1..3633: mol_type = other DNA; note = Synthetic coding sequence
atggctagtcagcttcaagtcttctccccaccatcagtctccagtagtgccttctgctcagccaagaagctgaaaatcgaaccttctggatgggatgtaagcggacagtcatccaacgataagtactacactcacagcaaaactctacccgcaactcaggggcaggccaactcatcccaccaggtcgctaatttcaacattcctgcgtatgatcagggcctactcttgccggcccctgctgtcgaacacatcgtcgtgacagctgctgattcatcaggctccgccgctacctctacgttccaatcaagccagacgctgacccaccgctctaatgtgagtctgttggagccttatcagaaatgcggcttgaagcgtaagtctgaggaagtggactcgaatggatccgtccaaattattgaagaacacccccctctgatgcttcagaaccgcactgtggtaggagccgccgcaactacaacgaccgtcaccacaaagtccagctccagctctggcgaaggtgattaccagctggtgcagcacgagatcctctgttccatgactaatagctatgaagtgctggagttccttggcagaggtacgtttggacaagttgcgaagtgttggaaaagatcaacaaaggagattgtagcaataaaaatcctgaagaatcacccgtcctacgccaggcaaggccaaatcgaagtctcaatcttgtcacgtctttccagcgaaaatgccgacgagtacaacttcgtgaggagttatgaatgtttccagcataagaaccatacatgcctcgtttttgaaatgctggagcaaaatttatacgactttctgaaacagaacaaatttagtccgctgcccctgaagtacatcagacccatccttcagcaagttgcaaccgccctcatgaaattgaagagcttaggcttgattcacgcggatctgaagcctgaaaacattatgctggtggatcctgtgcggcagccctacagagtaaaggtgattgactttggaagcgcatcccacgtgagtaaagccgtctgctctacctacctccagtctcgctattatagggcccctgaaatcatccttggcctgcctttctgcgaggcgatcgatatgtggtctctgggttgcgtcattgctgagctcttcctcggttggcctctgtacccgggcgccagcgaatatgatcagatccgctacattagccaaacgcagggcctgccggccgaataccttttatcagctggaacgaagaccaccagattttttaatagagatcccaatctcgggtatccactctggcgcctcaagacaccagaagagcacgaactggaaacaggaatcaaatcaaaggaggcccgcaagtacatctttaattgcctcgacgatatggctcaggttaatatgtcaactgatctggagggtacagatatgctggccgaaaaagcagaccggcgggagtatattgacctgttgaagaaaatgttgacaatcgatgctgataagcgcatcacgcctctgaagaccttgaatcaccagtttgttacaatgacacatctgctggattttccccactccaatcacgttaaatcgtgctttcagaacatggagatctgtaagaggcgggtccacatgtacgatacagtcagtcagataaagagcccttttactactcacgttgccccaaatacctcaacaaatctaacaatgagcttctccaaccaactgaatacggtgcataaccaggcctccgtgttagcctctagctctaccgccgctgcagccactctttcccttgccaactcagacgtctcactgctgaactaccaatcagctctatatccatcttcagccgcaccagtgcctggggtggcccagcagggcgtcagcttacaaccaggtacaacgcagatctgtactcagacagaccctttccagcagacattcatcgtgtgtccacctgcatttcagaccgggctacaggctaccacaaagcattccgggttccccgtgcgcatggacaatgccgtccccatcgtgcctcaggctccagcagcacagcctctgcagatacagtcaggagtactgacgcagggcagttgtacgccgttaatggtagctacccttcatccccaggtggcaaccataacacctcaatacgcggttccctttaccctgagctgcgcggcaggtcgcccagccctggtcgagcagaccgccgccgtcttgcaagcatggccaggaggaacgcagcagatcttactcccatccacctggcagcagctccccggtgtggcactgcataattccgtgcaacccacggcgatgataccagaggccatgggttctggacagcaactcgcagattggaggaacgcccattcccatggaaaccagtatagcaccatcatgcagcaaccctcccttctgaccaaccacgtgacattggccacagctcagccccttaacgtaggcgtggcgcatgtggtgaggcagcagcaaagcagtagtctcccctcaaaaaaaaataaacaatccgctccagtatcctctaagagttcactcgatgtgctaccatcccaggtctattcactcgttggcagtagtcccttgcgtactaccagcagttacaacagccttgttcccgtccaggaccaacatcagcctatcataatccccgacactccttctccaccagtgtctgtgattacaatccgcagtgacactgatgaagaggaggacaacaagtacaagccctcctcttccggtcttaagcctcgatccaacgtgatctcctacgtgacagtgaacgactcgccagattccgattcgagtctttccagcccctactctaccgataccctgagtgctctgagaggcaattctgggtcagtactggagggcccgggaagggtggttgctgatgggactggaacccgcaccattatcgtccccccccttaagacccagttgggagactgtacggtggcaacccaagcgtcaggcctcctttctaataagaccaaacccgtggcatccgtcagcggtcagtcatccggttgttgtatcacaccaactggctatcgagcccagcgcggcggcacctcagcggctcagccgctcaatctgtcccagaaccagcaatcgtccgccgccccaacatctcaagagcgctcaagcaatcctgcccccaggaggcagcaggcgtttgtagctccgctgtctcaggccccctatacattccagcatggaagccccctgcattctactggccacccacatctggcaccagctcccgcacatttaccatcccaggcacatctatacacttatgccgcaccaacatcagccgctgctcttggctctacaagcagtatcgctcacctgttctcacctcagggctcttccaggcatgccgccgcgtatacaacacacccgtctaccctagttcaccaagtgcctgtttctgtgggtccttccctgctcacttcggccagtgtggcccctgcgcagtatcaacaccaatttgcaacgcagtcttacatcggcagcagccggggttccacgatctacacagggtacccgttaagccccactaagatcagccagtactcttatctatag

SEQ ID NO: 15256 - DNA, 3228 bp, synthetic construct
  source 1..3228: mol_type = other DNA; note = Synthetic coding sequence
atggccagtcagcttcaggtgttctcaccacctagtgtgtccagcagcgctttctgcagtgctaagaagctgaagatagaaccgagcgggtgggacgtaagcgggcagagctccaacgacaaatattacacgcactctaaaactctgcccgcaactcaggggcaagcaaacagcagccaccaggtggctaacttcaacattcccgcttacgatcaggggctccttcttccggcccccgcagtcgaacacatcgttgtaacagcagccgattcttcaggatctgctgcgacctcaaccttccaatcatcacagacgctgactcaccggtctaacgtgtctctgctcgagccttatcaaaaatgcgggctgaagcgcaaatcagaagaagtggattccaacggatccgttcagatcattgaagaacatcccccgctgatgctgcaaaacaggacagtggtgggagcggccgcaacaaccaccaccgtgacgactaaatcatcatcatcttctggcgaaggtgattatcagcttgtgcagcacgaaatcttgtgcagtatgactaacagttacgaggtgctcgaattcttggggcgcggtacatttggacaggtagcgaagtgctggaagcggtccaccaaggagatcgtcgccattaagatccttaagaaccacccatcttacgcacgtcaggggcagatcgaggttagtattctgagcagattatcatcagagaacgcagatgaatacaattttgttcggtcatacgaatgcttccaacataaaaatcacacttgcctggtcttcgagatgctagaacagaatctgtacgacttcctcaaacagaataagttttctccactgccactcaaatacatcagacccatacttcagcaggtagctactgccttgatgaaattaaagagtttgggcctgattcatgcagacctgaagcccgagaacatcatgctggtcgatcctgtgagacagccctatcgagtcaaagtcatcgactttggctcagccagccatgtcagcaaagccgtgtgtagcacatacctgcagagcagatactaccgcgctcccgaaatcatcctcggcttaccgttttgcgaagcaattgacatgtggtcactcggatgtgtgatagccgaactgtttctaggctggccactgtaccctggcgctagcgagtacgatcagattcgctatattagtcagactcaaggtctgccggcggaatatctgctctcagctggcacgaaaacaacgcggttctttaatcgcgaccctaaccttgggtaccccctgtggaggttaaagacgccagaagagcacgaactggaaacaggaatcaagagtaaggaggccaggaaatacatttttaattgcctcgacgacatggcccaggtgaatatgtccacagatttggaggggaccgatatgttggctgagaaagcggatcggagagaatatatcgatttactgaaaaagatgttgaccatagatgctgacaaacggattacccctttaaagacgcttaaccaccaattcgtgacgatgacccacttgctggacttccctcactccaatcacgtcaagtcgtgttttcagaacatggaaatttgtaagaggcgggttcatatgtacgatacagtaagtcaaattaaatcccccttcactactcacgtggctccaaataccagcactaacctgacaatgagcttcagcaaccagcttaacacagtgcataatcaagcctccgtgctagcatcttcatctactgctgctgcagctacactttctctagctaatagcgacgtctcacttctgaactaccagagcgccctttatcccagttctgctgcccccgttcccggcgtcgcacaacagggggtgagccttcaaccgggaactacccaaatttgcacccagacagaccccttccagcagactttcatcgtgtgtccgcctgccttccaaaccggattacaagcgactacaaagcattctggatttcccgtaagaatggataatgccgtgcccatagtcccgcaggcgccagccgcacagccactccaaatacaatccggtgtgcttacccaggggtcgtgtactcctcttatggttgctactctacatccacaggtagctaccatcaccccacagtacgccgttccatttacactgtcatgtgctgctggccgccccgccctcgtggagcagaccgcggcggttcttcaggcctggcccggcggtacacagcaaatccttcttcctagcacatggcagcagctccccggtgtcgccctgcacaatagtgtgcagccgaccgcaatgattccggaggcaatgggaagtggacagcaacttgccgattggcgaaatgctcattctcatgggaatcagtattcgacaataatgcaacaaccatccttactaaccaatcatgtcacactggctacagctcagccactgaacgtcggggtcgcgcacgtggtaagacaacagcagagctcctcccttccgtcaaaaaaaaacaaacagtccgctccagtgtcaagtaaatcgagcctggatgtcctgccatcccaagtgtattctctggtgggctccagtcccctgcgtaccacctccagttacaatagcctggtgccggttcaggaccagcatcagcctataatcatccctgatacaccttctccccccgtctctgtaattacgatccgctcagacaccgacgaggaggaagataataaatataagccatctagctcagggttaaaacctcggtccaatgttatcagttatgtcaccgtgaatgactcgcctgactctgattcaagtctgtcgtccccatactcgaccgacactcttagcgctctcagggggaactccggcagcgtcttagaggggccaggacgcgtggtggccgacggaaccgggacccgcactattatagtgccaccgctcaagacacaattaggcgactgtacagtggcaactcaggcttccggcctcttgtctaataagacgaaaccagtcgcttctgtgagtggacaatcttcaggttgctgcataacccctaccgggtatcgggcacaaaggggtgggacatcggccgctcagcctctgaacctgtcccaggtgtccgctatgggctattgccttttatttgggccatgtacagtggtgaccttctggcgcactctgttgttggcggggtgctag

SEQ ID NO: 15257 - DNA, 543 bp, synthetic construct
  source 1..543: mol_type = other DNA; note = Synthetic coding sequence
atgcaagcagagggtcaagggaccggcggctccaccggcgacgccgatgggcctggcggccctggcatacctgatggtcctggagggaatgctggaggccccggggaagccggcgccactggtggacgcggccctcggggtgccggcgccgccagggccagtggccctcgtggtggcgcccctcggggccctcatggaggagccgcctcagctcaggatggtcggtgtccttgcggggcaagacggccagatagccgattactgcagctgcacataacaatgccattctccagccctatggaggccgagctggtgcgccgcatcctgagccgcgatgccgcgcccctccccaggccaggcgccgtgcttaaagactttactgttagcggaaatctgctgttcatccggttaacagctgcggatcaccggcagttgcagctatcaatttcatcttgcttgcagcagctcagcctgctgatgtggataacgcaatgcttcttgccagttttcctggcccaggcaccttcaggccagaggcggtag

SEQ ID NO: 15258 - DNA, 717 bp, synthetic construct
  source 1..717: mol_type = other DNA; note = Synthetic coding sequence
atgagcgaagacctggctaagcaactcgcctcatacaaagctcagctgcagcaggtggaggccgctctttctgggaatggcgaaaacgaggaccttctaaagttgaaaaaagacctgcaggaagtgatcgaactgaccaaagaccttctatcaacgcagccttccgagactctggcctctagtgattcattcgcgagcactcagccaactcactcctggaaagtgggggataaatgtatggcagtgtggagcgaagacggacagtgttatgaagcagagatagaagaaatcgatgaggaaaatggaaccgcggccatcacattcgcgggctatggaaacgctgaagtgacccctctactcaatctgaaacccgtggaggaagggcgcaaagccaaagaggacagtggaaataaaccaatgtctaaaaaggagatgatagcccagcagcgggagtataaaaagaaaaaggctttgaaaaaagcacagaggatcaaggagcttgagcaggaacgagaagatcagaaagtgaagtggcagcagtttaataaccgcgcttactcaaaaaacaagaaaggacaggtcaagaggtctatattcgccagtcctgaaagcgtgaccggaaaagtgggagtaggaacctgcggtattgctgacaagccaatgacacagtatcaggataccagcaagtataatgttagacatttgatgccgcagtag

SEQ ID NO: 15259 - DNA, 717 bp, synthetic construct
  source 1..717: mol_type = other DNA; note = Synthetic coding sequence
atgagcgaggatctggcaaaacagttagcctcatacaaagcccagctccagcaagtagaggccgcattgagcggcaatggggagaacgaggatctgctcaagctcaagaaagaccttcaggaggtgatcgagctaactaaagatctgctctcaacccaaccaagcgagacgctggcctcatctgatagctttgcaagcactcagcctacccactcctggaaggttggcgataaatgcatggcagtctggagcgaagacggccaatgttatgaggccgaaatcgaagaaatcgatgaggaaaatggcacggccgcgattacattcgccggctacggaaacgcggaagttacacccctattgaacctcaagcccgttgaagagggtcgaaaggcaaaggaagattcagggaataaacctatgtccaagaaggagatgattgcccagcagcgggaatacaagaagaagaaggctctcaaaaaggcccagcggatcaaagagctggagcaggagagggaagaccagaaagtgaaatggcagcagtttaataacagggcctattctaaaaacaaaaaaggacaggtcaagcgatccatcttcgcctctcccgagtccgtcaccggcaaagtcggagtcggcacatgtgggattgcagacaagcctatgacacaatatcaggacacttccaagtacaacgttcgacacttgatgccgcagtag

SEQ ID NO: 15260 - DNA, 2229 bp, synthetic construct
  source 1..2229: mol_type = other DNA; note = Synthetic coding sequence
gatttgtcctccggggggggaatcgaaccacagtgttcatccgaagtatactttcgagcccgtgaacgggggtgcgaaaacgtcgcttggtccttgggcttgcggtcccactgcttccttgaggctgagctgcatcccttgccttggtttctgcccactaacgtatgcagccccctccctggcgccgcacacaaactcgtgtgctatttcaccaattgggcgcattcccgccccgggcccgcgtcgatattgccacacgatcttgatccttttctgtgcacccatcttattttcgccttcgcttctatgaacaataaccagattgtggcaaaagacctccaggatgaaaagatattgtatcccgagttcaacaaactgaaggaaaggatgtggcagcaactgcctactggcgtaaaaaatcctgcccaccagccgagcctgagccaccataggaacagggagctaaagactctactgagcattggagggtggaatttcgggacgtccagattcaccactatgctctctacattcgcaaaccgggaaaaattcattgcaagcgttatcagcctgcttcggacccatgatttcgacggcttagatctatttttcctctaccctggcctcaggggcagcccaatgcacgataggtggaccttcttgttcctaattgaggagctgctgtttgcttttaggaaggaagctctgctaacaatgcgccccagactgttgctgagcgccgccgttagcggcgtgccacacattgtgcaaacttcatacgacgttcgttttttaggcagattgctggatttcataaacgtgctctcttatgatctgcacgggagttgggagcggttcacaggacacaatagccctttgttctcactgcctgaagaccccaagagcagtgcatacgccatgaattattggagaaaattgggcgcacctagtgagaagttaataatgggcatccccacctacgggagaacctttcggctgcttaaggcaagcaagaatgggctccaggcacgagctatcggcccagcgagtccaggcaaatacacaaaacaggagggctttctggcctacttcgagatatgctcgttcgtctggggcgcgaagaagcactggatcgactatcagtacgtcccgtacgccaataaaggtaaggaatgggtgggatatgacaacgccatcagctttagctataaggcgtggttcatcagaagggaacacttcggcggagccatggtgtggactctggatatggacgatgtccggggcactttttgtggaaccggtccttttccactagtctatgtactcaatgatattctggttcgggctgagttcagctccactagcctcccacagttctggctttccagcgccgtgaacagttcctccacagatccggaacggctcgctgtaacgacggcttggaccacggactctaaaattctgcctcccggcggtgaagctggagtcaccgagatacacggtaagtgcgagaatatgaccatcactccccggggcaccaccgtgacaccaacaaaggaaactgtgagcctggggaagcacactgtggcgctgggcgagaagacagaaattactggcgccatgactatgacatccgttggacaccagtcaatgacacctggggagaaggcactcactcccgttggacatcagagcgtgacgaccggccagaagactctcacatccgtggggtatcagtccgtgacccctggagagaagactctgacccctgtcggccatcagtccgtgacccctgtatctcatcaaagtgtgtctcccgggggaactactatgactccagtacatttccagacagaaaccctgcggcagaatactgtggcacctcgcagaaaagccgtggctcgggagaaagtgaccgtgccctctagaaatatttccgtgacccctgagggccagacaatgcccttgcggggagaaaatcttacctccgaggtggggactcatccaagaatgggaaacctggggctacagatggaggccgagaacagaatgatgctcagcagttcaccagtgatccagctccccgaacaaactccattggcttttgacaaccgtttcgtcccaatctatggcaatcatagcagtgtcaattccgtaactccccagacaagccccctttccctgaaaaaggaaatccccgagaactccgcggtggacgaagaagcctag

SEQ ID NO: 15261 - DNA, 2037 bp, synthetic construct
  source 1..2037: mol_type = other DNA; note = Synthetic coding sequence
atgtggaaattacttctgtgggtgggccttgtacttgtgctcaaacaccacgacggggcggctcataagctggtttgttattttacgaactgggcgcattctagaccaggtcctgctagcatccttccccacgacctggatcctttcttgtgtacccacctcatttttgcgttcgctagcatgaataacaaccaaatcgtggctaaggatttgcaagacgagaaaattctctaccccgagttcaacaaattaaaggagaggaaccgagagctaaagacactgctctctattgggggttggaattttgggacctctaggttcactaccatgttgagcactttcgccaatagagagaaattcattgcctcagtcataagcctactccgaactcatgactttgacggtttggacctgttttttctctaccctggcctgcgcggctcccccatgcacgacaggtggacattcctgttcctcattgaggagttgctcttcgcttttcgcaaggaagcactgctgactatgaggcctagattgctgttatcagctgctgtgagcggtgtccctcacatcgtccagaccagctacgacgtgaggttccttggcagactgttggactttatcaatgtactgagctatgacttgcatgggtcatgggaacggtttacaggccacaactcaccattgttctcattacccgaagatcccaagtcctctgcctacgctatgaattactggcggaaactgggagctccctcagaaaagctgataatgggcatccccacatatggcaggacctttaggctgttgaaggcttcgaaaaacggcctgcaagcccgcgcaattggccctgcctcgcccgggaagtacactaagcaagagggcttcttagcctatttcgaaatctgtagctttgtttggggcgccaaaaaacattggatcgattatcagtacgtgccgtatgccaacaagggaaaagagtgggtcggctacgacaacgctatttctttctcctacaaggcttggtttattaggagggaacactttgggggcgccatggtttggaccttggacatggacgacgttcgtggcaccttttgtgggacgggtcccttcccactggtgtacgtgcttaacgatattctggtccgtgccgagttttcaagcactagccttccccagttttggctgtcctctgcggtcaattcttcctctacagatcccgaaaggctcgcggtcactacagcttggacgaccgactctaaaatcctgcctccaggaggagaggcaggcgttacagagatacatgggaagtgtgagaatatgaccatcacaccgcggggtacgaccgtgactcccacaaaggaaactgttagtctcggcaaacacaccgtggctcttggggaaaaaactgagatcacaggagccatgacaatgaccagcgtgggacatcagagcatgacgcccggggaaaaagctctgactcctgtaggccaccagtctgtgactaccggccagaaaactctcacctcagtgggttaccagtctgtgacgcctggtgagaaaacactcacacccgtgggccaccaaagcgtcactcctgtgagtcaccagagcgtgtcaccaggcggtactactatgaccccggtgcactttcagactgagaccctgagacagaataccgtggctccaagacgaaaagccgtcgccagagagaaagtcacagtgccttccaggaatatctccgttacccccgaaggccagactatgccactgaggggcgagaacctaacttccgaggttggcacccatccacgcatgggcaatctggggctgcagatggaggcagagaatcgcatgatgctcagcagttctcccgtgattcagctccctgagcagactccattagcattcgataatcgctttgtccccatttacggtaatcatagcagcgtgaattctgtcacccctcagaccagcccactgtcactgaagaaggaaattccagagaatagcgctgtggacgaggaggcttag

SEQ ID NO: 15262 - DNA, 1005 bp, synthetic construct
  source 1..1005: mol_type = other DNA; note = Synthetic coding sequence
atgggcggagcagttagtgcaggagaggataacgatgaactaatagacaacttgaaagaagctcagtatatccgcactgagttggttgaacaggcattcagggctatcgatcgggccgattactacctggaagagttcaaggaaaatgcctacaaagacctggcctggaagcatggcaacattcaccttagcgctccttgcatatactctgaggtgatggaagcactggatctgcagccaggactctccttcctgaacctgggatctggcacagggtacctatcctcaatggtgggattgattttaggccccttcggagtgaaccatggcgtcgaactccattccgacgtgattgagtacgccaaacagaagttagacttcttcattaggacgtccgactcattcgataagtttgacttttgcgaaccaagctttgtgacaggaaattgtctggagattagcccagactgttctcaatacgacagggtgtactgcggggccggcgtccagaaggagcacgaggaatacatgaaaaatctgctcaaggtgggagggatccttgtgatgccactggaagaaaagccttgtcacagcgagagtggcaaatctaggttagtgcagctaccacctgttgctgtgaggagcttgcaggatctcgccaggattgccatacgtggaacaattaagaaaatcatacaccaagagactgtgagcaagaacggcaacgggctgaagaacacaccacgtttcaaaaggcgtcgtgtgcggcgccgtcgaatggaaaccatcgttttccttgacaaggaagtcttcgccagccgaatctctaacccctcagatgataacagttgtgaagacctagaggaggagcggagagaagaagaagagaaaacacccccggagaccaagcctgatcctccagtgaactttctgagacagaaggtgctgagcctgcctctccccgaccctctgaaatattatctcctgtactacagagaaaagtag

SEQ ID NO: 15263 - DNA, 1785 bp, synthetic construct
  source 1..1785: mol_type = other DNA; note = Synthetic coding sequence
atgtctaggccatcttctagggcaatctatctgcacaggaaggagtactcacaaaacctgaccagtgaacccactctgctccaacaccgagttgaacacctgatgacctgcaaacaagggtcccagagggtgcaggggccagaagatgcgctccaaaaactatttgagatggacgcccagggacgtgtttggtcccaagacctcatcctgcaggtgagggacggatggctccagttactggatatcgaaacaaaggaggagcttgactcatacagattagactccatacaggctatgaacgttgccctcaacacctgttcttataacagcattctgtccatcacagtgcaggagcccggcctccctggaactagcaccctcctcttccagtgccaagaagtgggtgcagaacgactgaaaacctccttacagaaagccctggaagaggagctggagcagagcagacctcgccttgggggcctgcaacctgggcaggacaggtggaggggtcccgcgatggagagacccctacctatggaacaggcaagatacctggaacccgggatcccccctgaacaacctcatcagaggacacttgaacattccttacccccaagccctagacccctccctaggcacacctcagctcgggagccctccgcctttacactgccaccaccccggcgatcctctagtcccgaagatcctgagcgcgacgaagaagttttgaaccacgtgctgagagacatcgagctgtttatgggaaagctcgaaaaggctcaggccaagacaagccgcaagaagaaattcggcaaaaagaataaggatcagggcgggttgacacaggcccagtatatcgactgcttccagaaaataaaacattcgttcaatctattaggtcggctcgctacttggcttaaggaaacaagcgcgcctgaattggtgcatatcttatttaagtcgctgaattttattctggcacgatgccccgaggcaggattggctgcccaggtgatatcaccactgcttacccccaaggctattaacctcttgcaaagttgtctatctcctcctgagtcaaacctatggatgggcctgggaccagcttggactactagccgcgctgattggactggagatgaaccgctgccctaccagcccaccttttcagatgactggcagctgcccgaaccctcttcccaggcaccgctgggataccaggacccggtgagtcttcgtcgagggtcccacagacttggatccactagccatttcccgcaggaaaaaactcacaatcatgatccccagccaggggaccccaactctaggccctcaagcccaaaacccgctcagccagccctgaaaatgcaagtcctgtatgaatttgaagcccgcaaccctcgagagctcaccgtggtgcagggggaaaagctcgaggtgcttgaccatagtaaaaggtggtggctggtcaagaatgaagctgggcgctctgggtacattccctcaaacattctagaacctctgcagcccggtacaccaggcacccaagggcagtctccatccagggtccccatgctgcggttgtctagccgaccagaagaggtgacagattggctgcaggcagagaatttctcaactgctactgtccgcacacttggatctctcaccggaagtcagctcctgcgaattagaccaggagagctccagatgctctgcccccaggaggcacccagaatactctcgagactggaggccgtgcgcagaatgctggggatcagtccatag

SEQ ID NO: 15264 - DNA, 1500 bp, synthetic construct
  source 1..1500: mol_type = other DNA; note = Synthetic coding sequence
atgtccttcggcagcgagcactacctctgctcttcctcctcctaccggaaagtatttggagatggatctcgattgtctgcgcgcctctcgggcgcaggaggggcaggcgggtttaggtcccaaagcctttcgcgctccaatgtagcttcttcagctgcctgttcttctgccagctctctgggcctagggttagcatacaggaggccaccagcttcagacggcctggacctgagtcaggcagctgcaagaactaacgagtacaagattatacgtacaaatgagaaagaacaactgcaaggcctgaacgacagattcgcagtgtttatcgaaaaggtccaccagctggagacccagaacagggctctggaggcagaactggccgcgctgaggcagcgccacgccgaaccgagcagagtaggggagctcttccagcgggaattacgcgacctccgcgcccagctcgaggaggcttcatcagcccgctcccaagcccttctggagagagatggccttgcggaggaggtgcagagactccgcgctcgctgcgaggaagagtcccggggtcgggaaggagcggagagggcactcaaagcccagcagagagacgtggatggagccacacttgccaggttagaccttgagaagaaggtggaaagtctgctggacgagctcgccttcgttaggcaggtgcacgacgaggaggtagcagagctgcttgccacgctgcaagctagttcccaggccgcggccgaggtcgatgttacagtggctaagcccgaccttacgtccgccctcagagagattcgagcgcagtacgagagcctagctgcaaaaaatttacagtcagcagaagagtggtacaagtccaaattcgccaatttgaatgagcaggccgccaggtctaccgaggccattcgcgcaagccgtgaagagattcatgaataccgaagacagcttcaagcccgcacaatcgagatcgaggggctccgcggcgccaacgagtccctcgagaggcagattctggagctggaagaacggcatagtgctgaagtagccggctaccaggactctatcggacaactggagaatgacctccgaaacacaaagagcgagatggctcgacacctgagggaatatcaggacttgttgaacgtgaagatggcgctggacatcgagatcgctgcttataggaagctcctggaaggcgaggagactcggttcagcacttccggactcagcatatcgggactgaaccccctgcccaacccttcctatctattaccaccacgaattttatccgccaccacgtcaaaagtcagttcgactggactgagtcttaagaaggaagaggaggaggaagaggccagtaaggtagcgtcgaaaaaaacatcgcagatcggcgaaagtttcgaggaaattctggaggagactgtgatttctaccaaaaagaccgaaaaaagtaacattgaggagactaccatctcctcgcagaaaatttag

SEQ ID NO: 15265 - DNA, 1131 bp, synthetic construct
  source 1..1131: mol_type = other DNA; note = Synthetic coding sequence
atggagagttacgatgttatagcaaaccaacccgtggtcatagataatggcagcggggtcattaaagcaggcttcgctggagatcagatcccgaagtactgcttccctaactacgtcggtaggccaaagcacgtccgggttatggccggggccctggagggggatattttcattggcccaaaagcagaggaacaccgtggattgctttctattagatatcctatggagcacggtattgtgaaagattggaacgatatggagaggatttggcaatacgtttactctaaggatcaacttcagaccttcagtgaggagcaccctgtactcttaaccgaggcaccgctgaacccgagaaaaaatcgcgaacgcgccgctgaggtgttctttgagaccttcaacgtcccagccttattcataagcatgcaggccgttctctcgctttacgccaccggcaggaccacaggtgttgttctcgactcaggagatggggtgacacacgctgtgccaatctacgaaggtttcgcgatgcctcattctattatgagaatcgatatcgcgggccgagacgtaagcagattcctgcgcctatatttgcgcaaagagggctacgactttcatagcagcagcgagttcgaaatcgtaaaggctatcaaggagcgtgcctgctatctttctattaatcctcagaaggatgagacccttgaaacggagaaggcccaatattatcttcccgacgggtccaccatcgaaatcggtcccagccggtttcgcgcccccgaacttctgtttaggccagaccttattggtgaagaatccgagggcattcacgaagtgttggtgttcgctatccaaaaatcagacatggatctaaggcgcacactgttttccaatatcgtactgtcgggcggcagtactttgttcaaaggcttcggtgataggctgctctccgaagtcaagaagctggcaccaaaggacgttaagatacgcatctctgcgccccaggaaaggctatactccacctggatcggcgggagcattcttgcatccctggacacatttaaaaagatgtgggtatctaagaaggagtatgaggaagacggagccagaagcattcaccgcaagacattttag

SEQ ID NO: 15266 - DNA, 783 bp, synthetic construct
  source 1..783: mol_type = other DNA; note = Synthetic coding sequence
atgtcacttcagaagacgcctcccacacgggttttcgtggaattagttccctgggctgacaggtcgcgggagaataatctggcttccggaagggagacattgcccggactgagacaccccctgtccagcacccaagctcagacagctacgagggaggttcaggtatccggcacatcagaggtcagtgcaggtccagatagggcacaggtggtcgtgagggtgtcaagcaccaaagaggccgctgccgaagctaagaaatctgtgtgtagacgcctagattacatcactcaaagcttacagcagcagggcgttcaggccgaaaatatcaccgtgaccaaggattttcgccgagtggaaaacgcctatcatatggaagccgaggtgtgtatcacttttactgagtttggcaaaatgcagaacatctgcaacttccttgtggaaaaactagacagctctgtcgtcatttctcctccacagttctaccacacccccggcagtgtcgaaaacctcaggaggcaagcttgtttagtcgcggttgagaacgcttggagaaaggcccaggaggtatgtaatctcgttggacagactctgggaaagcccctgctgatcaaggaggaagaaactaaagaatgggaaggccaaattgacgatcaccagagttcccgtctctcgtcctcactcaccgttcagcagaaaattaaatccgcgacaatccatgcggcatcgaaagtgttcattaccttcgaggtaaagggcaaggaaaaacgcaaaaagcatctatag

SEQ ID NO: 15267 - DNA, 891 bp, synthetic construct
  source 1..891: mol_type = other DNA; note = Synthetic coding sequence
atggaaccttccggcggcgaacaggagcctggcgcagtgagattcttagatctgccttgggaagacgtgctactgccccatgtgctgaatcgcgtcccccttcgacagttgctcagacttcagcgagtgtcacgggcatttcgatctttggtgcagctgcacctcgctggattgcggagattcgacgccgcccaggttggcccgcaaattccacgcgctgcattggctcgccttctgcgcgacgcagaaggcctccaagagcttgcactagcaccctgccacgagtggctgtccgacgaagacttggtgcctgtactggcccgcaacccacagctgaggtctgtggctcttggtggatgcggtcagctgtcaagacgtgctctcggtgctctcgccgaggggtgtcctcgcctccagcgtctgtctctggcacactgcgactgggtggacggactggccttgcgcgggctggctgaccgctgtcctgccctcgaggagctcgacctgactgcatgtaggcagctcaaggacgaggccatagtgtacctggcccagcgccgaggagctggtctacgttccctgtccctggctgtaaacgccaatgtaggggacgccgccgtccaggagctggctaggaattgccccgaactgcaccacctggatctgactggatgcctgagagtcggttccgacggcgtcagaacgctcgcagagtattgccctgtactcaggtctctgagggtaagacactgtcaccatgtggccgagtcgtcgctcagtcgcctgcggaaaaggggcgttgatatcgatgtggaacctccactgcaccaggcattggtgctgttacaagatatggcaggcttcgctccgtttgtaaatctgcaggtttag

SEQ ID NO: 15268 - DNA, 2100 bp, synthetic construct
  source 1..2100: mol_type = other DNA; note = Synthetic coding sequence
atggccgacgccggtataagacgggtcgtgccgagtgatctgtatccgctagtccttgggtttctccgcgataaccagctcagcgaagtggctaacaagtttgccaaggccacaggcgccacgcagcaggacgctaacgctagctccctcctagacatttacagcttctggctcaagtcggctaaagtacctgagcgtaagctgcaagctaacggccccgttgctaagaaggctaaaaaaaaagctagctcaagcgactcagaagactcatcagaggaagaagaggaggtgcaagggccccccgccaaaaaggctgcggtgccagccaaacgggttggcttaccaccagggaaggccgctgccaaggccagcgagtcctcctcaagtgaagagagttccgatgatgatgacgaggaggaccagaaaaagcagccagtgcaaaagggagttaagcctcaagcaaaggctgccaaagcccctcctaagaaagctaagtcaagcgatagtgattcagattcttctagtgaggacgaacctcctaagaatcagaagccaaaaattacaccagttactgtgaaggcacagacgaaggctccccctaaaccggctagagcagctccaaagatcgccaacgggaaggctgcaagtagtagctcctcctccagtagttcgagcagtagtgatgattccgaggaggaaaaagcagccgccacacccaaaaagactgtgcctaaaaagcaggtcgtggctaaggcaccagttaaagccgccaccactcctacgcggaagtccagtagctccgaagacagctcaagcgatgaagaagaggagcagaagaagcccatgaagaacaagccaggcccctatagttcagtccccccacccagcgcgccaccccctaagaagagcttgggaacgcagcctcccaaaaaagcggtcgagaaacaacagccagtggagagctctgaagactcatccgacgagagcgatagtagttctgaggaggagaaaaagcccccaactaaggccgtggtgtccaaggctacaaccaagcctcccccagctaagaaggccgcagaatcttctagcgacagtagcgactctgacagcagcgaagatgatgaggcacccagcaagcctgcaggcactacaaaaaacagcagtaacaagcccgcagttactaccaaaagcccagccgtaaagcctgctgctgcccccaagcaaccggtgggtggtggccagaagcttctaaccaggaaagccgatagcagtagctccgaggaggagagcagcagtagcgaagaggaaaagactaagaagatggtcgctaccaccaaaccgaaggccacagccaaggctgcactttccctgccagccaagcaggctccccaaggcagccgtgactcgtcttctgactcggatagtagctcctctgaggaagaagaggagaagacctcaaaatccgcagtgaagaaaaagccacaaaaggttgccggaggcgccgctccatctaagccagcgagtgcaaaaaagggaaaggccgagagttccaattctagttccagtgacgattctagcgaggaggaggaagaaaagctgaagggcaaggggtctcccagaccccaagcaccaaaagcaaatggtacctctgccctgaccgcacagaacggtaaggcagcgaaaaatagcgaagaggaagaggaggaaaagaagaaggcggctgtggttgtgtcaaagagcggaagcctgaagaagaggaaacagaatgaggctgctaaggaggcagagacaccgcaggccaaaaagataaaattacagaccccaaacactttccctaaaagaaaaaagggtgaaaaacgggcgagctcacccttcagaagggtgcgtgaggaggaaatcgaagttgattccagggtggccgacaactcattcgacgccaaacgcggcgctgcgggagattggggggaaagagccaaccaggtcctaaaatttaccaaaggtaagtctttccgtcatgagaaaaccaagaaaaagcgcggatcctaccggggggggagcatatctgtgcaagttaactctataaaatttgacagcgaatag

SEQ ID NO: 15269 - DNA, 1275 bp, synthetic construct
  source 1..1275: mol_type = other DNA; note = Synthetic coding sequence
atggaggagaataatctccagtgtagcagcgtggtggacggaaattttgaagaggttccgcgtgagactgccattcagtttaaaccacccttatataggcagagatatcagtttgtcaagaaccttgtcgatcaacatgagcctaaaaaagtagccgacctggggtgtggtgatacaagtctgctccgtctccttaaagtgaatccttgtatcgaactgttagtaggcgtcgatatcaatgaggataagttacggtggagaggcgactctctggcccctttcctcggcgactttctgaagccccgcgatctgaacttgaccatcacactctaccatggctctgtggtggagcgggattccaggctcctggggtttgaccttattacatgcattgagctcatagagcacctggactcgggagacctagcgcgcttcccagaagtagtattcgggtatttgtccccttcgatgattgtgatttccacgcctaacagtgagtttaacccactatttcctagcgtgactctgcgggactctgaccacaaatttgagtggacccggatggagttccagacatgggcactgtatgtggcaaaccgctacgactacagtgtggagttcactggcgtgggcgagccccccgcaggggccgagaacgtggggtactgtactcagatcggaatcttccgaaaaaacggggggaaagctaccgagtcatgtctgtccgagcagcatgaccagcatgtctacaaggcccggcagggacttaccatgctacccagactggtcctaaacttccatcctcaagcaatcctgttgccccatctgccgaagatgctcaggttgcaagtctttaccacctcatatcctagtttgcagcaggagaggttcttcaagctagtgctcgtaaatgaagtctctcagcaggtagagtcactacgcgtgagccatctcccacgccgcaaggagcaggccggcgagcgtggcgataagccgaaagatattggggggtccaaagccccagtgccttgtttcgggcccgtgtttacagaggtggagaaggcgaagattgagaactcaccgaccccgttttgcgtgggagacaagttctttgttcccctgcaacgcctgctcgcatatcctaagctcaaccgcctctgcgccaacgaggagatgatgcggagcgtgattgccgattccatacccctcagcagcgatgggtccgccgtggttgcggatctgagaaattatttcgatgagcaattcgaattttag

SEQ ID NO: 15270 - DNA, 1182 bp, synthetic construct
  source 1..1182: mol_type = other DNA; note = Synthetic coding sequence
atggaagagaataatctgcagtgcagctccgtcgtcgatggcaattttgaggaagttccgcgagagacggcgatccaatttaagccacccctttaccgacagagataccagttcgtcaagaatcttgttgatcagcatgagcctaagaaggtggcagatctgggctgcggcgatacatccctacttagacttctgaaggtgaacccatgtatcgaactgttagtaggagtggatatcaacgaggataagctgcgatggagaggagactcgctcgcacccttcctgggggattttcttaagccacgggatctgaaccttactattactctttaccacggttcagtggttgaacgggattcgaggctgcttggcttcgacctgataacctgcattgaactgatagaacacctggactctggcgacctggctcgcttccctgaggtcgtctttgggtacctgagtccttccatgatcgtaatctcaactccgaattcggaatttaaccctctcttcccaagtgtgaccctgagagatagcgaccacaagttcgagtggacaagaatggagtttcaaacatgggctctttacgtggccaatcggtatgactacagcgtggaatttactggcgttggtgagcctcctgcgggggcagaaaacgtaggatactgtacacaaattggcatttttaggaagaacggtgggaaagccactgaatcatgcttaagcgagcagcatgaccagcacgtgtacaaggcggtgttcaccacctcttatccaagtctgcagcaagagaggtttttcaagttggtgttagtgaatgaggtgagccaacaagtggaatccctacgggtgtcccacctgcctagacgcaaggagcaggccggtgaacggggcgataagccaaaagacattggtgggagcaaggcccccgtgccctgtttcgggcccgtgttcaccgaagttgagaaagccaagatcgagaattcccctacacccttttgcgtcggcgacaagttctttgttccgcttcaacggctactcgcgtatcctaagctcaatagattgtgtgctaatgaagagatgatgcggtctgtcattgccgactccatccccctgtcaagcgatggttctgccgttgtggccgatctgagaaattattttgacgagcaatttgaattttag

SEQ ID NO: 15271 - DNA, 1701 bp, synthetic construct
  source 1..1701: mol_type = other DNA; note = Synthetic coding sequence
atgtcagcctccactgggggcggaggtgattcagggggctctggcggcagctcctcctcctcgcaggcctcctgcgggcccgagagcagtggaagtgagctggctctcgcgactcccgtgcctcaaatgctgcaagggctgcttgggtcagacgacgaagagcaagaagaccctaaggactactgtaaaggcggataccatccagtgaagattggtgacgtattcaacggtcggtaccatgttgtcaggaaactgggctggggacatttctctacagtttggctttgttgggatatccagcgtaagagattcgtggcgctcaaggtagttaaatccgctgggcactacaccgagaccgccgtggacgagattaaactgctcaaatgtgtgcgggactccgacccctcagaccctaagcgggaaaccatagtacagttgatcgatgactttcgcatcagtggagtgaacggcgttcacgtctgcatggtgctggaggtcctggggcaccagctcctcaagtggatcatcaaatctaattatcagggactcccagtgccctgcgtaaaaagcattgtgcgtcaggtcctgcatggattagactatctccacaccaagtgtaaaatcattcacaccgacattaaacctgagaacatcttactatgtgttggagatgcatatatacgccgcctggccgcagaggcaacagagtggcagcaggccggcgcaccgccaccgtctcggtcgatcgtctccacagccccacaggaagttttaacaggcaagctgtcaaaaaataagcgaaagaaaatgcgacgtaagagaaagcagcagaagcgtctgcttgaggaacggttaagggacctgcagcggctggaggctatggaagccgctacccaggctgaggattccggtctgcgtcttgacggaggaagcggttccacctcatcctctggctgtcaccctggaggagcaagggccgggccatctcctgcctccagctcccctgctcccggaggtgggcgaagcctgtctgcaggcagccagacctccggcttcagcggctcactgttctctcccgccagctgcagtatcctcagtgggagtagcaaccaacgggaaactgggggcttactcagccccagtacgccatttggcgcttctaatcttttagtaaatcctttggaaccacagaatgctgacaagattaaaattaagattgctgatcttggtaatgcgtgctgggtgcacaagcactttaccgaggacattcagacaagacaatatcgggcggtggaggttcttataggagcggaatacggtccacccgcggacatctggtctacagcctgcatggcattcgagctggccaccggcgattatctgttcgaaccgcactctggagaggattatagcagagatgaggatcacatcgcccacattgtggagctcctgggagacattcccccagcgtttgccttaagtgggagatattcccgggagttcttcaataggaggggcgaactgcgacacattcataatttaaaacactgggggctctacgaggtcctgatggaaaagtacgaatggcctcttgaacaggccacacagtttagcgcattcctgctccccatgatggaatacataccggagaagcgcgctagtgccgctgattgccttcagcatccatggttgaacccctag

SEQ ID NO: 15272 - DNA, 150 bp, synthetic construct
  source 1..150: mol_type = other DNA; note = Synthetic coding sequence
atggctggtcccagggtggaggtggatgggtctattatggagggaggtggccagatcctcagggtttccactgctctgagttgcctgttgggacttccactgcgggtgcagaaaatcagggcaggtcgctcgacacctggactgaggtag

SEQ ID NO: 15273 - DNA, 1101 bp, synthetic construct
  source 1..1101: mol_type = other DNA; note = Synthetic coding sequence
atggccggccctcgggtagaggtggatgggtcaattatggaaggtggcggacagatattgcgagtgtcgaccgccctgtcctgccttctgggcttgccactgcgggttcagaagatcagggcggggcggtccacacctgggcttaggccgcagcacctatccggactggagatgattcgagacctgtgtgacggccagctggagggtgccgagatcgggtccacagagattactttcaccccagaaaagatcaagggcggcatccatacagcagatacaaaaacagcagggagcgtctgtctgctgatgcaggtcagcatgccatgcgtcttatttgctgcttctcccagcgagctgcatctgaagggggggaccaatgcagagatggcaccacagatcgattataccgtgatggtgttcaagccaatcgtagaaaagttcgggtttattttcaactgcgacataaagaccagggggtattaccctaaaggaggcggagaggtgatagtaagaatgagccccgtcaaacagctgaacccaatcaacctgaccgagagaggatgcgtaaccaagatctatggacgggccttcgtggctggagtccttccttttaaggtagctaaggatatggctgctgccgctgtgcggtgcatacgaaaagagattcgggacctctatgtcaacatacagccagtgcaagagccaaaggaccaggcctttggaaacgggaacggaatcattattattgccgaaacctcgactggctgcctctttgctggttcttcactgggaaagaggggggtgaacgctgacaaggtcgggattgaagccgctgagatgttgctcgcaaaccttcgccatggcgggactgtggacgagtatctccaggaccagcttatcgtcttcatggcactggcaaatggcgtgtcacgaattaaaacaggccccgtgaccctgcatacacagaccgctatacactttgccgagcagattgccaaagcaaaatttattgtcaagaaaagcgaggacgaggaggacgctgctaaagatacttacatcatcgagtgccagggcattgggatgaccaatcccaatctgtag

SEQ ID NO: 15274 - DNA, 1155 bp, synthetic construct
  source 1..1155: mol_type = other DNA; note = Synthetic coding sequence
atggagggcttaggtcgaagttgtttatggctacggcgcgaactgagcccgccacgcccccgactgctgctgctcgactgcagatcgcgggagttgtatgagagtgcgagaataggcggcgccctctccgtggcactacctgcactcctgctgcggagactcagacgaggcagtttgagcgttcgggcgctgttgcccggaccccccctccaaccccccccccctgctccggttctcctctacgaccagggcgggggacgtagaaggaggggagaagcagaggcagaagcagaggaatgggaggctgaatcagttttgggaactttacttcagaaacttcgcgaagagggttatttagcctactacctccaaggcggcttttctaggtttcaagctgagtgcccccacctttgcgaaacctccctggccggccgcgccggttcttcgatggcccccgtgcctggcccggtgcccgttgtagggttggggagcctatgcctagggagtgactgctcagatgccgagtccgaggcagaccgtgatagtatgtcctgcggtctggattccgagggggccacacctcccccagttgggttgagggcgagctttccggtacaaattttacctaatctatatctggggtcagctcgtgacagcgcgaatctcgagagcctcgcaaaactgggaataaggtatatcctgaacgttacacctaatctgccaaacttctttgagaagaatggtgatttccattataagcagattcccatttccgaccattggagtcagaacctttccagattttttccggaggccattgagtttatagacgaggccctgagtcagaactgtggggttcttgtgcactgcctggccggggtcagcagatccgtgacggtgaccgtggcatacctaatgcagaagctgcacctgagcctgaacgacgcgtatgacttggtcaaacgaaaaaaatctaacatcagcccaaacttcaacttcatgggccaactgcttgacttcgaacgatctctgaggctggaagagaggcatagtcaggagcaaggcagcggagggcaggcctctgccgcttccaaccctccctcctttttcacaacgccgacatccgatggcgcatttgaattggcccccacctag

SEQ ID NO: 15275 - DNA, 804 bp, synthetic construct
  source 1..804: mol_type = other DNA; note = Synthetic coding sequence
atggccgaaccggttcaggaggagctttcagtcctcgccgcaatattttgccgaccacacgagtgggaggttctcagcaggagtgaaacagatgggactgtgttcagaattcacactaaagcagagggatttatggacgttgacatccctctggagctggttttccatctccccgttaactatcccagctgcttgcccggcatcagtatcaattccgagcagttgacacgcgcacaatgcgtgactgtgaaggagaatctgctggagcaagctgagagcctgctgtccgagcctatggtacatgagttggtactgtggattcagcagaatctgcgtcacatcctgtctcagccagagactggtagcggcagcgagaagtgcacgttctctacctcaacaacaatggatgatgggttatggattaccttattgcacctcgatcatatgagggcgaagaccaagtatgtcaagattgtggaaaagtgggccagtgatctccgactcactggcagactaatgttcatgggcaagattatcctcattctgcttcaaggggatcgaaacaatcttaaagaatacctgatcctgcaaaaaaccagcaaggtcgacgtagactccagtggcaagaagtgcaaggaaaagatgatctccgtcctgtttgaaaccaaagtacaaactgaacataagcgcttcctggcctttgaagtgaaggagtacagcgcactggacgagctgcagaaggagtttgagacagcggggcttaagaagctgttttccgaatttgtactggccctagtaaagtag

SEQ ID NO: 15276 - DNA, 2010 bp, synthetic construct
  source 1..2010: mol_type = other DNA; note = Synthetic coding sequence
atggctatcgtccagacattgccagttccgctagaacctgccccagaagctgcaaccgctcctcaggctccggtgatgggttccgtgtcttcactgatatccggcagaccatgcccaggcgggccagccccccctcgtcaccacggacctccaggcccaacgttctttagacagcaggatggcttgttacggggcggctatgaagctcaggaacccctgtgccccgctgtacccccccgtaaggccgtaccggttacaagcttcacctatatcaacgaagacttccggaccgagtcccccccctctcccagcagcgatgtcgaagatgcaagggaacagagagcccacaacgctcacctgcgaggtcctcccccaaagctgattccggtgagtgggaagctcgaaaagaatatggaaaagatcctgatacggccaaccgccttcaagccggtgctgccaaaacctagaggggccccgagtctgccaagctttatggggcctcgcgctacaggcctctccggcagccaaggcagccttacgcagctctttggaggcccagcaagctcctcttccagcagctcgtcatcctcagcagcagataaacctctagctttttcaggttgggcctccggatgccccagtgggactctgtctgactccggccgaaattccctgtcctccctgccaacctactcaacaggaggtgccgaaccaactacatcgagcccaggcggccacctgccgagtcatgggtcaggccgaggcgctctgccgggacctgctaggggcgttcccactggccctagccacagcgattccggaaggagcagcagctcaaagagcaccggaagcctcggtggaagggtggctggcggactcctggggtcgggcacacgggcctcccccgacagctccagttgtggggagagatccccccccccgccccccccacccccgtcagacgaagcactgttacactgtgtcctcgagggcaaactccgtgaccgcgaggccgagctgcagcaactgcgggatagtttggatgagaacgaggccactatgtgccaggcatatgaggaacggcaaaggcactggcagcgggaacgggaggcacttagggaggactgcgctgcccaagctcagagggctcagcgtgcccaacaactcctacagctgcaggtattccagctccaacaggagaagagacaattacaggacgactttgcccaattgctgcaggaaagagagcagctcgagagacgctgcgctacattggagagagagcagagagaactgggtcctcggctcgaggaaaccaaatgggaggtgtgtcagaagtctggagaaatatccttactgaaacagcagttgaaagagtcccaagccgagctggtacaaaaagggtctgagctcgtggcactgagagtagccttgcgtgaagccagagctactctcagggtaagcgagggacgcgctcgcggcttgcaagaagccgccagagccagagagctcgagctggaggcttgcagtcaggaactccagagacacagacaggaagccgaacagttacgggagaaagctggccagcttgacgcagaagcagctggactgcgggaaccacccgtgccacctgctactgccgatccttttctgttagcggaatctgacgaggcaaaagttcaacgggccgccgccggggtggggggctcattgcgggcccaggtcgagcgattacgcgtggagctgcagcgtgagcggcggcgcggagaagagcagcgggattcctttgagggcgaacggctggcatggcaggccgagaaggaacaggtaataagatatcagaaacagttacagcataattatatccagatgtaccgtagaaaccgacaactggaacaagaattgcagcaactatctctcgaactagaggccagagagttggctgatctggggctcgctgaacaggccccatgcatatgcctggaggaaatcacagccactgaaatatag

SEQ ID NO: 15277 - DNA, 2010 bp, synthetic construct
  source 1..2010: mol_type = other DNA; note = Synthetic coding sequence
atggcaatagtgcagactctgcctgtaccacttgaacccgcgcctgaggcggctaccgctcctcaagcccccgttatgggatctgtctcatcccttatcagcggacggccgtgccctggtggtccagctccgccaaggcaccacggaccccccggaccaactttttttcgccagcaggatgggttattacgcgggggttacgaggcccaggagcccctgtgtcccgccgtgccgcccaggaaggccgtccccgtgacctcttttacctatattaacgaagactttaggaccgaatccccacccagcccctccagcgatgtagaagatgctagggagcagagagctcacaacgcccacttgagaggtcccccccctaaacttatcccagttagcggaaagctagagaagaacatggaaaagatcctaatccgtcctacggcgtttaagccagtactcccaaagccaagaggggctcccagtttaccctcctttatgggtcccagagcgactgggctgagtggcagtcagggctccctgacccagctcttcgggggccccgcctcaagctcttcttccagctcaagctcatcagccgcagataagcccctagcattcagcggctgggcgagtgggtgtcccagcggcaccttgagtgatagcggccggaacagcctatcaagtctgccgacgtattccaccggaggagccgagccgaccacttcaagccctggtggtcaccttcccagtcatggtagcggcagaggtgccttgcctggcccagctcgcggagtgccaactggtccatcccacagcgactccggtcggtcctcttcgagcaagtcaactggcagtctcggcgggcgcgtcgccggcggtctgctgggttccggcacacgcgcgtcacctgactcaagctcatgcggtgaacgctctcctccaccccctcctccacctccctctgacgaagctttgttgcactgcgtactggagggaaagctgagagacagggaagcagaattacaacaactgcgcgactctctcgatgagaatgaggcaacaatgtgtcaggcctacgaggagaggcaaaggcactggcaacgagagcgagaggccctgagggaagactgcgcagcccaggcacagagggctcagcgcgctcagcagctcctccagttgcaggtattccagcttcagcaagaaaagaggcagcttcaagacgattttgcacagttgctgcaggaaagggagcagctggaaaggcggtgtgccactctcgagagggagcagcgggagttggggccccggttagaggagaccaagtgggaggtgtgccaaaaatccggcgagatttccctgcttaagcaacagttaaaagagagtcaggccgagttggtccagaagggctccgagctcgtagcgctgagggttgccttgagagaagctagagcaaccctgagggtatctgagggccgtgcccgagggctgcaagaggcggcaagggccagggaactggagctggaagcttgttctcaggaattacagcgacacaggcaagaggccgaacaactgcgggaaaaggcaggtcagttggatgccgaagccgccggactgcgggaacctccagtgccccccgccactgccgatccatttctgctcgctgagagcgacgaggccaaagtgcagcgggctgcggcaggagtaggagggtccctgagagctcaggttgaacggttgagggtggaactgcaacgggagcggagacgcggtgaagaacaacgcgacagcttcgagggggagcgactcgcctggcaggcagagaaagagcaggtcattcgttatcagaagcagctccagcacaactacatacaaatgtatcggagaaatcgacaactggagcaggagctgcagcagcttagtctcgaattggaggcccgcgagctagccgatctaggtctggctgagcaggcaccgtgtatctgtctcgaggaaattactgcaactgagatatag

SEQ ID NO: 15278 - DNA, 1059 bp, synthetic construct
  source 1..1059: mol_type = other DNA; note = Synthetic coding sequence
atgaagttaaaggagctggagcggccagcagtgcaagcctggagcccggcttcacagtaccccctgtatctggccacaggaacttccgctcagcagctagactccagcttctctactaatggaacccttgagatttttgaggttgactttagagatccgagcttggatctgaagcaccgtggtgtactgtcagctctgtctagatttcacaaactggtgtggggatcctttggatcgggtctcctggagagttccggcgtcatcgtgggagggggcgacaatgggatgttgatcttgtataacgtgacgcacatcttatccagcggaaaggagcccgtaatcgcccaaaaacagaaacatacgggtgcagttcgcgcattagacctgaaccccttccaggggaacctcctggctagtggcgcaagtgactccgagattttcatctgggatctgaataacctcaacgtgcctatgacattgggtagcaagtcacagtaccatgaacaaccacctgaagacattaaggctttaagttggaaccggcaggctcagcatatcctgtcctccgctcatcctagcgggaaagccgtggtgtgggacttgcgcaagaatgaacccatcatcaaagtgtctgaccactccaatcgaatgcattgctcaggcctggcttggcacccagatatcgccactcagctcgtgttgtgctcagaggatgatagactaccagtgatccagctctgggacctgaggtttgccagcagtcctttgaaggtcctggagagccactcacggggtattctcagtgttagttggtcccaagctgacgcagagcttctgcttacaagcgcaaaagactctcagatcctctgccgcaacctcggctcgtctgaagtagtgtacaagctgcctacgcagtctagctggtgtttcgacgtgcaatggtgccctcgagacccgtccgttttttccgctgcttcatttaatggatggattagtctgtatagtgtgatggggagatcatgggaagtgcaacacatgcggcaggctgacaaggtgtag

SEQ ID NO: 15279 - DNA, 3540 bp, synthetic construct
  source 1..3540: mol_type = other DNA; note = Synthetic coding sequence
atgaagttgaaagagttagaacgtcctgctgtccaagcctggagcccagcgtctcagtacccgttgtatctagccactggcacctcggcccagcagttggactcgagcttctcaacgaacggaacgctggaaattttcgaggtagactttagagatccatcattggacttaaaacaccgaggcgtgcttagtgcactgagtcgatttcacaaactagtgtggggctcctttggcagcggattgttggagagctccggcgtgatagtcgggggcggcgataacggtatgctaattctgtacaatgtgacccatatactgtcaagtggaaaggagcccgtaatagctcaaaagcagaagcacaccggagccgtaagggctctggacctgaatccgttccaggggaatctattagcgtccggagctagcgatagtgaaattttcatatgggacctgaataacctcaacgtccctatgactctgggctccaaatcacagcagcctccggaggatatcaaagctttgtcctggaataggcaggcgcagcacatactgtctagcgcccacccatccgggaaggcggtggtctgggacctgcgaaagaatgaaccaattatcaaggttagtgaccattccaatcgcatgcattgctccgggttggcatggcacccagacattgccactcaactggtgttgtgtagtgaagatgatcggttacctgttatacaactgtgggacctgagatttgcaagttcccctctcaaagttcttgagtctcatagtagagggatcctgtcagtgagctggtcccaggccgacgccgagctcctgcttacgtctgccaaggactcccagatcttatgcagaaacctagggtctagcgaggttgtctataaactgcccacgcagtcgagctggtgctttgacgttcagtggtgcccccgagatccttccgtgttctctgccgctagtttcaatgggtggataagtctctattctgtgatgggcaggtcttgggaggtacagcatatgcgccaggctgataagattagtagctctttctccaagggccagcctctccccccactacaggtccctgagcaagtggctcaggcaccattaatccccccactgaaaaaaccgccgaaatggatcagaaggccaactggagtctcattcgcatttggcggcaagctagtgacatttgggcttccctcaacccctgcccatctggtgccccagccttgtcctcggctcgtgttcatctctcaggtcaccaccgagagcgagtttctcatgaggagcgccgagctacaagaagccctcggcagcggtaacctgctgaactactgccaaaacaaatcccagcaggctcttctccagagtgagaagatgttgtggcagtttctgaaggtcacattggagcaggactcgaggatgaagtttcttaagcttctgggatatagcaaggacgagctccaaaaaaaagtagccacctggctgaagagtgatgtaggtcttggtgagtccccccagccaaaaggcaacgaccttaattcagatcgacaacaagctttctgttctcaagcttcaaaacacaccactaaggaagcttccgcgtcttccgcctttttcgatgagctcgtgcctcagaacatgactccatgggagattcccattaccaaggatattgatggcctattgtcccaggccctacttctaggtgaacttggaccagccgttgagctttgtcttaaggaggaacgctttgccgatgctataatactcgctcaggccggtgggaccgatctactgaagcagacacaagagaggtacctggctaagaagaagaccaagatctcgagcctgctggcgtgtgtagtgcagaagaattggaaggatgtcgtgtgcacctgtagtttaaagaattggcgcgaggccctagccctcctccttacatacagcgggacagagaaatttccagaactctgcgacatgttgggcactcggatggagcaagaaggctcacgcgccctgacatcagaggcccggttgtgctatgtctgttcgggaagcgttgaaaggcttgtagaatgttgggcgaagtgtcaccaggcactgtctccaatggccctgcaggatctcatggagaaagtcatggtgttaaacaggagcttggagcaactgcggggacctcacggggtgagtcccggccctgctacgacgtatcgggtgactcagtatgcaaacctgctagctgcccaaggctccctagcaaccgccatgagtttcctcccccgcgactgcgcccagccgccggtgcagcagctaagagatcgtctcttccacgctcagggatctgctgtgctcggccagcagtccccaccgttccccttccctaggatcgtagtcggcgctacgcttcattccaaggagacctcatcgtaccgtctgggatcccagcccagccaccaggttcccacaccctcccctcgaccccgggtttttacgccacagagttcaccagctatgccactggccccttctcatccctctccataccaaggtcctagaacccaaaacatttctgactaccgagcacccggaccacaggccatccaacctttacccctgagccctggcgtccggccagctagctcacagccccaactcctggggggccagagggtacaggtccctaatcccgtgggctttcctgggacatggcctcttcctggaagccctctacccatggcctgtccgggcatcatgaggccgggttctactagtctgccagagaccccaagactcttcccgctcctgcccctgcgacctcttggtccgggccggatggtttcccacacgccagcccctcccgcttcttttcctgtcccgtacctcccaggagaccctggcgcaccctgtagttccgtgcttcctacgactggaatactgacacctcaccccggacctcaggacagctggaaggaggccccagccccaaggggtaatctccagaggaataaactgcccgagacctttatgccgcccgccccaattacggcccctgtcatgtccttaacacccgagttgcaggggatcctccccagccagcccccagtctcctccgtgtcacacgccccccccggagtgccgggagagctgtcactgcagctgcaacacttaccccccgaaaagatggaacgtaaagaactgcccccagagcatcaaagtttaaaatcatctttcgaggcgctgctgcagaggtgttcactctcagcaaccgatctgaaaactaaaaggaaactcgaggaggccgcccaaaggctggagtatctgtatgaaaagctgtgtgagggcacgctcagcccacacgttgtggctggactgcatgaggtggcccggtgcgtggacgccggttcctttgaacaaggcttagccgtgcatgctcaggtggccggatgcagctcattttccgaagtatccagcttcatgcccatcttgaaggctgtgctgattattgcccataagctgctcgtttag

SEQ ID NO: 15280 - DNA, 1635 bp, synthetic construct
  source 1..1635: mol_type = other DNA; note = Synthetic coding sequence
atggacgataagggggatccatcaaacgaagaagcacctaaggctataaagcccacctctaaagaattccggaaaacatggggctttaggcggaccacgatagcaaagagggaaggcgccggggatgcagaagcagacccactcgagcctcccccacctcagcagcagctgggcctgagtcttcgtaggagtggtcggcagccaaagcggacagaaagggtggagcaattcttaaccattgctaggcgtcgtggcagaaggagtatgcccgtgtcattggaagactctggagaacccacatcatgtccggccaccgatgctgagaccgcctccgagggcagcgtagagtcagcctcagagacacggagcgggccacagtctgcaagcactgcagttaaagagagaccagcatcctccgagaaggtcaaaggcggcgacgaccatgacgatacctcagattcagattctgatgggctgaccctcaaggagcttcagaacagacttcggcgcaaacgtgagcaggaaccgacagagcggcctctgaaaggaatccagtccagacttagaaagaagcgcagagaggagggccccgccgaaaccgtgggtagcgaagcatccgataccgtggagggagtcctcccatctaagcaggaacccgaaaacgaccaaggagtggtttcacaggctgggaaagatgaccgagaatcgaaattagaaggtaaggcagctcaggatatcaaggatgaagagccaggggatctggggcgtcccaagccagagtgtgaaggctatgatcccaacgcgctgtactgcatatgtcggcagccgcacaacaacaggtttatgatctgctgcgaccgctgtgaggaatggtttcatggggattgtgtaggaataagtgaggcaagaggacgactcctagaacgcaacggggaagattacatttgtcctaactgcacaatcctccaggtgcaggacgagacccattctgagaccgccgaccaacaggaggcaaagtggcgtcccggcgatgcagacggcaccgattgcactagcattggaacaatcgaacaaaagtccagcgaagatcagggaataaaagggaggatagaaaaggctgctaatccttccggaaaaaagaagctcaagatcttccagccagtgattgaagcccccggggcaagtaagtgcattggtcctggctgttgccacgttgctcaaccggacagcgtttattgctccaacgactgcattctgaagcacgcggcggcaacaatgaaatttctttcttctggtaaggagcagaaacccaagcccaaagaaaagatgaagatgaaaccagaaaagccatcattacctaaatgtggcgcccaggctggcattaaaatctcttctgtccataagaggccagctcctgagaaaaaggagactacagtaaaaaaggcagtggttgtcccggcacgctccgaagcactggggaaggaggcagcatgcgagagctctactccctcttgggcctccgaccacaactataatgctgtaaaacctgagaaaactgcggcgccatccccaagcctattgtacaaatgcagtggtaagtactcctactcattgcacccatctctgatcgcttag

SEQ ID NO: 15281 - DNA, 1689 bp, synthetic construct
  source 1..1689: mol_type = other DNA; note = Synthetic coding sequence
atggatgacaagggagacccaagtaacgaggaggctccaaaagccatcaaacctacctccaaggagtttcgaaaaacctggggattcagacgtaccacgattgccaagagagagggcgcaggcgacgcagaagcggacccgttggaaccacccccgccgcagcagcagctggggctttcgcttaggaggtctggcaggcagccaaaaaggacagagcgtgtggagcagtttctcacgatagcacgaaggcggggaagacgtagcatgccagtcagtctggaagactcaggagaacctacctcctgcccagcaacggatgcagagacggccagcgaaggatccgtcgagtccgcttccgaaaccaggagcggccctcagagcgcttcaacagccgtaaaggaaagaccagcctcatcagaaaaagtgaaggggggcgacgaccatgacgatacctctgacagtgactctgatgggttgacgcttaaggaactacagaatcggcttagacggaagagagaacaggagcccactgagcgacctctgaaaggcatccagtctaggttgcggaaaaaacggcgggaagagggcccagcagaaaccgtgggctccgaagcaagtgacacagtggagggcgtgctgcccagcaagcaggagccagagaatgaccagggtgtcgtgagccaggctgggaaggacgacagggagagtaaactggaaggtaaggccgcgcaggatattaaggatgaagagccaggggatttaggcagacccaaaccagaatgtgagggctacgacccgaacgccctatactgtatctgcaggcagccgcataacaaccggttcatgatctgttgtgaccggtgcgaagaatggttccacggcgactgcgtcgggatctctgaggcccgtggaagattgctcgaaaggaacggcgaagattatatttgccccaattgtacgattcttcaggtccaggacgaaactcatagtgagactgccgatcagcaggaggcaaaatggcgacccggagacgctgacgggaccgattgtacgtctatcggaactatcgaacagaaaagctctgaggaccagggcattaaggggcgcatagaaaaggccgccaatccatcagggaagaaaaagctgaaaattttccagcccgtaatcgaagcccctggggccagcaaatgcataggtcccggatgctgccacgttgctcagcccgattccgtatattgcagcaatgactgtatacttaaacacgccgctgctaccatgaaattcttaagcagtgggaaagagcaaaaaccaaaacctaaggagaaaatgaagatgaagcctgagaagccgtcacttcccaaatgcggggcccaggccggcatcaagatctcctccgtgcataaaagaccggctcccgagaaaaaagaaaccactgtaaagaaggccgtggtggtccccgccaggagcgaggccctagggaaggaagcagcctgtgaatcgtcgaccccaagttgggccagcgatcacaattataacgctgtgaagcccgagaaaacagcagccccatctccaagtctgctttacaagtgtatgtatcacctcggtgtggggctcctggatcccagtcgcagcttctggatcgcgataccttgggcctgcccggggctcggcgtcgccgccctgtgttag

SEQ ID NO: 15282 - DNA, 1689 bp, synthetic construct
  source 1..1689: mol_type = other DNA; note = Synthetic coding sequence
atggacgacaagggcgatcctagtaatgaagaagcgccgaaagccatcaaaccaacctcgaaagaattcaggaaaacctggggctttcgacgaaccaccatcgccaagcgcgagggagcaggtgatgccgaagccgatcccttagagcctccacctccccagcagcagctcggactttccctccgcaggagtgggagacaacccaagaggacagaacgggttgaacagtttctgaccatcgcaagacggagaggccggcgtagcatgccggtgtccctcgaggattcaggggaacccacctcatgccctgctacagatgctgagaccgctagtgaaggctcggtagaatctgccagtgaaacaagaagcggcccccagtctgcatcaacggcggtgaaggagcggcctgcatcctcagaaaaggtcaaggggggagatgaccacgatgacactagtgacagcgatagcgacggacttacgcttaaagaactgcaaaaccgcctaagacgaaagcgcgagcaagagccaaccgaacggccccttaagggaattcagagcaggcttcgcaaaaaaagaagggaggagggtcccgccgaaacagtcggctccgaagccagcgacactgtagagggcgtcctgccaagtaagcaagagcccgaaaatgaccagggcgtagtgtcgcaggccggcaaggatgacagagaaagcaagctcgagggtaaggccgcccaggatatcaaagacgaagaaccgggcgacctgggcagaccaaagccagaatgcgagggatacgatccaaatgcactctattgcatttgtcgacagccccataataatcggtttatgatctgttgtgacagatgcgaagaatggtttcatggagattgcgtaggaatttcggaggcacgcggccggctgctggaacgcaatggtgaagattatatctgcccaaattgcaccatcctgcaggttcaggacgagacccacagtgaaaccgctgaccagcaggaggctaaatggagaccaggcgacgcagacggtacagactgcacctcaataggcaccatcgagcaaaagagttcagaggatcagggtatcaagggtcggattgaaaaggcagccaaccccagcggaaagaagaagctcaagatcttccagcctgtgatcgaagccccgggagccagtaagtgtattggccccggatgctgccatgtagcccaacccgattcagtttactgttctaatgactgcattctgaaacatgctgccgccacgatgaagtttttgagtagcggtaaagaacaaaagcctaagcccaaggagaaaatgaagatgaagcctgagaaaccatccttgcctaagtgcggagcgcaagccggaatcaaaatatccagcgtacataagcggcctgctcctgaaaagaaggaaactacagtgaaaaaggctgtggtagtgcctgccagaagcgaagccttgggcaaggaggctgcatgcgaatcttccacacctagttgggcctcggaccacaactataatgcggtgaagccggagaagaccgccgcacccagcccgagtctgctgtacaagtgcatgtatcatctcggtgtaggacttctggacccaagtcggtccttttggatagccattccgtgggcctgcccgggactcggagttgccgcactctgctag

SEQ ID NO: 15283 - DNA, 1272 bp, synthetic construct
  source 1..1272: mol_type = other DNA; note = Synthetic coding sequence
atggaagacaagcgttctttaagcatggcgagatgtgaagaacggaactcccgtgggcaagatcacgggctggagagagtcccattcccgccccagctgcagtccgaaacctacctgcatcctgcagacccttctccagcctgggacgatcctggaagtactggctccccgaatcttcgcctgctgaccgaggaaatcgcctttcaaccactggctgaagaagcctcatttcgcagacctcaccccgacggtgacgtgccgcctcagggcgaggacaatctcctgtcccttccttttccccagaagctttggagattagttagttccaatcaattctcaagtatttggtgggacgacagcggtgcatgcagggtcataaaccagaaactgtttgagaaagagatcctgaagcgcgacgtcgcgcacaaggtgtttgccacaaccagcatcaagagcttttttcgccagttgaatctttatggctttcggaagcggcggcagtgcacattccgcacctttacccgtatattctccgctaaaaggctcgtgtccattctgaacaagctggaattctattgtcatccctatttccagcgggactccccgcacctcctggtaagaatgaagagaagggtgggagttaaatccgccccacggcatcaagaagaagacaagcccgaggccgccgggtcttgtttggcacctgcagacaccgaacaacaggatcacacttccccaaatgagaacgatcaagtaacaccccagcacagagagccagcaggtccaaatacccagattcgtagcggctccgcaccccctgcgactccagtcatggttcctgattccgctgtggccagtgataactcccccgtgacccagccagcaggagaatggagcgagggatctcaggcccacgtgactccggtcgcggctgttccaggtcctgctgccttgcctttcctgtacgtgccaggaagccctacacagatgaattcttacggccctgtagtggctctgcctactgcatcacggagtacgctggccatggacaccacaggactgcccgccccgggtatgttgcctttttgccatctgtgggtcccagtcaccctggtggcagcaggagctgcgcaaccagctgcaagcatggtgatgtttccccacctgcccgctctgcatcaccactgtccccattcccaccgcacctcacaatatatgccagccagtgatgggccacaagcatacccagattatgccgatcagtcaacttag

SEQ ID NO: 15284 - DNA, 675 bp, synthetic construct
  source 1..675: mol_type = other DNA; note = Synthetic coding sequence
atgcccacacttttcaaaggggtttggggagtggtggagcactcccgagctttggggcgcttttgcccagcctgcctgccgagtggaccacacctgcacacccagcccgcgttaggcaccgccgagatgacgctcctctcatcccagagctcctcactcgtggccccctctggttccgtatcagccgaaaatcctgagcagcgtatgctcgaaaaaagggcaaaggtaatagaggaactgctgcagaccgaaagggactatataagagaccttgagatgtgtatcgagcggatcatggtgccaatgcagcaggcacaggtgcccaatatcgattttgaggggttattcgggaatatgcaaatggttatcaaagtgtcaaagcagctgcttgccgccctggagatcagcgacgccgtcgggcctgtgttcttgggccatagggatgagttagaggggacctataagatctactgtcagaaccacgatgaggctatcgctctgctcgagatttacgagaaagacgagaaaatccaaaaacatctgcaggattccctggccgatctcaattcactcgtgctgaaaaagggttgcacaaattatatcaaccttgggagtttcctaatcaaacctgtgcaaagagtgatgcgttatcctctgttactgatggaactttag

SEQ ID NO: 15285 - DNA, 1878 bp, synthetic construct
  source 1..1878: mol_type = other DNA; note = Synthetic coding sequence
atgcgcctgcctgaacgtcacggcggcccccagggcagcctctgcctgatggatccatgttgccccctatctctcgctctacaggatttagtggaacgagattgcaacggagacactcctaacctcagcttctaccggaacgaaatccggttcctgccgaacggctgttttatcgaagacatcctccagaattggaccgacaactatgacctgctggaggacaatcacagttatattcaatggctatttccgctaagggagcccggtgttaactggcatgccaaacccctgactctgcgcgaagttgaggtcttcaagtcttcacaggaaatccaggagaggctcgtcagggcatacgagctgatgttggggttctatgggattagactggaagatagaggaaccggtactgtgggcagagcccaaaactaccaaaagcgctttcaaaacctcaactggaggtctcataataatctacgcattacccggatcttgaagagtctgggtgaactcggactggagcatttccaggcacctttagtcagatttttcctggaggagacgctggtgcgccgtgaactgccgggggtaaggcagagcgccctcgactacttcatgtttgctgtaaggtgtcggcatcaacgaaggcagctggtacatttcgcatgggagcattttagaccccgctgtaaattcgtctggggaccacaagacaagctgagacgctttaagccctcttcactcccccacccgctggaaggctcaaggaaggttgaggaagaggggtctccaggagacccggaccatgaagctagcacgcagggtcggacctgtggaccggagcactctaagggcgggggccgtgtggacgaaggcccgcagcctagaagcgtcgaacctcaagacgccggacctctggaacgctctcagggcgatgaggccggggggcacggtgaggaccgtccagagcctctgtctcctaaagagtctaagaagcggaaactggaactatcccgccgagagcaacctccgaccgagcccggacctcagagtgcgtctgaggtggagaaaatagcccttaacttggaaggctgtgcactgagccaagggagcctgcgtactggcacgcaggaggtgggagggcaggaccctggtgaggccgtccaaccctgtaggcagccgctgggcgccagggtggcggacaaagtcagaaagcgccggaaagtggacgagggggctggtgacagcgctgctgtggctagtggcggagcgcagactcttgccttggccggcagtcccgcaccttcaggccaccccaaagctggacactccgaaaacggcgtcgaggaggacacggaagggcgcaccggccccaaagaaggaactcccggttccccttctgagacccccggaccctcacctgccggaccagccggagacgagcctgccgaaagcccttctgagactcccggccctcggcctgcaggccccgccggtgatgagcctgccgaaagccccagcgaaacccccggcccacggccggctgggcccgctggggatgaacccgctgagagtcccagcgaaactcccggtccttcccctgccggtcccaccagagacgaaccggctgagtctccatctgagactcccggccccaggcctgccggcccagctggagacgagcccgcagagagtccttctgagacaccaggccccaggcccgctgggccagccggtgatgaaccagctgaatcccctagcgagacacctggccctagccctgccggccctacccgggacgagcctgcaaaggctggagaagccgccgagctgcaggacgcggaggtggagtctagcgctaaaagtgggaagccttag

SEQ ID NO: 15286 - DNA, 1386 bp, synthetic construct
  source 1..1386: mol_type = other DNA; note = Synthetic coding sequence
atggatgatcccgactgcgactccacctgggaggaagacgaggaagatgctgaggatgccgaggacgaggactgtgaggacggagaagcagccggcgctcgtgatgctgatgctggcgatgaggatgaggagtccgaagaaccccgagcagctcgtcctagttctttccagagtcgaatgaccgggtctaggaattggcgggccacccgggatatgtgcaggtaccgccataactaccctgatttagttgagagggactgcaacggagacacacctaatctctcattttatagaaacgagatcagatttctgcccaatggatgttttattgaggacattctacagaattggaccgacaactatgacctattagaggacaaccactcatatatacaatggctgttccctttgcgcgaacccggagtcaactggcatgccaagcctctgacacttagggaagtcgaggttttcaaaagttctcaggagatccaggagcggcttgtgagggcgtatgagctgatgttaggcttttatgggataaggcttgaagatagaggtactggcactgtgggaagggcccagaattatcagaaacggttccagaacctgaattggcggagtcacaataacctccgcattacccgaatactcaagagtctcggcgagctaggcttggagcacttccaggctccactggtgcggttcttccttgaagagaccctggtaaggagggagttgcctggcgtgcgccagagcgcgctcgattattttatgtttgccgttaggtgtcgtcatcagcgaaggcaactggttcacttcgcctgggagcactttaggccccgttgcaagttcgtgtggggcccccaagataagctgaggagatttaagccctcatccctcccacaccctttagagggcagcaggaaggtagaagaagaagggagccccggggaccccgatcacgaagcgtcaacacagggcagaacatgcggccctgaacacagtaagggaggagggagggtcgatgagggcccccagccccgttctgtggaaccccaggacgcaggcccattggaaaggtcccagggcgacgaagcgggtggccatggagaggatagacccgaacccctcagccctaaagaatccaagaagagaaaattagaactgtccaggcgggagcagccccccaccgaaccaggtccgcagtcagcgtccgaagttgagaaaatcgcgctcaatctggaaggctgcgccctgtcccaaggttcactgcgaacagggacacaggaagtcggaggtcaggaccccggagagagctcttgtccctgttgtaggggctggggactgaggagctgttgtggattgccttctggctctgcttcctag

SEQ ID NO: 15287 - DNA, 1539 bp, synthetic construct
  source 1..1539: mol_type = other DNA; note = Synthetic coding sequence
atgccctctccaagccgatccggacgctctaggtgcctcaaggcaccacggaggtctcggagcggactgagcggtcctactagcagctgctgggcgtcaacaatccgcctggaggatcgcggcaccggcaccgtgggtcgcgcgcagaactaccaaaaacggtttcaaaacctcaattggcgcagccacaacaacctgagaatcacccggattttgaaaagcttaggcgaactgggactcgagcacttccaagcgcccctcgtcagattctttcttgaagagacactcgtcaggagggaattgcccggggttagacagtccgctttagactattttatgttcgcggtgcgttgtcgccatcagaggaggcaattagttcactttgcctgggagcactttagacctcgctgcaaatttgtgtgggggccccaggacaagctgcgacggttcaaaccatcatcattgcctcacccactggagggatcacggaaggtggaagaggaggggagcccaggagatcccgaccacgaagcctctacacaggggcgcacctgcggtcccgaacacagcaagggtgggggtagagtcgatgagggtccccagccccggtctgtcgaacctcaagacgctggcccgctcgagcgctcccagggagatgaggccggcggccacggtgaggatagacctgagccattgagccctaaggagagtaagaaacgcaagcttgaactgtcccgacgcgaacaacctccgactgagcctggcccccagtctgcatccgaggtggagaagatcgccctgaatctcgaagggtgtgccttaagccagggatctctcagaactggtacacaggaggttggtggccaggatcctggcgaggcagtgcagccttgccgccagccactgggcgcccgtgttgctgacaaggttaggaaaaggcggaaagtggatgagggcgccggggatagcgccgctgtcgcttcaggtggagcccagactctggctctggccggaagccctgctcctagtggccatcctaaagcaggtcactccgagaatggtgtggaagaagacaccgaaggtaggacaggcccaaaggagggcacgcccggctctccatccgaaactcctggtccatctcctgctgggccagcaggagatgagcctgcagaaagccctagcgagactcccggcccccggcccgctggaccggcgggagatgagccagctgagtccccctctgagactccaggaccgagtccagctggcccaacccgggacgagcccgccgagtctccttccgagacccccgggccacgtccagccggacctgcgggagacgagcctgctgagtccccctccgaaaccccggggcctcggcccgccggcccggccggagatgagcctgctgaaagcccctccgaaacgcccggaccgagccccgccgggccgacccgggacgagccagcaaaggccggagaagctgctgaactacaggacgccgaggtggagtcctcggcgaaaagcggaaaaccgtag

SEQ ID NO: 15288 - DNA, 312 bp, synthetic construct
  source 1..312: mol_type = other DNA; note = Synthetic coding sequence
atgggacagcaaagttccgtgcgccgcctcaaacggagtgttccctgtgagagcaatgaggcaaatgaagccaacgaagcgaataagaccatgcccgagacccctacaggtgatagcgacccccagcctgccccaaagaagatgaagaccagcgagtcctccaccattctcgtcgtgcggtaccggcgcaatgtgaaacgaacatcccccgaagagttggtgaatgaccatgctcgggaaaatcgtattaaccccgatcaaatggaggaagaagaattcatcgagatcacgactgaaaggccaaaaaagtag

SEQ ID NO: 15289 - DNA, 1776 bp, synthetic construct
  source 1..1776: mol_type = other DNA; note = Synthetic coding sequence
atggagaaagccgtgaacgatgggtctcactcagaggagctgttttgtcacctcaagacgatttctgaaaaggaagacctgccccggtgtacctccgagtcacacttatcttgtctgaaacaagacattctaaacgaaaaaactgagctggaggctactcttaaagaggctgagctggtaacccactctgtggagctgctacttcctctttttaaagacaccattgaaaagataaactttgaaaatgctaacctgtcagccctcaacttgaagatcagcgaacaaaaagaaattctgataaaagaattggatactttcaaatcagtcaagctcgctctggagcacctgcttcggaagagagactataagcagactggggacaacctcagctccatgcttctagagaatctgaccgataatgagagcgaaaacaccaacctcaagaaaaaggtattcgaaaaggaagcccacattcaggagctgagttgcttatttcagtctgaaaaggcaaacactttgaaagcaaacaggttctcccagtccgtgaaggtggtgcatgagcgtctccagatccaaattcacaagcgggaagccgaaaatgataagctcaaggaatacgtgaagagtctggagactaaaatcgctaaatggaacctccagtcccgaatgaacaaaaacgaggcaattgtgatgaaggaggcctcacgacagaaaaccgtggctctgaagaaggcgtccaaggtgtacaaacagagactggatcacttcacaggtgcgattgaaaagcttactagccagataagggaccaggaggctaagttaagcgaaactatctccgcctctaatgcatggaaatctcactatgagaaaattgttatcgaaaagacagagcttgaagtgcagatcgagactatgaaaaagcagatcatcaatttactagaggaccttaaaaagatggaggaccatgggaagaatagttgtgaagaaatcctcagaaaagtccactcaatcgaatacgagaatgagacattgaacctcgagaacactaagctgaagactacactggccgccctcaaggatgaggtagtgtccgttgaaaacgaactgtcggaactgcaggaagtcgagaagaagcaaaagacactcatcgagatgtataagactcaggtgcagaaactgcaggaggcagccgagattgtgaaatcacgatgcgagaatttgctgcacaagaacaatcaaattacaaagactaagaataagaatgtcgagaaggtggacggcaaccacaatcttctgacaaaactctctctcgaggaggaaaactgccttatccagctgaagtgcgaaaacctgcaacagaagctcgagcaaatggacgccgaaaacaaggagcttgaaaaaaaactggctaaccaagaggaatgcctgaaacacagcaacctgaaatttaaggagaaatcagccgagtatacagctcttgctagacaactggaggccgccttagaagaagggcgacagaaggtggctgaagaaatcgagaagatgtcttcccgtgaatcagcgctgcaaatcaagatcttggatctggagaccgaactccgtaagaaaaatgaggaacagaatcagctggtgtgcaagatgaacagcaaagcccagcaccaggaggtgtgcctcaaggaagtacagaattccctcgagaaatccgagaaccagaatgagtctattaagaactacctgcagtttctgaagacttcctatgttacaatgttcgagtag

SEQ ID NO: 15290 - DNA, 1935 bp, synthetic construct
  source 1..1935: mol_type = other DNA; note = Synthetic coding sequence
atggagaaggccgtgaatgacggatcccacagcgaggagcttttctgtcacctgaaaacaatcagcgaaaaggaagaccttccaagatgtacctctgaaagccacctgagctgcttaaagcaggacattctgaatgaaaagaccgagttggaggcaaccttgaaagaggcagagcttgtcacccatagcgttgaacttctgctaccactgtttaaggacacgattgaaaaaattaacttcgaaaacgcaaacctttcagccttgaacctgaagatatccgagcaaaaggagatcctaatcaaggaattggatacctttaaaagcgttaagttggctctagagcacctgctgcgcaagcgcgactacaagcagaccggtgacaacttatcatccatgctacttgagaacctaacggacaacgaatccgaaaacactaatttaaagaaaaaggtgtttgagaaggaggctcatatccaggagttatcttgcctgtttcagtcggaaaaagccaacacactgaaagccaatcgcttttcgcaatccgtaaaggtagtccatgagcggcttcagatccagatccataaaagagaagcagagaacgataagctgaaggagtatgtgaagagccttgagactaaaattgcaaaatggaatctccagagcaggatgaataaaaatgaagcgattgtgatgaaagaagcctcacggcagaaaacagtcgccctgaagaaggcgtcaaaggtctataaacaacggttggaccatttcaccggggccatcgagaagcttacctcccaaattagagatcaggaagccaagctctcggaaaccatctctgctagcaatgcctggaaatcacactatgaaaaaattgtcatagagaagaccgagctagaggtccaaatcgagactatgaaaaagcagatcataaacctccttgaggatctcaagaagatggaggatcacggaaagaactcatgtgaggaaattcttaggaaagtgcactctatcgaatacgaaaacgaaactcttaatcttgagaacacaaagctcaaaacgacgcttgcggcgttgaaagacgaagtcgtcagcgttgaaaatgaactatctgagctacaagaggtggagaagaaacagaagaccttgatcgaaatgtacaagacccaggttcagaagctccaggaagcagcagaaatagtgaaaagcaggtgcgaaaacctcctgcacaaaaacaaccaaattactaagacgaagaacaagaacgtggaaaagatgaggggacaaatggaatcccacttaaaggaactggaaagggtttgtgactctcttacagccgccgagcgcaggttgcatgagtgccaggagtctctgcaatgctgcaagggaaagtgcgccgaccaagaacatacgatccgcgagctgcaggggcaagtcgacggtaatcacaatctgctcacaaagctcagcctggaagaggaaaactgcctgattcaactcaagtgcgaaaacctacagcagaagcttgagcaaatggacgcagagaacaaagagttggaaaagaagctcgccaaccaagaggaatgcctcaagcactctaacctcaagttcaaagaaaaaagtgccgaatacaccgctctcgcacggcagttagaggcggccttagaggaggggagacagaaggtggctgaagaaatcgaaaagatgtcttcacgtgagtccgctctgcagataaagatcctcgacttggagactgagcttcggaagaaaaacgaggagcagaatcagcttgtgtgcaaaatgaattcaaaggcccaacaccaggaagtatgtctcaaggaggttcaaaactcactggagaagtcagagaaccagaatgagagcatcaaaaactaccttcagtttttgaagactagttatgtaacaatgtttgaatag

SEQ ID NO: 15291 - DNA, 2526 bp, synthetic construct
  source 1..2526: mol_type = other DNA; note = Synthetic coding sequence
atgatggctgacggggccgccgcaggagccggggggagcccaagcctcagagaactccgcgccaggatggtggctgcagcgaacgaaatagccaaggaaagaagaaaacaagatgtagtgaacagggttgcaacccactccagcaatatcagatctaccttcaagcccgttattgatgggtcaatgctgaagaacgatattaagcagcgcctcgctagagagaggagggaggagaagcgccgccagcaggatgcgaacaaggaaacacagctgctggaaaaggaacgcaagacaaagctgcaatatgagaagcagatggaagagaggcagcggaagctcaaagaacgcaaggagaaggaggaacaaagaaggatcgcagctgaggagaagcgccaccagaaagatgaggcccaaaaagagaagtttactgctatcttgtacaggacactagagaggcgacgactggccgatgactaccagcagaagcggtggagttgggggggaagcgccatggccaacagcgagtctaaaaccggcaagacagataaggagcgcagtagcagtttaaatcggagagactcaaacctccatagctctaccgataaggaacaagctgagcgcaagccccgggttacaggggtgaccaactatgtgatgcagtatgttacagttcccttgaggaaatgcaccagcgacgaactgagagcagtgatgttccccatgtcaacaatgaagattccacctcagactaaagtcgaagagtcccctctggaaaaggtcgagacacctccaaaagccagcgtcgatgctccccctcaagtgaatgtggaggtattctgcaacaccagcatggaagccagtcccaaggcaggcgtcgggatggcaccagaggtgtcaaccgattcctttcctgttgtgagtgtagacgtttcaccggtggttagcacgtatgatagcgagatgtctatggacgccagccctgagttgtccattgaagctctccctaaggtagatttggaaaccgttccaaaggtgtctatagtggcttccccggaggcatccctcgaggccccccctgaggtgagcttggaggccctcccggaagtgagtgtggaagccgctcccgaggggagccttgaggcccctccgaaggggtcagccgaggtagcccctaaggaaagcgtgaaaggaagcccaaaggagtctatggaagccagtcctgaagccatggttaaggcttccccaaaaacgtcgcttgaagcaagcatggaagccagtcccaaggcaaaggcccgtgacgctcccaaaaagtccgaaatggacaaacaagcactcatccctattgcaaagaagaggcttagctcctatacagaatgctacaagtggtcctccagccccgaaaacgcatgcggcctgccctcccctatcagcaccaataggcagatccagaaaaattgtcccccaagccctctccctttgatcagtaaacagtccccacagacatcatttccctacaagataatgcccatccagcataccttgtctgtgcaaagcgcctcttccaccgtgaagaaaaagaaagagaccgtatccaaaactactaaccgatgcgaggcactctcacaacggcacatgatttatgaggaatcaggcaacaagtcgaccgcagggatcatgaatgcggaagccgcaactaagatactcactgaactccgtcggctggccagggaacagcgcgaaaaggaggaggaggaacggcaaagggaggaaatgcaacaacgggtgataaagaagagtaaggacatggccaaggaggcagtaggcggccaggctgaagaccatctgaaactaaaggacggacagcagcagaacgaaacgaagaagaagaaaggctggctggaccaggaggatcaagaagccccgctgcagaagggggatgccaaaattaaggcccaagaagaagcggacaaaagaaaaaaagaacatgagcgtattatgctccagaatctgcaagaacgcctcgagagaaaaaaaagaattgaggagatcatgaagagaacccggaagacggacgtgaatgctagtaaggttaccgaaacatccagtcatgatatttatgaggaagcggaggctgataacgaagagtccgataaggacagcctaaacgaaatgttcccctcagccatcctgaatggtacaggaagtcctactaagttcaagatgccatttaataacgctaagaaaatgacccataaactggtcttcctcgaagatgggaccagtcaggtgcggaaggagcccaaaacatacttcaacggcgacctcaaaaatttcaggcagaaatccatgaaggatacaagcatacaagaagtcgtcagtaggcccagttctaaaagaatgacgagccatacgactaagacacgcaaggctgacgagaccaatactacctctcgctccagcgcgcaaactaagtctgagggattccatgacattcttccaaagtcatctgacacatttcggcagtag

SEQ ID NO: 15292 - DNA, 2577 bp, synthetic construct
  source 1..2577: mol_type = other DNA; note = Synthetic coding sequence
atgacaagcccccgcgtggcggctgcaaatgagatcgcgaaggagagacgcaaacaagacgttgttaacagggtggcgactcacagttccaacatccgctccactttcaaacctgtaatcgacggaagtatgttaaaaaatgacattaagcagcggctcgctcgagaaaggagagaggagaaaagaaggcagcaggatgccaacaaagagacacagctgctcgaaaaagaacgaaagacgaaattgcaatacgaaaagcagatggaagagcgccagcgtaagttgaaagaaaggaaggagaaggaagagcagcgacggattgccgcagaggagaagcggcaccagaaggatgaggcacagaaagaaaaattcaccgccatactgtatcggacactggaacgcaggcggctggccgacgactatcagcagaagaggtggagctggggaggaagtgcgatggcaaactcagaatccaaaaccgcaaataagcggagcgccagcactgagaaattagagcagggaacgagtgccctcatccgacagatgcctctatcaagtgctggtctccagaactcagtagccaaacgaaaaacagataaagagaggagctcaagcctcaacagaagagatagcaatctacactcatccaccgataaagagcaggctgaaagaaaaccacgagtgaccggggttactaactatgtaatgcagtatgttacggtcccactccgcaagtgcacctctgacgagcttcgcgctgtgatgttccctatgtccacaatgaagataccacctcagaccaaagtcgaggagtcgccgctggagaaagtagagaccccccctaaggcttcggtagatgccccgcctcaagtgaacgtggaagtgttctgtaacactagcatggaggcctcccctaaagctggagttggaatggcaccagaggtttctacggatagttttccagtggtaagtgtagacgtctcgccagtcgtgtcaacctatgacagtgagatgtctatggatgcttcacccgagctgtccattgaggctctgcccaaggtcgatctggagaccgtccccaaggtaagtatcgtggcatccccagaggctagtttggaagcccctcctgaagtgtccctcgaagccctccccgaggtatcagtggaggctgctcccgagggctccttagaagccccccccaaagggtctgctgaagtcgcaccaaaggagtctgtgaaggggtctcctaaagagagtatggaggcctccccggaggcaatggtcaaggccagccctaagacttcgctggaggcctccatggaggcctctcctaaagccaaggcacgagatgcccccaagaagagcgagatggataagcaagcgctgataccaatagccaagaaacgactgtcctcctacaccgagtgctataagtggagtagctctccagagaacgcctgtggattgccgagtccaataagtacgaatcgccagatccagaaaaattgccctccttcaccactgcccctcattagcaaacagtctcctcaaaccagcttcccctataagatcatgcccatccaacatactttatcagtacagagtgcttccagtaccgtgaaaaaaaagaaagaaacagtgtctaagaccaccaaccgttgtgaagcactttcccagcgccatatgatctatgaagaaagcggcaataagtccacagctggtattatgaatgccgaggcagccacaaagattctgacggagctgcgccgtctggccagggaacagcgagagaaagaggaggaggagaggcagcgcgaggagatgcagcagcgggttatcaagaagtctaaagatatggcaaaggaggcagttggcggacaggctgaggatcacctgaaactgaaagacggccagcagcaaaacgagacgaagaagaagaaggggtggctcgatcaggaggaccaggaagcccctctccagaagggggacgctaaaattaaagcacaggaagaggctgataagagaaaaaaggaacacgagcgtatcatgctgcagaatctgcaggagcgcctagaaaggaaaaagaggattgaagaaataatgaagcgcactaggaaaactgacgtgaacgcgtccaaagtaaccgaaacctccagccacgacatatacgaagaggccgaggctgataacgaagagagtgataaggactcactgaacgagatgttccctagtgccatattaaacgggaccggctctccaacaaaattcaaaatgcctttcaacaacgcgaaaaaaatgacccataagctggtcttcctggaggatggtacttctcaggtgcgaaaggaaccaaaaacatattttaacggggacctgaagaactttagacaaaaatcaatgaaggacacttcaattcaggaggtggtctcccgtcctagttccaagcggatgacttcccatacaacgaagacccgaaaagccgacgaaaccaacacaaccagcaggtcatctgcccagaccaaaagcgaaggttttcacgatattctgcctaaatcaagcgataccttccgccagtag

SEQ ID NO: 15293 - DNA, 948 bp, synthetic construct
  source 1..948: mol_type = other DNA; note = Synthetic coding sequence
atgcctctgaagctgcgaggaaaaaaaaaggctaagtctaaggaaactgcaggactggtcgagggggagccaaccggagccggcggtggttcactgtccgcttctcgtgccccggctagaagacttgtgttccacgctcagctggcccatggcagtgctaccgggcgtgtggagggattcagttccatccaagaactgtatgcccagatcgccggagccttcgaaatctcaccttctgagattctgtattgtacactgaacacccctaagatcgatatggaacgactgttaggcggacagctgggtctggaagacttcattttcgcccacgtgaaaggcatcgagaaagaggtgaacgtctataagagcgaagactcactgggtctgaccatcactgataatggtgtcgggtatgcttttattaagcggattaaggacggcggtgtcattgattctgtcaaaacgatttgcgtgggggatcacatagagtcgatcaatggcgagaacattgtgggctggcgtcactatgatgtggcaaaaaaattaaaggagctcaaaaaagaagaactatttactatgaagctgatcgagcctaagaaagctttcgaaatcgaactccgtagcaaagctggcaagagttcaggcgagaagataggatgcggtagggccacgcttcgtcttcgcagtaagggcccagcgacagtggaagaaatgccaagcgagactaaggccaaggccatagagaaaattgacgacgtgctggagttatacatgggcattcgcgatatagaccttgcaacgacgatgtttgaggcaggtaaggacaaagtaaacccagatgagtttgctgtggcccttgacgaaacacttggggattttgcgtttcccgatgagttcgtcttcgatgtgtggggagttattggggacgccaaacggcgcggtctgtag

SEQ ID NO: 15294 - DNA, 2487 bp, synthetic construct
  source 1..2487: mol_type = other DNA; note = Synthetic coding sequence
atgacggggagcaattcccatatcaccatcctgaccctgaaagtcttacctcatttcgaatccctgggcaaacaggaaaagattccaaataagatgagcgcatttcgcaaccactgcccgcacttggactcagtgggtgaaattacaaaagaggacctcatacagaaaagcctcgggacctgccaggactgcaaagtgcaggggcccaatctgtgggcctgcttggagaatcgatgttcatatgtgggctgtggggaaagtcaggtcgaccactctaccatccacagccaggaaacaaagcattatctgaccgtcaacctgactacactgagggtttggtgttatgcctgttccaaggaagtttttctggatagaaaattaggaacccagccgagtttaccccacgtgaggcagcctcaccaaatccaggagaactcggtgcaggatttcaagataccctccaatacaactctgaagacccccctggtggcagtctttgatgacctggatattgaggcagacgaagaggacgagctgcgcgccagaggcctcactggcctgaaaaatatcgggaacacatgttatatgaatgccgcactgcaggccctgtctaattgccctccccttacccaattctttctggactgtggcggtctcgctagaactgacaagaagcccgcaatctgcaagtcttacctgaaattaatgaccgagctgtggcataagagtcgtcccggttctgtggtgcctaccactctgtttcaggggattaaaacggtcaaccccacattccggggctactcccagcaggacgcccaggagttcctcagatgcctgatggatctgctgcacgaagagctcaaagagcaagtgatggaggttgaggaagacccacagacaatcactacggaagagactatggaggaggacaaaagccagtctgacgtggacttccagagttgtgagtcctgctccaattctgatcgtgccgagaacgaaaacggctccagatgctttagcgaggacaataatgagacaactatgttaattcaggatgacgagaacaattctgagatgtcaaaggattggcaaaaagagaagatgtgcaacaaaattaataaagtgaactctgagggcgaattcgacaaggatcgtgattccatctccgagacagtcgacctcaacaaccaggagactgtcaaggtccaaattcattctcgagcgtccgaatacattactgatgtgcactccaatgacctcagtaccccacagatactgccaagcaacgaaggcgtcaaccctcggctctctgcaagtccaccgaaaagtggcaacctgtggccaggcctcgccccgccccacaagaaagctcagagcgcatcccctaagcgtaaaaagcagcataagaagtacaggagcgttatttccgatatatttgacggtacgattatcagctcagtgcagtgcttaacgtgcgaccgggtgtctgtgactttggagacatttcaggatctgagcctaccgatccctggaaaggaagacctcgcaaagcttcactcgtcctctcatccaacatctattgtaaaagccggcagctgcggcgaggcatacgccccacaggggtggatcgccttcttcatggaatacgtcaaaagctggttctggggacccgtcgtgaccttgcaggattgcctcgccgctttctttgcacgtgatgagttaaaaggcgacaatatgtactcctgtgaaaagtgtaagaaactaagaaatggcgtgaaattctgtaaggtgcagaactttccagaaatcctgtgcattcatctcaaacggtttcgacacgaactcatgttcagcaccaagattagtacccatgtctccttccctctggaaggcctcgacctacaaccattcttagctaaggactcacctgcacagatagtcacctacgatttactctcagttatttgtcaccacggcactgcctcctcagggcactacatcgcgtactgccggaacaacttaaacaatctgtggtacgagttcgatgatcagagtgtcactgaggtgtctgagtctactgtgcagaacgcagaagcatacgtactattctataggaaaagtagtgaagaagcgcagaaggaaaggcgaagaatctccaatctgttaaacattatggagccaagtcttctgcaattttacatcagtcgccagtggctcaacaaattcaaaacttttgcagaaccgggaccaatttccaacaatgacttcctgtgcattcacggcggagtcccacctaggaaggctggttatatcgaggatttggtcttaatgctcccccagaatatctgggacaacttatactcaaggtatggcggtggacctgctgtgaaccatttgtatatatgtcatacttgccagatcgaggccgaaaaaatcgagaagcgaagaaagactgagctggagatcttcattagggttaagaagtag

SEQ ID NO: 15295 - DNA, 2829 bp, synthetic construct
  source 1..2829: mol_type = other DNA; note = Synthetic coding sequence
atgacagggtccaatagccacatcactattctgacactgaaggtgctgcctcacttcgagagtctcgggaagcaggagaagatcccaaacaagatgtccgccttcagaaaccattgtcctcacctcgatagtgtgggtgagatcacaaaggaggatttaattcaaaaatcactgggcacttgccaggactgtaaggtccagggaccaaatctttgggcttgtctggaaaacaggtgctcctatgtaggatgtggggagtcccaggtggatcatagcacaatccactctcaggagaccaagcattatctgaccgtgaatctaactactttacgagtatggtgctacgcttgcagcaaagaagtatttcttgacagaaagctcggaacgcagccgtccctgccacatgtgagacagcctcatcaaatacaggaaaacagtgtacaggacttcaagatcccttcgaacactacactgaagacacccctggttgctgtatttgatgaccttgacatcgaagctgatgaagaggacgagctccgggcaaggggccttactggactaaaaaacatcggaaatacctgctatatgaacgccgcgttgcaggccttgagcaactgcccccctttaactcaattttttctcgactgtggagggctcgcccgcactgacaagaagccagctatctgcaagtcgtatttaaagctcatgaccgaactttggcacaagtccagacccggcagcgtggtgcctacaaccctgtttcagggtatcaaaacagtcaatccaacgtttcggggatattcacaacaagacgcccaggagtttctaaggtgcctcatggacctgcttcacgaggagctgaaggaacaggttatggaggtcgaagaggatccccagaccatcaccactgaggagactatggaagaagacaaatcgcagtccgatgtggattttcagagctgcgaaagctgtagcaactcggaccgagccgagaatgagaacggcagtagatgtttctccgaggataataatgagacaacaatgctgatccaagatgatgaaaacaatagtgagatgagcaaagactggcagaaggagaagatgtgcaacaagattaataaggtgaatagcgagggcgagttcgacaaagaccgtgactccatctctgaaaccgttgatctgaacaatcaggagacagtcaaagtccagattcattcccgcgcctctgagtatatcacagatgtgcacagcaacgatctctccaccccacagattctgccttcgaatgagggggtgaaccctaggctgtctgcctctcctcccaagtccggcaacttgtggccaggactggctcctccacataaaaaggcccaatccgcctctcctaaaagaaagaaacaacacaagaagtataggtccgtcattagcgacatttttgacgggaccataatctctagcgtccagtgcttgacctgcgatagggtcagtgtgaccttagagaccttccaggacctgtccctacccattccaggcaaagaagacctcgcaaaactccatagctctagccaccctacaagcatcgtgaaggccggctcatgtggggaagcatatgcaccacaggggtggatcgcattcttcatggaatacgtgaaacgattcgttgtctcctgcgtacctagctggttctggggtccagtggtcaccctccaggactgcctcgccgccttctttgcccgagacgaactgaaaggtgataacatgtacagctgcgaaaaatgcaagaagctacggaacggggtgaaattttgcaaggtacagaacttcccagagatcttatgcattcatctgaaaagatttcgccatgagctcatgtttagtacaaagatttccacccacgtctcctttccactcgagggcctcgacctacaaccgttcctggcaaaagacagcccagcacaaatcgtcacctacgacttgctttccgtcatctgtcaccatggtactgcttccagtgggcattacatcgcttactgtcgaaacaatctgaacaatctgtggtatgaatttgacgaccagtctgttaccgaagtcagcgagtcaaccgtccagaatgctgaagcttacgtgctgttctatcgaaaatcctcagaggaggcccaaaaggaaagaagacggatcagtaatcttctgaatataatggagccttctctgctgcagttttacatatcaaggcagtggctgaataaatttaagacttttgccgaacctggcccaatttctaacaatgacttcttatgtatccacggaggcgtgccacccagaaaagcgggatatatcgaagatctagtgctgatgttaccgcagaacatttgggacaacctgtattccagatatgggggtgggccggccgttaatcatctgtacatttgccatacctgtcaaatcgaggcagagaagattgaaaagcgacgaaagactgagcttgagatctttatcaggctgaaccgggcatttcagaaggaggactcacctgccaccttttactgtatttcgatgcagtggttccgggaatgggaaagcttcgtgaaagggaaagacggtgatccacctggccccatcgataacactaaaattgctgtaactaagtgcgggaacgtgatgctgcgtcagggcgcagattccgggcagatcagcgaggaaacctggaactttctccagagcatttacggtggaggcccagaggttattcttagaccacccgtggtacacgtcgaccctgacatcttacaagcagaggagaagattgaggtggaaacacggtcactctag

SEQ ID NO: 15296 - DNA, 2736 bp, synthetic construct
  source 1..2736: mol_type = other DNA; note = Synthetic coding sequence
atgtctgcatttagaaatcactgcccccacctggacagcgtaggtgagataaccaaggaagacttgatacaaaaaagcctgggcacatgtcaggattgcaaggtgcagggccccaacctgtgggcctgcctcgagaatcggtgcagctacgtcggttgtggggaatcccaggtagatcactctactatacatagccaagagactaaacactatttgaccgtaaatcttacaacacttagagtgtggtgctacgcatgctcaaaggaagtgtttttggatcgcaaactcggcacacagccaagtcttccacacgtgagacaaccgcaccaaatccaggagaacagtgtccaggacttcaaaattcccagcaacaccacactcaagactccgttggtcgccgtattcgatgacttggacattgaggccgacgaggaagatgagcttcgggccagggggctcactgggctaaagaacattggcaatacttgttacatgaacgctgccctccaggctctcagcaattgccctccattaacacagttttttttggactgcgggggcctagctagaactgataaaaaaccggcaatctgcaaaagctatcttaaactcatgaccgaactctggcataagtctcggccagggtcggtcgttccaacaaccctcttccaaggcatcaaaacagttaaccccacattccggggatattcccagcaggacgcgcaggaattcctgcggtgtctgatggatctgctgcatgaagagctcaaggaacaggttatggaagtggaagaagatcctcaaactattacaacagaggagaccatggaagaggataagtctcagtctgatgtagatttccagtcttgtgagtcttgctccaatagcgaccgggccgaaaacgagaacggaagccgttgctttagcgaggacaacaacgagacaactatgctgattcaggatgatgagaacaactctgaaatgagtaaggactggcagaaagaaaagatgtgtaacaagatcaataaagttaattccgaaggggagttcgataaagatcgggattcaatctccgagaccgtcgacctgaataaccaggaaacggtgaaggtgcagatacactctagggcttccgagtacataaccgacgtgcatagtaacgatctgtccacacctcagatcttgccatccaacgaaggggtcaacccgcggctttccgcgtctcctcctaagtctggtaacctgtggcctgggctagctccaccccataaaaaggcccagagcgcctctcctaagcgcaaaaagcagcataagaagtaccggagtgtcattagtgacattttcgatggcaccattatatccagcgtgcagtgcctcacctgcgaccgcgtgtccgtcaccctggagacattccaggatttatcgttgccaataccgggaaaagaggacctggccaagttgcattcatcatcacaccccacatcaatcgtgaaagccggttcatgtggggaagcttatgcccctcagggctggattgcattcttcatggagtatgtgaagcggtttgttgtgagttgcgtgccaagctggttctggggtccagtggtgaccctacaggattgtcttgctgcgttttttgcccgtgatgagctaaagggcgataacatgtacagctgcgagaagtgcaaaaagctccgcaatggagtgaagttctgcaaggtgcagaactttcctgaaatcctctgcatccatctgaagagatttcggcacgagctcatgttcagcacaaaaataagcacccacgtcagttttcctctcgagggacttgatttacagccgtttctagcaaaagactcccccgcacaaatagtgacatacgacttactatctgttatttgccaccacggcaccgctagcagcggccactatatagcctactgccggaataacctcaacaacctgtggtatgagtttgacgaccagagcgtgaccgaggtcagcgaatccactgtccaaaacgctgaggcttacgtattattttaccgcaagtccagcgaggaagcgcagaaggagagacggcgcatttccaacctgctcaacattatggagccctcactcttacagttctatatttctagacagtggctgaacaagttcaaaactttcgctgaacctggtcctatctccaacaatgattttctttgcatacatggcggcgtgccgccccgtaaggccgggtacatagaagatctcgtcctgatgctgccacaaaatatttgggataacttgtattctcgctacgggggtggtcctgccgtaaatcacctctatatctgccatacatgtcagatcgaggccgagaagattgagaaaagaagaaagactgaactggaaatcttcatacgactcaatagggcttttcagaaggaggattcccccgcgacgttctactgcatatccatgcagtggtttcgggagtgggagagcttcgtgaagggcaaagatggcgacccacctggccccatcgacaacactaagatcgcagtgaccaagtgcggaaatgtcatgttgagacagggagcagactcaggccaaatcagcgaggagacttggaatttcctgcagagtatctacggaggtgggcctgaggtaattctgagaccgcccgtagtccacgttgatcccgatatcttacaggcagaggagaaaattgaagtggagacccggtcactgtag

SEQ ID NO: 15297 - DNA, 465 bp, synthetic construct
  source 1..465: mol_type = other DNA; note = Synthetic coding sequence
atggctcctcccgttagatactgcatcccaggagaacggctttgtaacctggaggagggatccccggggtcaggaacttacacacgccacggctatatattctcatccctcgcaggctgtctcatgaagagcagcgaaaacggggcattgccagtggtctctgtggttagggagacagagtctcagctgttgcccgacgttggcgccatcgtgacttgcaaggtggagatatacaaatctttcaggccgggagacattgtgttggctaaggtaatttccctgggagacgcccaatccaactacctgttaactaccgctgaaaacgagcttggcgtagttgtcgctcactcggagtccggcattcaaatggtgcccatcagttggtgtgaaatgcagtgccctaagacacatacaaaggaatttcgtaaggtggcacgggtgcaaccagaattcttgcaaacctag

SEQ ID NO: 15298 - DNA, 513 bp, synthetic construct
  source 1..513: mol_type = other DNA; note = Synthetic coding sequence
atggcccctccagtgaggtactgtatcccaggagagcgcctgtgtaacctggaggagggatcaccaggaagcggtacgtacacacgacacggatacattttctcaagcctggctggctgtcttatgaagtcatctgagaacggtgcagtgtctagcatcaattcccggttcgcaaaagtccatatcttatacgtaggatcaatgcctctgaaaaactcattcaggggcacaataagaaaggaggatgtcagggccactgaaaaagacaaagttgagatttataaatccttcaggcctggcgacatcgttttggccaaagtgatcagtttgggcgacgcacagagcaactacctgttaaccaccgccgagaatgaactcggagttgtggttgcacattccgagtcaggaatacagatggtgcccatcagctggtgcgaaatgcagtgtcctaagacacacaccaaagagttccgcaaagtagctagagtgcagcccgaattcttacaaacatag

SEQ ID NO: 15299 - DNA, 537 bp, synthetic construct
  source 1..537: mol_type = other DNA; note = Synthetic coding sequence
atggctcctcccgtacggtattgcattccaggtgagaggctgtgcaacttagaggaaggatctcctggatctggaacatacacacgccatgggtatatcttcagtagcctggcaggttgtctgatgaagagctctgaaaacggggctttgcctgtggtctccgtcgtgcgggaaacagagagtcagctcctcccagatgtcggagctatagtgacctgtaaggtgtccagtatcaattcacgtttcgccaaagtccacatcctttacgtcgggtcaatgcctctgaagaatagttttagaggaaccattcgtaaggaggatgttcgagcaaccgaaaaagacaagatttctctgggtgacgcccagagtaactatcttctgacgacagcagagaacgagttgggagtagtggtggcccacagtgaatctggaattcagatggtgcccataagctggtgcgaaatgcagtgtccaaaaacacacacaaaggagtttcgtaaagtggcccgcgtccagccagaattcctgcagacctag

SEQ ID NO: 15300 - DNA, 2811 bp, synthetic construct
  source 1..2811: mol_type = other DNA; note = Synthetic coding sequence
atggcggcagcaagggaccctcccgaagtgtctctgcgagaggccacccaacggaagttacggcgattctccgagctcaggggcaaactggttgccaggggtgagttttgggacattgtggcaattacggcagcagacgagaagcaagagctggcctacaaccaacagttaagcgagaaactgaagagaaaggagctgccgctcggcgtgcaataccatgtgtttgtagatcccgccggggcaaagattggaaatggcggcagtactctatgcgccttgcaatgtttagaaaagctgtatggggacaaatggaatagctttacaatcctgctgattcactctgacgagtggaaaaagaaggtgtcggagtcttacgtcatcacaattgagagacttgaagatgatctacagataaaagaaaaagaacttacagaactgaggaacatcttcggatccgacgaagcatttagcaaggtgaatctgaattaccggactgagaacggccttagtctgctgcacctgtgttgcatatgcggcggaaagaaatctcatatcaggacgcttatgctgaaaggacttcggccgtctaggctgactaggaatggcttcactgcgctgcatctggccgtctataaagacaacgctgagcttatcactagcctgcttcactccggagccgacatccagcaggtcggatatggcggccttacagctctgcatatcgccactatcgccgggcatctggaggcggccgatgtacttttgcagcatggggccaacgtgaacatacaagacgcagtattttttactcccttgcacatcgccgcctactatggacacgagcaggttacgcggctcctgctgaaatttggtgccgacgtaaacgtgtctggcgaagtcggagacagacctcttcacttggctagtgctaagggtttcctgaacatcgccaagctgcttatggaagaagggtccaaggctgatgttaacgcccaggataatgaagatcatgtgccactgcacttctgttcgcggttcggacatcacgacattgtgaaatatttattacagagcgacctggaggtgcagccgcacgtcgtcaacatctatggcgatacacccctgcacctggcttgttacaacgggaagtttgaggtagccaaggaaatcatccagatcagcggcaccgagtctctcaccaaggagaatattttttctgagacagcctttcactccgcctgtacatacgggaaaagcattgatttggtgaagtttctgttggatcagaacgttatcaacattaatcaccagggtagagacggacatacgggcctgcatagcgcttgctaccacggccacatcaggcttgttcagtttctcctcgacaacggcgcagatatgaatctggtggcatgcgatccatcacgctcttctggggagaaggacgagcaaacgtgtctgatgtgggcatacgaaaaaggtcatgacgcgatcgtgactctgctaaaacattacaaaaggcctcaggacgaattaccctgcaatgaatattctcagccaggcggagacggctcatacgtgtctgttccctcgcccctggggaaaatcaagagcatgacaaaggaaaaggcagatatcctgctcttgagggcgggtttaccatcacacttccacctgcagctgtcagagattgagtttcatgagatcattggttcaggaagttttggaaaggtgtacaaaggcagatgcaggaacaagatcgtcgccatcaagcgctatcgagccaacacgtattgtagtaagtcagacgtggatatgttctgccgcgaagtgtccatcttatgtcagctcaaccatccgtgcgtgatccagtttgtgggcgcgtgcctcaatgacccgtctcagttcgctattgttacacagtatatttccgggggcagtctttttagcctgctccatgaacaaaaacgaatcctggatttgcaatcaaaactaataattgcagtggatgtggcaaaaggcatggaatatttacataaccttactcaacctatcatccacagagatcttaatagccataatatactgttatatgaagacggccatgctgttgtcgccgattttggcgaatcccgcttcctgcaatcacttgacgaagataatatgactaagcagccaggtaatctccgctggatggcccccgaggtttttacacagtgtacacgctacactatcaaagctgacgtgttctcatacgccctctgcctttgggagattctaaccggtgagataccatttgcccatcttaagccggctgccgctgccgcagacatggcttatcatcacatcaggccaccaatagggtactctatccccaaacccatctcttctcttctgattagaggctggaatgcctgccccgaggggcgtccggagttctcagaggtggttatgaaattagaagaatgcttgtgcaacatagagctcatgagtccggcgagctccaattcttcaggcagtctgtccccctcgtccagcagtgattgcttggtcaacagaggaggacccggaagatctcacgtcgctgctcttagatctcggttcgaactggaatacgccttgaacgcacgttcttacgccgcactgtctcaaagcgctgggcagtattcatcacagggcctcagtctcgaggagatgaagaggagcctgcagtacaccccaatcgataaatatgggtatgtctctgatcccatgtcatcgatgcatttccacagctgccggaatagtagctcttttgaagatagttcttag

SEQ ID NO: 15301 - DNA, 510 bp, synthetic construct
  source 1..510: mol_type = other DNA; note = Synthetic coding sequence
atggcagctgccagagacccacctgaggtgagtctgagggaagcaacccagaggaaattaaggcgcttcagtgagcttcgcgggaagctggtcgctcgaggcgagttttgggacattgtggcaattacagcggccgatgaaaagcaggaattagcatacaatcagcagctgtccgaaaagttaaaaaggaaggagctccctcttggcgtccagtaccacgtgtttgttgaccctgccggagctaaaattggtaatggaggatctaccttgtgcgctctgcaatgcttggagaagctgtatggtgataagtggaactcctttaccattctgttgattcattccgtgagcttccaaatctaccagaacgccctggctaagcaccccgtctctttcaaagcttattggatccaggacgtactctggcacctagcgcaactctggtccatccctgattggggattgatgtttcagcttggaaaaactgccctcttggtggtgctgacgagctag

SEQ ID NO: 15302 - DNA, 1785 bp, synthetic construct
  source 1..1785: mol_type = other DNA; note = Synthetic coding sequence
atggctgcggcccgcgatccgccagaagtgtccttgcgggaggccacccaaaggaaactgcggcgcttttcagaactcagagggaagctagtagcgagaggggagttttgggacattgtcgccatcacagccgctgatgagaagcaagagttagcttataaccagcagctaagtgaaaagctcaaaaggaaggaactacctcttggtgtccaatatcatgtgtttgtggatccggctggcgcgaagataggcaatggagggagtactctctgtgcacttcagtgcttggagaagttgtatggtgataagtggaactcttttactatcctgcttattcatagtggaggctattcccagagactgcccaacgcaagcgcactggggaaaatattcactgcattgcctcttggcaatccaatttatcagatgctcgaactcaagctcgccatgtatatcgatttcccgctgaacatgaatcccggaatccttgtcacatgcgccgacgacattgagctctattctataggggaattcgaattcatcagatttgacaagccaggcttcactgctctcgctcatccgtcctctttgaccatcggtaccacacatggcgtttttgtcctcgaccctttcgacgatctgaaacatcgggatctggagtaccggagttgccacagatttcttcacaagccctctattgaaaagatgtatcagttcaatgctgtttgtagaccgggcaatttctgccagcaagactttgccggcggtgacatcgcggatttgaagctggattcggattatgtgtataccgatagtctgttttacatggaccataagtctgcaaagatgttgcttgctttctacgagaagatcggcaccctttcttgcgagatcgatgcatacggcgactttttgcaagccctgggaccgggcgccacagtcgagtacacacgtaatacatctaatgtcattaaagaggaaagtgaactcgtcgagatgcggcagcgcattttccatctgctgaaaggaactagtctcaatgttgtggtgctgaataactctaagttctaccatattggaaccacggaagagtacctgttctacttcacctccgataattcactcaaaagcgaactgggtctccaatcaattaccttctcaatcttccctgatatccctgagtgttcagggaaaacctcttgcattattcagtccattttggattccaggtgctctgtggcccccgggagcgtcgtcgaatattctagactgggacccgacgtcagcgtgggggaaaactgcattatatctgggtcatacatcctaacaaaggcggccctgcccgcacattcttttgtatgcagtttaagcctgaaaatgaaccggtgccttaagtatgccacgatggcattcggcgtgcaggataatctcaagaagtccgttaagactctgtctgacatcaaactgctccagttctttggggtctgtttcttgagttgtctcgacgtttggaacctgaaggttacagaggaactgttttccggtaataagacctgcctctctctatggaccgctcggattttccccgtgtgctcttcactgagcgactccgtcataacttcactgaagatgctgaatgctgtgaagaataagagcgcatttagtctcaactcctacaagctgctgtccatcgaggagatgctgatatacaaggatgtggaggatatgattacttacagggaacagattttccttgagatcagcctgaagagctccctgatgtag

SEQ ID NO: 15303 - DNA, 588 bp, synthetic construct
  source 1..588: mol_type = other DNA; note = Synthetic coding sequence
atggccccccctgtgcgatactgcatcccgggcgaacggctgtgtaacctagaggagggcagccctggctctggcacgtatactcgccacggctacatatttagctcactggcggggtgcttaatgaagagctccgagaacggagccctgccagtcgtctcagtggtcagggaaaccgagtctcagctgttacccgatgtcggcgcaattgtgacctgcaaggtgagctcaatcaacagccgctttgccaaagttcacatcctttacgtgggatccatgcctctcaagaattccttcagaggcacaatccgcaaggaagacgtacgggctaccgagaaagacaaagtggaaatttataagtcattccgcccgggagacatcgtcctggcaaaggtcatatctctgggggatgctcagagcaactatcttttgactactgcggaaaatgagctaggcgtggtcgtcgcccattctgaatccggcatccagatggtgccaatatcatggtgtgaaatgcaatgtccaaaaactcataccaaagagtttcggaaagtggctcgcgtccagccagaattcctgcaaacttag

SEQ ID NO: 15304 - DNA, 1626 bp, synthetic construct
  source 1..1626: mol_type = other DNA; note = Synthetic coding sequence
atgaccggcgagaagattcggagtctacgccgggatcacaagccatccaaggaagaaggcgacctgctggagcctggcgacgaggaggcagcagcagcacttggcgggactttcactagatctagaatcgggaaaggtggaaaagcctgtcacaagatcttctcaaatcaccaccacaggctccaattgaaagctgcccctgcgagcagcaatcctccaggcgcacctgccctgcccctccataactcctcagtaacagccaactcacaatcccccgctcttctggcggggaccaatcctgtggctgtggtagccgacggcgggagctgtcccgcccattacccagttcacgaatgtgttttcaagggtgacgttcgtcggctgagctccctcataaggactcacaatatcggtcagaaagacaatcatggcaacactcccctccatttggctgtgatgcttggaaacaaggagtgtgctcacctgcttctggcccacaacgcccccgttaaagtcaagaacgcccagggttggagcccactggctgaagcaatatcttacggcgacagacagatgattacggcactcctgcggaagctgaagcagcagagccgagaaagcgtcgaggagaagaggccacgtctgctgaaggcattgaaagagttaggcgatttttatctcgagctgcactgggacttccagagctgggtgcctctgctcagtcgaatcttgccttcagacgcgtgtaaaatctacaagcagggtattaatattcggctggatacaacacttatcgatttcacagacatgaagtgccagcgaggcgacttaagcttcattttcaatggcgacgctgccccctcagagagttttgtggtcctcgataatgaacagaaagtctaccagaggatccaccatgaggaaagcgagatggagacagaagaggaggtcgacatcctgatgagctcagatatctattccgctaccctctcgactaagtctatttctttcacaagagcacagactgggtggctgttccgcgaggataagactgaaagagtggggaatttcctggccgatttctacctcgtcaatggcctagtgctggagtcccgcaagcgcagagagcacctgagtgaggaggacatcctgaggaacaaggcaataatggagtcactgtccaagggcggtaacataatggagcagaattttgagcccatccgccggcagagcctcaccccccccccccaaaacactatcacatgggaggagtacatctccgccgagaacgggaaggccccccatctgggccgcgagctggtgtgcaaagaaagtaaaaagacatttaaggccaccatcgccatgtctcaggagttcccactaggcatcgagctactcctgaacgtgcttgaagtcgtggcccctttcaagcacttcaataagcttagggagttcgtgcagatgaagctgcccccagggtttccagtgaaactcgatatccccgtgttccccacaattactgctaccgtgacattccaggagttccggtatgacgaatttgacggtagcatatttactatcccagatgattacaaggaagaccccagcaggttccctgatctttag

SEQ ID NO: 15305 - DNA, 840 bp, synthetic construct
  source 1..840: mol_type = other DNA; note = Synthetic coding sequence
atgccctgtcggcgagaggaggaggaggaagccggcgaggaggccgagggggaagaagaggaagaagattccttcctgttgctgcagcaatctgtagccctaggctcatcgggggaggtggacaggctagttgcccagatcggtgagacccttcagctcgatgccgcccagcacagccctgcgagtccctgtgggccacccggtgctccattgcgagcaccgggacccctggccgccgcagtgcccgccgacaaggcgcgcagcccagcggtcccactgctcctgcccccagcactggccgagaccgtgggaccggctcctccgggtgtgctcagatgcgcactgggtgatcggggccgggtgcgcgggcgggcagccccttattgcgtggcagagctcgcgaccgggcccagcgccttgtctcccttaccacctcaggccgaccttgatggccctcccggcgccggcaaacagggcataccccagcccctctcgggaccttgccgaagagggtggttacgcggcgcggccgcatcaagaaggcttcagcagcgtcgcggttcccagccagagacacgcacaggcgacgatgatccccatagattgctgcagcagctggtcctgagcggaaacctgatcaaggaggccgtccgcaggctccacagtcgcagactacaacttagagcaaaactcccacagcgaccacttctgggcccattgtccgctccggtccatgaaccgccctcaccacggtcaccaagagctgcctgttccgatccaggcgccagcggcagggcccaactccggacgggagacggcgtcctcgtccctggctcatag

SEQ ID NO: 15306 - DNA, 1209 bp, synthetic construct
  source 1..1209: mol_type = other DNA; note = Synthetic coding sequence
atgccactccatagctctcttgggaataagtccgaaaccctctcacagaagaaaaacaacaacaacaaagaaaaaactaagagaaattcaagaaaccctccacgcaccgctttgaaagaaggtaagatggaagagttgtctcaggcactcgcctcttcatttagcgtgtcgcaggacctcaacagcaccgccgcgccccaccccagactgtcccagtacaagagcaagtactctagcctggaacagtccgagcgcaggcgtagactcctcgagttgcagaaatccaaacgactcgactatgtgaatcatgctaggcgactcgcagaggatgactggacgggcatggaatctgaagaagaaaataaaaaggacgatgaggaaatggatatagatacagtgaagaaactgcccaagcattacgcaaatcaactcatgctttccgaatggctgatagatgtgccttccgacttggggcaggagtggatagttgtggtctgtcctgtgggaaaaagagccctcatcgtcgccagcaggggaagcacctccgcctacactaagagtgggtattgtgtaaacagattcagctcacttctgcccggaggcaacagacggaactcaacagcaaaagattacactatcttggattgtatatataatgaggtgaatcaaacttactacgtgttggatgtaatgtgttggaggggccatcctttttatgactgtcaaaccgatttcaggttctattggatgcatagcaagctccccgaagaggagggtctgggagaaaaaacaaagctaaacccctttaagttcgtgggtctgaaaaacttcccctgcacacctgaaagtctatgcgacgtgctgtccatggacttccccttcgaggttgacgggctgctgttttatcataagcagacacactactcaccagggagtacaccattagtggggtggttgcgcccctatatggtgtctgacgtgctcggcgtcgctgtgcccgctggcccattaactactaagcccgactacgccggacatcagctgcagcagatcatggaacataaaaaaagtcaaaaagaaggcatgaaggagaagctaacgcacaaagcctcagagaacggtcactatgagctggaacacctttccacccccaagttaaaagggtcatcacactcacccgatcatcctggttgccttatggagaactag

SEQ ID NO: 15307 - DNA, 1107 bp, synthetic construct
  source 1..1107: mol_type = other DNA; note = Synthetic coding sequence
atgtctctatttggcaccacctcaggatttgggacgagcggaacctctatgttcggatccgcaaccaccgacaatcacaatcccatgaaggacatagaggtcacaagctctccagatgatagcatcggttgtttgtcattttctccgcctacccttcctggcaattttctgatcgccggttcatgggctaatgacgtgagatgttgggaggtacaggactccggacagaccattcccaaagcccagcagatgcataccgggcctgtccttgacgtgtgctggtccgatgacggcagtaaagtgttcacagctagctgcgataagaccgctaaaatgtgggacctatcttccaaccaggctatccaaatcgcacaacatgacgccccagtgaagacgatccattggataaaagcgcctaactacagctgtgtcatgaccgggtcctgggataagactttgaagttctgggacacccgtagcagcaatcccatgatggtgctgcagcttccggaaagatgctattgcgctgatgtcatctaccccatggctgtcgtggcaaccgcggaacgcgggctgatcgtgtaccaactcgagaaccaaccatcagaatttaggcgcattgaatctcccctcaagcatcagcaccgctgtgtggctatattcaaggacaagcagaacaaacccaccggcttcgctcttggatctatcgaaggccgggtggcgatccactatatcaacccaccaaatccagcgaaggacaacttcacattcaaatgccaccggagcaatgggacaaacacttctgcgcctcaggacatctatgcagtgaatggaattgcatttcatccagtgcacggaacactggccaccgttggatccgacggcaggttcagcttttgggataaagacgctcgcaccaagctgaaaacctcagagcagttagatcagcctatatcagcttgttgctttaaccacaatgggaatattttcgcatatgcgagcagctatgattggagcaaaggccatgagttttataatcctcagaagaagaattacatcttccttaggaatgctgccgaagagttaaaaccacggaacaagaagtag

SEQ ID NO: 15308 - DNA, 552 bp, synthetic construct
  source 1..552: mol_type = other DNA; note = Synthetic coding sequence
atgaggaagtcatcgtgtgtggaaagcttcgatgaccaacgccgaatgagtctccacctccatggggccgattgcgatccgaagacccagaacgaaatgaacatttgtgaagaggagttcgtggaatacaaaaaccgtgacgctatcagcgccttaatgccactgtttagcgaagaggagtcatcggacggaagtaagcataacaatggcctgccagatcatatctcggcgcagctgcaaaacacctacacattgaaagccttcacagtgggtagcaagtgcgtggtgtggtcaagcctccggaacacctggtctaaatgcgagatcctggaaacagcagaggaaggaactagggtcctaaacctaagcaacgggatggaggagatcgtcaacccagaaaacgtctggaacggcattcccaagcttgataagagcccccccgaggcagtgtcacagagagtgggaaaggacctgtactttatgtcagtgggggacacgaccatcaaggaaaaaggatttggtggcgatggcgatctgacagtggacttatag

SEQ ID NO: 15309 - DNA, 1821 bp, synthetic construct
  source 1..1821: mol_type = other DNA; note = Synthetic coding sequence
atgcccagtcctcaactcctcgtcctgttcggcagccagacaggaaccgcccaagacgtttctgaaagacttggccgggaggcaagacgccggaggctaggctgccgagtgcaggcgttggactcataccctgtggtgaacttaatcaatgagcccctggtgatatttgtgtgtgccacaactggacagggcgacccacccgataatatgaagaacttttggagattcattttcagaaaaaatctcccatcaactgctctttgccaaatggacttcgccgtgttgggtcttggagatagctcttatgcaaaattcaatttcgtagctaaaaagctgcacagacgacttctgcagctcggtgggtcagccctgttgcccgtctgcctgggggatgatcaacatgaactcggacccgatgccgccgtcgacccctggttgcgggacttatgggatagggttctgggtctgtacccacctccccccgggctgactgagatccccccaggcgtgcctctaccctccaagtttacacttctcttcttgcaggaggccccatcaacagggtctgagggccagagggtagcccaccccggcagccaggaaccacctagcgagagcaagccctttctagcaccaatgatcagcaatcagagagtgacaggaccttcccattttcaagatgtgaggctgatcgagttcgacatactgggctcaggcataagctttgcggctggcgacgttgtgctaatccagccctcaaatagcgcagcgcacgtccagcggttttgccaggttctgggcctggaccctgaccagctttttatgttgcaacccagagagccagacgtgtccagccccacccggcttccccagccttgttccatgagacatctcgtctctcactacctcgatattgcttccgtgcccagacggtctttctttgagttactggcctgtttgtcattgcacgagctggaaagagaaaaactgttggagttctcctccgctcagggacaggaagaactgttcgagtactgtaataggccccggaggaccatcctcgaagtcctttgtgattttccacacactgcggcagccataccgcccgactacctcctggatctgattccggttatccgcccccgggctttctccattgcctcctctctactgacccacccctccagattgcagattttagtggctgtggtccagtttcagactcggctaaaggagccacggcgtgggctctgctccagctggctggccagccttgatccagggcagggtccagtgagagtgccactgtgggtcaggcctgggtctctggccttccctgaaacaccagacacacctgtaatcatggtaggccccggaaccggagttgccccattcagagcggccattcaggaaagggtggcccagggacagacaggcaattttctgttctttggctgccgctggcgagatcaggatttctattgggaagccgaatggcaggagttagagaaacgcgattgtcttaccctcattcccgccttcagtcgagagcagccacctgctctgtttagcgcactgcaggagcaaaaggtatatgttcagcaccgactgcgcgaacttggatccttggtatgggaactcctggaccgacagggtgcctacttctacctggccggcaatgcaaaatcgatgcccgctgatgtctctgaggctctgatgtcaatcttccaggaagagggaggactgtgtagtcctgacgctgcagcctatctggcacgcctccagcagacacgtcgctttcagacagagacgtgggcttag

SEQ ID NO: 15310 - DNA, 420 bp, synthetic construct
  source 1..420: mol_type = other DNA; note = Synthetic coding sequence
atggccgagtctgactgggatacagtcactgtcctgagaaagaaaggccctactgccgctcaggctaaatctaagcaggccatcctggcggctcagcggagaggggaggacgtggaaacgtcaaagaagtgggccgcaggccagaataaacagcattcaattacgaaaaacactgctaaacttgaccgggagaccgaggagcttcaccacgatcgtgtaactctcgaggtcgggaaggtaatccagcagggacgacaaagtaaaggcctcacacagaaggacctggccacaaaaatcaacgaaaaaccacaggtgattgccgactacgaatctggcagggctatcccaaataatcaggtgttagggaagattgagagggccatcggggaatgcccctcgacactgcgaagagtgcgctag

SEQ ID NO: 15311 - DNA, 426 bp, synthetic construct
  source 1..426: mol_type = other DNA; note = Synthetic coding sequence
atggcagagtccgactgggataccgtcacggtgcttcgcaagaagggccccacagccgcccaggccaagtcaaagcaggctattctggctgcgcagaggcggggtgaagacgtggagaccagtaaaaagtgggctgctggacagaacaagcagcactcgatcacaaagaatactgcgaaactcgaccgggaaaccgaagagttgcatcatgaccgcgttaccctggaagtgggcaaggtcatccagcagggccgacagtccaaaggcctgactcagaaggatctagctaccaagatcaacgagaagccacaggtaattgcagattatgagagcggcagggctataccaaacaaccaggtattaggcaagatcgaacgcgccatcgatgtgggcacgcgttctgcccgtgtcctgagggcccagtag

SEQ ID NO: 15312 - DNA, 150 bp, synthetic construct
  source 1..150: mol_type = other DNA; note = Synthetic coding sequence
atggctactcagagaaagcacctcgtgaaggattttaatccatatatcacctgttatatctgtaagggatacctaataaaaccaaccactgtgacagagtgcttgcacacaagcgctgagagttattggatgtccacatggatgagctag

SEQ ID NO: 15313 - DNA, 960 bp, synthetic construct
  source 1..960: mol_type = other DNA; note = Synthetic coding sequence
atgatggtgctgaaggtagaggaacttgtgaccgggaagaagaacggaaacggggaagcgggagaatttctgccagaggattttagggatggggagtacgaagccgctgtcacgctcgaaaagcaggaggaccttaaaacacttttggcacatcccgtgactctgggggaacagcagtggaagagcgaaaaacagcgcgaggcagagcttaagaagaaaaagctcgaacaacgatcaaaactcgagaatctcgaagacctggaaattattattcagctgaaaaaaagaaaaaagtaccggaagacgaaggtacccgtcgtaaaagagccagagcccgagatcatcacggagcctgtcgacgtccctacttttctcaaagcggcactggagaacaagcttcctgtggtagagaaattcttatctgataaaaacaacccagacgtgtgtgacgaatacaaacgcacagcgctgcatcgcgcctgcctggagggccacctggccatcgtagagaaactgatggaagctggtgcccagatcgagttccgtgatatgcttgagagtaccgctatccattgggctagcagaggggggaacctcgacgtactcaagctgctccttaataaaggcgcaaagatcagtgctagggacaaactactgagcactgctcttcatgttgccgttcgaacaggtcattacgaatgtgccgagcaccttattgcttgcgaagcagacctcaacgctaaggaccgcgagggagacaccccactgcacgatgctgtgcgcctgaacagatataaaatgatccgcctactgatcatgtatggggctgacctcaacattaagaactgtgctggtaagacacctatggatctcgtgttgcactggcagaatgggaccaaggccatctttgattccttacgcgagaatagttataaaacttcccgcatcgctaccttctag

SEQ ID NO: 15314 - DNA, 1089 bp, synthetic construct
  source 1..1089: mol_type = other DNA; note = Synthetic coding sequence
atgtcggggtaccagcggaggcccggagctacacccctgagcagagcgcgaagtcttgctattcctgatgatgacagattcgaagacctggaagaggccaaccccttttcgttccgtgagttcttgaaaaccaaaaatctaggacttagcaaggaagatcctgccagcagaatctacgctaaggaagcatcacgccactctctgggcctggatcacaacagcccgccgagccagacaggtggttatggactcgaatatcagcagccgttctttgaagatccaacgggggcaggagacctgttggatgaagaagaagatgaggatacagggtggtcaggggcttacttaccttccgctatagagcaaacccaccccgaacgggtgcctgccggcacctccccatgcagcacttacctcagtttcttctctaccccctccgagttggcaggccccgagtcccttccaagctgggctctttctgataccgactcgcgcgtgagcccggcatcaccagcgggttccccatccgccgacttcgcagttcacggtgagtcactgggagataggcacctgaggacgctccaaattagctacgacgcactgaaagatgaaaactccaagctccgtcggaagctcaatgaggtgcagtcttttagtgaagctcagaccgagatggtgaggacactcgagaggaagttggaggctaagatgatcaaggaagagtctgactaccatgacctggagtcggtggtgcagcaggtcgagcagaaccttgagttgatgactaaacgcgctgtgaaagcggagaatcacgtggtaaagttaaaacaagagattagtctactacaggcgcaagtgtccaactttcagcgggagaacgaggcactgcgttgtggtcagggggcctccctgactgtggtcaaacagaacgcagatgtggcactgcagaacctgagggtggtgatgaattcagcacaggcaagtatcaagcaactggttagcggcgcagaaaccctaaatttggtggcagagatcctcaaatctatcgatcgaatatcagaggtcaaggacgaggaagaagactcttag

SEQ ID NO: 15315 - DNA, 5463 bp, synthetic construct
  source 1..5463: mol_type = other DNA; note = Synthetic coding sequence
atggaatctaattttaatcaagaaggcgtgcctagacccagctacgtgttttccgccgatcctatagccagaccctctgaaatcaatttcgacggcattaagctggatctcagccatgagttcagcctggttgcccctaataccgaggccaacagtttcgaatctaaagactatctgcaggtgtgtcttaggatcaggccgttcacgcagtccgagaaggagttggagtccgagggctgcgtgcacatcctggactctcagaccgtcgtcctcaaagaaccacaatgtatcctcggacgattgagcgaaaagtcgagtggccagatggcgcaaaaattctcatttagtaaggtattcggccctgccactacacagaaggaattttttcaggggtgcattatgcagccagttaaggaccttctgaaaggacaaagccgactgatctttacttatggtctcaccaactcaggaaagacttacactttccagggaacagaggagaacattggaatcctccctaggacattgaatgtgttgttcgattctctccaagagaggctgtacacaaaaatgaacctgaagccccacagatccagggaatacctaagactgtccagtgaacaggagaaagaggagattgcatccaaatcggccctccttcggcagattaaggaggtgaccgtgcacaacgactctgacgatacactgtatggcagcctgacgaattccctgaacatttctgagtttgaggagtctatcaaagactacgaacaagcaaatctgaacatggccaactcaatcaagttctctgtttgggtgtctttcttcgagatatacaatgaatatatatatgatttattcgtgcccgtaagtagtaagtttcagaaacggaaaatgctgcggctgtcccaggatgtgaaaggctacagtttcattaaagatttacaatggatccaggttagtgatagcaaggaagcgtacaggctcctgaaactgggcatcaagcaccaatcagtcgcctttactaagctgaacaacgcctcctcgcgcagtcactccatttttacagttaagattctccaaatcgaagactccgagatgagtcgtgtgatcagggtgtctgaactctcactctgcgatcttgcaggcagcgaaagaacaatgaagacccagaacgagggcgagcgactgcgcgaaacgggtaatatcaataccagcctgctaacactgggcaagtgcattaacgtgctcaagaattcggaaaaaagcaaattccaacaacacgttccatttcgcgagagtaagctaactcactacttccaatcttttttcaacggtaaaggtaaaatttgcatgattgtgaatatatcccaatgttacctggcttacgacgaaaccctgaatgtgctgaagttttccgctatagcacagaaagtctgtgtcccggacacccttaatagctcacaggaaaaattgttcggacccgttaaaagctctcaagatgtgtcactggattcaaatagcaacagcaagatactgaacgtcaagagagcaaccatctcctgggagaattccctggaggacttaatggaagatgaggatctggtggaagagctagaaaacgcggaggagacacaaaacgttgagacaaaacttttggatgaggacctggacaagaccctagaagagaataaagctttcatctcacatgaagaaaagaggaaactgcttgatttaatcgaggacttaaaaaagaagctgatcaatgaaaagaaagagaagctcactctggagttcaaaatacgtgaggaagttactcaggaatttacacagtattgggcgcagcgggaggctgactttaaagaaaccttgctgcaggagcgagaaatcctggaggaaaatgccgagcgtcgtctggccatatttaaagacttggtggggaagtgtgacactagggaggaagccgccaaggacatctgtgccaccaaggtcgagaccgaggagactcataactacgtcggctttgaagatatcatcgacagcctgcaggataatgttgcagacattaaaaagcaagcggagatcgctcatctatacattgcctctttgcccgacccacaggaggccacagcatgcctggagctgaagtttaatcagatcaaagccgaattagccaagacaaagggtgaattgatcaaaactaaggaagaactgaagaagcgagaaaacgaaagtgatagcttgatccaggagttggagacatctaataagaaaatcatcactcagaatcaacggatcaaggaactgatcaatataatcgatcagaaggaggatactattaatgaatttcaaaatttgaagtcccacatggagaacaccttcaaatgcaacgacaaggccgacacctccagtctgattatcaataataagctgatttgtaatgagaccgtcgaggtcccaaaagattccaaaagcaaaatttgtagcgaacggaagcgggtcaacgaaaacgagctccagcaggacgaaccccccgccaagaagggctccatccatgtgtccagtgcaataaccgaagaccagaaaaagtcggaggaagtgagaccaaatatcgccgaaattgaggacatacgagtactgcaagaaaataacgagggcctccgcgctttcctgctcacaatcgaaaacgagctgaagaatgagaaggaggagaaagccgagctcaacaaacaaattgtccacttccagcaagagttgtctctgtcagagaagaagaacctgacactgtcaaaggaggtgcagcagatacagtccaattatgatatagctatcgccgaacttcacgttcagaaatccaaaaatcaggaacaggaggagaagatcatgaagctctcaaatgagatcgagacagccacccgatcaattaccaacaacgtaagccagataaagctaatgcacacaaaaattgacgaattgcgtacccttgactcagtgtctcagatttccaacattgacttactgaacctgcgcgatctgagcaacgggtctgaggaggataacctgccaaatacccagctggaccttctagggaatgactacctggtgagcaagcaagtcaaggaatacaggatccaagaacccaatagagaaaattccttccactccagtattgaggccatttgggaggagtgtaaggagatcgtgaaggcttcatccaagaaaagccaccagattgaagagctggaacagcagatcgagaagctgcaggcagaggtaaaggggtacaaggatgagaacaatcgcttgaaagaaaaagagcataaaaaccaggatgacctgctaaaagagaaagaaactctgattcagcaactaaaggaggagctccaagagaagaacgtgaccttagacgttcagattcagcatgtggtggagggaaagcgagctctgagtgagcttacacagggtgtgacctgctacaaggccaaaatcaaggaactggaaaccatcctggaaacacagaaggttgaatgtagtcactcggccaaactcgagcaggacattcttgagaaagagagcatcatccttaaactggaaaggaacctcaaggagttccaggaacatctgcaggatagcgtgaaaaataccaaagatttgaatgtgaaggaactcaaactgaaagaagagatcacgcagctgaccaacaatctccaggacatgaaacaccttttgcagctgaaagaagaagaggaggagactaaccgccaggagaccgagaagcttaaggaggagctgtctgcttcctccgctcgtacacagaacttgaaggctgacttgcagcggaaggaggaggattatgccgacctgaaggaaaagttgactgatgcaaagaaacagattaagcaagtacagaaggaggtctccgtcatgagggacgaagataagctgttgagaataaaaatcaacgagctggagaagaaaaagaaccagtgctcccaggagctggacatgaaacagcggactatccagcagctgaaagaacagctgaataaccagaaggttgaggaggcaatccaacagtacgaacgggcatgcaaagatctgaacgtcaaggaaaagatcattgaggatatgaggatgactctcgaagagcaggagcagacacaggttgaacaagatcaggtgctcgaggccaagttggaggaggtcgaacggctggcaacagagctggaaaaatggaaagagaagtgcaatgatctggaaaccaaaaacaatcaacgctcaaataaagaacatgagaacaatacagacgtgttagggaagttaactaatctgcaggatgagcttcaggagagtgagcagaagtataacgccgacaggaaaaaatggttggaagagaagatgatgctcatcacacaagccaaggaagcagaaaatataagaaacaaggaaatgaaaaagtatgcggaagaccgggaacgtttcttcaagcagcagaatgagatggaaattctgaccgctcagctaacagaaaaggattctgatctgcagaagtggagagaggagagggatcagcttgtggccgccctggagatacagttaaaggcgctcatttcttccaacgtacagaaagataacgagattgaacagttgaaaagaataatctccgaaacgtccaaaattgaaacacagataatggatatcaagccaaagcggatcagttcagcggatcctgacaagctccagacagagccgctgtctacctcatttgagatttctcggaataaaattgaggacgggtccgtggtccttgattcctgtgaggtgtcaaccgagaatgatcagagcacgcgattcccaaaaccagaacttgagattcaattcacccctctccagcccaataagatggccgtgaagcatcctggatgtacaactccagtgaccgtgaagattccaaaagctagaaagcggaagagcaatgagatggaggaggacttggttaagtgtgagaataagaagaacgctactccgcgcacaaatctgaaattccctatctctgacgatcgcaattctagcgtcaagaaggagcaaaaggtggctattaggccaagctccaaaaagacatattccctgaggagtcaagcctctatcattggcgtcaacttagcgactaaaaaaaaagagggcacactccagaaatttggagactttcttcaacacagcccctccatactccaatccaaagcgaaaaagattatcgagacgatgagctccagtaaacttagcaatgtggaagcaagcaaagagaatgtcagccagccgaagagggccaagaggaagctgtacacatccgaaatttcatctcccatcgacattagtggtcaggtgatactgatggaccagaagatgaaggaaagcgaccatcaaatcattaaacgtcgtctcaggacgaagaccgcgaagtag

SEQ ID NO: 15316 - DNA, 1485 bp, synthetic construct
  source 1..1485: mol_type = other DNA; note = Synthetic coding sequence
atgaagttgggcaagaaaccaatgtataaaccggtggatccctatagtaggatgcagagcacttataactacaatatgagaggcggggcttaccctccgagatacttctacccatttcctgttcctcccctcctttatcaggtggagctgagcgttgggggtcagcagtttaatggtaaagggaagactcgtcaggctgccaagcacgatgctgccgcaaaggccttacgcattttgcaaaacgagccccttccggaacggttggaggttaatggtcgtgagagcgaagaagaaaatctaaacaagagcgaaatctcccaggtttttgagatcgcactgaagaggaacctccccgtgaatttcgaggtcgcacgagagtccgggcctcctcatatgaaaaatttcgtgactaaagtaagcgtgggcgaatttgtaggcgaaggagagggcaagagcaaaaaaatttcaaagaagaatgccgcaattgctgttctggaggagcttaagaaactaccccccctgccggcagtggaacgagttaaaccccgtatcaagaaaaaaaccaagcctatagtgaagacctcgccagagtatgggcagggcatcaaccctatttcacgactggcccagatccagcaggcaaaaaaggagaaagagccagagtataccctgctgactgaaaggggattgccgagacggcgagagttcgtgatgcaagtaaaagtgggcaatcacaccgctgaaggcacagggactaacaagaaggtggcgaaacgtaatgccgccgagaacatgctggaaatattaggcttcaaggtgccccaggcccaacccactaaacccgctttaaagtcagaagaaaagaccccgatcaagaagcccggtgatggaagaaaggtgaccttctttgagcctggctcaggggacgaaaatggaacttcaaacaaagaggacgaatttcgcatgccctatctgtcacaccaacagttgccagctggaattctgcctatggttccagaggtggctcaggctgtgggggtgtcacagggacaccacactaaggacttcacaagagcagcaccaaatcccgccaaagctacagtcaccgcgatgattgcaagagaactcctttatggcggcaccagtcccactgccgaaaccattctgaaaaataatatctcctctggccacgtgccccacggccccctgacaagaccgtctgaacagctagactacttgtcgcgcgtgcaaggtttccaggtggagtacaaagatttccccaagaacaataagaatgagtttgtgtcgcttattaattgcagctcacagccaccactaattagccatggaatcggtaaagatgtagagtcctgtcatgacatggctgccttaaacattctgaaactgttgtccgagttagatcagcagagtaccgaaatgccacggaccggtaatggtcctatgtctgtgtgcggtaggtgctag

SEQ ID NO: 15317 - DNA, 1509 bp, synthetic construct
  source 1..1509: mol_type = other DNA; note = Synthetic coding sequence
atgaaattaggcaagaaaccaatgtataaaccggttgatccatattccaggatgcagagtacctataattataacatgcgcggcggtgcatatccccccaggtacttctatccttttccagtcccccctctgctgtaccaagtggagctgagcgtgggcggtcagcaattcaacggcaagggaaagactaggcaggcagcaaagcatgatgcggcagccaaggccttacgcatcttacaaaatgaacctctccctgagcgattggaagtgaacggaagagaatccgaggaagagaatttgaataaaagcgaaatatcacaggtgtttgagatagcgttgaagaggaacctgcctgtaaattttgagagcttccctctaaaacaggtcgcaagagagagcgggcctcctcatatgaaaaacttcgtgaccaaggtaagcgtgggagagttcgtgggggaaggagaaggaaagtccaagaaaatctccaagaaaaacgctgccatcgccgtgttagaagaactgaaaaagcttcctcccctgccagccgtggagcgagttaaaccacgcatcaagaagaaaacaaaaccgattgtaaagccacagacatcacccgaatatggacaaggcataaatcccatcagcaggttagctcagatccagcaggcaaagaaggaaaaggaacctgagtacaccctgctaactgagaggggactcccacggcggcgagaatttgtcatgcaggtcaaagtgggaaaccataccgctgaagggaccggcaccaataaaaaagtggcaaagagaaatgctgcagagaatatgctcgagatacttggattcaaggtgccccaggcccaacccacaaagcctgcactcaagtctgaagagaaaactcccatcaaaaagcctggtgatggccggaaagtgactttctttgagcccgggtcgggagatgagaatggcacgagcaataaggaagacgaatttcgcatgccgtacctgagccatcagcagctaccggcaggtattctgcctatggtgccagaagtcgctcaggccgtcggggtcagccagggccaccatacaaaagatttcaccagagctgccccgaaccctgcaaaggcgactgttaccgctatgatcgcccgagaactgttatacggtgggacctctcccaccgccgaaacaattctcaaaaacaacatttcgagtggccatgttccacacggtcccttaacgagaccctctgaacagctggactatctttctagagtgcaaggcttccaggtagaatacaaggatttccctaagaacaacaaaaatgagttcgtttcactgatcaactgttcgagccaaccacctctgatttcccacggcatcggaaaggacgtggagtcttgccatgacatggccgccctcaacattctgaaactgcttagtgaactggatcagcagtcaaccgaaatgccccgcacaggaaatggtcccatgagtgtgtgtggccggtgctag

SEQ ID NO: 15318 - DNA, 1491 bp, synthetic construct
  source 1..1491: mol_type = other DNA; note = Synthetic coding sequence
atgaaattgggcaaaaagcccatgtacaaaccagtggacccttactcacgaatgcagtcaacctataactacaacatgagggggggagcttatccaccaaggtacttttacccctttcctgtgccaccacttctgtaccaagtggaactctcggtgggcgggcagcagtttaatgggaaagggaagacccgccaggcagccaagcacgatgccgctgcaaaagcattgaggatcttgcagaatgaacctctccctgaaagactcgaggtcaacggacgcgagagtgaggaagaaaatctcaacaagtctgagatctcacaagtcttcgaaattgctttaaaacgcaacttgccggtgaattttgaggtggcccgggagtccggtccaccacatatgaagaatttcgtcacgaaggtgtccgttggcgaattcgtgggagaaggcgagggtaagtccaaaaaaatttcgaaaaagaacgcggcgatcgcagtattggaagagctaaaaaaactccctcccctcccggctgtcgaacgggtcaaaccccggattaagaaaaagaccaagcccatagtgaaacctcagactagccctgagtacggacagggtattaacccaattagccgcctggcacaaatccagcaggcaaagaaggaaaaggagcctgagtacacgctcttgactgaaagaggtctcccccgacggagagagtttgttatgcaggtgaaagtcggaaaccacacagcggaggggacgggaacaaacaagaaggtggccaaacgaaatgccgccgaaaatatgctggaaatactagggttcaaggtccctcaggcccagcccactaagcccgccttaaaatccgaggagaaaacccctataaaaaagcccggggatggccgtaaggtcacgtttttcgagcctggctccggcgacgagaatggaacgagtaacaaggaggatgaattccgcatgccctatttgtcccaccagcagttgccagcgggaattctgcccatggtgccagaggtcgcccaggcagttggggtgtctcagggccaccacacgaaggacttcactagagccgcaccaaatcccgctaaagctactgtgacagccatgatcgcccgcgagctgctctacggaggaactagccccacagcagagacgatactgaaaaacaacatttcctcaggacacgtgcctcacgggccactgaccaggccttcagagcagctcgactacctgtcacgggtgcaggggtttcaagttgagtacaaagacttcccaaagaacaataagaatgagttcgttagcttgatcaactgctcctcccagcctcctctcattagccacgggatcgggaaggacgtagagagctgccacgacatggcagctttgaacattctgaagctactatcagaactcgatcagcagagcacggagatgcctagaactgggaatggtccaatgagcgtctgtggacgatgttag

SEQ ID NO: 15319 - DNA, 1473 bp, synthetic construct
  source 1..1473: mol_type = other DNA; note = Synthetic coding sequence
atgtccgaggttaccaagaacagcctagaaaaaatcctgccacaactgaaatgccacttcacgtggaacctgtttaaagaagattccgtctctcgtgatctggaggatagggtttgcaaccaaatcgagtttcttaataccgagttcaaggccaccatgtataacctcctggcgtatataaagcacctggacgggaataacgaagcagccttagagtgtctgagacaggctgaggagttgattcagcaggagcatgcagaccaggccgagataaggagcctggtcacatggggcaactacgcttgggtatattaccacctgggccgtctgtcagacgctcagatttacgtcgacaaggtgaaacagacatgtaagaagttttccaatccttattcgattgaatactcggagctggattgtgaggagggttggacccagcttaagtgtggtcggaacgaacgcgctaaggtgtgcttcgaaaaggctttggaggaaaagcctaacaatccagagttttcttcgggtctagccattgcaatgtatcacctggataatcatccagagaaacaattctccacggacgtgctcaaacaggcaatagagctcagtcccgataatcaatatgtgaaggtgctgctcggtttaaagctgcagaagatgaataaggaagccgaaggcgagcaattcgtggaggaggccctggaaaaatcaccttgccagaccgatgttctccgatctgccgcaaaattctacagacgaaaaggcgatctagataaggccatcgaactgttccagcgagtgctagagagtacgcccaataacgggtacttatatcaccaaatcggctgttgttataaggccaaggttagacagatgcaaaatacgggggaaagcgaggcatccggaaacaaggagatgatcgaagcgctgaagcagtacgcgatggattactctaataaggcattggaaaagggactgaatcccctgaatgcatactctgatctagccgagttcttggaaaccgaatgctatcagactccctttaataaagaggtccccgacgctgagaagcagcaatcccatcagaggtactgcaacttgcaaaaatacaacgggaagagcgaggatactgccgtccagcatgggctggagggactctccattagcaagaagagcacagacaaggaggaaataaaggaccaaccccaaaacgtaagcgaaaacctgttgccgcagaacgcccccaattactggtatttacagggcttgatacacaagcagaatggagacctgttgcaggccgctaagtgctatgaaaaagaacttggacggctgctaagggatgcccctagcggaatcggctctatctttctgagcgcctcagagcttgaggatgggtcagaggaaatgggacagggcgccgtgagcagctccccgcgagagctgttgtctaatagcgaacaactgaattag

SEQ ID NO: 15320 - DNA, 1473 bp, synthetic construct
  source 1..1473: mol_type = other DNA; note = Synthetic coding sequence
atgtcagaggtgaccaaaaacagtctcgagaagatccttccccaactcaaatgtcactttacctggaatctgttcaaagaggacagtgtgtcccgcgacctggaagatagggtttgtaaccagatcgagttcctcaatactgaatttaaggctactatgtacaatctgttagcatatattaaacatcttgacgggaacaatgaggctgcgctagaatgccttaggcaggctgaagaattgatacagcaggagcatgcagatcaggcggagattcgaagtctggttacgtggggcaattacgcatgggtttactatcacctggggcggttatcagatgcccaaatctacgtggacaaggtcaaacagacatgtaaaaagttctcaaacccttacagtatcgagtattctgaattagattgtgaagagggctggacacagcttaagtgcggtaggaacgagagggcaaaggtctgctttgagaaggccctggaagagaaaccaaacaatccagaatttagttccggactggccatagcaatgtaccacctggacaaccatcccgaaaaacagttctctacagacgtgctgaagcaggccatagagctgtctcccgacaaccagtatgtaaaagtactcctgggcctgaagctgcaaaaaatgaacaaggaagctgaaggcgagcagttcgtggaagaggctctggaaaagagcccatgccagacggacgtgctgcgatcagccgccaagttttacagacggaaaggcgacttggacaaggccattgagctcttccagcgggttctggagtccacccccaacaacgggtacctgtatcatcaaatagggtgttgctataaggccaaggtgaggcaaatgcagaataccggggagtctgaggccagcggaaacaaggaaatgattgaggcgctcaagcagtatgccatggattactctaataaggccctcgagaaggggctgaacccgctgaatgcatattctgacttggctgaattcctggagacagaatgctaccaaactccattcaacaaagaagtgcccgacgccgaaaagcagcaaagccaccaaaggtattgcaatctgcagaaatataacggaaagtcggaagacaccgctgtgcaacatgggctagaaggcctgtcgatttccaaaaagtctacggacaaagaagaaatcaaagaccagccccagaacgtgagcgaaaacttgcttccccagaatgcgcccaactactggtaccttcagggcttgatccacaagcaaaacggggaccttcttcaagccgccaagtgttatgaaaaggaactcgggaggctactgagagacgcaccatctggtatcgggtctatatttctctccgcttctgaactggaagacggatcggaggaaatggggcagggcgctgtgtcctcttcccctagggaattattgtctaatagcgagcagttgaattag

SEQ ID NO: 15321 - DNA, 1509 bp, synthetic construct
  source 1..1509: mol_type = other DNA; note = Synthetic coding sequence
atgaaactaggcaagaagccgatgtacaaaccagtggacccctattctcgcatgcaaagcacatataattacaatatgcgcggcggcgcataccctcccaggtacttttacccgtttccagtgccccccctgttgtatcaggtggagttgagcgttgggggtcagcagttcaacggaaaagggaaaacgcgacaggctgcaaaacacgacgccgcagccaaggctctgcggatcttgcagaacgagcccctgcctgaacgcctggaggttaacggaagagagtcagaggaggagaacctgaacaagtccgaaatcagtcaggtttttgaaatcgctctgaaaagaaatctgccagtcaacttcgagtcttttcctttgaaacaagtagcccgggaatccggcccgcctcatatgaaaaactttgtcactaaagtctccgtgggggagttcgtcggagagggggaaggtaagtcgaagaagatttctaagaagaacgccgctatcgccgtgcttgaagaactgaaaaaactgccacctttgcccgccgtggagcgcgtgaagccgcgaataaagaagaagactaaaccgatagtgaaacctcagacatcacccgagtatggacagggaataaatcctatctcacgcctcgcccagatccagcaggcaaagaaggagaaagaacccgagtatacccttctgaccgagcgcggactgccaaggagacgggaatttgtgatgcaggtgaaagtgggcaaccacacggctgaaggaacaggaacaaacaaaaaggtggctaagcgaaacgccgctgagaacatgctggagatactcgggtttaaggtgcctcaggcgcagccaacaaaacctgcactcaagtcagaggagaagactcctattaagaaacctggcgatggtcgtaaggtcactttcttcgagccagggtctggagatgaaaatggaaccagtaataaggaagatgaattccgcatgccatatctgtctcatcagcagctcccagccgggatcctgcctatggtgcctgaagtagcacaggcagtcggcgtctcacaggggcaccacaccaaggactttacaagggccgcaccaaatcctgcaaaagcgaccgtcacagctatgattgcccgcgagctcctgtacggtggcacgtctcctactgctgagacaatcctgaagaacaatatcagctccggacatgttccacacggacccctcacgcgcccatctgagcagcttgattacctgagtcgggttcagggctttcaggtggagtacaaggattttccaaagaataataaaaatgaattcgtatcactgataaactgttcctcccaacctccattaatctcacacggcatcggaaaggacgtggaaagctgccacgacatggccgcgctgaatatattgaaactcctgtccgaactggaccagcagtctactgaaatgccccggaccgggaacggacccatgagcgtctgcggacgatgctag

SEQ ID NO: 15322 - DNA, 654 bp, synthetic construct
  source 1..654: mol_type = other DNA; note = Synthetic coding sequence
atggcggaaggatcccagagcgccccagaggctggaaatgatatgggcaatgacgacgccatcggaggcaacgtaagcaaatatatcgtgctgccaacaggctactgcggtcaaccaaagaagggccaccttatatttgatgcctgcttcgagtcaggcaatttggggcgcgtggaccaggtatcagagtttgagtacgacttgtttataaggcccgatacctgtaatcccagatttcgtgtttggttcaactttacggtggagaacgtgaaagagagtcagcgcgttattttcaatatcgtgaacttcagcaaaacgaagagtctttatagggatgggatggctccaatggtgaaatccacgagtcgaccgaagtggcagcgcctacctcccaagaatgtatattactatcggtgtcccgatcacagaaaaaattatgtgatgtcttttgccttctgctttgacagggaagaggacatataccagttcgcctactgctacccttacacatacacacgtttccagcattatctagattcactgcagaaaaggaacatggactatttcttcagggagcagttgggacaatcagtgcagcagcgcaagctggacctcctgaccatcacttcgcctgctggtcgatggtcttggtag

SEQ ID NO: 15323 - DNA, 963 bp, synthetic construct
  source 1..963: mol_type = other DNA; note = Synthetic coding sequence
atggcagagggaagtcagtcagcaccagaggctggcaacgatatgggcaacgatgatgcaattggtggcaatgttagtaagtacattgttctgccgaccggctattgcggtcagccaaagaagggtcatttgatatttgatgcttgcttcgagtctggcaatctgggccgagtggaccaggtaagtgaattcgaatacgatcttttcatcaggccagacacttgtaatcctagatttcgggtctggttcaacttcactgtcgagaatgtaaaagagtcccagagagtaatcttcaatatcgtgaactttagcaaaacaaagtcactgtatcgtgacgggatggccccgatggtgaagtcgacctcccgaccaaagtggcagaggctcccacctaagaatgtttattactaccgctgtcccgatcaccgcaaaaattatgtgatgtcattcgctttctgtttcgaccgagaagaagacatttaccaatttgcctactgttatccatatacctatacccgcttccagcactacttggattccctgcaaaaacgaaacatggattattttttccgggaacagctcggacagagcgtgcaacaaagaaagctggatttactcacaataacatctcctgataatctccgcgagggcgccgagcagaaagtggttttcattaccggacgggtgcaccccggggagaccccgtctagctttgtctgccaaggcatcatcgactttctggtgtctcaacaccctattgcctgtgtactaagggagtatcttgtgttcaagatagcgcccatgctcaaccccgatggagtgtacctgggaaattacaggtgcagcctgatgggctttgacctgaaccgacattggctggaccctagtccttgggtgcacccgaccctgcatggtgtaaagcagctgatagtgcagatgtacaatgaccccgttagcaattag

SEQ ID NO: 15324 - DNA, 1512 bp, synthetic construct
  source 1..1512: mol_type = other DNA; note = Synthetic coding sequence
atggcagagggaagccagtctgcccctgaggccggtaacgatatgggaaacgatgatgcaatcggcggtaacgtgtccaaatacatagtcctgcccaccggttattgcggacagcccaaaaagggccacctgatctttgacgcatgtttcgagagcggtaacttaggacgggtagatcaggtctcagaattcgagtacgacttattcattcgcccagacacctgcaaccccagattccgagtctggttcaacttcacggtagaaaacgtaaaggaaagtcaaagagtcatcttcaatatcgtgaattttagcaaaacaaaatccctctaccgggacgggatggcccccatggtaaagtccactagccggccaaaatggcaacgtctgccacctaaaaatgtttactactacagatgtcccgaccaccgaaagaattacgtcatgtctttcgctttttgctttgatagggaggaggacatctaccagtttgcctattgttacccgtacacctatacccgttttcagcattacttagatagcctccagaagcgcaatatggactacttcttccgcgagcagctgggccagtccgtgcagcagcgaaaactagatctgctcactattaccagtccagataacttacgcgaaggagccgagcaaaaggtggtgttcatcactgggcgagtccacccaggggagacacctagttccttcgtttgtcagggtattatagactttctggtgagtcaacacccaatcgcctgcgtcctaagagagtatctagtgttcaagattgctcctatgctgaatccggatggggtgtatctcggcaactaccggtgtagccttatgggcttcgatctgaatcgccactggttagacccctcaccttgggtgcaccccaccctccatggcgtgaaacagctcatcgtgcagatgtacaatgaccctaaaacgtctctggaattttacatcgacattcacgcccattccactatgatgaatggtttcatgtacggaaacattttcgaggacgaggagcgctttcagaggcaggctatttttccgaagctactttgtcaaaatgccgaagatttttcgtacagcagcacgagtttcaaccgggacgctgtgaaagcaggcaccggaagaagattcctcgggggcctgcttgatcacacaagctattgctacacgctagaagtgagtttctatagttatatcatctctgggactaccgccgctgtgccatacactgaagaggcgtatatgaaactggggaggaatgtagcccggacgtttctggactattatcgccttaatccggttgtggagaaggtggccataccaatgcctaggctcaggaacaaggaaattgaggtccagcgacgcaaggaaaagtctccaccatacaagcacccgctattgcggggcccagcctcgaattatcccaattccaaaggggataagaaatcttccgtgaaccataaagatcctagcacacctttctag

SEQ ID NO: 15325 - DNA, 1734 bp, synthetic construct
  source 1..1734: mol_type = other DNA; note = Synthetic coding sequence
atgagccaggtccaggtccaggtccaaaaccccagcgccgccctttccggcagccagatccttaataagaatcaatccttactgagccagcctctgatgtcaattccttcaacaacatcatccttgccctctgaaaacgcaggaaggccaatccaaaattccgcactgccatctgctagcattaccagtacttctgccgctgccgaatccatcactcctaccgtggagctgaatgctctatgcatgaaactgggcaagaagccaatgtataagcccgtcgacccttactcacgaatgcagtctacatataactataatatgagaggcggtgcctaccctcctaggtacttttatcctttcccagtacctcctcttttgtatcaggtcgagctttctgtgggcggccagcagtttaacgggaaaggaaagacccggcaggccgcaaagcacgatgcggctgcaaaggcactgagaatacttcagaacgaacctctcccagaacgcctcgaggtgaacggtagggagagtgaagaggaaaacttgaacaagagcgagatttctcaggtattcgaaatagctctgaagaggaatcttccagtcaactttgaagtcgctcgcgagtcaggccctccccatatgaaaaactttgtgacgaaggtgtctgtgggagaattcgtgggagaaggagagggaaaaagtaagaaaatttctaagaagaatgctgccatcgccgtgctggaagagctgaagaagctgccacctctcccagctgtcgaaagagttaagccacgaattaagaagaagactaagccaatcgtgaaacctcagacctcacccgagtatggccaaggaatcaaccccatcagtcgcttggcacagattcagcaagcgaagaaggagaaagagcccgagtacactcttctaactgaacggggactgcccagaagaagggaattcgtaatgcaagtcaaagttgggaaccatacagcagagggaaccggcaccaataagaaggtggcaaagagaaatgccgccgagaacatgctggaaatcctggggtttaaagttccccaggctcaaccgacgaagccagccctgaagtccgaggagaagacaccaatcaagaagcccggcgatggccgaaaagtaacgtttttcgaacctggcagcggggacgaaaacgggacaagtaacaaagaggacgagtttaggatgccttatctaagtcaccagcagttaccagccgggattctgccaatggtacccgaagtcgcccaggccgtgggggtgtctcagggccaccacaccaaagacttcacccgtgcagctccaaatccggccaaggcgactgtgaccgccatgatcgcccgagaactgttatatggaggaacgagtcctactgctgagacaattctgaagaataatatcagctccgggcacgtccctcacggccccttgacccggccttccgaacagttagactacctcagtcgcgtacagggattccaggtggagtataaagacttccctaagaacaacaagaatgaattcgtgagcctgataaattgctcctcccagcccccacttatatcccacggcattggcaaggatgtggagtcatgccatgacatggctgctctgaatattctgaaacttttatccgagctcgatcagcaaagtacggagatgccaaggaccggcaacggcccaatgtctgtttgcggccgatgctag

SEQ ID NO: 15326 - DNA, 852 bp, synthetic construct
  source 1..852: mol_type = other DNA; note = Synthetic coding sequence
atgtctggtgcagtgctgttggagagggagcggttgacatcaggcacaacctggcatacagcaggtctgctgtggcaactgcgcccctccgacgtcgaagtagagctgctagctcacacaaggcgcgtggtaagtagggagctggaagaggaaacagggttgcataccggatggatccaaaacggcggcctgttcattgcaagcaatcggcagcggcttgatgagtataagcgtctgatgagcttggggaaagcttatggcgtcgaaagccacgtattgtcccctgccgaaacaaaaaccttgtatcccctgatgaacgtagacgatctgtacggaacattgtatgtgccgcacgatggcaccatggaccccgccgggacctgcacaacgctagccagagcagctagcgcacggggggcccaggtcatcgagaactgtcctgttaccggtattcgggtttggactgacgatttcggggtccgccgtgtggctggagtggagacccagcacgggtccattcagacaccctgtgtcgtaaattgtgctggcgtatgggcctcagccgtggggcgcatggccggcgtgaaagtacctctcgtggcaatgcatcacgcttatgtcgtgactgagcgaatcgaaggaattcagaatatgccaaacgttcgtgaccatgacgcctcagtttatctacggctgcaaggcgatgccctctccgtcggcggatacgaggccaaccccattttttgggaggaggccgtgaaataccgaccacgcgctgcaggaggcctctgtcttaaaacgagcacagagaaggtctgcgcagtctggtcagatgatcttcgtcgggcctag

SEQ ID NO: 15327 - DNA, 1107 bp, synthetic construct
  source 1..1107: mol_type = other DNA; note = Synthetic coding sequence
atgtcttacttcgggaagttctatctcgtgggactggacgcgcgcaaagccgcagattggctcttcagcgctgacgtaagtcggcctccaggatcaactgtttatacctgcatgctaaaccatcgcgggggaactgagagcgatcttacagtgtcacgtctcgcgccttcccaccaagccagccccttagcacctgccttcgaaggcgatggttattatctagccatggggggagcagtggcccagcacaattggtctcatattactacagtccttcaggatcagaagtctcaatgtcaactgattgactccagtgaagatttgggaatgatatctatccaaggtccggcaagccgggcaatactgcaggaagtacttgacgcagatctgtccaacgaggctttcccgttctcaacacataagctgctccgtgctgcggggcatttagtgcgtgcgatgcgtctgagctttgtcggcgagctgggctgggaactgcatattccaaaagcctcttgtgtgcctgtgtatcgagccgtgatggcagccggagccaaacatgggctaatcaacgcaggctatagagccattgatagtctgtctattgagaagggctaccggcattggcacgctgacctacgtccagatgactcacccctggaagcaggcctggccttcacctgcaagcttaagagccccgtgcctttcttggggagggaggccctggaacagcagcgcgctgccggccttagacggcggctggtctgtttcacaatggaggaacccctgtggacaaggcctcaccccgctgtcagcggggcacctgcctttagcaccgccagttcttcaaaggtaccaatgttcggattagaggccatctggaggaacggccaggtggttgggcacgttcgacgggccgattttggattcgccatcgataaaactattgcctacggatatattcatgatccctccgggggccccgtgagtttggactttgtgaaatcaggagattatgctctggagcggatgggggtcacatatggtgcccaggcccacttaaagagtccatttgaccccaacaataaacgcgtgaagggaatttactag

SEQ ID NO: 15328 - DNA, 2757 bp, synthetic construct
  source 1..2757: mol_type = other DNA; note = Synthetic coding sequence
atggcttcattatcaagggccctcagggtggcagccgctcacccccgccagtctcctactcgcggcatgggcccctgtaacctttccagtgcggccggacccaccgcggaaaaatcggtcccttatcagaggactttaaaggagggccagggtactagtgttgtggcccaggggccatcaaggccacttcccagcactgctaacgtggtagttatcggcggcggctctctgggctgccagaccctctaccatctggctaaactgggcatgtccggagctgtgcttctggaaagggaacgactgaccagcggtaccacctggcacacagcgggattactctggcaactaaggccttccgatgttgaggtggagttgctggctcacaccagaagagttgttagtagggaacttgaagaggagaccgggctgcataccggatggatccagaatgggggactctttattgctagtaaccggcagcgactcgacgagtacaaacggctgatgagccttgggaaggcctacggggtcgagtcccacgtgctgtctccagctgagactaaaacactttaccccctgatgaatgtcgatgatctctatggcactctgtacgtgccccacgatggaacaatggaccctgcaggaacatgcaccacactcgcccgggccgccagtgcccggggtgctcaagtgatcgaaaactgccccgttactgggataagggtttggactgacgatttcggtgtcagaagagtcgccggtgtggaaactcaacatgggtcgattcagaccccctgcgtagttaattgcgctggagtatgggcatccgcagtggggcggatggctggcgttaaggtgccactggtcgcaatgcatcatgcctacgtagtgacggagcgtattgaggggattcagaacatgccaaatgtccgggatcacgacgcctctgtctaccttcggctccagggcgatgccctgtcagtgggggggtacgaggccaaccctatcttctgggaagaagtgtctgacaagttcgcctttggcctctttgacctggactgggaggtctttacacagcatatagagggagcaattaaccgggtacccgtcctcgaaaaaaccggcattaaatcaactgtgtgcggcccagagagcttcacacccgatcacaagcctttaatgggggaagcacccgagctgagaggttttttcctgggttgtgggttcaatagcgctggtatgatgcttggggggggttgcggacaggagctggcccactggattattcacggacggccggagaaggacatgcatggctatgatattagaaggtttcatcactccctgacagatcatccacggtggatcagggagcgaagtcatgagagttacgcgaagaattactctgtagtattccctcacgatgaaccattagccggtcggaatatgcgcagagatcctctccacgaagagctgctgggccagggttgcgtgttccaggagcgacacgggtgggagcgcccaggctggttccacccaaggggcccagcccctgtgcttgaatacgactattacggtgcttacggaagcagagcccatgaagattacgcgtaccggcggctcctggctgacgaatatacttttgcctttcctccccaccacgataccattaagaaggagtgccttgcatgtagaggagccgctgctgtcttcgatatgtcgtatttcggaaaattttacttagtgggattagatgcgcgaaaggctgctgactggctgttctccgcagatgtaagtagaccacccgggtcaacggtttatacctgcatgttaaaccacaggggcgggacagaatccgatctgactgtctctcggctggccccttctcaccaggccagtcccttggctcccgccttcgaaggcgacgggtactacctggcgatgggtggagcagtagctcagcataattggtcccatattaccaccgtgttacaggaccagaagagtcagtgccaactaatcgatagcagcgaagacttgggcatgatttctattcagggccctgcatctcgtgccatcctccaggaggtgttagacgcagatctgtcaaatgaagctttcccattcagcacccataagctccttagggcggctggacatctggttagggcaatgcggctgagctttgtcggggaactcggatgggagctccatattcccaaagcatcttgtgtacctgtctacagagcagtgatggcggctggtgctaagcacgggcttataaatgccggttatcgtgccattgattcgctaagcattgagaaggggtatagacactggcacgctgaccttcgcccggatgattcaccattggaggccgggttggctttcacttgtaaactgaagtcacctgtgccctttttggggcgggaagccctcgagcagcagcgcgctgccgggcttcgtagacgcttagtctgcttcacaatggaggacaaagtgcctatgtttggattggaagccatttggcggaatggccaagtggtgggacacgtgcggagagcagactttggcttcgccattgacaagactattgcctacggctacatccatgacccctctggcggccccgtgagcctggatttcgtgaagtctggcgattatgcccttgagagaatgggggtgacatacggcgctcaggcccacctcaagtctccctttgatcctaacaacaaacgggtcaaagggatttactag

SEQ ID NO: 15329 - DNA, 720 bp, synthetic construct
  source 1..720: mol_type = other DNA; note = Synthetic coding sequence
atggaaggcaccgtcgagtctcagacccccgaccttcgtgacgtggaaggaaaagtcgggaggaaaactcctgagggcctcctgcgtggcttgaggggggagtgcgaactgggcaccagtggggccctgctgctgccgggagcaagttcaactggtcacgacctgggggacaagatcatggccctgaaaatggagctggcttatctgcgggccatcgatgtaaaaatcctccagcagcttgtgacactgaatgaaggcatagaggcggtgcgctggttgctagaagaacggggcactctgacatcgcactgctcaagtctgacatctagtcagtattcgctgaccggaggatcccctggcagaagtcgacgaggtagctgggattcactgccggacacttccacgacagacagacttgactctgttagcatcgggtcattcctggacacggtagcaccatccgagctggatgagcagggcccccccggcgctccacgatcagaaatggattgggctaaggtgatcgccggcggcgaacgggctcgcacagaagtggacgtggctgccaccagactgggaagtctgagggcggtttggaaacctcccggcgagagactacagggtggaccgcctgaatccccggaggacgaaagcgccaaacttggctttgaagcacattggttttgggagcaatgtcaggatgatgtgacattcttatag

SEQ ID NO: 15330 - DNA, 294 bp, synthetic construct
  source 1..294: mol_type = other DNA; note = Synthetic coding sequence
atgtcttcaggaaacgcaaaaataggccacccagcacccaatttcaaagccaccgctgacgaggggatctcttttagagggctgttcattattgacgacaaggggatactccgccagataaccgtgaacgacctccccgtcggacgatcggtggatgagactctccgtctagtgcaggctttccaattcacggataaacatggcgaagtttgccccgccgggtggaagccgggctccgacacaattaagccagatgtgcagaaaagcaaggagtatttctctaaacagaaatag

SEQ ID NO: 15331 - DNA, 1668 bp, synthetic construct
  source 1..1668: mol_type = other DNA; note = Synthetic coding sequence
atggatcggtctaagagaaactctatcgcgggctttcccccacgggtagagcgactggaagaattcgaaggcggaggcgggggcgagggcaacgtatcccaggtgggccgagtctggcccagcagctatcgtgcactgataagtgcatttagcaggctgacacggctggacgatttcacatgtgagaagatcgggagcggatttttttctgaagtgttcaaagttcgacatcgtgccagtggccaggtgatggctctgaaaatgaatactctgtcatctaatcgagcgaacatgttaaaggaagtgcagttgatgaaccggctgagtcaccccaatatcctaaggtacattaatagcggcaatcttgagcaactgctagactccaaccttcacctgccatggaccgtgagagtgaagctagcgtatgacattgccgtcggcctatcttacctacacttcaagggaatttttcaccgcgatctgacgtctaaaaactgtctaataaagcgggatgaaaatggctattcggcagttgtcgcagatttcggactcgcagaaaaaatcccggatgtctcgatgggatcagagaagcttgcagtagtgggatctccattctggatggcccctgaggtcttgagggatgagccctacaatgagaaagccgacgtattctcctacgggattattctttgcgaaataatcgcaaggatacaagccgacccggattatctccctcgcaccgaaaatttcggactggattatgatgctttccagcatatggttggtgactgtcctcctgactttcttcagttgactttcaattgttgtaatatggacccaaaattgcgaccctccttcgttgagataggcaaaactctggaggaaatactgagccgactccaggaagaagaacaggaacgcgataggaagctgcaaccaactgctaggggcctactcgaaaaagctcctggggtcaaaagactcagcagtctggacgacaagattcctcacaaaagcccatgcccgcggagaaccatctggctctctcgcagccaatcagacatttttagtaggaagccgcccagaacagtgagcgtgttggacccttactaccgaccccgggacggggcagccagaacgcccaaagtgaaccctttcagtgcaaggcaggatctcatgggcggcaagatcaagttctttgatctgccaagtaagtccgtcatctccctggtgttcgatttagatgcaccaggacccggtacaatgccgctggctgattggcaggaacccttagcaccaccaattcgccggtggaggtctctgcccggctccccggagtttctgcatcaggaagcttgcccgttcgtcggtcgcgaggaatcactgtctgacggcccccctcccaggctgtcaagtctcaagtaccgcgtgaaggaaatcccaccattccgggccagcgctctgcctgctgcccaggcccatgaagcgatggactgtagtattcttcaggaggagaacgggttcggaagcaggccacaaggcacatcaccctgccctgcaggagcttccgaagagatggaggtcgaagaaaggcccgccggatccaccccggccactttttccacctcaggcatagggttgcagactcaaggtaagcaggacggctag

SEQ ID NO: 15332 - DNA, 1629 bp, synthetic construct
  source 1..1629: mol_type = other DNA; note = Synthetic coding sequence
atggatcgctctaaacgcaattccattgcaggtttcccccccagggtggagcggctggaagaattcgagggaggtggaggcggcgagggcaatgtgtcccaggtaggaagagtctggccttcttcttatcgcgccttaatctccgccttttcacgcctgacgcgacttgatgatttcacctgcgagaagatcggctccggcttcttcagtgaagtgttcaaggtgaggcatcgggctagcggccaggttatggccctcaagatgaacacattatcttccaacagggccaatatgctcaaagaggtccagctgatgaatcgcctctctcaccctaacattctgagatttatgggcgtgtgcgtgcatcaaggacagctgcacgcgttgacagaatacatcaactctggcaatttggaacagctgctggattccaacctgcatctgccatggactgtacgcgtgaagttggcctatgatattgcagtgggactgtcctatctgcactttaaagggatcttccaccgcgatctgacgagtaaaaattgcttaattaagagagatgagaacgggtactccgcggttgttgcagattttggacttgcggagaaaatccctgacgtgtccatgggctctgagaagttggcagtcgtgggaagccccttttggatggcacccgaagtgttacgggacgagccttataacgagaaagccgacgttttcagctacggcatcatcctctgcgagatcatagcccggattcaggccgatcctgattatctacctcgtacggagatggaccccaaattgcgcccctcctttgtggaaatcggtaaaacgctggaagagatcctcagccggttacaggaagaggaacaagagcgggaccgaaagctgcagccaactgccaggggcctccttgagaaagcacctggagtaaagcgcctctcgtccctcgatgataaaatcccacacaagtctccatgcccaagacgaacaatctggttgtccaggagtcaatcagacattttttcccgtaaaccccccagaacagtttcagtgctggatccctactacagacctcgggacggagccgcacgaacccccaaggtcaatccattctccgcaaggcaggacctgatgggcgggaagatcaaattcttcgacttaccctcgaagtctgtaatatccttggtctttgatctggatgcacccgggccagggaccatgccgcttgctgactggcaggaaccactcgctcctcctatcaggaggtggaggagcttgccaggcagccctgagtttctacaccaggaggcctgtccatttgttgggcgcgaagagagtctgtcagacggaccacccccacgcctgtccagcctcaagtatcgagtcaaagagataccaccctttcgggcatcagccctcccggccgcccaggctcatgaagcaatggactgttctatcctacaagaggaaaacggtttcgggtctcgacctcagggaacctcaccttgcccggcaggcgcgtctgaagagatggaggtcgaagaaagacctgcaggctctacacctgctacattcagtacatctggcataggactccagacacaaggaaaacaggatgggtag

SEQ ID NO: 15333 - DNA, 1716 bp, synthetic construct
  source 1..1716: mol_type = other DNA; note = Synthetic coding sequence
atggaccgcagtaagcgcaactcaatcgcaggcttcccgccaagggtggagcggctcgaggaatttgagggtggcggaggcggggagggaaacgtcagccaggtgggaagggtgtggcctagcagctatcgcgccttgatcagcgcttttagtagactgactagactcgatgattttacttgtgagaaaattggttctggcttcttcagtgaggtctttaaagtacgccatcgggccagtggccaagtgatggcgttgaaaatgaatacactatctagcaatcgcgcaaatatgctgaaggaagtgcaactgatgaacagattatcgcaccctaatatcttacggttcatgggggtctgtgtccatcagggacagctccacgctctcaccgaatacattaactctggtaatcttgagcaactgctggatagtaacttgcacctgccgtggacagttcgtgtcaagttagcctacgacattgccgtgggactgtcctatctgcacttcaaggggatctttcacagggacctgacatccaagaactgtttgattaaaagagatgaaaacggatactcagccgtcgttgccgacttcgggctcgcagaaaaaatccccgacgtcagtatgggctctgagaagctcgcagttgtgggtagcccattctggatggctccagaagtcctgagagatgaaccatacaatgagaaagctgatgtctttagctacggaatcatcctctgcgaaatcatcgcccgcatccaggctgatcctgattacctacccaggacggaaaacttcggccttgactatgatgctttccaacacatggtgggggattgcccccccgacttcctgcagcttacctttaactgttgcaacatggacccgaagcttcgaccttccttcgtggagatcggaaagaccttggaggagattctctctcgcttacaggaagaagaacaggaacgggacagaaagctgcaacccacagcaagaggactgctcgagaaagccccaggtgttaaacggttatcttctctggacgacaagatcccacacaagagcccctgtcctcgacgaacaatctggctcagtcgtagccaatccgacatttttagtcggaaaccaccacggacagtgagcgtgttggatccctattatagacctcgcgacggggccgcgcggacaccaaaggtcaatccattttcggcccgccaggacctcatgggcggtaagatcaaattttttgacttaccctcaaaatccgtgatttccctagtgttcgatctggatgctcccggaccaggaaccatgcccctcgcagattggcaggagcccctcgcccccccgattcggagatggagaagcctgccagggtcccccgagttcttgcatcaggaggcgtgcccctttgtcggccgggaagagtccttatcggatggaccaccaccccgtctcagcagccttaagtaccgcgtcaaagagatccctccatttcgggcttcagcgctgcctgccgcccaggctcacgaggctatggattgctccatactgcaggaggagaacgggttcgggtctaggccacagggtacgagcccctgtcccgccggcgcctccgaggaaatggaggtggaggagcgacctgcaggatccacgccagccacctttagcacctccggaataggccttcagacacagggaaagcaggatggttag

SEQ ID NO: 15334 - DNA, 1416 bp, synthetic construct
  source 1..1416: mol_type = other DNA; note = Synthetic coding sequence
atgttaggctcctgggggtgctaccggtatgctaaattattctcctgctccctttccacacatgcccgatttatcaaaattctcgacagtgtcctccaccatctggtccctgcctgggaccacaccctgggcacattttctgagataaaacaggtgaagcaatttttgctattaagcagacagcgccccgggctggtggcacagtgtctgcgagatagtgaatcctctaaacctagtttcatgccaaggttatatatcaacaggaggcttgccatggaacacagagcgtgtccaagtcgggacccggcctgtaagaatgcagtgttcactcaggtttacgaaggcctcaaaccttcagataaatacgagaagcctctggactacaggtggcctatgagatacgaccagtggtgggaatgcaaattcatcgccgagggtattattgaccagggcgggggattccgggattctttggccgacatgtccgaagagctttgcccaagtagcgctgacacccccgtccctctaccgttcttcgtgcgcaccgcaaaccaggggaacgggaccggtgaagcccgcgatatgtatgtccccaaccctagctgcagggatttcgcaaagtatgagtggatcggccagctcatgggtgcggctctcaggggcaaagaattcttagttctggccctaccggggttcgtgtggaagcagctctctggagaggaagtgagttggagtaaggattttcctgcagtggattcagtgttagtcaagctgttggaggtcatggagggtatggataaggagacattcgaatttaaatttgggaaggaattaaccttcaccactgtcttaagcgatcagcaggttgtggaactgataccaggtggcgccgggatcgtcgtcgggtatggagatcgcagccgattcatacagctagtgcaaaaagcccgcctcgaagagtctaaggaacaggtcgcagccatgcaggcaggcctacttaaggtggtgccacaggccgtcctagatctcctcacctggcaagagttggagaaaaaagtgtgcggggaccccgaagtgaccgtggacgcccttcggaaattgacgcgatttgaagattttgaacccagcgacagccgggtgcagtatttttgggaagctctgaacaattttaccaatgaagaccggagtcggtttcttagatttgtaacagggcgaagtcgcctccctgcaagaatctacatctacccagataagttgggttacgagacgactgacgcactgcctgagtcttcaacttgcagctccaccctctttttacctcactatgcatcagcaaaggtctgtgaagagaaattacggtacgcggcttacaattgcgtggctatcgacacagatatgagcccttgggaagagtag

SEQ ID NO: 15335 - DNA, 825 bp, synthetic construct
  source 1..825: mol_type = other DNA; note = Synthetic coding sequence
atggccgcaccagaagccgaggtgctctcttctgcagccgttcctgacctggaatggtacgaaaaaagcgaagagacacatgcatcacagatcgaactcctagagacttctagcacccaggaaccgttaaacgcttcagaggccttttgtcccagagactgcatggttcccgtggtgttccccggaccggtctcacaggagggttgttgccagtttacctgcgagttactgaaacacataatgtaccagcgacaacagcttccgttgccttatgaacagctcaaacacttttacaggaagccgagcccccaagcagaggaaatgctgaagaaaaagcctcgcgccacaaccgaagtttcttccagaaagtgccagcaggcgctcgctgagcttgaatcagtcctgtcccacttagaggacttcttcgctcgtacacttgtgcccagggtcctcattcttctgggaggcaacgccctttctccgaaggagttttatgaactggacttgagcttgttagccccatactccgtagaccagtctcttagcactgcggcctgccttcgaagactcttccgggccatttttatggctgacgccttctcagaactgcaggcccctccattaatgggaacggtggtgatggcccagggtcaccgcaattgtggagaggattggttccggcccaaactgaattatcgggtcccatccagggggcacaaactgaccgtgactctgtcttgcggacgaccaagcatcaggacaacagcctgggaagactacatctggttccaagctcccgtaactttcaaaggatttcgggagtag

SEQ ID NO: 15336 - DNA, 2586 bp, synthetic construct
  source 1..2586: mol_type = other DNA; note = Synthetic coding sequence
atggcgggaccaggccctggcgccgtgctcgagtctccgagacagctcctcggaagagttcggtttctcgcagaagcggccaggtcattacgggccgggcggccattacccgctgcgcttgcgttcgtgcctcgggaggtgctatacaagctgtacaaggatcctgccggcccatcccgagtgctgctccctgtctgggaagccgaggggttgggcctgcgggttggagcggctggaccagctcccggaactggcagcggcccactgagggccgctagggatagcatagaactgcggcggggcgcttgcgtcagaacaacaggagaggagttgtgtaacggccatggactgtgggtcaagctgaccaaggagcaactagcggagcacttgggcgactgcggactgcaggagggctggctgctcgtctgccggccagctgaaggtggagcccggttagtgcctattgatactcccaatcacctacagcggcagcagcagcttttcggagtggattatcgtcctgtactgcgctgggagcaggtcgtggatctcacgtattcccaccgtctaggctcccggccccagcccgccgaggcctacgctgaagcagtgcagcggctgttgtacgtccctccaacctggacttatgaatgcgacgaggacctgattcacttcctgtacgatcacctgggaaaggaggacgagaatctcggctctgtgaagcaatacgtcgaatccattgatgtcagttcttatacggaggagtttaatgtatcatgtctgacggatagtaacgctgacacctattgggagtccgatgggtcacagtgtcaacattgggtgcggctcaccatgaagaagggaaccatagttaaaaaattactgctaaccgtggacacaacagacgataatttcatgccaaagcgggtcgtggtgtacggtggagagggagacaaccttaagaagctgtcagacgtatcgatcgatgaaacattgattggagatgtgtgcgtgctcgaggatatgaccgtgcacttaccaattattgagatccggatcgtggagtgcagagatgacggaatcgacgtgcgcctgagaggcgtaaaaatcaagtcctcaagacagcgcgagctcggactaaatgcggaccttttccagcctacaagccttgtccggtatcccaggctggaaggaacagatcctgaagtcttatataggagggcagtgctgctgcagcggtttatcaaaatcttagactccgttctgcatcacttggttcctgcttgggatcacacactgggcacgtttagcgaaattaaacaagtcaaacagtttctcctgctctccaggcagcgtcctggtctggtcgctcagtgtctgagagacagcgagagctcgaagccaagctttatgcctcggctgtatattaacaggcgtctggcaatggagcatagagcatgccctagtagggaccccgcgtgtaaaaacgctgtttttactcaggtctacgaggggctcaaaccatccgacaaatacgaaaaacccctggattatcgatggccaatgagatacgatcagtggtgggaatgcaagttcatcgcggagggaataatcgaccagggcgggggctttcgtgactccttagcagatatgagcgaggagctatgtccctccagcgcagatacccctgtgcctctgcctttctttgtgcgcaccgcaaatcaggggaacgggacaggggaagctcgagacatgtacgtccccaatcctagctgtagggactttgccaaatacgagtggattgggcagttgatgggtgccgcactgagaggcaaagagttccttgtcctagcattaccaggattcgtatggaaacaactgagcggggaggaggttagttggagtaaggatttccccgcagttgactccgtactcgtaaaactattggaggttatggaaggaatggataaagaaaccttcgagtttaagttcggaaaagagctgaccttcacaacagtcctcagtgatcagcaggtggtagagctcatccccggaggggctgggatagtggtaggttacggggaccggagcagatttattcagctggtgcagaaggctcggctggaagaaagtaaggaacaggtggccgcaatgcaggccgggctcctcaaggtggttcctcaagcagtcctggatcttctaacttggcaagagttagagaagaaggtatgtggcgatccagaggtgacggtagacgccctccggaagctcacacgcttcgaggattttgaaccgagtgacagccgcgtgcagtatttctgggaagcattaaacaacttcacaaatgaggatagaagccgtttccttcggtttgtgacaggcagaagccgcctgccggctcgcatatacatctaccccgacaaactggggtatgagacaaccgatgctctgcccgaatctagtacatgctcgagtaccttgtttctgccccattacgcctcggccaaggtctgtgaagagaagcttcggtatgcagcctacaattgtgttgcaatagatactgatatgagtccatgggaagagtag

SEQ ID NO: 15337 - DNA, 1197 bp, synthetic construct
  source 1..1197: mol_type = other DNA; note = Synthetic coding sequence
atggagagtgttctgtccaagtacgaggatcagattaccatctttacagattaccttgaggaatatccagacaccgatgaattagtgtggatcctcggcaagcagcacctcctcaagacggagaagtctaaactcctcagcgacatatccgcccggctctggttcacctaccgccgaaaattcagccctataggaggtaccggcccaagttctgatgcaggctggggttgtatgcttagatgcggtcaaatgatgcttgcccaagctctgatatgtcggcatctggggagggactggtcttgggaaaaacagaaggagcagcctaaagagtaccaacgcatactgcagtgttttctggacaggaaggattgttgttacagcatccaccagatggcccaaatgggggtgggcgagggaaagagcatcggggaatggtttggtccgaacacagtggctcaggtactcaaaaagctggccctgtttgacgagtggaactcactcgcagtgtatgtgtctatggacaacacagtggtgatcgaagacattaaaaaaatgtgcagggtgctccctctaagcgccgatacggccggagaccggccacccgactcgctgactgcctccaaccagagtaaaggcactagcgcttactgctccgcttggaagccactgctcctaatagttccactaaggctcggcattaaccagataaatccagtttacgtggatgctttcaaagaatgctttaaaatgcctcagtccctgggggctctgggcggcaaacctaacaatgcctactattttataggatttttaggggacgagctcatctttctagaccctcacaccactcagacctttgtagataccgaggagaatggcacagtgaatgaccagacctttcattgtctgcagagcccacaacgcatgaacatattaaacctggacccatccgtcgccctcggctttttctgtaaggaggaaaaggatttcgataattggtgctcactagtgcagaaagaaatccttaaggagaacctgagaatgtttgaattagttcagaagcacccatcccattggccaccatttgtgccaccggccaagcctgaagtgacaactacaggggctgaattcatagatagcaccgagcagctggaagagttcgacttagaagaagactttgagattctctctgtgtag

SEQ ID NO: 15338 - DNA, 1701 bp, synthetic construct
  source 1..1701: mol_type = other DNA; note = Synthetic coding sequence
atggatctgcaccgagcagcttttaaaatggagaatagtagctatctgccgaatccacttgcgtcccctgccttaatggttctggcatcaacagcggaagcaagccgggacgcttcgatcccttgccaacagccccgaccttttggagtgcctgtgtcagttgataaggacgtgcacattccttttacgaacggatcttacacttttgccagcatgtatcatagacaggggggtgtccccggcactttcgccaaccgtgactttccaccaagcctcctgcatttgcacccgcagttcgctccccctaacctggactgtactccaatctccatgctcaatcattccggtgtaggcgccttcaggcctttcgcttctactgaagacagggagtcgtaccaaagcgctttcaccccagcaaaaagactgaaaaactgtcatgacactgaatcccctcacctaagattttccgacgccgatggcaaggaatatgacttcggcactcaattaccctcgtcgtccccaggttccctgaaagtggatgacaccggcaagaaaatcttcgctgtatctggtctgatttctgaccgcgaagccagcagttcccctgaagatcgcaacgaccggtgtaagaagaaggctgccgctctctttgactcacaggctcctatctgccctatttgccaggtgcttctgcggcctagtgagctgcaagagcacatggagcaggagctggagcagcttgcacagcttccatcctccaagaatagccttctcaaggacgccatggctcccgggactcctaaatctctgctgttaagtgcctctattaagcgagaaggagagtctcccaccgcctcgccacactctagcgccaccgacgacctgcaccattccgaccgctatcagaccttcctgagggtccgagccaacagacagactaggctgaatgcgcggatcggcaagatgaagcgtcgcaaacaagacgaggggcagcgcgaagggtcctgcatggctgaggatgatgccgtggatatcgagcatgagaacaataaccgctttgaggagtacgagtggtgtgggcagaagcggattcgtgccacgacactgctggaggggggtttccggggatccgggttcatcatgtgttccggtaaagaaaaccctgacagcgatgcagacctggatgtcgatggcgatgatacccttgagtatggcaagccgcaatatactgaagcggatgtgatcccttgcactggagaagaaccgggggaggctaaagagcgagaagcattacgaggtgctgtgctaaacggtggaccccctagtacacgaatcacgccagagtttagtaagtgggcttccgatgaaatgccttccacctcgaacggtgagtcgtctaagcaggaggccatgcagaaaacttgcaaaaactcagatatcgaaaagattacagaggattccgctgtgaccaccttcgaagctctcaaggctagggtcagagaattagagcgtcagctgtcgcggggtgatcggtataagtgtcttatatgtatggatagttactctatgccactgaccagtatacagtgttggcacgtgcattgcgaggaatgctggcttcgtactttgggcgccaaaaaactttgtccacagtgcaacaccataacggcccccggcgacttgagaaggatttacctgtag

SEQ ID NO: 15339 - DNA, 930 bp, synthetic construct
  source 1..930: mol_type = other DNA; note = Synthetic coding sequence
atgccgcgagcccgctctgggcggcgctcccggggggctgggggccgggaggaaacctttctcagggttcgtgccaacaggcagacacgtttaaacgcccggattggaaagatgaaacgacgtaagcaggatgagggtcaggtttgcccactgtgtaatagaccgcttgctggatccgagcaggagatgagtcgtcacgtggagcattgtctgtccaagagagagggatcctgtatggccgaggacgatgccgttgacattgagcacgagaataacaacaggttcgaagagtatgaatggtgtggccaaaagagaattagagcaactaccctgttggaaggggggttcagagggagtggattcatcatgtgtagcggaaaggagaatccggactccgatgctgacttggatgtggacggtgacgatacgcttgagtacggaaagcctcaatatactgaggccgatgtgattccttgtaccggcgaagagcccggggaggccaaggagcgggaggccttacggggggccgtgctgaatggcggtcctcctagcaccagaattacaccggagttttctaagtgggctagcgacgccgaaatgccttctacatccaacggagagagcagtaagcaggaagccatgcagaaaacctgtaaaaacagcgacatcgagaagatcaccgaggactccgccgttactactttcgaggcgttgaaggcgagagtccgcgagttagaacgtcagctaagccgtggcgacagatacaagtgcctgatctgtatggatagttactctatgccactaacaagcatccagtgctggcacgtgcattgtgaggagtgttggctaaggacactgggcgcaaaaaagttgtgcccccagtgtaacacaattacagcaccaggagacctccgacgcatttacctgtag

SEQ ID NO: 15340 - DNA, 1125 bp, synthetic construct
  source 1..1125: mol_type = other DNA; note = Synthetic coding sequence
atggaatccgtgcttagcaagtatgaagaccaaattaccatcttcaccgactatttggaagagtacccagatactgacgagctcgtctggatcctgggcaagcaacacctgttaaagactggagggaccggaccaagcagcgatgcgggttggggttgtatgcttcggtgtggccaaatgatgcttgcccaagcactgatttgccgccatctgggccgggattggagctgggagaagcagaaggaacaacctaaagaataccagcggatcctgcaatgcttcctggaccggaaggactgctgctacagcattcatcagatggcccagatgggcgtgggagaagggaaaagtattggagaatggttcggcccgaacaccgtggcccaggtcctgaagaagctggctctgttcgatgagtggaactctctggccgtttatgttagtatggacaatacagtcgtgattgaagatatcaaaaagatgtgtcgggtgctgcccttgagtgcggacacagcgggtgataggcctccagattctctcacagcctccaatcagtctaaagggacatccgcctactgcagtgcatggaaaccacttctcctcatagttcctctccggctggggattaatcagattaaccctgtctatgtcgatgccttcaaagaatgttttaaaatgcctcaaagtttaggtgcactcggtgggaagcccaataatgcttactattttatcgggtttctgggagatgagctgatcttcttagatccacatactactcagacattcgtggacaccgaagagaacggcaccgtgaatgatcagacctttcattgccttcaaagccctcaacgaatgaatatcctgaatcttgatccatctgtggccctggggttcttttgtaaagaagagaaagattttgacaattggtgttccctggtgcagaaagaaatattaaaggaaaatctccgcatgttcgaactggtccagaaacaccctagtcactggccaccatttgtgcctccagccaaacctgaggtgaccacaaccggagctgaatttatcgacagcaccgaacagctcgaggaattcgatctggaagaagactttgagatactttccgtatag

SEQ ID NO: 15341 - DNA, 558 bp, synthetic construct
  source 1..558: mol_type = other DNA; note = Synthetic coding sequence
atggaaggctgtgttagcaacctcatggtttgtaacctcgcttattctgggaaactcgaagagttgaaagagtcgatacttgcggacaaaagtctcgccacacgcacagatcaagactctcggacggcgctgcattgggcttgcagcgctggccacaccgagattgtcgagttcctcctccaattgggagtccccgtgaatgataaggatgatgccgccagcaaaaataggcatgagattgcagtgatgttgttggaaggaggtgccaaccccgatgccaaggaccattacgaagcaacagccatgcacagggcagcagccaaaggcaatctcaaaatgatccacatcctgctatattacaaggcgtctactaatattcaagacaccgaagggaataccccattacacctcgcgtgtgacgaagagcgtgttgaagaggcaaagttactcgtttcacagggtgcttcaatttatatagagaataaggaggagaagaccccactgcaggtagcaaagggcggattaggattgatcttgaagcggatggtggaggggtag

SEQ ID NO: 15342 - DNA, 333 bp, synthetic construct
  source 1..333: mol_type = other DNA; note = Synthetic coding sequence
atggaggggtgcgtctcaaacctcatggtctgcaacctggcgtacagtggaaagcttgaagaactgaaagagtctatccttgccgataaaagtcttgcgaccagaaccgaccaggacagtagaacggctcttcattgggcttgctccgcggggcataccgagatagtcgagtttctacttcagctcggcgttccggtcaacgataaggatgacgcagccagtaagaaccgccacgaaattgctgtgatgctgctggagggaggtgcaaaccccgatgcgaaggaccactatgaggctaccgccatgcatcgggcagcagcaaaagacacctag

SEQ ID NO: 15343 - DNA, 546 bp, synthetic construct
  source 1..546: mol_type = other DNA; note = Synthetic coding sequence
atggttctgggtgctggatggggctgggcctatcaactgcaccttctccaggccctcaagcgcaagccggacctcttcttgtgcgaaagactcgacgtgaaggcagtgttccagtgtgcagttcttgccttgaagttcccagaagcccccacggtgaaggcaagttgtggcttcttcaccgagttacttcccaggtgcggtgaagtggaaagcgtgggtaaagttgtgcaggaggatggtaggatgctgctgattgccgtgctggaagctatcggcggacaagcttcacggtcgctcatggattgctttgctgatatcctgtttgcactcaacaaacactgtttcagcttgctgagtatgtggatcaaagaggctctgcagcctccaggctttccaagtgcgcggctgtcacctgaacagaaggatacattcagtcagcagattctgagagagagggtaaacaagaggcgggttaaggagatggtgaaagagttcacattgctgtgcagaggcctacacgggaccgactataccgcagactattag

SEQ ID NO: 15344 - DNA, 2892 bp, synthetic construct
  source 1..2892: mol_type = other DNA; note = Synthetic coding sequence
atggaaaggagggaggagcagcccggcgcagcaggtgccggcgcggctcctgcattggactttactgtggagaatgttgaaaaggctctgcaccagttgtattacgatccaaacattgagaataagaatctggcccagaagtggttgatgcaagctcaggtgagtccgcaagcctggcatttttcctggcaattactccaacctgataaggtgcctgaaattcagtatttcggggccagcgctctgcacatcaagatctctcggtactggtccgatattcccactgaccagtacgagtctttaaaggcacaactgtttacgcagatcacccgttttgcgagcgggtctaagatagtgctcacacgactatgtgtggcactagcttcgctagccctgtccatgatgcccgatgcatggccatgcgcggtggcggatatggtgaggctgtttcaggccgaggattcaccagtggatggccagggcaggtgcctggcactcctggagttgctcaccgtgctgcccgaggagtttcaaacgagccgtctgcctcagtaccgcaaaggcttagttcggacttcccttgctgtagagtgcggcgcagtcttccctttactggaacagctcctgcaacagccatctagcccttcctgcgttcgccagaaggtactcaagtgcttctcgagttgggtgcagctcgaagtaccccttcaggattgcgaggccttgatccaggctgcttttgcggccctccaggattctgagctcttcgactcaagtgtggaggctatcgtgaatgcgatctcacagcctgacgcccagcggtatgtcaatactctcctcaaactgatcccactggttctcggactgcaggagcaactcaggcaggccgtgcaaaatggggacatggagacctcacacggtatatgtaggattgccgtggctcttggtgagaatcacagcagagcattactcgatcaagtcgagcactggcagtcttttctggcgctcgtgaatatgatcatgttctgtacaggaatcccggggcattatccggtcaacgaaacaacctcctcactgaccttgacattttggtatactctccaggatgatatactgtctttcgaggccgagaagcaggctgtttaccagcaggtctatcgtccagtgtatttccagcttgtcgatgttttactgcataaggcacagtttcccagcgacgaagaatatgggttctggtcatcagatgagaaggagcagtttcggatctaccgcgtggacatctccgacacacttatgtacgtgtatgaaatgctgggcgcagagctgctttctaacctgtatgacaaattgggcaggctcctgacctcttccgaggaaccatactcatggcagcatacagaggccctactgtacgggttccaatccatcgctgaaaccattgacgtgaactatagtgatgtggttcctggtctgatcggcttgattccgaggatcagtatctcaaacgtacaattagctgacactgtcatgttcacgattggcgccctaagcgagtggctcgccgatcaccccgtgatgattaacagtgtccttcccttggtcctgcatgcccttgggaacccagagctctcggtgtcttctgtaagcacactcaaaaagatctgtcgggagtgtaagtatgatctcccaccatacgcagccaacattgtagctgtgtcacaggacgtgctaatgaaacagatccataagacttcacagtgtatgtggttgatgcaagctcttggttttctactgagtgctcttcaagtcgaggaaattctgaaaaacctgcacagcctcatcagcccatatatccaacagctggaaaaactggctgaggagatccctaacccatctaacaagctggccatcgtgcatatcctgggactgctgagtaacctgtttacaacactggacatctcgcaccatgaggacgatcatgagggacccgagcttcgcaaactgcctgtccctcagggcccaaacccagtagtggtggtcctccagcaggtttttcagctcattcagaaggtcctgtctaaatggctgaatgacgcccaggttgttgaggccgtgtgcgccatcttcgagaaaagcgtcaagactctgctagacgattttgcacctatggtgccccagctttgtgagatgcttggtcgtatgtatagcacaatcccccaggccagcgctctggatttgacccggcaattagttcacattttcgctcacgagccagcacactttccaccgatagaagccctgtttctacttgttactagtgtgactctgactctttttcagcagggccctcgggatcatccagatattgtggatagtttcatgcagttgctagcccaggcactaaagagaaaaccagaccttttcctatgcgagaggctggatgtcaaggctgtttttcagtgtgctgtgctggccctgaaattcccagaagccccaactgtgaaagcttcctgcggtttttttacagaactcctccccagatgcggcgaggttgagagcgtgggaaaagtcgtgcaggaagatggccggatgctgctcattgccgttcttgaggcgatcggaggccaagcatcaagatccttgatggactgtttcgccgacatattgtttgcccttaataagcactgcttcagcctgctctccatgtggatcaaagaagccttgcagccccccgggtttccatctgctaggctctcacccgaacagaaagatacctttagtcagcagatcttgcgagagagggtcaacaagaggagggttaaggagatggtcaaagaattcactttgctttgcagaggactccacgggaccgattacaccgccgactactag

SEQ ID NO: 15345 - DNA, 2907 bp, synthetic construct
  source 1..2907: mol_type = other DNA; note = Synthetic coding sequence
atgaggctgcttcggcataccgaaagcgagcagtggttccataggttcccactgtgccctagtcttaccttttgggccccagttgccatgtggccacagacacactgcgtggggggtagatcttccggcctcactaaatggacatactctttcagtgcttctcttcaagatggctcttttccatatgatagcgttccctggcagcaaaatactaaccagccccctgggagtctttctgtggtcaccacagtttggggcgtgactaatacgagtcagtcccaggcggatgtgctgatcccccacgcgacttgtagacctggtcctctcttaatcaccgcatgggagccctacgggcaatgccagcaaccccacgaaagcagacgccagccccatggagtcggccatgatcaccagcagccccgcccccagttaccgacagtgtgcggagcagcagctgcagtcctctcccagggttggccgcgtagcgccctacatccggcagaacacgtatggcccgctcagttgccacggcaacgcggactgtgggggcagccggccgccgccgctgctgccgcagctgtggctgccgccgccgccacagcaacagctaccgctacagccaccgttgccgctttgcaggagacgcaaaacaaggacattaatcagtatggccccgccccagtgttgttgcccgacctgctgaaagatggccttggggacgaagagagaggtgcaccaattgggatgcagaacagcatgaatcccgcatccatggcagctgggatgactcctagcggtatgagcggcccaccaatgggcatgaaccaaccccgccccccaggaatctcacccttcggaacccacggccagcggatgccacagcaaacatacccggggccccgaccacagtctctccccatccagaacatcaagcggccctaccccggcgaacccaattacggcaatcagcagtacggcccaaactctcagttccccacacagccaggccagtaccccgctccaaaccccccccgcccactgaccagcccaaactatcccggtcagaggatgccttcccagccctcgtctgggcaatacccacccccaaccgtaaacatgggccagtactacaagcctgagcaattcaacggacaaaacaatacattctccggtagcagctatagcaactatagccagggaaacgttaaccggccgcctagacccgtgcccgtcgccaattacccccactcacctgtgcccggtaatccaacacctcccatgacccccgggtcctctattccgccttatctcagcccttcccaggacgtgaaaccaccattcccaccagatattaaacccaacatgagcgcactccccccaccccccgaccacaatgacgaactccgattgacgttcccggtgcgcgacggggttgtcttggagcctttccggcttgagcacaatctggctgtttctaaccacgtattccacctgcggcccaccgttcaccagacgctcatgtggtccgacctggaactacagttcaagtgttaccaccacgaggatcgtcaaatgaataccaattggccagcctctgtgcaagtatccgtcaacgctacccccctaaccatcgaaaggggggacaataagacctcccataaacctctgcacctgaagcatgtgtgtcagcctgggcgtaacactatccagattaccgtaacggcatgttgctgctcccacctctttgtgttgcagttagtgcacaggccatccgtgcggtcagtactgcagggactgctgaagaagaggctcctcccggctgaacattgcatcaccaagaagaggaacttttctagcgttgctgcatcaagcgggaataccaccctgaacggagaggatggtgtggaacagaccgctatcaaggtttcactgaagtgtccaatcaccttcagacgcatacagctgccagcccgtggtcacgattgtaagcacgtgcagtgtttcgacctcgagtcctacctccagctcaattgcgaaaggggaacatggcgctgccccgtgtgcaagactgcattactggagggtcttgaggtggatcaatacatgtggggtattctgaatgcaattcacagcgagttcgaggaggttacaatcgatcccacatgcagttggagacccgtccctatcaagagtgacttacacattaaggatgacccagacggtatcccttcaaaacgcttcaagactatgtccccttcacagatgattatgccgaacgtcatggagatgatcgcagcgctgggcccaggaccgtcaccataccccctaccgccgccccctggaggtacaaattccaatgattactccagtcagaataactaccagggccacggtaattttgattttccacacggtaaccccggcggtacatccatgaatgattttatgcatggccccccgcaattaagtcatcctcccgatatgcccaataatatggctgctctggagaaacccctgtcccaccccatgcaagagacaatgccgcatgctggctcttcggatcaaccacacccaagtattcagcagggcctgcatgtaccgcatccgagctctcagagcggcccgcccttgcaccactctggcgcacctcccccaccaccctcgcagcccccgcgacagccgccgcaggctgccccttctagtcacccacactccgatttgaccttcaacccgagctcagcacttgagggccaggctggcgcgcaaggggcatctgacatgcctgagcctagcttagacttgcttcctgaacttaccaaccccgacgagctgctgtcttatctggaccccccggacctgcctagtaacagcaatgacgacttattgagcctgttcgaaaataattag

SEQ ID NO: 15346 - DNA, 603 bp, synthetic construct
  source 1..603: mol_type = other DNA; note = Synthetic coding sequence
atggcgatggagatgagactgccagtcgcacgcaaacccctgagtgaacggctgggaagggacaccaagaagcacttagtcgtccctggcgatacaattactaccgacactgggttcatgcgaggccacgggacttacatgggagaagagaaacttatcgctagcgtggccggatcggttgaacgtgtgaacaaactgatttgcgttaaggccctcaaaacccgatacataggtgaggtcggagatatcgtcgtgggccggataactgaagtacaacagaagagatggaaggtggaaaccaacagtcggttggatagtgtactgttgctgagtagcatgaatttacctggcggtgaactgcgccgccggtcagccgaggacgaactggctatgcgaggcttcctgcaggagggggatttgatcagtgcggaggtgcaggcagttttctctgacggtgctgtttctctacataccagaagtctgaagtacggtaagactcacttccatgaccttccatgtggcgccagcgtcatcttgggcaataatgggtttatttggatataccctactcccgaacataaagaggaagaggccgggggctag

SEQ ID NO: 15347 - DNA, 792 bp, synthetic construct
  source 1..792: mol_type = other DNA; note = Synthetic coding sequence
atggcaatggaaatgagactgccagtcgcccgaaaacccctttcggaacgcctcggcagggatacaaagaaacacttggtggtgcctggagatacaatcactacggatactgggtttatgaggggccacggaacatacatgggtgaggagaaacttattgctagcgtagcgggctctgtcgaacgtgtgaacaagctgatttgtgtgaaggcactcaagacgcgatacatcggagaggtgggtgacattgtggtcggcagaattacagagaggaggcggagcgcggaggacgaactggctatgaggggctttctgcaggagggggatctgatatcggccgaggtccaggccgttttctctgatggtgcagtctcccttcatacgagatctctcaaatatggcaaactgggacaaggcgtcctcgtccaggtgtcaccatcactcgtcaaacgccagaagactcactttcacgacctgccctgcggggcctcagttatcctgggaaacaatggttttatatggatttatccaacgcctgagcacaaagaagaagaggccggaggattcatcgcaaacctcgagccggtttcactggcggatagggaggtcatatcccgtctgcggaactgcatcatcagtctggtcacacagcgcatgatgttgtatgatacgagtatactgtactgttacgaagcctccctgccccatcagattaaagacattttgaagccagaaatcatggaagagattgtgatggaaaccaggcagcggctcctggaacaagaaggctag

SEQ ID NO: 15348 - DNA, 858 bp, synthetic construct
  source 1..858: mol_type = other DNA; note = Synthetic coding sequence
atggccatggagatgcgtctcccagtcgctagaaagccattatccgagcgattgggccgggacacaaagaagcatttagtcgtacccggtgacaccattaccacggacactgggttcatgcgcggccacggaacttatatgggcgaggaaaaactaattgcctctgtggccggctctgtggagagagttaacaaactgatctgtgttaaagcactcaagactcgttacataggcgaggtcggcgatatcgttgtgggtcgcatcacggaggtgcaacagaaacgttggaaggtggaaactaacagcaggcttgattcggtgcttctgctgagttctatgaatttgccaggtggggaattacgcaggcgcagtgcagaagatgaactggcaatgcgcggatttttacaagagggggatctaatttcagccgaagttcaggccgtattctctgatggcgcggtatctttacacacacgatctttgaaatacgggaaagtgagtccaagcctggtaaaaagacagaagactcacttccatgacctaccctgcggagctagcgtgattctcgggaataatggatttatctggatctatccaaccccggaacataaagaagaagaagctggcggtttcatcgccaacctggaacccgtgagcctggctgatcgggaagtgatttctaggctgaggaactgcattatttctcttgtcactcagcgcatgatgctttatgacacatctattctctactgttatgaagccagtcttcctcaccagataaaagacattctcaagccagagatcatggaagaaattgtcatggaaacaaggcaacgacttctcgagcaggaaggatag

SEQ ID NO: 15349 - DNA, 882 bp, synthetic construct
  source 1..882: mol_type = other DNA; note = Synthetic coding sequence
atggcaatggaaatgaggctgcccgtagctaggaaaccactcagtgaacggttgggccgcgacacaaaaaaacatctcgtggttcccggcgacaccatcacaacggacacaggttttatgagaggacacggcacgtatatgggggaggaaaagctgattgcctctgtggccggttcggtcgaaagagtgaacaagctgatatgcgtcaaggctctaaaaacaaggtatatcggagaggttggcgacatcgtggttggacgcattacagaggtgcagcagaagcgctggaaggtcgagactaattcgcgtctcgacagcgtgctcttgcttagctccatgaatctgccagggggggagctgcgtcgccgtagcgcagaagatgaactcgctatgaggggcttcctgcaggagggggacctgatctctgccgaagtgcaggccgttttctccgatggcgccgtttcgctgcatactagaagcctgaagtatggaaagcttggacagggcgttttggtgcaggtctcaccgtccctggtaaaacggcagaaaacgcatttccacgacctgccctgcggcgcttctgtgatcctcgggaacaacggcttcatctggatctaccctacccctgaacacaaggaggaggaagcaggggggtttatcgcaaatttggaaccagtttccttggcagacagggaagtgatctcccgtctccgtaactgtatcatctccctggtgacccagcgcatgatgctgtacgacacgtcaattctgtactgttatgaagcctcacttccgcatcagattaaagacatccttaagcccgaaataatggaagagatcgttatggaaactcgacaacgcttgcttgagcaggagggttag

SEQ ID NO: 15350 - DNA, 3195 bp, synthetic construct
  source 1..3195: mol_type = other DNA; note = Synthetic coding sequence
atggcctctgagtctgagaccctgaatcctagcgccaggattatgacgttttatcctacgatggaagagtttcgcaatttctcgagatacatagcttatattgaatcccagggtgcacatcgtgctgggctcgcaaaggtggtgcctccaaaggaatggaaaccccgagcctcttatgacgacatcgatgaccttgtcatcccggcaccaattcaacaactggtgacgggtcagtccgggctatttactcagtacaatatccagaagaaagccatgactgtgcgcgagtttaggaagatcgccaattcagataaatactgcactccaagatactcggaattcgaggagctcgaacgtaagtactggaaaaacctcaccttcaacccgccaatctacggagccgatgtgaatgggactttgtacgagaagcacgtggacgagtggaacatcggtcgccttcgcactatactcgacttagtagagaaggagagcgggatcactattgagggcgtgaataccccctacctttactttggtatgtggaagacttcattcgcttggcacacagaagatatggatttatacagtatcaactacttgcactttggtgagcctaagtcgtggtatagcgtccctcccgagcatggcaagaggttggagagactcgccaagggcttcttccccgggagcgcacagagttgcgaggccttccttagacataaaatgacgctcatatcgcccctcatgctcaagaaatacggtattccattcgataaggtgacacaggaggcaggcgagttcatgattacctttccctacgggtaccacgctggttttaatcatgggttcaactgcgcagagagtaccaacttcgctacacggcgttggatcgaatacggcaagcaggccgtgctatgctcttgcaggaaagatatggttaagatctccatggacgttttcgtgagaaaattccagcctgaacgttacaaattgtggaaagcaggcaaggataacaccgtgatcgatcacaccctgcctactccagaagctgctgaattcctgaaagaaagtgagctgcctcccagggccggtaatgaagaagaatgccctgaggaagatatggagggcgtagaagacggcgaagaaggggacctgaaaacaagcctggcgaaacacaggatcggcacaaaacgccatcgggtgtgtttggaaatcccacaagaggtgagccaaagcgaattattccccaaggaggatctcagctctgagcagtacgagatgactgaatgccctgccgccctggcaccagtgaggcccactcacagcagtgtcaggcaggttgaggacggactgacttttcccgattattccgacagtaccgaggtcaagtttgaagaacttaaaaacgtcaaactggaggaagaagatgaagaagaggagcaagcagcggcagcactagacctctctgttaacccagcttcagtcggaggtcgcttggttttcagcggttctaagaaaaagtcgagctccagcctcgggtccggatcgagtcgagatagcatttcatcagattcggaaactagtgagccactcagctgtcgcgcgcaaggtcagactggtgtattgactgtacattcctatgctaagggtgacggcagggtgacagtgggcgagccttgcactaggaaaaaaggatcagcagctcggtccttttcagaacgcgagctggctgaagttgctgatgaatacatgttcagcctagaggaaaataaaaaatcaaaaggtcggcgtcagcctttgtcaaagctccccaggcatcacccgctagtgcttcaggagtgtgtgtcagatgatgagacatccgaacagctcacccctgaggaggaggccgaggagactgaagcctgggccaaaccacttagtcagctgtggcaaaatcgcccgcccaatttcgaggcggaaaaagagtttaatgagaccatggcccagcaggcaccccattgcgctgtgtgcatgatttttcaaacctatcaccaggtcgagttcgggggcttcaaccagaattgcgggaacgcatccgatctggcgccccagaagcaacggactaagcctctcatcccggagatgtgttttacttccacgggctgttccaccgatattaacctctcaaccccctacctcgaggaagacgggactagcattcttgttagttgcaagaaatgtagtgtgagagtgcacgcatcatgttatggggtgccacccgccaaggcctcagaagattggatgtgttctaggtgttccgccaacgccctggaagaagattgttgcctgtgctctttgcggggcggagccctacagagggcaaacgatgatcggtgggtgcacgtctcctgcgcggtcgcgatcctggaagcaagatttgtgaacatcgcagagcgtagccctgttgatgtttcaaagataccacttcctcgattcaaactcaaatgcatcttttgcaaaaaaaggaggaaacgcaccgcaggctgctgcgttcagtgtagccatgggcgctgcccaacagcgttccatgtgagctgcgcccaggctgccggcgtgatgatgcagcccgatgactggccttttgtcgtatttattacatgctttaggcacaaaatacctaatctcgagcgcgcgaaaggagccctccagtccatcactgccggacaaaaggtcatctcgaaacataaaaacgggcgcttctatcaatgcgaggtcgtgaggttgactactgaaacattctacgaggttaactttgacgatggctctttttcagataacctgtatccggaagacatcgtgtcccaagattgtcttcaattcggtccaccggccgaaggtgaggtcgtgcaggtgagatggacagatggacaagtgtatggcgccaagttcgtggcgtcccacccaatccagatgtatcaggttgaatttgaggatggatcacagctggtcgtgaagcgggacgacgtttataccctggatgaggaactgcccaagcgcgtgaaatcgcgcctgtccgtagcgagtgacatgcgcttcaacgaaattttcacggaaaaggaagtcaaacaagagaagaagcgacagcgcgtgattaacagccggtatcgtgaggattatatagagcctgctctgtaccgagcgatcatggaatag

SEQ ID NO: 15351 - DNA, 2745 bp, synthetic construct
  source 1..2745: mol_type = other DNA; note = Synthetic coding sequence
atgggtgacagtagagacctttgtccgcacctggacagcataggcgaggttactaaggaagatctgctcctcaaatcaaagggcacatgtcagtcctgtggtgtgacaggtccaaacctctgggcatgcttacaagttgcttgcccatatgtcggctgcggcgaatctttcgctgatcacagtactatccacgcacaggcaaaaaagcataacctgaccgttaacttgacgacatttcggctgtggtgttacgcctgtgagaaagaagtttttctggagcagagactggctgcgccccttctgggcagctcctccaaatttagcgagcaggactccccaccaccatcccaccctttgaaggccgtgccgattgctgtagcggacgagggagagtccgaaagcgaggacgatgatttaaagcctcgtggtcttaccggcatgaagaatctgggcaattcatgttacatgaacgcggccttgcaagcactctctaactgtcctccactgacccagttcttcttggaatgtgggggactcgtccggactgacaaaaagcctgccctttgcaagagctaccaaaaactggtgtctgaggtgtggcataagaagcgaccgtcctatgtagttccaacgagcctcagccacgggatcaagctcgttaatcccatgttccgaggatatgctcagcaggacacccaagaatttttaagatgtctgatggaccagctgcatgaagagctgaaggagccagtcgtggccactgtcgccttaacggaggctcgggactccgactcatctgacacagacgaaaagagggagggcgaccgatcaccgagcgaggacgagtttctgtcctgcgatagtagcagtgacaggggggaaggggatggacaaggccgggggggcgggagttctcaggcagagactgaactgttgatacccgatgaagcaggaagggcgatctccgaaaaagagcggatgaaagacagaaagtttagttgggggcagcagaggactaactcggaacaggttgatgaagacgccgatgtggatacggctatggctgccctggatgaccaacctgccgaagcacaaccaccatcgcccagatcttcctctccttgccggactcctgagccagataacgatgcccaccttcgaagctcctcacggccttgtagcccagtgcaccaccatgagggccacgccaagctgagttcatcccctcctagagcaagcccggtgcggatggctccatcttacgtgctgaagaaagcgcaggtgctgtctgccggatcacgaaggcgcaaggagcagaggtatcgaagcgtgatatccgacatttttgacggaagcatccttagtttagtccagtgtttgacatgcgatagggtctcaactacagtggagacgtttcaggacttatcactgcctattccgggaaaagaagatctggctaagctgcactctgccatctatcagaatgtcccagctaagccgggcgcgtgtggcgattcctacgcagcgcagggctggctcgccttcattgtcgagtatattagaagattcgtagttagttgcactccttcatggttctggggacccgttgtgacccttgaagactgcctggccgcattttttgcagccgacgaacttaagggcgacaacatgtactcctgtgaacggtgcaaaaagctgagaaacggtgtgaaatactgtaaggtgctgcggctacccgaaattctttgcatacacctcaaaaggttccgtcatgaagtgatgtactcattcaagattaacagccacgtcagtttccctttggagggtctggatcttagaccatttctggccaaagaatgcacctctcaaattaccacttacgacctgctatccgtcatctgccaccacgggacggctgggtctggtcactatattgcatactgccagaatgtcattaacggacaatggtacgagtttgatgaccaatacgttaccgaagtccatgaaacggttgtccaaaacgccgaggggtacgtgctgttctacaggaaatcatccgaagaggcaatgcgggaacgtcagcaggtggtcagtcttgctgctatgcgagagccatctcttttgagattttacgttagccgagagtggctcaataaattcaatacgtttgccgaacctggccctataaccaaccagaccttcctctgctcccacggggggatacctccccataaataccattacatcgacgaccttgtcgtgattctacctcaaaacgtctgggaacacctgtacaatcgcttcggcggcgggccggccgtcaatcatctgtacgtctgtagtatctgccaggtggaaatcgaggccctcgcgaaacgcaggagaatcgaaatcgacaccttcatcaaacttaataaagcatttcaagcagaggagtcccctggagtcatatactgtatcagcatgcagtggtttcgagaatgggaagcattcgttaaggggaaggataacgagcctcctgggcctatcgataatagccggatcgcccaggtcaaaggttccgggcacgtccaactgaagcagggcgccgactatgggcaaatctccgaagaaacatggacctacctaaacagtctctatggcggcggcccagagatcgccatccggcagtcagtggcacagcccctcggcccagaaaatttgcacggggaacagaaaatcgaggccgagacacgcgccgtgtag

SEQ ID NO: 15352 - DNA, 1215 bp, synthetic construct
  source 1..1215: mol_type = other DNA; note = Synthetic coding sequence
atggactttaatatgaaaaaactggcaagcgatgcaggcatcttctttactcgggccgtgcagtttactgaggagaagttcggacaggcagagaagactgagctggacgctcactttgaaaatctgctggccagggctgatagtactaaaaactggacagagaagatccttcgacagactgaggtgttgctccagcctaaccctagcgcgcgcgtggaggaattcctgtacgagaagctggaccgcaaggtgcctagccgagtgaccaacggcgagctgcttgcacagtacatggctgatgcggccagtgagttgggacccactaccccatacggcaagaccctgattaaagtagctgaagctgaaaagcagctgggagcggcagagcgggacttcattcatactgcgtccattagtttccttacacccctgcggaactttctggagggggattggaagactatatcaaaagaacgccgcctgttgcagaatagacgcctggatctcgatgcttgcaaagctcgcctgaagaaagccaaagctgccgaagccaaagcaacgtgcgagggcgacaccgtgccagacttccaggagactaggccacgaaactacatactgagcgcatccgccagcgcactgtggaatgatgaggtagataaggcagaacaggaactccgggttgcccaaacagagttcgacagacaggctgaagtgacaaggctacttctcgaaggaattagttccacccacgttaatcacttaagatgtctccacgaattcgtgaaatctcaaacaacttactatgcgcagtgctatcggcacatgctggacctccaaaaacaactaggctcttcccaaggcgcaatctttccagggaccttcgtgggtaccacagagccagcatccccacctttaagttccaccagcccaacaacagcggcggcaacgatgcccgttgtcccctcagtcgcatccctggcaccaccaggggaggctagtctgtgtcttgaggaggtggcgcctccagcaagtgggacccgcaaggccagagtgctctacgactacgaggccgccgacagtagcgaactggcactcctggccgatgaattgataactgtgtactcattaccaggcatggatccagactggctgattggggagcgtggaaacaaaaaaggtaaagtcccggtgacatacctggaactcttgtcatag

SEQ ID NO: 15353 - DNA, 1188 bp, synthetic construct
  source 1..1188: mol_type = other DNA; note = Synthetic coding sequence
atggacttcaatatgaagaagcttgcgtccgacgccggcattttctttacacgcgccgttcagttcactgaagaaaaattcggacaggccgaaaagaccgagctggacgcccactttgagaatcttcttgcccgtgccgactctaccaagaattggactgaaaagatcctgcggcagactgaagtgcttctccagcccaacccctcagctcgcgtcgaggaatttctgtatgagaaactagatcggaaagtgcctagcagagtgactaacggcgagctccttgcacagtacatggccgacgctgctagcgagcttggacctacgaccccctacgggaagacgcttatcaaggtcgcggaggctgagaagcagctgggcgccgcagaacgggactttatccatacagccagtatttcgtttctcacacccctaagaaactttctggagggtgactggaagactatttccaaggaaagaagactgctgcagaaccgccgtctggatctggatgcttgcaaggccagattaaaaaaagctaaggctgctgaagccaaggccaccactgtgccggacttccaagaaacaagaccaaggaactatattctctcagcttccgcatcagccttgtggaacgatgaagtcgataaagcagagcaagagctgagggtcgcacaaacagagttcgatcggcaggcagaagtgacacgcttactcctagaaggaatcagtagtacgcacgttaaccacctgagatgcctccacgagttcgttaaatcacagactacttactacgctcagtgctacagacacatgctggacctacagaagcagctggggaggttccctggaacatttgtgggtaccaccgagcccgcgagtcctccactttcctccacatctcctacaaccgccgcagctacaatgcccgtagtgccttccgttgcatctctggcacctcctggcgaggcatccctttgtctggaagaagtcgcccccccagccagcggcacgagaaaagcaagggtgttatacgattatgaggccgcagactccagcgagctggcactgctggcagacgaattgatcacggtatattctctgcctggaatggaccccgactggctgattggtgagaggggtaataaaaaggggaaagttccggtgacatacctggaactgctgtcttag

SEQ ID NO: 15354 - DNA, 1188 bp, synthetic construct
  source 1..1188: mol_type = other DNA; note = Synthetic coding sequence
atggattttaacatgaagaaactggcgtccgatgcagggattttctttactcgggctgttcagtttaccgaggagaaattcggacaggccgagaagaccgagttagatgctcacttcgagaatcttctggctcgtgctgatagcactaaaaactggactgaaaagatcctacgacagacagaggtgctcctgcagcccaatccctctgctcgcgtggaggagtttctttacgagaagcttgatcgtaaagtcccaagccgggtgactaatggggagctgctggcccaatatatggccgatgccgccagcgaactaggccctaccacaccatatggcaagactctcattaaggttgccgaagctgaaaaacagcttggcgcagctgaacgcgatttcatccacacagctagcatttccttcctgacgcctctccgcaacttcctcgagggcgattggaaaactatcagtaaggagcgtcggctgcttcagaatagaagactcgatttggatgcttgcaaagcccggttaaaaaaagcaaaagccgcagaggcaaaggctacaacggtgcctgatttccaagagacccgcccgcgtaattacatcctctctgcctcagcttccgccttgtggaatgatgaggtggataaggctgagcaggaactccgcgtggctcagactgagttcgatcgccaggcggaggtcactaggctgttgttagagggaatctctagtacgcatgtcaaccacctgcggtgccttcacgagttcgttaagtcccagactacctactatgcccagtgttatcgacacatgcttgatctgcaaaaacagttagggcgatttcccggcacatttgtcggaaccaccgagcccgcaagtccacctctgagctcaacctccccaactactgcggccgctactatgcccgtcgtgccatcggtcgcctcactggcccccccaggagaggccagtctgtgcctggaagaggtggcgcctcctgcctctggtacgagaaaggctcgcgtgctgtacgattacgaagcagccgactccagtgaacttgctctactggcagacgagctcattactgtctactcactcccagggatggatcctgactggctgattggagagaggggcaacaagaaaggaaaagtccccgttacctaccttgagcttctgagctag

SEQ ID NO: 15355 - DNA, 615 bp, synthetic construct
  source 1..615: mol_type = other DNA; note = Synthetic coding sequence
atgtcctggacatgccctaggtgccaacagcctgtattcttcgccgagaaagtgtcctctcttggcaaaaactggcacagattttgcctcaagtgcgagaggtgccatagcatccttagccctggggggcatgcagaacacaacggaaggccatattgccataaaccctgttatggagcactgttcgggccccgaggcgtgaatataggtggggtcggaagttatttgtataaccctcccactccctcccccggatgcactacacccctctcaccatcttcattctcaccaccgagaccgaggactggattaccacaaggaaagaagagcccaccccacatgaagacatttacaggagaaacttctctgtgtcctgggtgcggagaacccgtctattttgccgagaaagtcatgagtctgggccggaactggcacagaccctgcttgcgctgccagaggtgccataagacattaacagcggggtcccatgctgaacacgacggagtcccttattgtcatgtgccgtgctatggttatctttttggccccaagggagtcaacatcggtgatgtgggctgttatatttatgacccggtgaagatcaaattcaagtag

SEQ ID NO: 15356 - DNA, 1221 bp, synthetic construct
  source 1..1221: mol_type = other DNA; note = Synthetic coding sequence
atggaaagtcttaggggctatacccacagtgatattgggtaccgctctttggccgtgggtgaagacatagaagaagtgaacgatgaaaagttgactgtgaccagcctgatggcacgaggaggtgaagatgaagagaacacacgctccaagccagagtacgggaccgaggcggagaacaatgtaggaaccgagggatccgtcccatctgacgatcaagatcgtgagggaggtgggggccacgaacccgaacagcagcaggaggaaccccctctgaccaaacccgaacagcagcaagaggagcccccactgctcgagttaaaacaagagcaggaggaacccccacagactaccgtggagggacctcagcccgctgaggggccccagaccgctgagggcccacagccccccgaacgcaagagacgcagaaggactgcttttactcagttccagcttcaggagctagagaattttttcgatgaaagtcaatacccagacgtggtggccagggagaggctggctgctcgcctgaatctgacggaagatcgggtgcaggtgtggttccaaaatcgacgagcaaagtggaaaaggaatcagagagtgctgatgctacggaacacggcaactgccgacctggcccaccctttggatatgttccttggcggcgcctattacgccgcgcccgcgctggacccagctctctgtgtgcatctggtacctcagctaccccgcccccccgttctccctgtcccaccgatgcctcctcgccctcctatggtgccgatgcccccgcgccccccaatagctccaatgcctcccatggcaccagtgcctcctggctcgcgaatggcgcccgtccccccaggtcccaggatggctccggttcccccttggccgcccatggctcccgtgccgccatggcctcccatggctcccgtgcctaccggaccacctatggcacctgtgccccccggacccccgatggcgcgggtcccacccggtccacccatggctcgggtgcctcccggacctcctatggcacctctgccgccgggacctcctatggcccccttaccccctggtccgcctatggcccctctgccacccggccctcctatggcacctctgccgccaaggtctcacgttcctcatactgggctggcaccagtacatattacttgggccccagtgatcaactcatactacgcatgcccatttttctag

SEQ ID NO: 15357 - DNA, 873 bp, synthetic construct
  source 1..873: mol_type = other DNA; note = Synthetic coding sequence
atgagtccttcggccaaaaagcgacccaaaaacagtcgagtatctaagatgcaggacgaaaaactccgcgatgaaacagagcagccagtttcaaaggttattgagcgaaacaggctacgaaccgtgcttaagaacttgtccctattaaaacttctgaagagctccaaccgacgcatacaggagctgcacaaactggccaaaaggtgctggcatagcttattatccgtcccgaagatcctgagaatatcaagtggggagaactccgcatgtaataaaaccaagcagaataacgaggagttccaggaaatcggttgctccgagaaagagcttaagagcaaaaagcttgagagtaccggggatccaaagaagaaggaatataaagagtggaagagccaagtgcagagtggaatgagaaacaaggagaaaacatctctcgcggctatgccccgaaaagaaaaacacatagaacctgaggtccctaggacctccagggacgactccctcaatcctggcgtgcaaggtcgccagccccttaccgaagggccacgcgtgattttcattaaaccatacaggaacaggacccctatggggcacatgaagcaactggatgtggccgatcagtggatctggtttgaggggttgcctactcgcattcaccttcctgcacctagagttatgtgcagaagcagcaccctgcgatgggtgaagaggcgctgtacccggttttgtagcgccagcttggaaatgccaatgtggcacccatataaggtggatgtgacatggacccgcgctaggggcgcttctcgcggttggaggtcccggcaccaactgaagggacggaatggctggagaaatagtcgcgtgtacaaatag

SEQ ID NO: 15358 - DNA, 1644 bp, synthetic construct
  source 1..1644: mol_type = other DNA; note = Synthetic coding sequence
atggcaggaacaaaaaataaaacaagagcacaggcaaagaccgaaaagaaggccgccatccaagcaaaagctggtgcagagagggaagctaccggcgtggtaaggcctgttgcgaagaccagagccaaggcaaaagcgaaaacaggtagtaagactgacgccgtcgcagagatgaaggccgtctcaaaaaacaaggtggtcgcagagaccaaagaaggcgccctctctgagcctaaaaccctcggtaaggccatgggtgatttcacaccaaaagccgggaatgagagcactagctctacctgtaaaaacgaggcaggtactgatgcatggttttgggcgggagaggaggctaccatcaatagctggttctggaacggcgaagaggccggtaattctttttcaaccaagaacgataagccagagatcggagcacaggtgtgcgctgaggaactcgaacccgccgccggtgctgactgcaagcctcgtagtggagccgaagaggaggaagaggagaacgtaatcggaaactggttttgggaaggcgacgatacctccttcgatcccaaccccaagccagtgtcacgtattgtgaagcctcagcctgtgtatgaaataaacgaaaagaacaggccaaaagactggtccgaggtgacgatctggcctaatgccccagcagtgacccctgctgttcttggttttcggagtcaggcgccctctgaggctagcccgcccagctatattgtactggccagtgctgaggaaaacgcatgcagcctgcccgtggcgaccgcctgtcggccctctcggaacactagaagctgctcccagcccattccagagtgccggtttgacagtgacccatgcatacagactattgatgagataagacgacaaattaggatccgcgaagtgaacgggatcaagccctttgcttgcccttgtaagatggaatgttacatggattccgaggaatttgagaaactcgtaagcttgttgaagtccaccacagatcctctaattcataaaatcgcaaggatcgccatgggcgtccataatgtccacccattcgctcaagaattcatcaatgaagttggtgtggtcaccttgatcgaatccctgttgagcttcccatctcctgaaatgaggaaaaagaccgtgattacgctgaatccaccctcaggcgacgaacggcaaaggaagattgagcttcacgttaagcacatgtgcaaagaaaccatgtcgttccctttaaactccccaggtcagcaatctggtttgaagattctgggtcaactcaccactgattttgtacaccactacatcgtggctaattactttagcgagttgttccaccttttgtcttcaggaaactgtaagacacgcaacctcgtgcttaaactgctgctaaatatgagcgagaatcctacagcagctcgcgacatgatcaacatgaaagctttagcggctctgaagctgatcttcaaccaaaaagaggccaaagccaatttggtcagtggcgttgccattttcatcaacattaaagaacatatcagaaagggaagcattgtggtggtagatcacctctcttacaatacacttatggctatcttcagagaagtaaaagaaatcatagagaccatgtag

SEQ ID NO: 15359 - DNA, 1881 bp, synthetic construct
  source 1..1881: mol_type = other DNA; note = Synthetic coding sequence
atgtgctccacactgaaaaaatgcggcacatatcgcacagaggtggcagaatgtcatgaccacggatccactttccaggggagaaaaaaaggcgggtcttccttcagagacaacttcgataaacgctcctgtcactacgagcacgggggctacgagagacccccgtcccattgccaggagaacgacggaagcgttgagatgcgcgacgtccataaagatcaacagcttcgtcacaccccttactcgatcagatgcgagcggagaatgaagtggcattccgaagacgaaatccgaattacgacctggagaaaccggaagccaccagagaggaagatgtcgcagaatacacaggacgggtacacccgtaactggtttaaggtcaccatcccgtatggcatcaaatacgataaagcctggttgatgaatagcatccagagtcactgctcagatcgctttacccccgtggactttcactatgtccgcaatcgagcgtgtttcttcgtgcaggacgcatccgcagcatctgccttgaaagacgtctcttataaaatctatgatgatgagaatcaaaagatctgcatctttgtcaatcattctaccgccccatactctgtcaagaataaactgaaacctggccagatggaaatgcttaagctgacaatgaataaacgttacaatgtatcacagcaggctctcgatctgcagaaccttcgtttcgatcccgatctcatgggccgtgatattgacatcatcctgaaccgtcggaattgtatggctgcaaccctgaaaattatcgagcggaatttcccggaactcctttccttaaatctgtgtaacaacaagctttatcagctagacggtctcagtgacattaccgaaaaggcccctaaagttaaaaccctcaacctttccaagaacaaactcgagagtgcctgggaactgggcaaggtgaaagggctgaagctggaagagctttggctggaggggaaccctctgtgttccacattttcagaccaatctgcctacgtctcagctattagggattgcttccctaaactgctgcgccttgacggaagggagctgtccgcacccgtcatagttgacattgacagctccgaaactatgaaaccctgcaaggaaaactttacaggctccgagactttgaagcatttggtgctccagtttctgcagcaatactacagcatctatgactcaggagacaggcagggccttttgggggcctatcacgacgaagcctgcttcagcctggccattccctttgaccccaaagattctgcccccagcagcctgtgcaagtactttgaagacagtcgaaatatgaagacactgaaggacccatatcttaaaggggagctcttgaggcggaccaagcgcgatatcgtggactccctctctgccctgccaaagacccagcacgatctctcatcaatcctcgtggacgtctggtgtcagacggaaaggatgttgtgtttttccgtgaacggcgtgttcaaggaagtggagggccagagccagggcagcgtgctcgctttcacccgcacatttatcgctacaccaggcagctctagcagtctatgcatcgtgaacgacgagttgtttgtgagggacgccagccctcaggagacacagtcagcattctcaatacccgttagcacactgtcaagttcaagcgagccctccctatcccaggaacagcaggaaatggtccaggctttcagcgcacagtcaggcatgaagcttgaatggtcccagaagtgccttcaggataatgagtggaattacacacgcgcagggcaggcttttacaatgctccagacagagggaaagatccccgccgaggccttcaagcagattagctag

SEQ ID NO: 15360 - DNA, 1881 bp, synthetic construct
  source 1..1881: mol_type = other DNA; note = Synthetic coding sequence
atgtgttccaccttgaagaaatgtggaacatacaggaccgaagttgcggaatgccatgatcacggcagcacattccaaggaagaaagaaggggggatcttcttttcgagataattttgataagcgcagttgtcactatgagcacggaggctatgaaaggcctccatcacattgccaggaaaatgatggttctgtcgaaatgagagacgtccacaaggaccagcagctgcggcacaccccgtactccattcgttgtgaacggcggatgaaatggcacagtgaggacgaaattcgtataacaacctggaggaatcggaaaccccctgaaagaaagatgtctcagaatactcaagacggatataccaggaattggttcaaagtgaccatcccttacggcattaagtatgataaggcatggctgatgaactcaatccagtcccactgttcagaccggttcacgcctgtggacttccattatgtgcggaacagagcatgtttttttgtccaggatgcaagtgccgcgtccgcactgaaagatgtatcgtataagatctatgatgatgagaaccagaagatttgtatcttcgtgaatcattctaccgccccatattcagtgaagaacaagctgaaacctggacagatggaaatgcttaaactcactatgaataagagatacaacgtgtcccagcaagcccttgatttgcagaatttacggttcgacccagacctgatgggcagggatattgatatcattttgaaccggcgaaactgcatggcagctactctgaagataattgagcgcaacttccctgaactgttgagtcttaatctctgtaacaacaaactgtatcaactggacggtttgtctgatatcaccgaaaaagccccaaaagtcaagaccctcaatctcagtaagaacaagctggaatcagcgtgggagttggggaaggtgaagggcctgaaactggaagagctgtggcttgagggaaaccctctgtgttccacattttctgaccaatctgcgtatgtctccgccatccgggattgcttcccaaaattgctccgtctcgatggaagagaactgagtgcacctgtgatcgttgacatcgacagttcggagacaatgaaaccctgcaaagaaaacttcaccggaagtgagacccttaagcaccttgttctccagtttctgcagcaatactatagcatctacgactccggcgatcgtcaaggcctgctaggagcctatcatgacgaagcttgtttttccctggcaatcccatttgaccctaaagacagcgcaccctcctccctgtgtaaatactttgaagactcaagaaacatgaagaccctaaaagatccttacctcaagggtgaattgctccgcaggacaaagagagacattgtggactccttgtctgccctgcccaagacacagcacgacctcagttctatactcgtagatgtctggtgtcagaccgagcgtatgctgtgtttcagtgtgaacggagtttttaaggaggtggagggccagtcccagggcagcgtcctcgccttcaccaggacattcatcgcaacccctgggtctagctccagcctctgtatcgtgaatgatgaactgtttgtcagagacgcctcgccgcaggaaacacagagtgcttttagcattcctgttagcactctaagcagctcttcggaaccatctctatcgcaagagcaacaggagatggtacaagcattctccgctcaaagcggtatgaagttggagtggtcacagaagtgtcttcaagacaatgagtggaattacacccgcgcgggccaggcgttcacaatgttgcagactgagggcaagattcccgctgaagccttcaagcagatttcctag

SEQ ID NO: 15361 - DNA, 1230 bp, synthetic construct
  source 1..1230: mol_type = other DNA; note = Synthetic coding sequence
atgaagtggcacagtgaggatgaaatacgcatcacaacttggcgaaatcgtaaaccccctgagaggaagatgtcgcaaaacactcaagacgggtacacacgcaactggttcaaagttactatcccctacggtatcaagtatgacaaagcttggcttatgaattccatacagtcacattgcagcgaccgtttcactcccgtggatttccactacgttaggaatagagcctgctttttcgtccaggatgcctctgctgcatcagctctgaaggatgtatcatacaagatctatgacgacgagaatcaaaaaatttgcatctttgtcaatcacagcaccgcaccttattctgttaaaaacaagctgaaaccaggccagatggaaatgttgaaacttacaatgaataaacgctataacgtctcacaacaggcgctggatctgcagaacctgcgattcgatccggacctgatgggcagagacattgacatcattctgaaccgacgcaactgtatggccgctactctcaagatcatcgagaggaatttccccgagctcctgtcattgaacctatgtaacaacaagctttaccagcttgacggtttatccgacatcacagagaaggcaccaaaagtcaaaaccttaaatcttagcaagaataagctcgaaagtgcttgggagctcggtaaggttaaaggcctaaagctggaagagctgtggctcgaaggcaatccgctgtgtagtacattctccgaccagtcagcatatgtatctgccatcagggactgctttcctaaacttttgcggctcgacggccgcgaactctccgcacccgtgatcgtagacatcgatagttcggaaacaatgaaaccatgcaaggaaaacttcacaggatctgaaactcttaaacacctggttttacaattcctgcagcagtactactcaatctacgacagtggggaccgacagggtctgctaggcgcttaccatgacgaagcttgtttctcactggcaattcctttcgacccaaaggatagtgcccctagttcattgtgcaagtacttcgaagacagtagaaatatgaagactctcaaggacccctatctgaagggagagcttttgcgcaggactaaacgggatatcgtggactctctctccgcgctgcctaagactcaacacgacctgtcttctatcctggttgatgtttggtgtcagactgtcccaagtggacagtag

SEQ ID NO: 15362 - DNA, 1326 bp, synthetic construct
  source 1..1326: mol_type = other DNA; note = Synthetic coding sequence
atggcttcagttgccgccgctcgagccgtccccgtaggctctggcctcagaggcctccagaggactctccccctggtggtgatcctgggggccactggcactgggaaatcaacactcgcactgcagctcggtcagcggttagggggtgagatcgtgagcgctgactcaatgcaagtgtacgagggccttgacattatcacaaacaaagtcagcgcgcaggaacagcgaatttgtagacatcatatgatttcatttgtggaccctctggtgacaaactacacagtcgtggatttccggaacagggccacagcactgattgaagacatttttgcaagggacaagattcccatagtggtaggtggcaccaattactacatcgagtcactgctctggaaagtcctagtgaatacaaaaccccaggaaatggggacggagaaggtgatcgataggaaggtggaactggagaaagaagacggtcttgttctacataagagactctctcaggttgatcctgagatggcagcaaaactccaccctcacgacaaaagaaaggtggcgagatccctccaggtgtttgaagagacaggcatttctcactcagaattcttgcacagacaacacacagaggagggaggcggaccattggggggaccactcaaattctcaaatccctgcatcctctggctgcacgccgatcaagcagttctggacgagaggctggacaaaagagtggacgacatgttggctgcgggtctgttggaggaactgcgggactttcatcgccgctacaaccagaaaaacgttagcgaaaattcgcaggactaccagcacggaatctttcagtcaattggctttaaggagtttcatgagtacctgatcacagaaggcaagtgcacattagagacctcgaaccagctgctaaaaaaggggccaggccccatcgtgccccctgtgtatgggctggaagtctcagacgtgtcaaagtgggaggaatccgtgctggaaccggcgcttgaaatcgttcaaagtttcattcagggacacaagcctaccgccacccccatcaagatgccatacaacgaagccgagaataagaggtcctatcatctgtgtgatctgtgcgatagaatcattatcggagatagggagtgggccgcacatatcaaaagtaaaagtcatttgaaccagcttaaaaagcgccgccgcctcgacagcgacgcagtgaatacgattgagtctcagagcgtgtcccccgatcataataaggagcctaaggagaaggggtcccccgggcagaacgatcaggagctcaaatgcagcgtctag

SEQ ID NO: 15363 - DNA, 1158 bp, synthetic construct
  source 1..1158: mol_type = other DNA; note = Synthetic coding sequence
atggcaagcgtagctgcagcccgggcggtgcccgttggctctggactacggggtttgcagcgaactctgcccctcgtcgtcatcctaggggcgaccggcaccggaaagtcgacactggctctgcagctaggacagagactgggcggcgagatcgtttccgcagattctatgcagccccaggagatggggaccgaaaaggtgattgatcggaaggtggaactcgaaaaagaggacggacttgtgcttcataaacggctgtcacaagtagaccccgaaatggcagccaaactgcacccccatgataagcggaaggtcgcacgatcactccaggttttcgaggagactggtatctcccactccgagtttctccaccgccagcacaccgaggaaggcggcggaccgctggggggacctttgaaattctccaatccatgtatcctgtggctccacgctgaccaagccgacgaaagactagataagcgcgtcgacgatatgctcgccgcaggattgctggaggagctccgcgacttccacagacgctacaaccagaaaaatgtgtcagaaaactcacaggattatcagcacgggatctttcagagcattggattcaaggagtttcacgagtatctgattaccgagggtaaatgtaccctagagacaagtaatcagctattaaagaaaggtatcgaagccctgaagcaggtaacaaaaagatatgctaggaaacaaaatcggtgggtcaaaaacagatttcttagccggcccggcccaattgttccccccgtctatggcctcgaggtctctgacgtctctaaatgggaggagtcagtactcgagcctgctctcgagatcgtccagtctttcatccaaggccataagcccactgccacaccaatcaagatgccctacaacgaggctgagaacaagcgaagctaccacctgtgcgacttgtgtgatcggattataattggagatagagagtgggctgcgcacattaaatctaagtcccatttaaatcagctcaaaaaacggcgccgcctggacagcgacgcagtgaatacaattgagtcccaatctgttagcccagatcacaacaaagagccaaaggagaagggctctccaggtcagaatgatcaggagcttaagtgctccgtttag

SEQ ID NO: 15364 - DNA, 987 bp, synthetic construct
  source 1..987: mol_type = other DNA; note = Synthetic coding sequence
atgaaacgtcccaaagaaccttctgggtccgatggggagtccgatggacccatcgatgtgggacaagagggacagctttctcagatggcgagacctttaagcactccctccagctcccagatgcaggctcggaagaagcatcggggcattatcgaaaaacgccgaagggaccggatcaacagttctctctccgagctcagaagactggttccaaccgcctttgagaaacaagggtcctctaaacttgagaaggctgaggttctgcagatgactgtcgatcatctcaaaatgctgcatgccaccggagggactgggtttttcgacgcgcgggcattggcagttgattttagaagcatcggatttcgcgagtgtctgactgaagtcatccgctacttaggcgtgctagagggcccttccagtagggctgatccagtccgcattaggctccttagtcatctgaattcctatgcggccgagatggagccctcacccacccctacaggccccctcgcgtttccggcttggccctggtccttttttcactcatgccccggccttcctgctctgtccaaccagctagccatcctcggccgggtgccatctccagtgttgcccggagtgtctagcccagcatatccaattccagcgctgcggaccgcacctctgcgccgggcgacagggattatcttgcccgcccgcagaaacgtgctgccatcgagaggagcctcttccacccgaagagcaagacccttggagcgccctgctacccctgtccccgtggcaccctcctcccgcgctgcccggagctcccatatcgctcccctgttgcagtctagtagtcctacccctcccggtccaacagggtccgccgcttacgtggcagttcctacaccgaacagctcctcccctggccctgcagggcggcctgccggagctatgctctatcacagttgggtctccgaaattactgagatcggggctttctag

SEQ ID NO: 15365 - DNA, 2262 bp, synthetic construct
  source 1..2262: mol_type = other DNA; note = Synthetic coding sequence
atggagactttcgagcctatttctcaagagcccttaagtcaggcctcttatgataaggcaccagacccggtacccgaactgcaggacagtttttatgccgagctgcaaagggcggagtccttacaggagaaaagtatcaaagaggcaaaaactaagtgcaggaccattgcctccttactgaccgccgctccaaacccccactcaaagggcgtccttatgtttaagaagcggaggcagcgagcaaagaagtacaccctggtttccttcggcgcagcagccggcactggagctgaggaggaggatggggtgccaccaacatctgagagcgagctggacgaggaggcattctctgacgcccgcagtctgacgaatcagtcagattgggactcaccatatttagatatggaactggcccgcgcgggcagccgcgccagtgaagggcaggggtcaggcctgggcgggcagctgtcagaagtgtctggccgcggcgtgcagctttttgagcagcagcggcagcgggccgactcctctacgcaagagctagcacgagtggagcctgccgctatgttaaacggggaagggttacagagccctcccagagcacagagcgctccacccgaagccgctgtcctgccaccatctcccctgccagcgccagtcgcgtcgccccgaccattccagccgggtgggggcgctcctaccccagccccctccatttttaacaggtctgccagaccctttactccgggcttacaggggcagcggcctactaccacatctgtcatctttagacccctcgcacctaagcgcgctaacgattcattaggcgggctgtcaccagcaccacctcctttcctgagtagtcaaggccccactccccttccaagcttcacgagcggggtgccttcccacgcccctgtgtcgggcagtccttcaactcctcggtcttcgggtcccgtcaccgcaacaagctctttgtacatccccgctcccagcaggccagtgacgcctgggggggcccccgagccgcctgctcctccatccgcagccgcaatgacatccaccgcttccattttccttagcgcacccctgcgcccctccgcgcggcctgaagctcctgcgcccggacctggcgcgccagaacccccctcagctagagagcagcgtatttccgtaccagccgcccggaccggcatactgcaggaggccagacgcagggggacccgaaaacaaatgttccgccctggcaaagaagaaacaaaaaatagtcctaaccccgaactcctaagtcttgtgcagaatctcgatgagaagccaagggcaggaggagctgagtcggggccggaggaagatgcactgagccttggcgctgaagcatgcaactttatgcagcctgtgggggctcgatcctacaaaacgttgcctcatgtgacaccaaagacaccccctccaatggctccaaagacccccccacccatgacaccaaaaactccaccacctgtggcccccaagcccccttctcgcgggctcctcgacggactggttaacggggccgcaagtagcgctggcatcccagagcccccccgcctgcagggaagaggtggagagttgttcgcaaaaagacagagtagagccgatcgctatgtggtggagggaacccctggtcccgggctcggtccaagaccgcgtagccccagccctactccatcactgccaccgtcctggaagtactcccccaatattcgggcacccccccctattgcctacaatcccctcctcagcccctttttccctcaggcagctcgaacacttcccaaagcccaaagccagggcccgagggccacccctaagcaagggatcaaggcgctggattttatgcggcaccagccctatcagctgaagaccgccatgttttgtttcgacgaagtccccccaacccctggccctatcgctagcggtagccccaagactgccagagtccaggagattcgccgctttagcacgccagccccccagccaaccgccgaacccctggccccaacagttctggcccccagggctgctacgacgctggacgagcccatatggcgcacagagctggcctccgctcctgtgccctccccagcaccacctcctgaggctccccgtgggctgggtgcctccccttcaagctgtggctttcaggtggccagacctagattttccgccactaggactggcctgcaggcccatgtatggcgacccggagccggccatcagtag

SEQ ID NO: 15366 - DNA, 1041 bp, synthetic construct
  source 1..1041: mol_type = other DNA; note = Synthetic coding sequence
atggagtccgtgagctgcagtgctgcagcggtcaggaccggcgacatggagtcacagagagaccttagtcttgtgccggagagactccagagacgggagcaggagcggcagctggaggtggagcgccggaaacagaagcgccagaatcaggaggttgaaaaagaaaatagccatttctttgtagccaccttcgtgagagaacgagccgctgtagaagagcttctagagcgcgctgaatccgttgagaggctcgaggaggctgcgtctaggctgcagggactccaaaagttgattaacgattcagtttttttcttggctgcatacgatttgcgccagggccaggaagcactggctcggctgcaggccgcattggcggagagacgccggggcttgcagccgaagaagcggtttgccttcaagaccagaggtaaagatgccgcatcaagcactaaagtggacgctgccccagggattcctcccgctgttgaaagtatccaagacagtcctctgcccaagaaagccgaaggcgacctggggccctcatgggtctgcgggttttccaaccttgaatctcaggtgttagaaaaacgtgcatctgaactgcatcaaagggacgtcctcttgacagaactgtcaaattgcacagtgcggctctacggtaacccgaacactctgagattgaccaaagcccatagctgtaagctgctgtgtggtcctgtctctacctccgtgttcttggaggactgtagtgactgcgtgctcgcagtcgcgtgtcagcagttgcgcatccactctacaaaggacaccagaatttttctgcaagtgacgtcaagagcaatcgtcgaagactgcagcggaatccagttcgctccctacacatggagctacccagagattgacaaagactttgagtccagtggcctggaccgctccaaaaacaactggaatgatgtggatgatttcaattggctggcaagggacatggccagccccaactggagcatattaccagaagaggagcgaaatatccagtgggattag

SEQ ID NO: 15367 - DNA, 1569 bp, synthetic construct
  source 1..1569: mol_type = other DNA; note = Synthetic coding sequence
atgagtcctcagaaaagggtgaagaacgtccaagctcagaacaggacgtcccagggatctagctcctttcagaccaccctatcagcatggaaagtaaagcaggacccttcaaattcaaagaatatatcaaagcatggacagaataatcccgtgggggattatgagcacgcggacgatcaggcggaagaagatgccctacagatggccgtaggctattttgagaagggacctataaaagcttcccagaataaggacaaaacccttgaaaagcaccttaagactgtcgagaacgtcgcttggaaaaatggcctcgcaagtgaggaaattgacatcctgctcaacatcgcactatccggcaagttcggcaacgccgtgaacactcggattctgaagtgcatgatcccagcaaccgtcattagtgaggatagtgtcgttaaggcggtatcctggctgtgtgtaggaaagtgcagtggcagcacaaaggtactgttttataggtggctggtcgcaatgtttgattttatcgatcggaaggaacagatcaacctgctgtatggcttctttttcgccagtctgcaggatgacgcactatgcccctacgtgtgtcatttgttgtatttgctcacaaagaaggaaaatgtgaagcccttcagagttcgtaaactcctggacctgcaggctaagatgggcatgcaaccccatctgcaagcactgcttagcttatacaaattcttcgctcctgcactgatcagcgtatctctgcccgtcagaaagaagatttatttcaaaaacagtgagaacctgtggaaaaccgccctcttagctgtgaaacagcggaatagggggccatcgcccgaaccgcttaagctcatgctgggccccgctaatgtgcggccgttgaaacgcaagtggaacagcctttcggtgattcctgttctgaattcctctagctacactaaggagtgcggaaagaaagagatgagtctgtccgactgtctgaacagatcaggatctttcccacttgagcaactgcagtcctttccacagctcctgcaaaatattcattgcctggaactgccgtctcaaatgggctctgttttgaacaacagcctgctcctgcactatataaactgtgttagagacgaacctgtcctccttcggttctattattggctcagtcagacccttcaggaggagtgcatatggtacaaagtgaacaattacgaacacggcaaagagttcactaactttcttgataccattatacgcgccgagtgtttcctgcaggagggcttctactcctgcgaagcatttttatacaagagcctcccattgtgggacggcctatgctgcagatcccagttcctccagctggtttcgtggattcctttctcttcgttttccgaagttaaaccactactgttcgaccacctcgcccagttgtttttcacctccaccatctatttcaagtgctcagtcctgcagtctctcaaagagctgcttcagaactggcttctgtggctgagtatggacatccacatgaagcccgtgaccaattctcctctttag

SEQ ID NO: 15368 - DNA, 2271 bp, synthetic construct
  source 1..2271: mol_type = other DNA; note = Synthetic coding sequence
atgtccccgcagaaaagagtaaaaaacgtgcaagctcagaaccgcacgagtcaggggtctagcagctttcaaacaacactcagcgcctggaaggttaaacaggacccctccaacagcaagaacatctccaagcacggacagaacaatcctgtcggggactacgagcatgcggacgaccaggccgaggaagatgccctccagatggcggttggatactttgaaaaagggcccataaaagccagccaaaataaagacaagacactggaaaagcatctgaagacggtcgagaatgtggcctggaaaaatggccttgcaagtgaagagatcgacatcctacttaacatcgccttgtccggcaagttcggaaacgccgttaatacgcgcattctcaaatgcatgattcctgctacagtgattagtgaggacagcgtggtcaaggccgtgagctggctgtgcgtgggtaagtgtagtggatctactaaagtgctattctatagatggctagtggcaatgtttgactttattgatcgtaaggaacagataaacctcctttatggcttctttttcgcgagcctccaagacgacgccctctgtccctatgtatgtcacctcctatacctgctgaccaaaaaggaaaatgtgaagcctttcagggtcaggaaactcctcgacttgcaggctaagatgggaatgcaaccgcacctccaggccttgctgagtctgtacaaatttttcgcacccgccctgatttctgtgtcattgcccgtcagaaaaaagatttacttcaagaactccgagaatctgtggaagacagcactgctggccgttaaacaacgaaatcggggaccaagccctgaacctctcaagttaatgctaggcccagccaacgtgaggcccctgaaaaggaaatggaattccttgtctgtcatacccgtcttgaactccagttcctatacaaaggaatgtggaaaaaaagaaatgtcactcagcgactgtttgaatcgcagcggcagctttccgctcgaacagctgcagagcttcccacagcttctgcagaacattcactgtttggaattgccatcacagatgggttcagtactgaataatagcctgctattacattatattaactgcgtacgtgacgagccagtgctgctgcgattctactattggctgtctcagactcttcaggaggaatgcatctggtacaaagtcaacaattacgagcatggcaaagagtttactaacttcttggataccataatcagagccgaatgttttctgcaggaaggattctatagttgtgaggcttttttgtataagagcctgcccttgtgggatggcctgtgttgccgcagtcagttcctccaactcgtctcttggatacccttcagtagttttagcgaggtcaagcccttactgtttgaccacctggcgcagttattctttacttcaaccatttatttcaaatgcagtgtgctccagtcattgaaagaattactgcagaattggttgctgtggctgagcatggacattcatatgaaacctgtgactaattcccccctggagacaactctgggtggcagtatgaattccgtcagcaagctcatccattatgtaggatggctatcgacgaccgccatgcgactggagtctaataatactttcctgctccatttcatactcgatttctatgagaaagtgtgtgacatttacatcaactacaacttacccctggtagtattgtttcctcctggcattttctactcagccctcttgtcacttgatacttccattctgaaccagttgtgcttcattatgcaccggtacagaaaaaatctgactgccgctaaaaaaaacgaactggttcagaaaacgaagtcagagttcaatttctcatctaagacttaccaggaattcaaccattatctgacctcaatggtcggatgtttgtggactagcaaaccttttggtaagggaatctacatcgatcccgaaatcctggagaagacaggagtagctgagtataagaatagtcttaatgttgtccaccatccatcttttctctcatacgcagtgtcctttctgttacaagaatccccagaagagagaaccgttaacgtgtccagtataagggggaaaaagtggagctggtatcttgattatttattttctcaaggactccaggggctgaaactctttataaggtctagtgtccaccacagctctatccctcgggccgaaggaattaactgtaacaatcagtactag

SEQ ID NO: 15369 - DNA, 933 bp, synthetic construct
  source 1..933: mol_type = other DNA; note = Synthetic coding sequence
atggctgatgctgctgccaccgctggcgcaggaggttccggtactcggtctggtagtaagcagtcgactaaccctgccgacaactaccatctggctagaaggagaacgctccaggtagtggtatcctccctcctgaccgaggccggttttgagagtgccgagaaagcaagtgtggaaaccctcactgagatgctgcaaagctatatatcagagatcggacgctccgcaaaatcttattgcgagcatactgcacgtactcagcccaccctttctgacatcgttgttaccttggtggagatgggatttaatgtcgacaccctccctgcttatgctaaacgatcccagagaatggttattaccgcccctccagtgacgaatcaacctgttacacccaaagctctgacggccgggcagaacaggccccaccctccacacatcccctctcactttccggagtttccggatccacacacctatatcaagacaccgacatatagagagcctgtgagtgattaccaggtgttaagggagaaggcggccagtcagcggagggacgtggaacgcgcgctgacaaggttcatggccaaaaccggcgaaactcaatccctttttaaagatgatgtatccactttcccattaatcgctgcacggccgtttactatcccttacttaacggcgcttttgccttctgaattggaaatgcagcaaatggaagagactgactccagtgagcaggacgagcagaccgatacagaaaatcttgctctacacattagtatggaggactcaggggccgagaaggaaaacacaagcgtgctccaacagaacccttcactctccggctcgaggaacggagaagaaaatatcattgacaatccctacctccggcctgtcaaaaaacctaaaattagacgtaagaagagcctctcttag

SEQ ID NO: 15370 - DNA, 1935 bp, synthetic construct
  source 1..1935: mol_type = other DNA; note = Synthetic coding sequence
atggaggaaacaatgaagttggccacaatggaggacacggttgagtattgtctctttctcatcccagatgaatctagggactccgataagcataaggagattctccagaagtacatagagcggattattactaggttcgcccccatgttggttccatacatttggcaaaaccaaccctttaacctaaagtacaaaccagggaaaggaggagttccggctcatatgtttggagtgacaaagtttggtgacaatattgaggatgaatggttcatcgtctacgtgatcaagcagatcacaaaagagtttcctgaacttgtggcccgtatagaggacaatgacggtgagttcctgctcattgaagcagcggacttcttgcctaagtggctcgacccagaaaactcaacgaatcgtgtcttcttctgtcacggcgagctgtgtatcatccctgccccccggaaatcaggtgccgagtcctggctacctactacaccccctaccatacctcaggccttgaacattatcaccgctcattctgagaagatccttgcatctgaatccatccgggctgcagtgaacagacgaatccgcggctaccccgagaagattcaggcttctctgcatagagcccactgttttctccctgccggaatcgtggccgtattgaaacagcgaccccggctggtggctgcagctgtgcaagccttttatttaagggaccctattgacctcagagcctgtagagtgtttaaaacgtttctgcccgagaccaggattatgacgtccgttacatttacaaaatgcctgtacgcacagttggtacagcaacgcttcgttcccgaccgacgttcaggttaccggttgccaccccctagtgacccccagtaccgggctcatgaactcggtatgaaactggctcacggattcgagattctgtgcagcaagtgtagcccccacttctcggactgtaagaaatccctggtcactgcaagtccactttgggctagcttcctggagagtttaaaaaagaacgattatttcaaaggcttaatcgagggctccgcacagtatcgggagaggcttgagatggccgaaaattatttccagctgagcgttgattggccagaatcatcactggcaatgagccccggtgaggagattcttacattgttacagactatcccctttgacatagaagaccttaaaaaagaagcagcaaatctgccacccgaagatgatgatcagtggctggacttatcaccagatcagctcgatcagctgctgcaagaggcagtgggcaagaaagagagcgagtcagtatcaaaagaggagaaagagcaaaactatgatttaaccgaagtctctgaatcaatgaaggcctttatttcaaaggtgtcaacacataagggcgcagaactgcctagggagcctagtgaggcgcctattacctttgacgctgactcgttccttaactatttcgataagatcttgggacctcgtcctaacgaatccgattctgatgatctcgatgatgaggacttcgaatgcctggatagcgacgacgacctcgacttcgagacacacgaacccggagaggaggcttcactgaaggggaccttagataatctgaagagctacatggcccagatggatcaggaactcgcccatacgtgcatttctaagtcttttaccacacgtaatcaggtggagccggtgtctcagactactgacaataatagtgatgaggaggacagtggcacaggtgagtctgtgatggccccagtcgatgtggacctcaatcttgtctcgaacatactggaatcgtattcctcccaggctggactggccggtcctgcctcaaatctgctgcaaagcatgggagttcagctaccagacaacactgatcaccgcccaacctccaaaccaacaaaaaactag

SEQ ID NO: 15371 - DNA, 2163 bp, synthetic construct
  source 1..2163: mol_type = other DNA; note = Synthetic coding sequence
atgagcgtgtccggtaagaaagagtttgacgtcaaacagatactgaggttgcgatggagatggtttagtcacccatttcagggtagtacaaacactggatcgtgtcttcagcaagagggctacgagcatagaggaacacctgtccagggacggttgaagagtcactcgcgggatcgcaacgggttaaagaaatccaattctcctgtgcaccacaacattttagcccctgtgccaggaccggctcccgcccaccagcgtgcagttcagaacctgcagcagcataacttgattgtacatttccaggcaaatgaggacactcccaaaagcgttcccgagaaaaacctctttaaggaagcctgcgagaagcgagcccaagacttagaaatgatggcagatgataacatcgaggattccacagctcgcttagacacacagcacagtgaagatatgaatgccacccggtcagaggagcagtttcatgtcatcaaccacgcagagcagacccttcgcaagatggagaattacttaaaggagaagcagttgtgtgatgtgctcctcatagcaggccacctgagaatcccagcccatcgcctcgttcttagcgcggtgtctgattactttgcggctatgtttaccaatgacgtgttggaggccaagcaagaagaggtgaggatggagggcgtggatccaaacgccctaaacagcttggttcagtatgcttataccggtgtactccagcttaaagaggataccatagaatctttgctcgcagcagcatgcttgctgcaactgacacaggtgatcgacgtttgttcgaattttttgattaagcagctgcatccatctaattgtctcggaatacggagcttcggcgacgctcagggttgtactgagctgttaaatgtcgcccataagtacaccatggagcatttcattgaagtgataaaaaatcaggagttccttctgctgcccgctaacgagattagcaagctcctctgcagcgacgatatcaacgtaccagacgaagagacgatcttccatgccctgatgcagtgggtgggtcatgacgtacagaatcgacagggggaattgggaatgctcctctcatacattcggctgcccctgctgccaccccagctcctggcggacctggagaccagcagcatgtttacaggagatctggaatgtcaaaagctcctgatggaagctatgaagtaccatctcctcccagagagaagatccatgatgcagtccccaaggacaaagcctagaaagtctacagttggcgctttgtacgccgtgggtggtatggacgccatgaaaggaacaacaacaattgaaaagtacgacctgagaactaattcctggctccacattggaaccatgaatgggaggaggctgcagttcggggtggccgtaatcgataacaagctgtatgtcgtgggtggacgagatgggttgaagaccttgaataccgtggagtgttttaatcctgttggcaaaatatggacagtgatgccacccatgtcaacccacagacacggccttggcgttgcaacacttgaaggccctatgtacgccgtggggggccacgacggctggtcatatctgaataccgtggagagatgggacccagagggacgacagtggaattacgtggcatccatgtccactccccgatccactgtgggcgtggtggcactgaacaataagctttacgcaattggcgggagggacggaagtagctgcctaaagtcaatggagtactttgatccccataccaacaagtggtcgctctgcgccccaatgagcaagcgccgcggaggtgtgggcgtcgcaacctataatggcttcctgtatgttgtcggaggacacgatgcccctgcgagtaatcattgtagccgcctgtctgactgcgtcgaaaggtatgatccaaaaggcgattcatggagcactgtggcacctctgagcgtgccacgggacgccgtcgcagtgtgcccattgggagacaagctgtacgtggttgggggatacgacggtcatacatacctcaataccgtagagagctacgatgcccagaggaatgaatggaaggaatctatgcaggagctcctccagaatttttatacaactcagaaactgaaagaaaccctggggcattag

SEQ ID NO: 15372 - DNA, 2157 bp, synthetic construct
  source 1..2157: mol_type = other DNA; note = Synthetic coding sequence
atgagtgtatctggaaagaaggaattcgacgttaagcagatcctccgcctgcggtggaggtggttttcgcacccatttcagggatcaaccaatactggttcatgcctccaacaggagggttacgaacatagaggcaccccagttcagggcagactcaagagtcactcaagggaccggaacggacttaagaagtcaaatagcccagtgcatcacaatatcctggcacccgtgccaggcccagcaccagcacaccagcgtgcagtccagaaccttcagcagcacaacctgatcgtgcacttccaggcgaacgaggacacccccaaaagcgtgccagaaaaaaacctgttcaaagaggcctgcgaaaagcgggcacaggaccttgaaatgatggccgacgataacatcgaggactctactgctcgcctggacactcagcactctgaggacatgaatgccacgcgtagcgaggagcagtttcacgtgataaatcatgctgagcagaccctgcgaaagatggaaaattatctgaaggaaaaacaactttgtgacgtgttgctcattgccggacatctgcggatccctgctcacagactcgtgctctcagccgtcagtgattatttcgcagccatgtttacaaacgacgtgctcgaagctaaacaggaggaagtcaggatggaaggcgttgatcccaatgccctgaacagcctcgtccaatacgcctacaccggtgtgctacagcttaaggaagacacaatagagagtttgctggccgcagcgtgcctgttgcagcttacccaggtcattgacgtttgttcaaatttcctgatcaagcagttgcaccccagcaactgtctcggaattagaagctttggtgacgcccaagggtgcaccgagctcctgaacgtggcacacaagtatacaatggagcactttatcgaggtcatcaaaaatcaggaatttctgcttttgccagccaacgagattagcaagctcctgtgtagcgatgatatcaacgttcctgatgaggaaaccattttccatgccctgatgcaatgggtaggtcacgacgtacagaaccgccaaggcgaactgggtatgcttttgtcatacataagattgcccctgctacctccacagctcttagccgatctggaaacgagctcaatgtttactggcgatttagagtgccagaaacttctgatggaggctatgaaataccaccttctgccggagagaagatcaatgatgcaatccccaaggaccaagccccggaagtcgacagtaggagccctttatgccgttggggggatggacgctatgaaggggacaactactatcgagaaatatgatctgcgcactaactcttggttgcacattggaaccatgaacgggcgcagactacagtttggtgtggcagtcatcgataacaaactctacgttgtcggcggacgggatggcctgaagaccctgaacaccgtggagtgctttaacccggtaggcaagatctggactgtgatgcccccgatgagtacacatagacatgggctaggtgtcgcgacactcgaaggtcccatgtatgccgtaggaggacatgatggctggtcttatctgaacactgttgagagatgggaccctgagggacgccagtggaattatgtggccagcatgtcaaccccgaggagtaccgtgggagttgtcgctttgaataataaactgtacgccatcggcgggcgcgacggcagctcctgtctcaaatcaatggagtatttcgatccgcataccaacaagtggagtctgtgcgcgcctatgtccaagcgcagggggggcgtgggcgtggccacatacaatggctttctctacgttgtggggggccacgatgccccagcttccaatcattgcagtaggctgtctgattgcgtcgagaggtacgatcctaagggagatagctggagcaccgtggccccgttgtccgtgcctagagatgctgtcgctgtttgcccacttggcgataaactttacgtggtgggagggtatgacggacatacctacttgaatactgtggaatcttacgacgcgcagaggaatgaatggaaggaagaagtgccggtgaacattggcagggctggggcatgcgtggtggtcgtaaaacttccttag

SEQ ID NO: 15373 - DNA, 1134 bp, synthetic construct
  source 1..1134: mol_type = other DNA; note = Synthetic coding sequence
atgaacggccctgtcagccccaaatctaaggcccgcccgtcctcacccagcaccagctggcacagaccagcaagcccctgccctagccctggaccaggacacactctccccccaaaacccccaagcccgcgcggcactacagcctctcctaagggtcgggtacgaagaaaagaagaggctaaggagagcccttctgccgccggacctgaagataagagtcaatctaaacggagagcttccaacgaaaaggaaagtgcagcacctgcctctccggcgccttctcctgccccttccccgacccccgcacccccccaaaaggagcaacctccagccgagaccccaacagcaccagcgcctcccgtcacccccagtaagccaatggctgggaccacagatcgggaggaggcgacacgattattggcggagaaacggaggcaagccagagagcaacgggagcgtgaggagcaggagagacggctccaggccgaaagggacaaaaggatgcgggaggaacagctggcaagggaagcagaagcacgagccgagcgagaagccgaggcccgtagacgcgaggagcaggaggcccgcgagaaggcccaggccgaacaggaggagcaggagcgcttacagaagcagaaggaagaggcagaggcaaggtctcgagaagaagccgaacgacagaggctcgaaagagaaaaacacttccaacagcaggagcaggaacgccaggagagacgcaagaggctggaagagatcatgaaaagaacccgcaaaagcgaagtctctgagactaaaaagcaagactccaaggaggctaacgcaaacggcagtagccctgagcctgtgaaggccgtggaagcacgcagccccggtctgcaaaaggaggcagtgcaaaaggaagaacccataccccaagagccccagtggagcttgccctctaaagagcttccggcatctcttgtcaacggcctgcagcccttaccggcgcatcaggaaaatgggttcagtaccaatggtccttctggcgacaagagtctgtctaggacccccgaaactcttctgccgttcgccgaagccgaagccttccttaaaaaagcagttgtacagagtccccaagtcactgaggttttatag

SEQ ID NO: 15374 - DNA, 2427 bp, synthetic construct
  source 1..2427: mol_type = other DNA; note = Synthetic coding sequence
atggaaagcggcccaagggcagagctcggggccggggctccccctgcagttgtggcacgtacaccccctgaaccacgaccttccccagagggagaccctagcccaccccctccacccatgtctgctctggtcccagacacccccccagatacccctcccgctatgaagaacgccaccagctctaaacaactacctctcgaacctgaaagccccagtggacaggtcggtcctcggccggcacctccccaggaagagtctccctcgtccgaagccaaaagccgtgggccaactccaccagccatggggccccgtgacgcccgaccccctcgccgttcttcacaacccagcccaacggcagtacctgcctcagattcgccccccactaagcaggaagtgaaaaaagccggagaacgtcacaaactggccaaagaaaggcgagaggaaagggctaagtacctggccgccaagaaggcagtgtggctggagaaagaggagaaagccaaggctctgagggagaaacagttgcaggagagacggcgaaggctggaagagcagcgactaaaagcggagcagcgaagagctgccctggaggagaggcagcggcaaaagttagaaaaaaacaaagaaaggtatgaagctgcaattcaaaggtcagtcaaaaagacatgggcggagatccgacagcagcgatggtcctgggctggggcgttacaccattccagtcctggacacaaaacatccggttcccggtgcagcgtaagtgccgttaatctacctaagcacgtggattccataatcaacaagcggctgagtaaatcgtccgctacactgtggaactcgccttctcgtaacaggtcccttcagctgagtgcctgggaatctagtattgttgataggctgatgacgccaaccctgtcgttcctggcccggagtcgcagcgctgtgactctgccgagaaacggtcgggatcaggccgtgcccgtttgcccgcgctcagcttctgccagtccgctgactccatgctcagtgacacgtagcgtgcacaggtgtgcacccgccggagaaaggggcgaaaggagaaagcctaatgctgggggatctcctgcgcccgttaggaggcggccagaggcaagtcctgttcagaaaaaagaaaagaaagataaggaaagagaaaacgagaaagaaaaaagcgccctggccagggagcggtctctcaagaagaggcagtccctgcccgcttctcctcgggcgagacttagcgcctccaccgcgagcgagttatcacctaagagcaaagccaggcccagttccccgtccacaagctggcatagacccgcatctccatgtcctagtcccggccctggacacactctacctcccaagcccccaagcccacggggcaccactgcctcaccgaaaggccgggttaggcggaaggaagaggcaaaggaaagcccgtcagctgctggtcccgaggacaaaagccagagcaaacgacgagcgtctaacgagaaggaatccgcggctcccgccagtccggccccttcacctgctcccagtccaacccctgcccctcctcaaaaggagcagccccctgctgaaacaccaaccgatgccgctgtcttaacttcaccccccgctccagccccgcctgtgactcccagtaaaccaatggccgggaccaccgaccgcgaggaagccacccggctgctcgcagagaagcgccggcaggcccgcgagcagagggagagggaggagcaggaacggaggctacaggcagaaagggacaagaggatgcgagaggaacagctggcccgagaagccgaggcccgcgctgagcgcgaggccgaggcccgaaggagagaggagcaggaagcccgggaaaaagcccaagctgagcaagaggagcaagaacgccttcagaagcagaaggaagaagcagaagccagaagccgtgaggaagccgaacgccagagattggagcgagagaagcacttccagcagcaggagcaagaaaggcaggaacgcagaaagcggctggaggagattatgaaacgaacacgaaagtcagaagtctcagagacaaaaaaacaggactctaaggaggctaacgcaaacggcagttcgccagaacccgtgaaagccgtggaggcgagatcgccgggactacagaaggaggccgttcagaaagaggaaccaatcccacaagagcctcagtggtctttgccatccaaggagctgcctgccagcctcgtgaacggcttgcagccgcttcctgcccaccaagagaacggtttttccactaacggaccctccggggataagtcactcagtaggacaccagaaacactgttgccttttgccgaggctgaggctttcctcaaaaaggccgtcgtccagtcaccacaggtaactgaggtattgtag

SEQ ID NO: 15375 - DNA, 2526 bp, synthetic construct
  source 1..2526: mol_type = other DNA; note = Synthetic coding sequence
atggaatccgggccccgcgccgagctcggcgcaggggctccccccgcagtggtagcccgcactccacccgagccgcgcccctccccggaaggcgatcccagtcctcccccgccccctatgtctgcactagtgcccgatactcctccggatacccccccagctatgaaaaacgctacaagcagcaagcaactcccactagaacctgagtcaccgagcgggcaggtaggcccccgccccgccccacctcaggaagaaagccccagttccgaggcaaagagtcggggacccacacctcctgccatggggccccgcgacgcccgtcctcctcggcgctccagccagccttctcccactgccgtcccagcatcagacagtccccccaccaagcaggaggttaagaaggcaggtgagaggcacaagctggccaaggaacgcagggaggaaagagccaagtaccttgccgctaaaaaggcagtctggctggaaaaagaggagaaggccaaggctctgcgtgaaaaacagctgcaagaaagaagacggcggctggaagagcaacgattgaaggcagagcaacggagggccgccttagaagaaaggcagcggcagaagcttgaaaaaaacaaagagcgttacgaggctgccattcagaggagtgtcaagaagacatgggctgagatacgacagcagcgatggtcatgggccggagccctccaccactcatcgccaggccataaaacttccggctctagatgctctgtgtcagctgtgaatctgcctaaacacgtggattcaatcattaacaagaggctgtcaaagtcatctgcaacattatggaatagcccttcaaggaataggtcgcttcaattgagcgcgtgggagtcaagcatcgtggacagactgatgactcctacactctcattcctcgcacggtctcgctctgcggttacacttccccgcaatggtcgagatcaaggcagagggtgcgaccctggaagggggccaacctgggggcgggcgggagcatccttggccagggggccacagcccgatcgaacacatccaagcgccgccgtccctgtgtgtcctcggagtgcctcggcctcacctttgactccttgctctgtgactcggagcgttcacagatgtgcacccgcgggcgagagaggcgagaggagaaagcccaacgcaggagggagccccgcccccgtcagacgacggcctgaggcctcccccgtccaaaagaaggaaaaaaaagacaaagaacgggaaaacgaaaaggaaaaatctgctctcgcgagggaacgctctctcaagaaacgccaaagtctccctgcctctcctcgggctcggctgagtgcgtccacagcatcggaactgtcacccaaatcgaaggcgagacctagctccccatcgacctcctggcacagacctgcttccccctgtccctcacctggtcctggtcacaccttgcctccaaaacccccctcacccaggggcaccacggcatcccccaaaggaagggtgaggcgtaaggaagaagccaaagagtctccatccgcagcaggcccagaggataagtcacagagcaaacgacgtgccagtaacgagaaagagtctgcagccccggcttcccctgccccttccccagctccatctccaactcccgcaccgccgcaaaaagagcagccccctgccgagaccccaacagatgccgccgtcctgacttcacccccagcgccagcacctccagttacaccttcaaagcctatggccggcactactgatagagaagaggccacgcggttgctggccgagaagagacggcaggctagagaacagagagagcgggaagagcaggagcggaggcttcaggccgagcgcgacaagaggatgagagaagaacagcttgctcgcgaagccgaggcaagagccgagagggaggcagaagctcgtaggagggaggaacaggaagcccgggagaaggcccaggctgaacaggaggagcaggaaaggctgcagaagcagaaagaggaggctgaagcacgcagtcgcgaggaggccgagagacagagactggagcgggagaaacactttcagcagcaagagcaggagcgtcaggagaggaggaagagactcgaggaaattatgaaaaggactcggaagtccgaggtaagtgagacaaaacagaagcaggattcaaaggaggccaatgccaatggcagcagccctgagccggtgaaagcagttgaggcccggtccccaggcttacagaaggaggccgtccagaaggaggagccgataccccaggagccccagtggtctctgccttccaaagaactgcccgccagcctcgtcaacggtctacagcctctacctgcccatcaggagaacggattcagtacaaatggcccttccggagataagagcctctcacgaactcctgaaacactgctgcctttcgcagaagctgaggcatttctgaaaaaagccgtggtccagagtccacaggtaacggaggtcctttag

SEQ ID NO: 15376 - DNA, 495 bp, synthetic construct
  source 1..495: mol_type = other DNA; note = Synthetic coding sequence
aacttgccaaagcatgtagatagtataattaataaacgccagcgactggaacgtgaaaagcacttccagcaacaggaacaggaacgtcaagagaggagaaaaaggctcgaagagattatgaaacggaccagaaagagcgaggtgtccgaaacaaaaaaacaggatagcaaagaagctaacgccaatggaagctcaccagagcccgtcaaagctgtggaagctaggtcacctggcttgcagaaagaagcggtgcagaaggaagaaccgatccctcaggagccccagtggtcgcttcctagtaaagagctgcccgcctccctagttaatggtttgcagcccctgccagcccatcaggagaatggattctctaccaatgggccatccggcgacaaaagcctgagcagaacgccagaaactctcctgccattcgccgaagccgaggccttcctcaaaaaagccgtcgttcagtcaccccaggtcacggaagtgctgtag

SEQ ID NO: 15377 - DNA, 345 bp, synthetic construct
  source 1..345: mol_type = other DNA; note = Synthetic coding sequence
atggttatacgcgtgtatattgcctcttcatctggcagcacggctattaaaaagaagcagcaggacgtgttgggattcctggaggctaataagataggctttgaggaaaaagacatcgctgctaacgaggagaacagaaaatggatgcgcgagaatgttcccgagaactctcgaccggccactggctaccctttacctcctcagatcttcaatgagtctcagtacagaggagactacgatgctttcttcgaggccagagaaaacaatgctgtttacgccttcctcggactgactgccccccccgggagtaaagaagccgaagtccaggcgaaacagcaggcttag

SEQ ID NO: 15378 - DNA, 537 bp, synthetic construct
  source 1..537: mol_type = other DNA; note = Synthetic coding sequence
atgtcagggttttctacagaagagcgggctgcgccattctctcttgagtaccgagtatttttgaagaatgaaaaaggccagtatatatcaccgttccacgatatccctatttacgctgacaaagacgtcttccacatggtggtagaagttccccgatggtccaatgcaaagatggagatagctaccaaggaccctttgaatcctatcaagcaagatgtgaagaaaggaaaattgagatacgttgccaatctgtttccctacaagggatatatctggaactatggtgcgatcccacagacttgggaggaccccggccacaatgacaaacacaccggctgttgcggcgacaatgaccccatagacgtgtgcgaaatcgggagtaaggtttgcgcccggggtgaaattatcggagtaaaggttcttggcatcctggccatgatagatgagggtgagaccgactggaaagtaattgccattaatgttgacgacccagatgcagcgaattacaatgtgtgcaacagcgtggtaatcctgtag

SEQ ID NO: 15379 - DNA, 870 bp, synthetic construct
  source 1..870: mol_type = other DNA; note = Synthetic coding sequence
atgtccggctttagcacggaagagagggcggctcctttttcacttgaatatcgagtgtttctgaagaacgagaagggacagtatatctctccttttcacgacatccctatctacgctgacaaggacgtcttccacatggtggtggaagttccccgttggagcaacgctaaaatggaaatcgccaccaaggacccactgaatcctataaagcaagatgtcaagaagggcaaactgcggtatgtggctaatcttttcccatacaaaggctacatttggaactatggcgctatcccccagacatgggaagaccccggccataacgacaagcacaccggttgctgtggcgataacgatcccatcgatgtgtgcgaaattggcagcaaggtatgcgccagaggagagatcatcggagtaaaagtcctggggatactggctatgatagacgagggggagacagactggaaggtcatcgcgattaacgtggacgaccctgacgcggctaattataacgacataaacgatgttaaacgcctgaaaccaggatatctggaagcaacggttgactggttcagaagatacaaggttccagacggcaagcccgaaaacgaattcgctttcaatgcggagtttaaggacaaggacttcgccatcgacatcatcaagtctactcacgaccactggaaggccctggtgaccaaaaaaaccaacgggaaaggtatcagttgcatgaacaccaccctttctgaatccccttttaagtgcgaccctgatgccgctcgtgcgatcgttgacgcccttccgcccccatgtgagtcagcctgcacagtgcctactgatgtggataagtggttccatcaccaaaagaactag

SEQ ID NO: 15380 - DNA, 2103 bp, synthetic construct
  source 1..2103: mol_type = other DNA; note = Synthetic coding sequence
atgaccgagcgatgttccctctggtcagctctctccgccgccgcatgttgcttctacagaggatccttcgtgcaattcagtaaagagaagtacatcctggatagttcccctgaaaaactccacaaggaattggaagaggaactcaaactctccagtaccgacctcaggtcccatgcatggtatcacggtaggatcccacgagaagtatccgaaacactggtccagcgcaatggtgacttcctgatacgcgattccctgaccagcctgggagactacgtcctgacatgccgctggcgaaaccaagccttgcactttaaaatcaacaaagtggtcgtgaaggcaggtgaaagctatactcacattcagtatttatttgagcaggaatcattcgatcacgtacctgcgctcgtccggtaccacgttggctctaggaaagctgtgtcagagcagtcgggggctatcatttactgtcccgtaaaccgaactttccccctccgctaccttgaagctagctatggcctcgggcagggctcatccaagccggcttccccagtgtcccccagcggcccgaaaggatctcatatgaaaagaaggtctgttacaatgactgatggcttaaccgctgacaaggtgacacggagcgatggatgcccgacttccacatcgctgccccggcctcgggatagcatccgatcctgcgcgcttagtatggaccaaatccccgatctccatagccccatgagtcccatctcagagtcaccatctagcccagcatattcgacggtgactcgagtccatgcagcaccggccgccccatccgccaccgccttgccagcatcaccagttgcccggaggagcagtgaaccccagctctgtcctggctctgcccccaagactcatggagagtctgacaagggcccccacacttcgcccagccacactctgggcaaggccagcccaagcccatccctgagctcctattctgaccctgactccgggcactattgccaacttcaacctccagtgagaggcagtagggaatgggccgccactgagacttcgagccagcaggcccgttcttacggagagcgcctgaaggagctgtcagagaatggcgctcccgaaggcgattgggggaagacctttaccgtccctatcgtagaggtgacaagcagctttaatccagccacatttcaatccctcctgataccacgcgacaatagacctctggaggtggggctcctccggaaggtgaaggagttattagcggaggtcgacgcccggactctggctcgccatgtgacaaaggtggattgccttgttgctaggatcctgggagtgacaaaagagatgcagaccctgatgggcgtccgctggggtatggagctgctgaccctccctcatggacgacagctgcggctagatctgctggagcgctttcacactatgtccattatgctggccgttgatattctcggttgcactggctccgccgaggaacgcgctgcgcttcttcataaaacaatccagttggcagcggaactccggggtacgatgggtaatatgttttctttcgccgcagtaatgggcgccctggacatggcacagatctccagactggagcagacctgggtgaccctaagacagcgtcataccgaaggtgccatactgtacgaaaagaagttgaagccgttcctcaagtcactcaacgagggaaaggaggggccacctttgtcgaacaccacgtttcctcacgtgttacccctgatcactctcctcgaatgtgattccgcgcctcccgaagggcctgaaccatggggaagcacagagcatggcgttgaagtcgtcttggcccacctcgaagcggcaagaacagtggcccaccacggaggcttgtatcacactaacgccgaagtgaagctgcaaggctttcaggctagaccagagcttcttgaagtgtttagtaccgagttccagatgaggctcctctggggttcccagggagcctcctcctctcaagcaagacgctatgagaaatttgataaagtgctcacagccttaagccataaacttgagcccgccgtaagaagtagtgagctctag

SEQ ID NO: 15381 - DNA, 2379 bp, synthetic construct
  source 1..2379: mol_type = other DNA; note = Synthetic coding sequence
atggcccccgctctgcccagcccacacaaggcagtcgcccgacctgagcttcttctggacactgccgctcactcaggcaaactcagagctcccgatggcggtgagggtgccgaatgcgccggtcacaatggcggtccttcctggggcgtcggccaaggacagtcacaagagccctcgcgacaagggatcccacaggccccttggttggtctcctggcagcgacgcggttttccaccttcttctttctgtccaggtcctttgaggacagagaagcttcgggcgggccgctgtccattactgctatgcggcggagccgccggcgagcctgaggcgggcagcgattatgtgaagttttctaaagagaagtacattctcgattcatcaccggagaaactccacaaagaactggaggaggaattgaagttgagtagcaccgacctacgttcacacgcctggtaccacggacgtatacctagggaagtgtctgaaactctggtgcaaaggaatggcgattttctgatcagagactcactgacctcccttggcgactatgtcctaacctgccggtggcggaaccaggctctgcatttcaagatcaacaaggtggtagtgaaggctggggaaagctacacccacatccaatatctgttcgaacaggaaagcttcgaccacgttcctgccctggtcaggtatcatgtgggctcaaggaaagcggtcagcgaacagtcaggcgccattatctattgccccgtgaatcgcacatttcctctgagatacctggaggctagttatggtctcggccagggtagctccaagccggcgagtcccgtgtcaccttccggccccaagggctctcacatgaaacgcaggtctgtgactatgacagacggactgactgctgacaaagtcaccagatcagatggctgccctacatccaccagtctgccgcgaccccgtgatagtattagaagttgtgcccttagcatggatcagatcccagacctgcacagtcccatgtccccaatcagcgagagtccgagttctcctgcctacagtaccgttacccgggtgcacgcggcaccagcagcccctagcgctacagcactgcccgctagccccgtagctagacgcagcagcgagccccaactgtgccctggatccgcaccgaaaacacacggcgagtctgacaaggggccacacacctctcccagccacactctgggtaaggcaagtccgtctcctagcctctcatcctattcagatccagattctggacactattgccagttgcagccacctgtacgagggagtagggaatgggctgcaaccgagacgtcttctcagcaggcacgaagttatggagaacgccttaaggagctgagcgagaatggcgcgcctgaaggcgattggggcaagacctttacagttccaattgtggaagtgacctcatcctttaatcctgcaacctttcagagcctgctgattcctagagacaacaggcctctggaggtggggctcttaaggaaggtgaaggagcttttggcagaagtggacgccagaacgctcgcacgccatgttacaaaagttgattgtctggtcgctaggattctgggtgtgacaaaggagatgcaaacacttatgggcgtgcggtggggtatggagcttctcactctgccgcacggacgccagctccgcctcgatctcttggagcgttttcacaccatgagtataatgctggcagtggatatactggggtgcacggggtctgccgaggagcgggcagcactactccacaaaaccattcagctggccgcagaactacgaggcactatgggaaatatgttttctttcgctgccgttatgggagccctggacatggcgcagattagcaggctggaacagacctgggtgacactcagacagagacacaccgaaggcgccatactgtacgagaaaaaacttaagcccttcctgaagagtctcaatgagggtaaagaggggccacctctgtctaacactacatttcctcatgtgctgccgctgatcaccctgttggaatgtgactcggccccacccgaaggacccgaaccctgggggagcacggagcacggtgtcgaggtcgtactcgcgcacctggaagctgcacggacagtcgctcatcatggggggctgtaccacactaacgcagaggtgaaacttcagggctttcaggccaggcctgaactgctcgaagtcttctccaccgagtttcaaatgcggctgctgtgggggtcccaaggtgcgagtagctcccaggcccggagatatgaaaaatttgataaagtgctgacagctctgtctcataaactcgagccagccgtgcgctctagcgagttgtag

SEQ ID NO: 15382 - DNA, 2112 bp, synthetic construct
  source 1..2112: mol_type = other DNA; note = Synthetic coding sequence
atgacagccgttggacgcaggtgccccgccctgggatcccgcggcgcagcgggagaaccagaagcaggcagtgactatgtgaagttcagtaaggagaagtacatcctggattccagccctgaaaagctgcacaaggaattggaagaagaactgaagctgagctctaccgatctccgttcacatgcatggtaccatggaagaattccgagagaggtgagcgagacgctggttcagcgaaatggtgactttctgatccgcgattcactgacatcccttggagattacgtattgacgtgccggtggagaaaccaggctctccacttcaagattaacaaggtggtggttaaggccggtgaatcttatacgcacatacagtacctgtttgaacaggagtccttcgaccacgtccctgcactcgtgagataccatgtgggctctagaaaagctgttagcgaacagagcggcgcgattatatactgtcctgtgaaccgcacctttcccttgcggtatctggaggcaagctacggacttggccagggctcctcaaaacccgccagcccagtctcaccatccggacctaaaggatctcacatgaaacgccgctcggtgacaatgaccgatgggctcacagccgataaagttactcggagcgacggatgcccaacatcgacctcacttcctcgcccacgcgactcgattagaagttgcgccctgagtatggatcaaattcctgatcttcacagcccaatgagcccaataagtgaatctccttcatctccagcatattccaccgtaaccagagtacacgccgcaccagccgcccctagcgctactgcactcccagcttctccagtcgcacgccgttccagcgaacctcagctatgccctggctccgcccccaagacacatggcgaaagcgacaagggaccacataccagcccatctcacactctggggaaggcgtcccctagtccttctttatcgagctatagtgacccagactcggggcactactgccagttacagcctccagttcggggcagtagagagtgggcggctaccgagacttctagccagcaagctcgcagttatggggaacggttgaaggagctatctgaaaatggcgcacccgaaggagactggggcaagactttcaccgtcccgattgtggaggtgaccagctcttttaaccctgccaccttccagagtctgctgattccacgcgataaccggcctctagaggtgggtttgcttcggaaggtgaaggaactcctggcggaagttgacgccaggacactggccaggcacgtgacaaaggtcgattgtctcgtcgcccggatactcggggtgactaaggaaatgcagacactgatgggcgtccgatgggggatggaactcctgactctccctcatggcagacaattgagactggacctcctggagcggttccatacgatgagtatcatgcttgctgtagacatcctgggctgtaccggctccgctgaggagcgtgctgccttactccacaaaacgatacagctagccgccgaactgcgaggaaccatgggcaacatgttctccttcgctgctgtgatgggcgccctggacatggcacagatctcaaggcttgagcaaacatgggtgacactgagacagcggcatacagagggagccatactgtacgagaaaaagctgaagcctttcctgaagtcactgaacgagggcaaagaaggtcctcctttgtcaaatacgacatttcctcatgtgcttccactaataaccctgttagaatgcgattctgccccgcccgaggggcctgagccatggggatccaccgagcacggcgtggaagtagttctcgcccacttagaggccgccaggactgtcgctcaccatggagggctgtatcacactaatgccgaggttaaactgcaggggttccaagcaagacccgagctgctggaggtgttctccaccgaatttcagatgcgtctgctgtggggttcccaaggagcatcatcatcacaggcaagaaggtatgagaaattcgataaggtactcacagctttatctcacaaattagaacccgctgtcaggtcctctgagctttag

SEQ ID NO: 15383 - DNA, 1869 bp, synthetic construct
  source 1..1869: mol_type = other DNA; note = Synthetic coding sequence
atggaccaattgcctcagaaaaatctgctacggctgcatccggctggttcagcaggatgcagtaccggcgttgagtcctcctcgatggacggcttctggatggaggtggaacagatccagcagagggacgaactccgagaggaagattccggaggcaacgaaggccagctcccggaggagggagaggccgaatctcagtggctccaggacactggattatcaggcttattgggagggttaggtctggacggtgatcatcaggagctgctgagcactctgacacagacgcaggtcgccgcggtttgtcgccgcctggatatctacgccaggagcgtgcgcaggcagcacaagacccccgtgcgtgacgttagagatgtgttcggtgttttcaattccggtaagatgtcatccgaaaacggcgatagtgggatgaagggtgcacagctgtccagcggcgcttccaagttccccccagctgcagaaccaggcggacttcaggagcaagcaggtcgcgaagaggcttttaatatggattccgcctactcggaacaggccgccgtgctgctgcagaggagtcggccgtcacgcgggggcaccagcgcatggggaaaatgttctctgcccaagtttacagttcccaaagggcggctgggagtgacgagaatcggggacttaagccttcaggacatgcgaaaagtcccgtccctggctctgatcgagttgactgccctctgcgacatcttgggattggatctcaaaaggtcaaaagctgggaaatggaaggccgctgagactcgactgtttggagtccccttggattctctgttggaggcggatcacaaagttctcccatccacccaggttccgttggtgcttcaggcactcctgagttgtctcgaaaaaagagggttggacatggagggcatcctgcgcgtgcctggatcccaggccagagtgaagggtctggagcagaagctagagagggatttctatgccggccttttttcatgggatgaggtacaccacaatgatgcctcagacctgttgaagcgctttatccgaaaactgccaacacccttactaactgccgaatatctcccggccttcgctgtcgtccctaacattcccaacctgaaacagcggcttcaagtgctccacctgctgattttaattctgcctgagccgaaccgaaacgcattgaaggcgctcttggaattcctcaggaaggtggtggctagggagcagcacaataaaatgacactccgcaacgtgagcacagttatggcgcctaatcttttcctccatcaggggcgaccacccaaattgcctaagggcaaggaaaaacagcttgcggagggggctgccgaggtagtccagataatggtgcattatcaggacctgctttggactgtagcatcgttcctcgtggctcaggtgcgcaaactaaacgattcgagctcccggcgtccgcaactttgtgacgccggcttgaagacctggctgagacggatgcatgcagaccgcgataaagccggagatggccttgaggcaacacctaaagtcgccaagatccaggttgtatggccgatcaaagatcctctgaaggttcctctgaccccctctactaaggtagcacacgttctcaggcagtttaccgaacatctctctcctggaagtaaggggcaggaggacagtgaggatatggacagtttattgctgcaccacagatctatggagagtgccaacatcctgttgtatgaggttggggggaatataaacgagcaccggttggatcctgacgcgtatcttttggatctgtacagagctaatcctcacggggaatgggttcttaaacaaaatcctacgtag

SEQ ID NO: 15384 - DNA, 846 bp, synthetic construct
  source 1..846: mol_type = other DNA; note = Synthetic coding sequence
atggcaaccgaactgcagtgtcctgactcaatgccctgccataaccagcaggtgaattcagcgagtactccaagcccagagcaactcaggccaggagatttgatccttgatcacgctggcggcaatagagccagtagggccaaggtcatccttctgaccggatatgcgcactcctctttgcctgccgagttagactccggtgcttgtggggggagctctctgaacagtgaaggtaacagcggatccggagatagttcaagctatgatgctccggcgggcaattctttcctcgaggactgtgagctgtcccgacaaatcggcgcccagctgaaactccttccaatgaacgatcagatcagagaactgcaaacaatcatacgtgacaaaactgctagcaggggcgactttatgttttctgctgacaggcttattcggcttgtggtagaagaaggattgaatcaactcccatataaagagtgtatggtgacaacaccaactggatacaaatacgagggagttaaattcgaaaaaggcaactgcggcgtctctatcatgcgaagcggcgaagccatggagcaggggctgagagattgctgtcgatcgatacgcatcgggaaaatcctgattcagtcagatgaagaaacgcagagagcaaaggtgtattacgcaaaatttccccctgatatttacagacgaaaggtgctgttaatgtatccaatactatccaccgggaacacagtgatagaggcagtgaaggtgctgatcgaacacggtgtacagccttcagtaataatcttattatctttgttcagcaccccgcatggggagttttccatgaggcaatag

SEQ ID NO: 15385 - DNA, 930 bp, synthetic construct
  source 1..930: mol_type = other DNA; note = Synthetic coding sequence
atggcgacagagctgcaatgccccgactctatgccttgccataaccagcaggtgaattctgcgtccacgcccagtcccgaacagctgaggcccggggacctgatcctggatcatgccgggggcaatcgagctagccgagccaaggtgatccttctcactggctatgcccactccagccttccagctgaacttgactccggggcttgtgggggctcatctttgaatagcgaaggaaacagtgggtccggtgactcgagcagttacgacgcaccggccgggaattcgttcttggaagattgtgagttgtccagacagatcggcgcgcaactaaaactgctgcctatgaatgaccagatcagagagttgcagaccatcatcagagacaaaactgcctcccgcggtgactttatgttttccgctgaccggctcatacggctggtggtcgaagaggggcttaaccagctcccatataaagaatgcatggtgactacacctacaggatacaagtatgagggcgtgaaattcgaaaaggggaattgcggggtgagcataatgagatcaggtgaagcaatggaacagggcctgcgcgattgctgccgaagcatcagaattgggaaaatactgatccaatccgacgaggagacgcagagggcaaaggtgtactatgcaaaattcccccccgacatctatcgccggaaagtcctgctgatgtacccaatcctcagcacaggaaatacagtcatagaagctgtaaaagttctcatcgaacacggagtccagccctcggtgattatcttgctcagcttgttttcaactcctcacggtgcgaagtctataatccaagagttccctgagatcacgattctaacaaccgaggtccacccggtcgcaccaactcatttcggacagaaatacttcggcactgattag

SEQ ID NO: 15386 - DNA, 633 bp, synthetic construct
  source 1..633: mol_type = other DNA; note = Synthetic coding sequence
atggtgagcgggagcgaacagaagttcctgattggtctcggaaagtctcagatatatacatgggacggtcgccagagcgaccgctggattaaactggatctgaagaccgagttgcctcgggacactttgttgagcgttgaaatagtacacgaattgaaaggagagggcaaggcacagaggaagatttctgctatacatatccttgatgtcctagtactgaatggaactgatgttcgcgagcagcatttcaaccagcgaattcagctggccgaaaagttcgtcaaggccgtctcaaaacccagtaggcccgacatgaaccccatccgagtgaaggaggtctacaggctcgaggagatggaaaaaatcttcgtgcggctcgagatgaagattataaaagggtcctctggcactccgaagttgtcatatactggtagggacgacaggcacttcgtccctatgggcctttacatcgtgaggacagtgaacgagccctggaccatgggcttcagcaaatccttcaagaagaaattcttctataataaaaaaacaaaggactcgaccttcgacctcccagccgattccattgctcctttccatctgcctagtctggcctgtttgtctaaaatggattag

SEQ ID NO: 15387 - DNA, 1119 bp, synthetic construct
  source 1..1119: mol_type = other DNA; note = Synthetic coding sequence
atgaagcgcagaacagaccccgagtgcactgctccgatcaagaagcaaaagaaacgggtcgccgagctcgctctcagcttgagctctacttccgatgacgagcctcctagtagcgtgagtcatggcgccaaagcctcaaccacctctctgtctggcagtgactccgaaacagaagggaaacagcactcaagtgatagttttgacgacgcatttaaagcagactcactcgtggaggggacctctagcagatacagcatgtacaacagtgtatcacagaaattgatggccaagatggggttccgggaaggggaagggctgggcaagtattcacaaggcagaaaggacatcgtcgaggcctcttcgcaaaagggtcgtagaggattggggctgacattgcgaggcttcgatcaggagctgaatgtggattggcgagacgagccggaaccaagcgcatgtgaacaggtgtcctggttcccagagtgtactacagagatccccgacacacaagagatgtctgactggatggtcgtcggaaaaaggaagatgataattgaggacgagacggagttctgcggggaagagctcctgcactcggtcctgcaatgcaaaaagccactcgtaaaagatagggaagcagagctgctgtattttgcagacgtatgtgccggacctggagggttttcagagtatgttttgtggcgcaagaagtggcacgcaaaaggtttcggaatgacactaaaaggcccaaatgacttcaagctggaggacttttactccgcgagcagcgagctttttgagccctattatggtgaaggtggaatcgatggcgatggcgacatcacccggccagagaatatttccgccttccggaactttgtgctcgataacactgataggaagggggtgcatttcttgatggccgatgggggcttttctgtcgaagggcaggaaaacttacaggaaatcctgtctaagcagctcctcctctgtcagtttctaatggctctgtctattgtccggaccggagggcacttcatatgcaaaaccttcgatctcttcacccctttttcagtgggcctggtgtacctgttatattgttgcttcgagcgggtctgttag

SEQ ID NO: 15388 - DNA, 615 bp, synthetic construct
  source 1..615: mol_type = other DNA; note = Synthetic coding sequence
atggctgggtacctttccgagagcgatttcgtgatggtggaagagggtttttctacacgtgatttattgaaggagcttaccctgggcgccagccaggccactacagacgaggtcgctgccttttttgtcgccgacctcggcgctattgtgcgtaaacacttctgtttcttaaaatgtttgccacgggttagaccattttacgcggttaaatgcaatagctctcctggagttctcaaagtgctggcccaactgggactaggcttctcctgtgcaaacaaaattgccagcgttataaacagcgcactagatctgtacttcccggaaggatgcggagtcgacatctttgctgagctaggccgttattatgtcacaagcgctttcacggtggccgtcagtattatcgctaagaaggaagttctcttggaccagcccggtagagaagaagagaatgggtccacctcaaaaaccatcgtttatcacctggatgagggcgtgtacggcattttcaactcagtgctcttcgacaacatttgccccacacctatactgcagaaatcaaaaaaccatagcccatgttatatgagcctggaatctattcacttcattgctgtgtag

SEQ ID NO: 15389 - DNA, 1443 bp, synthetic construct
  source 1..1443: mol_type = other DNA; note = Synthetic coding sequence
atggctggttatttgtccgagtccgatttcgtcatggtggaagaagggttctcaaccagagacctgctaaaggaactgaccctcggtgctagccaggccaccactgacgaggtggctgcgtttttcgtggccgatctaggcgccatcgttcgaaaacacttctgcttcctgaagtgcttaccacgggtgcggcctttctatgctgtgaaatgcaatagcagcccgggcgtcctcaaagtcttagcccaactgggccttggctttagttgcgccaacaaagctgagatggaactggtacagcatatcggtatccccgcgtcaaaaatcatttgcgcaaatccatgtaaacagatcgctcaaatcaaatacgccgccaaacatgggatccaactgctctcgtttgataacgaaatggagctggccaaagtggtgaaatctcacccatccgctaagatggtcctgtgtattgccaccgatgacagccactctctcagttgtctgtccctgaagtttggcgtgtctctcaaatcttgtagacacctgctggagaatgccaagaagcaccacgttgaagtggttggggtctcatttcacatcggaagtgggtgtccagatcctcaagcttacgcacaatctattgcggacgccaggctggtttttgagatgggcaccgagctgggtcacaagatgcatgtcctggatttgggaggaggctttcccggaaccgagggcgccaaggtcaggtttgaggagatcgcaagcgtcataaatagtgcactggacctgtatttcccggaaggttgtggggttgacatcttcgcagagctaggtagatactatgtgacctccgcttttaccgtcgccgtgtccataattgccaagaaagaagtcctgctggaccaaccaggaagagaggcacccttaccaccacctcatatcgccacctgcgcagcctctgaacctagcccccctgcagaagaaaacggttcaacttctaagacaatcgtttaccacttggacgagggagtctacggcatcttcaattcggttctctttgacaatatctgccctaccccaatcctgcagaaaaagcctagtaccgagcaacctctttacagcagctccctgtggggacccgcagttgatggatgtgactgcgtggccgaaggattatggctaccccaactccacgtcggggattggctagtcttcgataatatgggcgcctacacggttgggatgggctctccattctggggaacacaagcatgccacattacgtacgctatgagcagggtggcctgggaggccctgcgacggcagttaatggctgctgagcaagaagacgatgtggagggcgtatgtaaaccactttcttgtgggtgggagattaccgacactctgtgcgtgggccctgtgtttacccctgcttcgatcatgtag

SEQ ID NO: 15390 - DNA, 1383 bp, synthetic construct
  source 1..1383: mol_type = other DNA; note = Synthetic coding sequence
atggccgggtatctatcggaatccgactttgtgatggttgaagagggctttagtactcgcgacctgctcaaagagctgacactgggcgctagtcaggcgaccacggacgaggttgcggcctttttcgtggctgaccttggtgccattgtacggaagcatttctgttttctcaaatgcctccctagagtcagaccgttttacgccgtaaaatgtaactcttctcccggagtgcttaaggtgttagcccagttgggtctcggcttctcctgtgcaaacaaagcagagatggagctggtccaacacatcggcatccctgcaagcaagattatctgcgcaaacccctgcaaacagatcgctcagattaaatacgcggcaaaacacggcatacagctgctctccttcgacaatgagatggaactagcaaaggtagtgaaaagccatccctccgccaagatggtgttgtgtatagcgaccgacgattcgcactccctgagctgtctttccttgaaattcggcgtgtctttgaagagttgtcggcacttgctcgagaacgccaagaagcaccacgtggaggttgtgggagtttcattccatatcgggagtgggtgtccggatccacaggcttatgcccagtccattgcggacgctcggctcgttttcgagatgggaacagagctagggcacaaaatgcatgtcctggatttaggcggaggtttccccggaactgagggagcaaaggtcaggttcgaggaaatcgcctcagttatcaacagcgcattggatttatacttcccggagggatgcggagtagacatctttgctgagttgggccgttactacgtgacctcagcctttacggtggctgtgtcaataattgccaaaaaggaagtgctcctggatcagccaggccgcgaggaagaaaacgggtcaacctctaagacaattgtctatcacctggatgaaggtgtctacgggattttcaatagcgtgttgttcgataatatatgtccgacacctatcctgcaaaaaaagccatccacagagcagcctctctactcatcttccctatggggccctgctgtggatggatgtgattgtgtcgccgaaggattgtggctgccacagcttcacgtgggagactggctcgtctttgataacatgggagcctacaccgttggaatgggaagcccattttggggaacccaggcttgtcacatcacctacgcgatgagccgcgtagcttgggaagcactaaggcgccagcttatggctgctgaacaagaggacgatgtggagggggtctgcaagcctctctcctgtgggtgggaaattacagatacactctgtgtaggacctgtgttcacccccgcctccattatgtag

SEQ ID NO: 15391 - DNA, 2508 bp, synthetic construct
  source 1..2508: mol_type = other DNA; note = Synthetic coding sequence
atgaagcggagaaccgatccagagtgcaccgcccccattaagaaacagaaaaagagggtggctgagctggcgttatccctgtcctccacttccgatgacgagcctccttcgagcgtttctcacggagcgaaagccagcactacatccctctcaggatcagattctgaaactgagggaaagcagcattcgtcagacagtttcgatgacgcatttaaggctgatagcctggtcgagggcacttcatccagatattcaatgtataattcagtcagccaaaagcttatggccaagatgggatttagagaaggagaaggtctggggaaatactcccagggtaggaaggatatcgtggaggcctcttcacagaaaggtaggcgaggattgggactcaccctcaggggctttgatcaggaactgaatgtggactggcgagatgagccagaaccgtcagcgtgtgaacaggtcagctggttccccgagtgcactacagaaattcccgatacacaggaaatgtccgattggatggtggtaggtaaaaggaagatgattattgaggacgagactgaattttgcggagaggagcttctccattctgtcttacagtgcaaatcagtgttcgacgtgctggacggggaagaaatgcgtagggctcgtactagagctaacccctatgaaatgatccgaggagttttctttcttaatcgggccgcaatgaaaatggcaaacatggacttcgtgttcgacaggatgtttacaaatccgcgtgactcctacggcaaacccttggtaaaggatcgggaggccgaactgctgtacttcgccgacgtttgtgctggacctgggggattttctgaatacgtgctgtggaggaagaagtggcacgccaaagggtttggcatgaccctcaaaggtcctaacgactttaagttagaggatttctatagtgcttctagcgaactgtttgagccctactacggggaaggaggtatcgatggggacggcgacattacacggcccgagaacatctctgcttttcggaacttcgtgctggataatacagaccggaagggagtgcactttctcatggcagacggcgggttttccgtggagggacaagaaaatctgcaagaaatcttgtccaaacagcttctactgtgtcagtttctgatggccctttcaatcgtacggaccggcggtcacttcatctgtaaaacctttgacctcttcacaccgttctccgtgggtcttgtgtacctgctgtattgctgcttcgaaagggtttgcttgtttaaacccatcacatcccgccctgccaatagcgagagatatgtggtgtgcaagggtttaaaggtgggaattgacgacgtgagagattatctgtttgcagtgaatatcaaactgaatcaactgcgcaacactgactcagacgtcaacttagtggtgccactggaggttattaaaggagaccacgagtttactgattatatgataagaagtaatgaaagccactgctcactgcagataaaggcactggccaagatccacgcctttgttcaggacactactttgagcgagccaaggcaggctgaaatccgtaaagaatgccttcgattgtggggaatcccggaccaggcacgcgtcgctccttcctccagcgatccaaaaagcaagtttttcgagcttattcaggggacagaaattgatattttttcctataagcctacacttttgacttctaagacactggagaagatcaggccagtgttcgactatcggtgtatggtgtcagggtccgagcagaagtttctaattgggctaggcaaaagtcaaatctacacttgggacggacgtcagtcagatagatggattaagctggacctgaaaacagagttgcctcgggacactctgttgagtgttgaaatcgtgcacgaattaaagggcgaaggtaaggcccagcggaagatttccgcgatccacattctggatgttctggtgttgaacggcacggatgtcagagagcagcactttaaccagcgtatccagctcgcagagaaattcgttaaagcagtgtctaaaccaagtcgccctgatatgaaccctatccgcgttaaagaggtgtatcggctcgaagagatggagaagattttcgtgagactagagatgaagataataaaggggtcgtctgggacacctaagttgagctacacagggcgagacgacagacatttcgttcccatgggcctatatatagtccgcaccgtgaatgaaccttggactatgggcttctctaaatccttcaaaaaaaagttcttctacaataagaagactaaagactctactttcgacttgccggccgacagcatcgctccctttcatatatgctattatggaagactgttctgggaatggggagacggaattagagtccacgacagccagaagcctcaggatcaagataagttaagtaaggaggatgtgctaagtttcatccaaatgcacagggcgtag

SEQ ID NO: 15392 - DNA, 252 bp, synthetic construct
  source 1..252: mol_type = other DNA; note = Synthetic coding sequence
tagcaggaactgctgaaggaaaagactcttgctgagcagaatttagaagataccagacagcaattgttagctgctagaagcagtcaagcaaaagcaatcaacacgttagaaacccgggtgagagagctggagcagacactgcaagccagcgaagaacaactccagcaaagcaaaggcattgttgcagctcaggagacccagatccaggagctcgtttcagcctactggagttgctgtataccaggtccctag

SEQ ID NO: 15393 - DNA, 2304 bp, synthetic construct
  source 1..2304: mol_type = other DNA; note = Synthetic coding sequence
atgttcgctaaactgaaaaagaagattgccgaggaaacagctgtggcccagcggcccgggggcgccacgagaatcccgaggagcgtctccaaggaatctgttgccagcatgggcgcagattctggagatgactttgcaagcgacggctcatccagccgcgaggacttatccagtcagctgttgaggaggaatgagcagattcgcaagttggaagcccggctgtctgactatgccgagcaggtaagaaatcttcagaaaatcaaggagaaactggaaatcgctttggagaaacaccaagattcgtcaatgcgaaagttccaggagcagaatgaaaccttccaggctaatagggcaaagatggccgaaggcctcgctttagcgttggccagaaaagaccaagaatggtctgaaaagatggaccagttagagaaggagaagaacatactgactgcccaattacaagagatgaagaatcagtcgatgaatctcttccagcgccgggatgagatggacgaactggagggattccagcagcaggaactgtcaaagatcaaacacatgctgttaaaaaaagaggaatccctgggaaagatggaacaggagctggaagcaagaacaagagagctgtcaagaactcaggaggagctgatgaacagcaatcagatgtcttcggatctgagccagaaattggaggaacttcagaggcactacagtacactggaggagcaaagggatcatgtaatcgcgtctaaaacgggggccgagtccaaaatcaccgccttagagcagaaagagcaggaactccaggccctgatacagcaactgtcaattgatctacagaaggtcacggccgagacccaggaaaaagaggatgtgatcactcacctgcaagagaaagtggcatccctagagaagcgcctggaacagaatctgagtggtgaggagcacctgcaggagctcctgaaggagaagacgctggcagaacagaacctggaggacacaaggcagcagctacttgcagcccgttcctcccaagctaaagccattaatacactcgaaacacgcgtgagggagcttgaacagaccctgcaggcatcagaagaacagcttcagcagagcaaggggatagtcgcagcgcaggagacgcaaatccaggagctcgcggcggctaatcaggagtcttcccacgtgcagcagcaggccctggctttagagcagcagtttctggagcggacacaggccctggaggcgcagattgtcgctttggagaggacacgcgctgcagaccaaaccactgcggagcagggaatgcgccagctggaacaggagaacgccgcgctgaaggaatgtcggaacgaatatgaacgttcccttcaaaatcatcaatttgaactgaaaaagctgaaagaagagtggtcccagagggaaattgtcagtgtcgcaatggcacaagcattagaggaggtgcgtaaacagcgggaagaattccagcagcaggccgccaacctaacagcgatcatcgatgagaaggagcagaatctcagggagaagaccgaggtgttgttacagaaagagcaggagatcttacagctagaaagggggcacaattccgcattgctgcagattcatcaattgcaagccgagctcgaagccctccggactttaaaggcggaggaggctgctgtcgtagccgagcaggaggatttgttgcggctgcgtggaccactgcaggccgaggcgctatctgtgaatgagagccacgtgacaagccgcgcgatgcaggatccagtttttcagttgccgacagcaggacgcacccccaatggcgaggtcggagcgatggatctcacccagctccaaaaggaaaagcaggatctggaacagcagctgctggagaagaacaaaaccattaaacagatgcagcagcgcatgttagaactgagaaaaacactccagaaggaacttaaaattagacccgacaacgagctgttcgaggtcagggagaagcctgggccggaaatggctaatatggcgccctctgtaacaaacaatacagacctgactgacgcgcgcgagatcaatttcgagtatctgaagcacgttgtgctgaaattcatgtcctgcagggaaagtgaggccttccacctgattaaagctgtttccgtgctgttgaatttctcacaagaggaagaaaatatgctaaaggaaacgctggaatataagatgtcctggttcggatccaaacccgcaccaaaaggttctattcggccctcaatctctaatcccaggataccctggagctag

SEQ ID NO: 15394 - DNA, 291 bp, synthetic construct
  source 1..291: mol_type = other DNA; note = Synthetic coding sequence
tgagccaaaattaaggctcgggacctacggggaaaaaaaaaggaggaactactcaagcagctcgacgatttgaaagtcgagctttcgcagctgagagttgcaaaggtgaccggaggagccgcctctaaactgtcaaagatcagggtcgtccggaaatcgatcgcccgggtgttgactgtcataaaccagacacagaaggaaaatctaaggaaattctataaagccgctgccggcggcccttgtatccagatggaccgggtgctgcctcagcctcctgcctgtagctgctag

SEQ ID NO: 15395 - DNA, 1035 bp, synthetic construct
  source 1..1035: mol_type = other DNA; note = Synthetic coding sequence
atgcggcggcggagggaggaagagggaatccagctgcgcaagcagaaacgagagcagcagttgtttaagcggagaaatgtggagctgataaatgaggaagccgctatgtttgactctctcctgatggacagctacgtgtccagcacaactggggagagtgtcatcactcgcgaaatggttgaaatgcttttttctgatgattccgacctgcaactcgccacaacccaaaaatttcggaagctgttaagcaaggaacctagcccacctattgatgaagtaattaacaccccaagggtggttgaccggtttgttgagtttcttaagaggaatgagaactgcactctacaggcagtttgggctctcgggaatatcgccggagattccagcgtttgccgcgactacgtacttaactgtagcattttaaatccattgctgactttactcacaaagtccactcgccttacaatgacccgcaacgctgtatgggccctgtccaacttatgccgcggcaaaaaccccccccccgaattcgccaaggtcagcccttgcctgccggtgctttcacgattattgttcagtagcgatagtgacctgttggctgacgcctgttgggctctttcgtatctgtctgacggcccaaatgaaaagattcaggccgtaatcgactccggggtttgtagaagactagtggaactcctgatgcacaacgattataaggtggcatctccagctctgcgggccgttggaaacatcgttaccggcgacgacattcagactcaggtgatcctaaactgctctgccctcccatgcctgttacacctactttccagtcccaaggaatccatccgcaaggaggcctgttggaccatttccaatattaccgcaggtaatcgagcgcagatccaggccgtgatagatgccaacatcttccctgtgctgattgagattctgcaaaaggctgaatttagaacccggaaagaggcagcatgggcgataacgaacgctacctccgggggcactccagaacagatctag

SEQ ID NO: 15396 - DNA, 582 bp, synthetic construct
  source 1..582: mol_type = other DNA; note = Synthetic coding sequence
atgcctacaacctctaggcccgctctggacgttaagggaggcacctcccccgcaaaggaagatgccaatcaggaaatgtcttccgtcgcatattctaatctggccgtgaaggatcgtaaggctgtggcgattctgcactacccaggtgtggctagtaatggcacaaaagcaagtggcgccccaactagtagctccggttctccaattggttctcccaccactacaccccccacaaagcctcccagtttcaatttacaccccgctcctcatcttcttgcatctatgcacttgcagaagctgaattcacagtaccaggggatggctgctgcaacacccggccagcctggggaagcaggaccgctccagaactgggatttcggcgcccaggcagggggggctgaaagcctgtctcccagtgccggcgctcagagccctgcaatcatcgattcagatcctgttgacgaggaggtgctgatgagcctggttgtcgagctgggcttggatagagcaaatgaattgcctgagctctggctgggacaaaacgaattcgatttcacagccgacttcccttctagttgttag

SEQ ID NO: 15397 - DNA, 1611 bp, synthetic construct
  source 1..1611: mol_type = other DNA; note = Synthetic coding sequence
atggagaccatggccagtcctggaaaggataactatagaatgaagtcttataaaaacaatgccctcaaccctgaagagatgagacgacggagagaagaggaggggattcaattgagaaagcagaagcgggaacagcagctgtttaaaagacgtaacgtggagctcattaatgaggaagcagcgatgttcgacagcctactgatggattcttatgtatcatcaacaacaggcgaaagtgttattacacgcgagatggtcgagatgctgttttcagacgactctgatctacagctggctacaacccagaaatttcgtaagcttctgagtaaagagccatcaccccctattgacgaagtgatcaatacacccagagtcgtcgatcgttttgtggaattcctcaaaaggaacgagaactgcacactacagttcgaagcggcatgggcgctgaccaatattgcatccggcacttcccaacagacaaagatagtgattgaagccggagctgtgcctatcttcattgaactcctgaacagtgatttcgaagacgtgcaggaacaggctgtgtgggcattaggaaacatcgccggcgattccagtgtctgccgggattacgtgcttaattgcagtatcctgaatccactgttgacactactgacaaagagcacgaggttgacaatgacacgcaatgcggtatgggctctcagcaacctatgccgggggaaaaatccaccaccggagtttgccaaggtgtcaccctgtttgcctgtgctgtccaggctcttattttcatctgattccgatctcctcgcagatgcatgttgggccctgagttatctgagtgacggacctaacgaaaagattcaggctgtgattgattcgggcgtgtgtaggcggctagtggaactcctcatgcacaacgattacaaagttgcttctcctgcactccgtgctgtgggaaacatcgtcaccggcgatgatatccagacgcaggtgattctgaattgctccgctctgccatgcctgctgcacttactgtccagtccaaaggagtccatcagaaaggaggcatgttggacaatcagcaatatcacggcgggaaaccgcgcccagattcaggcagtgattgacgctaacatcttcccagtactcatcgagatccttcagaaagctgagtttcggacaaggaaagaggccgcatgggccattaccaatgctacctcaggcggcactcccgagcaaattagatacttggtctcgctgggatgcatcaaaccactctgcgatctactgaccgtgatggactccaaaatagtgcaagtcgcactgaacgggctcgagaatatcttgcgccttggtgaacaggagggcaagagatcaggatccggagtgaacccctactgcggcttaatcgaagaggcctatggcttagataaaatagaattcctgcagagccatgagaaccaggagatttatcagaaggctttcgacctgattgaacattatttcggcgttgaagacgatgacagctctcttgctccccaggtggacgagacacagcaacagtttatctttcagcagcccgaggctcctatggagggatttcagttatag

SEQ ID NO: 15398 - DNA, 2769 bp, synthetic construct
  source 1..2769: mol_type = other DNA; note = Synthetic coding sequence
atgatcactagcgcagccgggatcatttccctgctcgacgaagatgagccacagcttaaagagttcgctctgcataaactcaacgcggtggtcaacgacttttgggcggagatttccgagtctgtggacaagatcgaagtcctgtacgaggacgagggattccggtcacggcagtttgccgctctcgtggctagtaaagtgttttaccatctgggcgcatttgaagaatccctgaattacgctctgggggccggagatctctttaacgtcaacgacaattctgaatacgtggagacaatcatagccaaatgtatcgatcactacacaaagcagtgtgtagaaaatgcggatcttccagaaggagaaaaaaagccaattgatcaacgcctcgagggaattgtgaacaaaatgtttcagcgatgcctcgatgaccacaagtacaaacaggcgattggcatcgcccttgaaactcggagactcgacgttttcgaaaagaccatactcgagtctaatgatgtgcccgggatgctagcatactctttaaagctctgtatgagcctcatgcagaacaagcagttccggaacaaggtcttgagagtgctggtcaagatttacatgaacctggagaagcccgatttcattaacgtgtgccagtgtctaatcttcttggacgatcctcaagctgtcagcgatattctggagaaactggtgaaggaagataatctactcatggcttatcagatctgttttgacctctacgaatctgcctcccagcagttcttgagcagcgtcatccaaaacttaagaactgtgggaacccctattgccagtgtcccggggagcactaataccgggaccgtgcctggatctgaaaaggatagcgacagcatggagaccgaagaaaaaacatctagcgcatttgtaggcaaaacacctgaggcttcccctgagcctaaggatcaaacactgaaaatgattaagatcctgagtggggagatggcgattgaactgcacctgcaattcctgatccgaaacaacaatacagatttgatgatcttgaagaatacgaaggacgctgtgcgaaacagtgtgtgccacacagcaactgtgattgccaacagcttcatgcactgcggaactaccagcgatcagttcttgcgagacaatttggaatggctggcacgggccactaactgggccaaattcactgccaccgcatctttgggagtgatccacaagggtcacgagaaagaggccctacagcttatggccacttatctgccaaaagataccagccctggctcagcatatcaagaggggggcggcctgtacgctctgggactgattcatgccaatcacggcggggacatcatagattatttgttaaaccaactgaagaatgcgtccaacgacattgtacggcatggagggtccctgggtctgggtttggccgccatggggacagcacgccaggacgtgtacgacctcttgaagacgaatctctaccaggacgatgcagtgactggcgaagcagccggcttggcactggggcttgtaatgctggggagtaagaacgcacaggccattgaagacatggtgggatacgcccaggagacacaacatgagaagattctgcgggggcttgctgtgggcatcgctctggtgatgtacggaagaatggaggaggcagatgccctcattgagtctttgtgcagagataaggaccctatcctgaggcgcagcgggatgtacacagtagccatggcgtattgtggcagtggaaacaataaggctatccgccgactcctccatgtggctgttagcgatgtgaacgacgacgtgcgtagggccgcagtggagtccctcggctttatcctcttcagaacccctgagcagtgcccctcggtagtgagcctgctgtctgaatcttataatccccacgtgaggtacggagcagcgatggccctcggaatttgttgcgccgggaccggaaataaggaggcgataaatctgctagagccaatgaccaacgatccagtcaactatgtgaggcaaggggccctgattgcatcagccctgattatgatccagcaaaccgaaatcacttgtccaaaagttaaccagtttcgacaattgtacagtaaggttatcaacgacaaacatgacgatgtcatggccaagttcggcgctattctcgcccagggcatcctggacgccggaggtcataatgtcaccatcagcctccagtcacgcaccggacacacccatatgcctagtgttgtgggcgtccttgtcttcacacaattttggttctggttcccacttagtcacttcttgagcctggcctatacacccacatgtgttattggactcaacaaagatttgaaggtatccactgctgtgctctctatcaccgctaaggccaagaagaaggagaaggagaaagagaagaaggaggaagagaagatggaggtcgatgaagcagaaaagaaggaggaaaaggaaaaaaagaaggagcccgagccaaattttcagctgttggacaaccctgcacgtgtgatgcccgcacaactgaaggtcttgactatgcccgaaacctgtcggtaccaaccattcaaaccgttgtccatcggtggaatcatcattcttaaggacacatctgaggatatagaggagctggttgagccagtcgctgcgcacggacccaaaatcgaggaagaggagcaagaaccagagcccccagaaccctttgagtatattgatgactag

SEQ ID NO: 15399 - DNA, 1227 bp, synthetic construct
  source 1..1227: mol_type = other DNA; note = Synthetic coding sequence
atgccagaagagcaagctttcagcgtgctggtcaaaattatgttcgattacggcttgcgagagctgttcaagcagaacttcgaagatttgcattgtaagttctaccagcttgagaggcttatgcaggagtacatacctgacttatataaccattttctggatatttcactggaagctcacatgtacgctagtcagtggttcctcaccctgttcaccgccaagttcccactgtacatggtcttccatattattgatcttctgctctgtgaggggatatccgttatatttaacgtagcccttggccttttgaagaccagtaaggatgatctactccttaccgattttgagggcgccttaaaattttttcgcgtgcaactgcccaagcgctatcggagcgaggagaatgctaagaaacttatggagctggcctgtaatatgaagataagccagaagaaactgaaaaaatatgagaaagaatatcatacaatgcgagagcagcaagcccaacaggaggaccctattgagcgtttcgagcgggagaaccggcggctccaagaggccaatatgcgcctggaacaagaaaatgacgatttggcacatgagctcgtgacttcaaagatagctttaaggaaagatctggacaatgctgaggagaaggcagacgctctgaacaaagagcttctgatgaccaagcaaaaattgatcgacgcagaagaggagaagcggcgcctggaagaagaatctgcacagctgaaggagatgtgccgacgagagttagacaaagctgaaagcgaaatcaaaaagaacagctccattataggagattacaaacagatctgcagtcagctcagtgagcgcctggagaagcaacagacagctaacaaagttgagattgagaagatcaggcagaaagtagatgattgcgaaagatgtagggagttttttaataaggaaggaagggtcaaaggaatcagctcaaccaaggaagtgttggacgaagatacggatgaagaaaaagagaccttgaagaatcagttgagagagatggaactggagttggctcagacaaagcttcagcttgtggaggccgagtgcaagattcaggatctcgaacaccatttaggactggccctgaatgaggtacaagcggccaaaaaaacatggtttaacagaacgctcagctctatcaagacagcgacaggggtgcagggtaaagaaacgtgctag

SEQ ID NO: 15400 - DNA, 3210 bp, synthetic construct
  source 1..3210: mol_type = other DNA; note = Synthetic coding sequence
atggacgacaaagcttcagttggcaaaatcagcgtgagtagcgacagcgtgtcgacactcaatagtgaggattttgtcctggtgtcccgccagggcgacgagaccccttccaccaataacggtagtgacgacgaaaagactggcctgaaaatcgttggaaatggctcagagcagcagctgcagaaagagctggccgacgtactgatggacccccccatggatgatcagccaggagaaaaagagctggtcaagcgttcgcagcttgacggtgagggcgacggccctctctccaaccagctgagtgccagttctaccattaatccggtgcccttggtgggactgcagaagcccgagatgtctctgcccgtaaagcctggacagggagactctgaggcatctagtccctttacgcctgtcgctgacgaagactcagtcgtcttttcaaagttgacctatctgggctgcgcgagtgtgaacgcaccgcgctccgaggtggaagcgctgcggatgatgagcattctgagatctcagtgccagatctccctcgacgtcaccctgagcgtaccgaatgtgtcagagggaatcgttcgattgctggacccccaaacgaatacggagattgcaaactacccaatatataaaattctattctgtgttaggggacatgatggcactccggagagcgattgcttcgcttttacagagtctcactataacgccgaactcttccgtatacacgtcttccggtgcgaaattcaggaagccgtcagccgcatcctgtacagcttcgcaactgctttccgccggtccgccaagcagacacccctctctgctaccgcagccccacagacccccgattctgacatcttcaccttcagcgtctccttggagatcaaagaggacgacgggaaggggtacttctccgcggtcccgaaagacaaggaccgccagtgcttcaagttgagacagggcatcgacaagaaaattgtgatttacgtgcagcagaccaccaacaaagagctggccatcgagcgctgcttcggcttgttgcttagtcccggcaaagacgtacgaaattccgacatgcacttactggatctcgaatcaatgggaaaaagtagcgacggtaagagttatgttatcacaggcagctggaatcccaaatcgcctcatttccaggtggtcaacgaagaaacgcctaaggataaagtgctgtttatgactacagccgtggatctggtcatcaccgaggtgcaagaaccggttagatttctcttagagaccaaggtgagagtgtgctcccctaacgaacgcctcttttggcctttttccaagcgcagcacaaccgaaaattttttcctgaaactgaaacagatcaagcagcgagagcggaagaataacacagatacgctgtacgaggtcgtctgtctggaatccgaaagtgagagggagcgtcgaaaaacgaccgcatctccttcagtccggctcccccaatcagggagccagtccagcgttatccccagcccaccggaagatgatgaagaggaggacaacgatgagccgttgctgtcaggatctggcgacgttagtaaggagtgtgccgagaagatcttggagacctggggagaactgttgagtaaatggcacttgaatctaaacgtgagaccaaaacagttgtcttccttagttaggaatggagtgccggaggctctccgaggtgaagtttggcagttgcttgctggatgccacaataatgatcaccttgtcgagaagtatcgaatcctgattaccaaggagtcaccgcaggactcagcaatcacacgggatattaacagaacctttcccgcgcatgactacttcaaggacaccggaggggacggccaggactctctctacaagatctgtaaggcttattcggtctacgacgaagagattggctactgccagggtcagtctttcctggctgctgtcttgctcctgcacatgcctgaggagcaggccttctcagtccttgtgaaaatcatgtttgactatggactgagggaactattcaaacagaacttcgaagacttacactgcaagttctatcagctggagcggttgatgcaggagtacatccctgacctgtataatcacttcctcgatatttccctcgaggcgcacatgtatgcttcccagtggttcctcaccctgttcactgccaagttcccactttacatggtttttcacatcatcgacctactgctgtgcgaagggatcagcgttatctttaatgtggcacttggtttgcttaagaccagtaaggatgatctcctgctgactgattttgagggggctcttaaattttttcgggtgcagctgccaaaacgttatcgatcagaggagaatgcaaaaaaattgatggagctggcttgtaacatgaaaatatcccaaaagaaactgaagaaatacgagaaggaataccacaccatgagggaacagcaggcccagcaggaggacccgatagagcggtttgaaagggagaacaggcggttgcaagaggcaaatatgcgcctggagcaggagaatgacgatctggcccacgagctggtgacttccaagattgcactgagaaaagatctggacaacgctgaagagaaagctgacgccttgaacaaggagctgctcatgacaaagcaaaagctcatagacgcggaagaggaaaagcggcgcctggaggaggagagtgctcagcttaaggaaatgtgtaggagagagttagataaggccgaatctgagatcaagaaaaactcgtccatcattggagactacaaacagatctgcagtcaactgtccgagcgccttgagaagcagcagacggcaaataaagtcgagattgaaaaaatccggcagaaggtagatgactgtgagcgttgtagagagtttttcaacaaggaaggaagagttaaaggcatctcatcaactaaggaggtcctggatgaggacactgatgaggagaaagagacactgaagaaccagcttagagaaatggaactcgaactagcccaaactaaactccaactagtggaagctgaatgcaaaatccaggacctggagcatcacctcgggctggcgctgaatgaggtccaggcggctaagaaaacctggtttaaccgaactttgtccagcatcaagaccgctactggcgtccagggaaaggagacctgctag

SEQ ID NO: 15401 - DNA, 2808 bp, synthetic construct
  source 1..2808: mol_type = other DNA; note = Synthetic coding sequence
atgcagaggaaattggtgaccctagtcaactgccagttagtcgaagaagaaggtcgagtcagagcgatgagggccgcccggagtctcggtgagcgaacagtgaccgaactgattctgcagcatcaaaatccccaacaattgagcgccaacctatgggctgccgtcagggccagaggatgccagtttctcgggcctgccatgcaggaagaagccctgaagctggtgctactggcattagaggacggctcagcgctctcccggaaggtcctggtgctctttgttgtacagaggctagaaccacggttcccccaggcatctaagacctcaatcggccatgtggtgcaacttctctacagagctagctgcttcaaagtgaccaaacgcgacgaagactccagcctgatgcagctgaaagaggagtttagaagctacgaagccctgcgcagggaacatgacgcccagatcgttcacattgcaatggaggcagggcttaggattagtcctgaacagtggtcctcgttgctttatggggaccttgctcataaaagccacatgcagagtattatagataagttgcagagtccagaatcttttgccaagtccgtccaagagctcacaatcgtgttgcagaggacaggtgacccggctaacttgaaccggctgaggccccatctggagcttcttgctaatatcgaccccaaccctgatgcagtgtcacccacatgggaacagctggaaaacgccatggtcgccgttaaaacggtggtccatggcctggttgatttcatccaaaattactctaggaaaggacatgagacgccgcagcctcagccaaacagtaagtataagaccagcatgtgcagggatctgcgacagcaaggtggttgtccaagaggtaccaactgtacattcgcacactctcaggaggagctggaaaaatacagactccgtaataagaagataaacgcaaccgtccgaacctttccactcctcaataaagtcggcgttaacaataccgtgactaccaccgcagggaacgtgattagtgtcatcggctccacagagacaactggaaagatcgtaccctcaaccaacgggatttctaacgcggaaaactccgtttcacaacttatctcccgcagtactgacagcaccttgagagcactagaaacagtgaagaaggtcgggaaggttggagccaacggccagaatgccgccggcccgagcgcggactcagttactgaaaataagattggatcacccccaaaaacacccgtgtccaatgtggctgcgacaagtgccggtccaagtaacgtgggaaccgagcttaactccgtcccccagaaaagcagcccattcctgacgagggtcccggtatatcccccccacagtgaaaacatccagtactttcaggaccctaggacccagatccctttcgaagtcccccaatatccccaaacgggatactacccgccacccccaactgtgcctgccggcgttgctccctgcgttccgcggttcgtgaggtcaaacaacgtgccagagagtagcttgcctccagcctcaatgccttatgccgaccactatagtactttttcccctcgcgaccgaatgaatagtagcccgtaccagccaccgccacctcaaccctatggacctgttccgcctgtgcctagcgggatgtatgcgccagtgtacgactcgagaagaatctggagaccacccatgtaccagcgcgacgatatcatcaggtcaaattctttacctccaatggacgtcatgcacagctccgtttatcagacgagcctgcgcgaaaggtataactccctggacggttactattctgttgcttgccagcctccgagcgaaccccgaaccactgtgccgctgcctagagagccttgcggtcacctcaagacgagttgcgaggagcagatcagacggaagccagatcaatgggcacagtaccacacacagaaggcccccctggtgtcatctacgttacccgtcgctacacagtcaccaacacctccatctcccctattttcggtggattttagggctgatttctcagaatctgtgtctggcacgaagtttgaagaagatcatcttagtcattactccccttggtcttgcggcacaattggcagttgcattaacgctatcgattccgagcctaaggatgtcatcgccaactctaacgcggtcttaatggacctggacagcggagatgtaaaaaggcgagtgcaccttttcgaaacccagcggaggacgaaggaagaggatccaatcattccgttctcggacggcccaattatcagcaagtggggggctatcagcaggtctagtagaaccggctaccacacaactgaccccgtgcaggccaccgccagtcaggggtcggctactaagccaatatccgtgtctgattatgtgccatatgtaaacgccgtggacagtagatggagcagttatggcaatgaagccactagttctgctcattacgtggagagggacagattcattgtgactgacttgtccggacaccggaagcactcaagcacaggagacttgttatcgctggagctgcaacaggctaagagcaatagcctcttgctgcagcgagaggcaaacgccctggctatgcaacagaagtggaacagcctggatgagggcagacacctcaccctgaacctgttatccaaggagattgagttgcggaatggtgaggtgaagaaactgaacctgtcggcgagttgccttatgtacctgttttctgcagccgccagctggctgtaccactattag

SEQ ID NO: 15402 - DNA, 1437 bp, synthetic construct
  source 1..1437: mol_type = other DNA; note = Synthetic coding sequence
atgcccgtgcaagcagcacaatggaccgagttcctgtcatgcccaatatgttacaatgagttcgacgagaatgtgcacaaacccatcagcctcggctgctctcatacagtgtgcaagacctgtctgaataaattacacagaaaggcctgccctttcgatcagacagcaattaacaccgatatcgatgtcttgcctgtgaatttcgccctactgcaactggttggagcccaggtgcccgaccatcagtctataaagctgagcaaccttggggagaataaacattatgaggtagcaaaaaaatgtgttgaagacttggctctgtatctgaaaccgctgtccggcgggaagggagtggcatcactgaaccagtcagcgttatcccggccgatgcagcggaaattagtcacactcgtcaactgtcaactcgtggaggaggaaggtcgcgtgcgcgccatgcgcgctgctagatctttgggagagaggaccgtgactgaattgatcctccagcaccagaacccacagcaactctctgcaaacctgtgggctgcggttagggcacggggctgtcaatttctggggccagctatgcaggaagaagctctcaagttggtgttactggccctcgaagatggtagtgcgttatcaaggaaagtgcttgtgctttttgtagtccaacgacttgaacctaggtttcctcaagcctcaaaaacttctataggccacgttgtccagcttctctaccgcgccagttgtttcaaggtgaccaagagagatgaagattcatcccttatgcagctgaaagaagagttccgctcttatgaggccctgcgaagggagcacgacgctcagattgtacacattgccatggaagccgggctccgcatttcccctgagcagtggagttccctgctgtacggggacctcgcccacaagtctcacatgcagtctattattgacaaactccagagcccagagtcttttgcgaaatctgtgcaagagctcactatcgtgctgcagcgcacgggggaccccgccaatctgaatcggctgcgaccacacttggaactcctggcgaatatcgaccctaatccggacgctgtctcccccacatgggaacagctcgagaacgccatggtcgccgtgaagaccgtggtgcacggacttgtggactttattcagaattacagccggaaaggccatgaaacaccgcagccccagcccaattccaaatacaagacatccatgtgtcgcgatttacggcagcagggtgggtgccctcgcggaactaattgcacattcgcccactctcaggaagagctggagaaataccggctgcgcaacaaaaaaatcaatgctactgaagttttgaaacagcagggaaaattattccaggtccagacagaatttcagatgcagaagactgtctttccatcctag

SEQ ID NO: 15403 - DNA, 3576 bp, synthetic construct
  source 1..3576: mol_type = other DNA; note = Synthetic coding sequence
atgcccgtgcaagccgcccagtggaccgaattcctcagctgtcctatatgttataacgagtttgatgagaacgtccataagcccattagtctcgggtgttcccatacagtctgtaaaacatgtctgaataagctgcacagaaaagcgtgccctttcgaccagactgcaataaacactgatattgacgtgttgccagtgaatttcgctctcttgcaactcgtgggagcgcaggtgccagaccatcagtctatcaagctgagcaacttgggggagaataaacactacgaggtggctaagaagtgtgtggaagaccttgctctgtatttgaagcccctgtctggtggaaagggtgtggcttctctaaatcaaagcgccttgtctaggcccatgcagaggaagctggttactttagtgaactgccagctggtcgaggaggagggcagagtccgggcaatgcgtgcagcgagatcgctgggggagcgcacggtgacagagctaattctgcagcaccagaaccctcagcagcttagtgccaacctctgggctgccgttcgcgcccgaggctgtcagtttctgggccccgcgatgcaagaagaggccctgaaattggtactgttggctctagaggacggctcggcactgtctcgaaaagtgctggtgctcttcgtggtgcaaagactggagccgcgcttccctcaggcgagcaaaacatctatcgggcacgtcgtgcagcttctctatcgcgccagttgtttcaaagtaaccaagcgcgacgaagactcaagtcttatgcagttgaaagaggagtttcgaagctatgaggccctccggcgggaacatgatgctcaaatagtgcacatcgctatggaagctggcctcaggatcagtccagagcagtggtctagtctactgtacggtgacctggcccacaaatctcatatgcagagcatcatcgataagctgcagtcccctgaatctttcgcaaaatcagttcaggagctcaccattgtgctgcagcggacaggcgacccagccaatctgaataggctgcggccccatctggagctgttggcaaatatagatccgaacccggatgctgtgtcaccgacctgggaacagctggagaacgccatggtggcagtgaagaccgtcgtacacggactggtggatttcatacagaattactcccgcaaggggcacgaaacaccgcagcctcagccaaactctaagtacaaaacttcaatgtgcagggatctgagacagcaaggcgggtgtcccaggggaacaaattgcacctttgctcatagccaggaagagctggagaagtatcgcctgagaaacaaaaaaatcaacgcgacagtacggaccttcccactgctgaacaaagtcggtgtgaataatacagttacaacaactgccggaaacgtcatctccgttattggcagcactgagacaacagggaagatcgtgccttccactaacggcatatccaacgctgagaattctgtgagccagctgatctcacgaagcaccgacagcaccttacgtgcactggaaacggtgaaaaaggtgggcaaggtaggcgcaaacggccaaaacgccgctggcccatccgctgattctgttactgagaataagattggctcccctcccaagaccccagtgagcaatgtggccgcaacttccgccggaccttccaacgttggtacagagctaaattctgttcctcagaaatcatccccctttctcacccgggtgccagtgtacccccctcactctgaaaacattcagtacttccaggatccccgcacacagattccctttgaagtgcctcagtatcctcaaaccggctactatccccctccgcctacagtaccagcgggggtcgccccctgcgtcccgcgttttgtaagatctaataacgtccccgagtctagcctgccccctgcctctatgccctatgccgaccactattcaaccttcagtcctcgcgacagaatgaattccagcccttaccagcccccacccccccagccttacggccccgtgccccccgtgccttctggtatgtacgccccagtatatgactccagacgcatttggcgtcctcctatgtaccaacgtgacgatattatcagaagtaattccttgccccctatggacgtgatgcatagtagcgtataccagacctcgcttagagagagatacaactccctggacgggtattattcagtggcctgccagcctcctagtgagccccggactaccgtgccattgccccgcgagccctgtggccatttgaaaactagctgtgaagagcagattagaagaaagccagaccagtgggcccagtatcacacacagaaggctcctcttgtaagctctaccctgcccgtggcaactcaatccccaacaccacctagcccactcttttccgtggatttcagggcagacttctcagagtccgtgtccggcacgaagtttgaagaagaccacctgtcacactattctccgtggtcctgcggcacaattgggtcttgtatcaatgccatcgattctgaaccaaaagacgtcatcgcaaattcaaacgccgtactgatggatttggatagcggggatgtgaaacgaagggtccatctctttgaaacgcagagaaggactaaggaagaggatcccataattccattctctgatggccctatcatcagcaagtggggtgccatttccaggtcgtctaggactggatatcataccaccgaccctgttcaggctactgctagtcagggttcggctaccaaaccaatcagcgtgtccgattatgtgccgtacgttaatgccgttgacagtagatggtcctcgtatggtaacgaggccacatctagcgcccactacgtagagcgggataggtttattgttaccgacctctcaggccatcgaaaacattcctctactggcgatctgctcagccttgagcttcagcaggctaagtcaaacagcctgctcctacagagagaggcgaatgctctcgcaatgcaacagaaatggaactccctcgacgaaggccgccacctgactctgaaccttctgagcaaggaaattgagctgcgaaacggtgaattgcagtccgattataccgaggacgcaactgatactaaacctgatagagacatagagctggagctctccgcactggataccgatgagcccgatggacaaagcgaacccatagaggaaatccttgatatccaacttggaatctcttcccagaacgatcaactgctgaatggcatggctgtggaaaatggccatccagtgcagcagcaccaaaaggaaccccctaaacagaagaaacagagcttaggcgaggatcacgtgattctggaggaacagaaaactattcttcctgtgacatcttgcttctctcagcccctccccgtgtctatcagtaacgcaagttgtctgcccatcactacatcggtgtccgctgggaatcttatcctgaaaacccatgtgatgtccgaggataaaaatgacttcctaaagcctgtggccaacggcaagatggtcaactcttag

SEQ ID NO: 15404 - DNA, 1569 bp, synthetic construct
  source 1..1569: mol_type = other DNA; note = Synthetic coding sequence
atggcagcctcagctaaacgcaagcaggaggagaagcacctgaagatgctgagagatatgacggggctgccacataaccgaaagtgttttgactgtgaccagcgggggccaacttacgtaaacatgaccgtcggctcattcgtgtgtacaagctgctccggatcattgcggggactgaaccccccgcaccgagtcaaaagcatctcaatgactacattcacgcagcaagagatcgaattccttcagaagcacggcaacgaagtttgcaagcaaatatggctgggactgttcgatgatcggagctctgcaatccctgatttcagagacccacagaaagtgaaagaatttctgcaagaaaagtacgaaaaaaagaggtggtatgttccccccgagcaggccaaagtggtggccagtgtccacgccagcattagtgggagcagcgctagctccacttcatcaacgccagaggtgaagccgctgaaatcattgttgggtgattctgcaccaaccctacacctgaacaagggcacacctagccagtccccagtggttgggcggagtcaggggcagcaacaggaaaaaaagcagttcgaccttctctctgacctagggtcagatatttttgcggctcctgccccccaaagtactgctacagcaaactttgctaattttgcgcactttaatagccacgcaggtggaagcgccgccagcgtgaatgcgaattttgcgcactttgataattttcctaagtccagcagcgcagattttggcacctttaatacatcccagagtcatcagacagcttcagcagtgtcaaaagtaagtacaaataaagctgggctacagacggcagacaaatacgccgccctggccaacctggataatattttcagcgctggacagggtggggaccagggtagcggattcgggactacaggcaaagcccccgtggggagtgtggtgtctgtcccctctcaatcttcagcttcttccgacaagtatgccgccctggccgagctcgactcggtcttctcgagtgctgccactagtagcaatgcttatacgtctacctccaacgcgagcagtaacgttttcggaaccgtccccgttgtggcctctgcccagactcagccagcgtcctcttctgtgccggccccttttggcgccacgccctcaacgaaccccttcgtcgccgccgctggcccatctgtggcttcctccacaaatccatttcagaccaatgcacggggcgcaacagctgcaacttttggcacagcatcaatgagcatgcctacaggcttcggcacccccgcaccttactcccttcctacatccttttctggttctttccagcagccagccttccccgcacaggccgctttccctcagcagaccgcattctcccagcagcccaatggagcggggtttgccgcattcggacagacaaagcccgtggtcacgccgtttgggcaagtggccgccgctggtgtcagcagcaatcctttcatgaccggagcacccactggtcagtttcctacaggatcatcttccactaacccatttctgtag

SEQ ID NO: 15405 - DNA, 1524 bp, synthetic construct
  source 1..1524: mol_type = other DNA; note = Synthetic coding sequence
atgcaagacgatagcattgaggctagtacaagtatttctcagttgctgcgtgaatcctatctggctgaaacacgccaccgaggaaataacgagcggagcagagctgagcccagcagtaacccctgtcactttggaagccccagtggggctgctgagggtgggggcggacaggatgacctcccggacctttccgcttttcttagccaggaagaactcgatgagtccgtgaacctcgctcggctcgcaatcaactacgatcccctggaaaaggcagatgagacacaagcccggaagagactgtcgccagatcagatgaagcactccccgaatctaagcttcgagcccaacttttgtcaagacaaccctagatctcccacctcttctaaggagtccccacaggaggcaaagaggccccagtattgcagcgaaactcagtctaagaaagtttttctgaacaaagctgcagactttatcgaggaattgtcatcactgtttaagagccactcctcaaagcgtatcaggcccagagcctgtaagaaccataagagcaagctggagagtcagaacaaggtgatgcaggagaattcctcctcgttctccgatctgtcagagcgcagagagcggtctagcgtgcccattcccatccctgccgatacacgggataacgaggtaaaccacgccctggaacagcaggaggcaaagcgaagagaggccgaacaggccgcatcagaggctgcggggggtgatacaactcctggcagcagtccgtccagcctgtattacgaggagcctctcgggcaacccccacgattcacgcagaagctgcgctcgagagaggtgccggaagggacacgtgtccagctggattgtatcgtggtcggcattccgcctccacaagtccggtggtactgcgaagggaaggagctggaaaactctccggatattcatattgtgcaggctgggaatttacactccctgactatcgcagaagcttttgaagaggatactggaaggtacagctgtttcgctagcaatatctacgggactgactctaccagtgctgagatctacatcgagggcgtgagctccagcgactccgaaggcgacccgaataaagaggaaatgaatagaatacagaaaccaaacgaggtgtcatctccgcctacaaccagcgccgtgattcccccagcggttcctcaggcccagcatctggtagcccagcctcgcgtggcaaccatccagcagtgccagagcccaactaattacctgcagggactcgatggaaaacctataatagcggcaccagtgttcactaagatgctacagaatttgtctgcttccgaaggccagctagtcgttttcgagtgcagagtcaagggagccccctccccaaaagttgagtggtacagagagggaacacttatagaggacagtcctgattttagaatcttgcagaaaaaaccaagatccatggcagaaccaggaaaggatgactttaatttcaacttactggtgtatgaatag

SEQ ID NO: 15406 - DNA, 3150 bp, synthetic construct
  source 1..3150: mol_type = other DNA; note = Synthetic coding sequence
atgttgtgttggggcaatgcctcctttgggcagcttgggctcggcggcattgatgaggagattgttctggaaccgcgtaaaagtgattttttcattaataaaagagtaagggatgttggatgcggcctgcgacatacagtgtttgtgctggacgatgggaccgtgtatacctgcggctgtaatgacctgggtcagctcggccacgagaagtcacggaaaaaacctgagcaggttgtggctctggacgcacagaatatcgtggctgtttcttgtggcgaagctcacacgctcgcactgaacgacaagggccaggtgtatgcttggggattagattcagacggtcagttagggctggtggggagtgaggagtgcatcagggtgccgagaaatataaagagtctgagcgacattcagatcgtacaggtggcctgtggctattaccactctcttgccctttccaaggcaagtgaggtgttctgttgggggcagaataagtacggccagctcggactgggtacagactgcaaaaagcagacctccccccagctcctgaaaagcctgctaggcataccctttatgcaagtcgctgcagggggcgcccattctttcgtacttaccctgagcggggccattttcggatggggaagaaataaatttgggcaacttggcctgaacgacgaaaacgacagatacgttccaaacctcctaaaatctctgcgctcccagaagattgtgtatatctgttgcggcgaagaccacaccgccgctttgacaaaggaagggggtgtctttacttttggggcgggggggtacggacagttgggacacaactcaacctcccatgaaattaacccccgaaaggtgtttgagctgatgggatccatcgtcacagaaatcgcatgcgggcgccagcatacaagcgccttcgtgccgagctccgggagaatctattcattcggattgggcgggaacggacagctagggacaggcagcacatccaataggaaatcaccctttactgtcaaaggaaattggtatccttacaacggccagtgcttaccggacattgactcagaggagtatttctgtgttaagcggatcttcagtggaggtgatcagtccttctctcactatagcagcccccagaactgcggtccgcctgatgacttccgttgtcccaatcccacaaagcagatttggaccgttaacgaagccctgatccaaaagtggctgtcatatccttccggaaggtttccagtggagatcgcaaatgagattgacggcaccttcagcagtagtgggtgtctgaacgggtccttcctggccgttagcaatgacgatcactatcggactggcaccagattctctggcgttgacatgaatgccgcccggctgctctttcataaactcattcagcctgaccatccccagatctcccaacaggtggccgcttctctcgagaagaatctgattccgaaattaaccagctctctgcccgacgtggaggcactgaggttctacttaaccttaccagagtgcccattgatgagcgatagcaacaactttaccacgatcgcaatccctttcggcaccgccctcgttaatctggagaaagcacccttgaaagttttggaaaattggtggagcgtgctcgagccaccactcttcttaaaaatcgtagagctgtttaaggaggttgtcgtgcatctgcttaaactgtataaaatcggcatcccaccgagcgaacgtcgcattttcaactccttcctgcatacagctttaaaagtgctagaaatcctgcacagagtgaatgaaaagatgggccagataattcagtacgataaattctatatacacgaagtgcaggagctgatcgacatccgcaacgattatatcaactgggtgcagcaacaggcttacggtatgctagcggacatcccagtgaccatctgtacctacccattcgtattcgatgcccaggcaaaaacaacgctgttacagactgatgctgtattacagatgcagatggctatcgaccaggctcatagacaaaatgtatccagcctcttcctgccggtcattgagtccgtgaacccctgcctcatcctggtggttaggagagaaaacattgtgggtgatgcgatggaagtgctccggaaaactaagaacatcgactacaaaaagcctctgaaggtgatttttgtaggggaggacgcagtggatgcgggtggtgttaggaaagagttttttctgctgatcatgcgcgaactcctggaccctaaatatggaatgttccgctattatgaggacagcagacttatctggttctccgacaagacttttgaggatagcgatctgtttcaccttatcggcgtaatttgcggtctggcgatctataattgtactattgtggacctgcattttccattggccctgtacaagaagctgcttaagaaaaagccttcactggatgatctcaaagaattgatgcccgatgttggccgcagcatgcaacagctgttagattatcctgaggacgatatcgaagagaccttctgtctcaatttcacgattaccgttgagaactttggagccacagaagtgaaagaactcgttcttaatggtgccgataccgccgtcaacaagcagaacaggcaggaattcgtggacgcctacgtagactatatctttaacaagagcgtcgccagcctgtttgacgcctttcacgctggatttcacaaggtatgtggtggtaaagtgctgctactcttccagcctaacgagttgcaggcgatggtgatcggtaacaccaattacgattggaaggagcttgagaagaatactgagtataagggggaatattgggcagaacaccccacgattaaaattttttgggaggtgtttcatgagttgcctttagaaaaaaaaaagcagttcctactgttcctgaccggcagtgacagaatccctatcctgggtatgaaatctctcaagctggtcatccagtctactggaggtggcgaagaatatctgccggtgtcccatacatgtttcaacctgctggacctgcctaaatacactgaaaaagaaacactccgctccaaactcatccaggctattgaccacaacgaagggtttagcctcatctag

SEQ ID NO: 15407 - DNA, 726 bp, synthetic construct
  source 1..726: mol_type = other DNA; note = Synthetic coding sequence
atgaattccgggcgccccgaaacaatggagaatttgcccgcactctataccatttttcagggcgaagtcgctatggttacggactacggggcttttataaagatccctgggtgccgcaaacaagggttggtacataggacccatatgagcagttgcagagtcgataaaccctctgaaattgtggacgtgggcgataaggtgtgggtgaagttaattggtagagagatgaaaaacgacagaataaaagtgagtctctccatgaaggtcgtgaaccagggcactggcaaggatctggaccctaacaatgtaatcattgagcaggaagagcgtaggagacgctcctttcaggattacactggtcagaaaatcacgttggaggctgtactcaatactacctgcaagaagtgtggatgtaagggccactttgccaaagactgcttcatgcagcccggaggcacaaaatactcactcattcctgacgaagaagaggaaaaggaggaagctaagtccgctgaattcgaaaagccagaccctacaagaaacccatccaggaaacgcaaaaaggagaagaaaaagaaaaagcaccgggaccggaagagcagcgatagcgattcatccgattccgaatcagataccgggaaacgtgcaaggcacacatcaaaggactctaaggccgcaaaaaagaaaaaaaagaaaaagaagcacaaaaagaagcataaagaatag

SEQ ID NO: 15408 - DNA, 870 bp, synthetic construct
  source 1..870: mol_type = other DNA; note = Synthetic coding sequence
atgatcatcaactggaaccaggttagtgttctgtggaagtgcctcctgaagcagagtgcaagctatcaggacaggcgccagtcatggcggcgcgcttccatgaaagagaccaaccgcaggaaatcattacacccgatccaccagggtattactgagctgagcaggagcatctcggttgacttagccgagtctaagagactgggctgtctgcttcttagtagctttcagtttagcatccaaaagctggaaccattccttcgggataccaaagggttcagcctcgagtctttcagagcgaaagccagctcgctgagcgaggagctgaagcatttcgccgatggcctcgagactgacgggactctgcaaaaatgcttcgaggactccaatgggaaggcctcggatttctctcttgaggcttccgttgctgagatgaaggaatatatcacaaaattttctctggagaggcagacctgggaccaactactcctgcactaccaacaggaggccaaggagatactgagtcggggctcaaccgaagcgaaaattactgaagtgaaggttgaacctatgacgtacctgggatcttctcagaatgaggttctaaatacaaagccagactaccagaagattctgcaaaatcaatccaaggtcttcgattgcatggaacttgtgatggacgaactccagggtagcgttaagcagttgcaggcttttatggatgaaagcacacaatgcttccagaaagtctccgtgcagctcgggaagagaagcatgcagcagcttgaccccagcccagctaggaaactcttgaagctgcagctgcagaaccccccagcaattcacggaagcggtagtgggagctgtcagtag

SEQ ID NO: 15409 - DNA, 750 bp, synthetic construct
  source 1..750: mol_type = other DNA; note = Synthetic coding sequence
atgacttctgtgacaagatcggagataattgatgagctcagtagatctatatctgttgacttggctgaatctaaaaggctgggatgcttgctgttgtcttcctttcagttttcaattcagaagcttgagccctttctccgggacacaaaagggttctctctggagtcattcagagccaaagcctcctccctcagtgaggaactgaaacactttgctgacggcttggagaccgatgggacactccagaagtgtttcgaagattcaaacgggaaggcttctgactttagcttagaagcctcagtggcggagatgaaagaatacattaccaaattttcactggagcgccagacctgggatcagttgttgctgcactatcagcaggaggcaaaggaaatattaagcagagggtcaaccgaggccaaaataacagaagtcaaagtagaacccatgacctacctgggatcaagccagaacgaggtgctcaatacaaagccagactaccagaaaattctccagaatcaatccaaagtatttgactgcatggaacttgtgatggatgaattacagggctccgtgaagcagctccaggcattcatggatgagagtacacagtgtttccaaaaagtttcagtacagctgggtaagagatctatgcagcagttggatcctagcccagcccgtaaattgctgaagctacagctacagaatccaccagctatccatggatccggctcagggtcatgccagtag

SEQ ID NO: 15410 - DNA, 855 bp, synthetic construct
  source 1..855: mol_type = other DNA; note = Synthetic coding sequence
atgacttcagtaacacgctctgagatcatcgatgaacagagcgcatcgtatcaggacaggcgtcagagctggcgtagagctagtatgaaggagactaacagaagaaagagcctccaccctattcatcaggggattaccgagctatcccgctctatctccgtggatctggccgagagtaaaagattggggtgtctactgctcagttcgttccaatttagcattcagaagctggaaccatttctccgcgatacaaaaggattctccctggagtcatttagggcgaaagcttctagcctgtcggaagagcttaaacactttgcagacggcttggagacagatggcacactccagaaatgtttcgaagattctaacggaaaagcctccgactttagccttgaggctagtgtggctgagatgaaagagtatatcacaaagtttagtctggagagacagacttgggaccagttgctcctgcactatcagcaagaggctaaagaaatcctgagtcggggatccacagaagccaaaatcacagaagtgaaagttgaaccaatgacttatttagggagctctcagaatgaggtgctcaatacaaaacctgactatcagaaaatcttacagaatcagtcgaaggtgtttgattgtatggagctggttatggatgaactgcagggctccgtcaagcagctgcaggctttcatggacgaatccactcagtgttttcaaaaggtaagcgtgcaactcggtaaaagatcaatgcagcagctagatcccagcccggcgcggaagttactgaagttgcaactacagaaccctcctgccatacatggctctgggagcggctcatgccagtag

SEQ ID NO: 15411 - DNA, 1071 bp, synthetic construct
  source 1..1071: mol_type = other DNA; note = Synthetic coding sequence
atgacctctgttaccaggtccgagattattgatgagaagggaccagtgatgtcgaaaacgcacgatcatcaactggaaagctcgctgagcccagtcgaagtcttcgctaagacctcggcctctctggaaatgaaccagggggtgagcgaagagcgcatacaccttggaagttctccaaagaagggaggcaattgtgaccttagccatcaggaaaggctgcagagtaagagtcttcacttgagtcctcaggaacaaagtgcttcctaccaggaccggagacagagctggaggagggcatctatgaaggagaccaatcgcaggaaaagcctacacccaatccaccagggtatcacggagctgagtaggagcatctccgtagatctcgctgagtctaaacggttgggttgcctgctgctctctagtttccagttcagcattcagaaattggagcccttcctacgggacactaagggcttcagcctggagtcgtttcgagccaaagccagtagtctgagcgaggagttgaagcacttcgccgacggccttgagactgacggtaccctgcagaagtgtttcgaagatagtaacggtaaggcgagcgatttctccctggaagcatctgtagccgagatgaaggagtatattacgaaattcagcttagagagacaaacttgggatcagctgctgctgcactaccaacaggaggctaaggagatcctcagtcgaggctcgacagaggctaagattactgaagtcaaagtggaacctatgacgtatctgggatcatcacagaatgaagtgctgaacacgaagcccgactaccagaagatacttcagaatcagtccaaagtatttgattgcatggaactcgtgatggacgagctacagggctccgtaaaacagctacaggcctttatggacgaatcaacccaatgcttccagaaggtgtccgtgcaactgggcaaacgcagcatgcaacagctggatccctcgccagccagaaagcttctgaagctgcagcttcagaaccccccagctatccatggcagcggctctggctcttgccagtag

SEQ ID NO: 15412 - DNA, 1071 bp, synthetic construct
  source 1..1071: mol_type = other DNA; note = Synthetic coding sequence
atgaccagcgtgacacgcagcgaaataatcgacgagaaaggtcctgtgatgtccaagactcatgaccatcagctggaaagtagcctaagccccgtagaagtcttcgccaaaacaagcgcctcgctggagatgaaccaaggagtctctgaagagcgcatacacctggggtcttcccccaagaagggggggaactgcgatttgagccatcaggaacggttgcagagcaagagcctgcacctttcccctcaggaacagtctgctagttaccaggatcgtaggcagagttggcggcgagccagcatgaaagaaaccaatcggcgtaagtcactgcaccccatccatcaggggattacagagttgtccaggagcatttctgtcgacctggctgaatcaaaaaggctcggatgccttctcttgagctccttccagtttagcatccagaagttggagccattcttaagggatacaaagggattctctctcgagagctttagagcaaaagccagctccctcagcgaagaactcaagcacttcgctgatgggctggaaaccgacggcacgctccagaagtgtttcgaggatagcaatggcaaagcctccgatttttctcttgaggcctcagtcgctgagatgaaagagtacattaccaagttctccctggaacgtcagacatgggatcagctgctgctgcactatcagcaagaagctaaggagatcctgagcaggggctcaacagaagcgaagatcaccgaggtgaaggtcgaacccatgacttatttgggttcctcacagaacgaggtgctgaacactaagcccgactaccaaaagattttgcagaaccagtctaaggtcttcgattgcatggaacttgtcatggatgaactgcaaggaagcgtgaagcagctgcaggccttcatggatgaaagtacccaatgcttccagaaggtgagtgtgcagctgggcaaaaggtcgatgcagcaactggatccttcacccgctagaaaactgctcaagctacaacttcagaacccacccgcaatacacggatctggctcagggtcatgccagtag

SEQ ID NO: 15413 - DNA, 1617 bp, synthetic construct
  source 1..1617: mol_type = other DNA; note = Synthetic coding sequence
atggcagccgccgcatcagttacaggtcgcgtgacttgggccgctagccccatgagaagcctgggactggggcgtcgactctccttgcctggacccaggctcgacgcggtgactgcggctgtcaatcccagcctctctgaccacggcaacgggctgggccgtggtactcgtgggagtggttgctctggcggctccctggttgcagactggggagggggcgcagctgccgcagccgctgtagccctggcccttgctccagccctgagcactatgagacgtgggagctctgaatcagagcttgcggcacgctgggaggctgaggctgtcgccgccgccaaggcagcagccaaggcagaagccgaagctacagctgaaaccgttgctgagcaggtgagggtcgacgcaggtgctgccggagagccagaatgcaaagccggggaggagcagcctaaagttcttgccccagcaccggcacagccctcggccgcagaagaaggtaacactcaggttctccagcgcccgcccccaaccctgccaccttcaaagccaaaacccgtgcagggactatgcccgcatggcaaaccaagagataaaggtcgtagctgtaagagatctagcggtcacggcagtggggagaatggatcacaaagaccagttaccgtggattctagcaaggctaggacatctctagatgcactcaagatcagtatcaggcaattaaaatggaaagagtttccgttcggcaggagactcccatgcgacatctattggcacggcgtttccttccatgacaatgatatcttttccggtcaggtgaacaaattccctggaatgaccgagatggttaggaagatcacactgagtcgtgccgtcagaaccatgcagaacctgtttcctgaggaatataatttctacccacgcagctggatcctgccagatgagtttcaactattcgtcgcccaggtgcaaatggtgaaggacgatgatcccagctggaagcccacattcatcgtaaagcctgacggcggctgtcagggagacggaatctatttgatcaaggacccttcagatatcagacttgcagggaccttgcaatctcgtccagccgtggttcaagaatatatttgcaaacctttgttgatagacaagctaaagtttgacattcgattgtatgtcctgcttaagtctctggaccctctcgaaatctacatcgccaaagatggattgtctagattttgtactgaaccgtaccaagagcctacacccaaaaacctgcatcgcatctttatgcatctgactaattacagtctcaacatacacagcggaaactttatacatagcgattccgctagtaccggatcaaagcgcactttcagcagtattctgtgtcgtttgtcgtcgaagggagtggacattaaaaaggtgtggtctgatataatttccgtggtgatcaaaacagtgattgccttgacaccagaactgaaggtcttttaccaaagcgacatcccaaccgggcgacccggccccacatgttttcaagtaactatcgcttcatcccagcccgcgtttcccgctctcacaggattaaaacgcgccctctggctgcgagtgggctag

SEQ ID NO: 15414 - DNA, 1356 bp, synthetic construct
  source 1..1356: mol_type = other DNA; note = Synthetic coding sequence
atgacggaaatggtgcgtaagatcactctttccagagctgtccgcactatgcagaacttgttcccagaagagtacatttgtaaacccctgctgatcgacaagcttaaatttgatatccggctgtacgttctgttaaaaagtctggaccctctggagatctatatcgccaaagacgggctgtcccggttctgtacagagccataccaggaacctacgcccaagaatctgcacaggatctttatgcacttaaccaactactctctgaatatccattccggaaattttatccattctgatagtgcttccaccggctccaagcgcaccttctcaagcattctgtgtcgcttgtctagcaagggggtggacataaagaaagtctggtcagacatcatctctgtggtgattaagaccgttatcgctctaacccctgaactgaaagtattctaccagagtgacatcccaaccgggcgtcctggccctacttgttttcaaatcctgggattcgatatcttgctcatgaagaatctaaagccgatactgctagaagttaatgcaaatccctcaatgcgaatcgagcacgagcatgagctgtctcccggcgtgtttgagaacgtgccttcgctcgtggatgaagaagtgaaggttgcggttattagagatactctccggcttatggatcccttaaagaagaagagggagaaccagagccagcagttagaaaagccgtttgcagggaaggaggatgccctggacggggagctgacatcggctcctgactgtaatgccaatcctgaagcacatttgccctccatttgccttaagcaggtctttccgaagtacgctaaacaattcaactatcttcggctcgtggataggatggccaatttgttcatcaggtttctgggcattaagggcactatgaagctgggacccaccggatttcgcacttttattcgctcctgtaagctttctagctcttcgctgtccatggccgcagttgatatattgtatattgacatcactaggcgttggaactcaatgactctggatcagcgagattcagggatgtgtctacaggccttcgtcgaagcctttttttttctggcccaacgcaaatttaagatgttgcctttacacgagcaggtagccagcctgatcgacctctgcgaataccatctgtccctgcttgatgagaagagactcgtctgcggccggggcgtccccagtggcggaagaccgccccatagaggtcctccacaggagccttccccgtctgctcagcctgctggtgataatcccccccctcgcactagttgtgcaaataagctctcccatcccagacacacattgtcctag

SEQ ID NO: 15415 - DNA, 1644 bp, synthetic construct
  source 1..1644: mol_type = other DNA; note = Synthetic coding sequence
atgaaggtcgtgaaatccgcggaacactacacagagacagctttagacgaaattagactgcttaaatctgtgaggaacagcgatccaaacgatccaaatcgtgaaatggtggttcagctgctggacgactttaaaattagcggcgtcaacggcacgcatatatgtatggtcttcgaagtcttggggcaccacctactgaagtggattataaagagtaactaccagggtctccctctgccttgcgtgaaaaagatcattcagcaggttttacagggattagactacctgcacacgaagtgcagaatcattcatacggacatcaagccggagaacatcctgctatctgtaaatgaacagtacatcaggaggttagccgccgaggctaccgagtggcaacgtagtggcgcgcctccaccatcaggctcagccgtcagcacagccccccagccgaagccagctgataaaatgagcaaaaataagaagaagaagctcaagaaaaagcagaaacgccaggcggagttactcgagaagcgcatgcaggagattgaagaaatggagaaggagagcggaccgggtcagaaaagaccaaataagcaggaagagtccgaatcccctgtagagcggcctctcaaggaaaatcctccaaacaaaatgacgcaagaaaagcttgaagaatcaagcacgatcggccaggatcagacactgatggaacgggataccgagggaggcgcagcagagatcaactgcaacggggtgatcgaagtgataaattacacacagaactccaacaacgagacactgcggcataaagaggacctgcataacgcgaatgactgcgacgtgcagaacctgaaccaggaaagctcgtttctttccagccagaatggggactcaagtacatctcaagagacggactcctgtacccctatcactagcgaggtgtcggacacgatggtgtgccaaagcagtagcaccgtaggtcaatctttttctgaacagcacatcagccagcttcaggagagcattagagcagaaattccctgtgaggacgagcaggagcaggagcataatggaccacttgataacaaggggaagagtaccgcagggaattttcttgtaaaccctctcgagcccaagaatgccgagaaacttaaggtcaagatcgctgacctgggaaacgcctgctggcataagcatttcactgaggatatccagacaagacaatacagaagtctcgaggtgctgatcgggtccggctacaacactcccgccgacatttggtccacagcatgcatggcttttgagttggctacaggagactatctgttcgaaccgcatagtggcgaggagtacactcgcgatgaagatcacatcgtccatatcatcgagctcattggacgtatcccaagaaggtttagcctctcgggtaagtactcccaggatttcttttcacaccgtggcgatttgaagcacataaccaagctaaagccttggggcctatttgaggtcctcgtcgagaagtacgagtggtctcaggaggaggcagctgggtttaccgacttccttctcccaatgctcgaactaatacctgaaaaaagggccaccgccgctgagtgtttgaggcatccatggctaaactcctag

SEQ ID NO: 15416 - DNA, 1968 bp, synthetic construct
  source 1..1968: mol_type = other DNA; note = Synthetic coding sequence
atggaacgaaaggtcctggcccttcaggcacggaagaagcgcaccaaggccaaaaaggacaaggcccagcggaagtcggaaacacaacaccgcggatcagccccacattctgaaagcgacctgcctgagcaagaggaggaaatcctaggctccgatgacgacgagcaagaagaccccaatgactattgcaagggaggctaccatctcgttaagatcggcgacctttttaacggccgctaccacgtcatcagaaaattaggttggggccacttctccactgtatggctgagttgggacatccagggtaagaagtttgtggcgatgaaagttgtgaagagcgccgagcactatacagagactgctctggatgagatcaggctgctcaagtcagtgcgtaacagcgaccccaatgatcctaacagggaaatggtggtccaactgctggacgattttaaaatctccggggtcaacggtacccatatctgcatggtctttgaagtgcttggccatcatcttctgaagtggatcattaagagcaattatcaaggtctgccacttccttgcgtgaagaaaattatccaacaggttctccagggtctggattacctacatacgaagtgccgaataatccacactgatattaaacccgagaacatacttctgagcgtcaacgaacagtatattcgacgcctggctgctgaagcgaccgagtggcagcgcagtggggcccctcccccctccgggagcgccgtctccactgcaccccaacctaagccagcggacaagatgagcaaaaacaagaaaaagaaactcaagaaaaagcaaaaacgacaggcagaactgctggaaaaacgcatgcaggagatcgaggaaatggaaaaagaatctggtccaggacaaaagcgaccgaacaaacaagaggagtctgagtctcccgtcgagcgtccgctcaaggagaaccctcctaacaaaatgacacaagaaaagcttgaggagtcctccacgataggtcaggaccagaccttgatggagagagatacagaggggggcgctgccgagattaactgcaacggagtgattgaagtaatcaattatacacagaacagcaataatgaaacgcttcggcacaaggaggaccttcacaatgccaatgactgcgatgttcaaaatctaaaccaggagtcatccttcctgagttcccaaaatggggatagtagcacgagtcaagagaccgactcctgcacacccatcacatcagaagtgagcgacacgatggtttgccagtccagttctaccgttggtcagtcattttccgaacaacatatctctcaactccaagagagcataagggccgagattccctgtgaagatgaacaggagcaggaacacaacggtcctttggataataaagggaaatccaccgccggtaattttctggttaatcctctcgaaccaaagaacgcagaaaaacttaaggttaagatagcagacctcggaaacgcctgttgggtccataagcacttcacagaggacattcagactcggcaatatcggtcccttgaggtgctgatcggctccggctataacactcccgctgacatatggtccacagcatgtatggcattcgaattagccactggcgactacctgtttgaaccacactcaggagaggagtacactcgggacgaggaccatatcgcactgattattgaactactcggcaaagtaccccgcaagctcattgtcgccggaaaatacagcaaggaattcttcactaagaaaggggacctgaagcatataaccaagttgaaaccatggggcctgttcgaagtgctggtggaaaaatatgagtggtcccaagaagaagctgcagggtttactgatttcctcctcccaatgttagaattaatccctgagaagagggcaactgccgcagaatgtctgaggcacccatggttaaacagctag

SEQ ID NO: 15417 - DNA, 864 bp, synthetic construct
  source 1..864: mol_type = other DNA; note = Synthetic coding sequence
atggccgcttccttgtggatgggggacctcgaaccctacatggacgagaattttatctctcgagccttcgctaccatgggagaaaccgtcatgtctgttaagataatacggaatagacttactggcattcccgcgggttactgctttgtggagttcgcggatcttgccactgccgagaagtgtctgcacaaaattaacggaaaaccactcccaggcgctactccagctaaacgcttcaagctcaattatgccacctacggaaagcagcccgacaattcaccggaatatagtctgtttgtgggggatctgacgcctgacgtggacgacggcatgctgtatgaatttttcgttaaggtatatccttcatgtaggggaggcaaggtggtcctggatcaaaccggggtgagcaaaggctacgggttcgtgaaatttaccgacgaactggagcagaagcgagcactcaccgaatgccagggggccgtgggactgggaagcaaacctgtgcgtctgtcagttgccattcctaaggcctcacgggtcaaacccgtggagtatagtcaaatgtacagctatagctataatcagtactatcagcagtaccagaattactacgcacagtggggctacgaccagaatacgggcagctatagttactcctacccccagtacggctacacgcaaagtaccatgcaaacatacgaagaagtgggcgacgacgccttggaagatccgatgcctcagcttgacgtgaccgaggcaaataaggaattcatggagcaatctgaggagctgtatgatgcactgatggactgccactggcaacccctggatacagtgagttccgaaatcccagctatgatgtag

SEQ ID NO: 15418 - DNA, 438 bp, synthetic construct
  source 1..438: mol_type = other DNA; note = Synthetic coding sequence
atggccgaaaggaacgaagaccaccacctgcaagtactgaaggaaagtgaagtcctgctgcaagccaaacgtgccgagctggagaagctgaaatcacaggtgactagtcaacaacaggagatggccgtcctggacagacagctgggacacaagaaggaggaactgcatctcctacagggcagcatggtccaagcaaaagccgacctccaagaggcgctccggctcggggaaacggaggtgactgaaaaatgcaaccacattcgggaggtgaagtcccttctcgaggagttatcttttcagaaaggtgagctgaacgtgcagatcagcgagcgaaagactcagttgacattgatcaaacaggaaatagagaaggaggaggagaacctacaggtggtgctgcgtcagatgtcgaaacacaaaactgcgtttctccaatag

SEQ ID NO: 15419 - DNA, 3024 bp, synthetic construct
  source 1..3024: mol_type = other DNA; note = Synthetic coding sequence
atgcagcatctgaagagcaagaaaagagaggagcggtggatgagggccagtaaacggcagtccgaaaaagagatggaggagcttcaccataatatcgatgacttattacaggaaaagaaatccctggaatgtgaggtggaggagcttcatcggaccgttcagaaacgccagcagcagaaagactttatcgatgggaacgtggagtcactcatgacagagcttgagatcgaaaagagcctgaaacatcacgaagacattgtcgacgagatagagtgcattgagaagacactattgaaaaggagatccgagctccgcgaggccgacaggctcctggccgaggccgaaagcgaactgtcctgcaccaaggagaaagtctgtctgctcgtggtgtggggtgtgagctccgtttggacgaagaacgcggtggaaaagttcacagacgcgaaacggtccctcttgcagaccgagtctgatgctgaggagctggagagacgcgcccaagagacggctgtgaacctggtgaaggcagaccagcagttgcggtccttgcaggctgatgctaaagatttagagcaacacaagatcaaacaggaggagattctcaaggagattaataagatagtggccgccaaggactcagatttccaatgtcttagcaagaaaaaagagaagctgacagaggaactgcagaaactccaaaaagatatcgagatggctgagaggaatgaagatcaccatctgcaggtgctgaaggagtcggaggtccttctgcaggcaaaacgtgcagaactggagaagctaaagagccaagtaaccagtcagcagcaggagatggctgttttagacagacagctcggccataaaaaggaggaactgcacctgctccagggctcaatggtccaggcgaaggctgatctgcaagaagcattgcggctaggcgaaaccgaagtgactgagaaatgtaatcacattcgagaagtcaaaagtctcctggaggaattatcctttcaaaagggtgagttaaatgttcagataagcgaacgcaagacccagttgaccctcataaagcaggagattgagaaggaggaggaaaacctgcaagtggtcctcagacagatgtctaagcacaagaccgaactcaagaatattctcgatatgttacagctcgaaaaccacgaactgcagggactgaagctgcagcacgatcagcgcgtatctgaactggaaaagacacaggtcgccgttttggaggaaaagttggagttagaaaacctacagcagatatctcagcaacagaaaggtgaaattgagtggcagaagcagcttctcgaacgggataaacgagagatcgagcgcatgacagcggagagtcgagcgctccagagttgtgtggagtgcctgtctaaagaaaaggaggatcttcaggaaaagtgcgacatctgggaaaagaagctggctcagacaaagagagtcttagctgcagctgaggaaaattccaaaatggagcagtcgaatctggagaagctcgagttgaacgtacgcaaacttcaacaggagctggaccagttgaacagggataagttgtctctgcacaatgacattagcgccatgcagcagcagcttcaagaaaagcgagaggctgtgaattctctacaggaggaactggctaacgtgcaggaccacctaaacctggctaagcaggacctacttcacactacaaagcaccaagatgtcctcctctctgagcagacgaggctacagaaggacatatctgagtgggccaaccggttcgaagactgccagaaagaggaagagactaagcagcaacaactacaggtgctacagaatgagattgaggaaaacaagctcaagttggtgcaacaggaaatgatgttccagaggctgcaaaaagaacgcgaatccgaggaaagtaaactcgagactagcaaagttaccctgaaggaacagcagcatcagctggaaaaagagttgacagatcagaagtcaaaacttgaccaggtgctcagcaaggtgctggctgctgaggagcgagtgaggaccttgcaggaggaggagcgttggtgtgaaagcctggaaaagaccctatcccagaccaagcgacagctctcggagagagaacagcagttggtagagaagagcggtgagctgctggctctgcagaaggaagcagattccatgcgcgcggatttctctttgctgcgtaaccaattcctgaccgagcggaagaaggcggaaaagcaggtcgcctccctgaaggaggctttaaagattcaaaggtcgcagcttgagaaaaacctcctcgagcagaaacaagaaaattcttgcattcagaaagagatggccacgatcgagctggtcgcacaggataaccacgaaagggctcgacggttgatgaaagagcttaaccagatgcaatacgagtataccgaactcaaaaaacaaatggctaatcaaaaggatctagaacgtcggcagatggagatatcagacgcaatgaggacattgaagtcggaagtgaaagacgagattcggacaagtcttaaaaacttgaatcagtttctacctgagctaccagccgacctggaagctatcttggagcgcaatgaaaacctagaaggcgagctagagtccttaaaagagaatcttcccttcactatgaatgaggggccctttgaagagaagctgaacttcagccaagttcatattatggacgaacattggcggggggaagccctgcgtgaaaaattacgtcatcgcgaggacaggctgaaggcccagctccggcactgtatgtcaaaacaagcagaggtgctcatcaaggggaagagacaaacagagggcacacttcactcattacggaggcaggtagacgccctgggcgagctggtcacgagcacatccgctgactctgcatctagcccaagcctcagccagctagaatcttctttgactgaggatagtcagctgggccaaaaccaggagaagaacgcgtcagcccgctag

SEQ ID NO: 15420 - DNA, 2985 bp, synthetic construct
  source 1..2985: mol_type = other DNA; note = Synthetic coding sequence
atgaaagcacaaaagtctgggaaagaacaacagctcgacatcatgaataaacagtaccagcagctggaaagccgcttggatgagattctctcccgtattgctaaggagacagaggaaattaaggatctggaggagcagctgacagagggacagattgctgccaatgaggcccttaagaaagatctggaaggcgtgatttcaggcctacaagagtacctgggcaccatcaaaggtcaggcaacacaggcccagaacgagtgccgaaagctgagagacgagaaggagaccttgctgcaacgtttgacagaagtggagcaagaacgcgatcagttggagatcgtcgctatggatgcagaaaatatgagaaaagaactagccgagttggaaagcgcactccaggaacagcacgaggttaatgcctcccttcaacaaacccagggtgatctaagcgcttacgaggccgaacttgaggccaggctgaatctgcgcgacgcggaggctaatcaattgaaggaagagttagagaaagtgacgcgtctcacacagctggagcagtcagcattacaggccgaactggaaaaggagaggcaggctcttaagaatgccctaggcaaggcccaattttctgaagagaaagagcaggagaacagtgagttgcatgcaaagcttaagcacttgcaggacgataacaaccttctgaaacagcagctcaaagatttccagaatcatctgaaccatgtcgtggacgggcttgtccgtccagaggaagtggcggcacgcgtcgatgagctgcgcaggaaacttaaattgggtaccggagagatgaacatacattctcccagtgacgtcctgggaaaaagcctcgcagatctccagaaacagttctccgagatactggctcggtctaagtgggagcgcgacgaggcccaggtgagagagcgaaaattgcaagaagagatggcactacagcaagagaagctcgctactggccaggaagagttcagacaagcttgcgagcgcgccctggaggcacgcatgaactttgataagcgtcagcatgaggcccggatccaacaaatggaaaatgagatacactacctgcaagagaatctaaaatccatggaggaaatccagggactcactgatctgcaactgcaagaagctgatgaggaaaaggagaggatcctggcccaactccgagagcttgaaaagaagaagaagcttgaagacgccaaaagccaggagcaagttttcggactcgacaaggagctgaagaaactcaagaaagcagtggccacttccgataagctcgctaccgccgaactcactattgcaaaagatcaactcaagagcctgcacggaaccgtgatgaagatcaatcaggagcgggccgaggagctacaggaggcggagcggttttcgcgaaaggccgctcaggctgcccgggatctcacgcgagccgaggctgaaattgagctgctccagaatctgctgcgccagaagggtgagcaatttagattggagatggagaagactggcgtaggcaccggggccaactctcaagtgttggagattgaaaagctcaatgaaaccatggaacgccagaggactgagattgccagattgcagaatgtgctagacctaacgggaagcgataacaagggcggattcgagaacgtgctcgaagagatcgcagaactacgcagagaagtctcttatcagaacgattacattagcagtatggcagacccctttaagcgtaggggctattggtattttatgccaccgccaccctcctcgaaggtttcatcacactctagccaggccactaaggactctggcgtcggcctgaaatactctgcatcaactccggtcagaaaacccaggccaggtcagcaggatgggaaggaaggcagccagccacccccagcctcaggctattgggtatacagtcctatccgatccgggctgcacaagctgtttccgtctcgggatgccgattcgggaggagactctcaggaggaatccgagttagatgatcaggaggaacctccatttgtccctcccccaggctacatgatgtacactgttctacctgacggaagcccagtgcctcaagggatggccttgtacgcccctccccctcctcttcccaacaactcacgtcctctaacccccggcaccgtggtgtatggcccgccacctgcaggagcacccatggtttatggccctcccccacccaacttcagtattccattcatccccatgggtgtcctccactgtaatgtccccgagcatcacaatttggaaaatgaggtcagtcgtctggaagacatcatgcagcacctgaaatcaaaaaaacgagaggagaggtggatgagagcaagcaagcgccaatccgagaaagaaatggaagagttgcatcacaatattgacgatcttctacaggagaaaaagagcttagagtgcgaggtcgaggaattacacaggaccgtgcagaagagacagcagcagaaggatttcattgacggcaacgtggaatcactcatgaccgaactggaaatagaaaagagcctgaagcatcacgaggacattgtcgacgaaattgagtgcattgagaagaccctgttgaagcgccgctccgagctgagggaggctgaccggctgctggccgaggccgagagtgagctgtcatgcactaaggagaagaccaagaacgccgtggagaaatttaccgatgcaaagcgctctttgttgcagacagagagtgacgccgaggagctagagagaagagcccaggagactgcagtgaatctggtgaaggcagaccagcagttgagaagcctccaagctgacgcgaaggacctggagcagcacaagatcaaacaagaagagatcctcaaggagattaataagattgtggccgcgaaggacagcgacttccagtgcctgtctaaaaaaaaagagaagctcaccgaagagtag

SEQ ID NO: 15421 - DNA, 5322 bp, synthetic construct
  source 1..5322: mol_type = other DNA; note = Synthetic coding sequence
atgaaagcccagaaatccgggaaagagcagcaactggacatcatgaacaagcagtatcagcagctcgagtctaggctggacgagattctatccagaatcgctaaggagacggaagagatcaaagatctcgaggaacaactgacggagggccagattgctgccaatgaggcactgaagaaagatctggaaggagtgatctccggcctgcaagaatatttgggcacaattaagggccaagcaacccaggctcagaatgaatgtaggaagttgagggatgagaaggagaccctgctgcagcggctgaccgaagtggagcaggaaagagatcagttggagattgtagcgatggacgctgagaacatgcgcaaggagctcgctgagcttgagtcagccctgcaggagcaacacgaagtgaatgcatcccttcaacagactcagggcgatctgtcggcatacgaagccgagttggaggcacgtcttaacctgagggacgcagaagccaaccagctgaaggaggagctagagaaggtgactcgtttgacccaattggaacagagcgcccttcaggcagaactggagaaggagaggcaagctctgaagaacgccctgggaaaagcacagttctcagaagaaaaagagcaggagaactccgagttgcacgctaagcttaaacacctccaagacgacaacaatctgctgaaacaacagctcaaggactttcagaaccatttgaaccacgttgtggacggactggtgagacctgaagaggtggccgcacgcgtcgatgaactgagacgcaagcttaagctcggcaccggagagatgaacatccattctccttctgatgtgttaggcaagagcctggcagacctccagaagcagttctcagagatcttagcgcggagcaagtgggagagagatgaagctcaggtaagggagagaaagctgcaggaggaaatggccctacagcaggagaaactcgcgacagggcaagaggaatttaggcaggcgtgtgaacgcgcccttgaagccagaatgaactttgataagagacaacatgaagcccggatccagcagatggaaaatgagatccactacctgcaggaaaacctcaagtccatggaggaaattcaggggctgaccgatttgcagttacaggaagccgacgaagagaaagagcggatcttggcccagctgcgcgagcttgaaaagaagaaaaagctggaagacgctaagagccaggagcaggtgttcggacttgataaagagttaaaaaagctcaaaaaagcagtggccacctcagacaagctggctaccgctgagttgacaatagcaaaggaccaactgaaaagcctgcacggcactgtgatgaaaatcaaccaagagcgcgccgaggaactgcaggaggccgagagattcagcagaaaggctgctcaggctgccagagatctgacccgggctgaagccgaaatagagttgctgcagaatttactacggcagaaaggtgaacagtttagactagagatggaaaagactggcgtgggcacaggggctaattcgcaggtgctggaaatcgaaaagctcaatgagacaatggagcgtcagaggactgaaatcgcccggctccaaaatgtactcgacctgactgggagtgacaataagggcggctttgagaacgtccttgaggaaattgcggaattgagacgggaggttagctaccagaacgactacatcagctctatggcagatccattcaagcgtcgggggtactggtactttatgccgcctcctccatcatcaaaggttagctcacattcttcccaagcaaccaaggactccggtgtcggattaaagtactcagcttcaaccccagttcgaaagcctcggccagggcagcaggacgggaaggaaggcagccagcctcccccggccagcggctattgggtgtattcaccaatacgatctgggctgcataagctatttcccagccgggatgccgatagcgggggcgacagccaggaggagtccgagctggacgaccaggaagagccccccttcgtgccaccccctggctacatgatgtacacagtgctgccagacggatccccagtgccacagggcatggctttgtatgctccccctccacccctacctaataattctcgtcctttgacaccaggcacggtggtttacggtccacctcctgccggagcgccaatggtttacgggcccccaccacccaatttctccattcctttcatccccatgggagttctgcactgcaacgtccctgagcatcataatctggagaatgaggtgtcacggctcgaggatattatgcagcatctgaagtctaagaagagggaagaacgttggatgagagcgtcaaaacggcaaagcgagaaggaaatggaagaattgcaccataatatcgacgatcttctgcaggagaagaaatctttggagtgcgaggttgaagaacttcatcgcacggtacaaaagcgacagcagcagaaggactttatcgacgggaacgtggagagtcttatgacagaattagagattgagaaatcgctcaagcaccacgaagatatagtggatgagatcgaatgtatcgaaaagacattattgaagcgtaggagcgagctgcgagaggccgatcgccttctggccgaggccgagtcagaattgtcatgcacaaaggaaaagacaaaaaatgcagtggagaagtttaccgatgccaagagaagcttgctgcagaccgaatcagatgccgaggaactggagcgccgtgctcaggagacagctgtaaaccttgttaaagccgaccagcagctacgcagtttgcaggcggacgctaaagatctggaacaacacaagatcaaacaggaagagatcctcaaagaaatcaataaaatcgttgccgccaaggactctgattttcagtgcctgagcaagaagaaagagaagttgaccgaagagttgcaaaaacttcaaaaagacatagagatggcagagcgtaatgaagaccatcatttacaggttctcaaggagtccgaagtgcttcttcaggccaaaagagccgaacttgaaaagctaaaatctcaagtgacaagtcaacagcaggagatggctgtgctggacaggcagcttggtcacaaaaaggaggagctgcatctgctgcagggatccatggtgcaggccaaagccgatctccaagaggcactccggttgggcgagactgaggtgactgaaaaatgcaatcacattagggaggttaaatccctgctggaagagctttccttccaaaaaggagagctaaatgtccaaattagcgaacgaaaaacacaactcactctaataaagcaggaaattgagaaagaagaagagaacctccaggttgtcttgaggcagatgtcaaagcataagactgagcttaagaacatcctcgatatgctgcagcttgagaaccatgagctccagggcttaaaattacagcatgaccagcgggtgagcgaacttgaaaaaactcaggttgccgtgttagaggagaagctggaactcgaaaacctacagcagatttcgcaacagcagaagggggagatagaatggcagaagcagctgctggaaagggacaaaagggaaattgagcggatgacagcagagtctagggccctacaatcttgtgtagaatgtctgagtaaggaaaaagaagatctgcaggaaaaatgtgatatttgggaaaaaaagctggcccagaccaaacgagtactggcagccgccgaggagaattcaaagatggagcaaagtaatctggaaaaattggagctgaacgtcaggaaactgcagcaggaactagaccagctgaacagagacaagctgtcactccacaacgatatctctgccatgcagcaacagctgcaagagaagcgggaggcagtcaatagcctccaagaagaactggctaacgttcaggaccatctgaacctcgcgaagcaagacttgctgcatactactaaacaccaagacgtccttctaagcgaacagacaaggttacagaaggacatttcagagtgggcaaatagatttgaagattgccagaaagaggaagaaaccaaacagcagcaactacaggtgttacaaaacgaaatcgaggagaacaagttaaagctggttcaacaggagatgatgtttcagaggttacagaaagaaagggaatccgaggagagcaaattggaaaccagcaaggtgacactcaaggagcagcagcatcagctggagaaggaactaactgatcagaagagcaaactcgaccaggtgttatcaaaagtgctggccgcagaggagagagtgcggaccctgcaagaggaggagcgttggtgcgagtccctcgagaagacgttgagtcagacgaaacggcagctatcagagcgagagcagcagcttgtcgaaaaatcaggggagctcttggctctacagaaagaagccgactctatgagagctgacttcagccttttgcgaaatcagttcttgactgaacgcaagaaggccgaaaagcaggtagccagtttaaaagaggccctgaagatccagcgcagccagctcgagaaaaacctgctggagcaaaaacaggaaaactcatgtatacagaaggagatggccacgatcgaactggtggcacaggataaccacgaacgcgctcgcaggctcatgaaagagctgaatcagatgcagtacgagtacaccgagctgaaaaagcagatggccaatcagaaagacctggagcgaaggcagatggaaatctcagacgccatgaggaccctgaagtctgaagtgaaagacgaaatccgcaccagccttaaaaatcttaatcagtttctacccgagttgcctgccgatcttgaagccatcctcgaacgaaatgaaaatcttgagggagagctcgagagccttaaagagaatttgcccttcacaatgaatgaaggcccgttcgaagagaagttaaatttctctcaggtccatattatggatgaacattggagaggagaggcattacgcgagaagctgaggcacagagaggacagactgaaggcacaattaaggcattgtatgtccaagcaggccgaagtcctgatcaagggtaagcggcagactgagggcacgctccatagcctccgacgccaagttgatgctctgggtgaactggtgactagcacaagtgcagatagcgcctcctcaccgtccctatcacaacttgagtcctccctgacagaagattcacagcttggccagaatcaggagaaaaacgcatccgcccggtag

SEQ ID NO: 15422 - DNA, 2487 bp, synthetic construct
  source 1..2487: mol_type = other DNA; note = Synthetic coding sequence
atggaaaagcagaagcaggagatcgcaggtaagcaaaaagaaatcaaagacctccagatcgctatagattctttagattcaaaggacccgaaacattcgcacatgaaagcccagaaaagcgggaaggagcagcagttagatattatgaacaagcagtaccagcagttggaaagccggctggacgagatcctgtccaggatagctaaggaaaccgaagagattaaggacctcgaggaacagctcactgaggggcagatcgcggctaacgaggctctgaagaaagatctggagggtgtcatctccgggctacaggagtacttggggacaatcaagggtcaagctactcaggcccagaatgaatgccgtaaactacgcgacgaaaaggagactttactccagagacttaccgaagtggaacaggagcgtgatcaactcgaaatagtggcaatggacgccgagaacatgaggaaggagcttgcggagcttgagtctgccctgcaagaacagcatgaagttaacgcaagcctacagcaaacccagggcgatctgagcgcgtatgaagcagagctggaggctcggcttaacctccgcgacgcggaggcgaatcagcttaaggaggaactggaaaaagtcacacgactgacacagctggaacagtccgcgctccaggcagaactggaaaaagaacggcaggccttgaagaacgccctgggaaaggcacaatttagtgaagaaaaagagcaggaaaacagtgagttgcatgctaagttaaaacatctgcaggacgacaataacctcttaaagcagcagctgaaggacttccagaatcacctgaatcacgtggtagatgggctggttagaccagaagaagtagctgcgcgagtcgatgaactacggcggaaactgaaactgggaacaggagagatgaacattcactcaccttccgacgtgctgggcaaatccctggccgatcttcaaaagcaattctcagaaatactggcccgttcaaaatgggagcgcgacgaggcacaggtcagagaacgcaaactccaggaggaaatggctctgcagcaggaaaaattggcaaccggccaggaggagttccgacaggcctgcgagcgcgctcttgaggcacgcatgaatttcgacaaacgacagcatgaggcaaggatacagcagatggagaacgaaatacactacctgcaggagaatttgaaaagtatggaggagatccaggggctcaccgacctccagctgcaggaagccgacgaagagaaggagcgaatcctggcacaattgagggaactggagaagaagaagaagctggaagacgcaaaatcacaggagcaagtattcggtctcgacaaggagctgaagaaattgaagaaggctgtggctacatccgataagttagctaccgctgaactaacaatcgctaaggaccagctaaaaagtctgcacggaaccgtaatgaaaataaatcaggagcgcgccgaggagctgcaggaggcagaacggttctctaggaaagctgctcaggccgcacgggacttgacccgggcggaagccgagatcgagctgctgcagaacctgttgcgccaaaaaggggaacagttcaggttggagatggaaaagaccggtgtgggtacaggggccaactcacaggtgcttgaaattgaaaagctgaatgaaaccatggaaagacagagaactgaaatcgcaagactccaaaacgttctcgatctgactggatcagacaataaagggggtttcgaaaatgtacttgaagagatagctgaattgaggagggaggtcagttaccagaatgattatatcagctctatggctgatccattcaagcgccgtggatactggtactttatgcctccacctccgtcaagcaaggtgtctagccacagtagccaggctacgaaggacagcggggtgggcctgaaatattctgcctccactccagtacgcaagccgcgccccggacagcaggacggcaaagagggttctcagcccccacccgccagcggatactgggtttactcccctattcgctccggccttcacaagctgtttccgtcaagagacgcagatagcggaggggatagccaggaggagagcgaactcgacgatcaggaagagccgccttttgtccccccccctggatacatgatgtacactgttttgcccgacggcagtccagtgccacagggcatggccctttatgcccctcccccacctctgccgaacaatagccggccactcacacccggcaccgtggtttacgggcctccacccgctggtgctcccatggtctatggaccgcctccacctaatttcagtattcctttcattcctatgggtgtccttcattgtaatgttccggagcatcacaacctcgtgagcgggaagacctacaattctctttctacccttctgccctgggtgaccgataaagtgatctacttgatgtcctag

SEQ ID NO: 15423 - DNA, 6978 bp, synthetic construct
  source 1..6978: mol_type = other DNA; note = Synthetic coding sequence
atgaagaaaggcagtcagcagaagatcttctccaaagcgaagattccttcctcctcacatagccccattcctagctcgatgtctaacatgcgaagcagaagtctgtcccctctcattgggtccgagacactcccgtttcactccggaggacagtggtgtgagcaggtcgagatcgcagatgagaataacatgttgctggactaccaggatcacaaaggcgccgactcccatgcaggagttcggtatataactgaggccttaatcaagaagctgacgaagcaggataacctggcgctcattaaatcccttaacctgagtttgtcgaaagacggcggcaagaaattcaaatatatagaaaatctggaaaaatgcgtaaagctcgaagttttgaatctttcctacaatctaatagggaaaattgaaaagctggacaagctgttaaagctgagagagctaaatctgtcctacaataaaatctccaagattgagggtatcgaaaatatgtgtaacctgcagaagctcaatttagccggaaacgagatcgagcacatccctgtctggctcggcaaaaagcttaaaagcctgcgcgtgctgaacctgaagggtaacaaaataagctcattgcaagatatctccaagctgaagccacttcaagatctcatttccctcatcctggtggaaaaccctgtcgtcactctcccccactacctgcaattcaccatctttcatttacggtccttggagtcactagaagggcaaccagtgaccacacaggatcggcaagaagcatttgagcggttctcattagaggaggttgagagacttgagagggacttggagaagaaaatgattgaaaccgaggagctaaagtctaagcagaccagattcctggaagaaatcaagaaccaagacaagcttaacaagagcttaaaggaggaagccatgctccagaagcaaagctgcgaagagttaaagagcgatttaaacactaagaatgagctcctgaagcagaaaaccatcgagctgacaagagcctgccagaagcaatatgagctggaacaagagctggccttctacaaaatcgatgccaagttcgaaccactgaattattaccccagtgagtacgccgaaattgacaaggcacctgatgaaagtccctacatcggcaagagccgatataagcggaacatgtttgcaacagagtcatacatcatcgactccgcccaagccgtgcagattaagaaaatggaaccggacgaacagctccgcaatgaccatatgaacctgcgggggcacacgcctctcgatactcaactcgaggataaggaaaagaaaatcagcgccgctcagaccaggctgagcgagctccacgatgagatcgagaaggccgagcagcagattctccgggctactgaggagttcaaacagctggaagaggccatacagttgaagaaaattagtgaagccggaaaggatcttctgtacaagcagctctcgggccgccttcagcttgttaacaagctccggcaagaggccctggatctggaactccaaatggagaaacagaagcaggagatagctgggaagcaaaaggagattaaagacctccagatcgcgattgactctttagatagcaaggatcccaaacactcccacatgaaggcccagaaaagtggaaaagaacagcagctggacattatgaataagcagtaccagcagctagaaagccgcctcgatgagattctgtcacgaatcgccaaggagactgaagagatcaaggatctcgaggaacaacttactgaaggtcagatcgccgcgaacgaggccctcaaaaaagaccttgaaggagtcatttcaggtttgcaagagtatctcggtacaattaaagggcaggccactcaagcccagaacgaatgcagaaagctgcgggatgaaaaagagacacttctccagagactcactgaggtggaacaggagagagaccagttggaaattgtggccatggacgctgagaacatgcgtaaggagctggcggagctcgaaagcgcactgcaggaacagcacgaagttaacgcttctctgcaacagacacagggcgaccttagcgcgtatgaggctgagctggaagctcgcttaaacctcagagacgctgaggccaatcaactcaaggaggaactggaaaaagtgacccggctgacccaactcgaacaatcagcgcttcaggcagagttagaaaaagagagacaagcccttaagaacgcactcggaaaggcgcagttttcagaagagaaggagcaggagaattcagaattacacgcaaaactcaaacatcttcaggatgataataacctgctcaaacaacaactgaaggattttcaaaaccatctcaatcacgtagtggacgggctggtccggccagaggaggttgccgcacgtgtggacgagctgcggcggaagctgaaacttgggacaggcgagatgaatatacactccccatccgacgtcttaggtaagtcactggccgatcttcagaagcagttttctgagatcttagcccgaagcaaatgggagcgagatgaggcccaggttcgggagcgcaaattgcaagaggaaatggcactccagcaggagaaactcgccacaggacaggaagaattcagacaggcatgcgagagagccctggaggcacggatgaactttgataaacggcagcacgaagctcggatacagcagatggagaacgagattcactacctccaggagaatttaaagagtatggaggaaatccagggcctgaccgacctccaactgcaggaggcagacgaggaaaaagagcgcatcctcgcacagttacgggagttagaaaaaaagaagaagcttgaggacgcgaagagtcaggagcaagtcttcggtctggacaaggagctgaagaagctgaagaaagcagtggccaccagcgataagttagctaccgctgagcttaccatcgccaaggatcaattgaaatctttgcatggtacagttatgaagattaatcaggagagggccgaagagttgcaggaagctgagcggtttagtcgtaaagccgctcaggccgcccgcgacctgacccgggctgaggcagaaatcgaactgctccagaatctgctgagacagaaaggcgaacagttcagacttgagatggagaagaccggggtgggcaccggagcaaattcacaggttcttgagatagaaaagttgaacgaaaccatggaacggcagcggaccgaaattgcccggctccagaatgtattggacctcaccggcagcgacaataagggcggattcgagaatgtgcttgaggagattgccgagttacggagagaggtctcctatcagaacgactatattagcagcatggctgatccctttaagcgcagaggatattggtacttcatgcctccaccacccagcagcaaggtttcctcccatagttctcaagcaaccaaagacagcggcgtcggactaaaatacagcgccagtacccctgtgcgcaagccgcgccccgggcagcaggacggcaaagagggctctcaaccaccgcccgcctcaggatactgggtttacagcccaatacgctccggactgcacaagctatttccctcccgagacgcggatagcggaggggacagccaggaggagtcggagcttgacgaccaggaggaacctccttttgttccccctccaggctatatgatgtatacggtgctcccggacggatctcctgtgccacagggtatggcactttacgctccccctcctcctcttcccaataattcccgcccgcttacgccaggcaccgtggtatatggcccgcctcccgccggagcccccatggtgtacggcccccctcctccaaatttcagcattccctttattccaatgggggtgctgcattgtaatgtgcccgaacatcacaacctcgagaatgaagtttccaggctcgaggatattatgcagcatctaaagtcaaagaaaagagaggagcgatggatgagggcttctaagaggcagtcagagaaggaaatggaagaactccaccataacattgacgacctgctgcaagagaaaaagtctctggagtgcgaggttgaggaactgcacagaaccgtgcaaaagcggcagcaacaaaaagattttatagatggcaacgtcgaaagccttatgactgaactagaaatcgaaaagtccctgaagcaccacgaggatattgtcgacgaaattgagtgcatcgagaaaaccctcctaaagcgccggtcagagctgagggaggcagacaggctcctggccgaggccgagagcgaattgtcatgcacaaaagagaaaacgaaaaacgctgtggagaaattcaccgacgccaagcgctccctgctccagaccgaatctgatgctgaggaattggaacggagggcacaagagaccgcagtgaatttggtaaaggcagatcagcaattgaggtcactccaagctgacgcgaaggatttagaacaacataaaatcaaacaagaggagatactgaaagagatcaataaaatagtggcggctaaagacagcgattttcaatgtttgtctaagaagaaggagaagctaacagaggagctccaaaagctgcagaaggacatcgaaatggctgagcgtaatgaagatcaccatctgcaggtgcttaaggaatcagaagtgcttctgcaggcaaaaagagccgagcttgagaagctgaaatcccaggtcacgtcccagcagcaagaaatggcagtgctggacagacagcttggacataagaaagaggagctccatctcctgcagggaagcatggtgcaagcaaaagccgacttacaagaagcacttagactcggggaaacagaagtcactgagaagtgcaatcatatacgggaggtcaagagtctgctagaagaactctctttccaaaaaggtgagttaaatgtccagatttctgagaggaagacacagctcacactgattaagcaagaaatcgagaaggaggaggagaacctgcaagttgtcctgcggcagatgtcgaaacacaaaacagagttaaaaaacattctagacatgctgcaactcgaaaaccatgaacttcaggggctgaagcttcagcacgaccagagggtttccgaacttgagaagacccaggttgccgtgttagaggaaaagttagagctcgaaaacctccagcagatatcgcagcagcagaagggtgaaatagagtggcagaaacaacttttggagagggacaaaagagaaatcgagaggatgacagctgaatcacgcgcgctccaaagttgcgttgagtgccttagcaaggaaaaagaggatctccaggaaaagtgtgacatctgggagaagaaactagctcagactaaacgcgtgctagcagcagccgaagagaacagcaagatggagcaatccaatcttgaaaaattggagctgaatgtgagaaaactgcaacaagaactggaccagttgaatcgggataaattgagcctgcacaacgacatcagtgccatgcagcaacagctccaagagaaacgagaggccgtgaactctctccaggaagagttggccaatgtgcaggatcacctgaacctggctaaacaggatctcttgcacaccacgaaacatcaggatgttctcttatcagagcaaactagactccagaaagatataagtgaatgggctaaccgctttgaagattgtcagaaggaagaagagactaagcagcaacagttacaggtccttcagaacgagatcgaggagaacaagttgaagcttgtgcagcaggagatgatgttccagcgcttgcaaaaagaacgagagtccgaggagtccaagctcgagacgagcaaggttactttaaaagagcaacaacaccaattagaaaaggaactgaccgatcaaaagtcaaaactcgatcaggtcctgtctaaagtgctggcagccgaggagcgggtgaggactctgcaggaggaggagcgttggtgtgaatcactggaaaaaacgttatcccagaccaaaaggcagctgtcagagagagagcagcagctagtggaaaagagcggtgagttgctggccctgcaaaaagaggcagattcaatgcgggccgatttctccctgctaaggaaccagttcttaaccgaaaggaaaaaggcggagaagcaggtcgcgtccctgaaggaggcactaaaaattcagcgctctcagctggaaaagaatctgctggagcagaaacaggaaaactcttgcattcaaaaggaaatggctacgattgaactggtggcacaggataatcatgagagggcacgcagattaatgaaggagctcaatcagatgcagtatgaatataccgaattaaaaaaacaaatggcaaatcaaaaggaccttgaaagacgacagatggaaatcagcgacgccatgcgtaccttgaagagcgaggtcaaagatgaaattcggacatctcttaagaacctgaatcagtttcttcctgagctccctgccgatctcgaggccatcctcgagagaaatgagaacttagaaggcgaacttgaatccttgaaagaaaatctgccgtttaccatgaatgagggaccctttgaggagaaacttaatttctcacaggtgcatatcatggacgaacattggcgtggcgaggcattacgagaaaaacttcggcaccgcgaggaccgcctgaaggctcaattacggcactgtatgtcgaagcaggctgaagtgcttatcaaagggaaaaggcagaccgagggcaccttgcatagcctgcggcggcaggtagatgcactgggagagctggtcactagcacatcagcggattcggcatccagtccctccttaagtcaattggagtcatctcttaccgaggacagccagctggggcaaaatcaggaaaaaaatgcatctgcccgctag

SEQ ID NO: 15424 - DNA, 1359 bp, synthetic construct
  source 1..1359: mol_type = other DNA; note = Synthetic coding sequence
atgaagaaaggatcccagcagaagatcttcagtaaagccaagatccccagttcgtcccacagcccaatcccctctagcatgtctaatatgcgaagccggtctctgtccccactgatagggagcgagaccctgccctttcacagtggcggccagtggtgcgagcaggttgagatcgccgatgaaaacaatatgcttcttgattaccaggatcacaagggggccgatagccatgccggagtgagatacattactgaagcgctcatcaagaagctgacaaagcaggacaacctcgccctgatcaaatccctgaacctctcacttagtaaagatgggggaaagaaatttaaatatatcgaaaacttggagaaatgcgtaaagctcgaagttctcaatctgtcttacaacctgatcggcaagatagagaagctggataaactgctgaagctgcgtgaactcaacctgagttacaataaaatatctaagatcgaaggaatcgagaacatgtgcaatcttcagaaactgaatctggctggcaacgagatcgagcacattccagtgtggctgggcaagaagctgaaatccctaagggtactcaatctcaagggcaacaaaatctcttccctgcaggacatctctaagctgaagccactacaggatctaatcagcctcattctggtggagaacccggttgtcacactcccccactatctgcagttcacgatcttccatttaaggtccctcgagtcactcgagggtcagccagtgaccacacaagacagacaagaggcattcgagaggttctccctggaagaggtcgagaggctggagcgggacctggagaagaagatgattgaaacggaggagctcaaatcaaaacagactaggtttctggaggaaattaaaaaccaggacaaactgaataaaagtttgaaggaggaagccatgctccaaaagcagtcatgcgaagaattaaaatcagacctcaacacgaaaaacgagctgttaaaacagaaaacaattgagttgacccgggcctgtcaaaagcaatatgaattagaacaggagctcgcattttacaaaatcgatgctaaatttgagcctctgaactattatcctagcgagtacgccgagatagataaagctcctgacgagagcccctacatcggcaaatcgcgatataaacgcaatatgtttgccacggaatcatacatcatcgacagcgcccaagctgtgcagatcaaaaagatggagccagacgaacagctgcgcaatgaccatatgaacttgcgcggacacactccgctcgacactcagctagaggaccataagctggattatcagaactgcatgatgaagtag

SEQ ID NO: 15425 - DNA, 1053 bp, synthetic construct
  source 1..1053: mol_type = other DNA; note = Synthetic coding sequence
atgtgctgtgatagcgacttcgtcgcaagaaataaatctcaggactccgggatcgctgagatggaagaactgcctgtgccccacaacatcaagatttcaaacatcacctgcgacagttttaagatttcttgggaaatggacagtaagagcaaggaccgtattacacattacttcatcgacttgaataagaaagagaacaaaaattcaaacaaattcaagcacaaggatgtccccaccaaactggtcgcgaaggccgttccactacctatgacagtgcgggggcattggttcctgagtcctaggacagagtataccgtggcagtgcagaccgccagtaaacaggtagacggggactacgtggtctccgagtggtccgaaatcatcgagttctgcaccgctgattacagtaaagttcacctgacgcaattattggagaaagccgaggtgatcgccgggcgaatgttgaagttcagcgtgttttatcggaatcagcataaagaatactttgattacgttcgagagcatcacgggaacgctatgcagccctcagttaaagacaactcagggagtcacggatctcctatctccggaaagcttgaaggcatctttttttcatgcagtactgagttcaatacagggaagcccccccaggacagcccctatggcagatacaggttcgagatcgcagctgaaaagctgtttaatcctaatacgaatctatattttggcgatttctactgtatgtacaccgcttaccattacgttatcctcgttatcgctcccgtaggcagtcccggtgacgaattctgcaaacagcgcctgcctcagctgaactccaaggacaataagttcttgacatgcaccgaggaggatggcgttctggtctaccatcacgcacaggacgttatcctcgaggtgatttacacagatccagtagacctgagcgtcgggactgtggctgaaattacaggacaccaactcatgtccctctcgactgccaacgctaaaaaagatccgtcctgcaaaacttgtaatatcagcgtgggaagatag

SEQ ID NO: 15426 - DNA, 1131 bp, synthetic construct
  source 1..1131: mol_type = other DNA; note = Synthetic coding sequence
atggaggtcccccgcctggaccacgcactgaatagcccgacatcaccctgcgaggaggttattaaaaatcttagcctggaggcaatccaactgtgtgatcgcgatggcaacaaaagccaggacagcggcattgccgagatggaagaactgcccgtgcctcacaacattaaaattagcaacatcacctgcgattcattcaaaataagttgggaaatggattctaaaagcaaggaccgcatcacacattatttcattgatctgaacaagaaagagaacaagaactccaacaagtttaaacataaagacgtgccaactaaactggtcgccaaggccgtccccctgcccatgaccgtgagagggcactggttcttgtcacctagaaccgagtataccgtggccgtccagacagctagtaagcaggtggacggcgattatgtggtgtccgagtggagtgagataatagagttttgtacagctgactactcaaaggtgcatcttacacagcttctcgagaaagccgaggttatcgctggcagaatgttaaaattttctgtcttttatagaaatcaacacaaagaatattttgactacgtgagagaacaccatgggaacgccatgcagccaagtgtgaaagataacagcgggtcccacgggtctccgatctccgggaagctggaaggcattttcttttcctgctcgaccgaatttaacacaggcaaaccaccgcaggatagtccctatgggaggtaccggttcgaaatcgcggccgagaaactgttcaaccctaacaccaacctgtacttcggtgacttctattgcatgtataccgcgtatcattatgtgatcctggttatcgccccagttggaagcccgggcgacgagttttgtaaacagcgcctcccacagctgaatagtaaagataacaagtttctaacctgtactgaggaggacggggttctggtgtaccatcatgcacaggatgttatcctcgaggtgatttatactgatccagtggacctctcggtcgggacagttgctgagatcaccggtcatcaattaatgagtctgtctaccgctaacgcaaaaaaggacccctcctgcaagacttgtaacatttctgtcggtaggtag

SEQ ID NO: 15427 - DNA, 1263 bp, synthetic construct
  source 1..1263: mol_type = other DNA; note = Synthetic coding sequence
atgctcaaggccgtcatcttgattgggggacctcagaagggcacacgcttcaggccactcagtttcgaagtgcctaaacccctgttcccagttgcgggggtgccgatgattcaacatcacattgaggcctgtgcccaggtgccaggaatgcaagaaattctcctgattggcttttaccaacctgatgagcctttaacgcagtttcttgaggccgcccagcaagagtttaatcttccagttagatatttacaagagttcgctcccctcggcactggaggagggctctatcactttagagaccagatactggcaggaagtccagaggcattctttgtgctgaacgccgatgtgtgctctgacttcccattgtccgctatgttggaggcacaccgccggcagcgtcatcctttcctgctgttgggtactacggcaaaccgaacccaaagtcttaattatggatgcatcgttgagaacccacagacacacgaggtcctgcattacgtggaaaaaccctccactttcataagcgacattatcaactgcggaatttacctatttagtcccgaggccctgaagccactacgcgacgtttttcagcgcaatcagcaagacggtcaattggaagattcacccgggctgtggccaggtgctggcaccatccgactcgagcaggacgtattcagtgccttggcaggccagggacaaatctacgttcacctcacggatggtatttggtcacaaattaaatccgcgggtagcgctctatatgcttcacgcctgtacctgtctcggtaccaggatactcaccctgagagattggccaaacacacacccggcgggccatggattagagggaacgtttacatccatcctaccgccaaagtggcgccaagcgctgtcctcggaccaaacgtctccataggtaaaggtgtgaccgtgggggaaggggtgaggttacgagagagcattgtcctgcacggggctacactgcaggagcatacctgtgttctacattctatcgtcggttgggggtcaacggtggggaggtgggcgagagttgagggcaccccctccgatcctaaccctaacgatccaagggcacgtatggacagcgagagcctcttcaaggacggaaaattgctgccagcaattaccattttgggttgccgcgtcagaattcctgctgaggtgctgatcctgaacagcattgtactgccccataaggaactctctcgtagtttcaccaaccagatcatactgtag

SEQ ID NO: 15428 - DNA, 411 bp, synthetic construct
  source 1..411: mol_type = other DNA; note = Synthetic coding sequence
gatcccctcagctggctgtccgggccatggggccaagtacccgccggtatttgtcctcctcggcatagaggctggtaccacttcagagatcagattctcgccggcagccctgaggcatttttcgtgttaaacgctgatgtgtgctcggacttccccttgagcgcaatgttagaagcacatcgccggcaacgacaccctttccttctcctcggcacaaccgcaaaccgaacgcagtccctgaactacggatgcattgtggaaaacccacagacgcatgaggtgctgcattatgttgaaaagccgtcaacgtttatatccgacataatcaactgcggaatatatcttttttcaccggaggccctcaagccactacgagacgtgtttcaaagaaaccaacaggacggacagtag

SEQ ID NO: 15429 - DNA, 1365 bp, synthetic construct
  source 1..1365: mol_type = other DNA; note = Synthetic coding sequence
atggaaagaaaggacttcgaaacgtggctggataatattagtgtcaccttcctgtctctgactgacttacagaaaaatgaaaccctcgatcatctgatatccctgagtggcgctgtgcagctgcggcacttatcgaacaatctagagacattgcttaaacgggactttctgaagcttcttccactcgagctttctttttatctactcaagtggctggatccccaaacactgctgacatgctgcctggtgtctaagcagtggaataaagtgatttccgcatgcacagaagtgtggcaaacggcgtgcaaaaatttgggctggcagattgatgattcagtacaggatgccctgcattggaaaaaggtctacttgaaagcgattctcaggatgaagcaactggaagaccacgaggccttcgaaacctcctcacttatcggccattccgcacgggtatatgccctttactacaaggatggcctgttgtgcactggctcagacgatctgagcgcgaaactctgggatgtaagcaccggccagtgcgtgtacggtattcagacacacacctgcgcagcggtcaaattcgatgaacagaagctggtaactgggagtttcgataatacagtggcttgttgggagtggtccagcggcgcaaggacacagcatttcagaggacacactggggcggtgttctccgtcgactacaacgatgaactggatatcctagtttcaggaagtgccgatttcactgtgaaggtctgggccttgtcagctggcacatgtctgaatactcttaccgggcataccgaatgggttactaaagtagtgctccagaagtgtaaagtgaaaagtctccttcactcaccgggcgactatattctgctgtctgctgataaatacgaaatcaagatttggcctatcggtagagaaattaattgcaagtgtttgaaaaccctgagtgtgtccgaagacagatccatctgcctccagcccagactccacttcgatggaaagtacatcgtctgttcttctgcgctgggtctgtaccagtgggacttcgcctcttacgacatcctccgggtgatcaaaaccccggaaattgcaaacttggcgcttttgggctttggagatatttttgccctgctttttgataaccggtacctttacatcatggatctgaggacagagtctttaatcagccggtggcccctcccagaatatagaaagagtaagagggggagcagcttcctcgctggcgaggccagctggctaaacggcctcgatggtcataacgacactggcttagtgtttgctacttcaatgccggatcacagcatccacctggtgctatggaaggagcacggatag

SEQ ID NO: 15430 - DNA, 372 bp, synthetic construct
  source 1..372: mol_type = other DNA; note = Synthetic coding sequence
atggaggcagctgagacagaagcagaggccgccgctctggaagtcctcgcggaagtcgctggtatcctggagcccgtcggcctccaagaagaggccgaactccccgctaaaattctcgtggagttcgtggtagatagccagaagaaggacaaactgctttgctctcagctgcaggtcgctgactttctccaaaacattctggcacaagagcggccatggtgcgtccttcagggctgttggagtaccacatgttggaggtgcaaatttgctatgacctcatggcgcaccgctgcttggcgcaaaatccttgagaaggctagcgattttcctcatcttccaaccataatcacaggaaagacagtgaactcttag

SEQ ID NO: 15431 - DNA, 834 bp, synthetic construct
  source 1..834: mol_type = other DNA; note = Synthetic coding sequence
atggaggccgccgaaactgaggccgaggctgccgccctcgaagtgttagcagaggtcgccggtattctcgaacctgtgggactgcaggaagaggccgagcttcctgctaaaattctcgtggagttcgttgtggatagccaaaagaaggataaactcttgtgctcccaattacaagtcgcggacttcctgcagaatattctggcacaggaagatactgctaagggtctggaccctctagcgtccgaggacacttctcggcagaaggcaattgcggctaaggaacaatggaaggagctgaaggctacttaccgggaacacgtggaagccatcaaaattggcctgacaaaagcattgacccagatggaggaagctcagcggaagcgcacgcagcttagagaggctttcgaacagcttcaggcaaaaaagcagatggcgatggaaaagagacgagctgtgcagaaccagtggcaactgcagcaggagaagcatctgcaacacctcgcagaagtgtctgctgaggtgcgtgagcgcaagacaggaacccagcaggaactggacagggttttccaaaaattaggcaatctcaagcagcaggccgaacaggagcgagacaaactccagcgctatcagaccttcttgcagctgctgtacactctgcagggaaagctgctcttccctgaggccgaggccgaggcagagaatctgccagacgacaaaccacagcagccaacccgaccgcaggagcagtctacaggagacacaatgggccgggatcccggtgtgtcgtttaaggccgtaggattacaaccagccggcgatgtgaacctgccctag

SEQ ID NO: 15432 - DNA, 1713 bp, synthetic construct
  source 1..1713: mol_type = other DNA; note = Synthetic coding sequence
atgtcttcaataggcgaggggatcgacttctctcaggagcgacagaaaatcagcgggcttcgcacattagagcagtccgtgggggagtggttggagtcaattggattgcagcaatatgagtccaaactgctgcttaacggtttcgacgatgtgcattttctggggtccaacgtcatggaggaacaggacctacgggacattggtataagcgatccacagcacagacgaaagttgctacaggctgcaagaagcctgcccaaggtaaaagccctaggttatgatggaaacagccctccatctgtgcccagctggttagactctcttggcctacaagattatgtgcacagtttcctgagctcaggttacagttctattgatactgtgaagaacctttgggagctcgagctggtaaacgtgttgaaagtccaactactgggacataggaaacgtattatcgccagcctagcggaccggccctacgaagagcctcctcagaaaccaccccgttttagtcaactgcgctgccaggacctgctgtcacaaaccagctccccgctctcccagaacgattcttgcaccggtagatcagcagaccttctcttgccgcctggtgacaccggacggcggcgacatgacagcctacatgaccccgcggcgccaagccgagccgaaaggtttagaattcaggaggaacaccgggaggccaaactgaccctgcgaccaccctccctggctgcaccatacgcacccgttcaatcttggcagcatcagccagaaaagctcatatttgagtcctgtggctacgaggcaaattacctgggttctatgctcattaaggacctgagaggaactgagtctactcaggatgcgtgcgccaagatgcgaaagtccactgagcacatgaagaagatccctaccattattcttagtattacctataagggtgtaaagtttattgacgcgagcaacaaaaacgtaattgcagagcacgagatacgtaatatctcttgcgctgcacaggatcccgaagatttgtgtacttttgcatatataacgaaagatcttcagactagccatcactactgccatgtcttcagtaccgtggatgtgaacctgacctacgaaattatccttaccctgggacaggcttttgaagtcgcctatcagttggccttgcaggcccagaagagccgcgccacaggggcgtctgccgccgagatgattgaaactaaatcatctaagccagtcccaaagcctcgagttggggtgcgcaagagtgccgtccccctacccccagattcaaggtgctgctactgccatacttgtaccacgcacaggcccagctatctgcctctcccatccgtgtcaccaggagtcaagcttgagcctcccgatatggaccaggacgcccagtcacacgcaagcgtaagctgggtggtggatcccaaaccagattccaaaagaagcctttccaccaatcacacacgcctggaacttgtatgctgctctcaaccggaaaatgagctggtgtccacaatctctggagataagcccaagtccttcctcgagccattgctgttcgtgatgcccactaccgcctacaaccacaattgtcctgaatggaggagtcaaaaggacggaggatgcagcacgtctgagtgtcctcatcatttatgtctggagaaaccaggcgtcctgtccctggagatgtag

SEQ ID NO: 15433 - DNA, 1785 bp, synthetic construct
  source 1..1785: mol_type = other DNA; note = Synthetic coding sequence
atggagagcaatcacaagtccggcgacggactgtccggcacacaaaaggaggccgcactaagggctctcgtgcagcgtaccggatactccctggtgcaggagaacggacagcgaaaatacggtggccccccccccggctgggatgcggcccctcctgagcgcggctgtgaaatattcattggaaagctccctcgcgacctcttcgaggacgagctgatccccctctgcgaaaaaatcgggaaaatctatgaaatgaggatgatgatggattttaacggaaacaatcgaggatacgcattcgtgacattttctaataaggtggaggcaaagaatgccattaaacagctcaacaactatgagatccgaaatggacgcctcctcggagtgtgtgcgtccgtagacaactgcagactttttgtgggcggcatcccaaagacgaagaagagggaggagattctgtccgaaatgaagaaagtcaccgaaggcgtagtggatgtgattgtctatcctagcgcggcagacaaaaccaaaaatcgcggattcgctttcgtcgaatacgagagccaccgggccgccgcgatggctcggaggaagctcctgcccggacggatccagctgtggggccatggaatcgctgtcgattgggccgaaccagaggtagaggtggatgaggacacaatgagctcagtcaagatcctgtacgtgcggaaccttatgttgagtactagtgaggaaatgatcgagaaggaattcaataatatcaagcctggggccgtggaaagagtgaaaaagatccgagactacgctttcgtgcacttctctaatcgggaagatgcggtggaggcaatgaaggcactgaatggtaaagtgttggacggcagtccaatcgaggtcacactagctaagccagttgacaaggatagttatgtacggtacacacgaggtacaggcggccgcggtactatgttacaaggcgaatacacctactctctagggcaggtgtacgaccccactaccacgtacctaggcgcgccagtcttttatgccccccagacctacgccgctatcccatccctgcacttccccgcgactaagggtcacctgtccaatcgtgccatcattagagcaccaagcgtgcgggagatctacatgaacgtgcccgtcggcgccgccggcgtccgcggacttgggggtagaggctacctggcgtatacagggctggggagggggtatcaagtgaaaggcgataaacgtgaagacaaactttacgacattctgcctggcatggagttgaccccaatgaaccccgtgactctgaaacctcagggaattaagctggccccacagattctggaggagatttgtcaaaagaataactggggccagccggtctaccagctgcactctgcaataggccaagatcagaggcagttatttttatacaagattaccataccagcgctggcttctcagaatcctgctatccatccatttaccccaccaaagttgtcagcttttgttgatgaggctaaaacttacgctgcagagtatacactgcagaccctcggaatccccactgacggaggcgatgggactatggccaccgcagccgctgccgccactgccttcccgggatacgccgtccccaacgcaactgctcccgtttccgccgcccagctaaagcaggccgtgaccctgggacaagatttggccgcatacacaacttatgaagtgtaccccacctttgcagtgactgcccggggggatggctatggtactttctag

SEQ ID NO: 15434 - DNA, 1785 bp, synthetic construct
  source 1..1785: mol_type = other DNA; note = Synthetic coding sequence
atggaagcagtctgcttgggcacatgtccagaacccgaggccagcatgagtaccgctattccaggactgaaaaagggcaacaatgccctacagtctattatccttcagactctcttagaaaaagagaacggacaaagaaaatacgggggacctcctccaggatgggacgcagcacctccagaaaggggatgtgagatctttattggcaagctgccccgcgatctgtttgaggatgagttaataccgctgtgtgaaaagatcggcaaaatctatgagatgcgcatgatgatggactttaacggaaataaccgcggttacgcctttgtgacattctctaacaaagtggaggccaagaatgccattaagcagctaaataattacgaaatccggaacgggcgactgctgggtgtatgtgcttctgtggataactgccggctctttgtgggaggaatcccaaagacaaagaagagggaagaaattttgagcgaaatgaagaaggtgacagagggtgtggtggacgtgatcgtgtacccctctgccgcagacaagaccaaaaaccgaggcttcgcttttgtggaatacgaaagtcatcgagccgcagctatggccagacgcaagcttctcccgggcagaattcagttatggggtcacggcatagccgtggactgggcagagccagaggtcgaggtggatgaagacactatgagttccgtcaagatcttgtatgttcgtaacctgatgctatccactagtgaggagatgatcgagaaggaattcaataacattaaacccggtgctgtcgagagagtgaaaaagatccgggattacgctttcgtgcacttctcaaaccgggaagacgctgttgaggcgatgaaagctctgaacggtaaggttttagatggttctcccatcgaggttaccctggctaagcccgtggataaggactcatatgtgagatatacccgtggcacaggtggccgcggtacgatgttgcagggggagtacacctactcattgggccaggtttacgatcccacgaccacctacctcggagctccagtcttctacgcaccccagacctacgcggctattccatccttacactttcccgctacaaagggacacctgtccaaccgggccataatccgggccccgagtgtgcgtggcgctgccggcgtgcggggtctggggggacgcggatatctggcgtacaccggacttggccgcggctaccaggtaaaaggcgataagcgcgaagataaattatacgacattctgcccggaatggagcttaccccgatgaatcccgtcacgctaaagccccaaggcatcaaattggctcctcaaattctggaggagatttgtcaaaaaaataattggggccagcctgtgtaccaactgcacagtgccatcggtcaagatcagcgccagcttttcctgtataaaatcacgattccagctctcgcatcccagaaccctgcaatccatccattcacacccccgaagttaagtgcattcgtggacgaggcaaaaacatacgcggctgagtacacattacaaactctcggcattccaacagacggcggcgacggcaccatggccaccgccgctgccgctgccaccgcctttcccggctatgcagttcccaacgcaactgcgccagtgtccgcagcccagctaaaacaggcggtgacactgggacaggatctagctgcatacactacctacgaggtttaccccacattcgccgttactgcaagaggagatggttatggcaccttttag

SEQ ID NO: 15435 - DNA, 1761 bp, synthetic construct
  source 1..1761: mol_type = other DNA; note = Synthetic coding sequence
atggaaagtaaccataagtctggggacgggttgagcggcactcagaaggaggccgcgctgagagcgttggtgcagcggacaggatattcgctggtccaggaaaatggccagcggaagtacgggggacccccgcccggctgggacgcggcacccccggaacggggttgtgagatcttcatcgggaaactaccgagagatctgttcgaagacgagctgatccctctttgcgagaagataggcaaaatttacgaaatgcgaatgatgatggattttaatggcaacaacagggggtatgccttcgtcaccttctccaataaggtcgaggcaaagaacgccattaagcagctcaataactacgagattaggaatggtaggctacttggggtctgcgcaagcgtggacaactgtagactgttcgttggcggcatacccaagacaaagaaaagagaagaaattctgtccgagatgaaaaaagtaaccgagggagtggtggacgtgatcgtatatccctccgcagcagacaaaacaaagaataggggtttcgcatttgtcgagtacgaaagccaccgtgccgccgccatggccagaaggaagctcttgccagggcggattcagctgtggggccacggcattgcggtagattgggccgaacccgaagtcgaggtggatgaggataccatgtcctctgtgaagatcctctatgtccgaaaccttatgctcagcacttccgaggaaatgattgaaaaggaattcaacaacatcaagccaggcgctgtggaaagggtcaaaaagatccgagattacgctttcgtccacttctccaaccgcgaggatgcagtcgaggctatgaaagcactaaacggtaaggtgctggacggttcacccatcgaggtgactctcgccaagccagtagacaaagactcatatgtgcgatatacaaggggcacaggcggccgtgggactatgttgcagggggaatatacgtacagtctgggtcaggtgtatgatcctactactacctacttgggtgcacctgtgttttacgctccacagacatacgccgctatcccgtcattgcacttccccgctaccaagggacacctctcaaacagggccatcatccgggccccttcggtgcgcggagctgccggagtgcgcgggttaggcggccgcggatatctggcttacacagggctgggcagagggtaccaggtcaaaggagacaaacgggaagataaactgtatgatattcttcccggaatggagcttacaccaatgaatcccgttacacttaagccgcaaggaataaagttggccccccagatcctggaagaaatctgccagaaaaataactggggtcagccagtgtatcagttgcattcggccattggtcaggaccaacggcagctctttctatataaaattacaatccctgcacttgctagtcaaaatcctgcaatacatccttttacgccaccaaagctgtcggcgtttgtggacgaggctaagacttacgcagctgagtacacgctgcagaccctaggaatccctaccgatggtggcgatggcaccatggccactgctgcagcagctgcaacagcctttcctggatacgccgtgccaaatgctactgcccctgtcagtgccgcacagctgaagcaggccgtaacactggggcaggacctggctgcctatacaacatacgaggtctacccaaccttcgccgtcactgcacgtggagacggctacggcacattctag

SEQ ID NO: 15436 - DNA, 1761 bp, synthetic construct
  source 1..1761: mol_type = other DNA; note = Synthetic coding sequence
atggagtcaaaccacaaaagcggagatggcctgagcggtactcagaaagaggccgccctgagggccttagtgcagcgcacaggctattcactggtccaagagaatggacagcgcaagtacggcggacccccccccggatgggatgcggcaccacccgaacgcggctgtgaaatttttatcggaaaactccctcgggaccttttcgaggacgagttaattcccctgtgtgagaagattgggaagatttacgaaatgcggatgatgatggacttcaacggaaacaatcgagggtacgcattcgttactttctctaacaaggtggaggccaaaaatgcaattaaacagcttaacaattacgaaatccgaaatgggcgcctactaggcgtttgcgccagcgtggacaactgccgcctctttgtcggggggattcctaagacaaagaaacgcgaagagatcctcagcgagatgaagaaagtaaccgaaggcgtggtggacgttatcgtctaccctagcgcagctgataagactaaaaacagggggtttgcatttgttgagtacgagtcacatcgcgccgctgcgatggccagacgcaaactgctgcccggccgaatccagctctgggggcatgggatcgcagttgattgggcagaacctgaggtggaggtagatgaggataccatgtcaagtgtgaaaatcctgtacgtgcgtaacctcatgctgtccacctctgaagaaatgattgagaaggaattcaacaacattaagcccggagcggtagagagagttaaaaagatcagagactatgcctttgtgcacttttctaatagggaagatgccgtcgaggcaatgaaggccctcaatggcaaggttctggatgggtctccaatcgaagtgacactggctaagcccgtcgataaggactcatacgtccggtacacgcgggggacgggtggtagagggactatgctgcaaggcgagtatacttacagccttggacaggtgtatgatcccacaacaacctacttgggggcccctgtgttctacgcacctcagacctatgcggccattcctagcctacattttcccgccacgaaaggacatttgtcaaaccgggccattatcagggccccatctgtgagaggcgctgcaggagtgcgcggtctaggtgggcgcgggtatctggcttacactggtctcgggaggggatatcaggtcaagggtgacaagcgggaggacaaactttacgacattctcccgggcatggaactcactcctatgaatcctgtgacactaaagccccaagggatcaaactcgcacctcagatactggaagagatatgccagaaaaacaattgggggcagccggtttaccagttacattcggcgatcggacaagatcaaaggcagctgttcctgtataagataaccatccctgccctggcaagccagaatccagcgatacacccgttcacaccacctaaactgagtgcattcgtggatgaagcaaagacgtatgctgccgagtataccctccaaaccctggggattcctacagacggaggcgatggtaccatggccactgcggccgcagctgcgactgccttccctggttacgcggtgcccaacgccaccgcacctgtatccgcagctcaactgaaacaggccgtcaccttgggacaggatttggctgcctatacgacttacgaagtgtaccctaccttcgccgtcaccgcaaggggtgacgggtatggtaccttctag

SEQ ID NO: 15437 - DNA, 1542 bp, synthetic construct
  source 1..1542: mol_type = other DNA; note = Synthetic coding sequence
atgcaaagaacatttgcttggctgctggatcgggtgcaacacctgggggcgcccgttaccctacgggcatcctacctcgagatatacaatgagcaggtgcgcgatctgctgtctcttgggtctccccgtccactcccggttagatggaacaagacacgcggtttctacgtcgagcaactccgtgtggtggaatttggcagtctggaagccttaatggagttactccagacaggcctatccaggcggcggaattccgcccacacactgaatcaggcttcgagccggagccatgcactactaacgctatatattagccgacagaccgctcagcaaatgccctccgtggatccgggcgagcctcccgtcggggggaagctctgtttcgtggatttggcaggatccgagaaagtggctgccaccggctctaggggcgagttaatgcttgaggccaattcaattaatcgcagtttgttggcacttggtcactgtatcagcctactcctggatccacagcggaaacagtcccacattcctttcagagatagtaagctgactaagttgctggcggactcactcggtggcagaggtgttactctgatggtggcgtgcgtgagtcccagcgcccagtgcctccccgaaacactctccacccttaggtatgcatcccgggctcagcgcgtgactactcgcccacaagccccaaaatcccccgtagcaaagcaaccccaaagactggagactgagatgttacagctgcaggaagagaatcggcgattacagtttcagctcgaccagatggattgcaaggcatctggactgtccggagctagagttgcttgggcacagcgcaatctttatggcatgctgcaggaattcatgctcgaaaatgagcggttgcgcaaggagaagtcccaactgcagaacagccgagatctggcccagaacgagcagcgaattctggcccagcaggtgcatgccctagagaggcgccttttatcagcatgctaccatcatcagcagggccctggcttgactcccccctgcccttgcctaatggcaccagcacctccatgccacgcattgccaccactctactcttgcccttgctgtcacatttgtcctctctgtcgagtaccgctggcccactgggcttgcttgccaggagagcatcacttgccccaggtgctcgaccctgaggcctcagggggaaggccgcccagtgcgagacccccgccttgggcccccccatgtagtcctgggtcagccaagtgcccccgggaacggtctcacagcgactggacgcaaacgagagttttagcagagatgcttaccgaggaagaggtggtcccaagtgccccacctcttccggtgcgacctcccaaaacaagccccggactcagggggggcgctggcgtgcccaatctggctcagcgtctcgaggcactcagggaccagatcggatcgagtctacggcgggggcggagccaacccccctgtagcgagggtgcgaggagtccggggcaggtgctgcctcctcactag

SEQ ID NO: 15438 - DNA, 786 bp, synthetic construct
  source 1..786: mol_type = other DNA; note = Synthetic coding sequence
atggtgaagggcgagaagggaccgaaaggtaaaaagatcaccctcaaggtggcccggaattgcatcaaaatcactttcgatggaaagaaacggctggacttatcgaagatggggataacaacttttccaaagtgtattctgcgtctctctgatatggacgagctggacctgagccggaacctgatccgtaagattcccgatagcatttccaaatttcagaacttacgctggctggacctgcactccaattatattgataagctgccagagtctattggacagatgacctccttgctgtacctgaacgtgtccaacaatagactcaccagcaacggcctgccagttgagcttaagcagctaaagaatattagggcagtcaacctgggactgaatcatttggactcggttccgactacgctgggtgctctgaaagagctccacgaagtaggcctccacgacaacctgctgaataatatccccgttagcatctctaagctgcctaaattaaagaagctaaacatcaagagaaatccctttcctaagccaggagaatctgagatcttcattgactcaattcggcggctcgaaaacttgtacgtggtggaggagaaagacctttgcgcagcatgtttgcgcaagtgccagaatgcacgcgataacttgaaccgcatcaagaacatggctactacgactccaaggaagacaatcttccctaatctcatctcccctaattccatggctaaggacagctgggaagattggcgcatccgtctgacctccagttag

SEQ ID NO: 15439 - DNA, 1770 bp, synthetic construct
  source 1..1770: mol_type = other DNA; note = Synthetic coding sequence
atggcgagtagccaacgcgacatggaggattgggtgcaggccattaggcgtgtaatctgggctcccttgggcggcggcaccgctcgccgaagccatgctcaccccctggaacccctgccacctggcatctttggccagagactcgaggaaacagtgcatcatgagaggaaatatggtccaagactggctcctctccttgtcgagcagtgcgtcgatttcattcgtgagcgagggttgacagaggaagggctgttccgcatgccagggcaagcaaatttggtcagggaccttcaagattccttcgactgcggtgagaaacctctgtttgacagcaccaccgatgtgcacaccgttgcttcgctgctgaaactttatctaagagagttgccagaaccggtcgtccccttcgcccggtatgaagatttcctgagttgcgcacaactgctgacaaaggacgagggcgaaggtaccctagagcttgccaagcaggtgagcaacttgccccaggctaattataatcttctacgctacatctgtaaatttctggatgaagtccaggcctactccaacgtaaataaaatgagtgtccagaacctcgccaccgtgtttgggcccaacatcctgcgaccccaggttgaggacccagttacaatcatggagggcacgtctcttgtgcagcacctaatgacagtgctgatcagaaagcactcacagctattcacagctccagtgccggaggggccaaccagtccacgtggcggtctccagtgcgccgtaggctggggctccgaggaggtaactcgcgacagccagggagagccaggaggccctgggctacctgcccaccggacatccagtctggatggagcagctgtcgccgtgttatcccgcaccgcccccaccgggccggggtcacgctgcagtcccggaaagaaggttcagacacttccgagttggaaaagctcttttaggcagcccaggtccctgtctggctccccaaaaggcggcggcagctcccttgaggtcccgatcatcagttcagggggcaattggttgatgaacggactcagctccctgcggggtcaccggcgtgccagctcaggggaccgcctgaaggactctgggtctgtgcagagactcagcacttatgacaacgtgcccgccccagggttagttcctggcattcctagtgtcgcctctatggcttggtcaggagcttcatccagtgaatcttccgtgggagggtctctgtcatcttgcacggcttgtcgggcctctgatagttcagctcgaagctctttgcatacagattgggcgctggaaccctccccactgccctcatcctccgaggatcccaagtcgctcgatttagatcatagtatggacgaagcaggtgcaggggcttccaactcggagccatcagaacccgattcaccaacaagggaacacgcccgcagaagcgaggcactccaaggcctggtgactgaactaagagccgaattatgccggcagcgcacagaatatgagaggagtgtgaaacggattgaagagggcagcgctgatctaagaaagaggatgtcacgtctggaagaggagcttgaccaagagaaaaaaaaatacataatgctggaaataaagctgaggaattccgagcgagcccgtgaggatgcagagaggaggaaccaacttctgcagagagaaatggaggagttcttcagcaccctggggtcactaaccgtaggtgccaagggcgctcgcgcgccgaaatag

SEQ ID NO: 15440 - DNA, 1209 bp, synthetic construct
  source 1..1209: mol_type = other DNA; note = Synthetic coding sequence
atgagcgcagagggcgctgagcctggccccggaagcggctccggcccaggacctggaccactatgtcccgagcatgggcaggctctgagttggttctgtgggagcgaaagaaggcctgtgtgtgccgcgtgcgcaggcctcggcggcaggtgccgggggcaccggatccgcagggccgaggagagggctgaggagctgagaaataaaatcgtggaccagtgtgaacgcctgcagctgcaatcggcagccattacaaagtatgtggccgacgtcctgccagggaagaatcagcgcgctgtctctatggcctctgcagcccgagagctggtgatccagaggctctctttagtcagaagcctgtgtgagtcagaggagcagcgcctacttgaacaggtgcacggcgaagaggaaagggcgcaccaatctatactgacccagcgcgtccattgggccgaagctctgcaaaaacttgacaccatccggactggcctcgtgggcatgctgacccatctcgacgacctgcagctaatccagaaggaacaagagattttcgaaagaacagaggaggcagaagggatcctcgacccacaagagagcgaaatgttaaacttcaacgagaagtgcactcggtcgcccctgctgacgcaactctgggctactgcagtgctaggaagtctctctggaacagaagacattcgcatcgacgaaagaactgttagtcccttcctccagttgagtgatgacaggaaaacactcaccttctccaccaagaagtcaaaagcatgcgctgatgggcccgagagattcgaccactggccaaacgcactggcagccacaagcttccagaacggactgcatgcttggatggtgaatgtccaaaacagttgcgcctacaaggtgggcgttgccagcggccatttacctcgcaaagggagtggatctgactgccgcctgggccataatgccttctcctgggtgttcagccgctatgatcaggaattccgttttagccacaatggccagcatgaacctctcgggctgctacgggggcctgcccagctgggagtcgtcctggatcttcaggtgcaggagctactattctacgagcccgcctccggaactgtgctctgcgcacaccacgtgtcttttcctgggccattgtttcccgtcttcgctgtggctgaccagactatctcaatcgtgcgatag

SEQ ID NO: 15441 - DNA, 258 bp, synthetic construct
  source 1..258: mol_type = other DNA; note = Synthetic coding sequence
atgttgcggcgcaaacccactcggctggagctcaagttggatgacatcgaagaattcgaaaatattcggaaagatcttgaaacaaggaagaaacagaaggaagacgtggaagtcgtcggcggaagtgacggcgaaggagcaattgggttgtccagcgacccaaagtccagggaacagatgatcaatgataggatcggttataagccccaacctaagccgaataatagatccagccagttcggaagtctagagttttag

SEQ ID NO: 15442 - DNA, 744 bp, synthetic construct
  source 1..744: mol_type = other DNA; note = Synthetic coding sequence
atgctgagcgatgggtgcggatcagaggaaaagataagtgtcccatcttgctacggcgggattggggccccagtaagccggcaagtgccggcctcccatgacagcgagctgatggctttcatgacaagaaagctgtgggatctggagcagcaggtgaaggcccagaccgacgagatcttaagtaaggatcagaagatcgccgcgctggaggatcttgtgcagactctccggccccaccctgccgaggcaaccctccaacgccaggaggagctggaaaccatgtgcgtacagctgcagaggcaggtgagggagatggagagattcctgtcagattatggcctccagtgggtaggcgagcctatggaccaagaggattctgagtctaaaactgtgagtgagcacggtgaaagagactggatgacagcgaaaaagttctggaagccaggggattccctggctcctccagaagtggatttcgataggctactcgcctctctgcaggatctctctgaacttgtggtggaaggagacacccaggtcactcctgttcccggaggggccaggctcagaacattggagccaattcccctaaaattgtaccgtaacggcatcatgatgtttgatggaccctttcaaccattttatgatccatctacccagcgatgtttgcgcgacatcttggatgggtttttcccatcagagctgcagcggctgtaccccaatggtgtgccttttaaggtgtag

SEQ ID NO: 15443 - DNA, 1464 bp, synthetic construct
  source 1..1464: mol_type = other DNA; note = Synthetic coding sequence
atgtcctcccccctggcctctttgagcaagacccggaaggtgcccttgccgagcgagccgatgaatccgggccgaaggggcatccgcatttacggcgacgtgccagccagtcacgactcagagcttatggccttcatgacgagaaaactgtgggaccttgagcaacaggtgaaggctcagacggacgaaattctaagtaaagatcagaagatagctgccctggaggacctagtacaaactctccgtcctcatccagctgaggctactttgcagagacaggaggagctcgagactatgtgcgtgcagctccaaagacaggtgcgggagatggaacggttcttatctgactacggtctgcagtgggtgggagagcctatggaccaggaggattccgaatctaagacggtgagtgagcatggggagcgggattggatgaccgctaagaagttctggaaacccggagactccctggcacccccagaagtcgattttgaccgtctgttggcaagcctgcaggatctctctgagctcgtggtggagggggacacgcaagtgacaccagtgcccggcggtgcacgtttgcgtacattggaaccaattcctcttaagttatatagaaatggtatcatgatgtttgacggccctttccagcccttttatgatccatccacccaacgctgcctgcgcgacattctggacggcttcttcccaagtgaattacaaagattataccctaatggagtaccttttaaggtgtcagatctgagaaaccaggtctacctggaggatggtttggatcccttcccgggcgagggccgggtagtgggccgccagctcatgcacaaagcattagatagggtagaggaacaccctgggtctcgcatgactgctgaaaagttcttgaatcggctgcctaaatttgtaattaggcagggagaggtgatcgacatacggggcccaatcagagatacattacagaactgctgcccacttccggcgcgcatacaggaaatcgtggtggagacccctaccctggccgcagagagggaacgctcacaggaatcacccaataccccggccccacctctgagcatgctgcgcattaagtcagaaaatggggagcaagcattcctgttgatgatgcagcccgataatacgattggtgacgtcagagccctgctggctcaagctagggttatggacgctagtgccttcgaaattttttcaactttccccccaaccttgtatcaggatgatacactgaccctgcaagccgcaggcttagttcccaaggcggccctgcttctacgggcgcgtcgggcccccaagtcttccttgaaattcagtccgggtccttgccccgggccaggtccaggcccttcacccgggcctggccctggacctagccccgggccaggtcccggaccgagtccgtgccccggcccaagtccttccccacagtag

SEQ ID NO: 15444 - DNA, 1020 bp, synthetic construct
  source 1..1020: mol_type = other DNA; note = Synthetic coding sequence
atgtggactgcccgcggtccttttcgccgggataggtggagcagtgaggatgaggaggccgcaggcccatcccaggctctgtcccccctgctgagcgacacaagaaagatagtgagcgagggagaattagatcagctcgcccagatccggcctctaatattcaacttccatgagcagactgctatcaaagactgcctgaagatcctggaagaaaagaccgccgcctatgacatcatgcaggagttcatggccctggaactgaagaatctgcccggggaatttaatagcgggaaccagccatcaaacagagagaagaacaggtacagagatattctgccctacgacagtacgagggtgcctctcggaaagtcgaaagactacattaacgcatcgtatatccggatagtgaattgtggtgaggagtatttttatattgccacccagggtcccctgctgtctaccatcgacgacttttggcagatggttctcgaaaacaactccaatgtgattgcgatgataacccgtgaaatagagggtggaattatcaaatgttatcattattggcccatttcccttaagaagcccctggagctcaaacactttagggtgttcctcgaaaattaccagattcttcagtacttcataatccgcatgttccaggtggtcgagaaaagcactggaacttcacatagtgtaaagcagttgcaattcactaagtggcccgatcatggcacccccgccagtgccgactccttcatcaagtatattcgctacgcccggaaaagccacctgacaggaccaatggtggtccactgctctgccggtataggcagaaccggcgtgttcctgtgtgtcgatgtcgtgttctgtgcaattgtcaagaattgcagtttcaacattatggacatcgtggctcagatgagagagcaaagaagtgggatggtgcagaccaaagagcagtaccacttttgttacgacatagtgctggaagtgctgcgtaagctgctcactctcgactag

SEQ ID NO: 15445 - DNA, 1563 bp, synthetic construct
  source 1..1563: mol_type = other DNA; note = Synthetic coding sequence
atgagttcccctcttgcctcactgtcaaaaacaagaaaagtgccccttccatcagagcccatgaacccaggccgacgcggcatccggatttacggggacgaagacgaggttgatatgttgagcgatgggtgcgggtctgaggaaaaaatctccgtaccaagctgttatgggggtatcggggcacctgtgtcaagacaggttcccgcaagtcacgatagcgagctgatggctttcatgactcgaaagctgtgggatctggagcagcaggtgaaagcccagactgatgaaatcctctcaaaagatcaaaagattgctgccttggaggaccttgtgcaaacgctgcgacctcacccagccgaggccacactgcagaggcaggaggaactggaaacaatgtgtgtgcagcttcaaagacaggtacgagaaatggaaaggtttttgtcagactacgggttgcagtgggtgggcgaaccgatggaccaggaggactcagaaagcaaaaccgtgagtgaacacggggagagggattggatgaccgctaagaaattttggaaacctggcgatagccttgcccctccggaagtggacttcgataggctgttagccagcctccaggatctgtctgaactcgtcgtcgagggtgatactcaagttaccccagttcctggaggcgcccggctgcgtactctggaacccattcctctaaaactgtaccggaacggaatcatgatgttcgacggcccattccagccgttttatgacccctctacgcagaggtgcctcagagatatactggatggctttttcccaagcgagctgcagcggctctaccccaacggggtgcccttcaaagtgtctgacctaagaaaccaagtatatctagaggatggcctggacccctttccaggagagggaagggtggtcggacgtcagctcatgcacaaggcattagacagggtggaagaacacccagggtcccggatgacagctgaaaagtttctcaacaggctgccaaagttcgtcatccgccagggtgaggtgattgatatccggggcccaatcagggacaccctccagaactgttgtccactgcctgcgcgcatccaggaaatcgtggtggaaaccccaacactcgcagcagaaagggagcggtctcaggagtcacctaacacccccgctcctcctctgtccatgctgcgcattaagagtgagaatggggaacaagcattcctcctcatgatgcagcccgacaacacaattggagacgttcgggccttgctcgcacaggcccgcgttatggatgcatctgccttcgaaattttctcaaccttcccaccgaccctataccaggacgatacactgacactgcaagcagctggactggtgccgaaagctgcactccttctgcgcgcaaggagggccccgaaatcctctctgaagttttcacccggcccatgtcccggacctgggccaggacctagccccggccccgggccaggcccatctccaggtcccggccctggtccatcgccctgcccaggtcccagtcccagccctcaatag

SEQ ID NO: 15446 - DNA, 1563 bp, synthetic construct
  source 1..1563: mol_type = other DNA; note = Synthetic coding sequence
atgtccagccctttggcaagcctctctaaaaccagaaaagtccccttaccttcagagcccatgaaccctggcagacgcggaattcgaatatacggcgatgaggatgaggttgacatgctcagtgatgggtgtgggtccgaggaaaagatctcagtaccttcctgctatgggggcattggggcaccagtttcaagacaagtgccggcttctcacgattccgagctcatggccttcatgaccaggaagttatgggatcttgagcagcaggttaaagctcaaactgatgaaatactttccaaagatcagaagatcgccgctctggaagacctggttcagactctgcgaccccacccggcagaggcaaccctgcagcgccaggaggaattagaaactatgtgtgtgcaactgcagagacaggtcagagaaatggagcgctttctgtccgattacggcctccaatgggtcggcgaacctatggaccaggaagatagcgaatccaaaaccgtcagcgaacatggagaaagagattggatgacagcaaagaagttttggaaacccggcgattcgttggccccccctgaggtcgattttgacaggctgttggcatcattgcaggacttgagcgagttggtggttgaaggagatactcaggtcactccagtccccggaggtgccaggctcagaactctagagcctatcccccttaaactgtataggaacgggataatgatgttcgacgggccctttcaaccattctacgaccccagcactcagcgctgtctgcgcgatatcctcgatggcttctttccatccgagttgcagaggctttatcccaacggggtaccgttcaaggtgtccgaccttcgcaaccaggtgtacctggaggatggcctggacccgtttccaggagaagggagagtggttggtcgccagctcatgcacaaggcactggacagagttgaagagcaccctggcagtcggatgaccgctgagaagttcctgaaccgacttccaaaatttgtcatccgacagggcgaggtgattgatatccgcggacccatacgggacactttacagaattgttgtcctttgcccgctcgcatccaggagatcgtcgtagagacacccacgctggccgcagaaagagagcggtcccaagaatccccaaatacaccggcacctcccctgtccatgctacggataaagagcgagaatggagaacaggcatttctgctaatgatgcagccagataataccatcggggatgtgcgcgccctcctggcacaggcacgcgtgatggacgcttccgcgtttgagatcttctcaacatttccacctacactctaccaggacgatactctaaccctacaagctgctgggttggtaccaaaggcggccctcttgctccgggctcgaagagcaccaaaatcaagcctgaaattcagtcctggaccttgccctggcccgggccccggaccgagtcccggccccgggcccggcccttctcctgggccaggaccgggaccttctccctgtcccgggccatcgccatcaccccagtag

SEQ ID NO: 15447 - DNA, 834 bp, synthetic construct
  source 1..834: mol_type = other DNA; note = Synthetic coding sequence
atgttcgatgggccgtttcaacccttttatgacccctccactcagagatgtcttcgggacatccttgacggtttctttccctctgaattacagaggctgtatccaaatggcgtgcccttcaaggtctcagatttacgcaatcaagtgtacctggaggacggtctggacccctttcccggcgagggacgcgtggtgggtaggcagctcatgcacaaggcgctggaccgcgttgaggagcatccgggctccagaatgacagccgagaagtttctcaacagactgcccaaatttgtaatacgtcaaggggaggtgattgacattagagggccaatcagagacacgctgcaaaattgctgcccactgccggctcgcattcaagaaatcgtggtcgaaactcctacccttgcagccgaaagagaacgttcacaggagtcccccaatactccagcccctcctctgagcatgctgcggattaagtctgaaaacggggagcaggcgtttctgctcatgatgcagcccgacaataccattggcgacgtgagagcgctgctggcccaggcccgggttatggacgcatctgcattcgagatattttccacgttcccacccactctgtaccaagacgacacactgacactgcaagctgccggcctggtgcccaaagctgccctgttgttgagggcgagaagagcccctaaaagcagtctaaaatttagtcccggtccctgtccagggccaggccccggaccttctcctggacccggtcccgggccatccccgggcccaggacccggcccgtctccttgccctggcccctcgcccagtccacaatag

SEQ ID NO: 15448 - DNA, 1314 bp, synthetic construct
  source 1..1314: mol_type = other DNA; note = Synthetic coding sequence
atggccggcgggccacctaaggcactccccagcaccggacctcactccctgcgggatatgccccatcctttggctggctccagcagcgaagaggccgtcggaggagattccacaccttctcccgacctcctcatggccagatcatttggagataaggaccttattctccctaatggagggacaccagcgggtacatccagcccagcatcctcttcttccctcctgaacagactgcaactcgacgatgacatcgatggggagacaagggacctcttcgtgatcgtggacgacccaaaaaaacacgtctgcaccatggagacgtatattacataccgaatcaccacaaagagcaccagggttgagtttgatttgcccgagtatagcgtccggaggagatatcaggattttgactggttgaggtctaaacttgaagagtcacagccaacacacctcatcccacctcttcctgaaaaattcgtggtgaaaggcgtggtagaccggtttagcgaagagtttgtcgaaacacgacgcaaagctctcgacaaattcctgaaacgaatcacggaccaccccgtcctgtccttcaacgaacactttaacatcttcttaaccgcaaaagacctcaacgcgtacaagaagcagggtatcgcactgttgacccgaatgggcgaaagcgttaaacatgtgacaggcggctacaaactgcggaccagaccactggagtttgccgcgatcggcgattatctggatactttcgcgctcaaacttggtactattgacaggatcgctcagcgaatcataaaggaggaaattgagtacctggttgagttgagggagtacggacctgtctatagcacatggagtgctttggagggtgaactggctgaaccccttgagggggtctccgcctgcatcgggaactgttcgactgcccttgaagagctgaccgacgatatgaccgaggactttctgcccgttctgagagagtacatcctctattcggactcaatgaaaagtgtgctcaaaaaaagagatcaggttcaagcagagtacgaggctaagctggaggccgttgctctcagaaaggaggaccgtccaaaagtgcctgcggacgtggaaaaatgtcaagaccggatggagtgtttcaatgcggaccttaaggccgacatggaaaggtggcagaacaataagcggcaggacttccggcagctgctgatgggcatggcagacaaaaatatccagtattacgagaagtgcctcatggcttgggaatctattattcccttattacaagagaaacaagaagccaagtag

SEQ ID NO: 15449 - DNA, 1263 bp, synthetic construct
  source 1..1263: mol_type = other DNA; note = Synthetic coding sequence
atgtcttcacctcgtgattttcgagctgagcccgtcaatgattacgagggcaacgactccgaagccgaggatcttaattttcgggagacccttccgagtagctctcaggagaacacgcctaggagtaaagtctttgaaaataaggtcaattctgagaaggtcaagctaagcctaagaaatttcccccacaacgattacgaggacgtgtttgaggaaccatctgagagcggaagcgatcctagtatgtggactgcacgaggaccattcagaagagacaggtggtcaagcgaggatgaagaagccgcgggtcccagtcaggctttgtcgcctctgcttagcgacacccggaagatagtctccgagggagagttagaccagctagcacagatccgaccccttatcttcaacttccacgaacagaccgctattaaagattgcctgaagatcctcgaggagaagaccgctgcatatgatattatgcaggaatttatggctctcgagttgaagaatttacccggtgagtttaacagcggcaatcagcccagtaaccgcgaaaagaaccggtaccgggatatcctgccatacgatagcacaagagtaccattgggcaaaagcaaggattacatcaacgctagctatataaggatcgtgaattgcggcgaggagtatttttacatcgcaacacaggggccacttctctcaacgatcgacgatttctggcagatggttctcgaaaataattctaacgttatcgcaatgatcactcgcgagatcgagggtggcatcatcaagtgctaccactactggccaatttcgttgaaaaaaccattagaacttaagcactttcgcgtgtttctcgagaactatcaaatcctgcagtacttcatcatccgaatgtttcaggtggtagaaaagagcaccggcacatcacactctgtgaagcaacttcagttcacaaagtggccagatcacggtacacccgcttccgccgattcttttattaaatatattcgttacgcaaggaagtcgcacttgaccggcccaatggtagtgcattgttctgctggcattggcaggaccggcgtttttctctgtgttgatgttgttttctgtgcaattgtaaagaactgctcattcaatatcatggatattgtggctcagatgagggagcaacggtccggcatggtgcagactaaggagcagtatcacttctgctatgacattgtgctggaagtccttcggaaactcctgactttggattag

SEQ ID NO: 15450 - DNA, 837 bp, synthetic construct
  source 1..837: mol_type = other DNA; note = Synthetic coding sequence
atgtcgagcccccgagatttccgggctgagccagtgaatgactatgagggaaacgacagcgaggcagaggacttgaatttcagagagacgctgccctctagttcccaggaaaacacaccgcgcagtaaagtctttgagaataaggttaatagtgagaaagtcaagctgagcctcaggaatttcccccacaatgactatgaagacgtgtttgaagagccatccgaatctggtagtgatccatcaatgtggactgcaagaggcccctttcggcgcgaccgatggagttctgaagacgaagaggctgcaggaccaagccaagcgcttagtccattgttgtcagatacacgcaaaattgtgtccgaaggcgaactcgaccagctcgctcagattcggcccttaattttcaactttcacgaacagacagccatcaaggactgcctcaaaattctggaggaaaagaccgccgcttatgacattatgcaggaatttatgacaggaacttctcacagcgtgaagcaactgcagttcacaaaatggccagaccacggcacccccgcatcagcagactccttcatcaaatatatcagatatgctcgtaagtcccaccttactggtcccatggtggtccattgttccgcgggaataggccggactggcgtgttcctgtgtgtcgatgtggtgttttgcgccatcgtgaaaaattgttccttcaacattatggatattgtggcccagatgcgcgagcagaggagcggcatggtccagaccaaggagcagtaccacttctgctacgacattgtgctggaggtgctgcgtaagttgctgaccctagattag

SEQ ID NO: 15451 - DNA, 681 bp, synthetic construct
  source 1..681: mol_type = other DNA; note = Synthetic coding sequence
atgtctagcccccgagacttcagagccgagcccgtgaacgattatgagggcaacgattccgaagctgaagacctgaacttcagggagaccctgccaagttcaagccaggagaacacaccacgaagcaaggtgttcgagaataaggtcaacagcgagaaagttaaattaagtctccgtaattttcctcacaatgactatgaagacgtgtttgaagaaccctccgagtccggcagtgaccccagcatgtggaccgcaagaggcccctttaggagggacaggtggagtagtgaagacgaagaggccgccggcccctcacaagctctgtcaccactgcttagcgacaccaggaagatcgtcagtgaaggggaactggaccaactagcccaaattcgacctctcatcttcaattttcacgagcagaccgcaattaaagactgtcttaagatccttgaagagaaaactgccgcatacgacatcatgcaggaattcatggctctcgaacttaagaatctgcccggggaatttaacagcggcaaccagcctagcaatagggaaaaaaatcggtacagggacatcttacccttccagcatcatggttattctgggccaaatgaaagaactaccttctggcacggcagtaatgagggcgcggtgtcattgttgctcaggtattgcgcatag

SEQ ID NO: 15452 - DNA, 681 bp, synthetic construct
  source 1..681: mol_type = other DNA; note = Synthetic coding sequence
atgcatcagacctgcgtacgccttgaacgcgaagcatccgcgcgtccttccccagggcccgtgctccctccccgtccattaccatcacatacagagttgcagatacgcgaaggcccgaaaaggactattcgcgccgccgcagaaggtgctccttgcgtcgggcgcgttcgatgtgctccagggaaccgcgggggacgtgagggtgcaagtggtgtgcgcggaggggttgcccaggtgccccccaggctcccagcgcctccaataggccctgagcgagatgatctggcaggaggagcagggcgcaagccgctgccatccacagcggcggcttccagtcctggaagtgccgccgcagctaccgcagctttatgtcctcctgcccgactatctacaccaagcatgtctggattaagagtctacagtacatccgttaccggaagccgtgagatcaagagtcagcagtccgaggtgacccgtatacttgatgggaagcggatccaataccagctagtagatatctctcaggacaacgccctccgggacgaaatgcgggcccttgcaggtaatcccaaggcgacaccccctcagattgtgaatggcgatcaatactgcggagattatgagctatttgtcgaggcagtggagcaaaatacactgcaggagtttctgaagctggcttag

SEQ ID NO: 15453 - DNA, 1518 bp, synthetic construct
  source 1..1518: mol_type = other DNA; note = Synthetic coding sequence
atggaccctggcaatgagaattctgctactgaggctgctgcaatcattgatctcgatcctgacttcgaaccccagagcagaccgcgctcctgtacatggcctctcccgcgtccagaaatagcaaatcagccaagcgagcccccggaagtggagcctgatctgggagagaaggtccacaccgaagggcgtagcgagcctatactgttaccctccagactgcctgagcccgctggggggccacaacccggaatcttaggggcagttacaggcccccgaaagggaggttcgcggcggaatgcttggggaaatcagtcttacgcggaactgatcagccaagcaattgagtccgcgccagaaaagaggctaacattggcgcagatctatgagtggatggtcagaacagtaccatactttaaggataagggggactctaattctagcgccgggtggaagaatagcataaggcacaatctttcactgcactccaagtttatcaaagtccataacgaggcaaccggaaaaagctcctggtggatgctgaaccccgaaggagggaagagcggtaaggcgccaaggagacgggccgcctccatggattccagctccaagcttctccggggcaggtccaaggcaccaaagaaaaaacccagcgtattgcctgcccctccagagggagcaaccccaaccagtcccgtcggccacttcgcgaaatggagcggatcaccttgctcacggaaccgagaggaagcggatatgtggaccacgtttcgcccgcgatcttcctctaatgcctcatctgtgtccactagactttctcccctgcgaccagaatctgaggtgctggcggaggaaattccagcatccgtctccagttatgctggaggcgtgccacctaccctcaacgaagggctcgagctgctggatggactcaatttgacaagcagccactcgctgttgtctaggtcaggcttgtcaggcttctctctgcagcaccccggagttacggggcccctgcatacttattcaagctctctctttagtcccgcggaaggtcctctgtccgccggagagggatgcttctctagcagtcaggccttggaggcactgctcacttctgacacccctcctccgcctgcagacgtgctcatgacccaggtagacccaatcctgtcacaggcgcctactctgctattgctgggtggcctccccagttcttccaaactcgctactggagtcggcctgtgtccaaagcctcttgaggcccctggccccagtagtcttgtacccactctgagcatgatcgctcctcctccagtgatggcatcagctcctattccgaaggcgctcggcacaccagtgcttacacccccaaccgaggctgcatcgcaggaccgaatgccacaggatcttgacctcgatatgtacatggagaacctggaatgtgacatggacaacatcatttccgatttgatggacgagggtgaaggactggatttcaactttgagcccgacccctag

SEQ ID NO: 15454 - DNA, 1062 bp, synthetic construct
  source 1..1062: mol_type = other DNA; note = Synthetic coding sequence
atggactacaaaagttccctgatccaggacgggaatcctatggagaatctcgagaagcagctgatttgtcctatctgtctagagatgtttacaaagcctgtcgtgattctgccttgtcagcacaacttgtgtaggaaatgcgctaacgatatcttccaagcagcaaacccatattggacaagcaggggctccagcgtgtccatgtcgggcggaagatttcgctgcccaacatgtaggcacgaagtgattatggaccgccacggagtgtacggtttacagcggaatctcctcgtggagaacataatcgacatttataagcaggagtgctcctcaagacctctgcagaagggctctcacccgatgtgcaaagagcacgaggacgagaaaattaatatctactgcctgacctgtgaggtgcccacatgttccatgtgcaaggtttttggcattcataaggcttgcgaggtggcccctctccagagtgtgtttcaaggccagaagacggagctgaataattgcatctccatgcttgtagctgggaatgacagggtgcaaacaataatcactcagcttgaagacagtaggcgtgtcacgaaagaaaattcacaccaggtgaaggaggaactgtctcaaaagtttgatacactctatgccattcttgacgagaaaaagtcagagctgctccaacgcattacccaggagcaggagaagaaactgagcttcattgaagccctgattcagcaatatcaagaacagctggataagagtaccaagctcgtcgagacagccattcagtcacttgacgagccaggaggcgccaccttcttgctgacagccaaacagctgatcaagagcatagttgaggcttccaagggatgtcagttaggcaaaaccgagcagggatttgaaaatatggatttctttactttagacctagagcacatcgcagatgccctgcgggccatcgattttggcactgacgaggaggaagaggagttcatcgaggaggaagatcaggaggaggaagaaagcacggaggggaaggaggaggggcaccaatag

SEQ ID NO: 15455 - DNA, 1179 bp, synthetic construct
  source 1..1179: mol_type = other DNA; note = Synthetic coding sequence
atgggggtgaaccaatccgttggattccccccagtgactggcccccatcttgttggatgcggagacgtcatggaaggccagaacttgcaggggtctttttttcgactgttttacccatgtcagaaagcggaggaaaccatggagcagcccttatggatccctcgctacgaatattgcaccggactggcggagtatctgcagtttaacaaaagatgcggcggattgctgttcaacctcgctgtggggagctgtcgcctcccagtgtcatggaatggtccctttaaaacaaaggatagcggatacccactgataatattttcacacggtctgggtgcctttcgtactctatattccgccttctgcatggagttggcgagcaggggcttcgtggtggcagtgcccgagcatcgcgaccgctccgccgctacaacctacttctgtaaacaggctcccgaggagaaccagcctactaatgagtcgctgcaggaggagtggataccatttcggagagtggaggagggcgaaaaagaattccatgttaggaacccccaggtgcatcagcgggtgagtgaatgcctacgagtgctcaagatattacaggaagtgacagcggggcagaccgtgttcaatatcctccccggaggcctggatcttatgacactaaaggggaatatcgacatgtcccgtgtggcagtaatggggcatagcttcggaggagctaccgccattctagctttagcaaaggagacccaatttcggtgcgcagtcgccctggatgcatggatgttccccttggagcgagacttttacccaaaggcacgcggccccgtttttttcattaacactgaaaaattccaaaccatggagagtgtgaacctgatgaagaagatctgtgcccagcacgaacagtctaggatcattacggtactggggtcagttcatcgctctcagactgacttcgccttcgttaccggaaatttgataggtaaattcttttccacagagaccagggggtctctggatccgtacgaggggcaagaggtgatggtcagagccatgctagccttcctccaaaaacacctagacttaaaggaggactacaaccagtggaataatctaatcgaaggcatcggacctagcctcactccgggtgcgccgcaccatctttctagcttgtag

SEQ ID NO: 15456 - DNA, 1179 bp, synthetic construct
  source 1..1179: mol_type = other DNA; note = Synthetic coding sequence
atgggggtcaaccaatctgttgggtttccaccagtcacaggacctcatcttgtgggctgcggggatgtgatggaagggcaaaacctgcagggtagcttttttcggctcttttacccatgccagaaggcagaagagacgatggaacagcccctctggatccccaggtatgaatactgcacaggcctagccgagtatctgcagtttaacaagaggtgcggcgggctgctgttcaatctggcggtgggatcctgtagactgccagtttcttggaatggaccctttaagactaaggattcaggctacccgcttattattttttctcacgggcttggcgcctttcgtacgctgtattccgctttttgtatggagctagcttcccgcggatttgtcgtggctgttcccgagcatagggataggtctgccgctaccacatacttctgtaagcaggccccagaggaaaatcagccaaccaatgagagtctgcaggaggagtggattcctttccgaagagtcgaagagggcgagaaggagttccatgtgagaaacccccaagttcatcagcgcgtcagcgaatgtttaagggtgctgaagatattacaggaagtaactgccggccagactgtgtttaacatcctcccagggggactggacctcatgactctcaagggaaatattgacatgtctcgagtggccgtgatgggtcacagcttcgggggcgcgacagcgatacttgcattggccaaggagacccaatttcgctgcgccgtggcacttgatgcgtggatgttccccctcgaacgtgacttctatccaaaggcccggggtccggtattctttataaacacggaaaagttccagaccatggagtccgtcaacctcatgaaaaaaatctgcgcgcaacatgaacagagcaggataatcacagtgctcggatccgtgcacaggagccagacagactttgctttcgtcactggtaacctcatcggcaagtttttctccactgaaactcgaggaagcttggacccatatgaaggccaggaagtgatggtacgtgccatgctggcatttctgcaaaagcatttggacctgaaagaagactataatcagtggaataacctgattgaaggtattggaccaagcctgacacccggggcaccacatcacctcagttccctctag

SEQ ID NO: 15457 - DNA, 213 bp, synthetic construct
  source 1..213: mol_type = other DNA; note = Synthetic coding sequence
atggtgaggaccaaaacttggactctcaaaaaacactttgtggggtaccccactaattctgattttgagttaaagacagccgagttaccacccttgaagaacggtgaagtgcttttagaagcgctgttcttaactgtagatccctacatgcgtgtcgctgccaaaagattgaaggaaggggatacaatgatgggccaacaggtggcgaaatag

SEQ ID NO: 15458 - DNA, 213 bp, synthetic construct
  source 1..213: mol_type = other DNA; note = Synthetic coding sequence
atggtccgtaccaagacctggaccctcaaaaaacactttgtgggttaccccactaactccgacttcgaactgaagaccgccgagctgccgccactcaagaatggtgaggtactcctggaagcgctttttctcactgtcgacccatatatgcgagtcgcggctaagcgactgaaggaaggcgacaccatgatgggacaacaagtggccaagtag

SEQ ID NO: 15459 - DNA, 534 bp, synthetic construct
  source 1..534: mol_type = other DNA; note = Synthetic coding sequence
atgcccggccttacagcctactttggcctcctggagatctgcggcgtgaagggcggagaaactgtgatggtaaacgcagctgcgggcgcagtgggaagcgttgtgggccagattgcaaagctgaagggctgtaaggtggttggagcagtcgggagcgacgagaaagttgcttacctgcaaaaactcggcttcgacgtagtgtttaactataagacagtggagtcccttgaggaaacacttaagaaggcatccccggacggctatgactgctactttgataatgtcggtggcgagttctctaacacagtcattggacaaatgaagaagtttggcagaatcgctatatgtggtgccatctcgacctacaatcggacaggcccactgccgccagggcccccccctgagatcgtcatctaccaagagctccgtatggaagcctttgtggtctatcgctggcagggagacgcacgccaaaaggcactgaaggacctattgaagtgggtgctcgagctgccatacttcgtgattgactag

SEQ ID NO: 15460 - DNA, 1263 bp, synthetic construct
  source 1..1263: mol_type = other DNA; note = Synthetic coding sequence
atgtcctcacctagagacttccgggctgagccagtgaacgattacgaaggcaacgactccgaggcagaagatctgaactttcgggaaaccctgccgtcttccagtcaggaaaacacaccccgaagcaaggtgttcgagaacaaagttaatagcgagaaggtcaagcttagcctcagaaatttcccccataacgattatgaggatgtgtttgaggaaccaagcgagtctggctccgacccgtcaatgtggacggcccggggccccttcaggcgcgacagatggtcgagcgaggatgaggaagccgcgggcccctcccaggcgctaagtccacttctgtctgacactcgtaagattgtttccgagggagagttagaccaattagcccagattagaccgcttatctttaatttccacgagcaaacagccattaaggattgccttaaaattctggaggaaaaaaccgctgcttatgacattatgcaggagttcatggccctggagctcaaaaatctgcctggcgaattcaatagcggaaaccaacctagcaaccgcgagaagaatcgctatcgcgacatcctaccatatgattcgactcgcgtccccctggggaaatctaaggactacattaatgcgagttatattcgaatcgtgaactgtggcgaggagtacttttatatagccacacagggccctcttctctccacaatagacgacttttggcagatggtcctggagaataacagcaacgtgatcgcaatgattacccgtgagatcgagggcggaatcatcaaatgctatcattactggcctatcagtctgaaaaaacctctggaactaaaacacttccgcgtcttcctcgagaattaccagattctgcaatactttatcattcgcatgttccaagtcgtggagaaaagcacaggaacctcccattcagtaaagcagctgcagttcaccaaatggccggaccacgggacccctgcgagtgccgactcatttataaaatacatccggtacgccaggaagtcccatctgactggacctatggttgtccactgcagcgccggaataggtcggacaggcgtgttcctgtgcgtagatgtagtgttctgtgcgatcgtcaagaactgcagttttaatataatggacatagttgcccaaatgagagagcagagatccggcatggtgcagaccaaggagcagtatcacttctgttacgatattgtgttggaggtactgcgcaagctgctgaccctggattag

SEQ ID NO: 15461 - DNA, 837 bp, synthetic construct
  source 1..837: mol_type = other DNA; note = Synthetic coding sequence
atgtcatccccgagagatttcagggccgaaccagtcaatgattatgaagggaatgacagcgaagcagaagacttgaatttccgggagacactaccatcttcctcacaggagaatacacctcggtctaaggtctttgagaacaaagtgaactcagagaaggttaagctgtcccttaggaactttccccacaacgattatgaagatgttttcgaagaaccgagcgagagcggtagcgatccatctatgtggactgccagagggccctttagaagagataggtggtcctccgaagatgaggaagcagccggtcccagccaggccttatcaccattgcttagtgacaccaggaagatcgtgtcggaaggcgaattggaccagctggctcagattaggcctttgatcttcaatttccatgagcagacagccattaaggattgtctgaagattctggaggagaagacagcggcatatgatatcatgcaggaattcatgacaggcaccagtcatagcgtgaagcaactacagtttaccaaatggcccgaccacggcacaccagcatccgcagacagttttatcaaatatatccgatatgcaaggaaaagccacctgacagggcccatggtggtgcattgtagcgctggcattgggcggaccggcgtattcctgtgtgtggacgtggtgttttgcgccatcgtgaaaaattgtagcttcaatattatggatatagtggcgcagatgcgcgaacagcgcagcggaatggtgcagactaaggagcagtatcacttctgctacgacatagtgcttgaggtattgagaaaactgttgaccttggattag

SEQ ID NO: 15462 - DNA, 681 bp, synthetic construct
  source 1..681: mol_type = other DNA; note = Synthetic coding sequence
atgagtagtcctcgcgatttcagagccgagccagtgaatgactatgaagggaatgactctgaggccgaagacctgaacttcagggagactctacccagtagttctcaggagaacactccccgttctaaggtcttcgaaaataaagtcaacagcgagaaagtaaaactctccctgcggaatttcccccataacgattatgaggacgttttcgaggaaccctccgagtcaggatctgatccatctatgtggacggcgcggggtccgtttcgaagggaccggtggtcttctgaggatgaagaggcagcaggccctagtcaagcactctcccctctactgtctgatactcggaagattgtgagcgaaggggagcttgatcagcttgcccaaatacggcctctcatctttaactttcacgagcagactgccattaaggattgtctcaaaatcttagaggagaaaacagcagcatatgacataatgcaagaatttatggcacttgagctgaaaaatctaccaggagagttcaactcaggaaaccagccaagtaatcgtgaaaaaaataggtatcgggacatacttccattccaacaccatgggtatagcggccccaatgaacgcacaactttttggcatggaagcaatgaaggtgctgtctccttgctcctgcgttattgtgcctag

SEQ ID NO: 15463 - DNA, 789 bp, synthetic construct
  source 1..789: mol_type = other DNA; note = Synthetic coding sequence
atgtcgcgttacctcaggcctccaaatacatctctgtttgtgcgcaacgtcgcagatgatactaggtcggaagacctcaggagggaatttggtcggtacggacctatagtggatgtctacgtaccattagacttttatacacgtcggccacggggtttcgcgtatgttcagttcgaagatgtgcgcgacgcagaagacgcgctacacaacctggatcgaaagtggatatgcggacggcagatagaaatccaatttgctcagggggatcgcaagacacctaaccagatgaaggctaaggaaggccgcaatgtctacagcagctctcggtacgacgattacgatcgctaccgccgttcccggagtaggtcctacgagaggcgacgatctagaagcagaagcttcgattataattaccgcagatcttatagtccccgtaattctcggcctaccggccgcccacgtaggtcaagatcgcactctgacaacgacaggtttaaacacaggaacaggagtttctctcgaagcaagtcaaattcccgctctaggtcaaagagccagcctaaaaaagaaatgaaggccaagagtaggtcacgcagcgccagccacaccaagactcggggaacaagcaaaacagactcaaaaacacactacaaaagtgggagtcgttatgagaaagagtcccggaaaaaagagcctccacgcagcaaatcccagtccaggagccagtcgagaagtcggtcaaagagccgctcgcgcagctggaccagtcctaagtccagcggacactag

SEQ ID NO: 15464 - DNA, 522 bp, synthetic construct
  source 1..522: mol_type = other DNA; note = Synthetic coding sequence
atgtcaagataccttcgacctcctaacacctccctctttgtgagaaatgtggccgacgacacccgctccgaagacctccgccgcgagttcggccgttacggcccaatcgtcgatgtctatgtgcctctagacttttacactaggcgcccccgagggttcgcatatgtccagttcgaggatgtgcgggacgcggaggatgccctgcacaatctggaccgcaaatggatttgcggaaggcagattgaaatccagtttgcccagggcgacagaaagacgccaaatcagatgaaagccaaggaaggtaggaacgtctatagtagctcgagatacgacgattacgatagatacaggcgttcacggtcaagatcttacgagcggagaagaagtcggtctcggtctttcgactataattacaggcgctcctacagtcctagaaacagtaggccaactggccggccgaggagaagcagaagtcactcggataatgacagccaggtctcgaaaaagaagaacgagaggtag

SEQ ID NO: 15465 - DNA, 669 bp, synthetic construct
  source 1..669: mol_type = other DNA; note = Synthetic coding sequence
atgtccgcctttggacacgacgaagcttggatggaggctggagggtttggcttggaagcagccgagcgtactgaatatcagtctctgtgtaaaagcaagcttctcttcctgggagaacagtcagtgggcaaaacaagcatcatttcccgttttatgtacaacagttttggttgtgcctgtcaggccactgtgggcattgatttcctctctaaaactatgtaccttgaagaccagatagtgcagcttcagctgtgggacacggctgggcaggaaaggtttcattcactcatcccttcatatattagagattcaacgatagccgtagtggtctacgatatcactaatatcaacagctttaaagagactgataaatgggtggaacacgtcagggccgagaggggcgacgatgtggtgattatgttattaggaaataaaattgatttggacaacaagaggcaagtcaccgcggagcaaggcgaggagaaatcacggaacttaaacgtcatgttcattgaaacctcggcaaaaacaggatacaacgtcaagaagctctttcgaagggttgcctctgcacttctttcaacccgcacttctcctcctcccaaggaaggaaccgtggagatcgagttggagagtttcgaggaaagtggcaacaggtcgtactgttag

SEQ ID NO: 15466 - DNA, 348 bp, synthetic construct
  source 1..348: mol_type = other DNA; note = Synthetic coding sequence
atggtgcagatcattaaggatacaaacgagttcaaaacatttctgaccgctgccggacataagcttgctgtagtgcagttcagttctaagaggtgcggcccatgcaagcgcatgttccccgtctttcacgccatgagtgtgaaataccagaacgtcttcttcgctaacgttgatgtgaataattctcccgaactggcggagacatgccatatcaaaaccatcccaacattccagatgttcaagaaatctcagaaagtcacccttttcagtcgaattaaacggatcatttgctgctataggtcaggatttatgtcgaacctgtgtctggcagacgacggcaacgaatag

SEQ ID NO: 15467 - DNA, 384 bp, synthetic construct
  source 1..384: mol_type = other DNA; note = Synthetic coding sequence
atggtgcaaattataaaagatacaaacgagttcaagacctttctgacagccgcagggcataaactcgcagtcgttcaattctcctctaaacggtgcggcccatgcaagcgcatgttccctgttttccacgctatgagcgtgaagtatcagaacgttttttttgccaacgtagatgtgaataacagtcccgagctggctgaaacatgtcacatcaagacaatacctacattccagatgttcaagaaaagtcagaaggtgactttgttttctaggataaagagaattatatgttgttaccgctcaggattcatgagcaatcttatatttgaattctgtggagccgacgcaaaaaagttagaagctaaaactcaggagctgatgtag

SEQ ID NO: 15468 - DNA, 1767 bp, synthetic construct
  source 1..1767: mol_type = other DNA; note = Synthetic coding sequence
atgcacaggtcagccccttcgcagaccactaaaaggagccgaagtcccttcagtactacccgtagatcatgggatgatagtgaatcgtcaggcactaacctcaatatagataacgaagattactcccgatatcctcctcgggaatacagggccagcgggtctagaaggggcatggcttacggccacattgacagctatggcgccgacgacagcgaggaggagggggccggacccgtggaacgtccacctgtgaggggaaagaccggcaagtttaaggatgataagctgtacgacccagagaaaggggcccgcagtctggccggacctcctccccacttctcctcattcagccgcgacgtgagggaggaaagagacaaacttgatcccgtgccagcggccaggtgttctgctagcagagccgactttctgccccagtcttcggtggcctctcaatcatcatccgagggcaagctggccacaaagggggactcgtccgagcgcgagaggcgcgaacagaatcttcctgctcgcccctcaagagctcctgtctctatttgtggaggcggtgagaacacaagcaagtctgctgaggagcctgtggtgaggccaaaaatccggaatctcgcctctccaaactgtgtgaaacccaaaattttctttgacacagatgacgatgacgacatgccacattccaccagcaggtggagggacacggccaatgataatgaaggccattccgacggccttgctagaaggggccgtggtgaaagcagctctggatatccagagcctaagtatcctgaagataagcgcgaggctaggtctgatcaggtaaagcccgaaaaagtcccccggcggcggagaaccatggccgacccggatttttggacccattctgatgattactacaaatattgtgatgaagattctgattctgataaagagtggatcgccgccctgagacgaaagtataggtcccgggagcagacactatcaagcagcggggagtcctgggaaacccttcctggaaaagaagaacgagagccccctcaggcaaaggtctcagcctctacaggaacctcccccggaccaggagcgagtgcaagcgcaggagctggggctggcgcaagcgctgggtccaatggatcaaattacttggaagaggtgagagaaccctcactgcaagaagaacaggcaagcctggaggagggagaaattccgtggctgcagtaccacgaaaacgatagcagcagcgagggggacaacgacagcggacacgagctgatgcagccgggagtgtttatgctggacggcaataacaacttagaagatgattctagtgtttccgaagatttggaggtggactggtcactatttgatggtttcgctgacggtctcggggtggcagaagcgatatcctatgtggacccacaattcctgacctatatggccctggaggagcgccttgcccaggcgatggaaaccgccctggcgcaccttgaatcactagctgtcgacgtggaggttgccaatccgccagctagtaaggagtctatcgacgcactgccggaaatcttggtgaccgaagatcatggagcggtcggccaggagatgtgctgccctatatgctgttcagaatatgtgaaaggagaggtcgcaacggagcttccttgtcaccactattttcacaaaccttgtgtaagcatctggctgcagaagagtggcacatgcccggtgtgccgttgcatgttcccgccacctttatag

SEQ ID NO: 15469 - DNA, 612 bp, synthetic construct
  source 1..612: mol_type = other DNA; note = Synthetic coding sequence
atgcccgagcagttctcagtcgccgagtttctggctgtgacagcagaagatctgtctagccctgctggagcagctgcctttgcagctaagatgccaagataccgaggtgcggcgctagcacgggaagaaatcttggaaggcgatcaggctatcctgcagcgcataaaaaaggctgtgagagccatccactcttccggactcggacacgtggagaatgaagaacagtacagagaggcggtggagtcacttggcaactcgcatctgtcacagaatagccacgagctgtcgaccggattcctcaacctggctgttttcacccgggaagtggcggcactgtttaagaatctcattcaaaacttgaataacatcgttagcttcccactcgactccttaatgaaaggacagttaagggacggccgacaggatagcaaaaagcaattggagaaagcttggaaagactacgaggccaaaatggcaaagctggagaaggagcgggacagagcgcgggttaccggcgggatccctgcgtggaaccttgggatccccgctaagcctcacccgacacttaagagggcgtccgaaagcccacaggctccacctgaccccgcctag

SEQ ID NO: 15470 - DNA, 1932 bp, synthetic construct
  source 1..1932: mol_type = other DNA; note = Synthetic coding sequence
atgggacaggaaagtagcaaacccgtgtggcccaatcctacgggcggctaccagtcgaatacaggtagacggtacgggcggcgccatgcctacgtgtcctttcgtccgcccaccagccaacgtgagcggattgcaagccaacgaaaaacaaacagtgaggttccaatgcaccggtccgccccaagtcaaactaccaaaaggagcagaagtccgttctctaccacccgaagatcctgggacgactccgaaagctcaggcaccaatctgaacatcgacaatgaggactattctaggtaccctcccagagaatacagggcctcaggttcgcggagagggatggcttacggacatattgacagctacggagccgacgactctgaggaggagggagccggtccggtagagaggcctccggtgagaggaaaaacaggaaagtttaaagacgataagctttacgatccagaaaagggagctagatcactggccgggcctcccccacacttttcctcattctcccgggacgtgagggaagagagggataaactggaccccgtcccagcagcaaggtgctccgcttcacgggcagatttcctgccccaatcttcagttgcctcgcaatcatcctcggagggcaaactggctactaaaggggactccagcgaacgggaacggcgggagcagaatctccctgcacggccctcccgggctcccgtgagcatctgcggtggtggagaaaacaccagtaaatctgccgaggaacctgtggtacggccaaagattaggaacctggcctccccgaactgcgtgaaacctaaaattttcttcgacactgatgacgatgatgacatgccccatagcacctccaggtggcgcgataccgcgaatgataatgaggggcactccgatgggcttgcaagaagaggaagaggggagtcctcctctggctaccccgagcccaagtatccagaggataagcgcgaagcgagaagcgaccaggtgaagccggagaaggttccacggagaagacgaaccatggcggaccctgatttctggactcattccgatgactactataagtactgcgacgaagacagtgacagcgacaaggaatggatagccgccttgaggcgcaagtataggagcagagaacagaccctgtccagctccggcgagtcgtgggaaaccttgcctggcaaggaagagcgggagccccctcaagcgaaagtctctgcttctaccggaacttctcctgggccgggggccagcgcctccgctggggccggcgccggagcgtccgcgggatccaatggctccaactatctggaggaggtgcgggaacctagcctgcaggaggaacaggcaagtctggaagagggggaaataccatggttgcagtaccatgagaacgactcttcgtccgagggggacaacgattcaggccacgaattaatgcagccaggggtgtttatgctcgatggaaataacaatctggaggatgattcctccgtgtctgaagacctcgaagtggattggtctctgttcgacggttttgccgacgggctcggcgtcgccgaagctatcagctacgtcgatcctcagttcctgacttatatggcccttgaagagcgtcttgctcaggctatggaaactgcactggcccacctggagtcactcgcagttgatgtagaggtcgcaaatccgccagcgagcaaagaaagtatcgatgcattgcctgaaatcctggttactgaagatcacggcgccgtgggccaggaaatgtgttgtccaatttgctgctccgaatatgttaagggagaagtggccaccgagttgccatgccatcactactttcacaagccctgtgtgtcaatctggctacaaaagagcggaacatgtccagtgtgtcggtgtatgttcccgccccctctctag

SEQ ID NO: 15471 - DNA, 1368 bp, synthetic construct
  source 1..1368: mol_type = other DNA; note = Synthetic coding sequence
atgggccaggaaagtagcaagcccgtgtggccaaaccccactggcgggtatcaatccaataccgggaggcgctatgggcggaggcacgcttatgtttcgttcagaccacccacctctcagcgcgagcgaattgcgagtcagcgcaaaacaaattctgaggtgcccatgcatcgctcagcgccctctcagaccacgaagcgttcacgctcaccattctcaaccactagacgctcctgggacgattccgagtctagtggtactaacctgaatattgataacgaagactacagtagcaccagccgctggcgcgacacagccaacgacaacgaaggtcattccgacgggctcgcaagaagggggcggggagagtctagcagcggctatcccgagcccaagtaccccgaagataagcgggaggcacgcagcgaccaggtcaagcccgagaaagtaccacggcgcaggcgcacgatggcagatcctgatttttggacacactccgacgattattacaaatattgcgatgaagatagcgacagcgataaagagtggatcgcagccctgagacgcaaatatagaagcagagagcaaacgttaagttcctctggagaatcctgggaaacactgcccggcaaggaggaaagagaacccccccaggcaaaagtgtctgccagtacagggacatcacccgggccaggggcatccgcctccgcgggcgcgggcgcaggagccagtgccggatctaatgggtctaattatcttgaggaagtgcgcgagccttctctccaggaggagcaggccagtttggaggagggtgaaatcccatggctgcagtaccacgaaaatgactcatccagtgaaggggacaatgactccggtcacgagctgatgcagccaggggtgttcatgctcgacgggaataataacttagaggacgattccagtgtttctgaggatctcgaggtcgactggtcgctgttcgacgggtttgccgacggcctaggcgttgcagaggccattagctatgtcgatccccaattccttacttacatggcactggaagaaaggctcgctcaagcaatggaaaccgccctggctcatctagagagtctggcagtggatgtggaggtggccaacccacccgcttcgaaagaaagtatcgatgcattacccgagatcctggtaaccgaagaccacggcgcagtgggacaggaaatgtgttgtcccatttgttgctctgagtatgtcaagggagaagtcgctacagaacttccctgccaccactatttccacaagccatgcgtttcaatttggctccagaagtctgggacgtgtccggtgtgcagatgcatgtttccaccccctctgtag

SEQ ID NO: 15472 - DNA, 390 bp, synthetic construct
  source 1..390: mol_type = other DNA; note = Synthetic coding sequence
atggccgagctgattcagaagaagttgcagggtgaggtagagaagtatcagcagctgcagaaggatctcagtaagagcatgtcagggcgtcagaagcttgaagctcagcttacagagaataacatcgttaaagaggagctggctcttctcgacggctctaatgtcgtattcaagttgcttggccccgtgttggtcaagcaggagctgggcgaggcccgagcgaccgttggaaagaggctggactacattaccgcagaaatcaagcggtacgagtcgcagctgagggacctcgagagacagtccgaacagcagagagagacgctagctcagctgcagcaagagttccagagggcccaggccgccaaagccggagctcccggcaaggcctag

SEQ ID NO: 15473 - DNA, 390 bp, synthetic construct
  source 1..390: mol_type = other DNA; note = Synthetic coding sequence
atggcggaattaatccagaagaagttgcaaggtgaagtggagaaatatcagcagttgcagaaagatcttagcaaatcgatgagtgggcgtcagaaattggaagcacaattaaccgaaaacaacatcgtcaaggaggagctagcacttttagacggtagcaacgtagtgttcaagcttttgggcccggtcctggttaagcaagaactgggagaggcaagagccactgtcggaaaacgcctggactatattaccgcagagattaagcgatacgagagccagctgcgagaccttgaacggcaatctgagcagcagagagaaacactggcccagctacaacaggagtttcagcgggcacaagccgcaaaggctggggcgcctggaaaagcctag

SEQ ID NO: 15474 - DNA, 390 bp, synthetic construct
  source 1..390: mol_type = other DNA; note = Synthetic coding sequence
atggctgagttaattcaaaaaaagctgcagggggaggtggaaaagtaccaacagctgcagaaagacctgtcgaagtccatgagcgggcgacaaaagctggaggctcagctgaccgagaataatatcgtcaaggaggagctcgccctcctggatgggtcaaatgtagtgtttaaactcctggggccagttctagttaagcaagagctgggtgaggccagagcaactgtgggcaagcgactggactacataacagcggagatcaagcgctatgaaagccagctgagagacttagaacgccaatctgaacagcagagagaaactctggctcagctgcagcaagaattccagagggcccaggcagccaaggcaggggcacctggtaaagcatag

SEQ ID NO: 15475 - DNA, 1512 bp, synthetic construct
  source 1..1512: mol_type = other DNA; note = Synthetic coding sequence
atgaagtgtgagcactgtactcggaaggaatgcagcaagaagaccaaaaccgatgaccaggaaaatgtcagtgccgatgctcctagccccgctcaggagaacggtgagaaaggagagttccataaactggcagacgccaagatcttcttaagcgactgtttggcttgcgacagttgcatgaccgcggaagagggtgtgcaactcagtcagcagaatgcaaaagacttttttagagtgctcaacttaaacaagaaatgcgacacttcaaagcataaggtgctagtggtatccgtgtgtccacagagcctgccgtattttgcggccaaattcaacctgagtgtgaccgatgcatcccgcagactctgcgggtttttgaagagccttggagtgcactacgtgtttgatacgactattgcagccgatttctctatattggaatcccagaaagaattcgtccgcaggtacagacagcactctgaggaggagcgtactctgcctatgctgacctccgcgtgtccaggctgggtacggtatgcagagagagtgctcggcagaccgatcacagcacacctttgcacagcgaaatctcctcagcaagtgatgggttcacttgtgaaggactacttcgctagacagcagaatctaagtccagagaaaatcttccatgtgatcgtggccccgtgttatgataagaaactggaagccctccaggagtcactgccgcccgcgctgcacggtagcagaggggcagattgcgtgctaacaagcggaaaggtgctcatctcttggtggtgcacgcccgtgatcaccgccacacaagaggctgcagcacgcgaatcattggagcccggtaggcaacggcttcagcgagataagatcgcacccctcgattccagcctgggcggaggtggtgagattgctcaaattatggaacagggcgacctgtctgtgcgcgacgctgcagtcgataccttatttggggatctcaaggaagacaaggtgaccagacacgatggggcttcaagtgacgggcacttagcccacatcttcaggcatgctgccaaggagttgtttaatgaagacgtggaggaagtcacctatcgagccttaaggaataaggatttccaagaggtgactttagaaaaaaatggtgaagtggtgctccgatttgccgccgcctacggctttcggaacatacaaaacatgattttgaagctgaaaaaggggaagtttccattccactttgtcgaggttctggcctgcgcaggcgggtgtctcaacggtcgtggtcaagcacaaacacccgacgggcacgccgataaggcactgctgagacagatggaaggcatttatgcagacatacctgttaggcgccccgaaagctctgcccatgtgcaagagctgtatcaggagtggctggagggcattaattctcccaaagcaagagaagtcttgcacaccacttaccagtcccaggagagagggactcactccttggatatcaagtggtag

SEQ ID NO: 15476 - DNA, 348 bp, synthetic construct
  source 1..348: mol_type = other DNA; note = Synthetic coding sequence
atggcaaccgagccagaggctgcggagcccgtggtcccgtctctggtcgaccgatactttacccgttggtataaaccggacgtgaagggcaaattttgtgaagaccattgcatcttgcagcactccaaccgaatttgcgtgatcaccctcgcagagagccacccagtgctacagtctggaaaaaccatcaaaagcattagttaccagatcagcactaattgctcacgcctgcagaataaggtgtctgggaaattcaaaaggaggattatctacctggaaaaggtggaggacgttatcaaacgtaagatgatgccgttatctctcggccttcatctgcctcacagctag

SEQ ID NO: 15477 - DNA, 1566 bp, synthetic construct
  source 1..1566: mol_type = other DNA; note = Synthetic coding sequence
atgaacgtttcattatctcagaaaacagtgaaaatacaccgtctttttcctatgctggctttctcagagccctatgagtttgtttctctggaatggctgcagaaatggctggacgagtccacccctaccaaaccaatcgataatcatgcttgtctgtgtagccatgacaaactccacccggataaaattagcattatgaaaagaatctcggagtatgcagctgacatattctactctagatatgggggaggccctcgtctgactgttaaggctctctgcaaagagtgtgttgtcgaaagatgccggatcctgagactgaagaaccaactgaacgaagattataagacagtgaataatcttttaaaagcagccgtgaagggcgacgggttctgggtcggtaagtcctcactgcggtcttggcgccagctggcactggagcagctggatgagcaggatggtgacgccgagcagtctaatggcaaaatgaatgggtccactctcaataaggacgagtcgaaggaagagcgcaaagaagaagaggagcttaacttcaacgaagacatcctttgcccgcatggcgaactatgcatttcagagaacgaacggagactcgtttcgaaagaggcatggagtaagttacagcagtacttcccgaaggcgcccgaattccctagttacaaggagtgttgtagccagtgtaagatcctggagcgcgaaggcgaagaaaacgaagctcttcataaaatgattgcaaatgagcagaagacttcacttcccaatctgttccaagacaagaatcggccttgtctgtcaaactggccggaggacactgacgtgttatatatcgtttcacagttcttcgtagaggaatggagaaagtttgttcgaaaacccaccagatgcagccccgtaagcagtgtgggaaatagtgccctgctttgcccccacgggggcctcatgtttacctttgcctctatgacaaaggaagattcaaaactgattgcacttatttggccttctgaatggcagatgatccagaaattgttcgtggtcgaccacgtcatcaagattaccaggattgaagtgggggacgtgaatccaagcgaaacacagtacatttccgaaccgaaactgtgtcccgagtgccgagaggggttgttgtgtcaacaacagcgggacctgagggagtacacgcaggccaccatctacgtccataaggtagttgacaataaaaaagtcatgaaagactctgctcccgaattgaatgtgtctagctccgagactgaggaggataaggaagaagcaaagcctgatggggaaaaggatcccgattttaaccaaattatgcacgcctttagtgtggctccttttgatcaaaacctctcgatcgacggaaagatattgtctgatgactgcgccacgctgggaaccttgggcgtgattcccgagagcgttattctgcttaaggctgatgaacccatcgcagattacgctgccatggatgatgtgatgcaggtatgcatgccagaagagggcttcaagggcaccggattgctgggccactag

SEQ ID NO: 15478 - DNA, 984 bp, synthetic construct
  source 1..984: mol_type = other DNA; note = Synthetic coding sequence
atgactgctgtgggcgcggagagactgacgtcggtccgggcatggctgtcctgctgtggcgcctgcgtatgtgtattcctgttcttgtgtctgtgtgttttcccactgagggtgcacgtccatgtatggggaggcgaatgcagggtggatattgcagtctttgtgtccaagcacatgatcgtggcactgatgcacgtgaccggcgctgcgggcctgctaagactttgtgtcagggcatgcgtatgcatgcgggtgtgtgcgacagcccatatgtaccgcgtggacaagtcgtttacatcacgccgtagtgtgtggcggtcagatggccagaaccagcactttccccaggctctggatctatccagagtgaacctggtgccgagctacactccctcactgtatcctaagaacaccgatctgttcgaaatgatagagaagatgcagggctctaggatggatgagcagagatgttcctttccccccccactgaaaaccgaggaggactacataccttaccccagcgtgcacgaagtgctcgggcgggaaggtcccttccctctcatcctgctccctcagtttggaggctactggattgagggtaccaaccatgaaataactagcatacctgagaccgagcccctgcagtcgcctacaaccaaagttaagctggagtgtaatcccactgcaaggatttatcggaagcacttcctgggaaaggagcatttcaattattattcactggacgccgcgctcggccatctggtgttttcacttaaatacgacgtgattggagatcaagagcacctgagattgctcttgaggacaaaatgtaggacttaccatgacgtgatccctatatcctgtctaacagagttcccgaatgttgtccaaatggccaagctggtgtgtgaagatgtgaatgtagatagattctatccagtgctgtatcctaaagtgtggctagacttgggtaccgcacactag

SEQ ID NO: 15479 - DNA, 2079 bp, synthetic construct
  source 1..2079: mol_type = other DNA; note = Synthetic coding sequence
atgattgaaaagatgcagggttcccggatggacgagcagcgatgcagcttcccacctcctttgaagactgaggaggactatataccttatcccagcgtgcatgaagtgcttgggagggaagggccatttcctctcatactcctgccccaatttggagggtactggatcgagggaaccaaccacgagatcacatccattcctgaaactgagcccctacagtccccaacaacgaaagtcaaactggaatgcaatcccaccgctagaatctatcgcaagcacttcctgggcaaggaacattttaactattattctctcgacgccgcactgggccatctcgtgtttagtctgaaatacgacgtgataggcgaccaagaacacctgcgattactgttgcgaactaagtgtagaacgtaccacgacgtgatcccgatctcttgcctgactgaattccccaacgttgttcagatggcaaaactagtgtgcgaagacgtgaatgtcgaccggttttacccagtgctctatccaaaggccagtaggctgatcgttacatttgatgagcacgtgatttcaaacaacttcaagtttggcgttatctaccagaaacttggtcaaactagcgaggaagaactgttcagtactaatgaggagagtcctgcttttgtggagtttctcgagtttctgggccagaaggtcaaactccaggattttaaggggttccggggcggcctggacgtgactcacggccagacaggcacagaaagtgtttattgtaacttccgaaataaagagataatgtttcatgtaagtacgaagctcccgtatactgagggggacgcccaacagctccagcgcaaaagacatattgggaacgatattgtggctgtggtattccaagatgagaatacccctttcgtccccgacatgatcgcgtctaatttccttcatgcttacgtggtggtacaagcagagggtggaggaccagatggtcccctgtacaaagtgagtgtaactgccagggatgacgtgcccttcttcgggccccctttgcccgatcctgctgtcttcaggaaaggtcctgagttccaggagtttctgctcacaaaattaatcaacgccgagtacgcctgttacaaggccgagaaattcgctaaactcgaggaaagaactcgagctgctcttctggaaactctgtatgaggagctccatatccacagccaatcaatgatgggtctgggtggtgatgaggataagatggagaatgggagcggagggggcggtttttttgaatcatttaaacgggtgattagaagccgctctcagtcaatggacgccatggggctatcgaacaagaaacccaacacagtctctacctctcatagcgggtcctttgccccgaacaatcccgatctggccaaagctgctggaatcagcctgctgatacccgggaaaagcgcttctcgcttcggcagacgagggtctgcgattggtattggcacagttgaggaggtggtggtgcgaggcgccgcaggctccggtggatgtctccatgcactgttttcagctcgctctcaagacggagggcacatcggagacgtcgctccattgcctcctggccaggccccaggacgggctggatggtctggagggagttctgatggcacgcaacatctgctgtggggcttgagtctgatcgtacccggcaagtcccctactcgcaagaaatcagggccatttgggtcccgaaggtcatctgctataggaatagagaacattcaggaagtccaagaaaagcgggaaagcccacctgctggacaaaagacacccgactcgggccacgtttctcaagaacctaagtcagagaatagttcaacacagtcatcccccgaaatgcccacgactaaaaatcgagccgagactgccgcccagcgcgccgaggcactgaagttaccattactcgtgcagtgccagcagctccggcagcggggaggcggggacggaggatgtggacgaagagggcatcgtcccggcgaaagggtgattctgagaaatacgccacaggccggactgctgcacctctag

SEQ ID NO: 15480 - DNA, 2085 bp, synthetic construct
  source 1..2085: mol_type = other DNA; note = Synthetic coding sequence
atggcccaactaagaccagcagtgcccccaggtcgcccccgaaggggatccctccccgctggcgcttcatggcaaaatacagacctcttcgaaatgatagagaagatgcagggttctagaatggacgagcagcggtgttctttccccccaccattgaagaccgaggaagattacatcccctacccttctgtccacgaagtcctgggccgggaggggccatttccgcttatactgttaccccagttcggaggatactggatcgaggggaccaatcatgaaatcacttccatccctgagactgagcctctccagtcacctaccacgaaagttaagctggagtgtaatccaaccgctcgcatctaccgaaagcattttctgggtaaagagcactttaactattatagcctcgatgcagctttgggtcacctggtcttctccctaaagtacgatgtaattggtgaccaggaacatctgcgcctgctgctgcgtaccaagtgcaggacgtaccatgacgttattcccattagctgcctgacagaatttccgaatgtggtgcaaatggcaaaactggtgtgtgaggacgtgaatgtggatcgtttctacccggtactttacccaaaagctagccggttaattgtgaccttcgacgagcacgtgatcagcaataattttaaattcggcgtcatttatcagaaactgggccagaccagcgaagaagagctattctcaacaaacgaggaaagtcccgcttttgtagagtttctcgaatttttaggacagaaggtcaaactccaggattttaagggattccgcgggggattggacgtaactcatggtcagactggaaccgaatccgtatactgtaacttcagaaacaaagagatcatgttccacgtgtcaacaaaacttccctacacagagggtgatgcacagcagctgcagagaaagcgccatattggcaacgacattgtggcagtcgttttccaagatgagaacactccatttgtacccgacatgatagctagcaacttcctgcatgcttatgttgtagtccaagccgagggaggcggccctgatggcccgctgtacaaggttagtgttaccgcccgggacgatgtgcccttttttggtccacccctgccagatccagctgtcttccgtaagggccctgaatttcaggagttcctcttgacgaagctcataaatgccgagtacgcctgctacaaggctgagaagttcgccaagctggaggaacgaacccgggcagccctgctggagactctttacgaggaactgcatattcactcccaatcaatgatgggtctcggcggggacgaagacaaaatggagaatggctcagggggcgggggattctttgaaagtttcaagagagtcatccgatctagatcccagtctatggacgccatgggcctatctaataagaagcctaacacagtctccacatcgcattcaggcagcttcgcacccaataatcctgatctggccaaggccgccggcatctcgctgattgtgcccggcaagagccctacacgtaagaagtctgggccatttggtagccggcggtcaagtgccatcggaatcgagaacattcaggaggtgcaggaaaagcgcgaatctcctcctgcgggtcagaaaacaccggactctggacacgtgtcacaagaaccgaagagtgaaaacagtagcacccagtcatcccctgaaatgcctactactaaaaacagggcagaaacggctgcccagagagctgaagcgttaaaagatttcagccggagctcttctagtgccagttcttttgccagcgtcgttgaagagacagagggtgtggacggcgaagacacaggtctggaatcggtctcatcctccggcaccccccacaagcgggacagcttcatttattccacgtggctagaggattcagtttctacaaccagcggggggtccagtcccggcccgagccgaagcccacatccagatgcaggcaagcttggcgaccctgcttgccctgagataaaaattcagttagaggcgagcgaacagcatatgccccagctagggtgttag

SEQ ID NO: 15481 - DNA, 2082 bp, synthetic construct
  source 1..2082: mol_type = other DNA; note = Synthetic coding sequence
atggcccagctcagacccgcagtacccccaggcagaccaagacggggctcgctgccagctggcgcatcgtggcagaacaccgacttatttgagatgattgagaagatgcagggttcccgcatggacgaacagcggtgtagtttccctcccccattaaaaactgaggaggattacatcccctacccgagcgtccacgaggttctgggtcgcgaaggcccttttccacttatcctgctcccacagttcggcggctactggattgaaggtacaaatcatgagatcacctctatccctgagactgaacccctgcagtctcctacaactaaagtgaaacttgagtgtaatccaacagcccgaatctatagaaagcacttcctcgggaaggaacacttcaactactatagtctggatgcagccctgggtcatcttgtcttcagcctgaagtatgacgtgattggcgatcaggaacatctgaggctgctgctaaggaccaagtgtagaacataccacgacgtgatcccaatcagctgcctgaccgagtttccaaacgtggttcaaatggctaagctcgtgtgtgaagatgtgaacgtggataggttctacccagtgctgtacccaaaagcctcccggctaatagtgacattcgacgagcacgtgatcagtaacaacttcaagttcggcgtgatctaccagaagttggggcaaacctctgaggaggagttgtttagcactaatgaggaatcacccgcttttgtggagttcctcgagttcctgggacaaaaagtgaagctgcaggactttaagggtttccgggggggcctcgacgtgacccacggccagaccgggaccgaaagcgtctactgtaatttccggaacaaggaaattatgtttcacgtgtccaccaagctgccttacaccgaaggcgatgcacagcttcaacggaagcggcacattggcaatgacatcgtcgccgtggtgttccaggacgagaatacaccctttgtgcccgatatgatagccagtaacttcctccacgcctatgtggtcgttcaggccgaaggggggggccccgacggcccattgtacaaagtgagcgtgaccgctcgcgacgacgttccttttttcggcccccccctgccggacccagctgtattccgcaaagggcctgagtttcaagagtttctgcttactaaactgatcaatgcagagtatgcgtgctacaaggcagaaaaatttgcaaagcttgaagagagaaccagagccgccttgcttgagacattgtacgaagaactgcacattcactcccagagtatgatgggacttgggggtgatgaggataaaatggaaaacggaagcggtggtgggggatttttcgagagttttaaaagggtgattcgatcgcgctcccagtctatggacgctatggggctgagcaataagaaacccaacacagtgtcaactagccactccggaagtttcgctccgaacaaccctgatctcgccaaggccgccggaattagtcttattgtccctggcaagtctcccacccgcaaaaagagtggaccattcggcagccgccggagcagtgccattggcatagagaacatccaggaggtgcaggagaagcgtgaatctccccccgctggccagaagacacctgattcaggccacgttagccaggaacccaaaagcgagaacagcagtacacagagcagcccagagatgccgaccacaaagaaccgcgctgaaactgctgcccagagggcggaggctctgaaggatttcagccgcagctctagcagcgcaagtagctttgccagcgtcgtggaagaaactgagggagtggatggcgaggatacaggcctggagtccgtcagcagctctggaaccccccataagcgggattcgttcatctattcaacctggctggaggacagtgtgagtaccacgtccggcggctcatctcctggtcccagccgcagtccacatcccgatgccggtaagcttggtgaccctgcatgtccggagattaagattcagcttgaggcttctgaacaacacatgccacagttaggctgctag

SEQ ID NO: 15482 - DNA, 1992 bp, synthetic construct
  source 1..1992: mol_type = other DNA; note = Synthetic coding sequence
atgattgagaaaatgcaggggagccgaatggatgaacaaaggtgttcattcccaccacccctgaagaccgaggaggattatattccttatcctagtgttcacgaagtcctcggccgtgagggccccttccctctcattttgttgccacaattcgggggctactggatcgagggaacgaatcacgaaatcacctcaattcccgaaaccgagccgcttcagagccccacgactaaggtgaagctcgaatgcaatcctaccgcccgtatttatcgcaagcactttctgggcaaagaacattttaactactattcattggatgccgcccttggccacttggtattctcacttaaatatgacgtgatcggtgatcaggaacacctccgattgttactccgcacgaagtgtaggacataccatgatgtgattcctatctcttgcttgacagaattccctaacgtggtccagatggccaaactggtgtgtgaggatgttaacgtagaccgcttctaccctgttttgtatccaaaggcatcacggctcatcgtcacgttcgacgagcacgtaatttcaaataatttcaaattcggtgttatttaccagaagttgggacagacatccgaagaggaactctttagtaccaatgaggagagtccggctttcgtggagttcctggaatttcttggccaaaaggtgaaactccaggatttcaagggatttcgcggcgggctggacgtcacacacggtcagaccggcacagaatcagtgtactgcaactttcgtaacaaggagatcatgtttcacgtttcaactaaactcccctacacggagggtgatgcgcagcagctccagcggaaacgccatattggcaacgacatcgtggcagtggtgtttcaagacgagaatacaccatttgtgccggatatgatcgcaagcaatttcctgcatgcctacgtggtcgtgcaagccgaggggggtggtccggacgggcctttgtacaaggtttccgtcactgccagagatgacgttcccttttttggccctccgctccctgatcccgccgtgttccgcaagggacccgaatttcaggagtttcttctgaccaagctgattaatgcagagtatgcatgttacaaggctgagaagttcgcaaaattagaggagaggacgcgagcagccctgctggagaccctgtacgaagagttacacatccatagtcagagcatgatggggctgggcggagacgaagacaagatggagaacggtagtggaggcggggggtttttcgagtccttcaagcgagtcattcggtctagatctcagtctatggatgccatgggcctttctaacaagaaacctaatactgtcagcacgtctcactccggaagctttgctcccaataaccctgatctagctaaggcagctggaatctcactgatcgtacctggaaagtccccaactcgcaaaaagtccggccctttcggctcacggagaagcagcgctataggaatcgagaatatacaggaagtgcaggagaagcgcgagtctccccccgctggacagaagacacccgatagcgggcatgtgagccaggagcccaagtccgagaacagttcaacacagtcctcacccgagatgcccacgacaaaaaaccgggccgaaaccgctgcgcagagggcagaggccttgaaagatttctcacgaagctcatcaagtgcatcttcatttgcgagtgtcgttgaggaaaccgaaggagttgatggagaggacaccggtcttgagagcgttagcagcagcgggaccccacataaacgtgactcatttatttattctacctggctagaggatagcgtgtcgacaacatccggcggatccagccccggtccttctaggagcccgcaccctgacgccggaaaactcggggacccggcgtgtcctgaaattaagatacagctggaggctagcgagcaacacatgccgcagctgggttgctag

SEQ ID NO: 15483 - DNA, 744 bp, synthetic construct
  source 1..744: mol_type = other DNA; note = Synthetic coding sequence
atgctcgtcctcagatctgctctgactcgcgctctggcctctaggaccctcgcaccacaaatgtgctcctcctttgctactggacccaggcaatatgatggtattttttacgaattccgatcctactatctgaagccgtcaaagatgaacgagttcctcgagaacttcgaaaaaaatgcgcatcttcgtacagctcattctgaattggtgggttactggtccgtggaattcgggggtcggatgaacaccgtgtttcatatttggaaatatgataacttcgcccaccggaccgaggtcaggaaagccctggccaaggacaaagaatggcaggaacagttcttgattccaaatctggccctgattgataagcaggaatctgagattacttacctagttccatggtgtaagctggagaagccacctaaggaaggcgtgtatgagctggcgaccttccagatgaagcctggtggcccggccctgtggggagatgcgtttaagcgggcagtgcacgcccacgttaacctcggctacacaaaactcgtgggggtcttccatactgagtacggagctctgaaccgggtccacgtgttgtggtggaacgagagcgctgatagccgggcagccggtcgccacaagtcccacgaggaccctcgggtagttgctgctgtgcgggagagcgtaaactatctggtctcccaacagaatatgctcctcattccaacctcttttagtcctctgaagtag

SEQ ID NO: 15484 - DNA, 3594 bp, synthetic construct
  source 1..3594: mol_type = other DNA; note = Synthetic coding sequence
atgcacataaagagtataatacttgaggggttcaaatcctatgctcagcgcacagaggtgaatggtttcgaccctctgtttaacgcaattactgggctaaatggaagtggaaaaagcaacatactggacagtatatgttttctgctgggcatctccaacctatcacaggtcagagcttccaatctccaggacctggtgtataagaatggccaggcgggcattacaaaggcatccgtcagcatcacattcgataactctgataagaagcaaagtccccttggatttgaggtgcacgacgagattaccgtgacccggcaggtggtaataggcggacgaaataagtacctcatcaacggcgtgaacgccaacaatactcgagtgcaggacctgttctgctcggtagggcttaacgtaaataaccctcactttctcataatgcagggaagaattacaaaggtgctgaatatgaagcctccggagattctgtctatgattgaagaagccgccggcacccggatgtatgaatacaaaaagatcgcagctcaaaagacgattgaaaaaaaagaggctaaattgaaggaaatcaagaccatactcgaggaggagatcactccaaccatccagaagctgaaagaagaacggagcagttacttggaatatcagaaggtgatgagagagattgagcatctgtccagactgtacatcgcatatcagttcctcttggcagaggatactaaagtgcgctctgctgaagaactcaaagagatgcaggataaggtgataaaactacaggaggagctcagcgagaacgataaaaaaatcaaggcactcaatcatgagatagaggagctggagaagagaaaagacaaggagaccggaggcattttgcgttccctagaggacgctttggccgaagcccagagagtgaacacgaagagccagagcgccttcgatctaaagaagaaaaacttagcttgcgaggaatctaaacgcaaggagcttgagaagaacatggttgaagatagtaagacactcgcggctaaggagaaggaagtgaaaaaaataactgacgggctccacgcactgcaggaagcctccaacaaggacgccgaggccctcgcggccgcccaacagcactttaatgcggtctcagccggcctgagcagtaatgaggatggcgccgaggccacactggcaggtcaaatgatggcctgcaaaaatgatatctctaaagcccagaccgaagctaagcaggcccaaatgaagctgaagcacgcccagcaggagctgaaaaataagcaggctgaggtcaagaagatggactcagggtacagaaaggatcaggaggctctagaggccgtgaagagactgaaagagaagctggaggccgagatgaaaaaactcaactatgaggagaacaaggaggagagtttgctggagaaaagacgtcagctgtcgagggatatcggccggttgaaagaaacgtacgaggctctgcttgccagatttcccaacttacgcttcgcttacaaagatcccgagaaaaactggaatcgaaactgcgtcaaaggcctcgtcgccagcctgatctctgtgaaggacacgagtgccaccaccgcactggagctcgtagccggcgagaggctctacaacgtcgtggtcgatactgaggtgacaggtaagaaactgcttgagaggggtgaactcaagcgccgttacacaatcattccactcaacaaaatctctgcgcggtgtatagctcccgagacgttacgcgtggcgcagaacctggtgggcccagacaatgtacatgtagccttatcactggtggaatacaagcctgagctgcaaaaggccatggagttcgtgtttggtacaaccttcgtgtgcgacaatatggataacgccaaaaaagtcgcattcgacaaacggatcatgaccagaaccgttacgctcggcggagacgtttttgacccacacgggaccctgtccggaggcgcccggtcccaggcggcctcaatactgaccaagttccaggagcttaaagacgtacaggatgagttgcgaataaaagagaacgaactgagagccctggaggaggaactcgctggcctgaagaacacagcagaaaaatacaggcagctaaaacaacaatgggagatgaagacggaggaagccgacctgctccagaccaaactccagcaatcttcttaccacaagcaacaggaggagttggatgccctgaaaaagactattgaagaatctgaggagacactgaagaataccaaagagatccagcggaaagcagaggagaagtatgaggtcttggaaaataaaatgaaaaatgcagaggccgaaagagagagggagctgaaagacgctcagaaaaaactggattgtgccaaaaccaaagctgatgcatctagtaagaagatgaaagaaaagcaacaagaggtagaggctatcacgctggaacttgaggagctgaagcgcgaacacacctcttacaaacagcaacttgaagcagtcaatgaggccattaagtcttacgaatcccagatcgaggtcatggcagccgaggttgcgaaaaataaagagtccgtgaacaaggcacaggaggaagtcacaaaacaaaaggaagtgataaccgcccaggacacagtgataaaggccaagtatgcggaggtcgcgaagcacaaggagcagaataacgattcacagctcaagattaaagaactcgaccacaatatctccaagcacaaaagggaggccgaagacggtgcggcaaaagtgagtaaaatgctgaaagactatgactggattaacgccgagcgccacttgttcggccagccaaactcggcatatgactttaagacaaacaatcccaaagaggctggccaacgcctgcaaaagctgcaggagatgaaggagaaactgggtcgtaatgtcaatatgcgagccatgaatgtgctgacagaagcagaggagcgctacaatgacctgatgaaaaagaaaagaattgtggaaaatgataaatctaagatccttactacaatcgaggacctcgaccagaagaaaaaccaggccctgaacatcgcgtggcagaaggtcaacaaggactttggatccatcttttctactctgttacccggggcgaacgctatgctggccccccctgagggccagacggtgctggatggactcgaatttaaagtggcgttgggtaatacttggaaagaaaatctgacggagctgtccggtggtcaacgctcactcgtggccctttccctgatcctatctatgctcctgtttaaaccagctcctatctacatcctcgacgaggtggacgcagcgttagatctgagtcacacacagaacattggacaaatgctccgcacccacttcacccacagtcaattcatcgtggtatctttgaaggaaggtatgtttaacaatgctaatgtgctttttaagactaaatttgtagacggagtaagcactgtggccaggttcacacagtgccagaatgggaagatttctaaagaagccaaatcaaaggccaagccgcctaagggggcccatgtcgaggtttag

SEQ ID NO: 15485 - DNA, 3594 bp, synthetic construct
  source 1..3594: mol_type = other DNA; note = Synthetic coding sequence
atgcacattaagtccatcatcctagagggatttaaatcttacgcgcaacgaaccgaggttaacggctttgaccctttattcaatgccattacagggctgaatggcagcggcaaatccaacattctcgactcaatctgttttctgctgggcatttctaatctgagccaagtaagagcctcaaacctgcaagacctagtgtacaagaatggccaggctggcattacaaaagcctcagttagcatcacctttgacaactccgataaaaaacaatcacccctagggttcgaggtgcacgacgagattactgttaccagacaggtggtcataggaggtcgaaataaatacctgatcaatggggtgaacgccaacaacacacgggtgcaagacctgttctgcagcgttggactgaacgttaacaatccacacttcctgattatgcagggtcgaataactaaagttttgaacatgaaaccccccgagattttgtctatgatcgaagaggcagcagggactcgcatgtatgaatataaaaagattgctgctcaaaaaaccattgagaaaaaggaggctaagctgaaagagattaagaccatcttggaggaggagattaccccaactattcaaaagcttaaggaggaacgtagctcatatcttgagtaccagaaagtaatgagggaaatcgaacaccttagtcggttgtatattgcctaccaatttttactggctgaggatactaaggtgcgctccgctgaagagttgaaggaaatgcaagacaaggttatcaagcttcaagaagagctgagtgagaacgataagaaaatcaaggctctaaatcacgaaatcgaggagctagagaagagaaaggataaggagacaggtggaatcctgaggtcattggaagatgcgttggccgaagcgcagagagttaatacgaaatcgcaaagtgcatttgacttaaagaagaagaatcttgcatgtgaagagagcaagagaaaagaactggaaaagaatatggtcgaagattctaaaacacttgcagccaaggaaaaggaggtgaaaaagatcaccgacgggttgcacgccctgcaggaggctagcaacaaagacgctgaggcattggccgctgcccaacagcatttcaatgcagtgagtgctggactttcctcgaatgaagatggcgctgaggccactctggccggacagatgatggcatgtaaaaacgatatatctaaagcccaaacagaagctaaacaggcacaaatgaaactgaaacacgcgcagcaagaactgaagaacaagcaggcagaagtgaaaaagatggatagcggttacagaaaggatcaagaggctttggaggcggtaaagcgactgaaggagaaactcgaggcagagatgaaaaagctcaattacgaggaaaacaaagaagagtccctactggagaagaggcgtcagttatcccgagacatcggcagactgaaagagacgtatgaagcccttctcgcgcgatttccaaacttaagatttgcctacaaggacccagaaaagaattggaaccgcaattgtgtcaaaggtctcgttgcttctctcatctctgtcaaggatacatctgccacaaccgcccttgaactagtggcaggcgagcgcctgtataacgtcgtcgtagatactgaagtaactggaaagaagctcctggagcgcggggaactgaagcggaggtatactataatccccctcaataaaatctcggcgcggtgcatagcccctgaaactctgcgggtcgcacagaatctcgtaggtcctgacaatgtgcacgtggccttgtcacttgtggagtataagccggagttgcaaaaagctatggaattcgtatttggtacaacttttgtgtgcgacaacatggacaatgccaagaaggtggccttcgataagaggattatgaccaggacagtgacattggggggcgacgtattcgacccccatggcactctctcaggaggcgctcggtcccaggcagcctctattctcaccaaatttcaagaactaaaagatgtgcaggacgaactgcgcattaaggagaacgaactcagagctctcgaggaggaactggccggtcttaagaacacagccgagaaatacaggcagctgaagcagcaatgggagatgaaaacagaggaggccgatttgctgcagacgaagttgcaacaatcaagctaccacaaacagcaggaggaactcgatgccctgaaaaaaaccatcgaggaaagcgaggagactctgaagaacactaaggagatccagagaaaggcggaggagaaatacgaagtcctcgagaacaagatgaagaatgccgaggccgagagagaaagggagttgaaggacgcccagaaaaagctggattgcgctaaaactaaagctgatgcctcatccaagaagatgaaagagaagcaacaggaagtggaggctatcactctagaacttgaggagctcaaacgcgaacacacctcatataaacagcagttggaagcagtaaacgaggccatcaaaagctacgaatctcagattgaagtcatggccgcagaagtcgctaagaataaagaatccgtgaacaaggcccaagaggaggttacaaaacagaaagaggttattaccgctcaagacacagtcatcaaagccaagtacgcagaagtggcgaagcacaaagagcagaataatgacagccagttaaagatcaaggaattagaccacaacataagcaaacataagagggaagctgaggacggtgcagcaaaggtgagtaagatgctgaaggattacgactggattaacgctgagcgccatctgttcgggcagcctaactctgcttacgactttaagacgaataacccaaaggaggccggccagaggctgcaaaagctacaagagatgaaagagaaactcggccggaacgtgaatatgagagcgatgaacgtcttgaccgaagccgaggaacgatataatgatctcatgaaaaaaaaacggatcgtcgagaacgacaagtcgaagattctgaccaccatcgaagatcttgatcagaagaaaaatcaggcccttaacatcgcttggcagaaagttaataaagatttcggatcaatcttctccactcttctgcccggagccaacgctatgctggcccctccggaaggacaaactgtgctcgacggcctggagtttaaagtggcactcggcaacacatggaaggagaacctaaccgagttgtctgggggacaacgcagtctggtggctttgtcactcatactgtcgatgctcctgttcaagcctgcccctatttacattctggacgaggtcgatgccgctttggatttgagccacacacagaacatcgggcaaatgctacgcacccacttcacccactcccagtttatcgtggtgagccttaaggaggggatgtttaataacgctaatgtgcttttcaagactaaattcgttgatggtgtaagcactgttgcaaggttcactcagtgccaaaacgggaaaatcagcaaagaggcaaagtccaaggccaagcctccaaagggggcccacgtcgaggtctag

SEQ ID NO: 15486 - DNA, 1047 bp, synthetic construct
  source 1..1047: mol_type = other DNA; note = Synthetic coding sequence
atgtcgctgcctaggttccagcgggtaaatttcgggccctatgacaactatattcctgtatccgaactttccaagaaaagttggaatcaacagcatttcgccctgctgttccccaaaccacagcgccccggcacaaaaagaaggagcaaacccagtcagattagggacaatacagtctccatcatagatgaagagcaactgcggggcgaccggcgtcagcccctctggatgtacaggtccctgatgcggattagtgagcgcccatctgtgtatctcgccgcacgccggcagcctctcaaaccgacacggaccgtcgaggtggactctaaagccgcagaaattggaaagaagggcgaagataagacaacacagaaagatacgaccgacagcgagtccgaacttaaacagggtaaaaaggattccaagaaaggaaaggacattgagaaggggaaggaagagaagttagacgccaagaaggattctaaaaaggggaaaaaggacgcggagaagggcaaggacagcgccactgaatcagaggatgagaagggcggcgcaaagaaggacaataaaaaggataaaaaagatagcaacaaaggcaaagatagcgccactgaatcggaaggagagaaaggtggcacagaaaaagattcaaagaaaggaaaaaaggactctaagaaggggaaagactcggcaatcgaattacaggccgtcaaagctgatgaaaagaaagatgaggatgggaaaaaggacgcgaataagggggatgaatccaaggatgcaaagaaggacgccaaagagattaaaaaggggaagaaagacaagaaaaagccaagctcaacggattctgactccaaggatgacgtgaagaaggaaagtaagaaagatgctaccaaagacgccaaaaaagtggccaagaaagacaccgagaaggagtctgccgacagcaaaaaggatgctaagaagaatgcaaaaaaagatgccaagaaagacgcaaaaaaaaatgccaaaaaggacgaaaaaaaggatgctaaaaagaagggcaagtag

SEQ ID NO: 15487 - DNA, 1515 bp, synthetic construct
  source 1..1515: mol_type = other DNA; note = Synthetic coding sequence
atgaacagccaacctcagactcgttctccattcttccagaggccccagatccaacctccacgggctactatccccaattcttctccatcaatcaggcccggagcgcagacgcccactgccgtgtaccaggcaaaccagcatatcatgatggtgaatcatttgccaatgccataccccgtccctcagggcccacagtactgcattcctcagtatcgccacagtgggcctccttatgtgggtcctccccagcagtacccggtgcagccccctggacctgggcccttttatccaggaccaggaccaggggactttcccaatgcgtacggcactccattttacccatcacagccagtttatcagagcgcccccattatagtgcccacgcagcagcagcccccacccgctaagcgcgaaaaaaaaaccatcagaattagagaccctaatcagggcggtaaagatataactgaagaaatcatgtcaggaggtggaagccgcaaccccacgccacctatcggtagacctacaagcacaccgacccccccacagcagctgccaagccaagtccctgagcactccccagtggtctatggaacagtggaatcagcccatctggcagcttccacgcctgtaacagccgcctctgaccagaagcaagaggaaaagcctaagccggaccccgtgctgaaaagccctagcccagtcctgcgactggtcctctccggtgagaaaaaggaacaggaaggtcagacctctgaaaccaccgcaatagtgtccatcgctgagctccctctccccccatctccaactacagtgagcagtgttgcacggtccactatagccgccccaacatcgtctgcgctgtcatcacaaccgattttcacaacagccatcgacgatagatgtgaactgtccagtccgcgcgaggataccatcccgattccatctttgacatcctgcactgagacatctgaccctctgcctaccaatgaaaacgatgacgatatctgcaaaaagccatgctctgtcgctcctaatgatataccactcgtctcaagcacaaacctgattaacgagattaatggggtgagcgagaagttatctgcaactgaaagtattgtggaaatcgtcaagcaggaagtgttgccactcactctggagcttgagatactggaaaatcccccagaggagatgaagctcgagtgtattccagctcccatcacaccaagtaccgtcccttcgttccctcctacaccccctactccgccagctagccccccgcatacaccagtcattgttcccgcagcggccacaaccgtttcatctccaagtgcggccatcaccgtacagagggtgctggaagaagatgagtctattagaacttgcctgagcgaggatgctaaggaaattcagaataagatagaggtggaggcggacggacaaacagaggagatcctggattcccagaacctgaatagccggcggagcccagtacccgagacgtcaaacgagtgttag

SEQ ID NO: 15488 - DNA, 744 bp, synthetic construct
  source 1..744: mol_type = other DNA; note = Synthetic coding sequence
atgctgaaattccttgtatggttcttacaatggtgtgtgtgtgttctggtccagcctgccaaggaactgctgcactgtctgaaaatgcagatgcgaatatcaaagtacacaaagtgtttgcaagctcagattgccatcaccgtgccaaagacctggaaaaaacccaaggaccgaactaggactaccgaagagatgctcgaagccgagctggagctgaaagcggaggaagaactgagtattgacaaggtgctggaatcagagcaggacaaaatgtctcaggggttccacccagaacgcgatccctcagacctcaagaaggtgaaagctgtggaggagaatggcgaagaggccgagcccgtgaggaacggcgcagaatctgtctcggaaggggaaggtatcgatgctaacagcgggagcaccgattcatccggcgacggtgtcaccttcccttttaagcctgaatcttggaagcctaccgatactgagggtaagaaacagtatgacagggagtttctgctggattttcagtttatgcccgcctgtattcaaaaacccgaaggacttcctccgattagcgatgtggtactggacaagatcaaccagcctaagctgcccatgcgcaccctggacccacgaatactcccgcgtggacctgactttactcctgcctttgctgactttggccgccagacgcccggtggaaggggggtgccggtctctgccagttccctgcaactgacctag

SEQ ID NO: 15489 - DNA, 3918 bp, synthetic construct
  source 1..3918: mol_type = other DNA; note = Synthetic coding sequence
atgaattcacaaccacagactcggagcccattctttcaacggccacagatccagcctcctcgcgccaccatcccgaattcatcaccctccatacggccaggtgcacagaccccaaccgctgtctaccaagccaaccagcatataatgatggtaaaccatctgcccatgccgtatcccgtaccccaaggtccgcagtactgcatccctcagtaccgccattcaggcccaccctacgtcggaccaccacagcagtatcctgtgcagcctcccggtcccggacccttctaccctggaccaggacctggggattttccaaatgcgtacgggacgcctttctaccctagccagcccgtgtaccaaagtgcacccatcatcgtgccgacacagcagcagccccccccggctaaacgagagaagaagaccatcaggattcgtgaccctaatcagggcgggaaggatattaccgaggagattatgagtgggggggggtctcgcaatccaaccccccccatcggcagacccacaagtactcccactcccccccagcaacttcccagccaggtgcctgagcactcacccgtagtttatggcactgtagagtccgctcacctcgcagctagtacacctgtgaccgcggcgtcagatcagaagcaagcccagattgctataacagtgccaaaaacctggaaaaagcccaaagataggacccggacaactgaagagatgctggaggctgaactcgaactaaaggcagaggaagaattatcaattgacaaagtgctggaatcggaacaggacaagatgtcccaaggtttccatcccgagcgcgatccgtctgatttgaagaaggtcaaggcggtcgaagagaacggagaagaggcagagccagtgcggaatggagccgaatccgtctccgagggtgaggggattgatgcgaacagcggatcaacagattcctcaggggacggtgtgaccttcccattcaaacccgaaagctggaagccaacagacaccgaaggaaagaaacagtacgatcgcgagttcctgctagatttccagttcatgcccgcgtgtatccaaaagcctgagggtcttccgcccatttcagacgtcgtcctcgataagattaaccagcctaagcttcccatgaggactctagaccctcggatactcccccggggacccgactttacacctgcattcgccgatttcggacggcagacccctggagggcgaggggtgcccctcctcaatgtgggctctcggcgttctcagcctggccaaagaagggagccacgcaagatcataacagtaagcgtaaaggaagacgtacatctgaagaaggccgagaacgcttggaagccctctcaaaaacgagattcccaggccgacgaccctgaaaacatcaaaacacaagagctgttccggaaggtgaggagcatactaaataaactcaccccccagatgttcaaccaattaatgaagcaagtctctggtctgacagtggacactgaagaacgactaaaaggtgttatagatctggtatttgagaaagctatagatgaacccagtttctctgtggcctatgccaatatgtgccgctgccttgtcacattgaaagtgcctatggccgataagccagggaataccgtgaacttccggaagcttttacttaatcgatgccagaaggaatttgagaaggacaaagccgacgacgatgtcttcgagaaaaagcaaaaggaactggaggcggctagtgcgcccgaagagcgtacccgcctgcacgatgagctcgaggaagcaaaggacaaggccaggcgtcggtcaatcggcaacattaagtttattggcgagctcttcaagttgaaaatgctgactgaggcaattatgcacgactgtgtcgtaaagctgctcaaaaaccacgatgaagaatccctcgaatgcctgtgccgactccttaccacaatcgggaaagaccttgacttcgagaaggccaaacccagaatggaccaatactttaatcagatggagaaaatcgtcaaagagcgtaagacctcctccagaataagattcatgcttcaggatgtcatcgaccttcgactatgcaattgggtgagcaggagggcagatcaggggcccaagactatcgaacaaatccataaggaggctaagattgaggagcaggaagaacagcgcaaggttcagcagctcatgactaaggagaaaagacgtccaggggtgcagcgggtggatgagggagggtggaatacagtacaaggagctaagaattcccgggtcttggacccttcaaagttccttaagataacaaaacctactattgatgaaaaaatccagctggtccccaaagctcagctaggcagctggggcaagggctcgtcaggcggggctaaggcctccgaaacagacgcccttaggagtagcgcctctagtttgaataggttctccgcgctgcagcctcccgccccatctggaagcacaccttccacacccgtcgaattcgactctcgaaggaccctgacatcaaggggctcaatgggccgggagaagaacgataaaccactgccatcagccacagctagacctaacacattcatgcgtggcggctccagtaaagacctcctggacaaccagtcccaggaagagcaacggagagaaatgcttgagactgtcaaacagctcaccggtggagtcgatgtagaaaggaatagtaccgaggctgagagaaataagacccgcgaaagcgccaagcccgaaatcagcgcaatgtccgcacacgataaagccgcactctcagaagaggagctcgaaagaaagtcaaagtccattatcgacgaattcctgcacatcaacgacttcaaggaagcgatgcagtgcgtggaagaacttaacgcccagggactgctgcacgtctttgtgcgtgtgggggtggagagcactctggagagatcacagattacccgggaccacatggggcagctgctgtaccaactggtgcaatctgagaaactctccaagcaagattttttcaaggggttttctgaaacgttagagctcgcggacgacatggccattgacattcctcatatttggctgtacctggccgaactcgtgaccccgatgttaaaagagggtggcatctctatgcgggaattgaccatcgagttttctaaacccctgctgccagtggggcgggctggcgttctgctctcagagatactgcacctgttgtgcaagcagatgtcccacaagaaagttggtgcactgtggcgggaggccgacttgtcttggaaagatttcttgcctgaaggagaggacgtgcacaattttttgctggaacagaagctggacttcatcgagtcggacagcccctgtagcagcgaggcactgtctaaaaaagaactgtcagcagaggagctgtataaacggctcgagaagttaatcatcgaagacaaggctaatgatgaacaaatcttcgattgggtcgaggccaacctagatgagattcaaatgagcagtccaaccttcttgcgcgcgctgatgaccgctgtatgcaaggctgccatcatagctgacagctctacgttccgcgtcgacactgcggtcatcaagcagagggtgccaatcttgctgaagtacctcgactctgataccgagaaggagcttcaggccctttacgctcttcaagcaagtatcgttaagctggaccagcccgcaaacctcttaagaatgttttttgactgtttgtacgatgaagaggtcataagcgaggatgcattctataagtgggagtcatccaaggaccctgcagaacagaatggtaaaggcgtggcactgaaatcagtcactgccttcttcacctggctccgcgaagctgaggaggaatcagaagataattag

SEQ ID NO: 15490 - DNA, 4776 bp, synthetic construct
  source 1..4776: mol_type = other DNA; note = Synthetic coding sequence
atgaactcccaaccccagacccgttctcctggcggcttccgcccaatccagtttttccagcgacctcagatccagcctcctcgggcaactatccctaattccagccccagcattagaccgggggcccaaacacctaccgctgtgtaccaggccaaccagcacatcatgatggtaaaccatctgcctatgccatacccagtgccccaggggccccagtactgcatcccacaatatagacatagcgggccgccttatgtcggcccccctcagcaatatccggtgcaaccccccggcccgggtcctttttacccagggcctggccccggagacttcccgaatgcgtacgggacccccttctacccatcccagcccgtgtaccagtccgcccccattattgttccaacacagcagcagccaccacccgctaagcgagagaaaaagacaattcggatccgggacccaaatcagggcggcaaggacattacagaggaaatcatgagcgggggaggatccagaaatcccacaccaccaattgggaggcccacatcaacgcctactcccccccagttgccatcccaggttccagagcattctcccgtcgtctacggcacagtagagtccgctcatctggccgcctccacacctgtgacggctgcatcagatcagaagcaggaggagaaaccaaagcctgatcctgtcctcaaaagtccatcccctgtgcttagattggttctgtctggggagaaaaaagagcaagagggccagacaagtgagacaaccgctatcgttagcatcgctgagcttcctcttccacccagccccacgacagtctcttctgtggcgagatccaccattgctgcccctacgagctcagccctgtcaagccagccaatctttaccactgcaattgatgatagatgcgagctgtcctctcctcgcgaagatacgatccccatcccctcgctgacaagttgcacagaaacttcagaccccttgcctacaaacgagaatgacgatgacatctgcaagaagccctgcagcgtcgcaccaaatgatatccccctggtgtcgagtacaaatctgataaacgagatcaatggcgtttcagagaaactgtcggcgaccgagtctatcgtggagattgtcaagcaggaggtgcttcccctgacgttggaactcgaaatcctggagaatcccccagaggagatgaaactcgagtgtatacccgcgccaattaccccaagcaccgtcccctcctttcccccaacaccgcctacccctccagcttcccctcctcatactcctgtcatcgttcccgcagccgcaaccacggtaagctctccctccgcagccattacggttcaaagagtgctggaagaggacgaatcaatcagaacctgtctgtcagaggatgctaaagagatccagaataaaatcgaggtggaggctgacggacagactgaggaaatcctggacagccagaatttgaactccagacgtagtcctgtcccagcgcagattgccattacggttcccaagacctggaagaaacctaaagacagaacccgtaccactgaagagatgctggaggccgagctcgagctgaaagcggaggaggagctctccattgataaagtactggagagcgaacaggacaagatgagtcagggattccaccccgagcgtgatccaagcgacctaaagaaagtaaaagccgtcgaagaaaatggagaggaggcagaacccgtgagaaacggtgcagagtctgtcagtgagggagaagggatcgacgctaacagcggttccacggatagctcaggggacggcgtgacttttcctttcaaacccgaatcttggaagccaaccgatacagaaggcaagaagcagtacgaccgggagtttctgctggacttccagtttatgccggcatgcatacagaagcccgaaggactgccccccatcagcgatgtggtgcttgacaagatcaatcagcctaagctgccaatgcgcactctggacccacggatcctcccccggggacccgactttacgcccgccttcgccgacttcggccggcagaccccaggtggtcgaggagtgcccctgctcaacgtcggatcccgacggtcccaacccggacagcgtcgagaaccacgaaagatcattacagtatctgtgaaagaggatgtgcacttgaagaaggcagagaacgcttggaaaccatcacagaagagggattcccaagcagatgaccccgagaatatcaaaactcaggaattattcagaaaggtgagatcaattctgaataaactcacacctcaaatgttcaatcaactgatgaagcaggttagtggattgactgttgacacagaggagcgccttaaaggcgtgatcgacttagttttcgagaaagccattgacgagcccagcttctcagtcgcttatgccaacatgtgtcggtgtttagtgacccttaaagtgcccatggcagataaacctggcaataccgtgaactttcgcaagttgttactcaaccgatgtcagaaggaatttgaaaaagataaggctgatgacgacgtgtttgagaaaaaacagaaagagttagaggctgcttctgctcctgaggagcgaacgcgtctgcacgacgaactggaagaggctaaggacaaggcccgcagacgaagtatcgggaatattaagttcatcggagaactgttcaaactgaaaatgttgaccgaggctattatgcacgactgtgtggttaaattgctgaaaaatcacgacgaggagtcgctggaatgtctttgtaggctgctcacaaccataggtaaggatctggattttgagaaggccaaacctaggatggaccaatacttcaatcagatggaaaaaatcgtcaaagaacgcaaaaccagctcccgcatcaggttcatgttgcaggacgtgattgatctcaggctctgtaactgggtttcccgcagggctgatcaagggcctaaaaccatcgagcagatccacaaggaggctaagatcgaagagcaggaagaacagcgtaaggttcaacagcttatgactaaggagaaacggcgccccggggttcagcgagtcgacgaaggcggatggaacactgtgcagggtgccaaaaattcccgggtgctcgatccttccaaattcctgaaaattacgaagccaaccattgacgaaaaaatccagttagtgccaaaagcccagttaggaagctgggggaaagggagcagcggcggagccaaagcaagcgaaactgacgctctgcggtccagcgcaagctccctgaaccgctttagtgccctccaaccacccgccccctctggttccacacccagcacccctgttgagtttgatagtcgccgcaccttgacgtcccgtggctcaatggggcgtgagaaaaatgacaaaccccttccaagtgccacggctaggcctaatactttcatgcggggcgggagttctaaggatctgctggataatcaatcccaggaggaacagcgcagagagatgctggaaactgttaagcagctgacgggaggcgtggacgtggagcggaattctactgaagcagaacgcaacaagaccagagagtctgctaagccagagataagtgccatgtccgcccacgataaagctgcactctcggaggaagagttggagaggaaatccaagtccatcatcgacgaatttctccatattaatgatttcaaggaagcaatgcaatgcgtcgaagaactgaacgcccagggcctactccacgtttttgtgagagtgggagttgagagcacactggaaagaagtcagatcactcgcgatcacatgggacagctgctgtatcagcttgtgcaaagcgaaaagctctcaaaacaggacttcttcaagggcttctcagagacacttgaacttgccgacgacatggccatcgacataccccacatctggctgtatcttgcggaactggtcacacctatgctgaaggaaggcggcatctcaatgcgggagctcactattgagtttagtaagcccttgctccctgtgggcagggcaggtgtcttgctgagcgaaatactacatctcctgtgcaagcagatgtctcacaagaaagtgggagcactctggcgggaggcagacctgtcatggaaggatttcctgcctgaaggagaggacgtgcataatttcctgcttgagcagaaactggactttattgaatcggacagcccatgttcttctgaggcgctgagtaagaaagaactatcagcagaagagttgtacaagagacttgagaaactgatcattgaggataaagcaaatgatgaacagatttttgactgggttgaggccaatctcgacgagatccagatgtcttccccaacttttctgcgggccttaatgacagcggtgtgtaaagcagcaatcatcgcagattcatccacctttcgcgttgataccgcagtcatcaaacagcgggttcccatactgttgaagtacctagatagcgatacagaaaaggaactgcaggctctttacgcgcttcaagcgagcatcgttaagctagaccagcccgcaaatttgctccggatgttctttgattgtctgtacgatgaggaggtgatttctgaggatgccttttacaaatgggagagttctaaagacccagctgaacaaaacggcaagggcgtggctttgaaaagtgtcaccgcttttttcacttggctgagagaggcagaggaggagagcgaggacaactag

SEQ ID NO: 15491 - DNA, 1002 bp, synthetic construct
  source 1..1002: mol_type = other DNA; note = Synthetic coding sequence
atgagcggggatgagatgatctttgaccctactatgagtaagaagaaaaagaagaaaaagaagcccttcatgcttgatgaagaaggcgacactcaaaccgaggaaacccagccatccgagactaaggaagtcgagcccgaacctacagaggataaggacttggaagcagatgaggaagacactcggaagaaggatgcgtcagacgaccttgacgatcttaacttctttaatcagaaaaagaagaaaaaaaaaaccaaaaagatcttcgacatcgacgaggctgaggagggggtcaaggatctaaaaatcgaatccgacgtgcaggagccaactgaacccgaagatgacttggacatcatgctaggcaataaaaagaagaaaaagaaaaacgttaaattccctgacgaggacgagatcctggagaaggatgaggccctggaggacgaggacaacaaaaaggacgacgggatatccttctcaaaccagacaggaccagcctgggctggcagtgaacgcgactacacgtacgaggagctgctgaaccgcgttttcaacatcatgagagaaaaaaatcctgatatggtcgctggggaaaagcggaaatttgtaatgaagccgccacaagtggtgcgcgtaggaactaagaagacctctttcgtgaattttacggatatatgcaaactgctgcatcgccaacctaagcaccttctggctttcctcttagcggaactgggcactagcggatcaatcgatgggaataaccagctcgtgataaagggcagatttcagcagaagcaaattgagaacgtcctgcgaagatatattaaggagtacgtcacatgccacacatgtagatccccggacactatcctccaaaaggatactcgactgtactttctccagtgtgagacctgtcattctagatgttcggttgcgtcaatcaagacagggtttcaagccgtgactggaaagagggcccagctcagagccaaggctaattag

SEQ ID NO: 15492 - DNA, 2619 bp, synthetic construct
  source 1..2619: mol_type = other DNA; note = Synthetic coding sequence
atgggcgagggagggctccccccagccttccaactcctgttgagagcatgcgatcagggcgacacagaaactgcccgccggttgctagaacctggggccgccgagcccgcagaaaggggggctgaaccagaggccggcgctgagccggccggcgccgaagtcgccggacctggggcggcagccgcaggcgctgtgggagctcctgtgcccgtggactgctctgacgaagctggcaatacggcactgcaatttgctgcagccggagggcacgaaccactggtgcgattcttgctgcgtagaggggcctctgtgaattctcggaaccattacggatggagtgccctcatgcaggccgcccgatttggccacgttagcgtcgcccatctgctgcttgatcatggtgcagacgtgaacgcccagaacaggttgggtgctagcgttctgacagtcgcatccagaggcgggcacctcggggttgtgaagctcctattggaggctggggcgttcgttgatcaccatcacccaagtggtgagcagctggggctgggcggttcgagagatgaaccattagacattaccgctctcatggctgccatccaacatgggcacgaggctgtggtgcgactgttgatggaatggggagcagatcctaaccacgctgcaaggacggtgggctggagccctcttatgctggctgcccttacaggacgactgggggtagctcagcagcttgtggagaaaggagcaaaccctgaccacctcagtgtgctagagaaaaccgccttcgaggtcgctctagattgcaaacaccgggatttagttgattacctggatcctctgacgacagtgaggcctaaaaccgatgaggaaaagaggagaccagatatcttccatgctctgaaaatgggaaattttcagttggttaaggaaatcgccgatgaagatccgagccacgtcaatctggtgaatggcgacggtgccacccctctcatgcttgcagctgtgacaggacagctggcactagtgcagctgttagtcgagcggcatgccgacgtcgacaagcaggacagtgtccacggctggaccgccctgatgcaggccacttaccacggaaataaagagatagtgaaatatttactgaaccaaggggccgacgtcacactgagagccaagaacggttataccgcatttgacctggttatgttactgaatgacccggacaccgagctggtgcgtctgcttgcctctgtctgtatgcaggtcaacaaggataagggccgtcccagccaccagcctccactcccccattccaaggtaagacagccctggagcatccccgttctccccgatgataagggaggcctaaagtcttggtggaacaggatgtccaacagatttcgcaaactgaaattgatgcaaaccctgccccgtggcctgtccagcaatcagcctttacctttcagcgacgagcccgagccagctctggatagcaccatgcgggccgcccctcaagacaaaacatcccgtagtgctttacccgacgccgcacctgtgacgaaggacaatggtccaggatctacccgcggcgagaaagaggatactctgctgacaaccatgctgcggaacggcgcaccactgacacgactacctagcgacaaattgaaagctgtgataccccccttcttgcccccgtcgagcttcgaactgtggtcatccgacaggtctcgcacacgtcataacgggaaagccgacccaatgaagaccgcattaccgcaaagagccagccgtggccacccagttgggggcggaggaaccgacactacccctgtccggcctgtgaagttccccagcctgccacggtctcctgcatcgtccgccaactccggcaactttaaccacagtccacactcgtcagggggctcctcaggtgtgggcgtgagtcggcatggcggggagctcttgaaccgctcagggggaagcatcgataatgtgttgtctcagatcgccgcccagcgcaaaaaagcagcaggtttgctagaacaaaagccgtcccatagaagtagtcccgtgggcccagctcctggatcctctccctcagagctacctgcatctccggctggcggtagcgcccctgtcggtaagcagaagttggaaacatctaagcggcctccctccggcacttctacaaccagcaaatctacctctcccacactcacaccctccccttcgccaaaaggacacactgcagagtcttccgtgagcagctcatcatcccatcgccagagcaaaagcagcggcgggtcatcttccggcacgatcactgacgaggacgagcttactgggattttgaagaagctgtctttggaaaagtaccagcccatattcgaagaacaggaggtcgacatggaagcctttctgaccctgactgatggggacttaaaggaactcgggatcaagacggacgggagtcgccagcaaatccttgccgcaatctcggagctgaatgccggcaaggggagggaaagacaaatccttcaagaaacaatccataacttccactccagctttgaaagtagcgcatctaacacccgcgcaccagggaattctccctgcgcctag

SEQ ID NO: 15493 - DNA, 483 bp, synthetic construct
  source 1..483: mol_type = other DNA; note = Synthetic coding sequence
atggaggctgagcggcctcaggaggaggaggatggcgaacagggcccaccgcaggatgaggagggatggcccccccccaactccaccacgcggccctggagaagcgcaccaccttcgccccctccaccgggtaccagacacaccgcactcgggcctaggtccgccagccttctgagtttacagaccgagttgctactggacctggtcgccgaggctcaatctcgccgcctggaagaacagcgggctacattctacaccccccagaacccctctagcctggcccctgcaccactaaggccccttgaagatagggagcagctgtactccacaatcctgtcccaccagtgccagaggatggaagctcagcggtctgaaccccctcttccccctggaggccaggaactcctggagttgctgctccgagttcagggtggcgggaggatggaggagcaaaggtcaagaccaccaacacatacttgttag

SEQ ID NO: 15494 - DNA, 483 bp, synthetic construct
  source 1..483: mol_type = other DNA; note = Synthetic coding sequence
atggaagccgagagacctcaagaagaggaggatggcgaacaggggcccccgcaagacgaggaggggtggccaccacctaattccactactagaccgtggcggtcagcacccccctctcccccacctcccggcaccagacacactgcactaggtcccagaagcgcttctcttctgtctctccagacggagttattgctagatctcgtggccgaagcccagtctcgccgactcgaagaacaaagagcaaccttttataccccacagaatccctcgagcctcgccccagctcccctccggccactggaagatcgggagcagttgtatagcacaatactttcccatcaatgccaacggatggaagctcaaaggtctgagcctccgctgccccctggcggacaagagctactggaactcctcctgcgagtacaaggcggaggcaggatggaagaacaacgctcacgccctcctacccacacatgctag

SEQ ID NO: 15495 - DNA, 2790 bp, synthetic construct
  source 1..2790: mol_type = other DNA; note = Synthetic coding sequence
atgcaaggactgcccgatccacccagccagagaggcattatcccaagagcctttgagcacgtgtttgagtccgtccagtgtgcggagaacaccaaatttcttgttcgggcgtcgtacctggagatctacaacgaagatgtccgcgatctgttaggcgccgacaccaaacagaagttggaactcaaggagcaccctgagaaaggcgtgtacgtgaaaggactgagcatgcatacagttcattcagttgctcagtgtgaacacatcatggaaaccggctggaaaaatagatccgtgggatataccctcatgaataaagacagtagccgatcccactctatctttactatctcaatcgaaatgtctgccgttgacgaaagagggaaagaccatctgcgcgctggaaagctgaatttggtggacttggccggctctgagaggcagtctaaaactggcgccacaggcgaacgcctgaaagaagccaccaagattaacctatccctatcagcactggggaacgtaatctcagcgctggtggatgggaggtgtaaacacgtcccttatagagacagcaagctaaccagactgcttcaagactccttaggcggcaacaccaaaaccctgatggtggcctgcctcagtccagccgataataactatgatgaaacgctgagcacactccggtacgcaaacagagccaaaaatattaggaataagccacgtataaacgaagaccccaaggatgcactgttaagggagtaccaggaggaaattaagaaactcaaggcaattctcacacagcagatgtctccctcatccttgtctgctctgctgagtcggcaggtccctcccgaccctgtgcaggtggaagaaaaactcttgccacagcctgtaattcagcacgacgtggaggctgaaaaacagctcattagggaggagtacgaggaacggctggctcgactcaaggccgattataaggctgagcaagagtcacgcgctaggctggaagaagatatcacagctatgcggaattcctacgacgttcgccttagcactctcgaagagaatctgcgcaaagagaccgaagctgtgttgcaagtcggagtactgtacaaagcagaggtgatgtctcgagctgaattcgcctcctcagccgaatatccgcctgccttccagtatgaaaccgtagtgaagccaaaggtgttctccaccactgacacgctgccatctgatgatgtatcaaaaacccaagtttcctcaaggttcgctgaattgcccaaggtagagccatccaaatcagaaatcagcttgggcagcagcgaatcttctagcctggaggaaacaagcgtatctgaggccttcccaggacctgaagagccaagcaacgtggaggtatcgatgcccacagaggaaagccggagccggtactttctcgacgagtgcctgggacaagaggcagcgggtcacttgttaggggaacagaattacctcccccaagaggaacctcaggaggtgcctctgcaggggttactgggcctgcaggacccattcgccgaggtcgaagccaaactagcaaggctgagttctaccgtggccaggacagatgccccacaggccgacgtaccaaaggtacccgtccaggtgccagcacccactgatcttttggaaccaagcgacgcacgccccgaggcagaggccgcggacgatttccctcccaggccggaggttgacctagcgtctgaagtggctctggaggtagttcgcacagcggagccaggggtttggctcgaggcccaagcgccggttgccctggtcgcacagccagagccattacccgcaaccgccggcgtgaaaagggagtcagttgggatggaagtagcggttcttaccgacgatccattacctgtggtcgatcaacagcaggtgctggctcgactgcagctgttagagcagcaggttgtggggggagagcaggctaaaaataaagatttgaaggagaaacataagcgccggaaacgctacgccgacgaacgacgaaagcagctggtcgctgctcttcagaacagtgacgaggactcgggggactgggttcttttgaatgtgtatgactccatccaagaggaagtacgggctaagtcaaagctgttggagaagatgcagcgcaaactgcgggcagccgaggtggaaatcaaggacctgcagtcagagttccaattggagaagattgactacctcgccactataagacgacaagagcgcgatagcatgctgctgcagcagctattagagcaagttcagcctcttatccgcagggattgcaactattccaacctggagaaaattctgcgcgagtcctgctgggacgaggataacggcttctggaagatcccgcaccccgtcatcacaaagacatctctgcccgtagcagtgagtaccggccctcagaacaaaccggccagaaaaacgagcgctgctgataatggcgagccaaacatggaggatgaccggtatcggctgatgctaagccgtagcaactccgagaatatcgcctctaactacttccggtccaagcgggcatctcagatattaagcaccgatgctaggaaatctctgactcatcataattcccccccgggcctgagctgccccctgtccaacaactccgccataccgccaacccaggcgcccgaaatgccacaaccccggcctttccgcttggaatccctggatattccgttcacaaaggctaaacgaaaaaagtctaaatctaatttcggctctgagccgctctag

SEQ ID NO: 15496 - DNA, 426 bp, synthetic construct
  source 1..426: mol_type = other DNA; note = Synthetic coding sequence
atgaacaagcacgtactaaagatacagaaggaactggaagaagccaaggagaagctggcccgccaacacaaacgcagatcagacgacgatgataggagtagtgataggaaagacggagtcctggaggagcaaattgagcgactacaggaaaaagttgaaagcgcacaatcagaacagaagaatttgtttttggtaatcttccagcggttcatcatgatattaacagagcacttagtccggtgtgagactgatgggacaagtgtgctgaccccctggtacaagaattgcatcgagcggctgcagcagatcttccttcaggtgtgcggtgaacttcgcctcggaaacaacaccatcttgtctcacaaggactttagcctgaaaaagattctggtgaagtttgtgcgacgcctttattctacatgttag

SEQ ID NO: 15497 - DNA, 2373 bp, synthetic construct
  source 1..2373: mol_type = other DNA; note = Synthetic coding sequence
atgagtagacggagacacagcgacgagaatgacggcggacaacctcataagagaaggaagacatctgatgcaaacgaaactgaagaccacctggagagtttaatctgcaaggtgggagagaagtccgcctgtagcctggagagtaatctggagggattagctggggtgctcgaagctgatctgcccaattacaaatctaaaatcctgcgcctcctgtgtaccgtcgctcgcctgttgcccgagaaactcaccatctataccactctggtgggcctcctgaacgcccgaaattataacttcggtggtgagttcgtggaagcaatgattcgacaactcaaggagtctcttaaagcaaataattacaacgaagctgtttacctggttagatttctgagcgacttggtgaattgtcacgtgatcgccgctcctagtatggtcgctatgtttgagaatttcgtgtctgtcacccaggaagaggacgtgccacaggtcaggagagactggtacgtctacgcttttctgagctctttgccatgggtcggcaaagagctgtacgagaagaaagacgccgagatggaccgcatcttcgccaataccgagagctacctcaaacgtcgccagaagacccatgtcccaatgctccaagtgtggaccgccgataagccccacccacaagaggagtacctcgattgcctgtgggcccaaattcagaagctgaagaaggatcgttggcaggaacgtcacattctgcgaccatatctggcttttgattctattttgtgcgaggccttacagcacaacttgccgccctttacacctcccccacataccgaagactcagtctatcctatgcctagggtcatcttccgaatgttcgactacacagatgaccctgaaggacccgtcatgcccggttctcactccgttgaacgattcgtgatcgaggaaaatctacactgtatcattaagtcgcattggaaggaacggaaaacatgtgccgcccagctagtctcatatcccgggaagaacaaaatccctctgaattaccacatcgtcgaagttattttcgccgagctttttcaactccctgcgcctcctcacatcgatgtcatgtacacaactcttctgatagagttgtgtaaactccagcccggtagccttccacaggtgctggctcaggccaccgaaatgctctacatgagactggacactatgaacactacatgcgttgatcggtttattaattggttctcacaccatctgtctaatttccagttcagatggtcctgggaggattggtcggactgcctcagccaggaccctgagtcccctaaacccaaattcgttcgggaagtgctggaaaagtgtatgcgcctgtcatatcaccagagaatcctggacatcgtaccacctactttttcggccctgtgtccggccaaccccacatgtatttacaagtatggagatgaatcaagcaactcccttccagggcacagtgtggcgctgtgcctggccgtggcctttaagtctaaggctacaaatgacgaaatatttagcatcttgaaggacgtaccgaatcccaaccaggatgatgacgatgacgagggattttccttcaatcctctgaagattgaagtctttgtccagacgctgctgcatttagccgctaagagcttttctcattccttctccgcactcgctaagttccatgaagtgttcaagactttagcagaatctgacgaggggaaactccacgtgctgagagtgatgttcgaagtctggaggaatcacccccaaatgatcgctgtccttgttgataagatgataagaacgcaaatcgtagactgcgctgctgtggctaattggatcttctcttcagagttgagcagggatttcactagactttttgtgtgggagattctgcacagcaccatcaggaagatgaataagcacgttctcaaaattcagaaagagctggaagaagctaaagagaagctggccagacaacataagagaagatctgatgacgacgaccgcagcagtgacagaaaagatggcgtgctggaggagcagatagagagactccaggagaaggtggagtctgcacagagtgagcagaagaacctgttcttggtgattttccagaggttcatcatgatactgacagagcacctggtcagatgcgagaccgacggaacatccgttctgactccctggtataagaattgtatcgagcgactgcagcagatcttcctgcagcaccaccagataattcagcagtacatggtcacgctggagaacctcttgttcaccgccgaactggacccacacatcttggcagtgtttcagcagttctgtgccctccaggcatag

SEQ ID NO: 15498 - DNA, 699 bp, synthetic construct
  source 1..699: mol_type = other DNA; note = Synthetic coding sequence
atgtcacaggttctgtctatcctcggaatgcacacactgatgtcaaatcagcagtattaccaggcgctgtccagtagcagtattatgaacaaggagggactcaacagcgttataaaacctactcaatataaacccgtcccggatgaagagccaaactctacagacgtggaggagaccttggaacgcattaaaaacaatgaccccaagcttgaagaggtcaatctgaataatattaggaatatccccattcctacacttaaggcctacgcagaagcgctgaaggagaatagttatgtgaaaaagtttagtattgtcggtacccgcagcaatgaccccgttgcctatgcccttgcagaaatgttaaaggagaataaagtcctcaaaaccctcaatgttgaatctaactttatcagcggagccggaattcttcgactcgtggaagcattgccctataacacctcgcttgtggagatgaagatcgataaccaatcccagcctctaggcaacaaagtggaaatggagatcgtgagtatgctcgagaagaacgctacactcctgaaattcggataccactttactcaacagggcccacgcctgcgcgcaagcaatgcgatgatgaacaacaacgacctagtgagaaagcgccgactggctgatttgaccggtcccatcattcccaagtgtcggtctggggtctag

SEQ ID NO: 15499 - DNA, 2403 bp, synthetic construct
  source 1..2403: mol_type = other DNA; note = Synthetic coding sequence
atgtcctccctgggtgcgagttttgtacagatcaaatttgatgacctccagttcttcgagaattgtggaggaggaagctttgggtccgtgtatcgggccaagtggattagccaagacaaagaggtggccgtcaaaaagttgcttaaaatagagaaagaagccgagattcttagtgtgctgagccataggaacatcatacaattttacggggtaattctggagccgcctaattacggaatcgtgactgagtacgctagtctcggcagtctttatgactatatcaacagcaaccggtctgaggaaatggacatggatcatatcatgacatgggccacagacgttgccaaggggatgcattacttgcatatggaggccccagtaaaagtgatccaccgggacttaaagtcgagaaatgtggtgatcgccgccgacggcgtactcaagatttgcgatttcggcgcctctcgattccacaatcataccactcatatgagcctcgtggggaccttcccgtggatggccccagaggtgattcagtctctccccgtctccgaaacttgcgacacttactcatacggtgtcgtgctttgggagatgcttacccgcgaggtgcccttcaaggggctggagggattgcaggttgcctggctagtggttgaaaagaatgagagattaacgatcccaagcagctgccccaggagcttcgcagaactgctgcaccagtgctgggaggcggatgctaaaaaacgcccctctttcaaacagatcatatcgattctggaatccatgtctaatgatactagcctgcccgataagtgcaacagtttcctacacaataaagccgagtggaggtgcgagattgaggccacgcttgagcgtttgaaaaaactggagagggatctctcattcaaagaacaggagttaaaggagcgtgaacgcagactgaaaatgtgggagcaaaaactgacggagcagtccaacacccccttactgccctcattcgagatcggagcctggaccgaggatgacgtgtattgttgggtacagcagctggtgcgaaaaggggacagttccgctgagatgtccgtgtacgcatcgctttttaaagaaaacaatatcaccggtaagcgcctactgctgctcgaagaagaagatcttaaagatatgggtattgtgtcaaaaggccacatcatccattttaaaagcgcgattgagaagctgacccacgattacattaatctgtttcactttccaccgttgattaaggactctggaggcgaacccgaagagaatgaggagaaaatcgtcaatctggagctggtgttcgggttccatctgaagcctggcactggcccacaggattgtaagtggaaaatgtatatggagatggacggcgacgagatcgctatcacttatattaaagatgtgactttcaataccaatttgccagatgcagaaatattgaagatgactaaaccgcccttcgttatggagaaatggattgtcggcattgccaagagtcagaccgtggagtgcaccgtgacatatgagtccgacgtaagaacacccaaatcaaccaagcatgtgcattcaatacagtggagccggacaaaaccgcaagacgaggtcaaggccgtgcagttagcaattcagacacttttcaccaacagtgacggcaaccccggttcgcggtccgacagctctgccgactgccaatggttggatactctgaggatgcgccagatagcctcaaatactagcctccaaagatctcagagcaatccgatactaggctctcctttcttctcccactttgacggccaggatagctatgccgcggccgtgcgcaggccccaggtccctataaaatatcagcagattacaccagtcaatcagtccagaagttcatcgcccactcagtatggccttactaaaaattttagcagtttgcacttgaatagccgtgatagtggcttttcctccggcaacacggataccagcagcgagcgggggcgatactccgaccgttcaaggaataagtatggcagaggctccattagccttaacagctcgccaagaggcaggtactcggggaagtcacagcacagcactccgtcccgcggtcggtaccctgggaaattttatagggtgtctcagagcgctcttaacccgcaccagtcaccggactttaagagatcaccgcgcgatctgcatcaacccaataccatcccgggtatgccccttcacccagaaactgatagccgagcttccgaggaagattcaaaggtctctgagggcgggtggacgaaggtggagtacagaaagaagccacaccgcccttcccccgcgaaaacaaacaaggagagggctagaggcgatcatagaggttggagaaacttctag

SEQ ID NO: 15500 - DNA, 1071 bp, synthetic construct
  source 1..1071: mol_type = other DNA; note = Synthetic coding sequence
atgagacgattccttcgacctggccacgatccagttagggagcgactgaagcgggacctgttccagttcaacaagaccgtggaacacggctttccacaccagccatcagcactcggctacagcccatccttgcggatcctcgccattgggacaaggtctggtgcgatcaagttatatggggctcccggcgtggagtttatggggctgcaccaggagaacaatgccgtgacccagatccacctcctcccggggcagtgtcagctagttactctgctggacgacaatagccttcatttgtggagcctaaaggtgaaagggggggcttccgaactgcaagaggatgagagttttaccctgcggggtccaccaggcgcggctcctagtgcaacacagattacagtggtcctcccccatagttcatgtgaattattgtatctcggaaccgagagcggcaacgtgttcgtggtccagctgccagctttccgggctttagaggataggacaattagtagtgatgccgtgctgcagaggctgccagaggaggctagacatcggcgagtttttgagatggtggaagccctacaagaacacccccgcgaccccaatcaaatactcatcggctatagcaggggccttgtagtcatatgggatttacagggtagccgtgttttgtaccacttcttgtcttcccagcaactggagaatatttggtggcaacgcgatggcaggctcctagtaagttgtcattctgatggatcctattgccagtggcccgtcagtagcgaggcccagcagcccgagcccctccggagtttggtgccatatggaccatttccttgtaaggcaataacacgcattctgtggctgacaacaagacagggtttgccatttactattttccagggtgggatgcctcgggccagctatggcgaccgtcattgcatctccgtgatccatgatgggcaacagactgcattcgatttcacatcccgggtgatcgggtttaccgtgttgactgaggccgaccccgctgcttcccgacgggccagcggagtaggagcgcagggctag

SEQ ID NO: 15501 - DNA, 2526 bp, synthetic construct
  source 1..2526: mol_type = other DNA; note = Synthetic coding sequence
atgggcgctcgggctgctggcaccagctcaggcggcggtccccgtccctgcctcgcaagaggtctgagtgcctctccctttccagcaaagcaacaacacccccaggcaggagcatctccagcagaattgcaacaacgggcctactatagagcgaggcaggacgccgccagccaacccgggctcggcttcctgatcagcccctctagctgtagttcttggggcccgggatcgttcactcggagctgtggatatcccaccttatgctcctcatggatttctaagcgtgagccaggagaattaagcggcgtttggacgagtgcttggcgaacccatgctgcattcacagggagccaagacctttgtctttacaaaggtctcggcagcatctacgaggacaaaactgccctctctctgctgggcctgggggaagaaaccaatgaggaggatgaagaggagagcgataatcagtcggtccactcaagtagtgagcctcttagaaatctgcacctggatatcggcgctttagggggggatttcgaatacgaagagtctctcaggacttcacaaccagaagagaaaaaagatgtaagcctggatagtgatgcagccggtcctcccacaccatgtaagcccagctcgcccggggctgatagcagcctgagttctgccgtcggcaaaggacggcagggatcaggagctcggcccgggttgccagagaaagaggaaaacgagaaaagcgagcctaaaatttgcagaaaccttgtgactcctaaagccgatcctaccggatccgagccagctaaagcttccgaaaaagaggcccctgaggacaccgtggacgccggagaagagggatctcgaagagaggaggccgctaaagagccgaaaaagaaagcatcagccctcgaagaggggtcctctgatgcctcgcaagagctcgaaatctcagagcacatgaaggagcctcagctctccgattcaatagcttccgatcctaaatccttccatggtctggatttcggttttaggtccaggatatcagagcatctgctagatgtcgatgtcctaagccccgttctgggcggagcctgtagacaggctcagcagccgctgggcattgaggataaagatgattcccagtcctcccaagacgaactgcaatctaaacagagtaaagggttggaagagaggtaccatcgcctctctccccccttgccacatgaggagagggcgcagagcccaccaaggtccctagccacagaggaagaacccccacagggtccagaagggcagcctgagtggaaggaagcggaagagctcggcgaggactctgccgcatcattatcgctacaactgtccctgcaaaggagatccactgaaccggtggcaccacccgagcagttgagtgaggctgctctgaaggcaatggaggaggctgttgcccaggtccttgaacaggaccagagacatctcctggagagcaagcaggagaagatgcagcagcttagagaaaaattgtgtcaagaggaagaggaagagattctccgtctccatcagcagaaggaacaatcactgagttccctgagagaaagactacagaaggcaatagaagaagaggaggctaggatgagggaggaggaatctcaacgccttagctggctaagagcccaggtgcagtccagtacacaggctgacgaagaccaaattagagctgaacaggaggcttcactgcagaagctgcgcgaggagctggagagccagcagaaagccgagcgcgcttcccttgagcagaagaaccggcagatgttggagcagctgaaggaggagattgaggcatccgagaaatccgagcaggccgcattaaacgctgctaaagaaaaggccttacagcagctccgcgagcaattggagggcgaacgcaaagaagctgtggcgacactggaaaaagagcactctgcagagttggaaaggctgtgctcgtctctggaggcgaagcatcgcgaggttgtctcctctttgcagaagaagattcaggaggcacagcagaaagaagaggctcagctccagaagtgtctgggccaggtcgagcatcgcgtgcatcagaagtcataccacgttgccgggtatgagcacgagcttagttccctcctgcgggaaaaacgccaggaggttgagggtgagcacgagcgacgccttgataaaatgaaagaggaacaccagcaggtgatggccaaggcgcgcgagcagtatgaggcagaggaacgcaaacaacgcgcagagttactcggccacctcacgggggaactggaaagacttcagcgtgcacacgaacgagaactcgagaccgtgaggcaggaacagcacaaaagacttgaagatctaagacgcaggcatagagagcaagaacgcaaactgcaagacttggaattggacttggaaactcgagcaaaagacgtgaaagctcggttggccctactcgaagtccaggtgcgagatctccaggaatcgctgacatcggagtcttag

SEQ ID NO: 15502 - DNA, 1053 bp, synthetic construct
  source 1..1053: mol_type = other DNA; note = Synthetic coding sequence
atgattcggggctttgaggccccgatggccgaaaacccacctccacctccacctcccgtgatcttttgccacgacagtcctaagagggttctggtgtcagtgatccgaaccactcccattaagccaacttgtgggggagggggagagcctgaaccaccccctccgttaatccctaccagtccagggttcagcgattttatggtttatccatggagatggggggagaatgcgcacaacgtgactctgtctccgggcgctgccggagcggctgcttcagctgctctgccggctgctgctgccgcggagcatagtgggttacgggggcgcggagcccccccgccggccgccagtgcgtccgctgcggcctccggaggcgaggatgaggaggaggccagctcacctgattctggccacctaaaagatgggatccgcaggggtaggccaagggccgacaccgtacgcgatcttattaacgagggagagcacagctcttcccggattaggtgtaacatctgcaacagagtgttcccaagggagaagtccctgcaggcccacaagaggacacacaccggcgagagaccctacctctgtgactacccggactgcggcaaggcttttgttcagtccggacagcttaaaactcatcagcggctgcataccggagaaaaaccattcgtttgttcagaaaatggatgcttatccagattcacccacgctaacaggcattgtcccaaacacccctatgccagactgaaacgcgaagagcctactgataccctgtcaaaacatcaggcggcagacaataaggcagcagccgagtggctggcaagatactgggagatgagagaacaaagaacccccacactgaagggaaagctagttcagaaagcagatcaagagcaacaggatcctctggagtacctgcagagcgatgaagaggacgatgaaaaacggggagcgcaacgcaggctgcaggaacagcgggaaagactccacggcgcgctcgctctgattgaactggctaacttgacgggcgccccgctcagacagtag

SEQ ID NO: 15503 - DNA, 1137 bp, synthetic construct
  source 1..1137: mol_type = other DNA; note = Synthetic coding sequence
atgaacatgatctggcgaaactcaatcagctgtcttagactgggtaaagtgccgcatagataccagtcgggataccacccagtcgccccactgggatcaagaattctcactgatccagccaaggtattcgaacacaacatgtgggaccatatgcagtggtctaaagaggaggaggccgctgcaaggaagaaggttaaggagaacagtgccgtgagagtcctattggaggagcaagtaaaatatgagagggaagctagcaagtattgggacacattctacaaaatccacaaaaacaaattctttaaagaccgcaattggcttctgagagagtttcccgagatcctcccagtcgatcaaaagccggaagagaaagctagagagtcctcctgggatcatgtgaaaacatcagccaccaatcgattctcacggatgcactgtccaacagtgcccgatgagaagaaccattatgagaaatcgagcggttcctcagagggacagtctaagacagagtccgatttttctaaccttgattctgaaaaacacaagaagggacccatggagacgggtttgtttccaggaagcaacgccacgtttcgcattctggaggttggctgtggcgccggtaactctgtgtttcccatcctgaataccctggaaaattccccagagtcttttctctactgttgtgacttcgcaagcggtgctgttgagttggtaaagtctcattcatcttaccgggcaacccagtgtttcgccttcgtgcatgatgtttgtgatgacggcttaccttaccccttccctgacggcatcctggacgttattcttctggtctttgttctgtcaagcatacaccccgaccgtatgcagggcgtcgtgaacaggttgagcaagcttctgaaacctggtggcatgcttctgttccgggactacggccgctacgataaaacccagctgaggttcaaaaaggggcactgtttatcggagaatttctacgtgcgcggggacggaactagagcatacttttttacaaaaggagaagtgcactcaatgttctgtaaagcgagtttggatgagaaacaaaacctggtggaccgaagactccaggtgaatagaaagaaacaagttaaaatgcattag

SEQ ID NO: 15504 - DNA, 1797 bp, synthetic construct
  source 1..1797: mol_type = other DNA; note = Synthetic coding sequence
atggggctacgggcctcaaggcctagtaagctgacatggaagaagtgggctacaaccgccgcatccaacagctgttccaggagcgtgtcctcctgtaggcgctgtactggaggccgtctgatgaaggagccctggcgcaggccttcctctagtatttgttacactagtcggtcttcaaccattaaattctcttctaataagtttaagactctttccgtcctcctgagtcatctgcatctcttcaggcttcacgtgaagatttctcagccatcattgcctattagctcccggggcgctgcctcttccagtcagttccaaggcctgcccagcaggagtgccattttccagcagcagcctgaaaattgtagctctcccccgaacgttgccctcacttgcttgggcatgcagcaacccgcgcagtctcaacaagtgaccatccaggttcaagaacctgttgacatgctgagtaatatgcctggcaccgccgctggtagctcaggtcgggggatttcaatctcccctagtgcaggccagatgcagatgcagcaccggaccaatctgatggccacgttgagttacggacaccgccccctctccaagcaactgtccgcagacagcgccgaggcacatagtgcgcaccaacaaccgccgcactacactactagtgcactgcagcaggccctgctttcaccaacaccgccggactacaccagacatcagcaggtcccacacatcctgcagggtttgctctctccaagacacagcctgacgggccattcggacatccgtttgccccctaccgagttcgcccaattgataaaaaggcagcagcagcagagacagcagcagcagcaacagcagcaacagcaggaataccaggagctgttcagacacatgaaccagggggacgccggctcactggccccttctttggggggccagtccatgaccgagcggcaggctctgtcataccaaaatgcagattcttaccaccaccatacatctccccaacatctgctgcagatcagagcgcaggaatgcgtgagccaggcgtccagtccgactccgccacacgggtatgcccaccagcctgctctcatgcatagcgagagcatggaagaagattgctcgtgtgagggtgccaaggacgggtttcaagactcaaaatcgtccagcaccctgacgaagggatgtcacgactcacctctcttgctgagcaccggcggaccaggtgaccctgaatccctgcttggcacggtgtctcacgcacaggagctgggaatccatccatatggtcaccagcctacggctgccttcagcaagaataaggtaccaagtagggagcccgttatcggaaattgcatggatcggtcctcccctggccaggccgtagagctgccagatcacaatggcctgggataccccgcacgcccatccgtccatgaacatcatcggcccagggctctccaaaggcatcataccattcagaactctgatgacgcctatgtacagctcgacaacctgcccggcatgtccttggtggccggcaaagcactctcatccgctcgaatgtccgacgctgtcctttcccagtcgagcctgatgggcagtcagcagtttcaagatggagagaatgaggaatgcggggcttccctaggagggcatgagcatccggacctctccgatggttcccagcatctgaactcaagttgttacccaagcacctgcatcaccgacatcctgctgtcatataaacaccccgaagtgtcattttccatggaacaggccggagtgtag

SEQ ID NO: 15505 - DNA, 3966 bp, synthetic construct
  source 1..3966: mol_type = other DNA; note = Synthetic coding sequence
atggcagccgctgccgcctcaggtgccggcggagcggccggcgcaggtaccgggggagctggcccagcaggaagactgttgccaccgccagcccctggctctccagcagcccccgcggcagtgagcccagcggccggacagcctcgaccacctgctccagcctcaagaggccctatgcccgcaagaatcggctattacgagattgacagaaccatcggcaagggaaactttgcagttgtaaaacgcgcaacccatttggtgaccaaggcaaaagtcgctataaagattatcgacaagacgcaattagatgaggagaatcttaagaagatcttccgggaagttcagataatgaaaatgctctgtcacccacatatcatccgcttgtaccaggttatggaaaccgagcgtatgatctatttagtgaccgaatatgcaagtggaggagagatatttgatcacctagtcgcccacggaaggatggcggagaaggaggctcggagaaagttcaagcagatagttacagccgtttatttttgccattgcaggaacatcgtgcaccgcgacctgaaggcggagaacctcttacttgacgccaatttaaacattaaaattgccgattttgggttttctaacctttttaccccaggtcaattgttaaaaacgtggtgcggcagccctccctatgccgctccagaactattcgagggcaaagaatatgatggccccaaagtggatatttggagcctgggtgtcgtcctttatgtactcgtgtgtggagccctacctttcgatgggtccacactacagaacctgagagcccgcgtgctctccggcaagtttagaatccctttctttatgagcactgaatgcgaacaccttatacgacacatgcttgtcttggatcctaacaaaaggctgtctatggaacagatttgcaaacacaagtggatgaagttgggcgacgctgaccccaactttgacagactcattgcggaatgccagcaactgaaggaagagcgccaggtagaccccctaaatgaggatgttctcctggccatggaggatatggggttggataaagaacagacactgcagagcctcagaagcgacgcgtacgatcactattcggccatttactctctgttgtgcgatagacataaacgccacaagaccctgaggctgggagccctccctagcatgcccagagccctggcttttcaggcccccgtcaacatccaagcagaacaggcgggtactgcgatgaacataagcgtgcctcaggtccagctgataaaccctgagaaccaaattgttgagcctgacgggaccctgaatctggattctgacgaaggtgaagagccaagccctgaggcactggtccggtatctgagcatgagaagacacaccgtgggagtcgccgacccacggacagaagtgatggaggatctacagaagttactccccggcttccccggagtgaacccccaagcccccttcttgcaggttgcccccaatgtcaatttcatgcacaacctgttgccaatgcagaacttgcagcccacaggtcagctggaatacaaggagcagtcattgctgcagccaccgactcttcagcttcttaatggcatgggaccactggggcggcgggcctcggatggcggggcaaacatccagctccatgcacagcagctcctgaaaaggcctcgcggaccttctccactcgttaccatgactccggcggtgccagctgtgacacccgttgatgaggagtcatcagacggcgaacccgaccaggaggccgttcagtcctctacctataaggatagcaacactctgcatttgccgacggaacggttctccccagtgcgacgctttagcgacggggctgcttccatacaggccttcaaggcacacctggagaagatggggaacaactcatcaattaaacagctgcagcaagaatgtgagcagctgcagaagatgtacggtgggcaaatagacgaacgcactttggagaaaacacagcagcagcacatgttgtaccagcaggagcaacaccaccagatactccagcagcaaatccaggatagcatctgtcccccgcagccctctcctccactgcaggctgcctgtgagaaccagcctgccctgttgacgcatcagctccagcggctcagaatccagccatcttcccctccacccaaccaccccaataaccaccttttccgccagccaagcaactctcccccgcccatgagcagtgccatgatccagccacacggggccgcctcaagctcccaattccaaggactgccaagcaggtctgcaatcttccagcagcagcctgaaaactgctcctctcctcccaatgtggccttgacgtgcttgggtatgcagcaaccagcgcagagccagcaagtcactatccaagtacaagaacccgtggacatgttgtcaaatatgccgggaaccgccgccgggagtagtggccgcgggatctcaatttcaccctccgccggacagatgcaaatgcagcacagaaccaatcttatggcaacactttcctacggacatcggccccttagcaaacaactgagcgcagattccgccgaagctcattcactgaacgtaaacagattcagtcctgcaaactatgaccaggcacacctgcaccctcatctgttctctgaccagtcgagaggaagcccctcatcctactcccctagtacaggtgtcggtttcagccccacacaggccctcaaggtgcctcccctggaccaattccccactttcccacccagcgcacaccaacagcctccacactatactaccagtgctctgcagcaggccctcctcagcccgaccccaccagattataccaggcaccagcaagtcccacatattctgcagggacttctctccccacgccatagccttacaggacacagtgatattcgacttcccccaacagaatttgcccagctaatcaagcggcagcagcaacagcgccagcaacagcaacagcagcagcagcagcaggaataccaggaactgtttaggcatatgaaccagggcgacgccggctcactcgcgccatctctgggaggacagtcaatgactgagcggcaggcactctcctaccagaacgcggactcctaccaccatcataccagcccacagcacttgttgcagatccgtgcccaagagtgcgtgtcccaggcctcatctcccacacccccacacgggtatgctcatcagccagcgttaatgcactctgaatccatggaggaagactgcagctgtgaaggagccaaggatggattccaagacagcaagagctccagcacattaaccaagggttgtcacgactctcccctgcttttgagcaccggcgggccaggagatcctgagagccttctcggtacagtgtctcacgcacaggagcttggcatacacccctacggccatcagccaacggccgccttttctaagaacaaagtgccgagccgcgagccagtaatcgggaactgcatggacagaagttctccaggccaggctgtcgagctgcctgaccacaatggcctaggctacccagcaaggccttcagtgcatgagcatcataggcctcgagcactccagagacatcacaccatccaaaacagcgatgatgcgtacgtgcagctggataatctcccaggcatgtccctagtcgccgggaaagccctctctagcgctagaatgagcgatgctgttctgtcacaatcaagtctgatgggctcgcagcagttccaggacggcgaaaatgaggagtgcggcgccagcctgggtggacacgagcaccccgacctcagtgacgggtctcagcatctaaactcgagttgctatccgagcacatgcattaccgatattttacttagctacaagcacccagaagtaagcttctcaatggaacaagccggtgtttag

SEQ ID NO: 15506 - DNA, 1569 bp, synthetic construct
  source 1..1569: mol_type = other DNA; note = Synthetic coding sequence
atgccgagaaagaaggcagcggctgccgcctgggaagagccatcctctgggaacggcaccgctagggcaggccccagaaagagagggggaccagccggccggaagagagagcggcctgagaggtgttcctcatcatcaggcggcgggtcgagcggtgatgaggacgggctggagcttgacggagcaccaggtggaggtaagcgggctgctcgccctgctaccgctgggaaggccgggggggccgcagtagtgattaccgagcctgaacatactaaagagagagtgaaattggaaggaagcaaatgtaagggccaactcctaatcttcggagcaacaaactgggacctcattggccggaaggaagtccccaagcaacaggctgcctatcggaacttgggccagaatctctgggggccgcaccggtacgggtgcttagcaggcgtaagagtgcgtactgtagtgagtggcagttgcgccgcgcattctcttctgataactacagaaggcaagttgtggagctggggtaggaacgaaaaaggccagctcggccatggagacaccaaacgagtggaggcccctcgcctaatagaagggctttcccatgaggtgatagtgagtgcagcttgcgggcgaaatcacacactggccctgacagagacggggagtgttttcgccttcggtgagaataagatgggacaactcggactaggaaaccagactgatgcagtgccaagtccagcccagatcatgtacaacggccagcctatcaccaagatggcttgcggagctgagtttagcatgatcatggactgtaagggcaatttgtactcattcgggtgccccgaatatggacagctcggccataattccgatggtaagttcatcgcacgcgcccagcgtattgagtatgactgcgaactcgtaccgaggcgtgtggccatctttatcgagaagacaaaggatggtcagatattaccagtcccaaacgtggtcgtccgggatgtcgcttgtggcgccaatcacaccttggtgctagacagccagaaacgggtattttcttgggggtttggcggttacgggcgccttgggcacgccgagcaaaaggacgagatggttccccgattggtaaaactattcgacttcccagggagaggagcgagccagatttatgctggctacacctgttcttttgccgtgtctgaggtcggaggcctatttttttggggggcaacaaatacatctagagaaagcaccatgtaccctaaagcagtgcaggatctgtgtggctggaggattaggtcactggcgtgcggtaagagtagcattattgtggccgccgacgagtcaaccatcagttgggggccaagccccacctttggtgagctgggctatggtgaccacaaacccaaatctagtactgctgctcaggaagtaaaaacccttgatggcatcttctcagagcaggtcgccatggggtattcccatagccttgttatcgccagagacgaaagtgaaacagagaaagagaaaattaaaaagcttcccgagtataatccacgcactttatag

SEQ ID NO: 15507 - DNA, 1569 bp, synthetic construct
  source 1..1569: mol_type = other DNA; note = Synthetic coding sequence
atgcctcgaaagaaagccgcagccgccgcttgggaggagccctcctctggaaacgggacagcgcgcgctggtccgagaaagcggggtgggcccgcaggacgaaagcgcgagcgcccagaaagatgcagctcctcgagcggcggaggcagctctggagatgaagatggcttggaactggatggagcacccggtggcggaaagcgagccgcaagaccagccactgcaggcaaagccggcggcgccgctgttgtgattacagaaccagaacacaccaaggagcgtgtgaaattggaagggagcaaatgtaagggccaactgctcatctttggcgcaactaattgggacctaatagggagaaaggaggtgccaaagcagcaggccgcctacaggaaccttggacagaacctatggggcccccaccgctatggatgcctagccggcgtcagagtgaggactgtcgtgtcagggtcttgcgccgcccacagtctgctgatcacaaccgaaggcaagctgtggagctggggccgaaacgagaaagggcaactcggccatggggatacaaaaagggttgaggccccccggctgattgaggggttatctcatgaagtgattgtctcggccgcttgcggtcgaaaccacaccctggccttgaccgagaccgggtccgttttcgcttttggtgaaaacaagatgggccagctgggtctcgggaatcagacagatgcagtgccctctcccgctcaaataatgtataacggccagccaatcacgaaaatggcatgtggggccgaattttcaatgattatggactgtaagggcaacctctacagtttcgggtgccctgagtatggtcagttaggccataacagcgatggaaagtttatcgctcgagcccagaggatagaatatgactgtgagctggtcccccggcgtgtcgccatcttcattgagaaaaccaaagacgggcagattctgcccgtgccaaatgtagtggttcgcgacgtcgcttgcggcgccaaccacaccctcgtgcttgactcccaaaaaagggtgttctcctgggggttcggggggtatggccggctggggcatgcagagcagaaagatgagatggtgccacgactggtcaaactgttcgatttccccggcaggggagcatcccagatttacgccggatacacgtgcagtttcgccgtgtccgaggtcggtggcctcttcttttggggcgctacgaatacatcccgggaatcgacaatgtaccccaaggctgtacaggatctgtgcggctggaggatcagatcgctggcctgtgggaagtcatcaatcattgtcgctgctgacgagagcacgatatcgtgggggccatcgccaacttttggagaactgggatacggggaccacaagcccaaatctagtaccgccgcccaagaagtgaagaccttggatggtatcttctctgagcaggtagccatggggtacagtcatagtcttgtcatagctagggatgagtccgaaaccgaaaaagaaaaaatcaaaaaattgccagagtataatcctcgcacactctag

SEQ ID NO: 15508 - DNA, 552 bp, synthetic construct
  source 1..552: mol_type = other DNA; note = Synthetic coding sequence
atgacagatcagacctactgcgacagactcgtacaggacacccccttcctcactggtcatggacgcctaagcgagcaacaagtggatagaatcatccttcaactgaatagatactatcctcaaatcttaacgaataaggaggcggagaagtttcggaatcctaaggcaagtctcagagtccgactgtgcgaccttttgtcccacctgcaacgaagtggcgagagagactgccaagagttttatcgggctctgtacatccacgcccagcctctgcactcaaggctcccctcccggcacgcgttgcaaaactctgactgcactgaacttgattccggcagtcagagtggcgagttgtctaataggggacctatgtcatttcttgccggcctgggtctggctgtgggtcttgcattattgctttactgttaccctcccgaccctaaggggctccccggaacccggcgcgtactaggttttagcccagttattatcgacaggcacgtttcacggtatttactcgcgtttctcgccgacgatctgggcggcctgtag

SEQ ID NO: 15509 - DNA, 492 bp, synthetic construct
  source 1..492: mol_type = other DNA; note = Synthetic coding sequence
atgctggatctcctcgacatagagggactctaccctctgtacaatcgcgtggagaggtatcttgaagagttccctgaggagaggaaaaccctccagatcgatggaccttatgacgaagctttctatcaaaaacttctggacctgtccacggaagatgatgggacagttgcattcgctctgactaaagtccaacaatatcgggtggccatgactgcaaaagattgctctataatgatagcgctttcaccgtgccttcaggatgctagttcggaccagcgaccagtcgtgcccagttcgcgctcccgttttgccttttctgtgagcgtgctggacctagacctaaaaccctatgagagcatcccgcatcagtacaagctcgatggtaagattgtcaactactacagcaaaactgtgcgcgctaaggataacgctgtgatgtccacaaggtttaaagagtccgaagattgtactctggtcttacacaaggtttag

SEQ ID NO: 15510 - DNA, 777 bp, synthetic construct
  source 1..777: mol_type = other DNA; note = Synthetic coding sequence
atggcacgcccacctgttccaggatccgtcgtggttcctaattggcacgagtccgcagagggtaaagaatatttagcatgtatcctgcggaagaaccgacgacgggtgttcggcctcctcgagagaccggtgctgttgcctcccgtaagcatagacaccgccagttacaagatcttcgtgtcaggcaagtccggcgtaggaaagacggcattagtagccaaactggctggccttgaggtgcccgtggtgcatcacgagaccacagggatccagacaacagtcgtgttctggcctgcgaaactccaggcctccagtagggtggtgatgttccggttcgagttttgggattgcggggaaagcgcactaaagaagttcgatcacatgctccttgcatgcatggaaaacactgacgcctttctgtttctcttttcttttactgaccgggcgagtttcgaggacttgccaggacagctcgctaggattgctggtgaagctcccggtgtggtgaggatggtgatcgggagtaagtttgaccagtacatgcataccgacgtgcctgaacgggatctaacagctttccggcaagcgtgggaactacccctcctcagggtgaaatcagtcccgggacgcaggctggcggatggccggaccctggacggcagggctgggctcgcggatgtggcccacatcctcaacggcctggcagagcaattgtggcaccaggaccaggtggctgctggattactgcctaacccccctgaatcagcaccggagtag

SEQ ID NO: 15511 - DNA, 333 bp, synthetic construct
  source 1..333: mol_type = other DNA; note = Synthetic coding sequence
atggccgataaggtactgaaggagaaacgcaagcagttcatcaggtccgtgggcgaaggtactattaacgggctcctcggagaactgctggaaacacgggtcttatcccaagaagagatagagatcgtgaagtgcgagaacgcaacagtgatggataaggccagagcactgttggattcagtcatcagaaagggggctccggcttgccagatatgcattacatatatctgtgaggaagacagtcatctggcaggaactcttggactgtcagctggcccaacttcgggtaatcacctcacgacacaagacagccagatcgtcctgccttcctag

SEQ ID NO: 15512 - DNA, 924 bp, synthetic construct
  source 1..924: mol_type = other DNA; note = Synthetic coding sequence
atggagcccagctctctcgaactacccgccgacactgtccagcggattgccgccgagctcaaatgtcatcctactgacgagcgggtcgcccttcatcttgatgaggaggacaaactacgccactttagagaatgtttttatatcccgaagattcaggatcttcccccagtggacttgagtttggtcaataaagatgagaatgctatctattttctcggcaattcgctaggactgcagccaaagatggtgaagacctacctcgaggaagagttagacaagtgggcaaagattgccgcctacgggcacgaggttggaaaacgcccctggatcaccggagatgaatcaattgtggggctgatgaaggacattgtgggcgcaaatgaaaaagagatcgccctgatgaatgcccttacagtcaatctccacctgctgatgctgtcatttttcaagcccacgcccaaacgctataaaatccttctggaagctaaggccttcccgagtgaccactacgcaattgagtcccagctgcagctgcatggattgaatatcgaagaatctatgcggatgataaagcctcgagaaggagaggagacgcttcggattgaggacattctggaagtaatcgagaaggagggcgactccatcgcagtcatcttgttttcaggcgtccacttctacacaggacaacacttcaatattcctgctattactaaggcaggtcaagccaaaggatgctacgtcggttttgatctggcccacgctgtcggaaacgtggaactctacctccatgactggggagtggactttgcatgctggtgctcgtacaaatatttgaacgcaggtgctggaggaattgctggcgcttttatccacgaaaagcatgcccacaccatcaaaccggcccgctcagaatttttcaactag

SEQ ID NO: 15513 - DNA, 3060 bp, synthetic construct
  source 1..3060: mol_type = other DNA; note = Synthetic coding sequence
atggaaccaggcgaagttaaagatagaattttggagaatatctcactctcggtgaagaagttgcagtcatacttcgctgcttgcgaggatgagatccctgctatcagaaaccatgataaagttctgcagcgcctgtgtgagcatctggaccatgctcttctatatggcctgcaggacctgtctagcggctactgggttctcgtcgtgcacttcacccgccgagaggcaatcaagcagattgaggtcctgcagcatgttgcaaccaatcttggccgtagtagggcctggctgtatctcgccctaaacgaaaattcactcgagtcctacttgcgcctttttcaggaaaacttgggactgctacacaagtattatgtaaagaacgccctggtgtgctcacatgaccatctcaccctgttcttgactctggtatccggattggaatttatccgctttgaactcgatctggacgctccgtatttagacctggccccttatatgcctgactattataaaccacaatacttgctcgattttgaggaccggttgcctagctccgtgcatgggagtgatagcttgtctctgaacagttttaatagcgtgacttccaccaatctcgagtgggatgacagtgccatcgctcctagctccgaggactacgatttcggcgatgtctttcctgctgtgccttctgtgccgtccaccgattgggaagatggtgaccttaccgatacagtttcgggtccaaggtccaccgctagcgatctgacttcctctaaggcatcaacccgctcacccacccagcgtcaaaatccgtttaacgaggagccggctgaaaccgtatcttcatccgatactacacccgtgcacaccacctctcaggagaaagaagaagcacaggcactggatccccctgacgcctgtaccgaactggaggttattcgggtgacaaaaaaaaagaagattggtaagaagaagaagagtagatctgatgaagaagcttctcctctccacccagcatgttcccaaaaaaagtgtgctaagcagggggatggggactctagaaacggctccccgtcccttggtagagactcacctgacacgatgctggcctcacctcaggaagaaggagaaggaccctctagcacgaccgagtccagtgaaagatccgaaccaggattgctcatccctgagatgaaggataccagtatggaaagacttggacagcctctgagcaaggtcattgaccagctaaacggtcagctggatcctagcacatggtgctcccgggcggagcctcccgaccaatcgtttagaacgggatcaccaggagacgctccggaaaggccgccactgtgcgatttttcagaggggctgagcgcccctatggacttctatagattcactgtagagtcccctagtaccgtgacaagcggcggaggccaccacgacccagccggactcggacagcccctgcatgtgccgagctcacctgaggccgcaggccaggaagaagaaggcggaggaggagagggccaaacaccgagaccgttggaggatacaacacgggaggctcaagagctggaggctcagctgagcctggtccgcgaagggccagtctccgaaccggagccaggtacacaggaggtcttatgtcaacttaaacgggatcagcctagtccatgcttgtcttcggccgaagattccggcgtggatgaaggacaaggaagtcctagtgaaatggttcactcctccgaatttcgcgtggataacaatcacttgttactgcttatgatccacgtgtttagagagaatgaagaacagttgttcaagatgatccgcatgtccacaggccacatggagggcaacctgcaactgctgtatgtgttactcaccgactgctatgtttaccttctgcggaaaggagctaccgagaagccttatttggtggaggaggcagtctcctacaatgaactggactacgtaagcgtgggcctcgatcagcagacagtaaaactggtgtgcacgaaccgcagaaagcaattcctcctggacaccgccgatgtagcactagccgaatttttcctggcctccctcaaatctgcaatgattaaggggtgcagagagccgccctacccatcgatactcacagacgccacgatggagaagttggccctggccaagtttgtggcccaagagtctaaatgcgaggctagcgcagtcacagtccgcttttatgggcttgtgcattgggaagatcccacggacgaatctttgggtcccactccctgtcactgctcccctccagagggcacaatcacaaaggaggggatgttacattacaaggcagggacttcatatcttgggaaggagcactggaaaacatgtttcgtagtgttgtctaacggaattctctatcagtatcctgatcgtacagatgtgatacccctgctcagcgtgaacatgggtggtgagcagtgtggcggctgccgccgagctaacacaactgaccgaccacatgcctttcaagtaatcttgagtgatcggccatgcctggaactttctgccgagtccgaggcggaaatggcggaatggatgcaacatctgtgccaggccgtgagtaagggcgtgatcccccagggcgttgctcccagcccatgtattccctgctgcttggttctgaccgacgatcgtttgtttacctgccacgaggactgtcaaaccagcttcttccggagcctcggtactgccaaactaggggacatcagcgcagtgtctacagaaccaggtaaggagtactgcgtgctcgagtttagtcaggactcccagcagctcctgcctccctgggtgatctacttgtcatgcacttcagagctggatagactgctgagcgcgttgaactccggctggaagacaatctatcaagtggacctgcctcatacggcgattcaagaagcctcaaacaagaaaaagtttgaggacgctctcagtctcattcatagcgcttggcagagatctgatagcctttgtaggggacgtgctagtagggacccttggtgctag

SEQ ID NO: 15514 - DNA, 318 bp, synthetic construct
  source 1..318: mol_type = other DNA; note = Synthetic coding sequence
atgaaaccttttgaggacgcactgaaaaaccaacccctggggccagtcctgtccaaagcagctagtgtggaatgcatctcacccgtgagcccaagagcccctgacgcgaaaatgctcgaagaactgcaggctgagacatggtatcagggagaaatgtcccgtaaggaggctgaaggcctgttggagaaggacggggactttctggtgcggaaatctacaacaaatcccgggagtttcgtgctcacaggaatgcacaatggccaggcgaaacatctcttgctagttgatcccgaggggaccaggtccaatagctattag

SEQ ID NO: 15515 - DNA, 318 bp, synthetic construct
  source 1..318: mol_type = other DNA; note = Synthetic coding sequence
atgaagccttttgaggatgccctgaagaaccagccattgggtcccgtgttgtctaaggccgctagcgtagaatgtattagtcctgtgtccccacgtgcaccggacgctaaaatgctcgaagagctgcaggccgaaacctggtatcaaggcgaaatgagtcggaaggaggctgagggcctactagagaaagatggcgacttccttgttaggaaatccaccactaatccagggagtttcgtcttaactggcatgcacaacggccaagccaaacacttgttgctggtcgatccagaaggcaccagatccaattcatattag

SEQ ID NO: 15516 - DNA, 1785 bp, synthetic construct
  source 1..1785: mol_type = other DNA; note = Synthetic coding sequence
atgttacctcgaactaaatacaatcggttccggaacgattccgtgaccagtgtcgacgatctgctgcactcactctctgtgtccgggggcggtgggaaggtgtctgctgctagggctactcccgccgcagcaccttacttagtttccggggaggcactgaggaaggcccccgatgatggccctggctcactcgggcatctcctccacaaagtgtcacatctcaagctgtcttccagtggcttgagaggcctgtcttccgcggctcgggagagggctggtgctagactgtcaggttcctgctccgcccccagcctggctgctccagacgggagcgcacccagtgctcctcgcgctcctgctatgtcggccgctaggaagggcagacccggggacgagccactcccaaggcctccacggggtgcacctcacgcatccgaccaggttcttggtcccggcgtgacatatgtggtgaagtatctgggttgtatcgaagttctccggagcatgaggtctctcgatttctctactaggacccagattaccagagaagcgatctctcgcgtttgcgaggccgtgcccggtgccaagggcgcttttaagaaacgtaagccaccctccaagatgcttagctctatattaggtaagagcaacctccagtttgctgggatgagtattagtttaactatttccactgcttcacttaatttgcgcaccccggattctaagcaaatcattgcgaaccaccacatgagatccatcagttttgcaagcggtggcgatccagacaccacagactacgtcgcatatgtcgccaaagacccagtaaacaggcgggcctgtcacattttagaatgttgtgacggcttggcacaagacgtcatcggaagtatcggtcaagcctttgaactgaggttcaaacaatatcttcagtgccctactaagatcccagctttacacgacaggatgcagtccctcgatgaaccctggacagaggaggaaggagacggctctgaccacccatattacaactccatcccctctaagatgccccccccgggaggattcctggacacaaggcttaagccaagaccccacgcacctgatactgcgcagtttgcgggtaaagaacaaacctactaccagggacgccatctcggggatacctttggtgaggattggcagcagaccccgcttagacagggcagctccgatatctacagtactcccgaaggcaaattgcacgtcgcccccaccggtgaggcaccgacttacgtgaacacgcaacaaatacccccacaggcctggcctgcggccgtttcatctgctgagtcctcaccccgtaaggacctcttcgacatgaaaccatttgaagacgctctgaaaaaccagcccctggggcctgtgttaagcaaggctgcctctgtggaatgcatctcacctgtgtcccctcgagcccccgatgctaaaatgttggaagaacttcaagccgagacatggtaccaaggcgaaatgtcccggaaggaagcagagggcctgttggaaaaggacggcgacttcctggtaagaaaatccactactaaccccggatctttcgtactgacgggtatgcacaatggccaggcaaaacacttactgcttgtcgaccccgaggggaccatccggactaaagatagggtcttcgacagcatctcccatcttattaaccaccatctcgaatcaagtttacctattgtgagcgccggcagtgaactgtgtctccagcagccagtggaacgtaagcaatag

SEQ ID NO: 15517 - DNA, 693 bp, synthetic construct
  source 1..693: mol_type = other DNA; note = Synthetic coding sequence
atgaataccctgatggacgttcttcgccatcggcccggctgggttgaggtaaaggacgaaggtgaatgggacttttactggtgcgacgtgtcctggctccgcgagaacttcgatcacacctatatggatgagcatgtgcgaattagccactttagaaaccactatgagctgactcgcaaaaattacatggtgaaaaacctcaagcggtttaggaagcagctggagagggaggctggcaagctggaggcggccaaatgcgacttttttccaaagacatttgagatgccgtgcgagtaccacctctttgtggaggaattcagaaagaatccggggatcacctggataatgaaacctgacacaaggtcaagtgacgatcagaaagacgacataccagtcgagaactatgtagctcaaagatacatcgagaatccatatctcataggagggcggaaatttgacctgagagtatacgtgttggtgatgtcttatataccactgcgcgcctggctgtacagagacggcttcgctcggttctccaacacccgttttacattgaacagtatagatgatcagtatgtacatcttacaaacgtggcagttcagaaaacctcacccgactaccatccaaaaaaagtcgccccaggcggtcagtgcgtgccaattaccgatagccaacagccgggtcggctctag

SEQ ID NO: 15518 - DNA, 1068 bp, synthetic construct
  source 1..1068: mol_type = other DNA; note = Synthetic coding sequence
atgaacacactcatggacgtattgcgacataggcccggatgggtcgaggtaaaagatgagggcgagtgggatttctattggtgcgacgtatcttggctgcgggagaattttgatcatacgtacatggacgaacatgtgcggatctcacatttccggaatcattatgaactcacccgcaaaaattacatggtgaaaaacctgaaaaggtttcggaagcagctggagagagaagccggcaagctcgaagcagcgaagtgcgacttcttccctaaaacttttgagatgccttgcgaatatcacctgttcgtcgaggaattccggaagaaccctgggattacctggataatgaagcccgataccagatcaagtgacgaccaaaaagacgacatcccggtggagaactacgtggctcaacgttacatcgaaaatccttacttaatcgggggcagaaagtttgatcttagggtttacgtgctagtgatgtcctacataccgttgcgcgcatggttatatagagacggtttcgcccgattcagtaacacccggtttaccctcaattcaatcgacgatcagtatgtgcacttaaccaatgtcgccgtgcaaaagacctccccagattaccaccctaagaaaggatgcaagtggacactgcagcgctttaggcagtatctcgcatcgaaacatggcccggaagccgttgaaaccctgttccgagacatcgacaatattttcgtcaaaagtctacagtccgtccagaaggtcattatatctgataagcactgcttcgagctgtatgggtatgacattctcattgaccaggaccttaaaccttggctacttgaggttaatgctagtccaagcctgacagcttcctctcaagaggattatgaactaaaaacctgcttgttggaagacaccttgcacgttgtggatatggaagcaaggcttcgacagagatccgaggagacaaccgaggcagccctgctgttgcctagttcatctgaggagagctttcagctgatcccctcctgtcaggaagaaatatccctttcccgtccgtgcgtttag

SEQ ID NO: 15519 - DNA, 840 bp, synthetic construct
  source 1..840: mol_type = other DNA; note = Synthetic coding sequence
atgtctcgtcctaagaaccagaattacaagggacatggtctatctaaagggaaagagcgcgagcagcgggccagtattaggttcaagacaacgcttatgaatactctgatggatgtgctgcgccacagacctggctgggttgaggtgaaggacgaaggggagtgggatttctattggtgcgacgtcagttggctgagggaaaactttgaccacacctatatggacgaacatgtcagaatctcccactttcgcaaccactatgaactgactcggaaaaactacatggttaagaacctcaaacggttccggaagcagttggagcgggaggctgggaagttagaggctgccaagtgtgatttcttccctaagacttttgagatgccttgtgagtaccatttgttcgtcgaggagtttagaaaaaatccagggatcacctggatcatgaaacctgtcgcccgttcgcagggtaagggaatctttctcttccgccgccttaaggatatcgtcgactggcgcaaagacacacggtcctccgatgatcaaaaggacgacattcctgtggagaactacgtagcccagaggtatattgaaaacccttacctgataggtggccgaaaatttgacctgagggtttatgtcctagtgatgtccatgttcacctcccctacctggttgtgcaagaaacatctcccaacaactacacaaaggcgggcggcctccggccggtgctcggctagtggcagtacctggcgtcctaacacaggacctcgacagtggcggcacagttctggcacgtcaacaacatcattaagcaaggcctgccgtgtgtgcaggaggtag

SEQ ID NO: 15520 - DNA, 1116 bp, synthetic construct
  source 1..1116: mol_type = other DNA; note = Synthetic coding sequence
atgagcagaccaaagaatcagaactacaagggccacggtttatccaaagggaaggaaagggagcaacgggcctcaatccgctttaaaaccacgttaatgaatacactcatggacgtcctacggcaccgtcccggctgggtggaagttaaggacgagggcgagtgggacttttactggtgcgacgtaagctggctccgggaaaatcttgagagagaagctggaaagttggaggcagccaagtgtgacttcttccccaaaactttcgagatgccttgtgagtatcacctgttcgttgaagagtttcgcaagaatcctgggatcacgtggatcatgaaaccagtagccaggtcccaggggaagggcatcttcttattccgacgccttaaagatattgtggactggaggaaggacacccggagtagcgatgaccagaaggacgacattcctgttgagaattacgtggcccagcgctatattgagaatccctaccttatcggcggtagaaagtttgatctcagagtgtacgtgctggtgatgagctatatccctttgagagcgtggctgtaccgtgatggatttgctcgcttttcaaacacacggttcacccttaactctattgatgatcagtacgtccatctgactaatgtggccgttcagaagacgtcacccgattaccaccccaagaagttacatcccactgttggcccactttgtattcactcgccagaaaatggatcacttagtgtcacaccttggccatgggacgcccacatgggctgcaagtggacgctgcaaagattcagacagtatttagcgagcaagcatggtcccgaggcagttgaaacactttttagagacatcgataatatattcgtgaagagccttcagtccgtacaaaaggtgataatttcagataagcactgtttcgaactgtacggttacgacattctaatagaccaggacttaaaaccctggctgctggaggtgaatgcaagcccaagcctcacagcctctagtcaggaggattatgaactgaaaacctgcctactggaggatacactccatgtggtagatatggaggctagcttctctcccatcatccccgcggaagtgtag

SEQ ID NO: 15521 - DNA, 1320 bp, synthetic construct
  source 1..1320: mol_type = other DNA; note = Synthetic coding sequence
atggtcccttcccgagaagccctcttgggacccggtaccacggctatccggtgtccgaagaaactccaaaatcaaaactacaaggggcacggactgagcaagggtaaggagagggagcagcgggcctctatccggttcaaaacaaccctaatgaacaccctcatggacgtgctcagacatagaccaggctgggttgaggttaaggatgaaggcgagtgggacttttattggtgcgacgtgagttggttaagagagaacttcgaccatacttacatggatgagcacgtgaggattagccattttcgcaaccattatgagcttacgcgcaagaattacatggtgaaaaacctgaaacggtttcggaaacagttggaacgcgaagccggaaagctcgaggctgctaagtgcgattttttcccaaaaacattcgaaatgccatgcgagtaccacctgttcgtggaggaattccggaaaaatcctggcattacatggataatgaaacccgttgcacgttctcaagggaaaggtatctttttgttcaggcggttaaaggacatagttgattggcgcaaggatacccggtctagcgatgatcagaaagatgacataccggtcgaaaactacgtagcacaaaggtatattgaaaatccttatctgattggggggcgtaagttcgacctgcgggtctatgtgctggtcatgtcagtgttcgccgagtgtctcctgtggtccggacaccggcgacaggacgtgcacctcacaaatgtggcggtacagaagacttcacctgattatcaccctaagaagggatgcaaatggactctgcagcggtttcgccaatatctggcttctaaacacggacccgaggcagtcgaaaccctctttagagacatcgacaacattttcgtgaaatcccttcagtccgtgcaaaaagtcattatcagcgacaaacattgtttcgaactgtacgggtacgatattctgatcgaccaggatttaaagccatggttgctggaagtgaacgcttcaccaagcttgactgcctcatcacaggaggactacgaactgaagacttgtttgttagaagatactctccatgtggtggatatggaggcccggttgaccggacgggaaaagagagtgggagggttcgacttgatgtggaatgatggccccgtgtccagggaagagggcgctcctgatttgagcggcatgggtaattttgtgacaaacacacatctgggatgtgttaatgaccggaagaagcagttgcgacaactgttctgcagtctgcaggtgcagaaaaaagcgtctagttag

SEQ ID NO: 15522 - DNA, 501 bp, synthetic construct
  source 1..501: mol_type = other DNA; note = Synthetic coding sequence
atgaaagagatgttagctaaagatcttgaggaaagccagggtggcaagagcagtgaggtgctgtccgctacagaactgcgcgtgcagctggcacagaaagagcaggaattggctcgggccaaagaggcgctgcaggcaatgaaggcggaccggaaacggttgaaaggggaaaaaacggatctcgtcagccagatgcagcagctttacgccacccttgaatcccgcgaagagcagctacgcgatttcatcaggaactacgaacaacacagaaaggagtctgaggacgcagttaaagccctggcaaaagagaaagatctactggagcgggaaaagtgggaactgcggcggcaggcaaaggaggccaccgaccacgccacagcccttcgttctcagttggacctcaaggacaaccggatgaaggaactggaagcggaactggcgatggctaagcagtctttagctactcttactaaggacgtgccgaaacggcattccctctag

SEQ ID NO: 15523 - DNA, 2328 bp, synthetic construct
  source 1..2328: mol_type = other DNA; note = Synthetic coding sequence
atgatggaggataataagcagctcgcactcagaattgatggagccgtgcaatctgcctctcaggaggtgaccaatctgagggcagagctgacagccactaatcggaggttagccgaattgtctggcggaggcggtccaggacccggaccaggtgccgccgccagtgcctccgctgccggggactctgcggccactaatatggaaaatccacagttgggagctcaggtccttctgcgcgaagaggtgagtagactgcaggaggaggtgcacttattaaggcagatgaaggagatgctggctaaagatctggaagagagtcagggtggaaagtcctccgaagtgctcagcgctactgagctgagagtccagctcgcccagaaagagcaggaacttgcacgagcgaaagaagccctccaagctatgaaagctgatcgaaaaagactgaagggcgagaagacagatctggtctctcagatgcaacaactgtatgccacactggagtcccgcgaagaacaactaagagatttcatcagaaattatgagcagcaccgcaaggagtccgaagatgccgtaaaagcattagccaaggagaaagacctgctggagcgtgagaagtgggagctccgcaggcaggccaaagaggctacagaccatgcaacagcacttcgctctcaactggacctgaaggataacaggatgaaggagcttgaggctgaattggctatggcaaaacagagtctggcgaccctcactaaggacgtgcctaaaagacatagtctagcaatgcctggcgaaacggtgctgaatggtaaccaggaatgggtggttcaggccgacctacctctgactgcggccatccggcagtcacaacagacgttataccacagccatcctccacatccagccgacagacaagcggtcagagtgtctccttgccacagccggcaaccctctgtgataagcgatgctagcgccgccgagggggatagaagctccactccatctgacatcaattctcctaggcacaggacacactccctttgtaacggtgacagccctggtcccgtgcagaaaaatctgcataatcccatcgtgcagagcctggaagacctcgaggaccagaaacgtaagaaaaaaaaggaaaagatgggcttcgggtctataagccgggtttttgctcgaggcaaacagcggaagtcactggaccccggcctctttgatgatagcgactctcagtgtagtcctactcggcaatccctctctctgagtgagggcgaggagcagatggatcgcctccagcaggtggaactcgtgagaacaactcccatgagtcattggaaggcgggcaccgttcaggcatggctcgaagtcgtcatggcaatgcccatgtatgtgaaagcatgtactgaaaatgtgaagtctggtaaggtcttgctttcactatccgacgaggacctgcagttaggcctgggcgtgtgctccagcttgcatcggaggaaattaaggctggcaatcgaagattaccgggatgcagaagctgggcggagcctgagtaaagccgcggaactggaccatcactgggtggctaaggcttggctgaatgacattggcctgagtcagtactcccaagctttccaaaaccacctggtggatggaaggatgctcaatagcttaatgaagagagatctcgaaaaacacttgaatgtgagcaagaagtttcaccaggtctccatcctcctggggattgaactactgtaccaggtaaatttcagccgtgaggccctgcaggaaagacgggccaggtgcgagacacaaaatattgatcctgtcgtttggacaaatcaaagagtattgaaatgggtccgggacattgacctgaaagagtacgccgacaatttgacaaattctggcgtccacggtgccgtccttgtgcttgagccgacctttaacgccgaagccatggctaccgcattgggtattccatccggcaaacatatcctgcggcgacacttggctgaggaaatgagtgccgtcttccacccagccaactcaaccggcataagggaggccgaacgcttcggtacgcctccggggcgcgcctctagcgtaacccgagctgggaaggaagaaaattcttctggcttgaaatataaggctgggcgtttgccacttggaaaaattggtcggggattttccagcaaagacccagacttccacgatgattacggttccttacagaatgaggactgcggggatgatgatccacagtcacggctggagcagtgccgcctggaaggctataactcactggaagtcactaacgtgtag

SEQ ID NO: 15524 - DNA, 861 bp, synthetic construct
  source 1..861: mol_type = other DNA; note = Synthetic coding sequence
atgtactctcttgataggattttcgctggctttaggacacgctcccagatgcttctcgggcacatagaagagcaagacaaagtgctccactgtcaattcagcgataactcagatgatgaggagtccgagggccaggagaagtctggcacacgatgtaggtcacgcagttggatccagaagcctgactcagtgtgctcactagtagaactgagtgacacccaggacgagacccaaaaatcagacctggaaaacgaagacctgaaaatcgactgcttgcaagagtcgcaggagctgaatctccaaaaactgaaaaattcggaaagaatcctgacggaagcaaaacagaagatgcgcgagttgacgataaacatcaagatgaaggaggatttgatcaaggaattaatcaagactggaaatgatgctaaaagcgtctctaaacagtactcacttaaggtgacaaaactggagcatgacgcagaacaggcaaaagtagagctcatagaaactcaaaagcagctgcaagagctcgagaacaaggatctttcagatgtggcgatgaaggtgaagctgcagaaagagttccgcaagaagatggacgcagctaaactgagggttcaggttctgcagaaaaagcagcaagattccaagaagttggctagcctgagcatccagaatgaaaaaagggcaaacgagttagaacagtccgtagatcacatgaagtaccaaaaaattcagctccagcgcaagctgcgcgaggagaatgaaaaaagaaagcagctcgatgctgtgatcaagcgtgaccagcagaagattaaggttatcctcagctatatcccggctaaatacaatatgaaatgttag

SEQ ID NO: 15525 - DNA, 1662 bp, synthetic construct
  source 1..1662: mol_type = other DNA; note = Synthetic coding sequence
atgaacaagaacacctctaccgtggtttctcctagtctcctcgagaaagatcctgctttccagatgattacgatcgctaaggagacaggcttaggactgaaagtgttaggtggaatcaacagaaatgaagggcctctggtatatatccaggagattatccctggtggcgattgctacaaagatggcaggctcaaaccaggcgaccagctggtctcagtcaataaggagagcatgattggcgtcagctttgaagaggccaagagtataattaccggagcaaagcttcgactcgaaagcgcatgggaaattgcctttattagacagaagtccgataacatccaacccgagaacctgagttgtacatcactgattgaggcaagcggagaatacggtcctcaggcttccaccctctccctcttctcttcaccgccagaaattctgatccccaagacgtcttctacccctaagaccaacaatgatatccttagcagctgcgagatcaagacaggctataacaagacagttcaaataccaatcactagtgagaatagcactgtaggactcagcaatacagatgtcgcctcagcttggaccgagaactatggattgcaggagaagattagtctgaaccccagcgttaggttcaaagctgagaagctggagatggctctgaactacctgggcattcagccgacaaaggagcagcaccaggccctccgccagcaggtgcaagcagacagcaagggaactgtcagtttcggggatttcgtgcaggttgcccgtaatctgttttgtctgcaactggatgaagtgaatgtcggggcgcacgagatttccaatattttggatagtcaactcttgccatgcgattcaagcgaggctgacgagatggagcgtctcaagtgcgaaagagacgatgccctgaaggaggtaaacaccctgaaagagaagctgttagagagcgacaaacagcgcaagcaactgactgaagagttacagaatgtcaaacaggaagccaaagcggtcgtagaggagaccagggctctcagaagtaggatccaccttgcagaggccgcccaaaggcaggcccatggaatggagatggactatgaggaagtcatccgacttctcgaagccaagataaccgagctcaaggcgcagctggcagactactctgaccaaaataaagaatcagtccaggacctcaaaaaacgcataatggtgttggactgccagctgagaaagagcgagatggctcgcaagaccttcgaggcttctacggagaaactgctgcattttgtggaagccattcaagaggtattcagcgataattcgacccctttgtccaatttgtccgagcgaagggcggtgttagcctctcaaacctcgctgactccactgggtcggaatggcaggtcaatccctgctacgcttgccctggaatcgaaggaattggtcaaatcagtccgtgcattattggatatggattgtcttccttatgggtgggaggaagcctataccgcagatggcatcaaatactttataaatcacgtgacacagactacctcgtggattcatccagtcatgtctgttcttaacctgagtcgatcagaggagaatgaagaagattgttcccgcgaactcccaaaccaaaagtcatag

SEQ ID NO: 15526 - DNA, 564 bp, synthetic construct
  source 1..564: mol_type = other DNA; note = Synthetic coding sequence
atggctgccccgggagctctgctcgtcatgggtgtcagtgggtctggaaagagcacagtgggtgctctcctagcttcagaactcggctggaagttttacgacgccgatgattaccacccggaagagaatcgccgtaaaatggggaagggaatcccgttgaatgaccaagaccgaattccatggctgtgcaatctgcacgacatactcctaagggatgtggcgtctggacagagggtggtcctagcgtgtagcgcgctgaaaaagacctaccgagatatactaactcagggcaaggatggcgtggctctcaagtgtgaggaaagtggaaaagaggctaaacaagccgagatgcaacttctggtggtgcacctgtctgggtcctttgaagtgatatctggccgcttgctgaagcgtgagggacactttatgcctcctgaactcctgcaaagtcagttcgaaacattggaacccccagcagcaccggagaatttcattcagatcagtgttgacaagaacgtcagcgagatcatcgctaccataatggaaaccctgaagatgaagtag

SEQ ID NO: 15527 - DNA, 1134 bp, synthetic construct
  source 1..1134: mol_type = other DNA; note = Synthetic coding sequence
atggcaactattcccgactggaaactgcagctgctcgcccggcgccgccaggaggaagccagtgtccgtgggcgggagaaagcggaacgcgagagattgtcgcagatgcccgcttggaagcgcggcctcctggaaaggcgtcgcgctaagctagggctctctccgggggaaccttctccagtacttgggactgttgaggccggcccaccagatcccgacgagagcgccgtcctgctggaggccattgggcccgttcatcagaacaggttcatccgacaggaacggcagcagcagcagcagcagcagcaaagaagtgaggagctgcttgcagagcgaaaaccggggcctcttgaagcgagggagcgacggccaagtccaggcgagatgcgggatcaatccccaaagggtcgagagtcgcgcgaagagcgcctttctccccgcgaaacaagagaacggaggttggggatcggcggcgcccaagaattgtctctaagacccctcgaggctcgagactggcgtcagtcccctggcgaggttggcgaccgatcatcgcgcctgtccgaagcctggaaatggaggctttcgccaggcgagacgccagagcggagcttacggctagctgagtcacgtgaacagtccccacggcgcaaagaggtagagtctcgactttctcctggggaaagtgcctatcaaaaactcggtttaacagaagcacataaatggcgccctgacagccgcgagtcacaggagcagtccctggttcagttggaggccactgagtggcgactgcgctcaggggaggagaggcaggattattccgaggagtgcggacgcaaggaagagtggcctgtgcccggggttgctccaaaagaaaccgcggagctctctgagacccttaccagggaggcacagggcaatagctcagcgggagtggaggcagccgaacagcggcctgtagaggatggcgagcgggggatgaaaccgactgagggatggaaatggacactaatcatgagtctggccggaaaggggaaccagcatttggtgacttgcttcccgcatcctgtctccggtggacgggctaactgccccatctccacgttaatacagagcccttggtgtggatggggatag

SEQ ID NO: 15528 - DNA, 2223 bp, synthetic construct
  source 1..2223: mol_type = other DNA; note = Synthetic coding sequence
atggaggcagacggagacggggaggaattggcacgtctccgctcagtgtttgcagcctgcgatgccaacaggagtggacggctggaacgcgaagaatttcgtgccctttgtacggaactgagggttcgccccgctgatgctgaggctgttttccaaagactggacgccgacagggacggcgctatcaccttccaggaatttgcaagaggctttctgggtagcctacgaggcggtcgcagacgggactggggccccctggaccctgcacccgccgtgtccgaggccgggcctgagacccacgacagcgaagaggatgagggtgatgaagacgccgcggccgcactggcgacatcctgtggtcccgccagccctggccgtgcgtggcaggactttcaggcaaggctcggcgacgaagccaagttcattcccagagaagagcaggtgagtacactctaccagaatatcaatttggtcgagcctcgtttaattcaaccttatgagcacgtgattaaaaatttcattagggagatccgactccagtcgacggagatggaaaacttggccattgccgtcaagcgtgcccaggacaaagccgccatgcagcttagtgagctcgaagaggagatggaccagcgcatccaagcggcggagcataagacgcgaaaagatgaaaagcgcaaagccgaagaggcactgtctgacttacgccgacagtatgagaccgaggtgggagacttgcaggtcactattaaaaaactgcgaaaactggaggaacagtcgaagcgggtgtcccagaaagaggacgtggctgctcttaagaagcagatttatgacttgtcgatggaaaaccaaaaagtgaagaaggatcttttagaagcccaaaccaacatcgccttcttgcagagcgaattagatgcactgaagagcgactatgccgaccagtccctgaacaccgagcgtgatctcgaaatcatccgggcttataccgaagatagaaacagcttggaaaggcagatcgaaattcttcagactgccaatagaaaactgcacgattctaatgacggcttaagaagcgctctagagaattcatattctaaattcaaccggtccctccacatcaacaacattagcccaggtaacacgatctcaaggagcagtcctaaattcatcggacatagtccacagccattaggctatgaccggtcatccaggagtagttacgtcgatgaggactgcgattccctcgcattgtgcgaccctttgcagcgcacgaactgtgaggtggattctctgcccgagagctgttttgatagtgggctatcaaccctcagggatcccaatgagtacgattcggaggtcgagtataagcatcagagaggttttcaacggagtcacggcgttcaagaatccttcggtggagatgcatccgataccgacgtccctgatatccgggatgaagagacttttgggttggaagacgtcgcctctgtcctggactggaaacctcagggtagcgtttcagaagggagcattgtgtcatcctcgcggaaacccatatcagccctatctccgcaaactgaccttgtggacgataacgcaaagagcttttcctcccaaaaggcctacaagatcgttttagcaggcgacgccgccgtggggaagtcatcattcctcatgcggctttgtaaaaatgagtttagggagaatatcagcgcgaccttaggggtggattttcagatgaaaaccttgattgtggatggagagaggacagtgctccaactttgggacacagccggccaagagcggttccggtcaattgccaaaagttatttccggaaggcagacggagtgctgctgctctacgacgtgacttgtgagaagtccttccttaacattcgggaatgggttgatatgatcgaagacgcagcccatgaaactgtgcctatcatgttggttggaaacaaagctgatatccgggacaccgccgcaacagagggacaaaagtgtgtccctggccacttcggtgaaaagctagctatgacatacggcgcactgttttgcgaaaccagcgcgaaggatgggagcaacatagtcgaggctgtgctgcatctggcgagggaagtcaaaaaacggacagacaaggacgattcgaggtccattactaacctgacgggcactaattcaaaaaagtcacctcagatgaaaaattgttgtaatggctag

SEQ ID NO: 15529 - DNA, 4125 bp, synthetic construct
  source 1..4125: mol_type = other DNA; note = Synthetic coding sequence
atggaagagaatgagtctcagaagtgcgagccctgtctgccctactctgccgaccgccgacagatgcaggagcagggcaagggaaatctccatgttacatctcctgaagacgctgaatgcaggcgcactaaggagcgtctgtctaacggaaatagcagagggagtgtaagtaaatcatccaggaacattccacggcggcataccctgggtggtcccagatccagcaaggaaatcctggggatgcagacatcggagatggaccggaaacgcgaggcatttctcgagcatctcaagcagaaataccctcaccatgcgagtgctataatgggccaccaggagcgcctgcgggaccaaacccgcagccccaaactgagtcactcacctcaaccacctagcttgggggaccccgtggaacacctttcagagacttctgccgactcactagaggccatgagcgaaggggacgcccctaccccgttttcccgcggctcacgtactcgcgcttccctgcctgtggtgaggagcactaatcaaaccaaagaacgcagcttaggagtactgtacctgcagtacggggatgagacaaagcaattgcgcatgcctaatgagataacatcagctgacaccatcagagccctgttcgtctcagcctttccacagcaactgacaatgaaaatgcttgaaagcccatccgtggctatatacattaaagacgagtctcgcaatgtatactacgagctaaatgacgtgcggaacattcaggacaggtcactccttaaggtgtacaataaggatccagcgcatgcatttaaccacacaccgaagacaatgaacggcgacatgcgcatgcagagagagttagtctacgctagaggcgatggacctggcgctcctcggcctggctcaactgctcaccccccccacgccattcctaactcaccaccctctaccccagttccccactctatgcccccgtctcccagcaggattccttatggcggtacccggtccatggtggtgccaggcaatgctactattccacgggatagaatttcctccctgcccgtttctcggcctatttctccatctccctccgccatcttggaacgcagggacgtaaaaccggatgaggatatgagcggcaagaatatcgcaatgtaccgcaacgaaggcttctacgccgacccctacttgtaccatgagggccgcatgtccatagcctcttcccacggggggcacccgctagacgtcccggatcatataatcgcctatcatcggaccgctatcaggtccgcctcagcgtactgcaacccgtccatgcaggcggagatgcatatggagcaatccctgtaccgtcagaaaagtcggaaataccctgatagtcatctcccaactctgggttccaagacaccaccggccagtcctcatcgtgtcagtgaccttaggatgatagatatgcatgctcattataacgcccatggacctccccacacaatgcagccagacagagcttctccctcaaggcaagccttcaagaaggagcctggaacactggtgtatattgagaagccccggagtgctgcagggctgtcttctctggtggacctgggcccacccttgatggagaagcaagtgttcgcttattcgaccgccacaatccccaaggaccgagagaccagcgaaaagatgatgaagactaccgccaaccgcaatcacactgactccgccggtactcctcatgtgtctggcggaaagatgttgagcgcactcgagtcgacggtgccaccaagccagccacccccggtggggaccagtgctatccacatgtccctattggaaatgaggcggagtgttgctgagctcagattacaattgcaacagatgagacaactgcagcttcagaatcaggagctgctacgggccatgatgaaaaaagccgaattagaaatctccggtaaagtcatggaaacgatgaaacgattggaggatcctgttcagcgacagcgagtgcttgtggaacaggagagacagaaatacctacatgaggaggaaaaaattgtgaagaagctctgcgaactggaagacttcgtggaggatctcaaaaaggactccaccgcggcctctcggctcgttacgctgaaggatgtcgaagatggcgcatttttattacgccaggtgggagaggctgtagcaacactgaagggggagtttcccacacttcagaataaaatgcgggccattttgagaattgaggttgaagctgttaggtttttgaaggaagaaccccataaactggacagcttgctcaaaagggttcggagcatgactgacgttctgaccatgctgagacgccacgtcaccgatgggttgctcaagggtaccgacgcggctcaggccgcacaatacatggccatggagaaagcaaccgccgctgaggtgctgaaatcgcaggaagaggcagcacatacatccggacagccttttcattctactggtgctcccggtgacgcaaaaagcgaggtggtgccgctcagcggcatgatggtacggcacgctcagagctctcctgttgtgatccagcctagtcagcactcagttgcgcttttgaatcctgcacaaaatctccctcatgtggcaagttcaccagcagtccctcaggaggccaccagcaccctccagatgtcccaggcaccacagtctccacagattcctatgaacggctccgccatgcagtcattatttatcgaggaaattcattctgtgagtgctaaaaatagagccgtatccattgagaaggccgagaagaaatgggaagagaagcggcaaaacctcgaccattacaacggcaaggaattcgaaaagttactcgaagaggcacaggccaacattatgaaatcaatcccaaacctagagatgccgcccgccacgggccctctccctcgcggcgacgctccagtggacaaggttgagctgagtgacagccctaattcagagcaagacttggaaaaactaggcggcaagtcaccaccacctccacccccacctccaagaaggtcatacctccccgggagtgggctcacaaccacacgttccggcgacgtggtctacactggacgcaaagaaaacattaccgccaaagcttcatccgaagacgcaggccctagcccccagacccgagcaaccaaataccctgctgaggagcccgcttcggcttggaccccaagtccccctcccgtgactacctcatctagtaaggacgaagaggaggaagaagaggagggcgataagataatggccgaactacaggcattccagaagtgttcttttatggatgtgaactccaactcacacgctgagccctccagagccgatagccatgtgaaggacactcgatctggcgcgaccgtcccgcccaaagaaaagaagaatttggagttcttccacgaggacgtccgcaaaagcgatgttgaatatgagaacggcccccagatggaatttcagaaggggtcttctggcgcccctcaaacatcccgtatgcccgtccccatgagtgcaaagaaccgacctggaacactggacaagcccgggaagcagtccaagttgcaggatccacgacagtacaggcaagccaatggctcagctaaaaaatccggcggtgatttcaaacctaccagccctagtctgcctgcttccaagatccctgctttaagcccttcttcgggtaaatcatccagcttgccctccagctctggtgacagtagcaacctgcccaaccctcccgccaccaaaccttctattgcatccaatcctctgtccccccagactgggccacccgcccactctgccagtctgatcccttccgtctcaaatggtagcctcaaattccaaagcctcactcacacaggcaagggccaccacctctcttttagtccccaatctcagaacggccgcgctccacccccactgtcgtttagctcctcaccgccatctcccgcctctagcgtgagccttaatcagggtgccaaagggacaaggacaatacacacaccttcccttaccagctataaggcccagaatgggagctcatctaaagcaacacctagcactgcaaaagaaacatcctag

SEQ ID NO: 15530 - DNA, 5832 bp, synthetic construct
  source 1..5832: mol_type = other DNA; note = Synthetic coding sequence
atggaagaaaacgagtctcaaaaatgcgaaccctgcctgccctactcagctgacaggcggcagatgcaagaacagggcaagggtaacttgcacgtaactagtccggaggacgcagagtgccgccgtactaaggagcgactcagtaatgggaacagccgaggaagtgtctctaaatcctctcgcaacattcctaggcggcacaccctcggtgggccaagatcgtcaaaagagattttagggatgcagactagtgaaatggaccgcaaaagagaagctttcctcgagcacctgaaacagaaatatccccatcatgctagtgcaatcatgggccatcaggagaggctccgagatcagacaaggtccccaaagcttagccacagccctcagcctcctagtctcggcgatccagttgagcatttatccgagacttctgccgattcattggaggccatgagcgaaggggacgcccccactcctttctctcgcgggtccaggacaagagcttcattgcccgtcgtgcgcagcacaaatcaaaccaaagagaggtccctgggagttctgtacctgcagtatggagacgagaccaaacagctgcgcatgcccaatgagattacatccgccgataccataagggccctatttgtgtctgcctttcctcagcagctgacgatgaaaatgcttgaatccccttctgtggcaatttatattaaagatgaatcgagaaatgtctattacgaactgaatgatgttaggaacatccaggatagatcactactcaaagtctacaacaaagatcctgcccatgccttcaatcatacacccaaaactatgaacggcgacatgagaatgcaaagggagctggtgtacgccaggggtgatgggcccggagctccccgcccaggtagcaccgcgcatcccccacatgcaatccctaatagccctccgtctacacccgtgccacacagcatgccaccttcaccctccaggatcccatacggcggaacccgtagcatggtcgtaccaggcaacgccactataccacgcgatcgtatatcttccctgcccgtctctcggccaatctccccaagcccgtccgctatcctggagcggagggatgttaagcctgatgaggacatgtctgggaaaaatattgcaatgtaccgaaacgaaggtttttacgctgatccttatctctaccacgaaggacggatgagtatcgcttcctcccacgggggccatcccttggatgtgccagaccacatcatcgcctatcataggactgcaatacggagcgcctcagcttattgcaacccttccatgcaagctgagatgcacatggagcagtcattatatcggcagaaaagtaggaagtaccctgactcgcacctgcccacactcggctctaaaactcctcctgcctcaccacaccgggtgagtgatcttaggatgattgacatgcacgcacactataacgctcatggcccacctcacacgatgcagccagatagagccagcccgagcaggcaggcctttaagaaggaacctggtacgcttgtatacatcgagaaaccccggagcgccgccgggttatcgtcacttgtggatctgggcccaccacttatggagaagcaggtgtttgcttacagcacggctacaatccctaaggatcgagaaactagagaaagaatgcaggccatggaaaaacaaatcgcatctcttaccggtctggtgcaatccgccttgtttaagggtccaatcacaagttacagtaaggacgcctcttctgaaaaaatgatgaagacgaccgctaatcgtaaccacacggactcagctggcacaccacatgtgtccgggggcaaaatgctttccgcattggagtcgactgttccacccagtcagccgcctcccgtggggacaagcgctatccatatgagtttgctcgaaatgcgaagatccgttgccgagcttcgtctgcaactgcagcaaatgcggcagctgcagctacaaaaccaagagctgctgcgcgccatgatgaagaaggcagagctcgagatatcaggaaaagtcatggaaaccatgaagcgtcttgaggatcctgtgcagcgccagcgcgtgctcgtcgagcaagagcgccagaagtatctgcatgaggaggagaaaattgtcaagaagctgtgcgagctggaggattttgtggaagatctgaagaaagatagcacagccgccagccgcttggttacgctgaaggacgtggaggacggagcatttttgctcaggcaggtcggcgaagcagtcgccacactcaagggcgagttccccaccttacagaacaaaatgcgagccattcttcgaatcgaagtggaagctgtccgctttctcaaggaggaaccccataagctggattccctattgaagcgggttcgtagcatgactgatgtcctgaccatgttgcgacggcacgtcactgatggcctgctgaagggaactgacgccgcccaagctgcccagtacatggcaatggaaaaagcgaccgcagccgaggtcctcaaatcccaggaagaagcagcccatacctccggacaaccttttcattcaacaggagcgcccggggatgctaagagcgaggtggtcccgctcagcggaatgatggtgagacatgctcagtcttctccagtcgtgatacagccgagccagcacagcgtcgctcttttgaatcccgcccagaatcttccacacgtggcttccagcccagctgtcccgcaggaggccacatccactctccagatgtcacaagctccccagagcccccagattcccatgaatggcagcgccatgcagtcgctgtttattgaggagatccacagcgtctcggcaaaaaaccgtgcagtgtctatcgagaaagccgaaaagaagtgggaagagaagaggcagaatctcgaccactacaacggtaaagaatttgaaaaattgctggaggaggcccaggctaacattatgaagagcatcccgaacctcgaaatgcctcccgcgaccgggccactgccaagaggtgatgctcccgtagacaaagtcgagctctccgaggattctcctaatagtgaacaggatctggagaagttaggtgggaaaagtcctccgccccctcctccaccacccaggcggtcttacttacccggcagcgggctgactacgacgcgctccggggacgtcgtgtatactggcagaaaagagaacattacagcaaaagctagctcggaggacgctgggccttctcctcaaacgcgagccaccaagtaccctgccgaagagccggccagcgcatggacacccagcccaccccccgtgacaacctcctcttccaaggatgaagaggaggaagaggaagagggagataagatcatggccgagctgcaggcttttcagaagtgctcttttatggatgtcaactcgaacagtcatgccgaaccatccagagctgactctcatgtgaaggacaccagaagcggtgctacggtgccccctaaagaaaagaaaaacctagagtttttccacgaggacgttcgaaagagcgacgtggaatatgagaacggtccacagatggaattccagaaggtgacaaccggcgcggttcggccttccgatccccctaagtgggagcggggcatggaaaatagcatcagtgatgctagccggaccagcgagtataagacagagattattatgaaggaaaatagcatatctaatatgagcctgttgcgggatagtaggaactattcccaggaaaccgtccccaaagcgagcttcggtttttctgggatttctccactggaagacgagatcaataagggcagtaagatcagtggattgcaatacagcattcccgacaccgagaatcagactctcaattacggtaagactaaagagatggaaaaacaaaataccgacaagtgtcacgtgtcatcacatacgcgactgacggagtcatcagttcacgacttcaagactgaagatcaggaggtgattacgacggattttggccaggtggttctgcgacccaaggaagcccggcacgcgaatgttaatcccaacgaagacggagagtcaagcagcagtagccccaccgaggagaatgctgccaccgataacatagcgttcatgattactgaaacaacggtgcaggtactgagctcgggggaagttcatgatattgtgagccaaaagggcgaggatatacaaaccgtcaacatcgacgcacgaaaagaaatgacaccaagacaggaggggacggataatgaagatcccgttgtatgtttggacaagaaaccagtcattatcatatttgatgagcccatggatattagaagcgcttataaaagactgagtacaattttcgaggagtgcgatgaggagttggagcgaatgatgatggaagaaaaaatcgaagaagaggaggaggaggagaatggtgacagtgtggtgcagaataacaacacttcgcagatgtcccataaaaaggtggcacctgggaacctaagaaccggacagcaggtcgaaactaagtcccagcctcacagcttggcaactgaaacgagaaaccctggcggccaggaaatgaacaggacagaacttaataagttttcccacgtggactccccaaattccgaatgcaaaggcgaggatgccaccgacgaccagtttgaaagcccaaagaaaaaatttaagtttaaattccccaagaagcagctggcagcccttactcaggccatcagaacgggcaccaagactggaaagaaaacactacaggtcgtcgtctatgaagaggaggaggaagatgggacactgaaacaacataaagaggctaagcgcttcgaaatagcaagatcgcagccagaggacaccccagaaaatactgtaaggcgacaagaacagcccagtatcgaatcgacttcaccaatttctaggaccgatgaaatacgcaagaacacttacagaaccttggatagtctagagcaaactatcaagcagctggaaaacacgatcagcgaaatgtctcctaaggccttggttgatacaagttgttcgagcaacagagatagtgtggcctcttcatctcatattgctcaggaagccagcccccgccctctgctggtgccagatgagggccccacagcactggagccacccacatccataccatcggcctcccggaagggaagctcaggtgctccgcagacgagcagaatgcctgtgcctatgagtgcaaaaaataggcccgggacattggataaacccggaaagcagagcaagttgcaagatcccaggcagtacagacaggcaaatgggtccgccaaaaagtcaggcggagacttcaagccaacttccccgtcattaccagctagcaagattcctgcgctgtccccatctagcgggaagagttcttccctgccttcatcttctggcgatagctcaaacctgcccaacccacccgccaccaaaccgtccattgccagtaaccctctctccccccagaccgggcctcccgctcactctgcctcactaatcccatctgtctcgaacggctccctgaaatttcaaagcctaacacatactggtaaaggccaccatctctcctttagtccccagagtcagaatggacgcgcacctccccccctatctttctcatctagtcctccgagcccggcttcctcagtgagtctcaatcagggggcaaaaggtaccaggacaatccacactccgtctctaacctcctataaagctcagaatggttcatcttcaaaagccacccccagcacagcgaaagagaccagctag

SEQ ID NO: 15531 - DNA, 3795 bp, synthetic construct
  source 1..3795: mol_type = other DNA; note = Synthetic coding sequence
atgcagacatccgaaatggaccggaagcgtgaagcatttcttgaacacctcaagcagaagtatccacaccacgctagtgccataatgggccaccaagagagactgcgtgatcagacccgcagtccaaagctctcccatagtccccagcctccctcacttggggaccccgtcgagcatttgtcagaaacgtcggctgattccctggaggctatgagcgaaggcgacgcgcctacccctttcagtagaggctccaggacaagggcttcccttcctgtggtgcggagtaccaatcagaccaaggagcgttctctgggcgtgctgtacctgcaatacggtgacgagacaaagcagttaagaatgcccaacgagatcacgtctgcagatacaattagagcactgttcgtaagcgcattcccccagcagcttactatgaagatgctggaaagtccctcagttgcaatatatattaaagacgagagccgaaacgtgtactatgaacttaatgacgtcaggaatatccaggaccgctcattgttgaaggtttacaacaaggatcccgctcacgctttcaatcatacccctaaaacgatgaatggcgacatgcggatgcagcgcgagctggtgtatgcgcggggagacggcccaggcgcgcccagacctggatcaactgcccatcccccgcatgctattccaaacagcccaccttcaacaccagtgccccactctatgcccccgtcgccaagcaggattccatatggaggtacaagatctatggtggtcccggggaacgcgacaatacctcgggatagaatctccagtttgcccgtcagcaggccgatctcaccttccccctcagctatactagagcggagagatgtcaagcccgatgaggacatgtccggcaagaatattgccatgtataggaacgagggcttctacgccgacccctacctctaccacgagggaaggatgagtattgcaagtagccacggcgggcaccccctggacgtgccagatcacataatcgcctaccatagaacagctattagatctgcgagcgcatactgtaatccgtctatgcaggccgagatgcacatggagcagagcctgtatcgacagaaaagccgcaagtatccagactctcacttgcccactttaggcagcaagactccgcccgcctccccccatcgggtctcagaccttcgtatgatagacatgcacgcccactacaacgcccacggtcctcctcatacaatgcagccagatagagccagcccatctaggcaagccttcaaaaaggaacccgggactcttgtgtatatcgagaaaccccgtagcgctgcgggactatcttcgttggtagacctgggtcctccgctaatggagaagcaggtatttgcctactccaccgccaccatcccaaaggatcgtgagactagagagcggatgcaggccatggaaaagcaaatcgcttcgctgaccggcctggtgcaaagcgctctcttcaagggccccatcacatcctatagtaaagacgcttcatccgagaaaatgatgaagaccaccgccaatagaaaccacacagacagtgctggaacaccccacgttagcggagggaaaatgctgtctgctctcgagtccactgtgcctccctctcagccaccaccggtcggcacctcggcgattcacatgtcactgctcgagatgcggcgctctgtcgccgagctccggctccaactgcaacagatgaggcagctgcaattacaaaatcaggagctgctgcgggctatgatgaagaaagccgagcttgaaatcagcggtaaagtcatggaaacgatgaagcggctggaggacccagtccaacgccagcgagttctcgttgagcaggagagacagaagtaccttcacgaagaagagaagatcgtgaaaaagttgtgtgaactcgaagatttcgttgaggacctcaaaaaggattccactgccgccagccggttggtgactctcaaggatgttgaggatggcgccttccttttacgccaggtgggggaggcagtagccacactaaaaggggagtttcctaccctacagaataaaatgcgagcaattctccggatcgaagtcgaggccgtacggttcctgaaggaggaacctcacaaactggatagcctgctgaagagggtccgaagcatgacagatgtcctgactatgctgagacgtcacgtcaccgatggcctgctgaaaggaaccgatgccgcgcaggcagcccagtatatggccatggaaaaagccaccgctgctgaggtgctgaaatcccaggaagaggccgcccacactagcgggcagccatttcactcaacaggcgcccctggcgacgccaaatccgaggttgtcccgctcagcgggatgatggtgaggcacgcccagtcgtctccggttgtgattcagcccagccagcattctgttgccttgttgaatccagcccagaatctgcctcatgtggcctcttctccggccgtgcctcaggaggccacctcgacactgcagatgtctcaggccccacagtcaccacaaattccaatgaatggaagcgcgatgcaaagtcttttcattgaagaaatacatagtgtttccgctaaaaacagagccgtgagcatagaaaaggcagagaaaaaatgggaggagaagcgccaaaacctggaccattacaacggtaaggaattcgaaaaactgctagaggaggcccaggctaacataatgaaatctatccccaacctggaaatgccccctgctaccggacctctccccagaggcgatgcgccggtggataaagttgagctgagcgaagattcccctaacagcgaacaagacctggagaaacttggcggaaagtcccctccaccacctcctcctcctccaaggcgttcctatctgcccgggagcggccttaccaccacgaggtccggcgacgtagtttatacggggcgtaaagaaaatatcaccgcgaaagcaagtagtgaggatgcagggccctcgcctcagactagagcaacaaaatacccagctgaggagccggcctctgcgtggaccccttcacctcccccggtgacaacctctagttcaaaagatgaggaagaggaggaagaggagggagacaaaataatggcagagctgcaaggaagtagcggagccccacagactagccgaatgcctgtcccaatgagtgctaagaaccgaccagggacactggacaaacctggaaagcaaagtaaacttcaggaccctcgccagtacagacaggctaatgggagtgcaaaaaaatctggcggtgattttaagcccacctcacccagcttgcctgccagcaagattcctgctttatcaccttccagtggaaagagtagttccctgccatctagtagcggcgatagcagcaatctccctaatccccccgccactaaaccatctatcgcttctaacccgctgagcccccagaccggtcctcccgcccactccgcatcactgattccaagcgtttctaacggatcattaaagtttcagtcattaacacacacaggcaagggccatcacttatccttctctcctcagagccagaacggccgtgcaccacctcccttatctttttccagtagccctccaagtccggcctcttctgtgtccctgaatcaaggggcaaaagggacacgtactatccacactccctcattaacatcctataaggcacagaacgggtcaagctcaaaagcaactccttctacggctaaagaaaccagctag

SEQ ID NO: 15532 - DNA, 531 bp, synthetic construct
  source 1..531: mol_type = other DNA; note = Synthetic coding sequence
atgggctgttgcgggtgctccgggggttgtgggtccggatgcgggggatgcggatctggttctgggggatgtggctccggttgcggagggtgtggctcgagctgttgcgttcccatttgctgttgcaagccggtgtgttgttgtgtgcctgcatgtagctgctcatcttgtggatcatgtgggggttctaaaggaggctgcggatcctgcgggtcatctaaaggtggatgtgggagctgtggatgctcccagagcaactgctgtaaaccctgctgttcttccagcgggtgcgggtcattctgttgccagtcttcttgtagcaagccttgttgttgtcagtcatcttgctgccaatctagttgctgcaagccgtgttgctgccagtcctcttgttgccaatcaagctgtttcaagccatgctgttgccagagttcctgctgcgtgcccgtctgctgccaaagctcatgttgcaagccctgttgcagccaatcaagctgctgcgtgcctatctgctgccagtacaaaatctag

SEQ ID NO: 15533 - DNA, 513 bp, synthetic construct
  source 1..513: mol_type = other DNA; note = Synthetic coding sequence
atgggatgctgcggatgcagcgggggatgtggatctgggtgcgggggttgcggaagcggctgtggcggttgcggatccggctgcggggggtatggctccgggtgtgggggatgcggatcatcatgctgcgtacctgtgtgctgttgcaagcctgtgtgttgttgcgtgccagcatgctcctgtagcagttgcgggtcttgtggcgggtctaagggtgactgcgggtgtgggtcgtgcgggggtagcaaaggggggtgcggaagttgtggctgttcccaatgtaactgctgtaagccttgctgctgcagcagtgggtgtgggagctgttgccaatcctcctgctgtaacccttgttgttgccaatcctcttgctgtgtgccggtttgctgtcagagttcttgctgcaagccatgctgctgtcagtccagctgttgcgtacctagctcatgctgccggtcttgctgctctaaatcttcatgctgtgtgcccatctgctgccagtacaaaatttag

SEQ ID NO: 15534 - DNA, 2169 bp, synthetic construct
  source 1..2169: mol_type = other DNA; note = Synthetic coding sequence
atgatcgattctgtcaagcttcgccgcgactcagcggccgacttcttttctcactatgagtacctgtgtgcattgcagaattccgtgcccctccctgccgttcgtgcctgcctgcgggagggcgtgttggactttaatgccgaccgccttcgcggggtggactgggctccactcctgtcaaccctcaaaatcaataaggacctcccattggtgagcatcaaaagtttcttccagccatggttaggggacactggaagcgacatgaacaaattctgcaggtcaagagtcccagccataaggtataaggacgtgacttttcagctttgtaaggctctcaaggggtgcctgagcattagctcagttcttaaaaacctggagctaaatggcctgatactgagggaacgcgatctgacaattctagcgaagggactcaacaagtcagcgagcctcgtgcacctatcgttggctaactgccctattggtgacggagggttggagattatctgtcaggggatcaaatccagtattaccttgaagacagtgaatttcaccggatgcaatctcacttggcaaggagccgaccacatggccaaaatactaaaataccagacaatgcgcagacacgaagagacctgggctgagtcgctgcggtaccgccggccggatctcgattgtatggccggcctaaggcggattacactcaattgtaacaccttgataggtgatctgggagcctgcgcctttgccgattcattatctgaggatctgtggctacgtgccctagacctccaacagtgcggcctgacgaatgagggcgccaaggccctgttagaggccctggaaaccaatactactctggtcgtactggatatccgcaagaatccactgatagatcactcaatgatgaaagctgtgatcaaaaaggtccttcagaatggcaggagtgccaagtcagaatatcagtggattacgtcccctagcgtgaaagagcccagcaagacagcgaagcagaagagacgcaccattatccttggatcaggccacaagggcaaggccacaattcgcattgtgggtctagcaaccaagaagccggtctcctccggacgcaagcatagtctgggtaaagagtattacgccccagccccactgccccccggcgttagcggattcttgccctggcggactgcggagcgcgccaagaggcaccgcggctttccactaattaagacccgcgacatctgcaaccagttgcagcagcccggattccccgtgacggttaccgtggaaagcccctctagcagtgaagtcgaggaggtagatgatagctctgagtcagtgcatgaagtaccagagaaaacaagcatagagcaggaagcccttcaggagaagctagaagagtgtctgaaacaactgaaagaggagagagtaatcagacttaaagtggacaagagggtgagcgaacttgaacatgaaaatgcccagctgcgtaacataaatttctcactgtctgaggccctgcatgctcagtcattgacgaacatgatcctggacgatgagggtgtgctaggcagcatcgaaaactcttttcagaaatttcacgcctttttggatctcctgaaggatgctggtctgggccaacttgccaccatggccggtatcgatcagagcgactttcagttgctgggccatcctcagatgactagtaccgtgagcaatccaccgaaagaagaaaaaaaggccctcgaagacgagaaacccgagccaaagcagaacgccctggggcagatgcagaacattcaggtgtccatctgtatgcagagcgcgtacaatgaaggtacattgatgaaatttcagaaaatcaccggggatgcaagaattccactgcccctcgactcctttcctgtacccgtctccaccccggaggggctcggaaccagtagcaataacctgggagtgcctgccactgagcagagacaggagtcgtttgaaggattcatagcccgtatgtgcagtccctctcccgatgctactagcggcacgggcagtcagcgcaaggaagaggagttgtcccgtaactcccgaagctccagcgagaagaagacaaaaacaggggaatacacaaaaaaacatagcgacaaacagcaccccggcaaggacttacacagctag

SEQ ID NO: 15535 - DNA, 1122 bp, synthetic construct
  source 1..1122: mol_type = other DNA; note = Synthetic coding sequence
atggcactcaacgtggctcccgtgcgtgacactaagtggctgaccttagaagtctgtagacagtttcagcgaggaacttgtagcaggtcggacgaagaatgtaaattcgctcatccacccaaatcctgccaggtggaaaatgggagagtcatagcgtgtttcgattcgctcaaaggtcgttgtagtagagagaattgtaaatacttacaccctcccacgcacttgaagacacagttggaaattaacgggagaaataatctcatacaacaaaagactgcggcagccatgcttgctcagcagatgcagttcatgtttccaggaaccccattgcaccctgttccgacgttccccgttggcccagcaatcggcactaacactgctatctctttcgccccttacctcgcaccagtgacccccggcgttggcttggtgcctacagaaattctgcctaccactccagtgattgttccagggagtcctcccgtcactgtgcccggatctacagccacccaaaagctcctgaggaccgataaattggaggtgtgcagagaattccagcgcggcaattgtgcccgcggggaaactgactgcagattcgctcatcctgcagattccaccatgatcgatacctccgataacactgtgaccgtgtgcatggattacataaaaggccgatgtatgcgtgagaaatgcaagtattttcatccacccgctcacctgcaggcaaagataaaagctgcacagcatcaggctaaccaagcagccgtggctgcccaggctgcagctgccgctgctaccgttatggccttcccacccggcgccctacacccccttcctaagcggcaagcattggagaagtccaatggcaccagcgccgtttttaacccgtcagtgcttcactaccaacaagccttaacatctgcgcagctccagcagcatgctgcattcatccctacaggctcagttctctgtatgactccagctacctctatagacaactccgagattatctctaggaacggcatggagtgccaggaatccgcactcaggatcaccaaacactgttactgtacctattacccagtgtcttcgagcatcgagctaccccagaccgcgtgctag

SEQ ID NO: 15536 - DNA, 321 bp, synthetic construct
  source 1..321: mol_type = other DNA; note = Synthetic coding sequence
atgacccagtcaactgccaaggcaatgaagcgccctctagaagcgacagtggatctggcctttccccctggcgccctgcatccattacctaagcgtcaagctctggagaaatccaatgggacatctgctgtcttcaatccatccgtgcttcattaccagcaggccttaacctctgcacagctgcagcaacacgccgcattcatccccacagtgcccatgatgcattccgctacctctgcaaccgtaagcgccgccactacaccagcaacaagcgttcctttcgccgccactgctacagccaatcagttggtctactcgtag

SEQ ID NO: 15537 - DNA, 915 bp, synthetic construct
  source 1..915: mol_type = other DNA; note = Synthetic coding sequence
atggcgaagatcgaaaaaaacgcccccactatggagaaaaagccagaactgttcaatataatggaggtggacggagtccccacactgatcctatcaaaggaatggtgggaaaaggtgtgcaatttccaagccaaaccagacgatttgatcttagctacctaccccaagtccgggaccacttggatgcatgaaattctggacatgattctgaacgatggagacgttgagaaatgtaagagggctcagaccctggataggcacgcttttctcgagctgaaattccctcacaaggaaaaaccggatttagagtttgtgttggaaatgtcatcaccccaactcataaaaacgcatctgcccagccatctgattcccccttcaatctggaaggagaattgcaagatcgtctatgttgctcgcaatccaaaggactgcctggtctcttactaccacttccatcgaatggcctcatttatgcccgacccccagaatctggaggaattttacgaaaaattcatgtcgggcaaggtcgtgggcggatcctggttcgatcatgttaagggctggtgggccgcaaaggacatgcacaggatcctgtatttattttatgaggacatcaaaaagaacccaaaacatgagatccacaaggtgctagaatttctggagaagacctggtcgggcgacgtcataaataagattgtgcatcacacttcatttgacgtgatgaaggataaccccatggcaaaccatacagcggtacccgcccatattttcaaccattcaatttcaaagttcatgcgaaaaggcatgcctggggactggaagaatcactttaccgtcgctctgaatgagaatttcgacaagcactatgagaagaagatggctggatccacccttaacttctgcttggagatatag

SEQ ID NO: 15538 - DNA, 1188 bp, synthetic construct
  source 1..1188: mol_type = other DNA; note = Synthetic coding sequence
atggcttccgccgcgagtgttacctctctggctgacgaagtaaattgccctatttgccagggcacgctcagggagccagttaccatagattgtggtcacaacttctgtcgcgcatgtctcacacgttattgcgaaattcccggtccagatctggaggagtccccaacgtgtccattatgcaaagagccgtttagaccaggcagctttaggccaaactggcagctggccaatgtcgttgagaacatagagaggctccagcttgtgtctacccttgggctgggagaagaggacgtttgtcaggagcacggagaaaagatctacttcttttgcgaagatgacgagatgcagctctgcgtagtctgtcgagaggccggcgaacacgcaacgcatactatgcggttcctggaagacgctgccgcaccttaccgagagcagattcacaaatgcttgaaatgcctgcgtaaagaacgcgaagaaattcaggaaatccagtcgcgggaaaataaacgcatgcaagtgttactgacacaggtgagtactaagcgccagcaggtcatctctgagttcgcccacttgcgcaagtttctggaggagcagcagtctatccttctggcccagctagagagccaggacggcgatattttaaggcagcgggacgaatttgaccttctggtagcaggagagatttgtcggttctccgccctgattgaggagctggaggagaaaaacgaaagaccggccagagagttgctgaccgacattcgcagtactctcatccgctgcgagacgagaaaatgtcggaaacccgtggccgtctcacctgaactggggcaacgcattagggactttccgcagcaggcgttgccccttcagagagaaatgaagatgtttctggagaagttgtgctttgaactcgattacgaacctgctcatatttctcttgacccacagacatcacatccgaagctgctgctgtctgaagatcatcagagagcacagttcagctacaagtggcagaactctccagacaaccctcagcgatttgatcgcgccacctgtgtgctggctcatacaggtattacaggggggcgacacacatgggtgtggatggctcgagttccaggggatagcggatgctgccagttctgcagcccaccgtctgttctaggtacggaggtcgctgcttag

SEQ ID NO: 15539 - DNA, 1446 bp, synthetic construct
  source 1..1446: mol_type = other DNA; note = Synthetic coding sequence
atggcttctgctgcaagcgtaacctcactagccgacgaagtgaactgccctatctgtcaaggtactcttagagagcctgtgacaattgattgtggacacaacttttgtcgagcctgcctaacgcgatactgtgaaatcccaggccccgatttggaggagtccccgacatgccccctgtgcaaggaacctttccggccaggatcctttaggcctaactggcaacttgcaaatgttgtcgaaaatatagaaagacttcagcttgtatctaccctgggcctcggggaagaggatgtgtgtcaggaacacggagaaaagatctatttcttttgtgaggacgatgagatgcagctgtgtgttgtctgccgagaggccggggagcacgcaacacatacgatgaggttcctggaggacgctgccgccccctatagagagcagattcataaatgtcttaaatgcctgcggaaggaaagggaggaaattcaggaaatccaatctcgagagaataaacgaatgcaggtgctcttgacccaggtttctactaagcggcaacaagttatttcagagttcgcgcacctgcgcaagtttctggaagaacaacagtccattctccttgcccagctcgaatcacaggatggcgatatcttacgacaaagagacgagtttgacctactagtggccggcgagatatgcaggttctccgccttgatcgaggaactcgaggagaagaacgagcgtcccgcacgggagcttctcaccgatatcaggtccacattaatcaggtgtgagactagaaagtgtagaaagcccgtcgccgtaagcccagagctgggacaaaggattagagatttcccccagcaagccctgcccctccagagagagatgaaaatgtttcttgaaaacctccctaatcaccttgtgattcccactgctcacatatccttggaccctcaaactagccatcctaaactgttgctgtcagaggatcatcagcgcgcccagttcagctataagtggcagaactctccagataaccctcaaagattcgacagggccacatgtgtgttagcccacacaggaattaccggggggcggcatacatgggtcgtctctatcgacctcgcgcatggcggctcttgtactgtgggcgtggtaagtgaagacgtccagcgcaagggagagctgcgactgcgcccggaagagggtgtctgggctgtgcggctcgcctgggggttcgtgtcagctctgggttcttttcctaccagactaacactaaaagagcagccccggcaggtgcgcgtctcattggactacgaggtcggttgggtgacctttacaaatgctgtcactagagagccaatctacaccttcacggcaagttttaccagaaaggtaatccccttctttggtttgtggggccggggttcttctttcagtttgtcgagttag

SEQ ID NO: 15540 - DNA, 2604 bp, synthetic construct
  source 1..2604: mol_type = other DNA; note = Synthetic coding sequence
atgcaggcagaggctgcggactggttctcctccatgccattccagaaacacgtgtactaccctttagctagcggaccagagggcccagatgtggccgttgccgccgccgccgctggggcagcctctatggcctgtgctccaccttctgctgctagcgggcctctgccgttcttccaattcagaccacggttagagagcgtcgattggcgcagattatcagccattgatgttgataaagtcgcgggagccgtggacgtgcttacactgcaggagaatatcatgaatattacattctgcaaactggaagatgagaagtgtccccactgtcagtccggagtggacccggtactgctgaaactaattaggctggcacagtttaccatcgaataccttctgcacagtcaagagttcctgacgtcccagctgcatacattggaagagaggctccgactgtcacactgcgacggagagcagagcaagaaattacttacaaagcaggctggagagattaagacattgaaggaagagtgcaaacggagaaaaaagatgatcagtacacagcagttgatgattgaagcaaaggccaactattatcaatgccacttctgcgataaggcttttatgaatcaggcgtttctgcagtctcacatccagcgccgacacacggaggaaaattctcacttcgagtatcagaaaaacgcccagattgaaaaactgagatccgagatcgtcgtcctgaaagaggagctgcagttaacacgctccgagcttgaagcagcccaccatgcaagcgctgtcagattttctaaggaatacgagatgcaaaaaacaaaggaggaggatttcctcaagctgttcgaccggtggaaggaagaagaaaaagagaaacttgtcgacgagatggagaaagtgaaagagatgttcatgaaggaattcaaggaactgacctctaaaaattccgccctggaataccagctgagtgagatccaaaagtcaaacatgcaaatcaaaagtaacatcggaaccctcaaagatgctcacgagttcaaagaggatcgctctccctacccccaggattttcacaatgtgatgcaactgctggacagccaggagtcgaaatggacagcccgcgtccaagctatacatcaggaacataaaaaagagaagggacgcctcctcagtcatatcgaaaagttaagaacttccatgatcgacgatctgaatgctagcaatgtattttataagaagcggatcgaagagttagggcaacgcctccaggaacagaacgagttgattatcacacagcgccagcagattaaggatttcacatgcaatccactcaactccatctccgagcctaagggaaacccacttgcgtggcaggcatttgaatcacagcccgccgctccggcagtacccatgaacgcacccgccttacacactctggagactaagtcctccctccccatggtccatgagcaagccttttcgagccatatcctggaaccaattgaggagttgtccgaggaggaaaaagggagggaaaacgagcagaagctgaataataataaaatgcatctgcgcaaggccctgaaatctaacagctctctaaccaaaggcttgaggactatggtggagcagaacctgatggagaaacttgagactctgggaatcaatgccgacatccgcgggatatcttctgaccagctgcaccgagtgcttaaaagcgtggaatctgaacgccacaagcaggaacgagagattccaaactttcatcagatacgggagttcctcgagcaccaggtctcgtgcaaaatagaggagaaagccctcttgtcgagcgaccagtgtagcgtgagtcagatggacaccctttcgaccggcgaggtgccaaaaatgattcagttgcctagcaaaaatcgacagcttattcgccagaaagctgtatccacagataggacctctgtacccaagatcaaaaaaaacgtgatggaagacccatttccacgaaagtcttctacgatcaccacgcctccattctccagtgaggaggaacaggaggatgatgatttaatcagagcctacgctagtcctggaccgctacctgtgccaccaccccaaaataaggggtctttcggaaagaacacagtgaagagcgatgccgacggaactgagggctccgaaattgaagataccgatgactcacccaagcccgctggcgtggctgtgaaaacccctacagagaaggtcgagaaaatgttcccacatcgcaagaacgtgaacaagcccgtcggcgggactaacgtaccagaaatgtttataaagaaggaagagttacaagagctgaagtgtgctgacgtagaggacgaggattgggacatcagctctctcgaggaagagataagtcttggtaaaaagtctggcaaggaacagaaggaacctccccccgccaaaaacgaaccacacttcgcccacgtcttgaatgcgtggggggcttttaatcccaaaggtcctaagggcgaggggcttcaggagaatgagtcctccacattgaaaagcagtcttgtcacagtcactgattggtccgatacaagcgatgtatag

SEQ ID NO: 15541 - DNA, 279 bp, synthetic construct
  source 1..279: mol_type = other DNA; note = Synthetic coding sequence
atggccacgcctccaaaacggcgcgctgtcgaagccaccggggagaaggttcttcgctacgaaacctttatctctgacgtcctgcagcgagacctacgaaaggtgttagaccaccgggacaaggtttacgagcagctggctaagtacctccagctgcggaacgtaatcgagcggctacaggtcaaaactatgggtctgggcacaatcttcctggtctgcgtagggaaaggaggcaaatgggaagagaggctccagactcagccttgccacttgacttag

SEQ ID NO: 15542 - DNA, 2532 bp, synthetic construct
  source 1..2532: mol_type = other DNA; note = Synthetic coding sequence
atggccgtggaagactccaccctgcaagttgtcgtccgagtccgtccccctacacctcgtgagctggactcccagcggcgacctgtggtgcaagtcgtggatgagcgggtgctcgtgttcaatcccgaagagccagacggtgggttcccgggcctgaaatggggaggtacgcacgatggtcccaaaaaaaaaggtaaagacttaacttttgtgttcgaccgcgtgtttggcgaggccgcaacacaacaggacgtgtttcagcataccacccattccgtcctcgatagcttcctgcaggggtacaattgttccgtcttcgcctatggtgccactggcgcagggaaaacccacactatgcttggtcgggaaggcgaccccggcatcatgtacctaacaacagtggagctgtaccggcgactggaggcaagacagcaggagaagcactttgaggtcctgatcagttatcaagaagtttataatgagcagattcacgacctcctagagcctaaagggccactggctatacgggaagaccccgataagggcgtagtggtccagggcctaagcttccaccagcccgcctcagctgaacaactgctggaaatcttaactaggggtaatcgaaaccggacccagcacccaaccgatgctaacgccactagttccagatcccacgccatttttcaaatttttgtgaaacaacaggaccgggtacctggcctcacccaggccgtccaggttgccaaaatgtcactcatcgatctcgccggttctgagagagcaagttctacccacgccaagggggaacgtctacgagagggcgcaaacattaaccggagcttgttggcgctgataaatgtactaaacgccttggctgacgccaagggaagaaaaactcacgtgccctacagagactctaaactgaccagactgttaaaggactctctgggggggaactgtcgtaccgtcatgatcgcagctatcagcccttcatccctgacatacgaggatacctataatactctgaagtatgctgacagagcaaaggagattcgcctgtccctgaaaagtaacgtgactagcctggattgccatatatctcaatatgcgaccatatgtcagcagctacaagcggaagtagcggccctgcgaaaaaaattacaggtctacgagggcggcggtcaacctccaccccaggaccttccaggtagcccgaaatctggcccaccgccagaacatctcccgtcatctcctctgcccccccatccacccagtcagccatgcaccccagagctccccgcgggaccgagggccctgcaggaagaatccctcggaatggaggctcaggtggagcgggctatggagggaaactcgtccgatcaggagcagagccccgaagatgaagatgaggggcctgctgaagaagtccccacccagatgcccgagcagaatcccacccacgccctgccagaatctcccagacttacattgcagccaaaaccagtcgtgggacattttagcgcacgggagttagacggagatcgcagtaaacagttagcattgaaagttctctgtgtcgcacagcggcagtactccctgctccaggccgcaaacctgctgactccagacatgatcaccgaatttgaaactctacagcagctggtccaggaggaaaagattgagcctggcgccgaggccctaaggacaagcggactggcacgaggtgcccctctggcccaagagctttgcagtgagtctatacctgtgcccagccccctgtgccccgaaccacccggctacaccgggcccgtgacccggactatggctcgcaggctctcgggccccctgcatacactgggtatccctcctggcccaaattgcacaccggcccagggttcccgctggccaatggaaaagaaacggcgcaggccttccgcactggaggccgacagccccatggcgcccaagcgagggaccaaacgtcagcggcaatcattcctcccttgcttgaggagagggtccttacccgacacacaaccatcccaaggcccttccaccccaaagggcgagcgcgcaagtagcccctgtcattctccacgggtctgtcctgcgaccgttatcaagtcccgcgtgcctttagggccatctgcgatgcagaattgctctactcctctggccttgcctacacgagatctcaatgccacctttgacctgtccgaagagccccctagcaagccctcatttcacgaatgcatcgggtgggataagatacctcaggaactgagccgactcgatcagcctttcataccccgcgcgccggtaccactttttactatgaagggccccaagccaacatcgtcactgccgggcacatcagcctgcaagaagaagagggttgcttcttctagcgttagtcacggtcgatcgcgtattgccaggcttccatccagtacactgaaaaggccaggtcccctttatagccaagtaacgggcacacgcgatagagatagcctcggacacggggggagatag

SEQ ID NO: 15543 - DNA, 561 bp, synthetic construct
  source 1..561: mol_type = other DNA; note = Synthetic coding sequence
atggagcccccccgaggaccaccagctaacggagctgagccaagcagggctgtgggcactgtcaaggtctaccttcctaacaagcagcgaacggtagtgactgtgcgcgatggcatgagtgtctacgactcccttgacaaagctctcaaggtgcgagggctgaatcaggactgttgcgtcgtctatcgtctgattaaaggtcgcaagaccgtaacagcttgggatactgctatcgctccgttagatggtgaggaattgatagtggaggtgctggaggacgtgcccctaaccatgcacaatttcgtaagaaaaacctttttcagcttggcattctgcgatttttgcctaaagttcctgttccacgggtttaggtgccagacatgcggctataagtttcaccaacactgcagtagcaaagtgccaacagtgtgcgtggacatgagtacaaaccgacagcaattctaccattcagtacaagatctcagcggcggcagcaggcagcatgaagccccaagcaacaggcctttgaatgaactgctcacaccccagggtccacgttag

SEQ ID NO: 15544 - DNA, 1821 bp, synthetic construct
  source 1..1821: mol_type = other DNA; note = Synthetic coding sequence
atggaacctccgcgcgggccacctgcgaacggcgctgagcccagccgcgcagtcgggaccgttaaagtgtatctgcctaacaaacaacggacagtggtgacagtacgtgatgggatgagcgtctacgacagtttggacaaggccctgaaagtgcggggcctgaatcaggactgttgcgtggtatacaggcttattaagggaagaaagacagtaactgcctgggatactgccatcgcaccactggacggcgaggagctcatcgtggaggttctggaggatgtacctcttactatgcacaacttcgtgagaaaaaccttcttctcactcgcgttctgcgacttctgccttaagttcttattccacggttttagatgccaaacgtgcggatataaatttcaccagcactgcagctctaaggtccctacagtgtgtgtggatatgtccacaaaccgacagcagttctatcactccgtgcaggatctgtcaggcggctctagacagcacgaggcaccttctaataggcccctaaatgagttgcttacaccacaggggccatcaccaaggacccagcactgtgaccccgagcatttccctttcccagcccccgctaatgcacccctgcagaggatccgcagtacaagtacgcccaacgtccatatggtctcaacaaccgcccccatggactccaacttgattcagctaacagggcagagtttctctactgacgcggcaggcagtcgcggcggcagtgacggaactccccggggcagccccagccctgcctccgtgagctcgggccggaaatccccgcactctaagtcacccgctgagcagagagaaaggaaatcactcgcagatgataagaagaaagtgaagaatctggggtacagggactccggatattactgggaggtccccccatctgaagtacagcttctgaagaggatcgggaccggctccttcggaacggtgttcaggggaaggtggcatggagatgtcgctgtgaaagtcttgaaggtgagtcagcccactgccgagcaggcccaagcctttaagaacgaaatgcaggtactacgaaagacgcggcacgtcaacatcctgctgtttatgggcttcatgacacgaccgggttttgccataatcacccagtggtgtgagggtagcagcttgtaccatcacctgcacgtggcagacactcggttcgacatggtgcagctgattgatgtggccaggcagactgcgcagggtatggactacctgcacgccaaaaatataatccatcgcgatctgaagagtaacaacatcttcctgcatgagggcctgacagtaaaaatcggtgacttcggtctcgccacggtgaaaacacggtggtctggcgcacagcctttggaacagccctctgggtccgtcctgtggatggccgccgaggttatcagaatgcaggacccaaacccttactcgttccagtccgatgtttatgcctacggtgtggtactgtatgaactaatgactggcagcttgccatactcacacattggttgtcgcgatcagattatttttatggtgggcagaggatacttaagccctgacctgtctaagatctcttctaactgcccaaaagcgatgcgaagactgctcagtgattgtcttaagtttcagcgggaggagagacccctgtttccccagattctagctaccatcgagctgctccagagatccctgccaaaaattgagcgcagcgcatctgagcccagcctccatagaactcaggccgatgaattgcctgcctgtctgctatctgccgcaaggctggtcccgtag

SEQ ID NO: 15545 - DNA, 3036 bp, synthetic construct
  source 1..3036: mol_type = other DNA; note = Synthetic coding sequence
atggttagcagcgataggcccgtttccctcgaggatgaggtatcccacagcatgaaggagatgattggggggtgctgcgtttgttcagatgaaagaggctgggccgagaaccctcttgtgtattgcgatggccatggatgctccgtcgccgtccatcaggcctgttatggcatcgtacaagtgcccaccggcccgtggttttgccgcaaatgtgagtcccaggagcgcgcagcccgggtcaggtgtgagttgtgccctcacaaggatggagctctcaagaggacagataacgggggctgggcacatgttgtgtgtgcactctatatacctgaggttcagtttgcaaacgtcagtacaatggagccgatcgtgctgcagtctgttccacacgaccgctataacaagacttgctatatctgtgatgagcaggggagggagtccaaagcggcgaccggcgcttgcatgacctgtaataagcatggatgtcggcaggcttttcacgtcacgtgcgctcagttcgcaggccttctttgtgaagaagaaggcaatggggccgacaacgtgcagtactgtggttattgcaagtaccacttttctaagcttaaaaaaagcaaaagagggagcaataggagttacgaccagagcctgagtgattccagctcccatagccaggacaaacatcacgagaaagaaaaaaaaaaatacaaggagaaggacaaacacaagcaaaagcataagaaacagccagagccatccccagccctcgtgcccagcctgaccgtgacaaccgaaaagacctacacaagtacgagcaataacagcatttcaggatcactcaaacggcttgaagacaccaccgctcgctttaccaacgcaaacttccaggaagtgagtgcacacacttccagcggaaaggacgtgtccgaaacgagagggagcgaagggaaggggaagaagagttccgcccactcaagtgggcagagaggtagaaagcccggcggcgggcggaaccccggaactacagtaagtgccgcttctcctttcccccagggtagcttctcagggaccccgggcagtgtcaaatcaagctccgggagctctgtccagtccccccaggacttcctttctttcacagattctgaccttcgtaacgattcatactcgcacagtcagcagtcatcagcaacaaaagacgtccataaaggtgaaagcggtagccaagagggaggcgtaaactcttttagcaccctgattgggctgccttctacctccgctgtaaccagccagcctaaatcatttgaaaattctcccggtgatttaggcaacagcagtcttccaaccgcaggatataagagagctcagacctccggcatcgaggaggaaaccgtgaaggaaaaaaagagaaagggaaacaagcagtctaagcacgggcctggccggcctaaggggaataaaaatcaggagaacgtgtctcatctgtctgtgtcctctgcttctcccacctcaagcgtggcctccgctgcgggctctataacgtcttctagcctgcagaagagtccgactttgctgcgtaacgggagtctacagagcctgagcgttggcagcagcccagtgggatctgaaatatcaatgcagtaccggcatgatggcgcatgtcccaccactactttctcagagctgctgaacgccatccacaatgggatatataactcaaatgacgtagccgtgtccttccccaatgtggtttccggatccggtagctccacaccagttagttcctcacatctcccccagcagagttcaggccacctccaacaggttggggccctgagtccctccgccgtgtcttcggccgctccagcagtggccaccacacaagcaaacaccctctctggtagcagcttgtctcaggcaccaagccatatgtacgggaaccgcagtaattcaagtatggccgccttgattgcacagtccgaaaataatcagactgaccaggacttgggcgataacagccggaacctggtaggtcggggctcttcacctagaggcagcttgagtccacgctcaccggtctcttccctacagataaggtacgatcaaccaggcaactccagcttggaaaacctgccgcctgtcgctgccagcatcgagcagctgttggaaagacagtggagtgaagggcaacagttccttctggagcagggcactccttctgatattctgggaatgctcaaatccctgcaccagctgcaggtcgagaacaggcgcttggaggaacagatcaagaacctcacagcaaaaaaggagcgcctccagctgcttaatgctcagctctccgtcccattcccgaccataacggcaaacccctccccgtctcaccagatccatacatttagcgcacaaactgctccgacaaccgatagcctgaactctagtaagtcaccacacattggcaacagctttcttcccgacaacagcttgccggtgttgaatcaggacctcacctcctccggccagtcaacgtcctcaagctccgccttgtccacccccccccctgccggtcagagtcctgctcagcaggggagtggagtgagtggagtccaacaggtcaatggggtgacggtgggcgccttggccagcggcatgcagcccgtaactagtacgatccccgctgtgtccgctgtgggagggatcattggggcccttcccggcaaccagctggctattaacggtatcgtcggggccctcaatggagttatgcagacaccagtgaccatgagccagaatcccaccccactgacgcacactacagttcctcccaacgccacccaccctatgcccgccactctgactaattccgcctccggtctgggcctcctgagtgaccaacagagacagatactaatccaccagcagcagttccaacaactgctgaactcccagcagctcacacccgttcacaggcaccctcacttcacgcagctacccccaacacatttttccccctccatggaaatcatgcaggtgaggaagtag

SEQ ID NO: 15546 - DNA, 3084 bp, synthetic construct
  source 1..3084: mol_type = other DNA; note = Synthetic coding sequence
atggtatcatcagatcggcccgtgtccctcgaggacgaggtgtcccacagcatgaaggagatgattgggggttgctgtgtctgtagcgatgagcgaggttgggccgagaacccgctggtttattgcgacggacatgggtgctccgtggccgtccaccaggcatgctacggcatcgtgcaagtccccaccggcccctggttttgccgtaagtgcgaatctcaggagcgtgcggctagagttaggtgtgagttgtgtcctcataaggacggggctctgaagcgcaccgacaacggcggatgggcccacgtggtctgcgctctgtatatccccgaggtccagttcgcgaatgtctctactatggagcctattgttcttcaatctgtccctcacgaccggtacaacaaaacctgttacatatgtgatgaacagggccgcgaaagcaaggctgcgactggggcttgtatgacctgtaacaaacacggctgtcggcaggcattccacgtgacttgcgcgcagtttgctggtttactctgcgaggaagagggcaatggtgccgataacgtacagtattgcggctactgtaagtaccactttagcaaactaaaaaagtccaagagaggaagcaatcgctcttatgaccagtctctctcagactcttcatcccattcgcaggataagcatcatgagaaggaaaaaaagaagtataaggagaaggataagcacaaacagaagcataagaagcagcccgaaccctccccggcactggtgccctccctcactgtgacaactgagaagacttacacctccacttctaataattctatcagcgggagcctgaaacggctggaagatactactgccagattcactaatgccaactttcaagaagtgtccgcccacaccagtagcggtaaggatgtttccgagactcgtggatctgaaggcaagggaaaaaaaagctctgctcacagctcagggcagcggggcaggaagcccggaggaggaagaaatcccggcactactgtgtccgctgcctcacctttccctcagggcagcttctcgggaacccccggctcagtgaaaagctccagcggatcctccgtccagagcccccaggattttttaagcttcaccgattctgatctccgcaacgattcctactcccactcccagcagtcctctgcaacgaaggacgtacataagggggagagtggatctcaggagggaggcgtcaacagctttagtactctgatcggcctgccctctacatccgccgtgacttcgcaacctaaatctttcgagaactcacccggcgacctcggcaacagctccctcccgaccgccggctacaagagagcacaaacctccggcatcgaagaggaaaccgtgaaagagaagaaacggaaaggtaataagcaatctaaacacgggccagggagaccaaagggtaacaaaaaccaggagaatgtcagccatctctccgtcagcagtgctagcccaacttcatctgtggccagcgcagctgggtccatcacatcgtccagcctgcagaaaagcccaacgctgctacgcaacgggtccctgcaatccctgtccgtgggcagttccccagttggatcagagatttccatgcaataccgccatgatggcgcctgcccaaccacgaccttctcagaactgcttaacgccatacacaatgaccgtggtgattcatcgacactgactaaacaggaactgaaatttatcggcatatataacagtaatgacgtcgccgtctcattcccaaatgtggtgtcgggcagtggctcctctacacctgtttcttccagtcatttgccacaacaatcgtccggacatctgcagcaggttggagcgctgtctccaagcgccgtaagcagcgcggctccagctgtcgctactacgcaggctaacacactgtcagggtcgtccctgtcccaggctcccagtcacatgtacggtaacaggtctaactctagtatggcagcgttgattgcccaaagcgagaataaccagacagatcaggacctgggcgataactcccggaatctggtgggcagaggtagtagcccccgcggctctttgagcccccgctcccccgtgtctagtctgcagatccggtatgatcaaccgggaaactcctcgcttgagaaccttccccccgtggctgcctctatagaacaactcctcgaacgccagtggtccgaggggcagcagttcctgctagaacagggaacaccctctgacattctgggcatgctgaaatctttgcatcagctccaggtggagaatagacggctggaggagcagattaaaaatctgactgccaaaaaagaacgcctccagttactgaatgcccaactgagtgtacccttcccaacaatcacagctaatccctctccttctcaccagatccacacattttctgcccagacggctcccactaccgatagtctaaacagcagtaaatcgccacacatcgggaatagctttctgcctgataacagcctgcctgttctgaatcaggacctgaccagcagtgggcagagcacgtcttcatcttctgctctttctactcccccgccagctggccaatcccccgctcaacagggcagtggcgtgtcaggagtacaacaggtgaacggcgtgacggttggtgccctggcttccggcatgcagccagttacttccacaatacccgctgtttctgcggtggggggcattattggtgccttacctggcaatcagctggccattaatggcatcgtgggcgcactcaatggagtgatgcagacccccgtgactatgtcacagaacccaacccctctgacccacactacagtgccaccaaacgccacacacccaatgccagctactctgaccaattctgcttctggtctgggtctgttaagcgaccaacagagacagatcctgatccatcagcagcagttccagcagttgctcaacagtcagcaactcacacctgtccatcgacatccccacttcacccagttaccccccacacacttctccccctccatggaaatcatgcaggtgcggaagtag

SEQ ID NO: 15547 - DNA, 567 bp, synthetic construct
  source 1..567: mol_type = other DNA; note = Synthetic coding sequence
atgactgcccctagttgcgcattcccagtgcagtttcgccagccaagtgtcagcggattgtcacagatcaccaaatcgctgtatatatccaacggcgtcgcagctaataacaaattgatgctgagctcgaatcagataactatggtgatcaacgtttcggtggaggtggtgaataccctgtatgaggacatccaatatatgcaggtgccagtggctgattcacctaacagcaggctctgtgatttcttcgatccaatcgctgatcacatccattccgtggaaatgaaacagggaaggaccctccttcactgtgctgccggcgtctctaggagtgccgcgctgtgcttggcttacttgatgaagtaccacgcaatgtctctcctggacgctcatacgtggacaaagagctgccgtccaataatcagaccaaattctgggttttgggagcagctgatccactatgaattccagctgttcggaaagaacaccgtccatatggtgtccagccctgtgggtatgattcctgatatctatgaaaaggaggtgcgcttgatgatccctttgtag

SEQ ID NO: 15548 - DNA, 381 bp, synthetic construct
  source 1..381: mol_type = other DNA; note = Synthetic coding sequence
atggtttcaagcgacagaccggtctccctcgaagacgaggtttcccattcgatgaaggaaatgattggaggttgctgtgtttgttcagacgaacgtggatgggccgagaatccactggtctactgtgacgggcacgggtgctctgtggccgtacaccaggcctgctatggtatcgtgcaggtccctaccgggccatggttttgtaggaaatgcgagtcccaggagcgggcagcacgagtcgccgagtcccgaagtgtagctcaggcaaaagtgcagtggtgtgacctgagcccattacagccgttgctgccaggctttaagaggttttcttgtctttcgctgcctaacggaatgcagtttctgctcgttagcctgatctag

SEQ ID NO: 15549 - DNA, 540 bp, synthetic construct
  source 1..540: mol_type = other DNA; note = Synthetic coding sequence
atggtgagcagtgaccgacctgtcagcctcgaggatgaagttagtcatagtatgaaagaaatgataggaggctgctgcgtgtgtagtgacgagcggggatgggcagagaacccccttgtatattgcgatgggcatggttgtagcgtggccgtccaccaggcttgttacgggatcgtgcaagtgcccacaggaccatggttctgccggaaatgtgagtcccaagaaagagccgcaagggttatggtctgcaacagttgctggttagcatcttctgagaatgtgacaccaggatatatcgaacaccactgtgcctgtgcatcccctcacccgaggtgcctagtcagcaacgtacccccagtgtccggcgctctgatgcattgtttctgggcctgtcttaccaccgcggcttttttcggtccccaatcttttaccacatgtcatatgagctttctggtgtccagagatatactattctacatatatgggttcatgcctttcatctccgttgtgatttggagattcaaaaaggaacggtggtag

SEQ ID NO: 15550 - DNA, 540 bp, synthetic construct
  source 1..540: mol_type = other DNA; note = Synthetic coding sequence
atgggactgatctttgctaagctctggtctctgttctgcaaccaagaacacaaggtgatcattgtcgggctggacaacgccgggaagacaacgatcctctatcagttccttatgaacgaagtggtgcacaccagcccgacaattggcagcaacgttgaagagatcgttgtcaaaaacacacattttctgatgtgggacatcgggggacaagaaagcctacggagttcctggaatacatattactcaaatactgagttcattatactggtggttgactcaattgatcgtgagaggctcgcaattactaaggaggagctctatcgcatgctcgcccacgaggacctgagaaaggccgccgtgctgatttttgctaacaagcaggacatgaaaggatgcatgaccgccgccgaaatctcaaagtacctcacattatccagcatcaaagaccacccatggcatattcagagttgctgcgcactcaccggggagggcctgtgccagggactagagtggatgaccagtcggatcggcgtgagatag

SEQ ID NO: 15551 - DNA, 3345 bp, synthetic construct
  source 1..3345: mol_type = other DNA; note = Synthetic coding sequence
atgtctcagacgcaggattacgagtgtcgcagtcacaatgtggatctccccgaaagccggatcccaggcagcaacacacggctggaatgggtggagataatagaaccccgaacacgtgagaggatgtacgcgaaccttgttaccggcgagtgtgtttgggacccccccgccggagttcgcattaagcggacttctgaaaatcagtggtgggaactgttcgacccaaataccagtcgattttactactataacgcctccacccagcgcacagtgtggcatagaccgcagggctgcgatataattcctctggccaaactgcagaccctcaaacaaaataccgagtcccctcgagccagcgcagagagctctccaggccgcggttcctcagtgagccgggaaggtagcacatcctcaagcctggaaccagagccggacaccgagaaggcccaagagctgccagcgcgggccgggaggcccgcggccttcggtacagtcaaagaggactctggaagttctagtcctcccggagtcttcctggagaaggactacgagatctaccgagattattcagccgatggccagctgctgcattaccgcacatcttctttacgatggaatagcggagctaaggaacggatgctgataaaagtggcggaccgcgaaccgtccttcttggccgcacaaggcaatggctatgctcccgatgggcctcccggggtgcggtctagaaggcccagcggctcacagcacagcccttccctgcagacttttgcccccgaggcagatggtaccatatttttcccggaaagaaggccttccccgtttcttaagagagcggaactgcccgggtctagttctcctctccttgcccagccccggaagccctcaggcgatagtcaaccatcctcaccacgctacggatacgagccgccgttgtacgaggaaccgcccgtggaataccaagccccgatttacgatgaacctcctatggacgtgcagtttgaagcaggtggcgggtaccaggcagggtctccacagagatctcctggcagaaagcctcgcccctttctgcagcctaacaaacaagggccacccagcccttgtcagcagctcgtccttacaaaacaaaagtgtcctgagcgattcctgtccttggaatactcccccgctgggaaagaatatgttagacagttagtatacgtggagcaggcagggtcaagtcccaaactcagagcaggaccacgtcataagtatgcccccaacccagggggaggttcctatagcttacagccctctccgtgcctgttgcgcgatcaacgacttggggtgaagtccggcgactacagcacaatggaggggccagagctccgccattcccagccccccactccactgccccaggctcaagaagacgccatgtcatggagttctcagcaggataccctctcctccacaggttacagtccgggtacgcgtaaaagaaagagccgcaagcctagtctctgtcaggccactagcgcgactccaaccgaagggccaggtgatctcctcgtcgaacagcccctcgctgaagagcagcctccatgcggaacctcactggcccctgtgaagcgcgcagagggtgaggcagagggcgcaaggggtgcagctgagccgtttctggcacaggcccgtcttgcatgggaggctcaacaggcgcattttcatatgaagcaacggagtagctgggactcccagcaggacggttctggttacgagtcagatggtgcattgcctttgccaatgccgggaccagtggtccgtgcctttagtgaagacgaggctctggcccaacaggaaaataggcattggaggcggggaacgtttgagaaattgggttttcctcagattctgctggagaagtctgtgtctgtccagacaaacttagcttcccccgagccctatctgcatccgtcgcagtcagaggacttagcggcttgtgcccagttcgaatccagtagacaatctcgctccggggttccatcgagcagctgtgtgttccccacgttcacattaaggaagccttcatcagaaaccgatattgagaattgggctagcaaacactttaacaaacatacccaaggcctgttccgtcgtaaagtgtcaattgctaacatgctggcctggtccagcgagagcataaaaaagcccatgattgttacctctgatcggcacgttaaaaaggaagcctgcgaactgtttaaactgatacagatgtacatgggtgatcggcgggcaaaagctgaccccctgcatgtggcgcttgaagtcgctactaaagggtggtctgtgcagggccttagagacgaactgtacattcagctttgccgccaaacgaccgagaacttccggctggaaagcctcgctaggggctgggagctcatggcaatttgtctggccttcttcccacccacccccaaatttcactcatatttggaagggtacatttaccgacacatggaccctgtcaatgatacaaaagttactcaacacattaaagagcttcttgagcgaaatacgaaaaaaaagagtaagctgaggaaaaagcccaagccctacgtggaagagccggatggtgtggctatctctacctatgcaaaatactgttaccacaagttgcagaaggcagcgctgaccggggccaagaaaggcctaaaaaagccgaatgtagaggagatcaggcatgcaaaaaacgctgtattctctccttctatgtttggcagcgccctgcaggaagtcatggggatgcagcgcgaacgataccctgaacggcagctcccatgggtgcagaccaggctgtctgaggaggtcctggcactcaatggagaccaaactgagggtatttttagggtgcccggggacattgacgaggtcaacgcactgaagcttcaggtggaccagtggaaagtgccaacaggcctggaagatccacatgtgccagcatccctcctgaagctgtggtatagagagcttgaggagccactgattccccatgaattctacgagcagtgcattgcccattatgatagccccgaagccgccgtcgccgtagtgcacgctcttccgcggattaatagaatggtcctgtgttacctgatccggtttctgcaggtgttcgtgcagccagcgaacgtcgcagtgaccaagatggacgtttcaaacttggcgatggtaatggctccaaattgtctacgatgtcagagcgacgacccaagagttatttttgaaaacactagaaaggaaatgtcattcctgagagttctgattcagcaccttgacacctcattcatggagggagtattgtag

SEQ ID NO: 15552 - DNA, 822 bp, synthetic construct
  source 1..822: mol_type = other DNA; note = Synthetic coding sequence
atgggacaaaaggtaactggcggcataaagaccgtcgatatgcgggatcccacgtacaggccactcaagcaggagctccaaggactggattactgcaagcccacccgactggatctgctactggacatgccacccgtctcatatgatgtgcagcttttacattcttggaataacaatgataggtctttaaatgtgttcgttaaggaggacgataagcttatttttcaccgacacccagtcgctcagtcgaccgatgcgattcgcggaaaggtcggatacacacggggcttgcatgtctggcagatcacttgggcaatgagacagcgggggacccatgccgttgtgggtgttgcaacggcggatgctcctttacattcagtgggatacactacactagtggggaataaccacgaatcctggggctgggacctgggtcgcaatcgtctgtaccacgacggaaagaaccaaccctccaagacatacccagcctttcttgagccagatgagacgttcatcgttccagactccttccttgtcgccctggacatggacgacggaacattatccttcatcgtggacggccaatacatgggggttgcatttcggggcctaaaagggaaaaaactgtaccccgtagtgtccgctgtgtggggacactgcgagatacgaatgagatacctcaacggcttagaccctgagccactgccactgatggacctgtgccgtcggtcggtgaggttagcactcggaagagaaaggctaggggaaatccacacgctgccacttccagcctccctcaaggcttacctgctgtaccagtag

SEQ ID NO: 15553 - DNA, 3633 bp, synthetic construct
  source 1..3633: mol_type = other DNA; note = Synthetic coding sequence
atgccaaggggtgaggcaccaggtccaggtagaaggggcgctaaagacgaagccctaggggaggagagtggtgaacgctggtctccagagttccatctgcagagaaagctggctgattcgagtcatagtgagcagcaggatcgcaacagggtgagcgaggagctcatcatggtggtgcaggagatgaaaaaatattttccctctgaaagaagaaataaaccgagtacccttgacgccttaaattatgctctccgatgtgttcattccgtgcaagctaatagcgaattcttccaaatcttgtcccagaatggagctccacaggcagacgtcagtatgtacagcctggaagagttggccactatcgcttcagagcacaccagcaagaacacagacaccttcgtcgccgtgttttcctttctgtctggacgattggtccacatatctgagcaggccgccctcatcttgaatcggaagaaagacgtactcgcaagttcccactttgtcgacctgctggcccctcaggacatgcgggtattttacgctcacaccgccagagcccagctgcctttctggaacaactggacgcagcgggctgccgctagatatgagtgtgcgcccgtgaaacctttcttttgcagaattagagggggcgaagatcgtaagcaggaaaagtgccatagtccgtttagaattattccatatcttatccacgtccaccaccccgctcaaccagaactcgagtcagagccatgttgcttaaccgtggtggaaaagatccactccggctacgaagctcctcggattcctgtgaataaacgaatcttcaccaccactcacactccaggatgtgtgtttctcgaagtggacgagaaggctgtccctttgcttggctacctcccccaggacctcatcggaacaagcattctgtcctatttacaccctgaggatcggtcactgatggtcgcaatccatcaaaaagtcttaaagtatgctgggcacccgccttttgagcatagtcctattaggttctgtacccagaacggtgattatatcatccttgactcatcctggagcagctttgtgaacccatggtccagaaaaatcagtttcatcattggtcgtcataaagtgaggacttcacccttaaacgaagacgtgtttgcgaccaagattaaaaagatgaatgacaacgataaagatatcaccgaactacaggagcagatatacaagctgcttcttcagcccgtgcacgtgagcgtgagttctgggtacggctcgctcggaagcagcggatcccaggagcaactcgtctccatagcttcctcttcagaggcctccggacacagagtagaggaaacaaaggcagagcagatgacactccagcaagtttacgccagtgtcaacaagatcaagaatctgggacagcagctctatatcgaaagcatgaccaaaagttcattcaaaccagttaccggaacacggaccgagccaaatggaggtggagagtccgctaatggtggtggcgagtgcaaaacgtttacaagcttccaccagacactgaagaataactccgtctacaccgagccttgcgaggatctccgaaatgacgaacattccccttcctaccagcagatcaactgcattgattccgtgatacgttatctcaagtcctataacatccccgcactgaaacggaaatgtatatcttgtactaatacaacttcttccagcagtgaggaggacaagcagaatcacaaggcagatgatgtgcaggcactgcaggccggcctgcagatacctgccatccctaagtcagagatgcctacaaacggccgcagcatcgacacaggcggtggagctccacagattctgtccaccgccatgctaagcctgggttccggaatatctcaatgtggttactcctccacaatcgtgcacgtgcctcctcctgagactgctagagacgctacactattctgcgagccatggaccctaaatatgcaacctgcccccctgacatcggaagagttcaagcatgtcggcttgacagccgcggtgctgtctgcccacacacagaaagaggaacaaaattatgtggacaaatttcgcgagaaaatcctctccagcccttattccagttacctgcagcaagagagtagatctaaggccaaatatagttacttccagggggattcaactagtaagcagacacggtccgctggctgccgcaagggtaaacataagcgcaaaaagcttcctgaaccacccgactctagtagtagcaacactgggtcaggacctaggcgcggagcccatcagaacgcccagccatgctgtccttccgctgcctcctccccgcatacctcctctccaactttccctcctgctgcaatggtgcctagccaagccccatatttggtgccggcgttccccttaccagccgccacaagtcctggccgagaatatgccgctcctgggaccgcccccgaaggtctgcacggcctgcccttatccgaaggacttcagccctatcccgcatttccgtttccatacctcgacacctttatgactgttttcttacccgacccacccgtctgccctcttctgtctccttctttccttccgtgtccttttctcggcgccaccgcctcatctgcgatttcacctagtatgtccagcgctatgtcccccacactggatccccctcccagcgtgactagccagcgacgcgaagaagagaaatgggaagcacagtcagagggccatccgttcatcacatcgcgaagttcttctcctttgcagctcaacctgcttcaggaagaaatgcctcgcccttcagagagcccagatcagatgagacggaatacatgtccccaaacagagtatcagtgcgtgactggaaataatggcagcgaatcgtcgcccgccactaccggtgccctcagtaccgggtctccccctagggagaacccttctcaccctaccgcctctgccctgtcgaccgggtcccctcccatgaagaacccctcgcaccccacagccagtgccctgagtacaggcagcccgcctatgaaaaacccatcccacccgaccgcgagcactttatcaatgggtctgcctcccagccgcacgccttcacacccaaccgccacagtccttagcaccgggtcccctccctctgagagcccctcaagaaccggctctgctgcaagcggtagctcagatagtagcatctaccttactagtagtgtgtactcgagcaagatcagccagaatggacaacagagccaggacgtccagaaaaaagagacctttcccaatgtcgccgaagaacctatctggaggatgatcagacagaccccggaacgcatcctgatgacctatcaggtgccagagcgcgtaaaagaagtggtgctgaaggaggacctagaaaagctggaatcgatgaggcaacagcagccgcagttcagtcacggacagaaggaggagttagctaaggtttataattggattcagagtcagaccgtaacgcaggagatcgatatccaggcctgcgtgacctgcgaaaacgaggattccgccgatggcgccgcgacctcgtgcgggcaagtgctcgtcgaggattcatgctag

SEQ ID NO: 15554 - DNA, 1137 bp, synthetic construct
  source 1..1137: mol_type = other DNA; note = Synthetic coding sequence
atgccacgtggggaagcgccgggccctggacggcggggtgcaaaggacgaggcattgggcgaggaaagtggtgagagatggtctccagaattccaccttcagcgcaagctggccgattcgagccattccgagcagcaggataggaatcgagtgtctgaggaacttatcatggtggtgcaggaaatgaaaaaatactttcctagtgagcgcaggaataagccgagcactttggacgctctgaactatgctctgcgttgtgttcattctgtgcaggccaatagtgagttcttccagatattgtcacaaaacggggcgccacaggcggatgtaagtatgtattctctggaagaacttgcgaccatcgcctcggagcacacgagtaaaaacactgataccttcgtggcagtcttcagttttctttccggtaggctcgtacatattagtgagcaggccgccctgatactcaatagaaagaaggatgtcttggcttcatcgcacttcgttgatctgctggccccccaggatatgagagtcttctacgcgcacacagccagggctcaactaccattttggaataattggacccagcgagctgcacgttatgagtgcgcaccagtgaagccattcttctgcagaatcagaggtggagaagataggaagcaggaaaaatgccactccccatttcgaatcataccgtacttgatccatgtacatcaccctgctcaacctgaattagagtcagaaccatgctgcttaacagtcgtggagaagatccattctgggtacgaagctccgcgaatccccgttaataaacgcatattcactacaacacacacacccgggtgtgtgtttctggaggtggacgaaaaggctgtgccgttactaggctacctgccccaggacctgattggcacgtccatcttgagctacctccatccagaagacaggagcctgatggtggcgatccatcaaaaggttttaaagtacgcgggacatcctccatttgagcactccccgattcgcttttgtacccagaatggcgactacataatacttgattcctcttggtcctccttcgtcaacccttggtcacggaagatcagcttcatcatcgggcgacacaaagttagaacatag

SEQ ID NO: 15555 - DNA, 1794 bp, synthetic construct
  source 1..1794: mol_type = other DNA; note = Synthetic coding sequence
atggagcggcccgccccgctggccgtcttaccattcagcgacccagcccatgctttgagcctcctccgcggactctcccagctccgagctgagaggaagttcctggacgtgacgttggaggctgccggaggtagggacttccctgcccaccgggctgtcctggctgcagccagcccttattttagagccatgttcgccggccagttacgggagagccgggcagaacgggtgagacttcacggggtacccccagatatgctgcaattactgctggatttctcatacactggacgcgtagccgtcagcggcgacaacgccgagcccctgttgagagctgcggatttattgcaattccccgcggtcaaggaagcttgcggcgcctttttacaacagcaactcgacctcgctaattgcctggacatgcaggactttgcagaggcctttagctgctccgggttagcaagcgcagcacagcgattcatcctcaggcatgtaggtgagttgggggccgaacaattagaacgccttccgctggccagactgttgaggtacctgcgcgacgacggactgtgcgttccaaaagaggaagccgcctatcagctggccttacgctgggttagagctgatcccccgagaagggccgcccactggccacaacttctcgaggcggtgcgcctacctttcgtcaggcggttttatctgctcgcgcacgttgaggccgagcccctggtggcaagatgccccccatgcttgagactgttacgtgaggcccgggatttccaggccgcgcgctatgacaggcacgatagaggcccttgcccaaggatgcgtcctaggccaagcactgggcttgcagagatcttggtgctcgttggggggtgcgaccaggactgtgacgagcttgtaactgtggactgctacaacccccaaacagggcagtggagatacctagcagagtttccggaccacctcggtggaggatacagcatcgtggctctgggtaatgacatttacgtgaccgggggcagtgatggtagcagactttacgattgcgtgtggcgctacaatagttcggtgaacgagtgggctgaagttgcccccatgttgaaagctagagagtaccacagtagcagtgtgttggacggcctcctgtatgtggtagcagccgactcgacagagcggtatgaccacaccactgattcatgggaggctctgcagcccatgacatacccgatggacaattgtagcaccactgcatgtcgcggcagactgtatgccattgggtctcttgcagggaaggaaactatggtgatgcaatgttacgatcctgataccgatctgtggagcctggtggactgcgggcaactcccgccctggtccttcgccccaaaaaccgctactctgaatggccttatgtactttgttcgagatgactcagccgaggtggacgtatacaaccctacccgaaacgaatgggacaagatcccctccatgaatcaggtccacgtaggtggctcactcgccgtgctgggaggcaagttgtatgtttccggcggttatgataataccttcgagctgtcagatgtcgtggaggcttacgatcctgagaccagggcatggtccgtggtgggaaggctgccagaaccaaccttctggcacggaagtgtgagcatattcaggcagtttatgccgcagactttttccggtgggcgcggattcgaattggattccggctcggacgacatggaccccggaagaccgcgccccccacgcgatcccgatgagttacactag

SEQ ID NO: 15556 - DNA, 1620 bp, synthetic construct
  source 1..1620: mol_type = other DNA; note = Synthetic coding sequence
atggagcggccagctccattggcagtgcttcctttctcagacccagctcatgccctgagcctgctgagaggtctgtctcaactgagagccgagcggaagtttctggacgtgaccctggaggcagccggcgggcgcgatttccctgcccacagagctgttctggcagccgcatctccttacttcagagccatgttcgccgggcagctccgtgagtctcgagcagagcgggtgagactgcacggggtcccacctgatatgctccaattgctgctggacttcagctacacaggaagggtcgccgtgagtggggacaatgcggagccactgcttagagctgctgatttactccagtttcctgctgtgaaagaagcctgcggtgcttttctccaacagcagctggatttggccaactgcctcgatatgcaggacttcgccgaggcgttctcttgtagtggtcttgcctcggcagctcagagattcattcttcgacacgttggagaactcggagccgagcaactagagcggctccctcttgctaggctcctgcggtacctgagggacgacgggctgtgcgtgcccaaagaagaagcagcctatcagctcgccctcagatgggtgcgcgcagatcccccacgtagggcagcccattggccccaactcctcgaggcggtgaggttgccatttgtgagaagattctatctgctggcccacgtggaagccgagcccttggtagcgaggtgcccaccatgcctacgcctcctgagagaggccagagattttcaggctgctcggtatgataggcatgatagagggccctgtccaagaatgcgacctcgccccagcaccggcttagctgagatccttgtgctggttggaggatgtgaccaagattgtgatgagctggtgacagtcgattgttataacccccagacaggtcagtggaggtatcttgcagagtttcctgatcacctgggaggtggttactcaatcgttgccctaggcaacgacatatacgtaacaggtggatctgacggctcccgtctgtatgactgcgtatggcggtacaactcttccgtaaatgagtgggcagaagtggcgccaatgctgaaagctagagagtaccattctagcagcgtgctggacggccttctctatgtcgtcgctgcagattcaacagagaggtacgatcatacgacagattcttgggaggccctgcaacccatgacctaccccatggacaactgcagcacaaccgcctgtaggggacgactgtacgccatcggctctctcgccgggaaagagaccatggtcatgcaatgctatgatcctgatacggatctctggtcactcgtggactgcgggcagctaccaccgtggagttttgcaccgaagacggccaccctgaacggattgatgtatttcgttcgagacgatagtgcagaagttgatgtttacaacccaacaaggaacgagtgggacaaaattcctagcatgaaccaagtgaactttcaagcaggccagcactggaagcatcgactcgttctcatcctccagcccaagtgccaccgagacgagtgtctgggctctactgccatgatgggcggaagtcatcttaactag

SEQ ID NO: 15557 - DNA, 2067 bp, synthetic construct
  source 1..2067: mol_type = other DNA; note = Synthetic coding sequence
atggacggtagtttcgtgcagcatagtgttcgagtgttgcaagagcttaacaagcagagggagaaaggccaatactgcgacgctacacttgacgtgggcggcctggtcttcaaggcccactggtctgtgctcgcctgctgctcacatttcttccaatcactatacggtgatggcagcggaggcagtgtcgtgctcccagccggatttgccgagattttcgggctgctcctggacttcttttacactgggcaccttgccctgacttcagggaaccgcgaccaggttctactcgctgccagggaactccgcgtgccagaagctgtggagttatgtcagtctttcaaacccaaaactagtgtgggacaggctgcaggcggccagagcggcttgggtccacccgcttcacaaaatgtgaactcacatgtcaaggaacctgcggggctagaggaggaggaggtgtcacgtacactcgggctcgttcccagggatcaggaacccagaggctcgcatagtccgcagcggcctcagctgcatagcccagcacaatctgaagggccctcaagtttgtgtggcaaactgaaacaggcgctgaaaccctgcccactcgaggataagaaacccgaggactgcaaggtgccacctaggccgctggaagccgagggagcccaattgcaggggggctccaacgaatgggaggtggtcgtgcaggtggaggatgatggagatggagactacatgagtgaacccgaggctgtcttaactagaagaaagagtaacgttatcagaaaaccttgtgccgccgaacccgcactctctgcaggctctctggctgccgaaccagcggaaaaccgaaaggggaccgcagtcccagttgagtgccccacatgtcataagaagtttctcagtaagtactacctgaaggttcacaataggaaacacactggagagaagccatttgagtgtcccaagtgtggaaagtgttacttccggaaggaaaatcttctggagcacgaagcgagaaattgtatgaaccggagcgaacaagtgtttacatgtagcgtgtgtcaggagacctttaggagaagaatggagctcagggttcacatggtgtcccatacaggggagatgccgtacaaatgctcttcttgcagccaacagttcatgcagaagaaggatctccagagccatatgattaagctgcacggagcacccaagccgcatgcatgtccaacttgcgctaaatgtttcctgtcaaggactgaactgcagctacatgaagccttcaaacacaggggagaaaagctgtttgtatgtgaggagtgcggtcaccgagcctcctctaggaacggcctacagatgcacattaaagctaagcacaggaatgaacgaccacatgtgtgcgagttctgttctcacgccttcacccagaaggcaaatttgaacatgcacttgagaacccatacaggcgaaaaaccattccagtgccacctgtgtggcaagacatttagaacacaggcctcattagataaacataacagaacccatactggggagagacccttctcgtgcgaattctgcgagcaaagattcacagagaagggccccctcttgcgacacgttgctagccgacatcaagaggggcggcctcatttctgtcaaatctgtggcaaaacatttaaggccgtggaacagcttagagtgcacgtgcgacggcacaaaggagtgcgtaagttcgagtgcaccgagtgcggatacaagtttacacggcaggcccacctgaggcgccacatggaaatccacgatagagtagaaaactacaatccccggcaacgtaagctgaggaatctcatcatagaagatgagaaaatggtcgtagtcgccctgcagccacccgcagaactggaggttggaagcgctgaggtcattgtcgagagcctagcccagggcggacttgccagtcagttgcctggtcaacggttgtgcgctgaggagtccttcaccgggcccggcgtgctggagcctagcctcatcatcaccgccgccgtgcccgaagattgcgacacgtag

SEQ ID NO: 15558 - DNA, 525 bp, synthetic construct
  source 1..525: mol_type = other DNA; note = Synthetic coding sequence
atgacacactgttgctccccttgctgtcaaccaacatgttgccggactacctgttgtagaacaacgtgctggaagccaacaacagttaccacctgctcaagtacaccctgttgccagccagcttgctgcgtcagtagctgctgtcagccttgttgtaggccaacctgttgccaaaatacctgttgtcggacaacctgctgtcagcctacgtgtgtcaccagctgttgtcagccttcttgttgctcaactccctgctgccagcccacctgctgtgggtcgtcttgctgtgggcagaccagctgtggatcctcatgtggacagagctcaagctgcgcaccggtgtattgtcgccgcacatgctactacccaacaactgtgtgcctccccggctgtcttaaccagagctgcggcagtaattgctgtcagccttgctgccggccggcatgttgcgagaccacttgttgtagaactacttgctttcagccaacctgtgtgtcgtcatgttgccagccctcatgttgctag

SEQ ID NO: 15559 - DNA, 597 bp, synthetic construct
  source 1..597: mol_type = other DNA; note = Synthetic coding sequence
atggtctcatcttgctgtggatcagtctgtagcgaccaaggctgtagccaggacctgtgtcaggagacatgttgtcgcccttcttgttgtcagaccacctgttgtaggacgacttgttaccgcccttcatgctgcgtgagcagctgttgtaggccccagtgttgtcagtccgtttgttgtcagccgacctgttgtaggccaccgaggtgctgtatcagctcatgctgcaggcctagctgctgtatgtcaagctgttgcaaaccccagtgctgtcagagcgtgtgctgccaacccacaactacctgctgccatcctaggtgctgtatctccagctgctgtcggccctcttgttgcgtgtcatcatgctgcaagccacagtgctgtcaatctgtgtgttgtcagccaaactgttgccgcccttcgtgttccatctccagctgttgccgtccaagctgttgcgaaagcagctgctgtcggccatgctgttgcgtgcggcccgtgtgcgggagagtgtcttgccacactacttgctatcggcctacctgtgtaatatcttcctgcccccgaccattgtgctgtgcatcaagctgctgttag

SEQ ID NO: 15560 - DNA, 1296 bp, synthetic construct
  source 1..1296: mol_type = other DNA; note = Synthetic coding sequence
atgacgtcagactgctcctctactcactgctcacctgagtcatgcggcacagctagcgggtgtgccccagcttcctcttgctctgttgaaactgcatgcctacctggtacatgcgcaacctccaggtgtcaaacaccctcctttctctcccgctctagaggactgaccggatgtttgctaccctgctatttcaccggtagttgcaatagtccatgcctggtgggaaactgtgcttggtgtgaggacggcgtgttcacttccaatgagaaggaaactatgcagttcctcaacgacagattagcatcgtatctggaaaaggtgcgctctctggaagagactaacgccgaactcgaatcccggatccaggagcaatgcgagcaggatatcccgatggtgtgccctgactatcagaggtactttaacactatcgaagatctgcagcaaaagattctgtgcaccaaggccgaaaattcccggcttgcagttcagttggacaattgcaaactggcgaccgatgatttcaagtctaaatacgagtcagagttgagcttaaggcagttgttggaggccgatatctcgtccctgcacggcatcctggaggagctgactctgtgtaagtctgacctggaggcccatgtagaaagcctgaaagaagacctactttgcctgaaaaaaaaccacgaggaagaagtcaatctgctgagagaacagctcggggatagactgtcagtggagctggacacagcaccaacccttgatttgaatcgcgtgctcgacgagatgcgctgtcagtgtgagaccgtgctggcgaataaccgaagggaggctgaggagtggctggctgtgcagaccgaggaacttaaccagcaacagttgagctcggctgagcagctgcaaggctgccagatggagatcctagaactgaagagaacggcctctgcactggaaatagaactccaggcccagcagtctttgacagagagtttggaatgcactgtggcagagactgaggcacagtattcttctcaactcgcccagattcagtgccttattgataatctggagaaccagttagctgagattaggtgcgatctcgagcggcagaaccaggagtatcaggttctgttggatgttaaagcgcggctggagggcgaaattaacacttattggggcttactggactccgaggacagtcggttaagttgctccccttgcagtaccacctgtacttcaagcaacacatgtgagccgtgttccgcttacgtcatctgtaccgtggagaattgttgtctttag

SEQ ID NO: 15561 - DNA, 1047 bp, synthetic construct
  source 1..1047: mol_type = other DNA; note = Synthetic coding sequence
atggctggatctctgcccccctgcgtggtcgattgcggcaccggctataccaagctgggttatgctggcaatacagagccacagtttatcatcccttcgtgcatcgccatcagggaaagtgcaaaagtggtagaccaggcccaaaggcgggtcctgaggggtgtggacgatctggatttctttatcggagacgaagcaatcgataaacctacttacgctactaagtggcctattcggcacggcattatcgaagattgggatctgatggagagattcatggagcaggtggtgtttaaatacctcagagctgaaccagaggaccattatttcttgatgacggagccacccctgaatacccctgaaaacagagaatatctcgctgaaatcatgtttgaatcattcaacgtccctggactgtacattgctgtccaggctgttcttgcgctcgcagcctcctggacgagcagacaggtgggagagagaacgttaaccggcatcgtgattgactctggcgatggggtgacacatgtcataccggtagctgagggctacgtcatcggatcatgtatcaagcacatccccatcgctgggagggacattacttactttatccagcagctcctgagggaaagagaggtgggtatacctcccgaacaatcgctggaaaccgccaaagcgattaaagagaaatattgttatatctgcccagacatcgtgaaagaattcgcaaagtacgacgtggacccgcgcaaatggattaagcaatacacaggaatcaacgcgatcaaccagaagaaatttgtgatcgacgtgggctatgagcgattcctgggtcccgagatcttctttcacccggagtttgccaacccggattttatggaatctatcagcgacgtggtggacgaagtgatccaaaattgccctattgacgtgcgtcgccctctgtacaagcccgagttctttcaggtgtgccatacgaaaaaagattatgaagaatatggtcccagcatttgccgccacaacccagtgttcggcgtgatgagttag

SEQ ID NO: 15562 - DNA, 273 bp, synthetic construct
  source 1..273: mol_type = other DNA; note = Synthetic coding sequence
atggacaatatgagtcctcgactgcgggcctttctgagcgagcccatcggcgaaaaggacgtgtgctgggtcgatggcatctcgcacgagttagccatcaatcttgtaacaaagggtattaacaaggcctacatcctcctaggccagtttctccttatgcataagaatgaggccgaatttcagagatggcttatatgctgcttcggggctacggaatgcgaggctcagcagacctcccactgcctgaaggaatggtgcgcttgcttcttatag

SEQ ID NO: 15563 - DNA, 249 bp, synthetic construct
  source 1..249: mol_type = other DNA; note = Synthetic coding sequence
atggcttcgtcttccggcgcaggggccgctgctgccgcagcggccgctaacctgaacgctgtccgtgagaccatggatgtccttctcgagattagcaggatcctgaatacaggactcgatatggagacactcagtatctgtgtgcgactgtgtgagcaagggataaatcccgaggccctttccagcgtcataaaggagctcaggaaggctacagaagccctaaaagcagccgaaaatatgacaagttag

SEQ ID NO: 15564 - DNA, 3732 bp, synthetic construct
  source 1..3732: mol_type = other DNA; note = Synthetic coding sequence
atggaaaccagagctgcggagaataccgcgattttcatgtgcaaatgctgtaatctgttctccccgaaccagtccgaactgctcagccacgtgtcagagaaacacatggaggaaggagttaacgttgacgagatcataattccgctacgaccattgagtactccggaaccgccaaactcctccaaaacaggtgatgaatttctggtgatgaaaagaaaacggggacgccctaaggggtcaacaaagaagtccagcacggaggaagagctggccgaaaacattgtttcgcctaccgaggactctccgctggcacctgaggagggcaactccttgcctccaagttcgctggagtgttctaaatgctgcagaaaattctcaaacactcgtcaattaaggaagcatatctgtataatcgtgctgaacctgggtgaagaggaaggtgaagccggaaatgagtctgacctcgaactcgagaaaaaatgtaaggaggatgatcgcgagaaagcctctaagagacctcgcagtcagaagacggaaaaggtacagaagataagtgggaaagaagccagacagctgtccggcgctaagaagcccatcattagtgttgtcctgacagcccacgaggccattccgggcgccaccaagatagtcccagtggaagccgggcctcccgaaactggagcaaccaatagcgagaccacttccgccgacctggtgcccaggcgggggtatcaggaatacgccatacagcagaccccgtatgaacagccgatgaaatctagtcgactggggccaacgcagctcaagatttttacttgcgagtattgtaataaagtgttcaagttcaaacatagtctccaggctcatctccgtatccacacaaatgagaagccatacaagtgcccgcagtgctcgtacgcatcggccatcaaggccaatctgaacgtccatttgcgcaagcatacaggtgagaaattcgcatgcgactactgtagcttcacctgcttaagtaaaggacatctcaaagtgcatattgagcgcgtgcacaagaagatcaagcagcactgtagattctgcaaaaagaagtactccgacgtcaaaaatctgatcaaacatatccgcgacgcacatgatccgcaggacaagaaggtcaaggaagcccttgacgagttgtgcctaatgacacgcgaggggaaaagacaactcttgtacgattgtcacatttgcgagcggaaattcaagaatgaactcgatagagatcgccatatgttggtgcacggagacaagtggccgttcgcatgcgaactttgtggccacggggccactaaataccaagcgctggaactgcatgtgcgaaaacacccattcgtgtacgtgtgcgccgtctgccgcaagaaattcgtctccagcatccgcctaagaacccatatcaaggaagttcacggagcggcccaagaagccctcgtgttcacaagtagcatcaaccagagcttttgtctcttagaaccaggaggagacatccagcaggaagccttaggtgaccagctgcagctcgtcgaagaagagtttgctcttcagggagttaacgctctgaaggaggaggcctgcccaggtgacacacagctcgaagagggacgcaaagagcccgaggcaccaggcgagatgccagcacctgcagtgcacctggccagtccacaggccgagtctaccgcgcttccaccttgcgagctggaaaccacggtggtttcctcgtccgatctgcatagtcaagaagtagtttctgacgacttcctgttgaaaaatgacacctcttcggccgaggcccacgccgcaccagaaaagcctcccgacatgcagcacagatcatccgtacagactcaaggagaggtaataaccctcctcctttccaaggcccagtcagcggggtccgatcaggaatctcacggagcccagtcacctctgggggaggggcaaaatatggcagttctctctgccggagatcctgaccccagcaggtgcttaagatccaaccctgccgaggcatcagaccttctgcctcccgttgccggagggggagacacaattacccatcagccagattcttgtaaggctgcacccgaacaccgctcaggcataacagcctttatgaaggttctgaatagcctgcagaagaagcagatgaacacgagcctgtgtgagagaatacgtaaggtgtacggcgacttggaatgcgagtactgcggaaagctgttctggtaccaagtgcattttgacatgcacgtccgcacccacaccagagagcacctgtattattgttcacaatgccattacagtagcattacaaaaaactgtctgaaaaggcacgtgatccaaaagcattccaacattctgttaaaatgcccgactgacggttgcgactactctacaccagacaagtacaaattacaagcccacctaaaggtacacactgccctcgataagcgctcctatagttgccctgtgtgcgagaaatccttttctgaggatagactgatcaagagccatataaagacaaaccaccctgaggtgtcaatgtccaccataagcgaggtgctaggaaggcgggtccagctgaagggacttattggaaaacgagcaatgaagtgtccttattgcgacttctacttcatgaaaaatggaagtgatctgcagcgccacatctgggctcatgagggtgttaagcccttcaagtgctctttgtgtgaatacgccacgagaagtaaatctaatttgaaggctcacatgaacaggcatagcacagagaaaacccacctctgtgatatgtgcggaaagaagttcaagagcaagggcaccctaaagtcccataagctgctgcatacagcagatggaaaacagtttaagtgtactgtgtgcgattacaccgcggctcaaaagccccagttgctcagacatatggaacaacacgtgagctttaaacctttccggtgtgcccactgtcactatagctgcaacatttccggcagtctcaagagacattacaatcgtaagcacccaaacgaggaatatgcaaatgttggcaccggagagcttgcagctgaggtattaatccagcagggtggactgaaatgccccgtgtgctctttcgtttatggcacgaagtgggaattcaatcgccacctcaaaaacaagcacggacttaaggttgttgaaattgatggagaccccaagtgggagacagctactgaagcacccgaggagccatctacacaatatttgcatattacagaggcagaggaagatgtccaaggtacccaggccgccgtggctgctcttcaggaccttcgctacactagtgagagcggagatcggctagacccaacagcggttaacattctgcaacagatcattgaacttggggctgaaacacatgatgccacggctttggctagtgtggtcgctatggcccccggcaccgtgaccgtggtcaagcaggttacagaggaagaaccttcttcaaatcataccgtcatgatccaagaaaccgtccagcaggcgtccgtagaactggccgagcagcatcaccttgtggtgtcctcagacgacgtcgagggaatcgagacggtgacagtgtatacacagggcggggaagcatctgaatttatcgtctatgtgcaggaagcgatgcagccagtggaggagcaggccgtggaacaacccgcgcaggaactatag

SEQ ID NO: 15565 - DNA, 2274 bp, synthetic construct
  source 1..2274: mol_type = other DNA; note = Synthetic coding sequence
atggcactgggcgaggagaaagccgaagctgaagcttcagaagatactaaggcacagagttacggacgtggatcctgcagggaaagagagcttgacatcccgggtccaatgagcggcgaacagccacctcgcctggaggcggaaggagggctcatttccccggtctggggagcagagggcatccccgccccaacttgctggatcggtaccgacccagggggcccctcgagagcccatcaaccccaggcctcagacgccaatcgcgaaccagtggcggagcggagcgagcccgccctgtccggcctgcctccggctactatgggctccggggacctgcttctttcgggcgaatcacaggtcgagaagactaaactgtccagttctgaagagttcccccagactttatcactacctaggactactaccatttgctctggccacgacgccgacaccgaagatgacccgtctctggcagaccttccccaagcgttggacctgagccaacaaccacatagctccggcctttcgtgtctttcccaatggaagtccgtgttgagtccgggctccgccgcccagccctcatcttgctctataagcgcctccagtactggatcctctctgcagggccatcaagagagagctgaaccccgagggggttccttagccaaagttagctcgtccctggaacctgtggtgcctcaggagccatcgagcgtcgtgggactaggccccaggccccagtggagtcctcagcccgtgttctctggcggggacgctagcggactgggccgaagaagactctccttccaggctgagtactgggcatgcgttctgcctgattccctacctcccagtcccgatcgccattcacccctgtggaacccgaataaggagtatgaggatcttttggattacacctacccgctgcgccctggaccccagctgcctaagcacctcgattcaagagtgccagctgacccagtgttacaggattccggcgtggatttggactcatttagcgtgtcccccgcaagtacactcaagtcaccaactaacgtgtctcctaactgcccgcctgccgaagccaccgcactgccattctctgggccgagggaaccctccctgaaacagtggcctagccgcgtcccccagaagcaaggagggatgggactcgcctcttggtcccagctagcctccacgccaagggcacctggttctcgtgacgctcggtgggagcgtcgtgagccagccctgaggggagcaaaggatcgactcaccatcggcaaacacctcgacatgggctcaccccagctgcgcactcgggaccggggttggcccagcccacgtcctgagagagagaaaagaacttctcagtcagcaaggcgaccaacgtgtaccgaatcacgatggaagtccgaggaggaggtcgaatctgatgacgaatatcttgcgttgcctgcacgactgacacaggtgtcctctctggtctcatacctgggctctatcagcacccttgtgactttaccaacaggagatattaagggccaaagcccactggaagtcagcgattccgacggacctgcttcatttccaagttcctccagccaatcccagttgcctcccggcgcagccttgcagggatccggcgaccccgagggtcagaacccctgtttcctgcgatcattcgtgcgtgcccacgactctgccggtgagggcagtctggggtcaagtcaagccttgggtgtatcctctgggctgctgaaaacacggccttctctgccagcccgcctggatagatggccctttagcgaccccgacgtcgaagggcagctgccaaggaaagggggtgagcagggcaaggaaagcctagttcagtgtgtcaagaccttctgctgccagctggaggagctgatctgttggctgtataacgttgccgacgtcacagatcacggaacagctgcacgctccaacctgaccagtctcaaatcctcccttcagttgtatcgacagttcaagaaagacatcgatgaacaccagtcactgaccgagagcgtcctgcaaaaaggagaaatattgctgcagtgtctcttagagaacacacccgtgttagaagacgtgcttgggaggatagccaaacaaagcggagagctggaatcgcacgcagaccggctgtacgactctatactcgcctccctggacatgttagcaggttgcaccctgattcctgataagaaaccgatggcggctatggagcacccatgtgagggcgtctag

SEQ ID NO: 15566 - DNA, 540 bp, synthetic construct
  source 1..540: mol_type = other DNA; note = Synthetic coding sequence
atgaatccgtctatgaagcagaagcaggaagaaattaaggagaacatcaaaaactcttccgtgccacgacgaacattgaagatgattcagccttctgcctcgggctctctcgtgggtcgcgagaatgaactgagcgccgggttgtctaagaggaaacacaggaacgatcatctcacctctaccacgtcttcccccggggtcattgtccccgagagctccgagaacaaaaacctgggtggagtgacacaggagtccttcgacttaatgataaaggagaatccaagtagccagtactggaaggaggtcgccgaaaaacggcggaaagctttgtatgaagccctcaaggaaaatgaaaagctgcataaggaaatcgaacagaaggacaacgaaatcgctagactgaaaaaagaaaataaggagctcgccgaggtcgccgagcacgtccagtacatggccgagctgattgagcgcctcaatggcgagccattggacaatttcgagtccctggataaccaggagttcgattccgaggaggagtag

SEQ ID NO: 15567 - DNA, 309 bp, synthetic construct
  source 1..309: mol_type = other DNA; note = Synthetic coding sequence
atgaatccttctatgaaacagaaacaggaggaaatcaaggagaatatcaaaaattcttccgtccccaggcgcactctcaagatgatccagccatccgcgagtggttcactggtagggagagaaaacgagcttagcgccggcctgtcaaagcggaagcacaggaatgatcatttgacatccacaactagcagtcccggcgtcatagtcccggaaagctctgagaacaagaatctggggggcgtgacccaggagagcttcgacttaatgattaaggagaatcccagcagccagtactggaaggaagtgtag

SEQ ID NO: 15568 - DNA, 2259 bp, synthetic construct
  source 1..2259: mol_type = other DNA; note = Synthetic coding sequence
atggcagaacccgccagtgtgacggtcacgtttgacgatgtcgccctgtacttttccgaacaggagtgggaaattcttgagaaatggcagaaacagatgtacaaacaggagatgaaaacaaactatgagacgctggatagccttggctacgcattctcgaaaccggacctgatcacgtggatggaacaaggtcgaatgcttttaatttccgagcagggttgtctggataagaccagacggacaacctcgccgcctactgatgagcagctcaacatgaaaaatacgggcaaactcctctgctttgacgatgaaggcactccgcggacgaaagaggaagactgtagactgaatggtccgcagaagcaagatctttgtgccgcactgagggggaaagaaaggaaaatattgctcgctcaaactgccacctttcagtcgccttccctgagggaaaccgagatcttgaacaaaaaagtttccattacagcttacgaccctgacaagaaagatcttaggcacaaacccagagaaacccccggcaggctggagattcctaccggtccacgatgctacagttgctacgtttgcaggaaggtttttcaagtgcggagggatttgctgaagcataagcggagtcatagtaaatcccaattgtgtagatatcccaagtacaagaacagctctagggggaaatcagaattgcggagaacacagagacttctatgtcagaaaaagcggttccagtgtagcgaatgtgagaagagctacttccttaaggggtctctggtcacacaccaggtcgtacacaccggacaaagaccctatccctgcccggaatgtgacaaaacctttaggtaccgggctaacttaaagaagcatctgtgccttcataggggcgagcgtcccttttgttgcggcgaatgtgggagggctttcgtgcagcaatgtgagctaacagaacacctgaggttgcacagtggagaaaagccttttcagtgcccacagtgtgaccggtgttttcggcttaaacgaggcatgaaggtgcacttgacacagcatagtggcaagaggccatttcactgccctgagtgcggacgaagcttttctcgcaaagcagccctgaaaacacaccagaggacgcatagtgaggagaaaccctttagctgcggtgaatgtggccgcaaatttatatacaaaatcaaattggatgagcacattagggtgcacactggagagaagcccttcagctgccccgagtgtaataagtccttccgcctgaagaggtctcttaaggcacacggtttgcagcatattggcaagaggcctttccagtgtcctgagtgctcccggggctttttctggagaaacgccatgcgcgcccaccagaggctccactctgaacagaaacccttcccttgtgccgaatgcggcaaacggttcaccaggccttccaaactcgcctgccacactcgagtgcacgacagacagaaggagtttccctgcggagagtgcaaaaagactttttcgcagcaatcccgactcactcagcacttgaaggtgcacactaccgagaaaccattctcttgtgcggagtgcggtagaagcttccggcgccgcgcacacctgactgagcataccaggttgcactcaggtgaggaacccttccagtgccctgagtgcgataagagctttagctggaaggcctccatgaagttccaccagagaatgcatagagacgagaagcctttcgcctgtggtgagtgcgataaaacttacacccaccagagtcagctgactgaacatctccgactgcacagcggcgagaagccatatcagtgccccgagtgtgagaaaaccttccgtcttaaggggaatctgaagagccacctgctgcaacatagcggacagaaaccatttagctgcgtgatgtgtggaaagtcgttcacccaacagtaccgacttacagaacacatcagggtgcatagcggagagaaaccatttcaatgtccagaatgtgataagagttactgtatccgaggatcactgaaggtgcacttgtataaacatagcggggagaggccatttcagtgtccagagtgcgggaaggggttccttcaaaagcgcagcctgaaagcacatctgtgtcttcactcaggagagcgtccgttcagctgcgatgagtgcggaaggtcctttacgtacgtgggcgcgctcaagacacatattgccgtgcatgctaaagagaagcccagtagcctctag

SEQ ID NO: 15569 - DNA, 1935 bp, synthetic construct
  source 1..1935: mol_type = other DNA; note = Synthetic coding sequence
atgttcctcacatatatggagacagttaccaaagaactcgttagctggatgagaggccatgagagtagcgtcttcagtatcagtgtccatgcctcgggtaagtatgctataaccaccagctctgatacagcccagctctgggacctcgacacctttcagaggaaacggaagttgaatatcagacaaagtgtgggtatccaaaaagtgttttttttgcccctttcgaatacaattctgagttgtttcaaggacaatagcatattcgcgtgggagtgcgacactctattctgcaaatatcagctccctgcacctccagaaagtagctccattctatacaaagtttttgctgtcacgcgcgatggcaggattctggcggcaggtggaaaatccaatcacctgcacctctggtgtctcgaggctaggcagttgttcaggataatccaaatgccaaccaaggtccgagcgattcggcatctggagttcttgcctgacagtttcgatgcgggcagcaatcaggtcctaggtgtactgtctcaggacggcattatgaggtttataaatatgcagacttgcaagctgcttttcgagatcggtagcctggatgagggaataagtagtagtgctataagtcctcatggtcgctacatagcctcaattatggaaaatggcagtctgaacatttatagtgtccaggcactcacacaggaaatcaataagcctccaccccccctggtaaaagtgatcgaagatctacccaaaaacaagctctccagcagcgacttgaaaatgaaagttacttccggcagggttcagcagccagcgaagtccagggagagcaaaatgcaaaccaggattttaaagcaggacctgactggggactttgagagtaagaagaacgagctcccagatgggctcaacaagaaacggttgcagatactcctgaaaggctatggcgaatatccaactaaataccgaatgtttatttggagatccctcctacagctgcctgaaaatcacaccgccttcagcacacttatagacaaaggcacccatgtggcattccttaatctccagaaaaagtatcccataaagagtcgtaaactactgcgcgtgctgcaacgaaccctgagcgccctggcccactggagtgtgatattttcggacaccccttatctgccactgttggcctttcccttcgtgaagctctttcaaaacaaccaactgatctgtttcgaagtcatcgctaccctaattatcaactggtgtcagcattggttcgaatactttcccaacccacccatcaacatcctgagcatgatagaaaacgttcttgctttccacgataaagagttgctgcagcacttcatagaccatgacataacgtcccagctctacgcctggccactcctagaaacagtgttctcagaagtgctcacacgagaggaatggctgaaacttttcgacaacatctttagcaaccacccttcattcctccttatgactgtagtggcctacaatatttgctcacgtactccgttactgtcctgtaatttaaaggatgattttgaattcttcttccatcaccggaacaacctggatatcaacgttgtcatacggcaggtataccatctgatggaaacgacacccactgatattcatcctgacagcatgctgaatgtgttcgtagctctcacaaagggacaataccccgtgttcaatcagtacccaaagttcatcgtggattatcagactcaggagcgggagagaattagaaatgacgagctggactatctccgggaacggcagctcaagatctgcaagcttaagagcacatctaaagagttaaaaatgaagctgggaactcgcaataggtcctgtttcgttaagttaaagaagcaggaagaaaagtgctcgtacaagagacgaaggaaatag

SEQ ID NO: 15570 - DNA, 735 bp, synthetic construct
  source 1..735: mol_type = other DNA; note = Synthetic coding sequence
atgccccataaaataggctttgtagtggttagttcatccgggcacgaagacggttttagtgcccgcgaactgatgattcatgcccccacagtgtccggatggaggagccctcggttctgccagtttccccaggagatagtgctacagatggtcgagaggtgccgaattagaaagctacagctgcttgcccatcagtacatgatctcttctaagattgagttctacatctcagagagcctgcctgagtacttcgcaccataccaggctgagcgcttcaggcgactggggtacgtgtcactgtgcgacaacgaaaagaccggctgcaaggctagagaattgaaatctgtttacgtagacgcagtgggacaatttctgaagctcatctttcatcaaaaccatgttaacaaatataatatctataatcaggtggcactcgtggccataaatattataggcgatcccgctgacttttctgacgagtcaaatactgcgtctcgcgaaaaactgatcgatcactatcttggacataattcagaggacccagctctggaggggacctatgccagtagcgtgcggaccgggggcgaatcaacatttggggagttaaagggtccggcagtgcccagcagcgttaccctgtctgtactggggacaagtctaggacagtggtttccttgccacctgcccgctgttgacgacaacgaagggacccctttccagcgatgcctggtgtag

SEQ ID NO: 15571 - DNA, 2778 bp, synthetic construct
  source 1..2778: mol_type = other DNA; note = Synthetic coding sequence
atgccccataagattggattcgttgtagttagctcctcgggtcacgaagatggcttttctgcccgcgagcttatgatacacgccccaacagtgtccggatggcgatcccccaggttctgccaattccctcaggaaatcgtgcttcagatggttgagcggtgcagaattaggaagttacagcttcttgcccaccagtatatgattagcagcaaaatcgaattctatatttctgagtcccttccagaatacttcgctccctatcaagccgaaaggttcagacgactggggtacgtaagtctctgtgacaatgagaagacagggtgtaaggcgcgcgaactcaaatcagtctacgtcgatgctgtcggacaattcctgaagctgatattccaccagaaccatgtgaataagtataacatctacaaccaggtggcactggtggctatcaacatcatcggtgaccccgccgatttctctgatgagagcaacactgcttccagagagaagttgatcgaccactatcttggtcacaattccgaggatcccgctctggaaggcacctatgcgcgtaaaagcgattatatctccccgctggatgacttagcatttgacatgtatcaggatcccgaggtggctcaaatcatccggaagctggatgaacggaaacgcgaggccgtgcaaaaagagcggtacgattacgctaagaagctgaagcaagccatcgccgacctgcaaaaggtcggagaaagacttggacgctacgaggtggaaaagaggtgtgctgtcgaaaaggaagattacgacctggcaaaagagaagaagcagcagatggaacagtatcgcgccgaagtctatgagcagctggagcttcactctcttttagatgccgaattaatgaggcggcccttcgacctgcctttgcaacccctggcaagaagtggttcaccttgccatcagaagccaatgccgagtctcccccaactggaagagaggggaactgaaaatcaattcgcagaacccttcctccaggagaaaccgtcttcgtacagcttgaccatcagtcctcagcatagcgctgtggacccgttacttcccgcaaccgacccccatcctaagattaatgcagagtccctgccttatgacgagagacccttgccggcaatcagaaaacactacggtgaggccgtcgtggagcctgaaatgagcaatgccgatatctctgacgcacggcgaggaggcatgttgggagagcccgaaccacttacagagaaagccctgagggaggcaagctcagctatcgacgtgctgggcgagaccctcgtggccgaagcatactgcaagacttggtcgtatcgagaggatgcgctcctggctcttagcaagaagctgatggagatgcccgtgggcacccctaaggaagacctcaaaaatacgctacgcgcctcggtattcttggtgagacgggccataaaggatattgtgacatcagtctttcaagcctcacttaagttacttaagatgattatcacccagtacataccaaaacacaagctgtccaaactggaaactgcacactgcgttgagagaaccatacccgtgcttctgacaaggaccggggacagttccgcgcggcttagggtaacagctgcaaattttatccaggaaatggccttgtttaaggaggtgaaaagtctacagataatccctagctatctagtacagccactgaaagcaaattcatcggtgcatctggcgatgagtcagatgggtttactcgcaaggctcctgaaggatttaggcacaggcagctccggcttcaccatcgacaacgttatgaaattttcagtgagtgccctcgaacatcgtgtctatgaggtgagggaaaccgccgtaaggataattctggacatgtataggcagcatcaggccagcattctggaatatttgccaccagacgactcaaatacacgcaggaatattctgtacaaaactatcttcgaggggtttgccaaaattgatggacgggccacagatgctgaaatgcgggcccgacgtaaagctgccactgaagaagctgagaaacagaaaaaggaggaaattaaagcactacagggccagctggcagccctcaaagagatccaagccgaagttcaggaaaaagaatccgacgcggttaaaccaaaaaaccaggatattcagggcggtaaggccgctccagccgaggccttgggtatccccgatgaacactatctcgacaatttgtgtatattttgcggagaacggtccgaatcattcactgaagagggacttgatcttcattactggaagcattgcttaatgctgaccagatgtgaccactgcaaacaggtcgtagagatatccagtctcactgaacaccttctaactgaatgtgacaagaaggatggttttgggaagtgttacaggtgctcagaggccgtgttcaaggaggaactgcctcgacatattaagcacaaggactgcaaccccgccaagcctgaaaaactggctaatcgatgcccactgtgtcatgagaattttagtcccggcgaagaagcgtggaaggcccacctgatgggccccgcagggtgcaccatgaatttaagaaaaacccacatcctgcagaaagcccctgcattgcagcccgggaagtcttcagctgtggcagcatcaggacctctcggcagcaaggccgggagtaagattcctacacccaaggggggcctctccaagagctcttcacggacctacgcaaagagatag

SEQ ID NO: 15572 - DNA, 2145 bp, synthetic construct
  source 1..2145: mol_type = other DNA; note = Synthetic coding sequence
atggcacgtgctgggtcatgtgggggcgcagccgccggagccggacgccccgaaccttgggagttgagccttgaagaggtcctcaaagcttatgagcagcctctcaacgaagagcaagcttgggccgtatgtttccaaggctgtagggggctgcgcggttcacctgggcggaggctgcgcgataccggggacctgcttcttcgcggtgacgggtctgtgggcgcgagagagcccgaggccgccgagcccgccaccatggtggtgccattggcctcctctgaagcgcagacggtgcagagcttagggttcgcaatataccgggctttagactggggcctggacgaatccgaggagcgagaactaagtccccagttggaacgacttatcgacttaatggctaataatgatagcgaagattccgggtgtggcgctgcagatgagggatacggagggcccgaagaggaggaagaggccgaaggggttccccgtagcgtccggacctttgcacaggctatgaggctctgcgccgctcgcctgactgatcctaggggcgcccaggcccattatcaggccgtttgtcgtgcgcttttcgttgaaacgctggagctacgggccttcctcgcgcgggttagagaggcaaaggagatgctgcaaaagctccgagaggacgagcctcatctggaaaccccacgcgccgaactggattccctgggacatactgattgggcgcgtctttgggttcaactgatgagggaactgcgacggggagtcaaactgaaaaaggtgcaagagcaggagttcaaccctctcccaacagaattccagttgacgccgtttgaaatgcttatgcaggatattagagctaggaattacaaactacggaaagtgatggttgacggggatattcccccacgcgtgaaaaaggacgctcatgaactgattttagactttattcgctcacgccccccactgaagcaggtgagtgagagaaggctgaggcccctgccgcccaaacagcgttctctgcatgaaaagatcctagaagaaattaaacaggaaaggcgcctcagacccgtgcgtggagagggctgggccgccaggggatttggatcgctgccttgcatactgaacgcctgctcaggcgatgctaagtctacatcctgtattaacttgtcagtgacagacgccggcggatcagcacagcgaccccggccgcgggtgctcctgaaggcccctactctggctgagatggaggagatgaacactagcgaggaagaggaatccccttgtggggaggtcacattgaagcgggaccggtctttctccgaacacgatctggctcagttaaggagtgaagtggcctctggcctgcaatctgcaacccatcccccaggaggcacggagccaccccggcctcgcgctggaagcgcacacgtctggagaccaggctcccgagaccagggcacatgccctgctagcgtctccgatcctagtcaccccctgttgtctaatcgtgggtcaagtggggaccggccagaagcttccatgaccccggatgccaagcacctatggctcgagttttcccacccggtggaatcacttgcactgaccgtggaagaggtaatggacgtgcgacgcgtgctggtgaaggcggaaatggagaagttcttgcagaataaagagctcttctcttctttaaagaagggcaagatatgctgttgttgcagagctaaatttccgctctttagctggccaccttcttgtctgttttgcaaaagagccgtttgcacttcttgcagcataaagatgaagatgccttccaaaaagtttggacacatcccagtgtatacattggggtttgagagtccacagagagtgagtgccgcaaagacagcccctatccagaggcgtgatatttttcaatccctccaggggccacagtggcagtctgtggaagaggcattccctcacatatacagccacggctgtgtattgaaggatgtctgctctgaatgcacgagcttcgtagccgacgtcgttagaagttcccgaaaaagcgtggatgttcttaataccacccctcgtaggagcagacaaacacagtctctatatatccctaatactagaaccttggactttaagtag

SEQ ID NO: 15573 - DNA, 1308 bp, synthetic construct
  source 1..1308: mol_type = other DNA; note = Synthetic coding sequence
atgaacttctctgaggtgttcaaactgtctagtctcctttgcaagttctcaccagatggaaagtacttggcctcttgcgtacagtatagattggttgtcagagacgttaatacactgcagatcttgcagctttatacctgcctggaccagatccagcatattgaatggtccgctgattctctgtttattctgtgtgcaatgtacaaacgagggctggttcaggtatggagtctcgagcagcctgagtggcattgcaaaatcgacgagggttctgccggactcgtagcatcttgctggagccctgacggacggcacatcttgaatacaacggagtttcacctccggattaccgtctggtccctctgcacaaaaagcgtgagttatataaagtatcctaaggcctgccttcagggaatcacctttacacgcgacggtcgatacatggctctggccgagcgccgagactgcaaagattacgtgtccatcttcgtgtgttcggattggcagctccttaggcattttgacacagatactcaggacctgacaggcatcgagtgggcgcccaatggttgtgtgctggcggtttgggacacatgcctggagtacaagatcctgctttattccctggatggaagactgctttcaacctacagcgcctacgagtggtccttgggcattaaatccgtagcttggagcccctctagccagtttctggccgtcggtagctacgatggtaaggtgcggatactgaatcatgtcacctggaagatgatcaccgagtttggacaccctgcagcaattaatgaccccaaaatcgtggtctataaggaggccgagaagagccctcagcttgggctgggctgcttatccttccctccccccagagccggcgcaggcccactgccttctagcgagtctaaatacgaaatcgcatcagtgccagtcagtcttcagaccctgaaacccgtcacagaccgcgcaaatccaaaaattggcatcgggatgctcgccttttcaccagattcttacttcctcgccactcgcaatgataatatccccaacgccgtgtgggtgtgggacattcagaagctccgcctcttcgctgtcctggagcaattaagcccagttcgggcctttcagtgggatcctcagcagccccggctcgctatttgcaccggcggatcgcgtctgtatctgtggtccccagccggttgcatgtccgtacaggttccaggagagggtaaacacattcctgaggctactgacgtggcagccctcctctgtgccgtatggcaccataccgggtag

SEQ ID NO: 15574 - DNA, 819 bp, synthetic construct
  source 1..819: mol_type = other DNA; note = Synthetic coding sequence
atgctgcaactcagggatagtgtcgattcagccggaaccagcccaacggctgtgttggctgctggagaagaggtcggtgccgggggcggcccaggcgggggacggcctggtgctggaacccctttgcgacaaacactatggcccttgtccatccacgatcccacaaggcgggccagagttaaggagtacttcgttttcagacctggcagtattgaacaggctgttgaagagataagggtcgttgtgagacctgtggaggacggtgaaatccaaggggtctggttgctgacagaggtcgatcactggaacaatgaaaaagagcggctagtacttgtgacagagcagtccttgttgatttgtaagtatgactttatttctctccagtgccagcaggtggtcaggatagctctgaatgctgtggacaccattagctacggcgagtttcaattcccccctaagtccttgaacaaaagagaaggatttgggatccgtatacaatgggataaacagagtagaccttcatttattaacagatggaacccctggtccaccaatgtaccgtacgcaacatttacggagcatcccatggccggggccgatgaaaagacagccagcctgtgtcagctggagtcatttaaggccctgctcattcaggccgtgaaaaaagcgcagaaagaaagcccacttcccggccaggctaatggcgtgttgattctggagagaccactgttaatcgagacgtacgtgggcctgatgtcctttatcaataatgaggccaagcttggttactccatgacccgcggcaaaataggtttttag

SEQ ID NO: 15575 - DNA, 870 bp, synthetic construct
  source 1..870: mol_type = other DNA; note = Synthetic coding sequence
atgtggccatttccttcccggtctctgttcccacccccaacgcaggcctggctgcaaaccgtgtcgtcagatccagaggcgcagggatggggggcctggaatgaaaccaaggagattctgggcccagaagggggcgaggggaaggaagagaaggaagaagaggaggatgcagaggaagaccaggatggagatgcgggctttctactgtccctgctggaacaagaaaacctcgccgagtgcccactgcccgaccaagagctggaagccattaagatgaaagtgtgtgccatggaacaggccgaaggaactccaagacctcctggggtgcagcagcaggctgaagaagaggagggcaccgcggctgggcaactgctcagtccagaaactgtggggtgcccactgtctggcacaccagaggaaaaggtggaagctgaccacaggagtgtttacgtgggaaacgttgactacggcgggagtgcagaggaactagaagcccatttctcgcgatgtggcgaggtccacagagtgactatcctgtgcgataagttcagcggccacccgaagggatatgcatatattgagttcgcaactaagggatctgtccaggcagccgtggagctggatcaatccctttttaggggccgggtgatcaaagtgttgcccaagcgcactaatttccctgggatctccagcacagatcgtgggggactgagggggcacccgggtagtcgcggcgcacccttcccccacagtggactgcagggcagaccaagattgcgaccacaggggcagaacagaacccccgcagcgctgactccactgtgggcaagaccactaccctgggtggtagtctcacatgtgataaagtag

SEQ ID NO: 15576 - DNA, 1266 bp, synthetic construct
  source 1..1266: mol_type = other DNA; note = Synthetic coding sequence
atgttcgagattttgactagtgaattttcctatcagcactcgctttctatcttagtggaagaatttttacagagtaaagagctgagagccaccgtgacgcaaatggaacaccaccacctgttcagcaacatcttagacgtattaggcgccagccagcgctttttcgaggatctcgagcaaaggcacaaagctcaagtcctggttgaagatatcagcgatattctggaggagcatgcggagaagcacttccacccctacatagcatactgtagcaacgaggtgtaccagcaacggacgctccagaagctcatttctagtaatgccgccttccgggaagcgctccgcgaaattgaacggagacccgcatgtggcggtttacccatgttgagtttcctcatcctgcccatgcaacgggtcacacgactgcccctgcttatggacaccttatgtttgaaaacacagggacactccgaaaggtataaggctgcatcaagggcgctgaaggctatctccaaactggtgcgccagtgcaatgagggggctcatagaatggaaagaatggaacagatgtataccctccatacccagctggactttagcaaggttaaatctctcccacttatctctgccagtcgctggctgctgaaacgaggagaactgtttttagtggaagagaccggcctatttaggaagatcgccagtcggcctacttgttacctttttctattcaacgacgtcctggtggtgactaagaaaaagagtgaggaatcctatatggtgcaagactatgcccaaatgaatcacattcaggtggaaaaaatcgagccgagtgagctccccctccccgggggtggaaatcgttcctcttcagtgccacacccattccaggtgaccctgctgcgaaattccgagggcagacaggagcaacttctgctcagttcagacagtgcttcggatcgcgctagatggatcgtcgcgttaacccattccgagcgtcagtggcagggactcagcagcaagggagacttgccccaagtcgaaattaccaaggcatttttcgccaaacaagcagacgaggtgacactgcaacaggctgacgtggtgcttgtgctgcagcaagaagatggttggctttacggtgagcgcctgcgcgacggagagaccgggtggtttcccgaggatttcgctcgctttataacttcccgagttgcagtggagggaaacgtgaggcgcatggagaggctcagagtcgaaacagacgtgtag

SEQ ID NO: 15577 - DNA, 1266 bp, synthetic construct
  source 1..1266: mol_type = other DNA; note = Synthetic coding sequence
atgttcgagattctgacttcagaattttcgtatcaacacagtcttagtatcctggtagaggagtttttgcagagtaaggagctccgagcaaccgttacccagatggaacaccaccacctgtttagcaacattctggatgtgcttggcgctagccagcgcttcttcgaggacttagaacagcggcacaaagcccaggtgctggtggaagatatttcagacatcctcgaggagcacgccgagaaacactttcacccatacattgcatattgttctaacgaagtgtaccagcagcggacgctgcagaaactcatttccagcaacgctgcttttagagaggcgctgagggaaatcgagagacgacctgcctgtggcgggctgcccatgttgtcatttctgatcctcccgatgcaacgggtcacccgcctgccgttactgatggacacattatgtttaaaaacccaaggccacagtgagcggtacaaggccgcttcacgggccctgaaagcaattagtaaattggtgaggcagtgtaatgagggcgcacacagaatggagaggatggagcagatgtatactctgcacacccagctagatttctctaaggtcaaatctcttccgttgatctccgctagccgttggctgctgaaaaggggggagctgttcctggtggaagaaaccggcctattccgcaagattgcaagtcgccctacatgctaccttttcctgttcaacgatgtgttggtcgtgacaaagaaaaaaagcgaggagtcctacatggttcaggactacgcccaaatgaaccatatccaggtggagaaaatcgagccgagtgagttaccactgccaggaggcgggaatcgttcctcttctgtccctcacccctttcaggtcacactcctcagaaatagcgaggggcggcaggagcagctgctgctgtccagcgattccgcctccgaccgggctcgatggatcgttgccttaactcattccgagagacagtggcagggcctcagtagcaagggggacctgccacaggttgagattactaaagccttctttgctaaacaggcagacgaagtgaccttgcaacaggcagatgtggttctcgtcctgcagcaggaggatggctggctgtatggggagcggctaagagacggggaaaccggttggttcccggaagacttcgctagattcatcacaagtagggtggccgtggaaggcaacgtgaggagaatggagcgcctgcgggtggagaccgacgtgtag

SEQ ID NO: 15578 - DNA, 2130 bp, synthetic construct
  source 1..2130: mol_type = other DNA; note = Synthetic coding sequence
atggcccaaaggcattcagactcttccctagaagagaaactcctgggacacaggttccactccgaactgcggctggatgcaggtgggaaccccgccagcggtctcccaatggttcgaggatcaccccgggtgagagacgatgccgcgtttcagcctcaggttcctgcccccccccagccaaggcctcctggccacgaggaaccctggcctatagtactctcaactgaatctccggcagccctaaagctaggcacacagcagttaatccctaaatcacttgctgtcgcgagcaaagccaaaacaccagctaggcatcagtcctttggcgcggccgtgctgtctcgcgaggctgccaggcgtgatcccaagctgctcccagcaccatccttttctctcgatgacatggatgtggataaggatcctggcggaatgctcagaaggaacctccggaaccagagctatcgcgccgctatgaagggactcgggaagccaggggggcagggcgatgctattcagttgagccctaagctacaagcgctggctgaggagccatctcaaccacatacaagaagtcccgccaagaacaagaaaactcttgggcgcaaaagagggcacaaaggctcgttcaaggacgatccccaactttaccaggaaattcaagaacggggcctcaataccagccaggagtccgacgacgacatcctggacgagtcctcctcacccgagggcactcagaaggttgatgccacaattgttgtgaagtcttaccggcccgcccaggttacttggtcacagctccccgaggttgtggagcttggcattctggaccagctctctactgaagagcggaagcggcaggaggctatgtttgaaattcttaccagtgagttttcatatcagcattcgctgagcattctggttgaggaatttctgcaatcaaaggagcttagagccacagtaacgcagatggagcaccaccatctgttcagcaacatcctagatgtgctgggtgcatctcagcggttctttgaagacctcgaacagcgacacaaggcccaggttcttgtggaggatattagcgatattcttgaagagcatgccgaaaagcacttccatccctacattgcttattgctccaatgaagtttaccaacagcggacgctgcagaagcttattagctctaacgccgcttttcgtgaggcactgcgggaaattgagcgccggccagcatgtggaggtctaccaatgctcagctttctgatcctcccaatgcagcgcgtgacacggcttccacttctgatggacactctgtgtcttaagactcagggccactccgagaggtataaagctgcgagtcgcgccctaaaggctatctctaagttggtgcgccaatgcaacgaaggcgcccaccggatggagcgaatggagcagatgtataccctgcacactcaactagattttagcaaagtgaagtcgttgcctctgatttccgcatctcgctggctgctcaagaggggtgagctctttctagtggaggaaaccgggcttttccggaaaatcgcctcacgaccaacgtgttacctgtttctgttcaacgacgtgctggtggttacaaagaaaaagtctgaagaatcatacatggtccaggactatgcgcaaatgaaccatatccaggtggagaaaattgagccatcagagctccctctacccggcgggggcaatagaagctccagtgtgcctcatccctttcaggttacactgctgcggaacagcgaaggccggcaggaacagttgcttctctcctctgactcagcgagtgatagggccaggtggatcgttgccctgacacatagcgagcgccagtggcagggcttatctagtaaaggagacctgccgcaggtagaaattacaaaagccttttttgctaaacaagccgacgaggtgacacttcagcaagccgatgtggttctggtgcttcagcaggaggacggctggctttacggggagaggctgagagacggtgaaacagggtggtttcctgaggacttcgctcgcttcattacgtctcgggtggccgtggaggggaatgttcgaaggatggaacgcttacgggttgagactgatgtgtag

SEQ ID NO: 15579 - DNA, 1287 bp, synthetic construct
  source 1..1287: mol_type = other DNA; note = Synthetic coding sequence
atggtctggcaagtcctcgagggcttgtcccaggacagtgctaagcggctgcggtttgttgctggagtcatcttcgtagatgagggagccgcgtgcggacagtcactggaagagcgatctaagactctggcagaagtgaaaccaattctccaggccaccggcttcccctggcacgtggtggcactcgaagaagtattcagtctgcctccatcagtgctctggtgtagcgcccaagaactggtagggtccgagggagcatataaggcagcggtcgatagcttccttcagcaacagcacgtgctgggggcaggcggtggacctgggcccacccagggagaagagcaacctcctcagcctcctctcgatccacaaaaccttgcaagaccccccgctccggcccaaactgaagcgctgagccagctgttctgcagcgtccgcactttgaccgcaaaagaggagcttcttcagacacttcgaactcacctcatcttacacatggctcgcgcacatggatactctaaggtcatgactggggattcctgtaccagactggctattaagctgatgacaaatctggccctggggcggggggctttcctcgcctgggatacagggttctcggacgagaggcacggggacgttgtggtggtacgccctatgcgagaccataccctgaaagaggtagctttctataaccgcttgttttctgtgccctctgtgtttacccccgccgtagatacgaaggctccggaaaaggccagtatccaccggctgatggaagccttcatcctccggcttcagacccagttcccctctactgttagtactgtgtacagaactagcgagaaacttgtgaagggacccagagatggccccgcagctggagattctggaccgagatgcctgctttgtatgtgcgccctcgacgtggacgccgctgacagtgcgacagcctttggtgcccaaacatcctccagattatcacaaatgcagtcccccattccactcacggagacaaggactccacctggtccatgctgcagcccaggtgtcgggtgggcccagaggtgcgggcagggcgcatgccgcagagaggatccccaggcctgcatcgaagagcagctgtgttactcttgtagagttaatatgaaggatctgccatctctggacccccttcctccttacattctagccgaggctcagctgcggacgcagcgagcatgggggttgcaagagattcgcgactgtctaatcgaggattcagacgacgaggcggggcaatcttag

SEQ ID NO: 15580 - DNA, 417 bp, synthetic construct
  source 1..417: mol_type = other DNA; note = Synthetic coding sequence
atgggtgaacaggctgacggcaaggattcaatcgccaggcaggtggcacctgagtcccactggccagagcttcgggtccttatactcgtcgtgtctgctgagaagaaattgaccggcagcacagtggggatgagagcgtcagttgagacgtcccccctgttgaggtttcgggcagagtctgtggtgccggcacatgggggggacgggcctttgcaccccggagcccgtttgccacaactgcgccccgcagatcatgaggggcagcagccggtgccccgacacctaccccggcatcttccaccctcactgacttccatgccctcaccaggcgcatccagtacttggtgcaccgcatccacacctacgacagggacccccagatggcggactcctctgactcgcgcacccatgccttag

SEQ ID NO: 15581 - DNA, 597 bp, synthetic construct
  source 1..597: mol_type = other DNA; note = Synthetic coding sequence
atgagtaccgtagatctcgcacgtgtcggtgcatgtattttgaagcacgccgtgacaggagaggccgtggaattgaggtccttgtggcgggaacatgcctgtgtggtggcaggccttcggagatttggctgtgttgtttgtcgttggattgctcaggatttatcgagcctcgcaggactcctcgatcaacacggagttcgtctcgtgggagtgggaccagaagctctgggtctgcaggagtttttagacggggattacttcgctggggagctgtacctggacgaatccaagcagctttacaaggagctcggctttaagaggtacaactcgttgtcaattctcccggctgccctaggcaaacccgtgagggatgtggccgccaaagcaaaggccgttggtattcagggcaacctgagtggtgacctgctgcaaagcggaggactcctggtcgtcagcaaggggggcgacaaagtgctgttacacttcgtgcagaaatcgccaggggattacgtccccaaagagcatatactgcaggttctcggcatcagcgcggaggtgtgtgcctctgatccaccacagtgcgaccgggaggtgtag

SEQ ID NO: 15582 - DNA, 642 bp, synthetic construct
  source 1..642: mol_type = other DNA; note = Synthetic coding sequence
tagtcccgagagagaggtagcagaagtgaggaacctggggccggcaacagggaaagtggctcgcgtgaacctggcctggccgcagccgccatgagcacagtggatctggcgagggtgggagcctgcatcttaaagcacgctgttaccggcgaagccgtggagctgcgcagcctgtggcgggagcacgcatgcgtggttgccggccttcgtaggtttgggtgtgtcgtttgcaggtggatcgcccaggatctctcatcattggcaggtcttctggatcaacatggagtgaggttggtaggcgtaggtcctgaagctctgggcctccaggaatttctggacggcgattactttgccggggaattgtacctggacgagtcaaaacagctttacaaagagctgggttttaaaaggtataattccctctcgattcttccagccgctctggggaagcccgtgagggatgtagctgccaaggccaaagccgtcggcatccagggaaacctcagcggcgacttacttcagagtggagggcttctggttgttagcaaggaagtacctcggaggctcagaccccaaggagcccatcctgcgggaccagggcatctctgcggaggactgtgtcagcggcctgccagtgtgtag

SEQ ID NO: 15583 - DNA, 2553 bp, synthetic construct
  source 1..2553: mol_type = other DNA; note = Synthetic coding sequence
atggccgaagtggaggccgtccagctcaaggaggagggaaatagacacttccagttacaggattataaagcagccaccaacagctattcacaggccctgaaattaaccaaagataaagctttgctcgctaccctgtatcggaatagagcagcttgcgggctgaaaaccgaatcctacgtgcaggccgcgtccgacgctagcagggcaatcgatattaatagctctgatattaaggctttgtacaggcgatgtcaggcgcttgaacatctgggaaaactggatcaagcttttaaggacgtgcagaggtgtgcgacattggagcctcggaaccaaaatttccaggagatgctcagaaggcttaataccagcatccaagagaaactgcgcgtgcaattcagtaccgattctagagttcagaagatgtttgagatcttgctggacgagaatagcgaggccgataagcgagagaaggctgccaacaacctgatcgtgttaggacgggaggaagcaggtgcggagaagatattccagaataacggtgtggcactgctcttgcagctgctggacacgaagaagccggagttagtgcttgcagcggtcagaacgctctctggaatgtgcagtgggcaccaagctcgggccaccgtaatcctgcacgccgtgcggatcgacaggatatgttccctaatggctgttgaaaacgaagagatgtcactggccgtttgcaatctgctgcaagctattatcgactccttaagcggcgaggacaagagggaacacagagggaaagaagaggctctggttctagacactaagaaagacctcaaacagataacctcccatctgttagatatgttggtgagcaagaaggttagcggccagggacgggaccaggccctgaacctcctgaacaagaatgtgccgcgaaaggacctcgccattcatgacaactctaggacaatctatgtggtcgataacggcttacgaaaaatcttgaaggtcgtgggccaggtgccggacctaccatcttgtctcccacttaccgacaacacccgcatgctcgcctctatcctgataaacaaattatatgatgatctccgctgcgaccctgagcgggatcactttcggaagatttgcgaagaatacattacagggaaattcgaccctcaggacatggataagaacctgaatgccatccagacagtgtctggaatcttgcaagggcctttcgacctgggcaaccagctcttgggactgaagggcgttatggaaatgatggtcgcactgtgcggatctgaaagagagaccgaccaactggtcgctgtagaagccttaatccatgcctccactaagctgagtagggcgactttcatcattaccaatggggtctccctgctcaaacagatctacaaaacgaccaagaatgagaagatcaaaatcagaacactcgtcacttcagacaagacaattctctactcggtggctaccactctggtgaattgcaccaatagttacgacgttaaagaggttattcctgaactcgtccagttggccaaattctcaaagcagcacgtcccggaagaacaccccaaggataaaaaggattttatcgacatgagggtgaagcgtctattgaaggcaggcgtgatatcggccctggcctgtatggtgaaagctgacagtgccattctgaccgatcagacgaaagagctccttgcacgcgtgtttctagctctatgtgataatccaaaagaccgcggaactattgtcgcacagggcggagggaaggctcttatcccacttgctttggagggcacagacgttggcaaggtaaaggctgctcacgcgctggcgaagattgccgcggttagcaaccctgacattgcatttccaggagagagagtatatgaggtggtgcgccctctcgtacgtttactggacacccagcgcgatggtctgcagaactacgaagcactactcgggctaactaatctgtcaggacgaagcgacaaactccgccagaagattttcaaagagcgggccttgcctgacattgagaattatatgttcgagaaccacgaccagctccgacaggccgcaactgaatgcatgtgcaacatggtgctgcataaggaagttcaggaaaggtttctagccgacgggaatgaccggctgaagctggtcgtgctcctatgcggcgaggacgacgacaaggtgcagaacgccgctgcgggggctttggcaatgctaacagccgcccataagaagttatgtttgaagatgacacaggtcactactcagtggctggaaatccttcagcggctgtgcctccacgaccagttatctgtgcaacatcgaggccttgtgatagcttacaatttattagcggccgatgccgagctggccaaaaagctggtcgagtccgaactcttagaaatccttacggttgtaggcaaacaggagcccgatgaaaaaaaagccgaggttgtccagactgcccgcgagtgcttgatcaaatgcatggattatggtttcattaaacccgtgtcctag

SEQ ID NO: 15584 - DNA, 552 bp, synthetic construct
  source 1..552: mol_type = other DNA; note = Synthetic coding sequence
atgatgcagatctgtgacacttacaatcagaaacactcgctcttcaacgcaatgaatagatttatcggagccgttaataacatggaccagaccgtcatggtaccgtctttgctcagagacgttcctcttgcagatcctggcttggataatgatgtcggcgttgaggtaggtggatcaggggggtgcctggaggagagaacgcctccagttccggacagcggctctgcaaacggatcattcttcgcaccaagccgcgatatgtatagccactacgtgttactgaaaagtattcgcaatgatattgagtggggagtgctacaccagccaccaccaccagctgggagcgaggaaggttcagcgtggaagagcaaggatattctcgtggatctgggccacctggaaggcgccgatgccggagaggaagatctggaacagcaattccactatcatcttagaggtttgcatacagtgttgagcaagctgactcgcaaagcaaacatcctgacaaaccgatataagcaggagataggctttggaaactggggccactag

SEQ ID NO: 15585 - DNA, 366 bp, synthetic construct
  source 1..366: mol_type = other DNA; note = Synthetic coding sequence
atgttcaacaagtgttcatttcactcttcaatctatcgtcctgccgcggataattctgctagtagcctctgcgcaatcatttgttttttgaaccttgtcattgaatgtgacctcgaaacaaactcggaaattaacaaactgattatatacctgttttcccagaataacaggattcggttcagtaagctgctgctgaaaattctcttctacatttcaatattcagttatccagaactcatgtgcgagcagtacgtgacatttatcaagccaggaatccactacggacaggttagtaagaagcatataatttatagcacattcctgtccaaaaactttaaattccagttgctcagggtctgttggtag

SEQ ID NO: 15586 - DNA, 972 bp, synthetic construct
  source 1..972: mol_type = other DNA; note = Synthetic coding sequence
atggaatcacgcgtagccgacgcaggcaccggcgagacagccagggctgctgggggctcacctgccgtgggatgcaccactcggggcccagtggtgtccgcaccactcggcgcagctcggtggaaattactgagacaagttctgaagcagaaacatttggatgactgcttaagacatgtctctgtgcggcgcttcgaatcttttaatctgttttccgtgacagagggtaaagagcgggagacagaggaggaggttggggcttgggtgcagtacacttctatcttctgtccggaatactcaatctcccttcgccataattcgggttctttgaatgtagaagacgtcctcacctcctttgataataccgggaatgtgtgtatttggccatcagaggaggtgcttgcgtactactgtctgaaacacaacaacatattcagagcactggccgtgtgcgagttaggcggtggcatgacctgcctggcaggcctgatggtggccatttctgccgacgtcaaagaagtgttgcttaccgatgggaacgagaaggcaattaggaacgttcaggatattataactcgaaatcagaaggccggggtgtttaaaacgcagaagatttcgtcttgtgtgctccgctgggacaatgagacagacgtctcccaactcgagggacattttgacattgtgatgtgtgccgactgtttatttctagatcagtacagagctagtcttgtggacgccattaagcgcctcctccaaccccggggaaaggctatggtgttcgcccccagacgtggcaacacactcaatcaattttgcaacttagctgagaaggctggcttctgcatacagcggcacgaaaattacgacgaacatataagcaatttccacagtaagctcaagaaagaaaatcctgacatctacgaagaaaacctccactacccgcttctattgattttaaccaagcatgggtag

SEQ ID NO: 15587 - DNA, 3120 bp, synthetic construct
  source 1..3120: mol_type = other DNA; note = Synthetic coding sequence
atggcggtgcaattggtgccagactcagcgctgggcctgctcatgatgacagaaggtcggcgctgccaggtgcacttactggacgataggaaactggagctcctcgttcagcccaaactgctggctaaggagcttttagacttggtcgcatcgcactttaaccttaaggagaaagagtatttcggtatcgccttcaccgatgaaactggccatttgaattggctgcagctggatcgccgcgtgttggagcatgatttccccaaaaaatccggcccggtggtgttgtatttctgcgttagattctacattgagagtatctcttacctgaaagacaatgccacgatcgagctgttctttctgaatgctaagagctgcatctataaagaactgatcgacgtggactctgaagtggtttttgaactcgctagctatattctacaggaggccaagggagactttagtagcaatgaggtggtccgctctgatcttaagaaactcccagcattacctacacaggccttgaaggaacatccttcccttgcttactgtgaggacagagttatcgagcattacaagaagctgaatggccagacgcggggacaagcgatcgttaactacatgtcaattgtggagtcactacccacttacggcgtgcactattatgctgtgaaggacaaacagggcatcccttggtggctcggtctgtcatataaagggatcttccagtacgactatcacgataaggtcaagccacggaaaatttttcagtggagacagctggagaacttgtatttccgcgaaaagaagtttagcgtcgaggtgcatgacccccgaagggctagtgtcacccgacgaacctttggccacagcggcatcgccgttcatacatggtacgcttgccctgctctgatcaagagtatctgggcaatggccataagccagcatcagttttaccttgatcggaagcagtcaaagagcaagattcacgccgcgagatccttgagtgagatcgccatcgatctgactgagactggtacactgaaaacatcaaagctcgccaatatgggtagtaagggtaagattattagcggctcttctggcagcctgctgtctagcggctcacaagaaagtgatagctcccagtcagccaagaaggacatgctcgccgcccttaagagcagacaggaagccctggaagagacattgaggcaaagactagaagagctgaagaaattgtgcctcagagaagccgaactcacaggcaaacttccggttgagtaccccctggaccccggagaggaaccacctatcgtacgccggcggataggcacagcatttaaattggacgaacaaaagatcctgcccaaaggagaggaggccgagctggaaagacttgaaagggagtttgccattcagtcacagatcacggaggcagctcgccgcttggcctcagatcctaatgtctccaagaagttgaagaagcagaggaaaacttcctacttgaacgcattaaagaaactccaagaaattgaaaacgccattaacgagaatcgcatcaaatccgggaagaagcctacacagagggcctccctcattatcgatgacggaaatatcgcttctgaggacagctccctgagcgacgctctggttctggaggacgaggacagtcaggttacctcgacaatcagccccctacatagtcctcacaaaggtttacctcctaggccgcccagccataatcggccgccacctccacaatccttagagggcctccgccagatgcactatcatcgcaacgactatgacaagagccctatcaagcctaaaatgtggtcagagtcgagtctagacgagccttacgaaaaagtcaagaagcgcagtagtcattcccacagtagtagtcataaaaggttcccctcaacaggctcatgtgctgaggctgggggtggctcaaacagcctacagaacagccccattcgaggtcttccacactggaatagccagagttcaatgccatccacaccggacctgcgagtgaggagcccacactatgtccattcgaccaggtcagtagatatctcccccactcggctgcattctcttgcattacacttcaggcacaggtcatcctcccttgagagccaaggcaaactgctcggctccgagaacgatactggatcacccgacttttacaccccacggacaagaagtagcaatggaagcgacccgatggatgactgcagttcctgcacatcacattctagcagcgagcactattacccagcacaaatgaacgctaactacagcactctggctgaggattctccatctaaggccagacagcggcagaggcaacgtcagcgggcggctggcgccttgggctctgcttcgtctgggtctatgccaaatctggctgctcgtggcggggccggtggagcaggcggcgcaggcgggggcgtctacctgcactctcagtcccaacctagttcacagtatagaattaaggaatatcctctctatatagagggtggggcaacccctgtggtggtccgttccctggaaagtgaccaagagggccactatagcgtgaaggctcaatttaagacctcgaattcatacacagccggtggcctgtttaaagaatcatggcgggggggaggcggagacgagggagacaccggcagactgaccccaagcaggagtcaaatcttgcggacaccaagtctgggtcgcgagggcgctcatgataagggcgctggtagagccgccgtgagcgatgaacttcgacaatggtaccaaagatcgaccgctagccataaagagcactctaggctcagtcacactagctcaacgagttctgattcaggctctcagtacagtacaagcagtcagtcgacattcgtggctcattctagagttacgcggatgccccagatgtgtaaggccacttcggctgctctgccccaatcccagagatcaagcacccctagtagcgagattggagcaacaccaccttcttcaccgcatcatatcctcacctggcagactggtgaagcaaccgaaaattctcccatactggacggttccgaatctccgccccaccagtcaaccgacgaatag

SEQ ID NO: 15588 - DNA, 390 bp, synthetic construct
  source 1..390: mol_type = other DNA; note = Synthetic coding sequence
atgtacaggcagaggttcttatacagcctctacagacacactcactgggtgcggtgtgccaagttttccccggacggtcggctcatcgtgtcctgcagcgaggataaaacaattaagatttgggatactaccaacaaacagtgcgtgaacaacttttcagacagtgttggcgatctgtccctgctgtttcacttccaaaaggtagaatcttacctgcaccaagaggtgcagacccaccggagttattatggtggtttaactctgatgaattgtatcgtgaaggtgctgcctaaagagatttcaaaagactatatactgatccatcaccacatatttctgatttctacacaggaacaccatattcccatgcgtaagaaactacggctctag

SEQ ID NO: 15589 - DNA, 2178 bp, synthetic construct
  source 1..2178: mol_type = other DNA; note = Synthetic coding sequence
atgcatcctgagcctagcgagcccgccaccggcggggccgccgaattggattgcgcacaagagcccggcgtggaagaaagtgcaggagatcatgggtcggccgggagggggggttgtaaggaagaaatcaacgaccccaaggagatatgtgtaggatcctccgatacatcctaccattcacaacaaaaacagagcggcgacaatggctccgggggtcattttgctcacccacgggaagatagagaagatcgagggcccagaatgacaaagtccagtctacagaagctatgcaagcagcacaaactgtatattacacctgccctgaacgacacactatatctgcacttcaaagggttcgaccgaatcgagaatttagaggagtatacggggctgcgctgtctgtggttgcagagcaacggcattcaaaaaattgagaatttggaagctcagactgagctgcggtgcctcttccttcagatgaatctgcttcgcaaaatcgaaaatctggagcccctccagaagctagacgccctgaatctgtcaaacaactatattaaaacgattgagaacctgagctgcttgcctgtgcttaacaccctgcagatggcacataaccatctggagaccgttgaagatatccagcatttgcaagaatgccttcgcctttgcgtgcttgatttatctcacaataaactgtcggatccagaaattctgagcatactagagtctatgcccgacttgagggtcctgaacctgatgggtaatcccgtaataagacaaatccccaattatcggaggacagtgaccgtgagacttaagcatctcacatacttggatgatcggcccgtcttccctaaagacagggcgtgcgcagaggcctgggctcggggagggtatgcagcagaaaaggaagagcgccagcagtgggaaagtcgagagcgcaagaaaattaccgattccatcgaggcactggccatgattaaacagagggccgaggaaagaaagcggcaacgtgagagccaggagagaggagagatgacaagctcagacgatggtgaaaacgttcccgcgtccgctgaaggaaaagaagagccccctggggatagggagacacgccagaagatggaactgtttgtcaaagaaagctttgaggctaaagacgaattgtgccctgaaaagccatccggggaagaaccaccagtggaggccaaaagggaagacggaggaccggagccagaaggaacactcccagctgagacactgttgttgtcctctccggtggaggtgaagggcgaggacggcgatggcgaacctgagggcactctaccagccgaggccccacccccaccgcctccagtcgaggtaaaaggcgaggatggcgatcaggagcccgaaggaaccctacccgccgagacattattgctgtctcctcccgttaaggttaaaggcgaggacggggaccgcgaacccgagggaacactgcccgccgaggccccgcctcctcctcctctgggagcagctagggaggagccaactcctcaagccgtggctacagagggcgtcttcgtgacagagctggacggaacaaggaccgaggacttagagaccatccggctagagaccaaagagaccttctgtatcgacgatctgcccgatctcgaagacgacgacgaaactggtaaatctcttgaggatcagaacatgtgttttccaaagatcgaggtaatcagttccttaagcgacgactctgaccccgaacttgattatacgtccctccccgtactggagaatctacccaccgacactctgtctaatatattcgccgtatccaaagatacctcaaaagcggctagggtcccttttacagatatcttcaaaaaggaggcaaaacgtgacctcgagatcaggaagcaggataccaagtccccccgccctcttatccaggagttatctgatgaggacccttccggccaactgctgatgccccctacttgtcagcgggatgccgccccgctcacctcctccggtgatcgggactctgacttcttggccgccagttctcctgtccccacagaaagcgccgcgactccccccgaaacctgtgttggggtggcccagccctcacaggctcttccgacttgggacctgactgcattcccagcccctaaggcgtcttag

SEQ ID NO: 15590 - DNA, 957 bp, synthetic construct
  source 1..957: mol_type = other DNA; note = Synthetic coding sequence
tagggaatcaatggcagcgagggcgacggagctgagattgcagaaaagtttgtgtttttcataggtagcaagaacggggggaaaactacaatcatcctgagatgcctggatcgcgacgagccaccgaaacccactctcgctttagagtacacatatggacgccgggcaaaaggacataatacaccaaaagacattgctcatttctgggagctcgggggcggtacatccctacttgacttgatttccatccccatcacaggcgacacactccggacgtttagtctggtgctggttttagacttgtcaaaacctaatgacctctggcccacaatggaaaacctgttacaggctacaaagagccacgttgacaaagtgatcatgaagctcgggaagactaatgcaaaggccgtctccgagatgcggcagaaaatttggaataatatgcctaaagaccaccccgatcacgagctcatcgacccctttccagtaccactcgtaataatcggcagcaaatatgacgtgttccaggacttcgagtcagagaagcggaaagtgatctgcaaaacactcagattcgtcgcacattactacggagcttcgctcatgttcacctcaaaaagtgaagctctgctactcaagattaggggcgtgattaatcagctcgccttcggcatagataagagcaaatccatttgcgtggatcagaacaagccactgtttattacagcagggcttgattccttcgggcaaattggcagtccgccagttccagaaaatgatattgggaagttacacgcacactcaccaatggagttgtggaaaaaagtgtacgagaaattgttcccgccaaaatcaataaatacattaaaagacattaaggatcccgccagggatcctcagtacgctgagaacgaagtcgatgagatgagaatccagaaggatctcgtgctaagctag

SEQ ID NO: 15591 - DNA, 2559 bp, synthetic construct
  source 1..2559: mol_type = other DNA; note = Synthetic coding sequence
atggaggctcttggcccaggtggggatagggcctcccctgcgtcttctacctcatcactcgacctgtggcacctctccatgagggcagattctgcctattctagtttctcagccgcctccggcggccccgaacctcggacccagagccccggcaccgatctcctaccctatctggactgggactacgttcgggtcgtgtggggcggtccaggtcccgccccccctgacgcggctctctgtacttccccacgccccaggcctgcagtagcagcccgtagtggccctcaacccactgaggtccccggaacacccggcccactcaataggcaagccacccctttgctgtacgcactggccgccgaggctgaagccgccgcccaagcagcggaacctccttcgcctcccgcctcaagagctgcatacaggcagaggctccagggcgcgcagaggagagtgctgagagagacgtcgtttcagcgcaaggaactgagaatgtctctcccagccagactccgcccaacagtcccagcccggccaccagcaacacaccctaggagcgcgtccctttcacacccggggggcgagggcgagcctgcccgaagcagagcacctgcccccggcaccgcggggcgaggtccattagcaaatcagcagaggaagtggtgtttcagcgaacccggaaaactcgaccgcgtgggtagaggaggaggtccggccagggaatgcttaggagaggcatgttctagcagcggtttaccaggccctgagcctctggagtttcaacatcccgcgttagctaagtttgaggaccacgaagtgggctggctcccagaaacacagccgcaggggtccatgaatctggacagcggcagcctgaaactgggtgatgcttttcgcccagcctcaagaagtcggtccgcctccggcgaggtgctgggcagttggggagggagtggcgggactatacctatcgttcaagccgtacctcagggcgccgaaactccacggccactgttccagaccaagctgtcccggtttttgccccaaaaggaggccgcggtgatgtaccccgcggagctcccacagagcagcccagctgactctgaacagagagtgagtgagacatgtattgtgccggcctggctgccgtcactcccagatgaagtgttccttgaagaagcgcctcttgtgcggatgagatcacctcctgacccacacgcctcccagggaccccctgcttctgtgcacgccagcgaccagccttacggaactggactcgggcagaggaccggacaggtgaccgtcccaaccgagtaccccctccatgaatgccctggcacagcgggagccgatgattgttggcagggcgtcaacggctcggtgggaatttcccgtcctactagtcacacacctacaggcaccgcaaatgataacatccccaccatagatcccactggattgacaactaacccccccacagcagccgagtccgacctgctgaagccagtaccagctgacgcattgggactctcaggcaatgatactccaggccccagccataataccgccttagctcgtggaactggtcagccggggagtagaccgacgtggcctagtcagtgtctcgaagaacttgtccaggagttggcgagactggatcccagcctgtgtgaccctttggccagccagccaagtcctgagcctccattgggcctgctggatggcctgatccccctggccgaggttagggccgccatgcgtccggcctgtggcgaggccggcgaggaagccgcgtcaaccttcgaacccggcagttatcagttctcgttcacgcaattgctcccagcgcctagagaggaaactagactggagaacccagccacacacccagttttggaccaaccctgcgggcagggccttcctgcccctaacaattccattcagggaaagaaagttgaactcgcagcccggttacaaaagatgctgcaggatctgcataccgaacaagagcgcctgcagggtgaggcccaggcgtgggccagacggcaagccgcattggaagcagcagtgcgtcaagcctgcgcgccacaggagctggaacgatttagccgttttatggccgatctcgagcgggttctgggtctgcttctgcttctcggttcaagacttgccagggtcaggcgggcacttgcaagagccgcttccgatagtgatcccgatgagcaggcgagtctgctgcagcgactgagacttctgcagcggcaggaagaggatgccaaagagctgaaggaacacgttgctagacgcgagagagccgttcgggaagtactggtaagagccttgcctgtggaagaattacgggtctattgcgcgctccttgccggcaaagcagccgttcttgcacagcagaggaacttagatgaacgaatcagactcctgcaggaccagcttgatgccatacgggacgatctcggccatcatgccccgagccctagccccgccagaccaccaggcacgtgtcccccggtccagcctccttttcccctgttgctcacatag

SEQ ID NO: 15592 - DNA, 1776 bp, synthetic construct
  source 1..1776: mol_type = other DNA; note = Synthetic coding sequence
atggctcaagggagtgtgtcctttaatgacgttaccgtggacttcacacaggaggagtggcaacatctcgaccacgcacagaaaaccctatacatggatgtcatgctcgagaactactgtcacctgatctcggtcggatgtcacatgacaaagcctgatgtcattctgaagctggaaagaggcgaggagccatggactagcttcgctggccatacctgtcttgaggaaaactggaaagccgaggacttcctagtgaagttcaaggaacatcaggagaaatattctcggtctgtggtgtctattaaccacaaaaagctggttaaggaaaagtccaagatttacgagaagacttttaccttgggcaagaaccctgtgaactcaaaaaacctgcctccagagtatgatacacacggcagaatccttaagaacgtgtccgaacttataatttctaacctcaatcccgcgagaaaacgcctgtccgaatataacggatacgggaagagcctgctgtccaccaaacaggagacaactcatcccgaggtaaagtctcataaccagagcgctagagccttttcacacaacgaagtcctgatgcagtatcagaagactgaaaccccagctcagtcattcggttataacgactgcgagaagtcatttctccagcgtggaggattaatcacacacagccggccctacaagggggagaatccctctgtgtataacaagaaaagaagggccactaacatcgagaagaaacatacatgcaatgaatgtggcaaatcattctgcaggaaatcagtgctcattctgcatcagggtatacatagtgaagagaagccataccaatgccaccagtgcggaaacgctttcaggcggaagtcctacctgatcgaccatcaaagaacccacacgggtgagaagccttacgagtgcaatgattgtggcaaaagcttccggcaaaagacaaccctgagcctgcatcaaagaattcacacaggggagaagccatacatttgtaaggaatgtgggaagtcattccatcagaaagccaacctgacagtgcaccagcgcacacatacaggcgaaaagccttacatctgtaatgagtgcggcaagtccttcagtcagaagaccactctggctctccacgagaagactcacaatgaggaaaagccatacatttgtagtgagtgcgggaagtctttcaggcagaaaaccaccctcgtcgctcaccagcggactcataccggagaaaagtcatatgagtgtcctcactgtggcaaggctttccgaatgaaaagttacctcattgatcaccacaggacgcatactggggaaaaaccttatgagtgcaatgagtgtggcaagtcgttttctcaaaagaccaatctcaacctgcaccagaggattcacaccggggaaaagccatatgtctgcaacgagtgtggaaaatcttttagacagaaagccaccttgacagtccaccagaaaatccatacaggtcagaagtcatacgaatgtccgcaatgtggcaaagccttcagccgcaagtcctacctcattcatcaccagagaacgcacactggagagaaaccttacaagtgttcagagtgtgggaaatgttttagacagaagactaacctcatagtacaccaacgaacacacaccggggagaaaccctacgtatgcaatgaatgtggcaagtctttctcatacaaacgtaatcttattgtccatcagcggacccataaaggagaaaacattgagatgcagtag

SEQ ID NO: 15593 - DNA, 2934 bp, synthetic construct
  source 1..2934: mol_type = other DNA; note = Synthetic coding sequence
atgggctggaagccatccgaggctcggggccagagtcagtccttccaagcctcaggactgcagcccaggtctcttaaggccgccagacgggcaaccggacgccccgacagatccagagctgcacgcccgacgatggatccttctgcacacagatctcgcgccgcacccccgaacatggacccagacccccaagccggagttcaggtcgggatgagagttgtgcgtggggtagattggaaatggggacagcaggatgggggggagggaggggtgggaactgtggtcgaattgggcagacatggcagcccttcgacacctgacaggaccgtcgtagttcaatgggaccaaggcactagaactaactaccgagccggataccagggggcccatgatctactactctacgacaatgcacagatcggagtccgccaccccaacatcatatgcgactgctgtaaaaaacacggattgcgaggcatgaggtggaagtgtagagtttgcctcgactatgatctgtgcacacagtgttacatgcataacaagcacgaactggcccatgctttcgatagatatgagacagcgcacagtagaccagtgacgctgtctcctcgccaagggctgcctagaatccctcttcggggcatatttcagggcgccaaggtcgtgcgcggtccagactgggagtggggcagccaagacggcggggagggtaaacccggaagagtggtggatatcaggggctgggacgttgaaacggggcgcagtgtggcttccgtgacttgggctgacggcaccaccaacgtgtaccgcgtcgggcacaaaggtaaggtggaccttaagtgtgtgggtgaggccgcggggggcttctactacaaagaccatcttccgcggctggggaagccagcggaattgcaacgcagagtcagtgcggactcacaaccatttcagcatggggacaaggtgaaatgtttgcttgacacagatgtgctgcgggagatgcaggagggtcatgggggctggaaccctcgcatggctgagcaccactcattctgggtcggggacgtcgttagggtgatcggagacctcgataccgtcaaacggcttcaggccgggcacggcgagtggacggacgacatggccccagctctgggtagggttggcaaggtggtcaaagtctttggagatggtaacttgagagtggcagtcgctgggcagaggtggaccttttcccctagctgcctggtggcatacagaccagaagaggacgcaaaccttgacgtcgctgagagggcccgagagaacaagagtagcttgagcgtggccctcgataagctacgtgctcagaagtctgatcctgaacatcccggacggttggtagtggaggtggccttaggcaacgccgccagggccctcgacctactccggagaaggccagaacaagtcgatactaagaatcagggtcgcaccgctctgcaggtcgccgcatacctgggtcaagtagagttgattcgcctcctgctgcaggcgagggcaggggttgacttgcccgacgatgaaggcaataccgcgctgcactacgccgcactgggtaatcagcctgaagcaacccgagtcttgctgtccgccggatgtcgcgccgacgctattaactctacccagtcgaccgccttacacgtggccgtgcagcgaggctttttagaggttgtacgcgccctgtgcgagcgtggatgcgatgttaatttgcccgacgcacactcagatacaccactgcacagcgccatctcagctgggactggcgcgtctggcattgtcgaagtgctgaccgaggtgccgaacattgatgtgacagccacgaacagccaggggttcaccctgttgcatcacgccagtttaaagggacacgcactggctgtgcgcaagattctcgccagggctagacagctcgtggacgcgaaaaaggaagacggatttactgcgctccacctcgctgcactgaacaatcatcgggaagtcgcccaaattctgattcgggaagggcggtgtgacgtgaatgtaaggaaccgcaaactacagagtcctttacacctggccgtccagcaggctcacgttggcctggtccccctgttggtcgatgcaggatgttccgtgaatgccgaagatgaagagggagatacagcactacacgtagctctgcaacggcaccagcttctcccattggtggctgacggcgctgggggcgatccaggacctttgcagcttttgagccgattacaggctagtgggttacccgggagtgctgagctcaccgtcggagcagcagtggcttgctttctcgccctggagggggccgatgtgtcctacaccaaccaccgcggcaggagtccccttgacctcgctgcagaaggccgggtgcttaaagccttacaaggttgcgcccagcgcttccgtgagagacaagctggtggcggagccgcacctgggccacggcagacgctcggcacacctaatactgtcacgaacctacatgtgggcgcggcccctgggcccgaggccgctgagtgtctggtttgcagcgagctcgccctgttggtgctgttctcaccctgtcagcatagaacagtctgtgaggagtgcgccaggcgaatgaagaagtgtattaggtgccaggtagtggtgtctaagaaactgcgcccggatggcagtgaggtggcctctgcggctcctgcacctggaccaccccgtcagctagtggaggaacttcaatccaggtacagacagatggaggaaaggatcacgtgtcctatctgtatcgactcacatattcgtctggtgtttcaatgtggacatggcgcttgcgcgccatgcggatcagcactgtccgcatgcccaatctgcaggcagccaatccgggacagaatccagatattcgtgtag

SEQ ID NO: 15594 - DNA, 2262 bp, synthetic construct
  source 1..2262: mol_type = other DNA; note = Synthetic coding sequence
atggatccagaccctcaggcaggggttcaggtcggaatgagagtcgtgaggggggtagattggaagtggggccaacaggatggcggagagggcggagtcggtactgtagtagaacttggacgtcacgggtcaccatccacaccagacagaacagtggttgtacagtgggaccagggcacaagaaccaattaccgcgccggataccagggggctcatgatctgcttttgtacgataacgcccaaattggcgtccgtcacccgaacatcatctgtgattgctgcaagaagcacggactgcgcggtatgcggtggaaatgcagggtctgcctggactacgatctttgtactcagtgctacatgcataataaacacgaacttgcccatgcattcgatagatatgaaacagcccactctcggcccgtaaccctgtcacccaggcaggggctcccccgtatccctcttcgcggcatcttccagggagccaaagtggtgaggggtccagattgggagtgggggagtcaggatggcaaacccgcggagcttcagcggagagtgtccgccgatagccagccctttcagcacggggataaggtcaagtgtctgctggacacagacgttctgcgtgagatgcaggagggccatggaggctggaatccgaggatggcggagttcatcggccagaccggaacagtccatcgcataacggacagaggtgacgtgagggtacagttcaatcacgaaacgaggtggaccttccatccaggtgcgctgactaaacaccactcattttgggtaggagatgtggtccgtgttatcggcgatcttgacacggttaagcggctgcaagctggtcacggtgaatggacggacgatatggcacccgcactgggacgggtgggaaaagtagtgaaggtattcggtgacggcaacctgcgggtggccgtcgccgggcagaggtggacattttcgcccagctgtctggtggcctatcgtcctgaggaggatgctaacctcgatgtggcagaacgcgcccgtgaaaacaaaagtagtctttcagtggctctggacaaactccgggctcagaaaagtgaccctgagcaccccggtcgcctggttgtggaggtagctctcgggaatgctgcaagggcattggacctacttcggaggcggcctgaacaggtcgacacaaagaaccagggccggactgcactccaggttgccgcctatctcggacaggtcgaattaattaggttgctgcttcaagctcgggctggagtagaccttcccgacgacgagggtaacacagctctgcactatgcggccctcggcaaccagccagaggcgacacgggttctattaagcgccggctgcagggccgatgcgatcaattctactcagagcacggctcttcatgtcgccgtccagcggggctttcttgaggtggtgcgtgccctgtgcgagaggggttgtgatgtgaatttgcctgacgcccactcagacactcccttacacagcgccatctccgcagggactggcgcctctggcatcgtagaagtgctcacagaggtgcccaacatagacgtcacagccactaactctcagggatttaccttactacaccatgcctcacttaagggacacgctcttgctgtacgtaaaatcctggctcgagcccgtcagctagtcgacgccaagaaagaggacggcttcaccgcactgcatctggccgccctgaacaaccaccgggaagtggcgcaaatcctgatcagggaggggcggtgcgacgtgaatgtcagaaacagaaagctccagtcgcctctgcatctggcggtccaacaggctcatgtaggactcgtgcccctgctggtagatgccggctgttctgtgaacgcagaggacgaggagggcgacactgccctgcatgtggccctacagcgccatcagctgttgccactcgtggctgatggggcaggaggcgaccctggacctcttcagctgctgtcccgattgcaagccagcggactgcccggcagcgccgagttgactgtgggggccgctgtcgcctgcttcctggccctcgaaggcgcggatgtgtcttacactaatcataggggacgctctcccctcgacttagcagcagaaggtagagttttgaaggcactgcaggggtgtgctcaaaggtttcgggtaagagcccaagacgaagaagtccatcaggtgcctggagggaggcagcaggagacagcaccacggcgcttatag

SEQ ID NO: 15595 - DNA, 1161 bp, synthetic construct
  source 1..1161: mol_type = other DNA; note = Synthetic coding sequence
atggggaaagactactacaaaattctggggatccccagcggcgccaatgaagacgaaataaagaaagcctatcggaaaatggctcttaaatatcaccctgacaaaaacaaagaaccaaacgcagaggaaaaattcaaggaaatcgcagaagcctatgacgtcttgagtgatcccaagaaaaggggattatacgaccagtacggtgaagagggtctgaaaaccggaggcggaacttccgggggaagcagtggtagctttcattacactttccacggtgatccccacgctacctttgctagttttttcggaggaagcaaccccttcgatatcttttttgctagctctcgtagcaccagaccattctctggattcgacccagatgacatggacgtggacgaggatgaggatccctttggagcctttggaagattcgggttcaacggtctttcgagagggccacggcgcgcaccagaacccctataccctagacgcaaggtgcaggatccaccagtggttcacgaactccgtgtctcacttgaggagatctaccacggttcaactaagaggatgaagatcactcgccggaggttgaacccagatgggagaactgtgagaaccgaagacaaaatacttcacattgtgattaagcgaggctggaaggaagggaccaaaataacgtttccaaaggaaggagatgccactccagataatatccccgccgatatcgtattcgtgctaaaggataaaccccacgcccatttcagacgggacggcaccaacgtactgtacagcgccctgatatctctgaaggaagcactgtgtggctgtacggtcaatatccccacaatcgacggacgggtgatacccctgccttgcaacgacgtgattaagcctggcaccgtgaagaggctacgtggagaaggtctgcctttccccaaggtacccactcaacgcggagacctaatcgtcgagttcaaagtccgctttccggaccggcttacccctcagacccggcagatcctcaaacagcaatacccacaacatagcctgcacagcatgtgcacacagttagatgtccattggactctggccacattcagtaaaatgcagaagaaggcaaccgggtttcaggagaacgtgccagttcctgatccgttctag

SEQ ID NO: 15596 - DNA, 1008 bp, synthetic construct
  source 1..1008: mol_type = other DNA; note = Synthetic coding sequence
atgctgggaagtggatttaaagctgagaggctgagggtaaaccttaggctggttatcaataggttgaaactgctcgaaaagaaaaaaaccgagttagcacagaaagcaagaaaggagattgccgactacttggcagctggcaaagacgaacgagcccgcatacgcgtagagcatatcatacgcgaagactatctggtcgaagccatggagatcctggagctctactgcgatctcttactagcacgtttcggtctcatacagtccatgaaagagttggattcgggcttggccgagtccgtgtccacgctcatttgggccgcgccgaggctgcaatctgaagtggccgagttaaaaattgtggcggaccagctgtgtgccaaatactcaaaagagtacggtaagttatgccgaactaatcagatcggaacagtgaacgatcgtctgatgcataaactgagcgtggaagcccccccaaaaatcctcgtcgagagatacctcattgagatcgccaagaactacaatgtcccatacgaacctgactcagtagtgatggcagaggcaccaccgggcgtggagacagacctaatcgatgtcggcttcacagacgacgtcaaaaaaggcggaccgggtagggggggctccggcggcttcaccgctcccgttggagggcccgacggcacagtaccgatgccaatgcctatgccaatgcccatgccctctgcaaatactcccttcagctaccccctgcctaaagggcctgttgacgatattaatgctgacaaaaacatctcttctgcccagatcgttggcccaggaccgaaacctgaggcgagtgccaagcttccaagtcgtcctgctgacaactatgataattttgtgctgccagagctcccttctgtgccggatacacttcctacagcctccgcaggtgcttccacgtccgcttctgaggacattgactttgatgacctgagcaggagatttgaagagttaaagaaaaagacgtag

SEQ ID NO: 15597 - DNA, 1101 bp, synthetic construct
  source 1..1101: mol_type = other DNA; note = Synthetic coding sequence
atgctcggatccggcttcaaagcagaacgactgcgggtgaatcttaggttagtcatcaataggctgaagctcctcgagaagaagaagactgagctggcacaaaaagcccggaaggagatagccgactatctggccgctggaaaggacgagagagcccgaatcagggtcgagcacatcattcgtgaggactatctcgttgaagcgatggaaattctcgagttgtattgtgacttactcctggctagatttggacttatccagtctatgaaggagctcgatagcggtctggcagagagtgtgtcaacactgatctgggctgctccgaggctccagtcagaggtagcagaactgaaaatcgtggctgaccaactatgtgccaagtactcaaaagaatacggaaagctttgtcggacgaatcagattggtacagtgaatgatagacttatgcacaaattatctgtggaggccccccccaaaatcctcgttgagcggtatttaatagaaatcgccaagaactataatgtgccctacgagcccgattcggtcgtcatggcagaggcccccccaggcgtggagaccgacctgatcgacgtgggattcacagacgatgtgaagaaaggaggaccagggagaggcggatctggcggattcacagctccggtgggcggcccagacggaaccgtgccaatgccaatgcctatgccaatgcccatgccttccgctaacacccctttcagctacccactcccaaagggcccgtcagacttcaacggcctgcccatggggacgtaccaagctttccctaatattcacccccctcagatcccagcaaccccaccttcttatgaaagcgtggacgacattaacgctgacaaaaacattagctcagctcagatcgtgggcccaggaccaaaacccgaggcctcagccaaactcccaagtcggcccgccgacaattacgataattttgtgttacctgagctcccatcagtacccgacactctccctaccgcgtccgccggagcaagcacgtcagcatcagaggacattgatttcgatgatctgagccggcgtttcgaggaactgaagaagaaaacatag

SEQ ID NO: 15598 - DNA, 948 bp, synthetic construct
  source 1..948: mol_type = other DNA; note = Synthetic coding sequence
atggaaaaatacgagaagctggcaaagacaggagaggggagctatggggtggtgttcaagtgcagaaataagacttcgggtcaggtggttgcagtgaagaaatttgtcgagtccgaagatgacccggtagtgaagaaaattgcgttaagggagattcggatgctgaagcaactaaaacatccaaatcttgtgaatctgatcgaagtgttcagacggaaaagaaaaatgcacctcgtgttcgaatattgcgatcatactttgcttaatgaactcgaaaggaatcccaatggagtcgccgatggtgtcataaagagtgttctgtggcaaaccctgcaggcattgaatttttgtcatatccacaattgcatccaccgtgatatcaagccagagaatattctaattacaaagcaaggtatcatcaaaatttgcgactttggctttgcacagattctaatccccggtgatgcatataccgattacgtggccaccagatggtatcgagctcctgagctgctggtaggggatacccagtacggatcatctgtagatatctgggctattggttgcgtcttcgcagagctcctgacagggcaacccctgtggccaggtaagtctgacgtcgatcagctgtacttgatcatccgcacactcggtaaactcatccctcggcaccagagtatatttaaaagcaacggcttttttcatggaatctccataccggagccggaagacatggagactttagaggagaaattctccgacgtccatcccgttgctttgaactttatgaagggctgcctcaaaatgaacccggacgataggcttacctgttcacagctgctagaatcttcctactttgactccttccaagaggctcagatcaaaagaaaggcgagaaacgaagggcgaaatcgtcggcgccagcaggtgctgccactgaagagttag

SEQ ID NO: 15599 - DNA, 948 bp, synthetic construct
  source 1..948: mol_type = other DNA; note = Synthetic coding sequence
atggctaacgacccactcgaggggttccacgaagtcaacctggctagtcctacatcgccggatctgttgggggtttacgaatcggggacccaggagcagacaaccagcccatcagtgatctatcggccacacccctcagctttaagttcggtgcccatccaggccaatgccttggatgtcagtgagttaccaacccagcctgtgtactcttccccacgccggctgaattgtgccgaaattagttctatatcattccacgtgacagatccagccccttgttctactagcggcgtgaccgccggactgacaaagctcaccacccgcaaggacaactacaatgctgaaagagaatttctgcaaggagcaaccatcaccgaagcctgtgacgggtccgacgatatcttcggtttgtcaactgattccctttcacgtttgcgctctccatcggtcctggaggttcgtgagaaggggtatgagcggctcaaggaagagcttgcaaaagcccagagggagttgaaactgaaagatgaggaatgtgagcgtctcagcaaggtgcgagatcagttagggcaggagctggaggagttaaccgcatcgctgttcgaagaagctcataaaatggtgcgggaggctaatattaaacaagctacagctgagaaacagttgaaagaggcccaggggaagattgatgttctccaggcagaagtggccgctttgaaaacgctggtgctgagctcctcccccacgagcccaacacaggagcccctgcccggtggaaagactccattcaagaaggggcacactcgcaataagtctacatcttctgcaatgagcggcagtcaccaggatctgtcggtgatccaaccaatagtaaaagattgtaaggaggtgacccaccagggcctgtccccactgaccctgttaattctggtgagtagccatcattag

SEQ ID NO: 15600 - DNA, 1074 bp, synthetic construct
  source 1..1074: mol_type = other DNA; note = Synthetic coding sequence
atggccagagagaacggtgagtccagtagcagttggaagaagcaagcggaggacatcaagaaaatcttcgaattcaaggaaactctagggactggcgcgttcagtgaggttgtgcttgcggaggaaaaggccacaggcaagttgttcgcggtcaaatgcatccccaaaaaagcgctaaagggcaaggagtcctctatagagaacgagattgccgttttgagaaagatcaagcatgagaatattgtggccttggaggatatctacgaaagccctaaccacctatacttagtaatgcagctggtcagcgggggggagctgttcgaccggattgtcgaaaaaggattctacacagagaaggacgcatctactctcatcaggcaggtgctcgacgctgtctattaccttcaccgcatgggcatcgtgcacagggatctgaagccagagaacctgctctattactcccaggacgaggagtccaaaattatgattagcgattttggtctatcgaagatggagggaaagggcgacgtcatgagtaccgcctgcggaactccaggatatgtggccccagaggtcctcgcgcagaaaccttacagcaaagccgtagattgttggtcaattggtgtgattgcttatatcctgctctgcgggtatcctcctttttacgatgagaatgacagcaagttgtttgagcagatccttaaggctgaatacgagttcgattctccctattgggacgatatttctgacagtgccaaggacttcattagaaatttgatggagaaggacccaaataagcgatacacttgcgaacaggcagcaagacacccttggatcgctggcgatacggctcttaacaagaacatccatgagagtgtatccgcccagattcgaaaaaattttgctaaatccaagtggcggcaagcatttaacgctacagcagtggtcagacacatgagaaagctccacctggggtcttctctcgacagctctaacgccagcgttagcagctccctgtccttggccagtcaaaaggactgcgcttatgtcgcgaagcccgagtctttgtcctag

SEQ ID NO: 15601 - DNA, 1158 bp, synthetic construct
  source 1..1158: mol_type = other DNA; note = Synthetic coding sequence
atggcaagagagaacggagagtcatcctcctcctggaaaaaacaagcagaagatataaagaaaatcttcgaatttaaagagacactgggcaccggcgcatttagtgaagtggtactggctgaggaaaaggccaccggcaagcttttcgccgtgaaatgcatccctaagaaagcactgaaagggaaggagagctctatagagaacgaaattgccgtgttgcgcaagatcaagcatgagaacatcgtcgcgttggaggatatctacgaaagcccaaatcacctgtacttagtgatgcagctagttagcggcggcgagctgttcgatcggatcgtagaaaaggggttctacaccgaaaaagacgcctcaaccctgattaggcaggtgctggacgccgtttactacctgcacagaatgggaatcgtgcatcgggatctcaaacctgagaatctgctttattatagccaggacgaagagtccaagatcatgatttctgactttgggctgtccaagatggaaggaaagggtgacgtgatgtctactgcctgcggaacaccgggatatgtcgcaccagaagtgcttgctcagaaaccctacagcaaggctgtcgattgttggagtatcggagtgattgcctatatactgctgtgtggatatccacctttttatgacgagaacgacagtaagcttttcgagcagatcctgaaggccgagtacgaattcgactccccatattgggacgatatcagtgattcagctaaagattttatccgaaatttaatggagaaggatccgaataaacgatatacttgcgaacaggccgctcgtcatccatggattgccggtgatacagcacttaataagaatatccacgagtctgtcagcgcccagatccgcaagaactttgcaaaaagcaaatggcgccaggcgtttaatgccactgccgttgtccgacacatgaggaagctacatctgggttccagccttgactctagcaacgccagcgttagctccagcctgtctctggctagtcagaaggattgcctcgcaccctctactttatgtagtttcataagctcatcatctggtgtttctggagtgggggcagagcgtcgccctagacctacaacagtgaccgccgttcatagcgggagtaagtag

SEQ ID NO: 15602 - DNA, 888 bp, synthetic construct
  source 1..888: mol_type = other DNA; note = Synthetic coding sequence
atgaaaaaagagcatgtccttcactgccagttctcggcatggtacccattcttcagaggcgtgaccatcaagagcgttattctccccctgccccagaatgtgaaagactatctcctggacgacggaacactcgttgtttccggcagggacgaccctcccacacacagccagcctgatagcgacgacgaggccgaagaaatccaatggtcggacgacgaaaacacagccacgctcacggcccctgagttcccagagtttgcaacgaaggtccaagaagcaatcaattctcttggagggtcagtgtttccgaagcttaattggagcgcaccaagggatgcttactggatcgctatgaactcaagtctgaaatgtaagaccctctctgatatatttctcctctttaagtctagcgatttcatcacaagggacttcactcagcctttcatccactgcaccgatgattcccccgacccttgcattgaatatgagctggtcttacgaaaatggtgtgaactgataccaggagccgagtttcggtgttttgtgaaggagaacaaactcatagttgtattcgatatatatcgcgattcacgggggaaggtctggctgattgatttcaaccccttcggtgaggtcaccgactctctcctgtttacctgggaagaacttatttctgagaacaaccttaatggagactttagtgaggtggacgcacaggagcaagactctcctgcctttcgttgcacaaatagcgaggtcactgtgcagccatcaccatacctgtcatatagattgcctaaggacttcgtcgacctgagcaccggggaagacgcacacaagctcattgactttcttaaactcaaaagaaaccagcaggaagacgactag

SEQ ID NO: 15603 - DNA, 3273 bp, synthetic construct
  source 1..3273: mol_type = other DNA; note = Synthetic coding sequence
atggagcagccaaaaggtgtagactggacagtcattattctgacttgccaatacaaggactccgtgcaagtgttccagagggagcttgaagtcaggcaaaaaagggagcagatacccgctggaacgcttctgctagctgtggaagaccccgaaaaacgggtgggatcaggcggagcaacactgaacgcacttttggtcgcagccgagcacttgtccgcgagagctggatttacatggatatgtgtaggagtcagtctctggattagaggctgtcaccctcccgggaggctgcccgaagcctctgttcaccgagcctttccactgcttcaagtggtcacctccgacgtgctgcactcggcctggattctgatcttgcatatgggtcgcgacttcccattcgacgactgcggccgcgcttttacatgccttccagttgaaaatcccgaagcaccagtcgaagcactcgtgtgtaaccttgactgcctcctcgacattatgacatacaggcttggtcctggcagcccccccggagtctgggtgtgcagtacagacatgctgttatctgtgccggcaaatccaggcatctcgtgggattcatttaggggtgcgagggtgatcgccctgcctggcagccccgcttatgcccagaatcacggcgtctacctgactgatccgcaggggcttgtattagacatttactatcagggtactgaggccgaaatacagcggtgtgtgcggcctgacgggagggtgcccttggtgtcaggcgttgttttctttagcgtggagacagcagaaaggctcctagctacacacgtgtccccgcccttggatgcatgtacctacttgggtctggacagtggcgctcgcccggtgcagctctcactgttcttcgacatattgcactgcatggctgaaaacgtgactcgcgaggatttcctagttggccgacccccggagctgggacagggagacgccgatgtcgccggatatctgcagtctgcccgtgcccaactgtggagggagctcagagatcagcccctgaccatggcttatgtgtccagtggcagttattcctacatgacgtctagcgcatccgagtttctgctcagccttacattgcccggggccccaggcgcccagatagtgcactctcaggtcgaagagcaacagctgctcgccgccggaagctcagtggtgtcttgtcttttagagggcccggtacagttgggtcccgggtctgtgcttcagcattgtcatctccagggccccattcacattggcgcggggtgtctggtaactggtcttgacaccgcccattctaaggcattgcacggcagggaactgcgggatttggtgctccagggtcatcacacaagactccacggttctcctggacacgctttcacactggtggggcggcttgatagctgggagcgtcagggcgcggggacctacctaaatgtcccctggtccgagtttttcaaaagaacaggcgtgagggcctgggatctttgggaccctgaaactttacctgctgagtactgtttgcctagtgctcggttatttcctgtcctacacccgagtagagaacttgggcctcaggacctgctctggatgttagatcaccaggaggacggcggtgaggccttacgcgcgtggcgagcctcctggaggttgtcttgggaacagttgcagccgtgcctggatagagcagccaccttagcctcccgcagagacctgttcttccggcaagcccttcacaaggctcggcatgtgttggaagctagacaagatcttagcctccgccccctcatttgggccgctgtgagggaaggatgtccgggtcccctgctagctacccttgatcaagtcgctgcgggtgctggcgaccctggagtcgccgcccgcgccttggcctgcgtcgccgacgtgctggggtgcatggcagaaggcaggggaggactgagaagcggcccggccgccaatcctgagtggatgcggcccttttcttatttggagtgcggggaccttgcagctggtgttgaggccttggcccaagaaagagacaagtggttgtctagaccagccctcctagtcagagctgctcgccactacgagggtgccggccagattttgatcaggcaggcggttatgagtgcacagcattttgtgtccaccgaacaggtcgagctccccgggccgggtcaatgggtggtcgcagaatgtcccgcaagagtggacttctctgggggatggagcgacactcctcctttggcctacgaattaggcggcgcagtgcttggtctcgctgttagagtggacggcaggaggcctatcggcgcaagagcccgacggatcccagaaccagagctgtggttagctgttggaccccggcaagacgaaatgacggtcaaaatcgtgtgccgctgcctagccgatctgcgagactactgccagccccacgctcctggtgccctgctgaaagccgctttcatatgcgccggcattgttcacgtgcattcagaactgcaactgtcaacatcctccatcttggctggtactgccctcgctgccctccagcgcgccgcaggaagagtggtcggaacagaagcgttgatccatgcggtcctgcacttagagcaggtgcttacaactggcgggggttggcaggaccaggtcggcgggcttatgccagggattaaggtgggccgatctagagcccagctgcccttgaaagtggaggttgaagaggtcacggttcctgaaggtttcgtacagaagttaaacgaccatctgttgctggtgtatactggaaagaccagactggcccgaaacctgcttcaggatgtcttgaggagttggtacgcaaggcttccagctgttgtgcagaacgcacattctcttgttaggcagactgaagagtgcgccgaaggctttaggcaagggagcttacccctcctaggccagtgcctgaccagttactgggagcagaagaagcttatggcgcccggctgtgagcctctgacagtccgaagaatgatggatgttctagccccgcatgttcacgggcagagtttggccggggccggaggcggaggatttctgtatctgctgacaaaagagccccagcagaaggaggccttggaggccgtcttagccaagactgaaggtctcgggaattactcaatccacctagttgaggtagatacacaaggacttagcttgaagctgctgggaacggaggcgtcaacttgctgtccttttccatag

SEQ ID NO: 15604 - DNA, 318 bp, synthetic construct
  source 1..318: mol_type = other DNA; note = Synthetic coding sequence
atgctggagctggcccaagaccgtttgcagtttgagaccgtggaggtgtccgagccatccatgctgcagaaaatcctcaccacccggcggcgcgagactggcggcaacgagcccttacctgtgcctacactgcagcatcatctggccccgcctgccgaggcaaggaaggttccgtctgcctcacaggtacaagctatcaagtgtttcttgtctaaatgttggagcctgaacatcagtaccaaggaatatgcttacttgaaaggtactgtcctcttcaacccgggaaagggaaaagagaacgactgtaaccaccactag

SEQ ID NO: 15605 - DNA, 1413 bp, synthetic construct
  source 1..1413: mol_type = other DNA; note = Synthetic coding sequence
atggccggtgagaaccatcagtggcagggctctattctgtacaatatgctgatgtctgcgaaacagacgagggctgcccctgaggcccccgaaacccgtctcgtggaccagtgttggggatgtagctgtggagatgagccgggagtcggacgcgagggcttactgggtggacggaacgtggctctcctgtatcgatgttgcttctgtggcaaagaccacccgagacaagggtctatactgtatagcatgctcacttccgctaagcagacttacgctgctcccaaagcaccggaggccaccttgggaccttgctggggctgctcctgtgggtctgaccctggcgtcggaagagccggattacccgggggcagaccggttgcactactgtaccgctgctgtttttgcggcgaggaccacccaagacaggggagcatcctgtactctctccttacatcttcaaagcagactcatgtggctccagccgcccccgaagcaagacctggcggcgcctggtgggatagatcatatttcgctcagcgccctggtggaaaagaagctctcccaggcggccgggctactgcattattgtatagatgttgtttctgcggtgaggatcaccctcagcaaggttccactctgtattgcgttccaaccagcacaaatcaggcgcaggccgcacctgaggagagacctagggcgccctggtgggacacaagttccggggccctcagacctgtagccttaaaatcaccacaggtcgtctgtgaggcagcttcagccggactgctcaaaacccttagatttgtaaagtacctgccttgctttcaggtattaccgctggaccagcagctcgtattggtgcgcaattgctgggcttccttattgatgctggaattggctcaggatagactgcaatttgagacggttgaagtcagcgagccctccatgctgcagaagatcctcacaaccagacgtcgggagacaggcggaaacgagcccctccccgtccccaccttgcagcatcatctcgcccccccagccgaagctcgtaaggtccctagtgccagccaggttcaggcgattaagtgcttcctgagtaagtgttggagtctgaatatttctactaaagagtacgcttacctcaagggcacagtacttttcaatccagatgtccccggactgcaatgcgtgaagtacatccagggtcttcaatggggcacacaacaaattttgtctgaacataccaggatgactcaccagggcccccacgatcgcttcatcgagctgaactctacattatttttgcttcggtttattaatgctaacgtaatcgcggaattgttcttcagaccaattattggcacagtgtcaatggatgacatgatgctcgagatgctgtgcactaagatctag

SEQ ID NO: 15606 - DNA, 2028 bp, synthetic construct
  source 1..2028: mol_type = other DNA; note = Synthetic coding sequence
atgttaagggccaccgcaccatgctggtttccgcccggttatccagaagccaagaaagtagccgaggaagccgcactggaggcctctcggcaccttgggggagaacaaagccaggctggtgcccccgagggcagtaagatgctcagggctactgcaccctgctggttccgcccgggatacccagaagccaagaaagtagccaaggaagctgccccagaagcctctcgccatctcggagccgagcagagccctgccggcgcacccgagggctccaaaatgctgagggccacagccccatgctggtttcctccgggttacccagaagccaagaaggttgccgaggaggcagcgctcgaggccccagagttcccccttccatcccaccaaccggcccagagcttcggtctttgggtcccccagatgcacaagcaggctagcgcattcgtagacatccaggcagaaccacaaaaccgcggcccggctgtccctccggcttggcccaagatggtgaccgagagctgttactttcccgcacagaggggctccgcctgtaggttgccagccgcccccagactgactgagaggccatccggagttagaattagtgccccccggaaacggaaaactatcgcccattcctccagcccgtgtttggtcactggctacacggatgccaagagaacccgcgtggccagttcctcccagcgctccagggggagcaaagtgggccgccagcctggcaagacgcggaatcggagcggtatggcctgtaaaacaacagctaccacatcatccaaaagaatcgtcagaagagcctccctcccaagcctgtctcttaaaaaacccatcatcctaaggtctagtggttgccaggttccaaccgtgctgaggagaggatatctgcagctcttcaccgaggagtgcctgaagttctgtgcctctaagcaggaagccgaagagaaagccctgaacgaagagaaggtggcatatgactgcagccccaataaaaataggtacctgaatgtcgtgttaaatactttgaagcgcctgaaaggactaaccccttcaagtatgcctgggttgagcagagctgccctgtacagtcgcctccaagaattcctgctaacacaggatcagttaaaggaaaatggttacccctttccacatcctgagagacccggaggtgcagtgctgttcacaggccaaggcaaaggtcctggagattcttcatgccgagtttgctgccgctgtggcactgaatacctcgtgagttcttctggtagatgcgtccgagaccaattgtgttactaccattggggtagggttagatcttcacaggtagccggtggaagagtcagccaatacacatgctgtgcggctgcaccaggatccgtagggtgccaagtagctaaacagcacgttcgcgacggccgaaaggagagcctcgacggcttcgtcgagaccttcaaaaaagaattgtcaagggacgcttaccctggtatatacgctctggactgcgagatgtgctacacaacacatggcctcgagttgacccgggtcaccgttgtggacgcagatatgcgtgtggtgtatgatacatttgtgaagcccgacaatgagatcgtggattataacacccggttctcaggggtaacagaagctgatgtcgctaagactagtatcactctgccccaagtccaggctattttactctcatttttttctgctcagaccatactcatcggccactcactagagtctgacttacttgccctgaagctgatccattcaaccgtggtggatacggcagtattgttccctcactatttggggtttccatacaagcgctccctcaggaacctggccgccgactatctggcacagattatccaggactcccaagatggacacaactccagtgaggatgccagtgcttgtttgcagctggttatgtggaaagtcaggcagagagcccagattcagccacgccaccggagcgccagcccagcagcgcttgcctgtccatag

SEQ ID NO: 15607 - DNA, 711 bp, synthetic construct
  source 1..711: mol_type = other DNA; note = Synthetic coding sequence
atgcatacaactcagaaagacaccacatacaccaagatcttcgtcggaggcttaccctaccatacaaccgatgcctccctgcgaaagtacttcgaagtcttcggcgaaatcgaagaggccgtggtgatcaccgacagacagacaggaaagagccggggttatggattcgttactatggccgatcgagccgcggccgagcgagcttgcaaggaccctaaccctatcatcgatgggaggaaggccaacgtaaacttggcctatctgggtgccaagccccggatcatgcaacccgggtttgcctttggcgttcagcaactgcacccggctctgatccagagaccctttggcattcccgcccattatgtctatccacaggctttcgtgcaaccaggcgtagtaatcccccatgtgcagccgaccgccgccgctgccagcacgacgccttacattgactatactggtgctgcctatgcccaatactcagccgctgccgccgcagcggctgctgccgctgcatacgatcaatatccctatgctgcttcacccgcagctgccggctacgttaccgccggaggctatgggtacgctgtgcaacagcctattaccgctgccgcgccaggtactgctgccgcagccgctgctgctgcagctgctgcagccgcattcggacagtaccagcctcagcagctgcagaccgatagaatgcagtag

SEQ ID NO: 15608 - DNA, 4389 bp, synthetic construct
  source 1..4389: mol_type = other DNA; note = Synthetic coding sequence
atggcccctgtccatggtgacgatagcctgagcgattctggatcatttgtgtcatcccgcgcaagacgggagaaaaagagtaaaaaaggacggcaagaagcgttagaaaggcttaaaaaagctaaagccggcgaaaagtacaagtatgaggtggaggacttcaccggtgtctacgaagaagttgacgaggagcaatattcaaagttagtccaagcccggcaggacgatgactggatcgtcgacgacgacggaattggctatgtggaggatgggagggagatctttgatgatgacctggaagatgacgcactggacgccgatgaaaaagggaaagacggaaaagcgcgaaacaaagacaaacgcaacgtgaaaaaattggctgtgacgaaaccgaacaatattaaaagcatgtttatcgcgtgcgctggaaaaaagacagcagataaggccgtggacttgagcaaagatggtctgctcggagacattttgcaggacctgaacacagaaacaccacagatcacaccaccaccagtgatgatcctgaagaagaagaggagcatcggtgctagtcccaaccctttttccgttcataccgccactgctgttcccagcggcaagatcgcctcaccggtctcacggaaggagccgccgttgactccagtcccattaaagcgagccgaatttgcaggcgatgatgttcaagtggaatctaccgaagaagaacaggaatctggggctatggagttcgaagacggagattttgacgaacccatggaagtggaggaggttgacctcgagcccatggctgctaaagcctgggataaggaatctgaacctgcggaagaagttaagcaggaggccgatagcgggaagggcactgtgagctatttaggctcctttctgccagacgtcagctgctgggacatagaccaggagggagactcctcattttctgtgcaagaggtgcaagtagatagctcccacctcccgctcgtcaaaggggcagacgaggagcaggttttccatttctattggctggatgcttatgaagaccagtacaatcagccgggagtggtgttcctcttcgggaaggtgtggatagagtcagccgaaacgcacgtctcatgctgcgtcatggtcaaaaacatagaaagaacactgtatttcttgccgcgcgaaatgaaaatcgacctcaacacaggaaaggagacaggcactcctatcagtatgaaggacgtatatgaagagtttgacgaaaagatcgctacaaagtacaaaatcatgaaatttaagagcaaaccagtggagaaaaactacgcatttgaaattcctgatgttccagaaaaaagcgagtatctggaggtgaagtatagcgccgaaatgcctcagttgcctcaggatcttaaaggcgagacattcagccacgtcttcggcactaatacctcttctctggagctcttcctgatgaaccgaaaaatcaaaggaccctgttggctggaggttaaatctcctcagctgttgaatcagcctgtctcatggtgtaaagtggaagctatggctctgaaacccgatttggtcaatgtgatcaaggacgtcagcccccccccactggtggtaatggccttttccatgaaaactatgcagaatgctaaaaatcaccaaaacgaaatcatcgcgatggctgcattggtccaccactcatttgccttagataaggcagcccctaagcctccatttcagagtcacttctgtgtcgttagcaaaccaaaggactgtatctttccttatgcctttaaagaagtaattgaaaaaaagaatgttaaggtcgaggtggccgccactgaacgcactttgctagggtttttcttggcgaaggtgcataagatcgatccagacattattgtgggacataatatctatggcttcgaacttgaagtgcttctgcaaagaatcaatgtatgcaaggccccccactggtcaaagatcggccggctgaagaggtcaaacatgcccaaactcggcggccgctcaggttttggagagaggaacgcaacttgtggccgaatgatatgtgacgttgaaattagcgccaaagaattgatccgttgcaagtcttaccacttgtcagaactagtccagcagatcctgaagactgagcgagtagtcatccctatggagaatatccagaacatgtatagtgagagtagccagctgctctacctgctggagcacacctggaaggatgctaaattcatactgcagatcatgtgcgagctcaatgtgttgcccctcgcactgcagatcacaaatatagcagggaacatcatgtctcgcacgctcatgggcggccggtccgagaggaacgaatttctgctactgcacgccttctatgaaaataattatatagttcccgacaaacaaattttccgcaagccacagcaaaagctgggcgatgaggatgaggagatcgatggggatacgaacaagtacaaaaagggcaggaagaaagcggcgtatgccggaggcctggtcttggacccgaaggtgggcttttacgacaagttcatcctgctcctggacttcaattccctgtacccctccattatccaggagttcaatatatgcttcacgacagtgcagcgtgtcgcatctgaggcacagaaagtgaccgaggatggggaacaagagcagatccccgaactgccggatccttccttggagatgggcatcctgccccgggagattaggaaactcgttgagagacgtaaacaggtgaagcagctgatgaagcaacaggatctgaaccccgacctgatccttcaatatgacattcgtcagaaagcccttaagcttacagcgaacagcatgtacgggtgcttgggatttagttattccaggttctatgccaagccgctcgcagccctggtgacctacaagggacgggaaatccttatgcacacgaaagagatggtgcaaaagatgaacctagaggtgatctacggtgacaccgactccatcatgataaatacgaactccacaaatctcgaggaggtcttcaaactagggaacaaggttaagtcggaagtgaataagctgtacaagctgctggagattgacattgacggggtgtttaagtccctactgttgctcaagaaaaagaagtacgcagcactggtggtggaaccaaccagcgacggcaattatgtcaccaagcaagaactgaagggtctggatattgtgcgtagggattggtgtgacctggccaaggacaccgggaacttcgtgattggtcagatcctgtcagatcagtcccgggataccattgtagagaatatccagaagcgcctgatcgagattggcgaaaacgtccttaacggatcagtgcctgtctcacagttcgagattaataaggccctgacaaaggatccacaggactaccccgataaaaagtctctccctcacgtccacgtcgccttatggattaatagtcagggtggacggaaagtcaaagccggagatactgtatcttatgtgatctgccaggacggctctaacctgaccgctagtcagcgggcatacgcccctgaacagttacagaagcaggataaccttactatcgatacccagtattacctggcccagcagatacatccagtggtcgcccggatttgtgagcccatcgatggcattgatgcagtcctgatagctacatggctggggcttgaccctacgcagttcagagtacatcattatcacaaagacgaggagaatgacgctttactgggcggtcccgctcagctgactgacgaagaaaaataccgtgattgtgaaagatttaagtgcccctgtccaacgtgcgggactgagaacatctatgataacgtcttcgatgggtcagggactgacatggaaccatctctgtacaggtgctcgaacatcgactgtaaggcttctcctctcacttttacagttcagctgtccaataagttaatcatggacatacggcgtttcattaaaaagtactacgatggttggctgatttgcgaggaacctacatgtcgcaatcgcacgagacatttgccacttcagttttctagaactggacctttgtgtccagcttgcatgaaggcgacactgcagcccgagtactccgacaagtctctgtacacacagctctgcttctacaggtatatcttcgatgcggaatgcgctttggagaagctgacgaccgaccacgagaaagacaaacttaaaaaacagtttttcacacccaaggtgcttcaagattacagaaaacttaaaaacacggcagagcagtttctgtctcgcagcggatactcagaagtcaacctttcaaaactgttcgccggatgcgcagtgaaaagttag

SEQ ID NO: 15609 - DNA, 2673 bp, synthetic construct
  source 1..2673: mol_type = other DNA; note = Synthetic coding sequence
atgtccgctaataactctccaccctccgcccagaagtctgtgctgcctaccgccatccccgccgtccttcctgccgctagcccttgttcttctcctaagactgggctgtctgcccgcctctctaatgggtccttttcagccccctctctcacaaactcccgcggctccgttcacaccgtcagctttctcctgcaaattggtctgactcgcgagtcggtgacgatcgaggcacaggagctgagcctcagcgcagtgaaagatcttgtttgttctatagtctaccagaaattccctgaatgtggttttttcggcatgtacgataaaatcctgctgttcaggcacgatatgaattccgaaaacatactgcagctgataacttcagctgacgaaatccacgagggagatctggttgaagttgttctcagtgcactggccactgtggaagatttccagattcggcctcatacactgtacgtgcatagctacaaggcccccaccttctgtgattattgcggcgagatgctgtggggcctagtgcgacaaggcttgaaatgcgagggctgtggcctgaactatcacaaacggtgcgccttcaaaattcctaataactgttcaggggtgaggaagcggaggttaagtaacgtgtccctgcctggccctggactgagcgtacctaggcccctgcagcctgaatacgtcgcgttgccatctgaggagagccacgtgcaccaggagccttcaaagagaattccaagctggtcaggacgcccaatctggatggagaaaatggtgatgtgtcgggttaaagtgccccatacctttgccgtgcattcatacacccgaccaaccatatgtcagtattgcaagcgactcctcaagggcctgttccggcaggggatgcagtgtaaggattgtaagtttaactgccataaaagatgtgcttctaaggttcctagggactgtctgggggaggtgacttttaacggtgagccatctagcctcggcaccgatactgatatccccatggatattgacaacaatgatattaactccgattctagccgaggcttggatgatactgaggagccgagcccacccgaggacaagatgttcttccttgatcctagcgacttagacgtggaacgagacgaggaagctgttaagacgatctctccctctactagtaataacattcccctgatgagggtggtgcaatcaattaagcacaccaagagaaaaagttctacaatggtaaaagaaggatggatggtgcactacacatctagagataacctgcgaaagcggcactactggcgtcttgactcaaagtgtctgacactcttccaaaatgaatcaggctctaagtactacaaggaaatccccttgagcgagatattgcgaataagttccccgagggacttcactaatatctctcaagggtctaatccacactgttttgagattattacagacaccatggtttactttgtcggggagaacaatggagactcatctcacaacccggtgctggcggccaccggggtcggactggatgtcgcacaatcctgggagaaagccatccggcaggccttgatgccagtgacccctcaggcttccgtttgcacttcccctggacagggcaaggatcacaaagacctgagcactagtatctcagtgtctaactgtcagatccaggagaacgtggatatctccactgtgtaccagatctttgctgacgaggtcctgggaagcgggcaattcggaattgtgtatgggggtaaacacagaaagaccgggagggatgtggctatcaaggtaatcgataagatgcggttcccaaccaagcaggagagtcagctaaggaatgaggtggccattctgcagaatctgcatcatcccgggattgtcaatctggaatgcatgttcgagaccccagagcgcgtattcgttgtcatggagaagctgcatggagatatgttagagatgatcctgagctctgaaaagagtaggctgccagagaggattacgaaattcatggtgacccagatcctggtggcgctgaggaatcttcatttcaaaaatatagtgcattgcgacctcaagccggagaacgtgctgctcgcaagcgccgaaccatttcctcaagtgaaactgtgcgacttcggatttgccaggattattggggagaagtcattccggcgctcggtggtcggaacgcctgcatacctggccccagaggtacttcgatctaaagggtacaatcggtctctcgatatgtggtcagtaggggtaattatatatgtttcattatccggtacctttccatttaacgaagacgaagatattaacgaccagatccagaatgccgcttttatgtaccctccgaacccatggagagagatctctggcgaagcgattgacttgattaataatttgctgcaagtcaaaatgagaaaaaggtacagtgtcgataagtctctatcccacccttggctccaggattaccagacgtggctcgatctcagggagttcgagacccgaatcggagaaagatacattacccacgaaagcgatgatgcaagatgggaaatccacgcgtacacccacaatctggtctatccaaagcattttatcatggctccgaatcctgacgatatggaagaagatccgtag

SEQ ID NO: 15610 - DNA, 4407 bp, synthetic construct
  source 1..4407: mol_type = other DNA; note = Synthetic coding sequence
atggctccagtgcacggagatgattgcgaaattggggcatcggctctaagtgattcagggtctttcgtctcctcgagagcgcgaagagaaaaaaagtccaaaaaaggacgccaggaagcactggaacgtctgaaaaaggccaaggccggtgagaagtataaatatgaggtcgaggactttacgggcgtttatgaggaggtggatgaagaacagtattcaaaacttgtgcaggcgagacaagatgacgactggatcgtggacgacgacggaatcggctacgttgaggacggccgcgaaatcttcgatgatgatctggaggacgatgcactcgatgcagatgaaaagggtaaggatggcaaggctcggaataaggacaaacggaatgtgaagaagttagcggtgacaaaaccgaataacatcaagagtatgtttattgcctgtgctggcaagaagaccgccgataaagctgtcgatctatctaaggacgggctgctaggggacatcttacaggatttgaacaccgaaacgccccagataaccccgcctcccgtgatgattttgaagaagaagcgctccattggcgcatctcccaaccccttcagcgtacacacagctaccgctgtgccgtcagggaagatcgcaagtcccgtctccagaaaggagccaccactcacacccgtgccactcaagcgcgctgaattcgcaggcgacgacgtgcaagtagagagcaccgaagaggaacaagaatcaggggctatggaatttgaggacggggactttgacgagccaatggaagtggaagaggtcgatctggaaccaatggccgccaaagcctgggacaaggagtcagaacccgcagaagaggtaaagcaggaagcggattccggcaaagggacggtgagttacctaggcagttttctacccgatgtgtcctgctgggacattgatcaggagggggattcctctttctcagttcaagaggtgcaggtcgacagcagtcacctgccactcgtaaagggcgcagatgaggagcaagtgttccacttttactggctggacgcttacgaggatcagtacaaccagcctggggtggtctttctgtttggaaaggtgtggatagaatccgccgaaactcatgtatcctgttgcgtaatggtcaagaacattgagcgtactctgtatttcctgcctagggaaatgaagattgacctgaacactggcaaagagacaggaacgcccatttcaatgaaggacgtatacgaggagttcgacgaaaagatcgctactaaatacaagattatgaaatttaaaagtaagccagttgagaaaaactacgcgttcgagatacccgatgttcccgagaagtccgagtacctcgaggtgaaatattcagctgagatgccacagcttcctcaggacctgaaaggcgaaactttcagtcacgtattcggaaccaatacttcctccttagaactgtttctaatgaaccgtaaaatcaaggggccgtgttggctggaggtaaagagtccacagctgttgaatcagcctgtgagttggtgcaaagtcgaagccatggccctgaagcccgacctagttaacgtaataaaggatgtgtcgccgccacccctggtagtgatggcattctccatgaaaactatgcagaacgccaaaaatcatcagaatgagattattgctatggccgcactggtgcaccatagcttcgccctggataaggccgcacccaaacccccattccagtcacatttttgtgtcgtgtctaaacctaaagactgtatattcccatacgcctttaaagaggtgatcgagaaaaaaaatgtgaaggtggaggttgccgccacagagagaactcttctgggcttttttctggccaaggtacacaaaatcgaccctgatataattgtggggcataatatctacggatttgagctcgaagtgctactacagaggatcaacgtctgtaaggctcctcattggagtaaaatcgggagactcaagcggtctaacatgccaaagctggggggccgctccggctttggcgaaaggaatgccacctgtggtcgtatgatctgtgacgttgagatctcggcaaaagagctgattcggtgcaagagctatcacctgtccgagctggtccagcaaattcttaaaacagaacgtgttgttattcccatggagaacatacagaatatgtacagtgagagcagccagctcctctatctgttagagcacacctggaaggatgctaagttcattctacagattatgtgtgaactaaatgtgctgccactggctttgcagatcaccaacatcgctggtaacattatgtcacgtaccctgatggggggtcggtccgaaagaaacgaatttctcctgttgcacgccttttatgaaaataactatattgttcctgataagcagattttccggaagccacagcaaaagctaggggatgaggacgaggagatcgacggagataccaacaagtacaagaaaggtagaaaaaaggcagcctacgccggaggtttagtgctagatccaaaggtgggcttttatgataagtttattctgctccttgactttaatagtttatatccctccattattcaggaatttaacatctgtttcacaacagtgcaacgcgtcgcttctgaagcccaaaaggtgactgaggatggagaacaggaacagatccctgaacttccagatccatctcttgaaatgggcatcttacctcgcgaaatcagaaaactcgtggagcggcgtaagcaagtgaagcagctgatgaaacagcaggatctgaatcctgatctgatcctgcagtacgatattcggcagaaggctctgaaattaactgcaaacagcatgtacggctgtctgggctttagctatagtaggttttatgccaagcccttggcggccttggttacttataaggggagggagatccttatgcatactaaagagatggtccagaagatgaatctggaggtgatctacggcgacactgactcgatcatgataaacactaacagcaccaatctcgaggaggtgtttaaactgggaaacaaggtgaaaagcgaagtaaataaactgtataagttgctcgaaattgatatcgacggggttttcaaatcactgttgttgctgaaaaagaaaaaatacgccgccttggtcgtggagcccacctcagatgggaactacgtgaccaagcaagagctgaaggggctagatatcgtgcgtcgggactggtgcgatttggctaaggacacaggtaattttgtgattggacagattttatcagaccaaagtcgcgacactattgtggaaaacattcagaagcgcctcatcgaaatcggtgaaaacgtattaaatggctcagtcccagtttctcagtttgagatcaataaagctcttacaaaggatcctcaggactacccggataagaagtccctcccccacgtgcacgtggcactgtggataaatagccaggggggcaggaaggtgaaggcaggagatacagtatcgtatgtcatttgccaagacggttcaaacttgacagcctcccagcgcgcttacgctccagaacagctgcagaagcaggataacttaacgattgacacacagtattacctggcgcagcagatacaccctgtggttgcgcgaatctgcgagcccattgatggcatcgacgctgtgctcatcgctacgtggctgggactcgatccgacacagtttcgtgtgcatcattaccacaaagatgaagagaatgacgcgctgttgggtggcccagcacagctgactgatgaagaaaaatatagggattgtgaacggtttaagtgtccctgccccacttgtggcactgagaacatttacgacaacgtgtttgatggctcaggtactgacatggaaccctcattatacaggtgctcaaatatcgactgtaaggcatcgcccctgacatttactgttcagctgtctaacaagttgattatggacattcggcgatttatcaaaaaatattatgacggctggctgatctgcgaggaaccaacttgcaggaacagaaccagacatctcccgctgcagttttccaggacaggtccactgtgcccagcctgtatgaaggctacactccaaccggagtacagcgataagtcactgtatacgcagttatgtttttaccgctatatattcgacgcggagtgcgccctggagaagcttaccaccgaccacgaaaaagacaaactcaaaaagcaatttttcacacccaaagtgctgcaggattatcggaagcttaagaacactgccgagcagtttttaagccgctccgggtactctgaggtgaatctctctaagctgtttgccggctgcgccgttaaaagctag

SEQ ID NO: 15611 - DNA, 399 bp, synthetic construct
  source 1..399: mol_type = other DNA; note = Synthetic coding sequence
atggtagagcctttcctggggacttggaaacttgtttcatcggaaaatttcgaggattatatgaaggagctgggcgtcaatttcgccgcacgcaatatggcaggcctagtaaagccaaccgtgacgatctcggtagatgggaagatgatgacaattcgaactgagtctagcttccaggatactaaaatttccttcaagttgggggaagaatttgatgaaaccactgccgacaaccgaaaggtgaaatcaacgattactctcgagaatgggtctatgattcacgtccaaaagtggttgggcaaagaaactaccatcaagcgcaagatagtggatgagaaaatggtggtggagtgcaaaatgaacaatatagtgtccacaaggatctatgagaaagtgtag

SEQ ID NO: 15612 - DNA, 555 bp, synthetic construct
  source 1..555: mol_type = other DNA; note = Synthetic coding sequence
atggatcggggcgagcagggattgctccgcacagaccccgtccccgaggagggggaagacgtggctgccaccattagcgctaccgaaacgctctcagaggaagagcaagaagaactccggagggaacttgccaaggtcgaagaagagatccaaaccctaagccaagtgctcgcagccaaagagaaacatctcgctgagattaaacgtaagctggggattaatagcctccaggaactcaagcagaatatcgctaaggggtggcaggacgtcacagctacttctgcttataagaagacctctgagactctgagccaggcaggccagaaggcatcagccgccttctcctctgtaggcagcgttatcaccaagaaattggaggacgtgaaaaacagtcctacatttaagagtttcgaggaaaaggtcgagaacctgaagagtaaggtgggcggaaccaagcccgccggaggggattttggtgaagtgcttaactcggcagccaacgcctctgcaaccacaaccgaacctcttcccgagaagacccaggaatcactttag

SEQ ID NO: 15613 - DNA, 675 bp, synthetic construct
  source 1..675: mol_type = other DNA; note = Synthetic coding sequence
atggattgcagagaaatggacctatatgaggattatcaatcaccctttgatttcgacgccggtgtgaataaatcctacctttatttgtctccttctgggaattcaagtccccccggcagtcctacactgcagaagttcggactgctccgcaccgacccagtacctgaggagggggaagatgtggcagctaccatatcagccaccgagacactttcagaagaagagcaggaggaactgagaagagagctcgcgaaagtcgaggaggagatacagactctttcccaagtattggccgccaaagaaaagcacctcgctgaaatcaagcggaagctggggataaactccctgcaagagctcaaacagaatatcgccaagggctggcaagacgttacggcaaccagtgcttacaaaaagacaagtgagaccctcagccaagctgggcagaaggcctccgcagctttcagtagtgtgggatcagtaattacaaaaaaattagaggacgttaagaatagcccaacctttaaatcgtttgaagagaaagttgagaacctcaagagtaaagtcggcgggacaaagcccgctggcggcgacttcggtgaagtgctgaattccgccgccaacgcttccgctacaacaacagagcctctgcctgagaagactcaggaaagtttatag

SEQ ID NO: 15614 - DNA, 285 bp, synthetic construct
  source 1..285: mol_type = other DNA; note = Synthetic coding sequence
ccaagagccgcgagatcacgcggcccggcagtgagcagacctagggcacccaggccagagctgacaacagaagccggcgaacccgccaggcgttgcgtcccaccgtacgagcatcgccctggcatgcagtgcgcggttacaactccacccccttcgtactatccatatcccaatctccgctgggatacgagccacttcaagaagtccggcggtcctcagcgcaataattacgtgatccatcctgaattcgtgtccgagacctatccagactaccggtgttggtag

SEQ ID NO: 15615 - DNA, 1110 bp, synthetic construct
  source 1..1110: mol_type = other DNA; note = Synthetic coding sequence
atgcccgtagtgactacagacgcagaatctgagaccgggatccctaaatctctgtccaacgaacctccttcggagactatggaagagatcgaacatacctgtccccagcctcgcctcacgctcactgcccccgcaccatttgctgacgagaccaattgtcaatgccaggctcctcacgaaaagcttacaatagcacaggcacgactcggcacacccgccgaccgtcctgtgagagtatacgccgacggcatcttcgatttatttcatagcggccatgcccgggcgttaatgcaggccaaaacgctgtttccaaactcctatttacttgtgggtgtatgttccgacgacctgactcataagtttaaaggattcaccgtcatgaacgaggcggaaaggtatgaagcccttagacactgtcgatatgtagatgaggtaattagagacgctccctggaccctaacgcccgagttcctggagaaacacaagatcgattttgtggcccacgatgacatcccctacagttctgccggcagtgacgacgtctacaagcacataaaggaggccggaatgtttgtacctacccagagaacggaggggatttccaccagcgatattatcaccaggattgttcgagattacgacgtgtacgcacggcgaaaccttcaacgcggctatacggccaaggaactgaacgtgtcctttataaacgagaagcgttacagatttcaaaaccaggttgacaaaatgaaggagaaggtaaaaaacgttgaagagcggagcaaagagttcgttaaccgggtcgaggagaaaagtcacgacttgattcagaagtgggaggagaagagccgggagttcatagggaattttctggagttatttggtcccgatggggcctggaagcaaatgtttcaggaacgaagctctcgcatgttacaggccctgagccccaagcagagtcccgtgtcctctcctactaggagcagatctccttccagatcgccctcgccaactttcagctggctccctctgaagaccagcccgccatcgagtcccaaagctgcctctgcttcaatttcctcaatgtccgagggagacgaagatgaaaagtag

SEQ ID NO: 15616 - DNA, 1056 bp, synthetic construct
  source 1..1056: mol_type = other DNA; note = Synthetic coding sequence
atggtgggccaccaggagtgcattatggaggaggacaatcgggctcctcagctctggcggaaaactctgacagctcctgctccctttgcagacgaaacgaattgtcagtgccaagcaccgcacgagaagctgacgatcgcacaggctcgacttggtacaccagccgacaggcccgtgcgcgtttatgccgacggcattttcgacctctttcactcggggcacgcacgagctctgatgcaagccaagactctcttccccaatagctacctcctcgtcggggtgtgttccgatgatctgacgcacaaatttaaaggctttaccgtcatgaacgaagctgaacgatatgaagccctgcgccactgccggtacgttgacgaggtaattcgcgacgcgccttggactttaacccctgagttccttgaaaagcacaagatcgactttgtggcccacgatgacatcccttattcctcagccggctcagatgatgtctataaacatattaaggaagctgggatgttcgttccgacccagcgcactgagggcatctctacctcagacataatcacaaggatagttcgggactatgacgtgtacgcgcgtagaaatctgcagagggggtataccgctaaagagttaaacgtgtcattcattaacgagaaacgctaccggtttcagaaccaggtggataaaatgaaggagaaagttaagaatgttgaagaaagatctaaggaatttgtgaatcgtgttgaggagaagtctcatgacctgatccagaaatgggaagaaaagtcacgagagtttataggaaactttctcgagctgttcgggccagatggggcctggaaacagatgttccaagaacggtcttcccggatgctccaggccttatcccccaagcagtcaccagttagttcaccaacacgctctagatccccctctcggtcgcccagcccaacgttctcgtggttacctctcaagaccagtcccccatcatcacctaaggctgcatcggccagtataagcagcatgtccgaaggagacgaagatgaaaaatag

SEQ ID NO: 15617 - DNA, 600 bp, synthetic construct
  source 1..600: mol_type = other DNA; note = Synthetic coding sequence
atggccgataaatccaagtttatcgagtatatcgatgaggccctagaaaaaagtaaggagaccgcactttctcacctgttcttcacctaccaagggattccctacccaataacaatgtgtacaagtgagaccttccaggccttggacaccttcgaggcacggcacgacgatatagtcctcgcatcataccctaaatgtgggtctaactggattttgcatattgtctccgaactgatttatgcagtgtctaagaaaaaatacaagtatcctgagtttcccgtgctcgaatgcggagactctgaaaaataccagaatctggccgcaggcataaaacagatagctgagtttctggggtttttcctgaccggagaacagattcagaccatctccgttcaatccacgtttcaggctatgagagcaaagtctcaggacacgcatggagctgtggggccttttctgtttcgcaagggtgaagtcggcgattggaagaacctcttttcggagatccagaatcaggaaatggacgagaagtttaaggaatgtctggccggtacatctctcggcgccaaattgaagtatgaatcctattgtcagggatag

SEQ ID NO: 15618 - DNA, 1527 bp, synthetic construct
  source 1..1527: mol_type = other DNA; note = Synthetic coding sequence
atgcgctgtcccaaaagtgccgttaccatgcgcaacgaagaattactactgagcaatggcacggccaataaaatgaatggggctttagaccactcagaccagcccgaccctgacgcaattaagatgtttgtcggacagattcccaggtcctggtcggaaaaagagctgaaagaactgttcgagccctacggagctgtttaccagattaacgtccttagagatcggtctcagaaccccccccagtctaagggatgttgcttcgtgactttctatacgcgtaaggcggccctggaggcccaaaatgcactgcacaatatcaaaactctgccagggatgcatcatcccatccagatgaaaccggccgactcggaaaaatccaacgccgtagaagataggaaactgttcataggcatggtctccaagaaatgcaacgaaaacgatatacgggttatgtttagcccattcgggcagattgaagagtgtaggatcctgcggggccctgatgggctgtccagaggttgtgcattcgtgactttcagtaccagggccatggcgcaaaacgctataaaggctatgcaccagagccaaaccatggagggatgctcctctccaatcgtggtcaagttcgccgatactcaaaaagacaaagagcagaggcgccttcagcaacaactggcacagcagatgcaacagctcaataccgccacatggggtaatctgaccggcctgggaggcttaacccctcagtacctggccctcctgcagcaggctaccagcagtagtaacctcggcgcatttagcggcatccaacagatggccgggatgaatgcacttcagttacagaatttggccacacttgcggctgccgcagctgctgcgcagaccagtgctacgtcgactaatgcaaatccactgagcaccactagctcagcactgggagctctgacctcaccagtagcagctagcactcctaactcaacagccggcgctgccatgaattcgttgacctccctgggcaccttgcaaggtctggctggtgctacagtgggcctgaataatataaatgctctggcaggcatggcagcgttaaacggcgggttgggagctacgggactgacaaacggcactgccggaaccatggacgccctgacccaagcctactcggggatccagcagtacgccgccgccgccctgcccacactctatagtcagtccttgctgcagcagcagtcggctgcaggatcccaaaaggaggggcccgagggcgccaacttatttatttatcacctaccccaggagttcggcgatcaggacatcctgcagatgttcatgccatttggtaatgttatctcggcaaaagtgtttattgataagcagaccaatttgtctaagtgctttggatttgtgagttacgacaaccccgtgtccgcgcaggcggctatacaggccatgaacgggtttcagataggaatgaagagactgaaggtccagttgaagcggagcaagaacgactcaaaaccttattag

SEQ ID NO: 15619 - DNA, 1215 bp, synthetic construct
  source 1..1215: mol_type = other DNA; note = Synthetic coding sequence
atggggtcatcccaggaggagggactccggtgtcagccctcacagccggaccacgatgccgacggtcattgtggacccgatctggagggcgctgagcgagcctcagcaacgccaggtcctcccggcctgctgaactcccatcggccagccgattcagatgacacaaacgctgcagggccaagcgctgcattgcttgaaggactgttactgggcggtggaaagccatccccgcactcaacaaggcccggtccgttcttttatattggaggcagcaacggtgcaacgattataagcagctattgcaagagcaaagggtggcagcgtattcacgattctcgccgtgatgattacacattgaagtggtgtgaagtcaaatctagagattcctatggatctttccgggaaggcgagcaactgctgtatcaattacctaacaataaacttttgacaacaaagatcggtcttctgtcaactctgagaggccgggcgcgcgcgatgtcaaaggcgtctaaggttcccggcggggtacaggcccgcttggagaaggatgccgccgcccccgcactcgaggacctgccttggacctcccccggctaccttcgccctcagagggtgctaagaatggaggagttcttcccggagacatacaggctagatcttaaacacgaaagagaagctttctttacattgtttgatgaaacacagatctggatttgcaaacccaccgcctcaaaccagggtaaggggatttttctgttgaggaaccaggaggaagtggccgctttacaggccaagacgcgatccatggaggatgaccccattcaccacaagacccctttccgagggccccaggctcgtgtcgtccagaggtacattcaaaaccctctcctggtggatgggcgcaaattcgacgtccgcagctacctcctaattgcctgcaccacaccctacatgattttcttcgggcacggctacgctagactaaccctatctctgtatgatccacattctagcgacctgggtggccaccttaccaatcagtttatgcagaagaagagcccattatatatgctcctgaaagagcacactgtgtggtccatggagcacctgaatcgttacatttccgacactttctggaaggctcggggcttagcaaaagactgggttttcacaactctcaaggtcagacctttgtgcccaccagtgtgggaatag

SEQ ID NO: 15620 - DNA, 2022 bp, synthetic construct
  source 1..2022: mol_type = other DNA; note = Synthetic coding sequence
atggaccactcatgcacccgctttatccatagaagaggtccaccgacgcgcacacgcgctggctttaagagaggcaaaagaccgagaattcagcagaggccacgggctagggtctctggcacaatccccgcctctcgattacatcccgcacccgctagccaaccagggccctgtccggcaccaggccattgtcccgtaggaccagctcatgaacgacctatggggagcagtcaggaggaagggctgagatgccagccctcgcaaccagatcacgacgctgatgggcattgcggtcccgacttggaaggagccgagcgcgcctcagcaacacccgggccccctgggctcttgaactcccacaggccagccgacagtgacgataccaatgcagccgggccatctgctgccttattagaaggactgctgctcggcggcggcaagcctagccctcacagcacaagaccaggacctttcttctacatcggaggtagcaacggcgcgactattatttcctcctattgcaagtcaaaagggtggcagagaattcatgactctcggagagatgactatactctgaaatggtgtgaagtgaagagcagggactcctatggaagctttcgagagggggaacagctgctgtatcagctcccaaataacaagttgctgaccacaaagataggcctactgtcaactctaagggggcgggctagggccatgtcaaaagccagcaaagtgccaggcggcgtgcaggcacggctggaaaaagatgccgccgccccagcacttgaagacttgccatggacctcgcctggttatctacgcccccagcgggtgctgcgaatggaggagttcttccccgaaacctaccggctggacctgaagcatgagcgagaagcctttttcactctctttgatgaaacacagatttggatttgcaaacccaccgcaagtaatcaagggaaaggaatctttctgctgcggaaccaggaggaagttgctgctttgcaagcaaagacacgcagcatggaggacgatcctatccaccataagactcccttccgcggcccacaggctcgggttgtgcagagatacatccaaaaccccttgcttgtagatggccgcaagtttgatgtcagaagctacctgttgatcgcctgcaccacgccctacatgatcttcttcggccacggctatgcaagattgaccttgtcgctgtacgatccacattcttcagatttgggtgggcacctgacgaatcagttcatgcaaaagaagagtcccctctacatgttactgaaagagcacacggtatggtcgatggagcatttgaatagatacatatcagacacattctggaaagccagagggcttgccaaagactgggttttcacgaccctcaagaagagaatgcagcaaatcatggctcattgcttcctcgcagccaaacctaagctcgactgtaagctcggctactttgatctcatcgggtgcgactttctgatagacgacaacttcaaggtctggctgcttgagatgaatagcaatcctgcgctgcatactaactgtgaggtcctgaaagaagtaatccctggagtcgtcatagaaacactcgatttagtcctggaaacattccgaaagtcactgcgcggacaaaaaatgttaccattacttagccagcgccgctttgtactcctgcataatggcgaagccgacccccgtccccatcttgggggctcctgtagcttgcggagatggccacccctacctacgcgccaggcgaaatcatctgggcccccgatgcctcacgctccagatcagcccggggcacgccggcccgcaccccctcccctggtgccacagcgcccccggccaccagggcctgacctcgatagcgctcacgatggagaacctcaggccccaggaactgaacaatcaggtacaggcaatagacatcctgcgcaggaacccagtcctggaaccgccaaggaggagcgggaagaaccagagaatgccagaccttag

SEQ ID NO: 15621 - DNA, 2022 bp, synthetic construct
  source 1..2022: mol_type = other DNA; note = Synthetic coding sequence
atggatcattcatgcacacgctttatccatagacgtggcccccctacgagaacaagggccgggttcaagcgcggcaagcgaccacggattcagcaacgccctagggccagagtcagcgggaccatccccgcgtctagactccaccccgcccctgcatcccagcctggcccctgccctgcccccggccattgtccggtcggtccagctcacgaacgtcccatgggctcatcccaggaggaaggcttacggtgtcagccgtcccagcctgaccacgacgcagatggccattgtggacccgacctggagggcgccgagagagctagtgcaacccctgggccgcctggtctgttgaatagtcaccggcctgccgatagcgacgacaccaatgccgccggccctagcgctgccctcctggaggggctgctgttggggggaggaaagccgtccccccactccactaggccaggtccgtttttctatattggaggttcaaacggcgccaccatcatcagctcatattgtaaatctaagggatggcagcgtattcatgactctcgaagagacgattacaccctgaaatggtgcgaggttaagtccagggattcttacgggtctttcagagagggagagcagctcctataccaactaccgaacaataagctgctgacaaccaagatcggtctgctgagcaccctgcgtggacgcgcccgggcaatgagcaaggcgagcaaggttcctggaggtgttcaagccagactggaaaaagatgctgcagcacccgccctggaagatctcccttggacaagccccggctatctccgcccacaacgggtcctccggatggaagagttctttcccgagacctaccggctggacctgaagcatgagagagaggcattcttcacgcttttcgatgaaacacagatctggatctgcaagccaaccgcttctaaccaaggtaaggggattttcctattgcggaatcaggaggaggtggccgcactccaggccaagacacgaagcatggaagacgatcctattcaccacaagacgccgttcagagggcctcaggctcgcgtagttcagagatacatacaaaatcccctgttagtagacggccgaaagtttgatgtgcgtagttatctcctaatcgcctgcacaacaccttacatgattttttttggccacggatacgcccggttgaccctaagcttgtacgatccccactctagcgatctgggtggccatctcactaatcagttcatgcagaagaaatcccctctatatatgttactgaaggaacatacggtgtggtcaatggagcatctgaatcggtacatttcagacactttctggaaagcccgaggcttggccaaagattgggtgttcaccaccctgaagaaaaggatgcagcagataatggctcactgtttcctcgctgcgaaacccaagttggactgtaaacttggctatttcgacctgataggctgcgactttctcattgacgacaacttcaaggtctggcttctcgaaatgaacagtaatcctgcactgcacactaattgcgaggttctgaaagaggtcattccaggcgtcgtgatcgaaaccctggatctggtgcttgaaacatttcgtaaaagcctgcggggtcagaagatgctcccactgcttagtcaacgacggttcgtgcttctgcataatggggaagcggacccacgtccccacctgggaggaagctgcagcctcagaagatggccaccacttccaactagacaggcgaagtcctcaggccccccgatgccccatgcaccagaccaaccaggggcccgccggcccgccccaccacccttagtgccacaaagaccacgtcctccgggtcccgatctcgacagcgcccacgatggggagccccaggcccccggcacggagcaatccggaaccggaaaccgccacccggcccaggagccctctccaggcactgccaaggaggaacgtgaggagcccgaaaatgcgcggccttag

SEQ ID NO: 15622 - DNA, 393 bp, synthetic construct
  source 1..393: mol_type = other DNA; note = Synthetic coding sequence
atgaccgaggattcacagcgaaactttcgctcagtgtactatgaaaaggtagggtttagaggcgtggaagaaaaaaagagcttagaaatcctcctgaaggacgatcgcctcgacaccgagaagttgtgcacattttcacaacggttcccattgccctccatgtacagggccttggtttggaaggtgctgttaggaatcctgccacctcaccatgaatcacatgccaaggtgatgatgtatcgcaaagagcagtatcttgacgtgctgcacgctctaaaggttgtgaggtttgtttccgatgctacacctcaggccgaagtgtatctgagaatgtatcaattagaaagcgggaagcttccccggagtccgtcttttcccctcgagcctgactag

SEQ ID NO: 15623 - DNA, 882 bp, synthetic construct
  source 1..882: mol_type = other DNA; note = Synthetic coding sequence
atgacggaagattcgcaacgtaattttcggagcgtgtattacgaaaaggtaggatttagaggtgtcgaggagaagaaatctctagagattctgctcaaagacgataggctagatacagagaagctgtgtaccttttctcagcgcttcccgctgcccagtatgtacagggccctggtgtggaaggtgttgcttgggatactgccccctcaccacgaatctcatgccaaggtaatgatgtatagaaaggaacagtatttagatgtccttcacgctctaaaagtggtgcgctttgtaagcgatgccactccacaggcagaagtttacctgaggatgtaccagctcgagtcgggtaaattgcccagaagtccaagtttccctctggaacctgacgatgaggtattcctggccatcgcaaaagccatggaggaaatggtagaggatagcgttgattgttactggatcacacgacgtttcgtgaatcaactgaacacaaagtacagagactctctcccccagctaccaaaagcatttgagcagtaccttaacctagaggacggcaggctcttgactcacctgcggatgtgttcagctgcacctaagctgccctacgacttgtggttcaaacgatgcttcgcaggatgcctgcccgaatcttcattacaacgggtctgggataaggtcgtttcaggcagctgcaagatcttggtattcgtagctgtggagatactgttaactttcaaaataaaagtgatggccctgaattctgccgagaagatcacaaaatttctagaaaatataccccaggactcctctgacgctatcgttagcaaagcaattgacctctggcataaacactgcggaactcccgtccatagctcctag

SEQ ID NO: 15624 - DNA, 801 bp, synthetic construct
  source 1..801: mol_type = other DNA; note = Synthetic coding sequence
atgacagaagactcacagagaaattttcgctcagtgtactatgagaaagtcggattccggggcgttgaggaaaaaaagtccctcgagatactgttgaaagatgatcggttaggtatactgcccccacaccatgaaagccacgcaaaagttatgatgtacagaaaagagcaatatcttgacgtgctgcacgctttaaaggtagtgaggtttgtatccgacgccacacctcaagccgaagtgtacttgcgcatgtaccagctggagtccgggaaacttcctagatctccatccttcccgctggaacccgatgatgaagtatttcttgccattgctaaggccatggaagaaatggtggaagattctgtggattgttattggataacaagacggttcgtcaaccagctaaacacaaaataccgcgacagcttgcctcagcttccgaaggcgtttgaacagtacctgaatctagaggacgggaggctcctgactcatctaaggatgtgttccgcagccccaaaactgccatatgacctttggttcaaacgatgttttgccggatgcctgccagagtcatcacttcagcgggtttgggataaagtagtgtctgggagctgcaagatactggtcttcgtggccgtggaaattctgctaaccttcaaaattaaggtcatggctcttaattcagcagagaagattaccaaatttctcgagaatataccacaggactcgtctgatgccatcgtcagtaaagctatcgatctttggcacaagcattgtggcaccccagtccactcttcctag

SEQ ID NO: 15625 - DNA, 3672 bp, synthetic construct
  source 1..3672: mol_type = other DNA; note = Synthetic coding sequence
atgatgtccctgtccgtcagaccccaaagacggttactgtcggccagggtgaatcgatcgcagtcctttgcgggagtcctgggatcccatgagaggggtcctagcctgtcttttaggtcctttccagtcttctccccaccgggcccccccagaaaaccccccgctttgagccgggtatcccggatgttttccgtagcacacccagcggcaaaagtgccacagcccgagaggctcgatctcgtgtataccgccctgaagagaggactgactgcttatctcgaggtgcaccaacaagaacaagaaaagttgcagggacaaattagggaatctaagcggaacagtcgtctcggcttcttatatgacctggataaacaagtgaagtccatcgagagatttttgcgcaggttggaatttcatgccagtaaaatcgatgaactttatgaggcatactgtgtccagcggaggctccgcgatggtgcttataatatggtaagggcctacacgactggctcccccggttcacgagaggcccgggatagccttgctgaggccacccgaggccatagggagtataccgaatctatgtgcctgctggagagcgaattggaagcccagctgggcgaattccacctcaggatgaaaggactggctgggttcgcacgactgtgcgtcggcgatcagtacgaaatttgcatgaagtacggcaggcagagatggaaactaaggggacggatagaggggtccgggaaacaggtttgggacagtgaggaaaccattttcctgcctcttctcactgagtttcttagtatcaaagtgaccgaactgaaaggtctggcaaaccatgttgtggtggggagtgttagttgtgagactaaagacctgttcgctgccttgccccaggtagtggcagtggacatcaacgacctcggaactatcaaactctcgctggaggttacatggtccccctttgataaggatgaccagccatcagccgcttccagcgttaacaaagcatcgactgtcactaagcggtttagcacatacagccagagcccacctgataccccctccctacgggaacaagccttctataacatgctccgcagacaggaggaactggagaatggtacagcttggtcattaagttccgaatcctccgatgattcatcttctccccagctgagtggtactgcaagacattcaccagcaccacggccgcttgtgcagcagcccgaacccctgcctatacaggtagcttttcggaggccagagaccccctctagtggccccctcgatgaagagggcgctgtggctccagtcctggctaacgggcatgcaccgtattcccgtaccttatctcatatttccgaggctagcgtggacgcagcgctcgcagaagcgagtgttgaggcggttggtcctgagtcactggcctggggcccgtccccccctacacatcctgcaccgacgcacggcgagcacccatccccagtccctccagcactcgaccctggccattccgccaccagcagtaccctgggcactactgggtcagttcctactagtactgatccagctccctcggcacatctggacagcgtgcataagtcaaccgactcaggtccgagtgagctgcccggtcctactcacactaccactgggagtacatattcagccatcaccacgactcactctgcgccctctccactgactcatacgacgacgggcagcacacataagcccatcatctccacactcactactaccgggccaacgttgaacatcatcggccctgtgcagaccacaacgagccctacgcatactatgccatcccctacccacaccacagcctcccctacccacacttcaaccagccctacacatacacccacgagccctacccacaaaaccagcatgagtccacctacaacaacatctcccaccccatctggcatgggtctagtccagactgccacatccccaacccatcctactacttcccctacccaccctacaaccagtcccatactaatcaatgtcagcccctccacctcccttgaattagccaccttatctagcccgagtaaacattcagatccaaccttgccaggaaccgactccctgccgtgcagtccacctgtgagcaatagctatacccaggcagatccaatggcgcccagaacaccacaccctagccccgcccattcatcccggaaaccgctgacttctcccgcccccgacccaagcgagtctactgtgcaaagtctgtcccctacaccaagtcctccaacaccagctccccagcactcagacctgtgccttgcaatggcagtgcagactcccgtgcctaccgcagcaggaggatccggcgaccggtcactcgaagaggcgcttggtgcactcatggctgccctggacgactatagagggcagttccccgagctgcagggcctagaacaagaggtaacccggttggaatctctccttatgcaaaggcagggacttactagatcaagagcaagttcattgagtatcacagtcgagcacgctttggaatctttcagttttcttaacgaggatgaggacgaagataacgatgttccaggggacaggccaccttctagccctgaggccggcgccgaggattccatagactcgccctcagccagacctctgtccacagggtgtccagccttggacgcagcactggttagacacctgtatcactgtagcagattgctgctaaagttgggaacattcggacctctgagatgtcaggaagcgtgggcacttgagcggctactgcgagaagcgagggtgttggaagcggtatgtgagtttagcagaaggtgggagatccccgcatcttccgctcaggaggtggttcagttttcagcgtctagacccgggtttttaacattttgggaccagtgcacagagaggcttagctgctttctctgccctgtggagagggttctgctcacattttgcaatcagtacggtgcccgcctctccctccggcagccagggttagcagaagccgtgtgcgtgaagttcctcgaagacgctctcggtcagaagctcccgcggagaccacaacctggcccaggggagcagctgactgtgtttcagttctggtctttcgtggagaccttagatagccctacaatggaagcctacgtgaccgagaccgctgaagaagtgctactggtgagaaacctcaattcggatgaccaagctgtcgtgctgaaggcgttgcgtctggcgccagagggccgcttgcggagagacggactacgggcgttgagcagcctgctcgttcacggcaataacaaggtgatggccgccgtgtcaacccagctacggagtctaagtctggggcctaccttccgggagcgggccctcctgtgcttccttgaccagctggaggatgaagacgtccagacgcgtgtggcggggtgtctggcactcggctgcataaaagctcccgaggggattgaacctctggtgtacctctgtcaaactgacacggaggctgtacgtgaggccgccaggcaaagcttgcagcaatgtggggaggagggccagtcagcccataggaggcttgaagaaagccttgacgctttgccccgcatattcggccctggatctatggcttcgacagctttttag

SEQ ID NO: 15626 - DNA, 123 bp, synthetic construct
  source 1..123: mol_type = other DNA; note = Synthetic coding sequence
atggccgacgaggagctcgaggctctgcgtcggcagagactcgccgagttacaagctaagcatggagacccaggcgatgctgctcagcaggaggcaaagcactcctcgacagaggagaaatag

SEQ ID NO: 15627 - DNA, 414 bp, synthetic construct
  source 1..414: mol_type = other DNA; note = Synthetic coding sequence
atgaagccacccgctgcccagggaagccccgcagctgcagcagctgcggcaccagcactggattccgctgccgctgaggatctgtcggatgcgctctgcgagttcgatgccgtgctggcagattttgctagccctttccatgagcgccactttcactacgaagagcacctcgaacgaatgaaaagacgcagtagcgcctcagtaagcgatagttccggcttttctgattctgaaagtgctgactctctgtatagaaacagtttcagcttttcagatgagaagctcaattcacctacagacagcacgcctgctctcctgtcggcgacagttacgccacagaaagccaaactgggcgatacaaaagagctggaggctttcatagccgacctggataaaactcttgctagtatgtag

SEQ ID NO: 15628 - DNA, 1593 bp, synthetic construct
  source 1..1593: mol_type = other DNA; note = Synthetic coding sequence
atgcctaacgttctattgcccccgaaggagtccaacctgtttaagaggattctcaaatgctatgagcagaaacagtataaaaatggccttaagttctgcaagatgatcctttcaaatccaaagttcgccgagcacggagaaacgctcgcaatgaaaggactaacattaaactgcctcggcaaaaaagaagaagcgtacgagtttgtaagaaagggcctcagaaatgatgttaagtcccatgtctgttggcatgtctatggtctacttcagcggtccgataaaaagtacgatgaggcaataaagtgttaccggaatgcgcttaagttggacaaggataatcttcagatcttacgggatttaagtctcctgcaaatacagatgagagatcttgagggttaccgggagacaagataccaactactgcaactccgcccaacacagagggcgtcatggatcgggtacgccatcgcctaccacctgttgaaggattacgacatggccttgaagctactagaggagttccgccagacacaacaagtcccccctaataaaatagactacgagtatagcgaattgattctctatcagaaccaagtgatgcgtgaagccgacctcctacaggaaagtctggagcacatcgagatgtatgaaaagcagatttgcgacaagctgctggtcgaagagatcaagggcgaaatactcctgaagctggggcggttaaaggaagcttcagaggtctttaaaaatttaattgatcgaaatgccgagaactggtgctattacgagggactggagaaagccttacagatttcaactttagaggaacgcctacagatctacgaagagatctccaagcagcaccccaaggccattacaccacgaaggctgcctctaactttggtgccaggagaaagattccgagaattgatggacaagtttctgcgcgtgaattttagtaagggctgtccacctctgttcactactctgaaaagcttgtactataacacagaaaaggtcagtatcatccaagagctagtgacaaactatgaggcaagcctgaagacgtgtgacttcttcagtccctacgaaaatggtgaaaaagaaccaccaactaccttgctgtgggtgcagtattttcttgcacaacactttgacaagctcggacaatattcattagcactcgactacataaacgcggcaatcgcatctacgccgactctgatcgaacttttctacatgaaggctaaaatttataagcatatcggaaacctcaaagaggctgcaaagtggatggacgaggctcagagtctcgatactgcggaccggttcataaactcaaagtgtgctaaatacatgctgcgcgctaacatgattaaagaagccgaggagatgtgctcaaagtttacacgcgaagggacgtccgccatggagaatctcaacgagatgcagtgtatgtggtttcagaccgagtgtatctcagcttaccaaaggcttggtaggtacggcgacgctttgaagaaatgccatgaggtggaacgccactcaccatccacctggacaaccggcggaaaagagccgcagatgcacccatag

SEQ ID NO: 15629 - DNA, 2595 bp, synthetic construct
  source 1..2595: mol_type = other DNA; note = Synthetic coding sequence
atgcccaatgtgctgctgcccccaaaggagtcgaatttgttcaagcgcatcttaaagtgttatgaacagaaacaatataagaacgggctgaagttctgtaagatgatcttatccaatcctaaatttgcggagcatggtgagacactggcgatgaaggggctcacattaaattgtttagggaaaaaagaggaggcctacgagttcgtgagaaaagggctccgcaacgatgtgaagtcacacgtgtgctggcacgtttatgggttgctccagcgctctgacaaaaagtacgatgaagccatcaagtgctacagaaatgccctgaaactggataaagataacctgcagattcttcgcgacctctcactcctccagatccagatgagagatcttgagggatacagagaaacaaggtaccagctgctccagctgaggcccacacagcgggcctcttggattggctacgccattgcttaccacctgctgaaggactacgacatggccctcaagctgctggaggagtttcgacagactcagcaggttccaccaaataaaatcgactacgagtattcagaacttatcctgtaccagaaccaggttatgcgagaagccgacctcctccaagaaagcctggagcacatcgaaatgtatgaaaaacagatttgcgacaaactgctcgtcgaagaaatcaaaggggagatcctgctgaagctcggcagacttaaggaggccagcgaagttttcaagaatttgattgacaggaacgctgagaactggtgttattacgagggcctggaaaaagcgcttcaaattagcaccctggaggaacgcttgcagatctacgaagagataagtaagcagcatcccaaagctatcacacccaggcgtcttcccctgactctggtcccaggtgagaggttccgcgaacttatggataaattccttagggttaacttctctaaaggatgcccccctctgttcactacactaaagagcttgtattacaataccgagaaggttagtattatccaggagctggttacgaactacgaggctagtctcaagacttgcgacttcttctccccatatgaaaacggagagaaggagcctcctactactttactctgggtgcaatattttttggcccagcacttcgataagctggggcaatatagcctcgcactggattacattaatgctgccatcgctagcacgcccacgctgatcgagttgttctacatgaaggcgaaaatttataagcatatcggtaacctcaaggaggctgccaagtggatggatgaagcgcaaagcttagacaccgccgatagatttattaattctaagtgcgcaaagtacatgctgagagccaacatgatcaaggaggctgaagagatgtgctccaagttcacgcgtgaaggaacctccgcgatggaaaatctgaacgaaatgcagtgtatgtggttccaaaccgaatgtatttcagcttaccagaggctgggcaggtacggtgacgccctgaaaaaatgccacgaagtggagagacactttttcgagattaccgatgaccagtttgacttccacacatactgtatgaggaaaatgaccctccgggcctacgtcgacctgctaaggctcgaggatatccttaggagacacgctttttacttcaaggcggccagatctgccattgagatttacctgaaattatacgacaatcccctgactaacgagtccaagcaacaggaaataaactctgaaaacctcagtgcaaaggagcttaaaaagatgttatcaaaacagagaagggcgcagaagaaagccaagctagaagaagaacgcaagcacgctgaaagggaacgtcagcagaaaaaccaaaaaaaaaagcgagacgaggaggaggaagaggcctccggcctgaaggaagaactgatccccgagaagttggagcgggttgagaatcctttggaggaggccgtaaaatttctgatccccctgaaaaacctggtagccgataacatcgacacccaccttctcgctttcgaaatctatttccgcaaagggaaattccttctgatgcttcaatcggtgaagcgggcattcgccatcaatagcaacaatccatggttacatgaatgtctcatccggtttagcaagagcgtgtctaatcacagcaatctacccgacatcgtgagtaaggtgctgtcacaggagatgcagaaaatatttgtcaagaaagacctggaaagcttcaatgaggactttctgaagaggaacgccacgagtctgcaacacctgctgagcggcgccaagatgatgtacttcttggacaagagcagacaggaaaaagcgattgcgatcgcaacacgtctggatgaaacaattaaggacaaagacgtcaaaacacttatcaaggtcagcgaggctctgctcgacggctcgttcgggaactgctccagccagtatgaggaatatcgcatggcgtgtcataatctgctaccgttcacctctgcatttctgcctgccgtgaatgaggtggacaatcccaacgtcgccctgaatcataccgccaactacgacgtgctggcaaatgagatttag

SEQ ID NO: 15630 - DNA, 1668 bp, synthetic construct
  source 1..1668: mol_type = other DNA; note = Synthetic coding sequence
atgcagtcctgcgaaagctctggcgactctgccgatgatccgctgtctcgtggactgcgcagacgaggccagccccgagtagtcgtgattggggcagggctggcagggctcgctgcagccaaagccctcttggaacaagggttcacagatgtgacagttttggaagcaagcagtcatattggtggacgcgtgcaaagcgttaagttgggccacgccacttttgagctgggggcgacatggatccacggttcacatgggaacccaatctatcatctagctgaagccaacggcctcctggaggagactacagatggagaaaggtctgtaggacgcatctcgttgtatagcaaaaacggtgtggcatgttacttgactaaccacggccgcagaattcctaaggacgtcgtcgaagagtttagtgacttgtataatgaggtgtataatttgacccaggaattcttccgccacgacaaacccgtgaacgccgaaagccagaattcagtgggcgtgttcacacgcgaggaagtgcggaaccgaataaggaacgaccccgatgatccggaggcgaccaagaggcttaaactggctatgatccagcaatatctgaaagtggaaagttgtgagtctagctcccattctatggacgaggtgtcactgagcgcttttggggaatggactgaaatacctggagctcaccatataatccccagtggtttcatgagggtggtagagctacttgcagaggggatcccagctcacgtgattcagctgggaaagccagttcgctgtatccactgggaccaggcctcggcgcgacccagagggcccgaaatcgaaccacggggtgagggcgaccacaaccatgacactggcgagggcgggcagggcggggaagaaccaaggggcggaaggtgggacgaagatgagcagtggtcagtcgtggttgagtgtgaagattgcgagctgatccctgccgatcacgtgatcgtaacagtatctttgggagtcttgaagagacagtacacatccttctttaggccaggactgcccactgaaaaagtagcggccattcataggttgggcatagggaccacagataagattttccttgaatttgaggaaccgttttggggcccggaatgcaacagcctccagtttgtgtgggaggacgaggccgagtcccacaccctgacctatcccccagaactgtggtacaggaaaatctgtgggtttgacgtgttgtacccccctgagagatacgggcatgtgctctcaggttggatctgcggggaagaggcccttgtgatggaaaagtgcgacgatgaggcagttgctgaaatttgtaccgagatgttaaggcaattcaccgggaacccgaacattccaaaacctagacggatcctgagatcagcctgggggtcaaatccatactttagggggagttactcttacactcaagtcgggagctctggcgccgatgtagaaaagcttgccaaaccactgccatacacagagagttccaaaaccgcgcccatgcaagtgcttttttctggagaggccacccacagaaagtactattcaacaacccatggggcccttctcagcggccagagagaagcggccaggttaattgagatgtacagagacctcttccagcaaggcacttag

SEQ ID NO: 15631 - DNA, 630 bp, synthetic construct
  source 1..630: mol_type = other DNA; note = Synthetic coding sequence
atggccccggtcggcgtcgaaaagaagcttttgctcgggcctaatggaccagcagtggcagctgcaggagacttaacgagtgaagaggaggaggggcagagcttatggtcctcgatcctgagcgaggtatctacccgggctcggagcaagctcccatcaggcaaaaacattctggtgttcggcgaggacggcagcggcaagacgaccttaatgaccaagcttcagggtgcagaacatggcaagaagggcaggggcctcgaatatctgtatctctctgtgcacgacgaagatcgggatgatcatactagatgcaacgtgtggatactcgacggagacctctatcacaagggcttgctgaagttcgctgtgtccgctgagtcattacccgagacccttgtcatttttgtggccgatatgtcccgaccatggactgtgatggagagcctccagaaatgggcttcagttctgagggaacacatagataagatgaagatccctccggaaaaaatgcgcgagctcgaaaggaaattcgtgaaagactttcaagattacatggaaccagaagagggatgtcaggaagggcccttgagtaacagagttgagcagatgcggccccgaaaccattggtag

SEQ ID NO: 15632 - DNA, 858 bp, synthetic construct
  source 1..858: mol_type = other DNA; note = Synthetic coding sequence
aattggaatctggcgtcttggaatccttcaaaccccgagtgtctgttactcgtggtcaaggagctggtgcagcagtatcaccaatttcagtgttcgaggctgcgcgagagctcccgtctcatgttcgaataccaaacccttttagaggagcctcagtacggtgaaaacatggagatttacgcagggaagaagaacaattggactggggagtttagtgcgcggttcctgctcaaactaccagtagactttagcaacatcccaacatatctactgaaggatgtcaacgaggatcccggagaggatgtggcccttctgtcagtgagttttgaggataccgaagctacccaggtctatcctaagctgtacctgtcgccccgtattgagcatgcactcgggggcagtagtgcactgcacatcccggcctttcccgggggcggatgcttaatagattacgtgccccaggtttgtcatcttctaactaacaaagtgcagtatgtcatacagggttatcacaagcggcgggagtacatcgctgcattcttgagccatttcggtactggggtggtggaatatgacgcagaaggcttcactaagttaactctcctgttaatgtggaaggacttctgctttcttgtacacatcgatctcccccttttctttccgcgcgatcagccgaccttgacctttcagagtgtttaccacttcactaacagtggccagctttatagtcaggcccagaagaactacccctacagcccccggtgggacgggaatgagatggccaaacgagctaaggcctatttcaagacattcgtgcctcaattccaggaggcagccttcgcgaatggaaagctctag

SEQ ID NO: 15633 - DNA, 1152 bp, synthetic construct
  source 1..1152: mol_type = other DNA; note = Synthetic coding sequence
atgtcccctgaagttgccttgaatcgcatctcgcctatgttatctccctttattagttccgtagtaagaaacggcaaggtaggacttgacgccacaaattgtttgaggatcactgatctgaagagtgggtgtacttctctgacccccggccctaattgcgacaggttcaagttacacataccgtacgctggcgaaactctgaaatgggatattattttcaatgcccagtatccagagctgcctcctgactttattttcggagaggacgctgaatttctgcccgatccctccgctcttcaaaatttggctagttggaacccaagcaaccccgagtgcttgctgttagttgtaaaggagctagtgcaacagtaccaccagtttcagtgttcccggctgagggagtcttcaaggctcatgttcgagtaccaaactcttctggaggagccccagtacggggagaacatggaaatttacgcaggcaagaagaataactggacaggggagttctccgcacggtttctgctcaaactgcctgtcgatttcagtaatataccaacttaccttcttaaggacgtgaacgaggacccgggcgaagatgtcgctttgctgtctgtgagctttgaggatactgaagctactcaggtgtatcccaagctttacctttcgccccgcatcgagcatgctctgggggggtctagtgccttgcatattccggcgttccctggagggggctgtctgattgactacgtcccccaggtctgtcatctgctgaccaataaagtgcagtacgtcatccaggggtaccataagaggagggaatacatcgcagcgtttctgtctcacttcgggaccggggttgtggaatatgacgctgaggggttcacaaagttaacactgctccttatgtggaaggatttctgtttcctcgttcacattgatcttccactattcttcccgagggatcagccaaccctgacttttcagagtgtttatcatttcactaactctgggcagctctactcacaagcccagaagaactacccttacagtccaagatgggacggtaacgagatggccaagcgggctaaggcatacttcaaaactttcgttccacagtttcaggaagccgccttcgcaaacgggaaactgtag

SEQ ID NO: 15634 - DNA, 1131 bp, synthetic construct
  source 1..1131: mol_type = other DNA; note = Synthetic coding sequence
atgagccccgaggtggccctgaatcgcattagtcccatgctgtcaccgttcattagttctgtggtgcgcaatggtaaggtcgggctcgatgccactaattgcctgcgcatcaccgacctgaagtctgggtgtaccagtctgacccccggaccaaattgcgatcgcttcaagcttcatataccatatgctggggagactctcaagtgggacattatatttaacgctcagtatccagagctgccgcccgattttatcttcggcgaggatgccgaatttttgcctgacccttcagcactccaaaatttggcttcttggaatcccagtaaccccgagtgcctccttctagtagtcaaggagctagtgcagcaatatcaccagtttcaatgctcccgtctacgagaatcctcacgattgatgtttgagtatcagacgctcctggaggaaccccagtacggggagaacatggagatttacgccgggaagaagaacaactggacgggggagttctctgctcgttttcttctgaaactgccggtggacttttctaacatcccgacatacctgcttaaggacgtgaacgaggatcccggcgaagacgttgccctcctatcggtatcatttgaagacaccgaagcgacccaggtgtaccctaagctgtatctctcaccacggatcgaacacgctcttggtgggagtagtgctctccatatccccgctttccccggcggcgggtgcctgatagattacgtccctcaggtgtgtcacctactcactaataaggtgcagtatgtgattcagggttaccacaagcggagagaatacatagctgcatttctgtctcatttcggcactggggtcgttgaatatgatgccgaaggcttcacaaaactgacccttctcttgatgtggaaagatttttgcttcctcgtgcacatcgacctgccattattctttcctcgcgaccaaccgacactgacattccagagtgtctaccacttcacaaactccgggcagctttacagccaggcccaaaaaaactacccctacagtcctaggtgggacggaaatgaaatggcaaaaagagcaaaacgagaatccaatagagacggcgaagaatcaagctctgcctag

SEQ ID NO: 15635 - DNA, 312 bp, synthetic construct
  source 1..312: mol_type = other DNA; note = Synthetic coding sequence
atgatccgggctttcccaacaacaacccccaggtcactgcacctttttacatccagtacattcctcgctcgtgcacttcccggagccttccccaccggcgcctgcgaggagcgcctgagcgtaccagagtcgacgccctttacggctgtgctcaagttcgcagccgaagaattcaaggtgccggcagccacttctgcaattattacaaatgacggcataggcatcaatccagcacaaacagctgggaacgtgttccttaaacatggttcagagttgagaattattcctcgagatcgcgtgggcagttgctag

SEQ ID NO: 15636 - DNA, 1968 bp, synthetic construct
  source 1..1968: mol_type = other DNA; note = Synthetic coding sequence
atggctactccagtggtgactaaaacagcgtggaagcttcaggaaattgtcgctcacgccagtaacgtatctagccttgtcctgggaaaagcctctggcaggctgttagcaacagggggagacgattgccgagtgaatctgtggtctattaacaagcccaattgtattatgagcctcacaggtcacacgtcgccggtggagtcggtacgcctgaacaccccagaagagctgatagtggctggtagccagtccggcagcatccgggtatgggaccttgaggccgccaaaattctgagaaccctgatggggcacaaggcaaatatatgctctctggatttccatccctacggggagttcgtcgcctccgggagccaggacaccaacattaagctgtgggatattcgccgcaagggctgcgtgtttcggtaccggggacactctcaggccgtgcgttgtcttcggtttagccccgacgggaagtggctggcatctgccgcagacgatcacacagtcaaactgtgggacttaaccgccggaaaaatgatgagtgaattcccggggcacacaggtccagttaatgtcgtagaattccaccccaacgagtaccttctggcgtcagggtcctccgacagaaccatcagattttgggatctcgagaaattccaggtagtgagttgcattgagggcgagccggggcctgtcaggtccgtgctttttaatcccgatggttgttgcctttacagcggctgtcaggattccctcagagtgtacggttgggaaccggagcggtgtttcgacgtcgttctggtcaactgggggaaagtggccgatttagccatctgtaatgatcagctcatcggagtggcattctcgcagagcaacgtctccagctacgtagtggaccttaccagagttacacggactggcacagtggcaagggacccggttcaggatcacaggcctctcgctcagccacttccgaacccctcagctccccttcgccggatctacgaacgcccatccaccacttgtagcaagccacagagggtcaaacaaaactcagagtccgagaggaggagcccaagttcggaggatgatcgggatgagcgggagagtcgagccgaaatccagaatgccgaagactacaatgaaatctttcagcccaaaaactcgatttccagaactccacctagacggtctgagcccttccctgcccctcctgaggacgacgctgctactgctaaggaggccgccaaaccgagtcccgccatggacgtgcaatttccagtgccaaatctggaggttctgccgaggcccccggtcgttgcttcgacaccagcgccgaaggcagaacctgccatcatcccggcaacaaggaacgagcctatagggctaaaggcatccgatttcctgccggctgtcaaaattccccagcaggcggagctggtcgacgaggatgccatgagccaaatccgtaagggacacgacacaatgtgtgttgttctaacttctcgtcataaaaatctggatacagtgagagctgtctggactatgggagatataaaaacctcagtggacagtgctgtggcgatcaatgacttaagtgttgtcgtggatctgctcaatattgtgaatcagaaggcctctctttggaaactcgacctgtgtacgacggtcctcccacagatagaaaagctcctgcagtctaagtacgagtcctatgtgcagacaggctgcacttccctcaaactgatcctccagaggtttctgccccttatcactgacatgctggctgcccctccttcagtcggggtcgacatatctagggaagagaggctgcacaaatgtcggctctgttacaagcagttgaagtcaatcagcggcctcgtaaagtccaagtccgggttaagtgggagacatggctctaccttccgggaactgcacctgttaatggcctcgcttgactag

SEQ ID NO: 15637 - DNA, 165 bp, synthetic construct
  source 1..165: mol_type = other DNA; note = Synthetic coding sequence
atgtttttgtctgcagtcttctttgccaagagcaagagcaacgagacaaagtcaccccttcgaggcaaagagaagaatacactgcccctcaacgggggactgaagatgaccctcatatataaagagaagacagaagggggggatacagacagtgaaatcctctag

SEQ ID NO: 15638 - DNA, 2457 bp, synthetic construct
  source 1..2457: mol_type = other DNA; note = Synthetic coding sequence
atgaagaagcagttcaataggatgagacagttggcaaaccagaccgttggcagagctgaaaaaacagaggtgctttcagaagacctcctgcaggtggaaaagcgtctcgaattggtcaaacaggtaagtcactctacacataagaagttgaccgcctgcttacaaggacagcaaggagcagaggccgataagcgctctaagaaactgccattgacaacgctagctcaatgtctaatggaaggctctgcaatactgggcgacgatactcttttgggaaagatgcttaagctgtgtggcgagactgaggataaattggcacaggaactgatccatttcgagctccaggtggagcgggacgttattgaaccccttttcttgctagccgaagttgagattcctaacatccagaaacagcgcaaacatctggcaaagctcgtgctggacatggatagctcacgcactcgttggcagcaaacctctaagtcaagcgggttgtctagctcgctacagcctgcaggagccaaggccgacgcactccgtgaagagatggaagaggctgctaacagggtggagatttgtagagatcagctgtctgccgatatgtattctttcgtagccaaggagatagattacgcgaattacttccagaccctgatagaggtgcaggcagaataccaccgcaagagtctgaccctgctccaagccgtcctgcctcaaatcaaagcccaacaagaggcctgggtggaaaaaccatcctttggcaagccccttgaagaacacctgaccatctccgggagggagatcgcttttcccatcgaagcttgtgttacaatgctcctggagtgcgggatgcaagaggaagggctctttagagtcgctcccagtgcctctaaactgaaaaagctgaaggctgcccttgactgctgcgtcgtggacgtgcaggagtattctgcggatccccatgctatcgctggcgccctgaagtcttatctccgggagctgccagaacccctgatgacatttgagctttatgacgagtggatccaggccagcaacgttcaggaacaggacaagaagctgcaggcgctgtggaatgcctgtgaaaagcttcctaaagccaaccataacaatatcagatacctaatcaagttcctttctaaactcagtgagtaccaggacgtgaacaagatgactccctccaatatggctattgtcctgggtcccaatctgttgtggccacaggcagagggtaacatcaccgagatgatgacaacagtgtctttgcaaatcgtcggaatcatagagcccatcatccagcacgccgattggttttttccaggcgaaatcgaattcaacatcacaggcaattatggaagccccgtacacgtaaaccacaacgccaattactctagcatgccgtctcctgacatggatccagccgatcgaaggcagcctgagcaagctcgccggccgctgagcgtggctacagataatatgatgttagagttctataaaaaggatgggcttagaaagattcaatctatgggggtacgagtaatggataccaattgggtggccagacgtgggagcagcgcaggacgcaaagtttcctgcgcgcctccctcgatgcaaccgcccgcccctcccgccgaactagcggccccactcccgagccccctgcctgagcagcctctcgattctcctgccgcaccagcactgagtccatccggtctcgggctgcagcctggcccggagcgcacaagcactacgaagagcaaagagttatctccgggatccgcacagaaaggatcccccggctctagccaaggtacagcctgcgccggcacacagccaggcgctcaaccaggggcacaacccggcgccagcccatcaccctctcaacctcctgctgatcaatccccccacaccttgcgtaaggtgtccaaaaagttagccccaataccgcctaaagtgccattcggccagccaggggctatggccgaccagtcggccggccagcccagtcccgtgagtctaagcccgacacccccctctacaccatcaccatacggactgagctaccctcaagggtactcactggcgtccggccaactgagtcccgcagccgcgcctccactggcatcaccgagcgtcttcactagcacattgtctaagagtaggcccacgcccaagcctagacagcgtcctaccctgccgcctccccagccacccaccgtcaatctgtccgctagctctccccaaagcaccgaggctccaatgttggacggaatgtcccccggcgagtccatgtccaccgatctcgtgcatttcgacatccctagcatacacatcgaacttggcagcaccctgagattgagccctctggagcatatgcggaggcattcagtgacggataagagagatagtgaggaggaaagcgaaagcacggcactgtag

SEQ ID NO: 15639 - DNA, 1014 bp, synthetic construct
  source 1..1014: mol_type = other DNA; note = Synthetic coding sequence
atgaccaacaatagtgggtctaaagcggaattggttgtcggaggcaagtacaagctcgtgcgtaagattggttcaggctccttcggcgatgtgtatctcggcataaccacaaccaacggcgaggacgtagctgtcaagcttgaaagccagaaggtgaaacatcctcagctattgtatgagtcgaagctctacaccattctgcaaggcggagtcggcattccccacatgcactggtatggtcaagagaaggataataatgtactagtcatggacttgctgggaccatcgctggaggacctgttcaatttctgctccagaagattcactatgaaaacagttctgatgctggccgaccagatgatttcgcgcatagagtatgtgcacacgaagaacttcctgcacagggatatcaagccagataattttctgatgggaaccggacggcactgcaataagctgttcttgatcgatttcggcctcgctaagaagtacagagataatcgcactcgccagcatattccttatagagaagacaaacatctcatcggaacggtgcgttacgctagcattaacgctcacctggggatcgagcagtctaggcgagatgacatggaaagcttaggttatgtgttcatgtactttaaccgcacatccttaccctggcaggggttgagagccatgacgaagaagcagaaatacgaaaagataagtgaaaaaaaaatgtcgacccctgtggaggtgctctgcaaggggttcccggcagaattcgcaatgtacctcaattattgccgtggtcttcgtttcgaggaggttcccgactatatgtatctcagacagctcttccggattcttttccggacactcaaccatcaatatgactatacatttgactggactatgctgaagcaaaaggccgcacaacaggctgcttcttccagcgggcaaggccagcaagcacagacacagacagggaaacagacagaaaaaaataaaaataacgtcaaggataattag

SEQ ID NO: 15640 - DNA, 1608 bp, synthetic construct
  source 1..1608: mol_type = other DNA; note = Synthetic coding sequence
atgtcagaaggagagtcccagacggtgctatcttccggctctgaccccaaggtggagtccagctcatccgcccctggacttactagcgttagcccaccggtgacctccactacttcggccgccagtccagaggaagaagaggaatccgaggacgagtccgaaattctagaggaatccccatgtgggagatggcagaagcgcagagaagaagtgaaccaacggaacgtgccaggtatcgactcggcttacctagctatggatactgaggaaggcgtggaggttgtgtggaacgaagtccagtttagcgagaggaagaattataagttgcaagaggagaaggtgagagctgtcttcgacaacttaatacagctggagcaccttaatatcgtcaagtttcataagtattgggctgacataaaagagaacaaggccagagtgatattcatcacagaatacatgtcttcaggttccctgaaacagtttcttaagaagaccaagaagaaccataagaccatgaatgagaaagcatggaagcgatggtgcacacaaatcctctcggccctctcatacctccattcctgcgatccaccgatcattcacggtaatctaacttgtgacaccatttttatccagcacaatggcctgatcaaaattggatcagtggctcccgacaccatcaacaatcatgtgaaaacatgtagagaagaacagaagaatctgcacttctttgccccggagtacggagaggtcacaaatgtgaccaccgcagtcgatatttatagtttcggcatgtgtgccttggaaatggccgtcctggaaattcagggaaatggggagagcagctatgtgccacaagaagcgattagctccgcgatacagctgctggaggaccccttgcaaagggagttcatccagaagtgccttcagtctgagcctgcaagacgcccaaccgcccgtgaactactcttccacccagccctttttgaggtccctagcctaaaactgctggccgctcactgcattgttggtcaccaacatatgatccctgaaaacgcactggaagaaatcaccaaaaacatggacacatcggcagttctggcagaaatcccagcggggcctgggagggagcctgtgcagacactgtattcccagtcccctgcgctcgaacttgacaaattcctcgaggacgtcagaaacgggatctacccactgacagcctttggactcccccgccctcagcagccacaacaggaagaggtgacatccccagtggtcccacccagcgtgaagacacccacccccgaacccgccgaggttgaaacccgcaaagtcgtactgatgcagtgcaacatagagagtgttgaagagggcgtgaaacaccatctgacactgctgctaaagctcgaggacaaactgaatcgccatctgtcttgcgatctcatgccaaatgaaaacattccagaactcgccgcggagctggtccagctgggctttatctcggaggctgaccaatcacggcttacctctctgcttgaagaaactctcaacaaattcaactttgcccggaattcaaccctgaattctgctgcagtgactgtgtcctcttag

SEQ ID NO: 15641 - DNA, 2169 bp, synthetic construct
  source 1..2169: mol_type = other DNA; note = Synthetic coding sequence
atggagacaagcgatatccagatcttttatcaggaggatccagaatgtcaaaacctgtccgagaactcgtgtcctcctagcgaggttagcgacaccaatctttacagccctttcaagccaagaaactaccagctggaattagcccttccagcgatgaaggggaagaatactattatttgcgcacctacgggttgcggcaaaacttttgtgtcgctgctcatctgcgaacaccaccttaaaaagttcccccagggccagaagggaaaggtcgtcttcttcgccaaccagatcccggtgtacgaacaacagaagtcagtgtttagtaaatattttgagcggcatgggtacagagtcactggaatctcaggtgccacggcggagaacgttcccgttgaacaaattgtggagaacaatgacataatcattctgacccctcagatcttagtcaataacctaaaaaagggaacaatcccatccttaagtatcttcactttgatgatattcgacgaatgccataatacgtcaaagcagcacccatataacatgatcatgttcaattatctcgatcagaagcttggggggagcagtggacctctgccacaggtaataggtctgactgcatctgtgggtgtgggggatgccaagaacacagacgaagccttggattacatctgcaaactctgtgcgtccctcgacgcgtctgtgatcgctacagtcaagcacaatctcgaagagctggagcaagtcgtgtacaagccccaaaaattcttcagaaaggtcgaatctagaatctctgacaaattcaaatatatcatcgcccagctgatgagggataccgagtccctagccaaaagaatatgcaaagacctggagaatctctcccagattcagaatcgagagttcggcacccaaaaatacgagcagtggattgtcacagtccagaaagcctgtatggtgtttcagatgccagataaggatgaggagtccagaatatgcaaagcactcttcctgtatacaagccacctccggaaatataacgatgccctgatcattagcgagcacgctcgaatgaaggacgcgctcgactacttgaaagacttttttagcaatgtccgagcagccggcttcgatgaaattgagcaggatctgacccagcggttcgaagagaagctgcaggaactggaatccgtaagtcgagacccaagcaacgagaaccccaagcttgaagacctgtgtttcatattacaggaagagtaccacctaaaccccgagacgatcacaatcctcttcgtgaaaaccagagccctcgtcgacgcacttaagaattggattgagggcaaccctaaactttcattcttaaaacctggcatcctgactggtagggggaagactaatcagaacaccggaatgaccctgccggcacagaagtgcatcctagacgctttcaaggcctcaggtgatcataacattcttatagctacgtcagtggctgacgagggaatcgatatcgcccagtgcaacctggttatcctgtatgagtacgtgggaaatgtgatcaaaatgatccagaccagaggccgggggagggctcgaggtagcaaatgtttccttctaacgtcaaacgccggagttatagaaaaagagcaaattaatatgtacaaggaaaaaatgatgaatgatagcatactgagactgcagacatgggatgaagcagttttccgcgaaaagatcctccacattcagacacacgagaaatttatcagggatagccaagaaaaacctaaaccagtgccggacaaggaaaataagaagctcttgtgccgcaaatgtaaggccctcgcctgttacaccgccgatgtgagagttatcgaggagtgtcactacactgtgttaggcgatgcatttaaagaatgctttgtcagtcggccacaccctaagcccaagcagttttcctccttcgagaagagggctaagattttctgtgctaggcagaactgctcacatgattggggaatccacgtgaagtacaagactttcgagattcctgtcatcaagatcgaatcgtttgtagtcgaggacattgctaccggggtgcagaccctgtattccaagtggaaagatttccactttgagaagatcccatttgatcctgcagagatgagcaagtag

SEQ ID NO: 15642 - DNA, 2643 bp, synthetic construct
  source 1..2643: mol_type = other DNA; note = Synthetic coding sequence
atgaccacagagcaaagacgatctctgcaggcattccaggattatattcggaagaccctagatccaacatatatcctaagctacatggctccatggttccgtgaggggtactcaggcctttacgaagccatcgaatcttgggactttaagaaaatagagaagctggaggagtaccgattgctgctgaagcgtctgcagccagaattcaagaccagaatcatccctactgacatcatctctgatttaagcgagtgtctgattaatcaggagtgcgaggagattcttcagatctgttctactaaagggatgatggctggtgctgaaaagcttgttgagtgtctccttagaagtgacaaagagaattggcctaagaccctgaagttagcactagagaaggaacgaaacaaattctcggagttgtggatagtggaaaagggtatcaaagatgtggagacagaggacctggaagacaaaatggagacttctgacattcagatcttctaccaggaggaccctgaatgccagaatttgtcggaaaattcatgtccaccatccgaagtttctgacactaatctgtatagcccgttcaaaccccggaactatcagctcgagctcgcactcccagcaatgaagggaaagaacacaattatttgcgcacctaccggttgcgggaaaacatttgtcagtctgctgatttgtgagcaccacctcaagaagttcccccagggacaaaagggtaaggttgtgttcttcgctaaccagattcctgtgtacgagcagcagaagtcggtcttctcaaaatatttcgagcggcatggctatagggtcacaggcatctcaggcgccaccgctgaaaatgtgcctgtggagcagattgttgaaaacaatgacattattattcttaccccccagattctggtaaacaaccttaaaaagggaaccataccatcgctgagcatttttacattgatgatcttcgacgagtgccacaatacaagcaagcaacatccctacaatatgataatgtttaattatcttgaccagaagttgggaggaagcagcggcccactaccccaggtgatcgggctgaccgcgtccgtgggcgttggggatgccaagaataccgatgaggccttagactatatctgtaagctatgtgcttcattggatgcgagcgtgattgcaacagtcaagcataatctagaggagctggagcaagtcgtgtacaagccgcaaaaatttttccgtaaagtagagagcaggatttcagataagttcaaatatataattgcacagttgatgcgggacacggagagcctcgcgaagagaatctgcaaagacctggaaaatctgtctcagattcaaaaccgtgagtttggcacccagaagtacgagcagtggatcgtgaccgtgcagaaggcatgtatggtatttcaaatgccagataaggatgaagagtctcgtatctgtaaggctctgttcctctacacgtcacacctccgaaagtacaatgacgcccttataatatcagagcacgcaaggatgaaagacgcattagactatctgaaggattttttttcaaacgtgagagccgctgggtttgacgaaatcgagcaagacctaacacaacggtttgaagagaagctccaggaactggagtcggtttcaagggacccatcaaacgaaaatcccaaattagaagatttgtgcttcatcttacaggaggagtaccatcttaatccagagacaattacaatactgttcgtcaaaactagggccctcgtggatgcccttaagaactggattgagggaaaccctaagctcagcttcctcaagccaggaatattgactggtaggggtaaaacaaatcagaacacaggaatgacactccctgctcagaagtgtattttggacgcctttaaagccagtggagaccataacattctgatcgctacttccgtggccgatgagggtatcgatatagctcaatgtaatctcgtcattctgtatgaatacgtgggcaacgtgattaagatgatccaaacacgcggccgtggaagggcccgcgggtccaagtgtttccttctcacatccaatgccggcgtcattgaaaaggaacagataaatatgtacaaggagaaaatgatgaacgactctatcttaagactgcagacctgggatgaggccgttttccgcgagaaaattctccacatccagacccacgagaaatttataagagatagccaagagaaacctaagccggtccctgacaaggagaataaaaagctgctctgtcggaaatgtaaggcactcgcctgttacacagcagacgtccgggtcattgaagaatgccactatacggttctgggcgatgcctttaaggagtgtttcgtgtccaggccccatcctaagcccaaacagttttcatcctttgaaaaaagagcaaaaatcttttgtgcaaggcagaattgctctcatgactggggcatacacgtaaaatataagacttttgagattcccgtgataaagattgaatctttcgtggtggaagacattgctacgggggtccagactctttatagcaaatggaaagacttccattttgagaagattccttttgatccagcagagatgagcaagtag

SEQ ID NO: 15643 - DNA, 2778 bp, synthetic construct
  source 1..2778: mol_type = other DNA; note = Synthetic coding sequence
atgaccaccgagcagagacggtcactgcaggcttttcaagattacattaggaagacgctcgatcctacttatattctgagttacatggctccttggtttagagaggaggaggtacaatacatccaagccgagaagaacaataaggggcccatggaggcagctacccttttcctcaaattcctgctggagttgcaggaggagggatggttccggggcttccttgacgctttggatcatgccggttattctgggctgtatgaagccattgagagctgggactttaagaagatcgaaaagctggaggagtatcgtctccttctaaagcgtctgcagccagagtttaaaacgcgaataatcccaacagatattatctcagacctatcagaatgcctgatcaaccaggagtgcgaagaaatcctgcagatttgttcaaccaagggaatgatggccggtgcagaaaaactggtcgaatgtttattgcgatcagataaagagaattggccaaagactctcaagctagccctcgagaaagagcggaataaattctcagaattgtggatcgtagaaaagggtatcaaggacgtagagacggaagacctggaggataagatggaaaccagtgacatccagatcttttaccaggaagaccctgagtgccagaacctgagcgagaatagctgccctcccagcgaagtttctgacacaaacctctactccccgtttaaaccccggaattaccagctggaactcgccctgccagcaatgaagggaaagaacacaattatctgtgcaccaaccggctgtggaaagacgttcgtcagcctcttgatctgtgaacaccatctaaagaagtttcctcaaggccagaagggcaaggtggtgtttttcgcaaaccaaatccccgtgtatgaacaacaaaaatcagtcttcagcaaatacttcgaacgccacggttatagagtcacaggaataagtggggctaccgcagagaatgttccagtcgaacagatcgtggagaataatgatatcattatcctgaccccccagattcttgtgaataacttgaagaagggtaccatccccagcctctccatcttcaccttgatgatttttgatgagtgtcataacacgagcaagcagcacccctataatatgataatgtttaactacttggatcagaaactggggggaagctcgggcccactgccacaagtcattggactgaccgcttccgtgggcgtaggcgatgctaaaaacactgatgaagctttggactacatatgtaaattatgtgcttctttagacgcgagtgtcatcgctacagtgaagcataatctggaggaacttgaacaagtcgtttataagccccagaagttttttcggaaggttgaatcccgcattagtgacaaatttaaatatataatcgcccagctcatgcgcgacacagagagtttagcgaaacggatctgtaaggatctggaaaatctctcacaaatacaaaatagggagtttgggactcaaaaatacgagcagtggatcgtgacagtccagaaggcttgcatggtgttccagatgcccgacaaggacgaggaatcgcgcatctgtaaagcattgtttctgtacacgtcacacttgaggaagtacaacgatgccctgattatctcagagcatgcccggatgaaggatgctctggactaccttaaagactttttctcaaatgtgcgcgcagcaggctttgatgaaatcgagcaggacttaacgcaacgctttgaggagaaactgcaggaacttgaaagcgtgagccgcgaccctagtaatgagaacccaaagctagaggatctctgctttattttgcaggaggaatatcacttgaaccccgagactattaccatcctgtttgtgaaaactcgcgccctcgttgacgccttaaagaattggatagaggggaaccccaaactgtccttcctgaagcctggcattctcactgggcgggggaagactaatcagaacactgggatgaccctgccggcccagaaatgtatcttggacgctttcaaagccagcggcgatcacaacatcttaatcgctactagtgtagcagacgagggcatcgacatagcacagtgcaacctggtcatcttatacgagtacgtcggtaacgttatcaaaatgattcagaccaggggccgtggccgggcaagaggctccaagtgttttctcttaactagtaatgccggggtgatagagaaagagcagataaacatgtataaagagaagatgatgaacgactcaatcttgcgccttcagacttgggacgaggcggtctttagggagaaaattttgcacatacaaacacacgagaagtttatacgagacagccaagaaaagcccaaacctgtgcctgacaaggaaaataagaagctgctgtgtaggaaatgtaaggcactggcttgctatactgccgatgtgagggtgatcgaggagtgccattacactgtcctaggcgatgccttcaaagaatgttttgtgtctcggccacacccaaagccaaagcaatttagctcttttgagaagcgggcaaagatattctgcgctcgtcaaaattgctctcacgattggggtatacacgtgaagtacaagaccttcgagattcctgtcataaagatagaatccttcgttgttgaagatattgccaccggggttcagaccctgtacagcaagtggaaagacttccacttcgaaaagatcccgtttgaccccgccgaaatgagtaaatag

SEQ ID NO: 15644 - DNA, 987 bp, synthetic construct
  source 1..987: mol_type = other DNA; note = Synthetic coding sequence
atggacggcgaggacatcccggacttcagctcgctgaaggaagagactgcatattggaaagagttgagcctgaagtataagcaaagcttccaggaagcaagagacgagctggtagagttccaggagggatctcgtgagctcgaggccgaactggaggcccagctggttcaggccgagcagcgaaaccgtgatctgcaggcagacaatcagagattgaagtacgaagtagaagctttaaaggaaaaactggagcatcagtatgcccagagctataagcaggtgtctgtactcgaagatgacctgagccaaacccgcgcgatcaaagagcagcttcacaagtatgtgcgggaactggaacaggccaacgatgacctcgagcgtgcaaaaagagccactattgtgtcattagaggatttcgaacaacgcctcaatcaagccatcgaacgaaatgcttttcttgaaagtgagctagatgaaaaggagtcactcctggttagtgtccagagattaaaggatgaggcccgagacctgcgtcaggagctggcagtcagagaaagacaacaagaggtgacccgcaaatctgctcccagcagcccaaccttagactgcgagaaaatggattcagctgtgcaggcatccctgtctctgcctgcgacacctgtcggcaaagggaccgaaaatacattcccttcccccaaggccatccccaatgggttcgggacaagcccactgacgccctctgcgcgcatctccgctctgaatatcgtgggagacctgctgcggaaagtgggtgctctggaatccaagctagctgcttgtcggaactttgccaaggatcaggcttccaggaagagctacattagcgggaacgtgaactgcggagtgctgaacggaaatggaacaaaattctcccggtccggacacacatcctttttcgataagggtcaggagaaagtgattttccccaccttgttcatgggacagtag

SEQ ID NO: 15645 - DNA, 2898 bp, synthetic construct
  source 1..2898: mol_type = other DNA; note = Synthetic coding sequence
atggcgttactgtgcggactcggccaggtgaccctccggatttgggtatcactcccatcccaatctgagaatgggatcggcttcctcgcagccagagcgttccttcggtccggagggatggaagcgttgactacccagctcggacccggacgagagggatcctctagccctaacagcaaacaggagctgcaaccctacagtggttccagtgctcttaagcccaaccaggtgggtgaaacaagtttgtatggagttccaatagtctcactggtcattgacggacaggagagactctgcctggcccagataagtaacaccctgcttaagaactacagttacaatgaaatccataaccgacgggtggcactgggtattacatgtgttcaatgcacacctgtccagttggagatactgcgcagggctggcgccatgccgattagctcaagacgctgtggaatgattactaagagagaggccgaacggctttgtaagagcttcttgggagagcacaagccccccaaactgccagagaattttgcttttgacgttgttcacgagtgcgcttggggatcaaggggtagctttattcctgcaagatacaactcaagtagggccaagtgcataaaatgtggctactgtagtatgtatttttcccccaataagttcatatttcacagccacaggacacctgacgcaaaatatacacagcctgatgcagcgaatttcaacagttggcgccggcacttgaaactctccgacaaaagcgctactgatgagctctctcatgcatgggaggacgtcaaggccatgttcaatggcggcacacgaaaacgtactttttccttgcaggggggcggcgggggcggcgccaatggtggcagtggcggtcagggaaaaggcggcgctggcggcggcggggggggggggccagggtgcggggcagaaatggctccgggaccaccccctcacaaatctttgcgttgcggggaagacgaagctgcgggacctcctgggccacccccacctcaccctcagcggggccttgggctggccaccggagcttctggccccgctgggccaggcggccctggaggtggcgctggggttaggagttacccagtgatacccgttccctccaaaggatttggattgctgcagaagctgccacctccattgtttccccacccctacggattccctacagcctttggattatgcccgaagaaagacgaccctgtcctgggcgccggggagcccaagggtggacccggaaccgggtccggcggaggtggagcaggcacaggtggcggagctggggggcctggcgcctcccaccttccccctggcgccggcgcaggccccgggggaggtgctatgttctgggggcatcagccgagcggggccgcaaaagacgctgctgccgtagcagcagcagccgctgccgcaaccgtctacccaacttttccgatgttttggcctgctgctggatcactgcctgtcccttcctaccccgcagcccagagtcaggcaaaggcagtggccgcagcggtggcagccgctgcagctgccgcagctgctgccgcaggctctggggctcccgagccattagacggcgcagagcccgccaaggagtcaggcctaggtgctgaggagcgatgtcctagcgccctctcgcgcggcccactagatgaggacggcaccgacgaggcgttacccccccctcttgcccccctgcccccacccccgcctccaccggcacgaaaggggtcctacgtgagcgcctttcgccctgtagtaaaggataccgagtctattgcaaagctgtacggctccgcgcgcgaggcgtatggtgcagggccagcacggggacctgggcccggtgccggcagcgggggctatgtgagtcctgacttcttgtccgagggaagctcctcatataattcagcctcgccagacgtcgacacagccgacgagcctgaggtggacgttgagagcaacagattccccgacgacgaggacgctcaggaggagaccgaaccttctgctcccagcgccggcggcgggcccgatggtgagcaacctactggccccccgtcagctaccagttccggagcagatggacctgccaactcacctgacggggggtcccccaggcccagacggcggctcgggcctccccctgccggaagacccgctttcggcgacctcgctgctgaggacctcgttaggaggccagagagatcacctccatctgggggaggaggatatgagttgcgcgagccgtgtggtccgctcggtggtccagcccctgccaaggtgtttgcacctgaacgcgatgagcacgtcaaaagtgccgctgttgccttaggccccgctgcctcttacgtgtgtactccagaagctcacgagcctgacaaagaagataatcacagtcctgctgacgacctggaaacccggaagagttacccagaccagaggagtatctctcagccctccccagctaacaccgacaggggcgaagacggattaactcttgatgtcactggcactcatttggtggagaaagatattgaaaacttggctagagaagagctacaaaaactattactggagcaaatggaattgcggaagaaactcgagcgcgagtttcagagcctcaaagataacttccaagaccaaatgaagcgcgagctggcgtaccgcgaagagatggtgcagcagctccagatcgtgcgcgacacattatgcaatgagctggaccaggaaaggaaggcccgatacgccattcagcagaagctcaaagaagcacatgatgctttacatcacttcagttgtaaaatgttaactcccagacactgtacaggaaattgttccttcaagccgccattgctcccatag

SEQ ID NO: 15646 - DNA, 1803 bp, synthetic construct
  source 1..1803: mol_type = other DNA; note = Synthetic coding sequence
atggccagcaatcataagagttctgcagctagacctgtgtctcggggaggcgtgggacttactggccgccctccaagcggtattcggccattgtccggaaatataagggtggcaaccgccatgccacccggaactgccaggccgggcagtcggggatgccccataggtacggggggcgtgctgtcctcacaaataaaagtagcccaccggccagttactcagcaaggattaactggaatgaagaccggcacaaaaggcccacagaggcagatcttagataagtcatactacctggggctactccggtcgaaaatcagtgaattaactacagaagttaacaagctccaaaaaggcatagaaatgtataaccaggaaaattcggtgtacctgtcctacgagaaacgcgccgaaacccttgccgtcgaaattaaggagctgcaaggccagctggcagattataacatgctagtggacaaacttaatacaaataccgaaatggaggaggtaatgaacgattataatatgttaaaggcccagaatgatagagaaacccagagccttgacgttatctttaccgaacggcaagccaaagaaaaacagattcgaagcgtggaggaggagatagagcaagaaaagcaggccactgatgatatcataaagaatatgtcattcgagaatcaagtcaaatacctggagatgaaaactaccaacgagaaactgcttcaggaattggacacccttcagcagcagttagactcccaaaatatgaagaaagagtcgctggaagctgaaattgcgcactcccaggttaagcaggaagccgttcttctccatgagaagctgtacgaactcgagagccacagggatcagatgatcgccgaagacaagagtattggcagccccatggaagaacgggagaagcttctcaaacagataaaggatgacaaccaggagatcgctagcatggagaggcagttaaccgacactaaagagaagatcaatcagttcatcgaggagatccgtcaactcgatatggacctggaagagcaccaaggtgaaatgaaccagaagtataaagaactgaaaaaaagggaggaacacatggacactttcattgagacattcgaagagacaaagaaccaagagcttaaacgaaaggcccagattgaagccaacatcgtggcgcttctggaacactgttcgagaaacattaataggatcgagcagattagcagcattacgaaccaggagctgaagatgatgcaggacgacctgaacttcaaatctacggaggttcagaagtcgcaatcgaccgcacagaacctcacctctgacattcagaggctccaactggacctgcagaagatggaactgctggagagcaagatgaccgaggaacagcatagcctgaagtcaaaaattaaacagatgacaaccgatctcgagatttacaacgatctgccagccctgaagagcagcggggaggaaaagattaagaagttgcaccaagagaggatgatattgtccacacatcggaatgcttttaagaagatcatggagaagcagaatattgagtacgaagctctcaagacccagctacaagagaacgagactcacagtcagctgaccaatctcgagcggaaatggcaacacctggaacaaaataacttcgcgatgaaagagttcatcgccactaagtctcaggaatctgattaccagcccatcaagaaaaacgtgacaaagcagatcgcagaatacaataagaccattgtggatgccttacactctacaagcggaaactag

SEQ ID NO: 15647 - DNA, 582 bp, synthetic construct
  source 1..582: mol_type = other DNA; note = Synthetic coding sequence
atgctagtggcaggtaacgatagggtgcaggctgtaatcactcagatggaagaagtgtgtcagacaattgaggataattcaaggaggcagaagcagctgttaaaccagcggttcgagagcctctgcgccgtactcgaagaaagaaagggcgagctgctgcaggctcttgctagagaacaggaggaaaaattacagagggtccgcggcctcattcgacagtacggcgaccatctcgaagcttcctcaaagctcgtggaaagcgcaatacagtccatggaggagccccagatggctctgtatctgcaacaggctaaagaacttatcaataaagttggcgcaatgtctaaggtggaactcgccggcaggccagaacccggttatgaatccatggagcaatttaccgtgagagtggaacacgtggccgagatgttacggaccattgattttcagcccggggcgagtggcgaagaagaggaggtggcccccgatggtgaggaagggtctgcagggccggaggaggagcggcctgatggtccactcggcccatattccgcttacgtttccctgtgcggagcgccgtag

SEQ ID NO: 15648 - DNA, 1077 bp, synthetic construct
  source 1..1077: mol_type = other DNA; note = Synthetic coding sequence
atgaatttcaccgtgggcttcaaaccactcctgggcgacgcacactcgatggacaatttagagaagcagctgatatgccccatctgtcttgaaatgttctctaaacctgtcgttatcctcccatgtcagcacaatctctgccgcaaatgtgcaaacgatgtcttccaggccagtaatcccttgtggcagagtagggggtcaaccacggtctcttcaggcggtagatttcgctgcccatcttgcaggcacgaggtcgtccttgatcggcatggcgtgtatggcctgcagaggaaccttttggtggagaacatcatagacatctacaagcaggaatcatccagacctcttcattccaaggccgaacagcacctgatgtgcgaggaacatgaagaggagaaaataaatatttattgcctgtcctgtgaggtccctacctgttcactctgtaaagttttcggggcccacaaagactgtgaggtggccccactgcccactatctacaaaaggcagaagtcggagctgtccgatggcatcgcgatgctcgtggccggcaacgacagagttcaggcagttatcactcagatggaggaagtctgtcagacaatagaggacaattccagacgacagaaacaactgttgaaccagcgcttcgagagcctgtgcgctgtcctggaggagcgaaaaggagagctcttgcaagcactggcaagggaacaggaggagaaacttcagcgcgtgagagggttaattaggcagtacggggaccacctggaagcaagctccaaactggtggaatccgccattcaatctatggaggagcctcagatggcattgtacctccagcaggccaaagagctgattaacaaagtgggcgccatgagtaaggttgaactggctggccgcccagaaccggggtacgaaagtatggagcaattcactgtcagggtggagcatgtggccgaaatgctgaggaccatcgattttcaaccaggggcttctggggaagaggaagaggtcgcacctgatggcgaggaagggagtgccggccccgaggaggagcggccagatgggccttag

SEQ ID NO: 15649 - DNA, 756 bp, synthetic construct
  source 1..756: mol_type = other DNA; note = Synthetic coding sequence
atggcagcctctaccatgtccatatgctcgtccgcctgcaccgattcatggcgcgtggtcgactgtcccgaatcgtgctgtgaaccctgctgttgtgcacctgcccctagcctcactctggtctgcacaccagttagttgcgtttcttcaccatgttgccagacggcttgtgagcccagtgcatgccaatcagggtataccagcagctgcacaaccccatgttaccagcagagcagttgccaacccgattgctgtactagctcgccatgccaacaggcgtgctgcgtcccggtttgctgtgtgcctgtgtgttgcgttcccgtctgtaacaagcccgtctgtttcgtcccaacctgttcagagtcgtcaccctcttgctgccaacagtcttcctgccagcctacctgctgcacgtcaagcccttgtcagcaagcctgttgtgtcccagtatgttcgaaaagtgtttgttatgtgccagtctgctccggtgctagtacaagctgctgtcagcagagctcctgccagcccgcgtgctgtacggcaagctgctgtcgcccctcgtcctccgtaagtctgctgtgccacccagtctgtaagtccacttgttgcgtccccgtcccatcttgtggagcttctgcgagtagttgtcagcctagctgttgtagaacagcgtcttgcgtgagtctgctctgccggccagtttgctccaggcccgcatgctactctctgtgcagcggacagaagagctcttgctag

SEQ ID NO: 15650 - DNA, 1128 bp, synthetic construct
  source 1..1128: mol_type = other DNA; note = Synthetic coding sequence
atggcagcttccactatgagtgtctgctcatctgacttaagttacggctctcgggtatgtcttccaggctcctgcgattcatgtagtgactcctggcaggtcgatgattgcccagagagctgctgcgagcctccctgctgcgccccaagttgctgcgcccccgcgccttgtctcagtctggtgtgcacaccagtgtccagggtgtcttctccatgctgtcctgtgacctgcgaaccctcgccatgtcagtctggctgtacttctagctgtactccgtcttgctgtcagcagagctcatgtcaattggcttgttgcgcatcatcaccttgccaacaggcttgctgcatgccagtgtgctgtaaaaccgtttgctgtaaacccgtctactgtgtccctgtatgcagtggggactcatcatgttgccaacagtcctcttgccagtctgcttgttgtacttctagcccctgccagcaggcatgctgtgtcccgatctgttgtaaacctgtgtgttcgggaatttcctcatcttgttgtcagcagtcttcgtgtgtatcatgcgtatcaagcccttgctgtcaggccgtgtgtgaaccgtctccttgccaaagcggatgcatttcctcttgcacaccatcctgctgtcagcaatcctcatgtcaaccagcctgctgcacttctagtccttgccagcaagcttgctgcgtccctgtctgctgcaagccagtgtgctgcgtgccgacatgtagcgacgatagtggttcttgctgccagcctgcctgttgcacttcctcccaaagtcagcaggggtgctgtgtgcccgtgtgttgcaaaccggtgtgctgtgtgcccgtttgtagtggagccagctcaagctgctgccagcaatcgtcgtgccagccggcctgttgtactacctcttgttgccgtccaagcagcagtgtaagcttgctgtgccggcccgtgtgccggcctacctgctgcgtgcctgtaccaagctgttgtgcgccgacctcttcttgccaggcctcctgctgtaggccggcctcttgtgtgtcactgctgtgtcgacccgcttgctcgaggccggcctgctgcggcccaaccagcacacaaaaaagctcctgctag

SEQ ID NO: 15651 - DNA, 1587 bp, synthetic construct
  source 1..1587: mol_type = other DNA; note = Synthetic coding sequence
atggctacccgggtcgaggaagctgcccggggacggggcgggggcgccgaggaggccacggaggccggacgtggtgggagaaggagaagcccccgccaaaagttcgagatcggaactatggaggaagccggaatttgcggtctgggtgtaaaagccgacatgctatgtaattcgcagtccaacgatattttgcaacatcagggtagtaattgcggaggaacttctaacaaacacagcttggaggaagacgaagggtcagacttcattaccgagaaccggaacctggtgagccccgcgtactgcacgcaggagagccgagaagaaatcccagggggtgaggcacgaactgatcccccagacggtcagcaggattctgaatgtaacagaaacaaggaaaaaacattgggaaaagaagtcctgctactgatgcaggcactgaacacgctgtccacacctgaggagaaactggcagctctgtgcaaaaagtacgccgacctgctggaggaaagcagatccgtacagaaacaaatgaagatcttgcagaagaaacaggcacagatcgtgaaagaaaaggtacatttacaatcagagcacagcaaagctatactggcccgctccaaactggaaagcctctgtcgcgaacttcagagacataataaaaccttaaaggaagaaaatatgcagcaggcaagagaggaggaggaacgacgtaaggaagccacggcccactttcagatcacgcttaacgaaattcaagcgcagctcgaacagcatgacatccacaacgcgaagctacgccaggagaacatcgagctgggagagaaactaaagaagctgattgaacagtacgctctccgggaggagcatatcgacaaggtctttaagcataaggagttacaacagcaactggtcgatgccaagctccaacaaaccacccagcttatcaaggaagctgatgagaaacatcagcgcgagcgtgagttcttgctcaaggaagctactgagtcacgccataaatacgagcagatgaagcaacaggaggtgcagttgaaacagcagttgtccctctacatggataaatttgaggaatttcagaccaccatggccaagtccaatgagctctttaccacatttcgacaggagatggagaagatgacaaaaaaaatcaagaagcttgagaaagaaactatcatctggcgcacgaagtgggaaaataacaataaagctcttctacagatggccgaggaaaaaacagtacgtgacaaggagtataaggcgctccagatcaagttggaacggcttgaaaagttgtgccgagctctgcagactgaaagaaatgagctcaatgagaaagtagaggttctcaaagagcaggtttccattaaagcggctatcaaagccgccaaccgggacctggctactcctgtgatgcaaccttgtactgctctcgactcccataaggaactgaacacctcaagtaagagagcactgggtgcccatctcgaagccgaacctaagtcgcagcggagcgctgtgcaaaaaccgcctagcactgggtcagcacctgccatagaatcagtcgactag

SEQ ID NO: 15652 - DNA, 399 bp, synthetic construct
  source 1..399: mol_type = other DNA; note = Synthetic coding sequence
atgagagcttcaccctgtatatcccagcccgcggcttcctggcatccgcgccccagtgccctgaggccgaccgcgggatccggacccgatacacgcacccccgggaccgtggaggacggctctgcaccctgtcccgctttcagatccccagccgtaagtccttgcggagaggagccttgttgctttcaaatcagcccagcggaagaaacccttgaactgggacgtctggtgagtcccggtaattgcgacacccttagtccccgagcggcgggcttttatgcctgtcatgtacggtccctcatcccttgtcgctccactaaaggccgctggccactgactgcatccgctgccggcttaagccgccatgcacagtgtgggcccagcctcggcctcggatag

SEQ ID NO: 15653 - DNA, 1944 bp, synthetic construct
  source 1..1944: mol_type = other DNA; note = Synthetic coding sequence
atggccgagtttcgtgtccgcgtcagcacgggagaggcctttggggccggcacctgggataaagtgagcgtctctattgtcggaacgcgaggtgaatccccaccattgccactcgacaatcttgggaaagaattcaccgccggcgcggaggaggacttccaagtcaccctgccggaagacgtcgggagggtgctgttgctccgtgtgcataaagctccaccagtgcttccgttacttgggccccttgctcctgatgcctggttctgccgctggtttcagctgactccaccacgggggggacatctgctttttccgtgttatcagtggctggaaggcgctggaactctggtccttcaagagggaaccgccaaggtttcatgggctgatcaccatccggtgctgcagcagcagcgacaggaagagctccaggccaggcaggaaatgtatcaatggaaagcatacaacccaggatggccacattgtttagacgaaaagacggtagaggatcttgagttgaacatcaaatacagcaccgccaaaaatgccaatttctaccttcaagctgggagcgcctttgctgagatgaaaatcaaaggcctcttggatcggaagggcctgtggaggagcctcaacgagatgaaacgcatcttcaacttccgccgcaccccggctgccgagcatgcatttgaacactggcaggaggatgcctttttcgcctcacaattcttgaatggactgaaccccgttctgattcgtaggtgtcactacctccctaaaaactttccagttactgatgcaatggtggcaagcgttctcgggcctggtacctctctacaggcggagctcgaaaaaggatctctgttccttgtggatcatgggattctgagtggcatccaaacaaatgtgattaatggaaaaccccagttttccgccgcacccatgacactgttatatcagtcccccggttgtggaccgctgttgcctctggctatacaattgtcacagactcccggccctaacagccccatatttcttcccactgatgacaagtgggactggctgctggccaaaacttgggtacggaacgccgaattctcttttcacgaggccctgacccacctcctgcactcacatctcctgccggaggtgtttaccctggccaccctaaggcagttaccgcattgtcaccctctcttcaaatctaccgggatcgggattgaaggcttctccgagctgatccagagaaatatgaagcaactcaattactcactgctgtgcttgcctgaagatattaggacaaggggtgtcgaagacattccaggttactactatagggatgacgggatgcagatttggggcgcagtcgagaggtttgtgagcgagattatcgggatttattatccttccgacgagagcgtgcaagacgatcgggagttgcaagcctgggtgagggaaatttttagtaaaggcttcctgaaccaggaatcatccggaattccttccagcctcgaaacaagggaggctttagtgcagtacgtgacaatggtgatctttacctgtagtgccaagcacgccgccgtaagcgctggacagtttgactcctgcgcgtggatgccaaatctgcctccatccatgcagctgccccctccaacaagtaaggggttggctacatgcgagggcttcatcgcgactctgccacccgtaaacgccacatgtgacgtaattctcgccctttggcttctttctaaggagccgggggaccagaggcccctagggacatacccggatgagcacttcacagaagaggctccgcggcgaagcattgctacttttcagagtcggctggcacaaatctctcggggaattcaggagaggaatcaaggtctcgtgctcccttacacgtatctcgatcctcctttaatcgagaacagcgtgtcaatatag

SEQ ID NO: 15654 - DNA, 2031 bp, synthetic construct
  source 1..2031: mol_type = other DNA; note = Synthetic coding sequence
atggctgagttcagagttcgcgtatcaacgggcgaggccttcggagccggcacttgggacaaagtgtctgtgtctatcgtcggcacaagaggggagtctccaccgttgcctctagataacctgggaaaggagttcaccgccggggccgaagaggatttccaagtgactctccctgaggatgtcggaagggtccttctcctccgagtacacaaagcacctcccgtactcccgctgctcggccctctggccccagacgcttggttttgtcgatggtttcagctgactcctcctaggggggggcacttgttgtttccatgctatcaatggttggagggtgcaggcaccctcgtcctgcaggagggcacagctaaagtaagttgggctgatcatcacccagtgttacagcagcagcggcaggaagaactacaggcacgccaagagatgtatcagtggaaagcctacaatcctggatggccccattgcctggacgagaagaccgtggaggaccttgaattaaatattaagtactctacggcaaagaacgcgaatttttacctacaggcgggatcagcctttgcagagatgaagattaaagggctgctcgataggaaaggactgtggaggtcgctgaacgagatgaagcggatattcaatttcaggaggacacctgcagctgagcatgctttcgagcattggcaagaggacgcattcttcgcaagccagttcttgaatggtcttaatccagtccttatacgacgatgtcactatctaccaaaaaatttccctgtgacagacgccatggtggctagcgtcctgggccctggtacatcccttcaggcggaactggagaagggaagcctctttttggtagatcacgggatcctgtccggaattcagacaaatgtaatcaacgggaaacctcagttcagcgctgctccaatgacactgctttatcagtcgcctggctgcggacccctgttaccgctggctatccagctctcccaaacgcccgggcccaatagccccatttttcttccaaccgacgacaagtgggattggctactggccaagacttgggtccgcaacgcagagttttcttttcatgaggcccttacgcacctgctacacagccatctcttgcccgaggtattcaccctggccactttgcggcagctgccgcattgtcatcccctgttcaaattgctgatcccacacactagatatactctgcatattaacaccctggctcgagaactactgatcgtcccaggtcaggtagtagaccgatccacaggcatcggtatcgaggggttctccgagctaatacagagaaacatgaagcagttgaattactctctgctctgcctacccgaggatattcggaccagaggggtcgaagatatcccaggctattattatcgcgatgatggtatgcaaatctggggcgccgtggaacgttttgtgtctgaaataatcggaatttactaccctagcgacgaatctgttcaggacgaccgagaactccaggcttgggttcgggagatttttagtaaaggatttctcaaccaagaatcctctgggatacctagttcactggagaccagggaggcattagttcaatatgtgacaatggtcatttttacgtgctccgccaagcacgccgctgtgtctgccggtcagttcgacagttgcgcctggatgcctaatttgccgcctagcatgcagttgccgccgccaacctccaagggcctggcaacttgcgagggcttcattgccacactcccacccgtaaatgcaacatgcgatgtgattctcgccttatggctgctgtctaaggaacctggggatcaacggcctctgggaacttaccccgatgagcatttcaccgaagaggccccacgaaggtccattgcgactttccaatcaagattggctcagataagcagaggcattcaggaacggaatcagggtctcgtcctgccttacacctacctggatccccccctaatagaaaattctgtatctatttag

SEQ ID NO: 15655 - DNA, 1665 bp, synthetic construct
  source 1..1665: mol_type = other DNA; note = Synthetic coding sequence
atggccacttctgcagactccccctcttcccccctgggcgcagaagatcttctgagtgacagctccgagcctccaggactgaatcaggtcagcagcgaggttaccagccagctgtatgcctctctgcgtttgtctagacaggccgaagccacagcgcgggctcagttatatctgccttccacttcacccccacatgagggattagatgggttcgctcaggagctgagcagatctctgagcgtgggtctcgaaaaaaacctgaagaaaaaagatggctctaaacacatcttcgaaatggagtctgttagaggacagcttcagactatgctgcagaccagtagagataccgcgtacagagatccccttattcccggggccgggtccgagcggcgagaggaggactcctttgactccgactccacggctacactgctgaacaccaggcccctgcaggatctctccccgtcctcgagcgcccaggcactggaggagctcttcccccgttatacaagtttgcggccaggtcccccccttaaccctcccgatttccagggattaagggacgcactggacagcgaacacaccaggagaaaacactgcgagcgacacattcagtccctccagaccagggtccttgaactccagcagcagctggcagtcgcagtcgcagccgataggaaaaaggacaccatgatagagcagctggataaaaccctggctcgtgtggtggaaggctggaataggcatgaggcagaaagaactgaagtattgcgcggcctgcaagaagaacaccaagcagcagaactgacgaggtctaaacaacaagagacggtcacgagactggaacagtctttgtcagaggcgatggaagccctcaaccgggagcaggaatcagcgcggctccagcagcgtgagcgagagactctggaagaggaacgacaggctctgacattgaggctggaggcggagcaacagcggtgctgtgtgctgcaggaagaacgcgacgccgcaagagcagggcagctgtccgagcatagggagctcgagaccctccgcgctgcccttgaagaggaaagacaaacctgggcccagcaggagcatcaacttaaggagcactatcaggcactgcaggaagagagccaggcgcagctggaacgcgagaaggagaagagtcagcgggaagctcaagccgcctgggagacacagcaccagctcgctctggtccagtctgaagtgcgacggctggagggtgaactagacaccgctcggcgggaacgagatgctcttcaactggaaatgtcactagtgcaggcccgttacgagtcccaaagaatccagctagaatctgaattggccgtgcagctggagcagcgcgtgaccgagcggctggcccaagcccaggagagcagcctgcgccaggccgcttccctgagagagcaccatcgcaaacagcttcaggatctgtcaggccaacaccagcaagaactcgcttcccagctcgctcagtttaaggtcgagatggctgagcgtgaagaaagacagcagcaagtggccgaggattatgagctgcgtctgcttctgctggaccctccagctcccggactcaggtccccacgtaggcgtagaggtgggagcggcctgtgcctcccctggccctggccctag

SEQ ID NO: 15656 - DNA, 2778 bp, synthetic construct
  source 1..2778: mol_type = other DNA; note = Synthetic coding sequence
atggctacctcagcagatagtccaagctccccgctcggggccgaagacctgctgtctgacagctccgagccaccaggcctgaaccaggttagctctgaagtcacctctcagctttacgcaagcctgcgtctgagtcgccaagctgaggccaccgctcgcgcacagttatatctgccctccaccagccctccacatgaggggctggacggcttcgcacaggaactttcgagatctttgagtgttggattagaaaagaacctaaaaaaaaaagacggttccaaacacatctttgagatggagagcgtgagagggcagctccagactatgctccagacaagccgggacacagcgtaccgcgaccctctcatccccggagcggggagcgagaggcgggaggaggactctttcgattccgattccacagccacgctcctcaacacgcgcccgctacaggaccttagtccgagttccagtgcgcaggctctagaagagttgtttcctagatatacatctctgaggcccggccctcccctgaatcctcctgactttcagggtctcagagatgccctagactcagagcatacccgccggaagcactgcgaaaggcacatacagtctttgcagacccgtgtcctggagttacagcagcaactggctgtggctgtagccgccgatagaaagaaagacactatgatcgagcaactcgataagaccctggcccgggtggtggaaggctggaatagacacgaggctgagcgcactgaggtgttgcgcggactgcaggaggagcatcaggctgctgagttgacgcggtctaagcagcaggagaccgtgactcgattggaacaatccttgtcagaagccatggaagccctgaaccgtgaacaggaaagtgctcgcctccaacagcgtgagcgggaaacgctggaagaagaacggcaggctttgactctgagacttgaagccgagcagcagaggtgttgtgtcctgcaggaagaaagagatgcagccagagcagggcaactgtctgaacacagagaactcgaaaccctgcgcgcagccctcgaggaggaacgacaaacttgggctcaacaagaacatcagctcaaggaacattaccaggccttgcaggaagagtcacaggctcagctggaaagagaaaaggagaaaagtcagcgggaggctcaggctgcttgggaaacacaacatcagctggctctggtgcagtctgaggttcgtcgcctggagggagagttggatacagccagacgcgagcgcgatgcactacagctcgagatgtctctggttcaggctaggtacgagtctcagcggatacaactcgaaagcgaactagccgtgcagctggaacagcgcgtgactgagcggttagcgcaggcgcaggaatcttccctacggcaggctgcctctctgagggagcaccaccggaagcaactgcaagacctgtcagggcagcatcagcaggagcttgcgagtcagttggcccaattcaaagtggaaatggccgaaagagaggagcggcagcagcaggtggctgaggattatgagctcaggcttgcaagggagcaagcacgagtttgtgaattgcagagcggcaatcagcaattggaagagcaaagggtggagctggttgagagacttcaggcgatgctacaagcccattgggatgaagccaaccagctgctctccacaacactccctcctccaaacccaccggcaccccccgcgggaccaagttccccaggcccacaggagccagaaaaggaggaacgaagagtctggaccatgccaccgatggcagtggcacttaagccagtgctccagcagagtcgcgaggctcgggatgagttaccaggtgccccccccgttctgtgctcatcgagctcagacctcagcctcttgctgggcccttctttccagagccagcattcattccagccacttgagcctaagcctgatttgacctcgagcaccgccggagctttttcagccctgggcgcattccaccccgaccaccgagcagagcgaccctttcctgaggaagaccctggacccgacggggagggtctcttgaagcaggggctccccccagcccaacttgagggcttgaagaatttccttcaccagctgcttgagaccgtgccccagaataatgaaaacccgtccgtggacctgctgccgccaaagtccggtcccctgacggttcccagttgggaggaagccccgcaggtgcctagaattcctcctcctgtgcataaaacaaaagtgccgttggcaatggcatcgagcctcttcagggtcccagaaccccccagctcacacagccagggtagtggtccatccagtggatcgccagagcgcggaggggacggactgacattccctaggcaattaatggaggtctcccagttgctcaggctctatcaggctcgaggatggggcgccttacctgctgaggatctgctgctgtacctgaaacgcctggagcatagcggatacaaacctgggagaaaggaggagggattcagcggttggaaactggattatggtgaatggtcagggaccgacgggcgtggagacaatgtaccgagacgcaatactgattcccgtctgggtgagatcccccggaaggagatcccgtcccaagctgtgcctcgcagactagcaacagccccaaaaaccgaaaagccgccagcacgcaaaaaatctgggcatcctgcgccgtcctcgatgcgcagcagggggggagtgtggcggtag

SEQ ID NO: 15657 - DNA, 2961 bp, synthetic construct
  source 1..2961: mol_type = other DNA; note = Synthetic coding sequence
atgtatttctgttggggcgccgacagtagggaacttcagagaaggagaaccgccggatccccaggcgcagaactgttgcaggctgctagcggcgagagacacagtttgctgctcctcacaaatcaccgcgtgctaagctgcggcgacaactctcgaggtcagctcggccgccgtggtgctcaacgtggcgagctgccagagcctatacaggctctggagacactgattgtggatctagtttcttgcggaaaggagcacagcctagctgtttgccacaaggggagggtgtttgcctggggcgccggctctgagggccagttggggatcggggaattcaaggaaattagcttcacgccaaaaaagatcatgactctcaacgacattaaaattatccaggtaagctgcggtcactaccattcattggcattatcaaaggacagccaagtattttcgtggggcaaaaattctcacggccagctgggactcggaaaagagttcccaagtcaggcctctccacaacgggttcgctcactcgaaggtattccactggcgcaagtagctgcaggcggcgcccacagcttcgccctgagcctgtgtggaacgagcttcggatggggttctaattcagctggtcaattggcactgagcgggcgcaacgtacccgtacagagcaacaaacccctcagtgttggggccctgaagaacctgggggtggtctacatctcatgtggtgacgctcatacagcagtgctgacacaggatggtaaggtgttcacattcggcgataaccgctccggtcagttgggatatagcccgacccccgagaagagaggaccccagctggtggagagaattgacggtctcgtgagtcagattgactgcggttcttatcacacactggcctatgtgcataccactggccaggtggtgtcctttggccacggcccctcggacacgtccaagccaacccaccccgaggccctcacagagaatttcgatatcagttgcctaatcagtgcagaggacttcgtggatgtgcaagtgaaacacattttcgcaggcacgtacgccaattttgtgacaacacatcaggacacctcctccactagagcacctggaaagacccttccagaaatctcccgcattagccagagtatggctgagaagtggattgctgtgaagaggagatccacagagcatgaaatggccaaatcagagatacgtatgattttttccagcccagcttgcctgacagcctcctttttgaagaagcggggcaccggggagaccacaagtattgatgttgatctcgagatggccagggataccttcaaaaaacttaccaaaaaggagtggatctcctctatgatcaccacatgtctggaggatgacctactacgcgcccttccatgtcatagtccccaccaagaggctctgagcgtgtttctcctgctgcctgaatgccccgttatgcacgactcaaaaaactggaagaacttggttgttccatttgccaaagccgtgtgcgagatgtcaaaacagtctcttcaagtgctcaaaaagtgttgggcgtttcttcaagaatcctctctgaacccgctgatccagatgttgaaagcagcgataatttcccagctactgcatcagactaaaactgaacaagatcactgcaatgttaaggctttgctcggcatgatgaaagaactccacaaagttaacaaggcaaattgccgattgccggagaatacgtttaacattaatgagcttagcaacctcctcaatttttatattgaccggggtagacaactgttcagggataaccacttgatgtcagagaaaaaagcctacatgctgatgcacgaaacgatccttcaaaaaaaggacgagttcccacccagtccgcgcttcatcttgagagtgaggcggtctaggctggtgaaggacgccctccgccagctcagtcaggccgaggcaaccgatttctgtaaagtgctcgtggtcgagtttataaatgaaatttgccccgagtcaggcggggtgtcatcagaatttttccactgtatgtttgaagagatgacgaagcctgagtacggtatgtttatgtaccctgagatgggatcttgcatgtggtttccggctaagcccaaacccgaaaagaaacgctactttctgtttggcatgctctgtggtcttagcttatttaaccttaacgtggctaacctaccttttcctctggccctttacaaaaagcttctcgatcagaagccgagcttggaggaccttaaggagttgagtcctcgacttgggaagtctttacaggaagtgctcgacgatgctgccgatgatataggagatgccctgtgcatcagattctctatccattgggaccagaacgacgttgacttgattcccaatggtataagtatacccgttgatcagacaaacaaaagggattacgtcagtaaatatattgactatatttttaatgtttctgttaaagccgtttacgaggagtttcagagggggttttaccgggtgtgtgaaaaagagatcctgcgccacttttaccctgaggaactgatgacagcaattatcggcaatacagattacgattggaaacagtttgagcaaaacagtaagtatgagcaggggtaccaaaagtctcacccaacaattcagctgttctggaaggcctttcacaaactgactttggatgagaagaaaaagtttctgttcttcctcacaggtcgggaccgcctccatgcccgaggtatccaaaaaatggaaatcgtgttcaggtgtccagagaccttttccgaaagggaccatcccacatcaataacttgccacaatatcttatctctgcctaaatatagtactatggagcgcatggaagaggccttgcaagtcgccatcaataacaatagggggtttgttagtcccatgcttacccagagttag

SEQ ID NO: 15658 - DNA, 435 bp, synthetic construct
  source 1..435: mol_type = other DNA; note = Synthetic coding sequence
atgactactaggcaagcgactaaagacccgctgctgcgtggcgtgagccctactccttcaaaaattcccgttcgatcacagaagcggacacctttccccaccgtcacgtcctgtgcagtcgaccaggaaaaccaagacccacggagatgggttcagaagcctccgttaaacatccagcgacctctcgtggactcagccggacccagacctaaagcgcgccaccaggcagaaacgagtcagcgcctggttggaatcagccagcctagaaaccctcttgaggaacttcgtccttcccccagaggacaaaatgtcgggcccgggccccctgctcagaccgtcctggtgcctgccccaggaaaactctttgcactgcgcagatctccattcccccctgccaagtgccacctcgcccgatgtcacgggctctacctgtag

SEQ ID NO: 15659 - DNA, 327 bp, synthetic construct
  source 1..327: mol_type = other DNA; note = Synthetic coding sequence
atggccgatcccagggtacgccagataaagattaagacaggcgtcgtgaagagactggtgaaagagaaggtgatgtacgagaaggaggccaaacagcaggaagagaaaattgaaaagatgcgcgccgaggatggcgaaaactacgacattaagaagcaggccgaaattttgcaggaaagcaggatgatgatccctgattgtcagcgtaggcttgaggccgcttatctggatctccagaggatcctggagaatgagaaggacctcgaagaagcagaggaatataaggaagctagactggtccttgactcagttaagctcgaggcctag

SEQ ID NO: 15660 - DNA, 1341 bp, synthetic construct
  source 1..1341: mol_type = other DNA; note = Synthetic coding sequence
atgcgggagtgtctcagcatccacataggccaggcgggaatccaaatcggcgacgcctgctgggaactatactgtttagaacatggtattcagccaaatggagtcgtcctggatacccagcaggaccagttggaaaacgcgaaaatggagcacacgaacgcgagctttgatacatttttttgtgagaccagggcaggaaaacacgtcccgagggccttattcgtagacctggaaccaacggttatcgatggtattcggacaggacaacatcgttcacttttccatccagagcagctcctttctggcaaggaggacgcagctaacaactatgcccggggacgatattctgtgggctctgaggtaatagatctggtgctggagcggacacgcaaactggctgaacagtgtggagggctgcagggcttcctgattttcaggtccttcggtggagggacaggatcaggattcaccagtctactcatggaacgtctgaccggggagtattcccgtaagacgaagttagaattctcggtgtatccagcacccaggataagtacggctgtcgtagagccttataactctgtgctcactacccacagtaccaccgagcacaccgactgcacattcatggtggacaacgaggcggtttatgatatctgtcaccgtaagcttggcgtcgaatgcccttcacatgcttctatcaacagactcgtagtacaggtcgtctcatccataacggcatctctgcgctttgaggggccactgaatgtggatttgattgagttccagacgaatctggtaccatatccacggatccactttccaatgaccgcattcgcccctattgtttccgctgataaagcctatcatgagcaattctctgtctccgatatcacaactgcttgtttcgaatcgagcaatcagttggtaaagtgcgaccccagactcggcaagtatatggcttgttgtctgctgtaccgcggcgacgtggtcccaaaggaagtcaacgctgcaattgccgccaccaagtcacgccacagcgttcagttcgtggactggtgcccaacaggcttcaaggtgggcataaataatcgacccccaaccgtgatgcccggaggtgatctagctaaggtacaccgcagtatctgtatgctgtccaacacgacagccattgtggaagcttgggccagattagaccacaagtttgatcttatgtacgccaaacgggccttcctgcactggtacctccgtgagggcatggaagaagcggagttcttggaagcacgggaagacctggccgcactggaaagggattacgaggaagttgctcaaagcttctag

SEQ ID NO: 15661 - DNA, 873 bp, synthetic construct
  source 1..873: mol_type = other DNA; note = Synthetic coding sequence
atgggcagtagcaagaaggtgacactctctgtgctgagccgggagcagtctgagggggttggggcccgggtaagaaggtcaatagggcggccggagttaaaaaaccttgatccctttctgctctttgatgaattcaagggcggtcgccccggtggcttcccagatcatccccaccgcggcttcgagaccgttagttacctgctggaagggggaagcatggctcacgaggatttttgtggtcacacaggcaagatgaacccaggggacttgcagtggatgactgctggtagaggtatcttgcacgctgaaatgccctgctccgaagaacccgctcacggattacagctctgggttaaccttcgatcctccgagaaaatggtcgaaccccagtaccaggagttgaaatccgaggagattcccaagccgtccaaagacggggtgacagtggcggtaatcagcggagaggccctggggattaaaagcaaggtgtatacaaggacccctacattgtacctcgactttaagctggacccgggagccaagcacagtcagcccatacccaaaggctggacatctttcatttatactattagcggggacgtgtatattgggccagacgatgctcaacagaaaatagagccccaccacaccgccgtgctaggagaaggtgatagcgtgcaagtggagaacaaagatcctaaacggtctcatttcgtactcatcgcaggcgagcccctgagagaacctgtgatccagcacggtcctttcgtgatgaatacgaacgaggaaataagtcaggccattctcgactttcgcaatgccaagaacgggttcgagagagccaagacgtggaagagtaagataggaaattag

SEQ ID NO: 15662 - DNA, 873 bp, synthetic construct
  source 1..873: mol_type = other DNA; note = Synthetic coding sequence
atggggtcatccaaaaaagtgacactgagcgtattgtctagagagcaatctgaaggagtaggggcaagagtgcggcggtctatcggaagacctgagttaaagaatctagatccatttttacttttcgacgagttcaaaggtgggcgcccaggaggttttcccgaccatcctcataggggcttcgaaactgtgtcatacttactggaggggggatccatggcccacgaagacttctgtggacatactggcaagatgaaccctggggacctgcagtggatgaccgcaggtcgcggcattcttcacgcggaaatgccttgttccgaagagccagcccacggattacaactgtgggttaacctgagatcctctgagaaaatggtggagcctcagtaccaggaactgaaaagcgaggagattccaaagcctagcaaagacggtgtgactgttgcagtgattagcggcgaggccctgggaatcaaatctaaagtctacactcgcactccaacgctctacctcgacttcaagctagaccccggcgctaaacacagtcagcctataccaaagggctggacctcgttcatttacactattagcggcgacgtgtatatcgggccggacgatgcccaacagaagatcgagccccatcacacagccgtgctgggggaaggggacagcgttcaggtagaaaataaggaccccaagagatcacattttgttctgatagcaggagagcctctacgcgagccagtgatccagcatggaccttttgtcatgaatactaacgaagagatcagtcaggccatactggacttccgcaacgccaaaaatggctttgagagagctaaaacatggaagtcaaagattggcaattag

SEQ ID NO: 15663 - DNA, 1200 bp, synthetic construct
  source 1..1200: mol_type = other DNA; note = Synthetic coding sequence
atggacttctttagctcccatctccttgctgactcttcgagcccagccacaaattcaagccacacagacgctcacgaaatccttgtgtcagatttcctggtctctgacgaaaacttgcagaaaatggagaacgtgctcgacctctggagttccggcttgaagactaatattatctctgaactgtcaaagtggcggttaaatttcatagactggcataggatggagatgaggaaagagaaagagaaacacgctgctcacttgaaacaactctgtaaccagatcaatgagctgaaagagctgcagaagacattcgagatcagtatcggtagaaaggacgaagtgatctccagtctgtcacacgcaattggcaaacagaaggagaagattgagctaatgaggactttttttcactggcgtattggtcacgttagggcgaggcaggacgtgtatgagggtaagctcgcagaccagtactaccaacgaacgctgctgaagaaggtttggaaggtgtggaggtcagtcgtgcagaagcagtggaaggatgtggtggaacgtgcctgtcaggcaagagccgaggaggtctgcatccaaatttccaatgattatgaagcgaaagtggcaatgctgtctggtgctctggagaatgccaaggcagaaattcaacgtatgcagcatgaaaaagaacactttgaggactcaatgaaaaaagcattcatgcgcggagtgtgtgctctgaacctggaggctatgacgatattccagaaccggaatgatgccggtatcgattccaccaacaataagaaagaagagtatggaccaggcgtgcagggtaaagagcatagcgcccacctggacccatctgcaccaccaatgccactgcctgtgactagtcctctccttcccagcccaccagcagctgtggggggagccagcgccacagccgttccctctgcggcaagcatgaccagcacccgcgcagccagcgcttcctcagtgcatgtgcccgtgagcgcacttggggcaggatctgccgcaacggctgcatctgaagaaatgcagaccatcccccaggcgaccgctgccaagtatccaaggacaatccatcccgagagctctacttctgcttctcgcagcctgggcacccgtagcgctcacacacagtccctcacaagcgtccattccatcaaggtggtcgattag

SEQ ID NO: 15664 - DNA, 729 bp, synthetic construct
  source 1..729: mol_type = other DNA; note = Synthetic coding sequence
atggcagcggtgaaagcgagcacatcaaaggccaccaggccctggtattctcacccagtttatgcccgatactggcaacattaccaccaagccatggcttggatgcaatcacatcataatgcctaccggaaggctgtcgaatcttgttttaacctgccgtggtatctgccaagcgcactgctcccccagagtagctatgacaatgaagctgcttacccccagtccttctacgatcatcacgtggcttggcaagactatccatgctcctccagccacttcagacgctccggccaacatcctcgatactcttctcgtattcaggcctctactaaggaagaccaggcattgtccaaggaagaggaaatggagacggagtccgatgccgaagtagagtgtgacctatccaatatggagatcactgaagagttgcgccagtacttcgctgaaacagagcgccatcgtgaagaaagaaggcggcagcagcaacttgacgccgagaggctcgatagttacgtgaacgccgatcacgacctgtactgtaacacacggcgctctgttgaagcacccacagaacggcccggggagcggcgacaggcggagatgaagaggctgtacggtgacagcgccgccaaaatccaggccatggaagctgccgttcagctttcttttgacaagcattgcgataggaagcagcctaaatactggcctgtgatccccctgaaattttag

SEQ ID NO: 15665 - DNA, 1482 bp, synthetic construct
  source 1..1482: mol_type = other DNA; note = Synthetic coding sequence
atggaacgaagccctgatgtttctcctggtccttcccggtcttttaaagaagagctgctgtgtgctgtgtgttatgaccctttccgcgatgctgtgaccctaagatgtgggcacaacttctgtaggggctgcgtcagtaggtgctgggaagttcaggtctcacctacttgtccagtgtgcaaagatcgggcttcccccgccgaccttcggacgaaccatacactgaataatctggtcgagaagttgttacgagaagaggcggagggcgctcggtggaccagctaccgcttcagtcgcgtctgccgcttgcaccggggacagctgagtctgttttgcctcgaggacaaggaactcttatgctgctcttgccaggccgacccaagacatcagggccatagagtccagccagttaaggacaccgcccacgattttagagttcggagcctcatagctgaggaacggcgcaatttcctgccaacacaccagtggatcgttacaaaaacccgcctgcagacatccagccccaatttgcagtccagaagacagggccaggtccaggagcacggcgcatgtaccgctggagaaggccaagggcttctgggccacgcggctctgctggacgccatggcggaggagacccgccaaaagcaactgttggcagatgagaaaatgaaacagctcaccgaggaaaccgaggtgttggcccatgagatcgaacgattgcagatggagatgaaggaagatgacgttagtttcctcatgaaacacaagtctaggaagaggagattattttgcacaatggaaccagagccagtccagcccggcatgctcatcgatgtctgtaaatatctggggtcactgcaatatagggtgtggaagaaaatgctcgctagcgttgaatctgtccctttcagcttcgaccccaatacggctgcgggttggctgagcgtgtctgacgacctcacctccgttaccaaccacggatatagagtacaggtggaaaaccccgagcgttttagctccgcgccctgtttactgggcagtcgggttttttcccagggctcccacgcatgggaagtggcactgggcgggctccaatcctggagagtaggcgtggtgcgagtccgccaggacagtggagcggaagggcattcacacagttgttatcacgacaccagatccggtttctggtatgtgtgcaggacacagggagtggagggagaccattgcgtcacctccgaccccgccaccagtccactggtgctggcaatccccaggaggctgcgcgttgaactggagtgcgaggaaggcgaattgtccttctatgacgccgaacgacattgtcacctctataccttccacgccagatttggggaggttcgaccgtacttctaccttggcggtgctcgcggggcaggccctccggaacctctgcgcatttgcccattgcatatttctgtcaaagaggagttagatggatag

SEQ ID NO: 15666 - DNA, 1473 bp, synthetic construct
  source 1..1473: mol_type = other DNA; note = Synthetic coding sequence
atgaatttggcagagatctgcgataatgccaagaagggacgggaatacgctctgctaggcaactacgattcatcgatggtgtactatcaaggcgtgatgcagcagatacagaggcactgtcaatccgtgagagaccccgcaataaagggtaagtggcagcaggtgcgccaggagctgttggaagaatacgagcaggtgaagagcattgtctctaccctcgagtcattcaaaattgacaaaccgccagattttccagtttcttgtcaggatgagccattccgggaccccgccgtttggccaccccctgtgcccgccgagcaccgtgctcccccacagattaggagaccaaatagggaggtcaggccattaaggaaagaaatggcgggcgttggggccaggggcccggtcggaagagcccatcctatctccaagagtgagaagccatcaacctctcgggacaaagactatagagcacgcggaagagacgacaaaggcagaaagaacatgcaggatggagcttccgatggcgagatgcccaagttcgatggagcaggctatgacaaggacctggttgaagctctggagcgcgatatcgtttctcggaatccctctatccattgggatgacatagccgacttggaggaagctaagaagctattaagagaggccgtggtgttgcccatgtggatgcctgactttttcaagggaatcagaaggccctggaagggagtcctgatggtcggaccacctggaaccgggaagaccatgctggcaaaggccgtggctactgagtgtgggaccacctttttcaatgtcagctcttccactctaaccagtaagtacaggggcgagtctgaaaagcttgttagactgttgttcgaaatggcacggttttacgcacccaccacaatctttatagacgaaatcgacagcatctgctcaagacgggggaccagcgatgaacatgaggctagccgcagagtgaagtcagaactcctgatccagatggatggagttgggggcgctctcgagaatgatgaccccagcaagatggtgatggttctggctgcgacaaattttccatgggatatcgatgaggcacttcggcgtagacttgagaagcgcatatacatcccacttccaactgccaagggccgcgctgaactgctgaagattaacctgagagaggttgaactggaccctgacattcagctggaggacatcgctgagaaaattgaagggtactcgggagctgacatcacaaacgtgtgccgtgatgccagccttatggcaatgaggcgccgcattaacggtttgagtccagaagaaattagagctttgtcaaaagaggagctgcagatgccggtgaccaagggagactttgaactggccctgaaaaagattgccaagagtgtatccgccgccgatctcgagaagtacgagaaatggatggtggaatttggctcagcctag

SEQ ID NO: 15667 - DNA, 1473 bp, synthetic construct
  source 1..1473: mol_type = other DNA; note = Synthetic coding sequence
atgaatctagcggaaatctgcgataatgcgaagaaaggtagggaatacgcactcctgggcaattacgactcttccatggtttattatcagggggtgatgcagcagattcagcggcattgtcaatcagtgcgtgacccagctatcaagggaaaatggcagcaggtacggcaggagctcttagaggaatacgagcaggtgaagagtatcgtcagcacactggagtcctttaagattgacaaaccccccgactttcccgtgagttgtcaggacgaaccctttcgcgaccctgccgtctggccccctccagtgccggccgagcatagagcgcccccacagattcgacgacctaacagagaggtgaggccactccggaaggaaatggcaggagtgggagcacgcgggcccgttggtcgtgcacaccccatttcaaaaagtgaaaagcccagcacaagtagagacaaggactacagggcccggggaagagatgacaagggccgaaaaaatatgcaggatggggcctctgatggagagatgccaaagtttgacggggcaggctatgacaaggacctggttgaagcccttgagcgcgatatagttagccggaatcccagcattcactgggacgacattgcagacctggaggaggccaagaagctgttacgggaggctgttgttctgccaatgtggatgcctgacttctttaaaggcatcagacgtccttggaaaggggtgcttatggttggaccccccggcaccggcaaaacaatgctggctaaggctgtcgctacagaatgtggaaccaccttctttaacgtgagttctagcaccttaacatccaagtaccgcggcgagtccgaaaaactggtaaggcttctgttcgagatggcccggttttatgcgccaaccacgatttttattgatgaaatcgacagcatttgttctcggcggggtaccagtgatgaacacgaggctagtcggcgagtaaagtcggagctcctcatccagatggacggcgttggaggtgctctcgagaatgacgatcccagcaagatggtgatggtcctggctgcaacaaacttcccgtgggacattgacgaggcacttaggcggaggctggagaaacgtatttacatcccgctccccaccgccaagggacgcgcagaactgttgaaaataaacctgcgggaagtggaattggatccagatattcagctggaagacatcgcggaaaagattgaaggatattcaggtgcagacataaccaacgtgtgccgcgatgccagtttgatggccatgcgccgcaggattaatggcctcagtccagaggagatccgcgccctgagtaaggaggagctgcagatgccagtgacaaaaggagactttgagttagctcttaaaaaaatagctaagagcgtaagcgccgccgacctggaaaagtacgagaaatggatggtcgaattcggttccgcctag

SEQ ID NO: 15668 - DNA, 1068 bp, synthetic construct
  source 1..1068: mol_type = other DNA; note = Synthetic coding sequence
atggattttatctttcacgagaagcaagaggggttcttgtgtgcccaacactgccttaacaacctgctacagggagagtacttctccccagtcgagctggcctctatagcccaccagctggatgaggaggagcggatgcgaatggccgaggggggggtgacatcagaggagtatttggcctttctgcagcagccaagcgaaaacatggatgataccgggtttttttcgatacaggtgatatcgaatgccctgaagttttgggggctggaaatcattcatttcaacaatccagaataccagaaactgggaatagacccaattaacgagcgaagctttatttgtaattacaagcagcactggtttacaatcaggaagttcggcaagcattggttcaatcttaattccttgttggcagggccggagctgatctccgatacctgtctggctaatttcttagcccggcttcagcagcaggcttattccgtgttcgtggtaaaaggcgatctaccagactgcgaagctgatcagttgttgcagataatcagcgtcgaagagatggacaccccgaagttaaacggaaaaaagctggtgaaacagaaagagcatagggtgtacaaaaccgtgctggagaaagtttccgaggagtccgatgagtctgggacgtcggatcaagatgaagaagacttccagcgcgcattagaactgagccgccaggaaaccaaccgtgaggatgagcatcttagatctaccatcgaactgagcatgcaaggctcctctggaaatacaagccaagacctgcccaagacctcgtgtgtgacacccgccagtgaacagccaaagaaaatcaaagaagactacttcgaaaaacaccaacaggagcagaagcaacagcaacagcagtccgatctgcccgggcattcctcttatctgcatgagcggcctacaacgtcaagcagagccatcgagtcagacctatcagatgacataagtgagggtacagtgcaggctgccgtagacaccatcctggaaattatgaggaaaaatctgaaaattaaaggagagaagtag

SEQ ID NO: 15669 - DNA, 5910 bp, synthetic construct
  source 1..5910: mol_type = other DNA; note = Synthetic coding sequence
atggcggcaagaagcgccccaagctgccatctccggctggaatgggtatatggctacaggggccaccagtgccggaataatctgtattacaccgcagcaaaggagatcgtgtattttgtcgctggcgtcggagtggtctattcccccagagagcaccgacagaaattttacagggggcacagcgacgatattatctccctagccctgcatccggagcgggtgcttgtggcgaccggccaagtgggtaaagagccttacatatgcatttgggacagttatacagtgcagaccatttcagtgctaaaagacgttcacacccacgggattgcctgcctagccttcgacctggacggccaacggcttgtgtcggtggggttagattccaagaacgcagtctgcgtctgggattggaagcgtggcaaaatgctgtcgatggcaccagggcacacagacaggatcttcgacataagttgggacttataccagcctaacaaacttgtgtcctgcggcgtcaagcacatcaagttttggagtctatgcggaaatgcattgactcccaaaaggggagtcttcggcaaaactggcgatctacagacaatcctgtgtctcgcatgtgcccgcgatgagttgacctacagcggtgctctgaatggagatatctatgtctggaaggggataaacctcatcaggaccatccaaggagcccatgctgccgggatcttcagtatgaacgcctgtgaggaaggttttgctaccggcggccgcgacggatgcatccggctgtgggatctcacgtttaagccaattacagtaatagacctcagggagaccgatcaggggtataagggcttgtccgtgagaagcgtgtgctggagaggcgatcacatattagtcgggactcaggacagcgagattttcgaaatcgttgtgcaagagcgtaacaagccgttcctcataatgcagggccattgtgaaggagagttatgggccctggctgtgcaccctacaaagcccctagcggtcactggttccgacgaccgcagcgtccgcatttggagcctcgtggaccatgcactgattgctaggtgcaacatggaggagcctattcgatgtgcagcagtgaacgcagatggaattcacttggcgttaggaatgaaggatggcagctttacagtattaagggtgcgagacatgaccgaggtggtgcacattaaggaccgtaaggaggcaatccacgaactgaagtacagtccagacgggacctatttggccgtgggctgtaatgactcatcagtggatatctacggagtggcacagcgctacaagaaagtcggcgagtgcctaggatctctgagctttatcacacaccttgactggagcagcgactctcgctacttgcagacaaacgacgggaacggcaaacggctgttttaccgcatgcctggcggcaaggaagttaccagcacagaagagattaagggggtccactgggcaagctggacttgcgtgtctgggctggaagttaacggaatctggcctaagtattccgatatcaacgacatcaatagtgttgacggaaactatatcggacaagttctggtcacggccgatgattacgggatcattaaactcttccgctatccatgtctaaggaaaggtgccaaattccggaagtacattggtcactccgctcacgtcacaaatgttcgatggtcccacgactaccagtgggtcatctctatcggaggagccgaccactctgtgtttcagtggaaattcattcccgagcgaaaactcaaggatgccgtgcacattgcaccacaggaatccttagctgacagccattctgacgagagcgactctgacttgtccgacgtgcccgagctcgatagtgaaatcgagcaggagactcagcttacctatagaagacaagtgtacaaggaagacctgccccagctgaaggagcaatgcaaagaaaagcagaagagtgctactagtaagcgccgagagcgggccccaggaaattctatccggctacattttgtccacggatatcgagggtacgattgtcgcagcaacttattttacactcagattggcgagattgtgtatcacgttgctgctgtgggggtcatctataaccggcagcagaatactcagagattctacctgggtcacgatgacgacattctctgtcttacaatccatcctttgaaagactacgtggccaccggccaggtcggccgcgatccttcaattcatatttgggatactgaaacaataaagccactaagtatcctgaagggacatcaccagtatggagtgtctgctgtcgacttctccgccgatggaaagcgcctcgcttctgtgggcatcgacgacagccatacggtagttttgtgggattggaaaaaaggagaaaaactaagtatcgcccgcggatctaaagacaaaatatttgtagtgaaaatgaatccctatgtgcccgacaagctgatcaccgcaggaattaagcatatgaaattctggagaaaggcaggaggcgggctgattgggcgaaagggatacattggcactttagggaagaacgatacaatgatgtgtgctgtttacggttggacagaggaaatggctttcagcgggacctctactggcgacgtttgcatctggagggatatttttcttgtgaagactgtcaaagcacacgatggtcctgttttttccatgcatgctctcgagaaggggttcgtcactggtgggaaggatggaatcgttgccctgtgggatgactcctttgaaaggtgcttgaagacctacgcgataaagagggcagcacttgctccggggagcaaagggctgttgctggaggacaatccaagcatcagggcgattagtcttgggcacggccatatcctggtcgggaccaaaaacggagagatcctcgaagtggacaaaagcggccctatcaccctgctggtgcaaggccatatggaaggagaggtctgggggctggcaacgcacccgtatttaccaatatgcgcgaccgtttccgacgacaagaccctgcgcatctgggatctctcaccttcgcattgtatgctggctgtccgcaaactaaagaaaggaggccgctgctgctgcttctcccctgacggcaaagcactggccgtcggccttaatgatgggagcttcctcatggctaatgccgacacgctagaggaccttgtcagttttcaccacaggaaagatatgattagtgatatcaggttctcacccggctccggcaagtaccttgctgtggcctctcacgactcgtttatcgatatttacaacgtaatgagcagtaaaagggtcggcatctgcaaaggggccaccagttacatcacccatattgactgggacatcagggggaaattactgcaggtgaacacgggtgctaaggaacaactcttctttgaagctcctagagggaagaagcagaccatcccaagcgtggaagtggagaagattgcttgggccagctggacatcagtcctcggactctgttgcgagggcatttggcccgtcataggggaagtgaccgatgttacagcaagttgccttacatctgataaaatggtcctcgcaaccggagacgatttaggctttgttaaactgttcagatatccgaccaagggcaaatttgggaagttcaaacggtacgtggctcatagcacgcacgtgacaaacgtgagatggacctacgatgattcgatgctggtaaccctcgggggtacagatatgtccctcatggtctggactaacgagatggagggatatcgggagaaacgtccttgtgactctgaagaaagcgatattgactccgaagaagacggggggtatgactccgatgtaacgagggaaaatgaaatcagttacaccattcgggcattgagcaccaacatcagacccatgctgggcatcaagccacacctccagcaaaaagaaccttccatagacgagcggcccccagttagccgagcccctccgcaacccgagaagttgcaaacgaataacgtcgggaagaagaaacggcctatcgaagatctggttctggaactgattttcggctaccgcggccgcgactgcaggaacaacgtgcattacttgaatgatggagacgatatcatctaccacacggccagtgtgggcattctacataatgttgctacaggttcgcaatccttctatcaagagcacaatgacgatattctctgtctgaccgttaatcaacacccgaaatttatcaacatcgtcgccacaggacaggttggggattccgcagatatgagtgctactgccccgtccatccatatctgggacgccatgaacaagcagacgctttccattctgcggtgctaccacagtaaaggagtctgctctgttagtttctcagccactgggaaactcctgttgtccgttggtttggaccctgagcatacgatcacaatatggagatggcaggagggggcaaaaattgcttcacgcgcaggtcataatcagaggatttttgttgccgaatttagacccgatagtgatacccaatttgtcagcgttggcgtcaagcacgtcaagttttggaccctagccggtcgggccttgctatccaaaaagggtctattatccaccctggaggacgcaagaatgcaaaccatgcttgccatagcttttggcgcaaacaaccttacattcacggggacaattagcggtgatgtgtgtgtctggaaagaccacattttgtgccggattgttgcgcgcgcacataacggcccagttttcgccatgtataccactttgcgggatggtctaatcgtaaccggaggaaaagagcgacccagtaaggaaggcggcgccgtgaaattgtgggaccaagagcttcgccggtgccgagcctttcgcctcgaaactgggcaggctactgattgcgtgcggtccgtgtgccgaggcaaaggaaagatcctggtggggactcgtaatgccgagatcattgaagtgggcgagaagaacgccgcctgcaacatcctggtgaacggccatgtggacggcccaatatggggcctggcaacacatccaagtcgcgatttcttcctcagcgcggccgaggatggtacggtgaggctctgggacattgcagataagaagatgctcaataaagtcaatttaggtcacgcggccaggactgtctgttacagccctgagggtgatatggtcgccattggcatgaaaaacggagaattcatcattctcctagtgtcatccttaaagatttggggcaagaagcgtgacagacggtgcgccatacacgatatacgcttttcgcctgattcccgctacctggcagttggatctagtgaaaactccgtagatttctacgacctgacactcggccctacactgaataggatctcttactgcaaagatattcctagttttgttatccagatggacttttctgctgatagtagctacctacaggtgagctcaggctgctataagagacacgtatatgaagtgcccagtggaaagcatctgatggaccatgctgccattgacaggataacatgggcgacttggacaagtattctcggagacgaagtgcttggaatctggtcacgacacgccgagaaggctgacgttaattgtgcgtgcgtgagccactccggaatctccctcgtcacaggcgacgatttcggcatggtgaaactgtttgatttcccatgcccggaaaagtttgctaagcacaaaagattcctcgggcacagtccccacgtcaccaatatccgattcacaagtggcgatagacatgtcgtgtcagcaggaggcgacgactgcagcctttttgtttggaagtgcgtccataccccccactag

SEQ ID NO: 15670 - DNA, 1146 bp, synthetic construct
  source 1..1146: mol_type = other DNA; note = Synthetic coding sequence
atgccgctgcaggtgagtgattactcttggcagcagacaaaaacggctgtcttcctatcactgcctctgaaaggggtgtgcgtaagggacactgatgtattttgcaccgaaaactacttaaaggtgaactttccaccatttttgtttgaggcttttctgtacgcccctatcgacgacgaatcttctaaagctaagattggaaatgatactatcgtgtttacactgtataagaaagaagctgcaatgtgggagacactgtccgtgacaggcgtcgacaaggaaatgatgcagagaattcgggaaaagagcatcctgcaggcacaggagcgtgctaaagaagcaacagaagccaaagcagccgcaaagagggaagatcaaaagtacgccttgagtgtcatgatgaagattgaggaggaagaacgcaagaaaatcgaggatatgaaagaaaatgaaagaattaaggctaccaaagctctcgaggcctggaaggagtatcagaggaaggccgaagagcagaaaaagattcagcgcgaggaaaagttatgtcagaaagagaagcagatcaaagaggaaaggaaaaagattaagtacaagtccctgacccgaaacctcgcctccagaaatctggctccgaagggtcgcaatagcgagaatattttcacagaaaagctaaaggaagatagtatcccggcccctagaagtgttgggtccatcaagatcaacttcacacctcgggtattccctaccgctttgcgggagtctcaggtggccgaagaggaagagtggttacacaagcaagcagaggcccggcgagcaatgaatactgatattgccgaactatgtgatctaaaagaggaagagaagaatccagagtggctgaaagataagggaaataagctcttcgccactgaaaattacctggctgccatcaatgcctataaccttgctatcagactaaataacaagatgcccttgctgtacctgaaccgggctgcttgccatttgaagttgaaaaatctccataaggcaattgaggactcctccaaggaattctgttctttagaaggcatagaatgccaggcaagtgagccaaaactctctcaccacatcccaagtgatttgcacgtatatatacagatggcttag

SEQ ID NO: 15671 - DNA, 1344 bp, synthetic construct
  source 1..1344: mol_type = other DNA; note = Synthetic coding sequence
atggccggcgccggaggggggaatgacattcagtggtgtttctctcaggtcaagggagccgttgatgatgacgtagctgaagcggatatcatctcaaccgtcgagttcaaccactccggcgaacttcttgccaccggtgataagggcggacgcgtggtcatattccagcaggagcaggagaataaaatccagagccacagccggggagagtataatgtatacagtacgttccagtcacatgagccagaattcgactatcttaagtcactcgagattgaagaaaaaatcaacaaaattcggtggttgccgcagaagaatgccgcccaattcctgctgtccacgaatgataaaactattaagctctggaaaatcagtgagagggataaacgccctgagggctataatttgaaggaggaggatggccggtatcgtgatccaactacagtgacgacactgcgagtgcctgtttttcggccaatggacttgatggtggaagctagccctaggaggatattcgctaatgcccatacctaccacattaactccatctccattaactcagactacgaaacatatttgtcggctgacgacctacgtattaacctctggcatcttgagattaccgatcggagctttaatattgttgacataaaacctgccaacatggaagagctgaccgaagtcattacggcagcagagtttcaccccaattcctgcaatacctttgtgtactcatcgtccaaggggaccattcgtttgtgcgatatgcgtgcaagcgcgctctgtgaccggcacagcaagctttttgaggagccagaagaccccagcaaccgtagttttttctcagaaatcatctcgtccatttctgatgtgaagttctcccactcaggtcgttacatgatgacccgtgactacttaagcgtgaaaatctgggacctgaatatggagaacaggcctgtggaaacgtaccaggtgcatgagtatctacggtccaaactctgctctttgtatgagaacgattgcatttttgataagttcgagtgctgttggaatgggagcgactccgttgttatgacgggctcgtataataactttttcaggatgttcgaccgaaatactaaaagggacattaccctggaagcctcccgagagaacaacaagccacgcactgtcctgaaacctcgcaaggtctgtgcctctggcaagcgaaagaaggacgaaatttctgtcgactctctggattttaataaaaaaatccttcacactgcctggcacccaaaggagaacataatcgccgtcgcaacaacgaacaatctctatatcttccaggataaagtcaattag
